(19) United States
(12) Patent Application Publication
(10) Pub. No.: US 2003/0194704 A1
(43) Pub. Date: Oct. 16, 2003

(54) Human genome-derived single exon nucleic acid probes useful for gene expression analysis two

(76) Inventors: Sharron Gaynor Penn, San Mateo, CA (US); David Russell Rank, Fremont, CA (US); David Kagen Hanzel, Palo Alto, CA (US)

Correspondence Address: AMERSHAM BIOSCIENCES, PATENT DEPARTMENT, 800 CENTENNIAL AVENUE, PISCATAWAY, NJ, 08855, US

(21) Appl. No.: 10/029,386

(22) Filed: Apr. 3, 2002

(51) Int. Cl. C12Q 1/68; C07H 21/04

(52) U.S. Cl. 435/6; 536/24.3

(57) ABSTRACT

Methods and apparatus for predicting, confirming and displaying functional regions from genomic sequence data are used to identify 13,700 unique human genome-derived single exon probes useful for gene expression analysis, particularly gene expression analysis by microarray. Also presented are genome-derived single exon microarrays that include such probes, peptides encoded by the exons, and antibodies thereto.

[0001] The present application includes a Sequence Listing and eight (8) tables filed herewith on a single (CD-R) compact disc, filed herewith in duplicate, having volume label AEOMICAR52.

[0002] The Sequence Listing is presented in a single file named sequence.txt, last modified Nov. 30, 2001, and having 35,279,032 bytes.

[0003] Table 4 is presented in a single file named table4.txt, last modified Nov. 27, 2001, and having 3,534,273 bytes.

[0004] Table 5 is presented in a single file named table5.txt, last modified Nov. 27, 2001, and having 2,413,476 bytes.

[0005] Table 6 is presented in a single file named table6.txt, last modified Nov. 27, 2001, and having 3,665,493 bytes.

[0006] Table 7 is presented in a single file named table7.txt, last modified Nov. 27, 2001, and having 3,210,111 bytes.

[0007] Table 8 is presented in a single file named table8.txt, last modified Nov. 27, 2001, and having 3,133,404 bytes.

[0008] Table 9 is presented in a single file named table9.txt, last modified Nov. 27, 2001, and having 3,285,036 bytes.

[0009] Table 10 is presented in a single file named table10.txt, last modified Nov. 27, 2001, and having 3,480,813 bytes.

[0010] Table 11 is presented in a single file named table 11.txt, last modified Nov. 27, 2001, and having 3,037,905 bytes.

[0011] The disclosure of each of the aforesaid files is incorporated herein by reference in its entirety.

### FIELD OF THE INVENTION

[0012] The present invention is in the fields of molecular biology and bioinformatics. In particular, the invention relates to 13,700 genome-derived single exon nucleic acid probes expressed in one or more of eight tested human tissues, which are useful for gene expression analysis as by microarray hybridization. The invention further relates to single exon nucleic acid microarrays that include such probes.

### BACKGROUND OF THE INVENTION

[0013] For almost two decades following the invention of general techniques for nucleic acid sequencing, Sanger et al., Proc. Natl. Acad. Sci. USA 70(4):1209-13 (1973); Gilbert et al., Proc. Natl. Acad. Sci. USA 70(12):3581-4 (1973), these techniques were used principally as tools to further the understanding of proteins—known or suspected—about which a basic foundation of biologic knowledge had already been built. In many cases, the cloning effort that preceded sequence identification had been both informed and directed by that antecedent biological understanding.

[0014] For example, the cloning of the T cell receptor for antigen was predicated upon its known or suspected cell type-specific expression, by its suspected membrane association, and by the predicted assembly of its gene via T cell-specific somatic recombination. Hedrick et al., Nature 308(5955):149-53 (1984). Subsequent sequencing efforts at once confirmed and extended understanding of this family of proteins. Hedrick et al., Nature 308(5955):153-8 (1984).

[0015] More recently, however, the development of high throughput sequencing methods and devices, in concert with large public and private undertakings to sequence the human and other genomes, has altered this investigational paradigm: today, sequence information often precedes understanding of the basic biology of the encoded protein product.

[0016] One of the approaches to large-scale sequencing is predicated upon the proposition that expressed sequences—that is, those accessible through isolation of mRNA—are of greatest initial interest. This “expressed sequence tag” (“EST”) approach has already yielded vast amounts of sequence data. Adams et al., Science 252:1651 (1991); Williamson, Drug Discov. Today 4:115 (1999); Strausberg et al., Nature Genet. 15:415 (1997); Adams et al., Nature 377(suppl.):3 (1995); Marra et al., Nature Genet. 21:191 (1999). For nucleic acids sequenced by this approach, often the only biologic information that is known a priori with any certainty is the likelihood of biologic expression itself. By virtue of the species and tissue from which the mRNA had originally been obtained, most such sequences are also annotated with the identity of the species and at least one tissue in which expression appears likely.

[0017] More recently, the pace of genomic sequencing has accelerated dramatically. When genomic DNA serves as the initial substrate for sequencing efforts, expression cannot be presumed; often the only a priori biologic information about the sequence includes the species and chromosome (and perhaps chromosomal map location) of origin.

[0018] With the ever-accelerating pace of sequence accumulation by directed, EST, and genomic sequencing approaches—and in particular, with the accumulation of sequence information from multiple genera, from multiple species within genera, and from multiple individuals within a species—there is an increasing need for methods that rapidly and effectively permit the functions of nucleic sequences to be elucidated. And as such functional information accumulates, there is a further need for methods of storing such functional information in meaningful and useful relationship to the sequence itself; that is, there is an increasing need for means and apparatus for annotating raw sequence data with known or predicted functional information.

[0019] Although the increase in the pace of genomic sequencing is due in large part to technological changes in sequencing strategies and instrumentation, Service, Science 280:995 (1998); Pennisi, Science 283: 1822-1823 (1999), there is an important functional motivation as well.

[0020] While it was understood that the EST approach would rarely be able to yield sequence information about the noncoding portions of the genome, it now also appears the EST approach is capable of capturing only a fraction of a genome's actual expression complexity.

[0021] For example, when the C. elegans genome was fully sequenced, gene prediction algorithms identified over 19,000 potential genes, of which only 7,000 had been found by EST sequencing. C. elegans Sequencing Consortium, Science 282:2012 (1998). Analogously, the recently completed sequence of chromosome 2 of Arabidopsis predicts over 4000 genes, Lin et al., Nature, 402:761 (1999), of which only about 6% had previously been identified via EST sequencing efforts. Although the human genome has the greatest depth of EST coverage, it is still woefully short of surrendering all of its genes. One recent estimate suggests that the human genome contains more than 146,000 genes, which would at this point leave greater than half of the genes undiscovered. It is now predicted that many genes, perhaps 20 to 50%, will only be found by genomic sequencing.

[0022] There is, therefore, a need for methods that permit the functional regions of genomic sequence—and most importantly, but not exclusively, regions that function to encode genes—to be identified.

[0023] Much of the coding sequence of the human genome is not homologous to known genes, making detection of open reading frames (“ORFs”) and predictions of gene function difficult. Computational methods exist for predicting coding regions in eukaryotic genomes. Gene prediction programs such as GRAIL and GRAIL II, Uberbacher et al., Proc. Natl. Acad. Sci. USA 88(24):11261-5 (1991); Xu et al., Genet. Eng. 16:241-53 (1994); Uberbacher et al., Methods Enzymol. 266:259-81 (1996); GENEFINDER, Solovyev et al., Nucl. Acids. Res. 22:5156-63 (1994); Solovyev et al., Ismb 5:294-302 (1997); and GENSCAN, Burge et al., J. Mol. Biol. 268:78-94 (1997), predict many putative genes without known homology or function. Such programs are known, however, to give high false positive rates. Burset et al., Genomics 34:353-367 (1996). Using a consensus obtained by a plurality of such programs is known to increase the reliability of calling exons from genomic sequence. Ansari-Lari et al., Genome Res. 8(1):29-40 (1998)

[0024] Identification of functional genes from genomic data remains, however, an imperfect art. For example, in reporting the full sequence of human chromosome 21, the Chromosome 21 Mapping and Sequencing Consortium reports that prior bioinformatic estimates of human gene number may need to be revised substantially downwards. Nature 405:311-199 (2000); Reeves, Nature 405:283-284 (2000).

[0025] Thus, there is a need for methods and apparatus that permit the functions of the regions identified bioinformatically—and specifically, that permit the expression of regions predicted to encode protein—readily to be confirmed experimentally.

[0026] Recently, the development of nucleic acid microarrays has made possible the automated and highly parallel measurement of gene expression. Reviewed in Schena (ed.), DNA Microarrays : A Practical Approach (Practical Approach Series), Oxford University Press (1999) (ISBN: 0199637768); Nature Genet. 21(1)(suppl):1-60 (1999); Schena (ed.), Microarray Biochip: Tools and Technology, Eaton Publishing Company/BioTechniques Books Division (2000) (ISBN: 1881299376), the disclosures of which are incorporated herein by reference in their entireties.

[0027] It is common for microarrays to be derived from cDNA/EST libraries, either from those previously described in the literature, such as those from the I.M.A.G.E. consortium, Lennon et al., “The I.M.A.G.E. Consortium: an Integrated Molecular Analysis of Genomes and Their Expression, Genomics 33(1): 151-2 (1996), or from the construction of “problem specific” libraries targeted at a particular biological question, R. S. Thomas et al., Cancer Res. (in press). Such microarrays by definition can measure expression only of those genes found in EST libraries, and thus have not been useful as probes for genes discovered solely by genomic sequencing.

[0028] The utility of using whole genome nucleic acid microarrays to answer certain biologic questions has been demonstrated for the yeast Saccharomyces cerevisiae. De Risi et al., Science 278:680 (1997). The vast majority of yeast nuclear genes, approximately 95% however, are single exon genes, i.e., lack introns, Lopez et al., RNA 5:1135-1137 (1999); Goffeau et al., Science 274:563-67 (1996), permitting coding regions more readily to be identified. Whole genome nucleic acid microarrays have not generally been used to probe gene expression from more complex eukaryotic genomes, and in particular from those averaging more than one intron per gene.

### SUMMARY OF THE INVENTION

[0029] The present invention solves these and other problems in the art by providing, in a first aspect, human genome-derived single exon nucleic acid probes. The probes are useful, inter alia, for gene expression analysis, and particularly for gene expression analysis by microarray.

[0030] In preferred embodiments, the invention provides genome-derived single-exon probes known to be expressed in one or more human tissues or cell types, particularly human brain, heart, liver, fetal liver, placenta, lung, bone marrow, HeLa and other human cervical epithelial cells. In particular embodiments, the invention provides human single-exon probes that comprise a nucleotide sequence as set forth in any one of SEQ ID NOs: 13,701-27,400, the complement thereof, or a fragment of the referenced SEQ ID NO: or complement thereof, wherein the probe hybridizes at high stringency (i.e., under high stringency conditions) to a nucleic acid expressed in human cells, and wherein the probe includes portions of no more than one human exon. In certain embodiments, the single exon nucleic acid probe comprises any one of SEQ ID NOs. 1-13,700 or the complement thereof.

[0031] In a second aspect, the invention provides an amplifiable nucleic acid composition, comprising a single exon nucleic acid probe of the present invention and at least one nucleic acid primer, wherein the at least one primer is sufficient to prime enzymatic amplification of the probe.

[0032] In a third aspect, the invention provides a spatially-addressable set of single exon nucleic acid probes, comprising: a plurality of single exon nucleic acid probes of the present invention, wherein each of the plurality of probes is separately and addressably isolatable and/or amplifiable from the plurality.

[0033] In a fourth aspect, the invention provides a single exon nucleic acid probe attached to a substrate. The substrate can, e.g., be a filter membrane, such as nitrocellulose or nylon, or can be a solid, such as glass, amorphous silicon, crystalline silicon, or plastic.

[0034] In a fifth aspect, the invention provides a single exon nucleic acid microarray, comprising: a plurality of nucleic acid probes addressably disposed upon a substrate, wherein at least 50% of the nucleic acid probes include a fragment of no more than one exon of a eukaryotic genome, the fragment being selectively hybridizable at high stringency (under high stringency conditions) to an expressed gene, wherein the plurality of nucleic acid probes averages at least 50 bp, 75 bp, or 100 bp in length, and wherein the eukaryotic genome averages at least one intron per gene.

[0035] In certain embodiments of the nucleic acid microarrays of the present invention, at least 50% of the exon-including nucleic acid probes further comprise, contiguous to a first end of the fragment, a first intronic and/or intergenic sequence that is identically contiguous to the fragment in the human genome. In certain embodiments, at least 50% of the exon-including nucleic acid probes further comprise, contiguous to a second end of the fragment, a second intronic and/or intergenic sequence that is identically contiguous to the fragment in the human genome.

[0036] In preferred embodiments, the microarray includes genome-derived single-exon probes known to be expressed in one or more human tissues or cell types, including human brain, heart, liver, fetal liver, placenta, lung, bone marrow, HeLa and other human cervical epithelial cells.

[0037] In particular embodiments, the microarrays of the present invention include a plurality of human single-exon probes that comprise a nucleotide sequence as set forth in any one of SEQ ID NOs: 13,701-27,400, the complement thereof, or a fragment of the referenced SEQ ID NO: or complement thereof, wherein the probe hybridizes at high stringency (i.e., under high stringency conditions) to a nucleic acid expressed in human cells, and wherein the probe includes portions of no more than one human exon. In certain embodiments, the single exon nucleic acid probe comprises any one of SEQ ID NOs. 1-13,700 or the complement thereof.

[0038] In a sixth aspect, the invention provides a method of measuring eukaryotic gene expression, comprising: contacting the single exon microarray of the invention with a first collection of detectably labeled nucleic acids, the first collection of nucleic acids derived from mRNA of at least one eukaryotic tissue or cell type; and then measuring the label detectably bound to each probe of the microarray. In certain embodiments the method further comprises comparing the measurement to a second measurement, the second measurement identically obtained using a second, control, collection of nucleic acids.

[0039] In certain embodiments of this aspect of the invention, the first and second collections of detectably labeled nucleic acids are distinguishably labeled, often by fluorophores, and are contacted simultaneously to the microarray.

[0040] In a seventh aspect, the invention provides a method of selling and/or licensing genome-derived single-exon microarrays to a customer desiring to measure gene expression, comprising: making available for computerized query a database having a record corresponding to each genome-derived single exon microarray available for sale and/or license; responding to a customer query of the database by returning to the customer at least one record, or an identifier of that record, that best meets the customer query criteria; and offering for sale or license to the querying customer the genome-derived single exon microarray identified in that at least one record. In certain embodiments, the single exon microarrays includes the probes of the present invention.

[0041] In an eighth aspect, the invention provides a method of designing and/or manufacturing a genome-derived single exon microarray that has genome-derived single exon probes that have at least one common attribute desired by a customer, the method comprising: receiving from a customer at least one criterion for common probe attribute; using the at least one criterion to identify, within a database having records corresponding to available genome-derived single exon probes, those that meet the criterion; and then disposing such identified probes on a substrate capable of functioning in microarray hybridization experiments. In typical embodiments, the common attribute is common expression in a tissue and/or cell type. In presently preferred embodiments, the tissue and/or cell type is selected from the group consisting of: human brain, heart, liver, fetal liver, placenta, lung, bone marrow, HeLa cells.

[0042] In a ninth aspect, the invention provides a method for making available by subscription expression data obtained from use of the genome-derived single exon probes and genome-derived single exon microarrays of the present invention to customers that desire such information, comprising making available to a subscription client for computerized query a database, the database having records containing expression data generated using single exon probes disposed upon microarrays; and then responding to a customer query of the database by returning to the customer at least one record, or an identifier of the at least one record, that best meets the customer query criteria.

[0043] In a tenth aspect, the invention provides a method of attracting investment to a company that makes and sells microarrays or expression data obtained from microarrays, comprising: advertising the availability for distribution, sale, or license of genome-derived single exon probes, microarrays, and/or data therefrom; and then selling stock in the company.

[0044] In an eleventh aspect, the invention provides a protein, polypeptide, or peptide comprising: at least 8 amino acids of the sequence set forth in any one of SEQ ID NOs: 27,401-34,288. In typical embodiments, the protein, polypeptide, or peptide comprises at least 15 amino acids of the sequence set forth in any one of SEQ ID NOs: 27,401-34,288. In certain embodiments, the protein, polypeptide or peptide is detectably labeled.

[0045] In a twelfth aspect, the invention provides an isolated nucleic acid that encodes the protein, polypeptide, or peptide of the present invention.

[0046] In a thirteenth aspect, the invention provides an antibody, wherein the antibody is specific for the protein, polypeptide, or peptide of the present invention.

### BRIEF DESCRIPTION OF THE DRAWINGS

[0047] The above and other objects and advantages of the present invention will be apparent upon consideration of the following detailed description taken in conjunction with the accompanying drawings, in which like characters refer to like parts throughout, and in which:

[0048] FIG. 1 illustrates a process for predicting functional regions from genomic sequence, confirming the functional activity of such regions experimentally, and associating and displaying the data so obtained in meaningful and useful relationship to the original sequence data, according to the present invention;

[0049] FIG. 2 further elaborates that portion of the process schematized in FIG. 1 for predicting functional regions from genomic sequence, according to the present invention;

[0050] FIG. 3 illustrates a visual display according to the present invention, herein denominated a “Mondrian”, in which a single genomic sequence is annotated with predicted and experimentally confirmed functional information;

[0051] FIG. 4 presents a Mondrian of a hypothetical annotated genomic sequence, further identifying typical color conventions when the Mondrian is used to annotate genomic sequence with exon-specific expression data, as in FIGS. 9 and 10;

[0052] FIG. 5 is a chart that summarizes data from experimental Example 1, showing the size distributions of predicted exon length (dashed line) and actual PCR products (amplicons) (solid line) as obtained from human genomic sequence according to the methods of the present invention;

[0053] FIG. 6 is a histogram that summarizes data from experimental Examples 1 and 2, showing the number of tissues in which predicted exons could be shown to be expressed using simultaneous two color hybridization to a genome-derived single exon microarray of the present invention. The graph shows the number of sequence-verified products that were either not expressed in any of the ten tested tissues/cell types (“0”), expressed in one or more but not all tested tissues (“1”-“9”), or expressed in all tissues tested (“10”);

[0054] FIG. 7 is a pictorial representation of data from experimental Examples 1 and 2, showing the expression (ratio relative to control) of probes having verified sequences that were expressed with signal intensity greater than 3 in at least one tissue, with: FIG. 7A showing the expression as measured by microarray hybridization in each of the 10 measured tissues, and the expression as measured “bioinformatically” by query of EST, NR and SwissProt databases; with FIG. 7B showing the legend for display of physical expression (ratio) in FIG. 7A; and with FIG. 7C showing the legend for scoring EST hits as depicted in FIG. 7A;

[0055] FIG. 8 is a chart of data from experimental Examples 1 and 2, showing a comparison of normalized CY3 signal intensity for arrayed sequences that were identical to sequences in existing EST, NR and SwissProt databases (known) (solid line) or that were dissimilar (unknown) (dashed line), where “known” is defined as having a BLAST expect (“E”) value of less than 1e-30 (1×10⁻³⁰) and “unknown” is defined as having a BLAST expect (“E”) value of greater than 1e-30 (1×10⁻³⁰) (“unknown”);

[0056] FIG. 9 presents a visual display, herein termed a “Mondrian”, of BAC AC008172 (bases 25,000 to 130,000), containing the carbamyl phosphate synthetase gene (AF154830.1); and

[0057] FIG. 10 is a Mondrian of BAC A049839.

### DETAILED DESCRIPTION OF THE INVENTION

[0058] Definitions

[0059] As used herein, “nucleic acid” includes polynucleotides having natural nucleotides in native 5′-3′ phosphodiester linkage—e.g., DNA or RNA—as well as polynucleotides that have nonnatural nucleotide analogues, nonnative internucleoside bonds, or both, so long as the nonnatural polynucleotide is capable of sequence-discriminating basepairing under experimentally desired conditions. Unless otherwise specified, the term “nucleic acid” includes any topological conformation; the term thus explicitly comprehends single-stranded, double-stranded, partially duplexed, triplexed, hairpinned, circular, and padlocked conformations.

[0060] As used herein, an “isolated nucleic acid” is a nucleic acid molecule that exists in a physical form that is nonidentical to any nucleic acid molecule of identical sequence as found in nature; “isolated” does not require, although it does not prohibit, that the nucleic acid so described has itself been physically removed from its native environment.

[0061] For example, a nucleic acid can be said to be “isolated” when it includes nucleotides and/or internucleoside bonds not found in nature. When instead composed of natural nucleosides in phosphodiester linkage, a nucleic acid can be said to be “isolated” when it exists at a purity not found in nature, where purity can be adjudged with respect to the presence of nucleic acids of other sequence, with respect to the presence of proteins, with respect to the presence of lipids, or with respect the presence of any other component of a biological cell, or when the nucleic acid lacks sequence that flanks an otherwise identical sequence in an organism's genome, or when the nucleic acid possesses sequence not identically present in nature.

[0062] As so defined, “isolated nucleic acid” includes nucleic acids integrated into a host cell chromosome at a heterologous site, recombinant fusions of a native fragment to a heterologous sequence, recombinant vectors present as episomes or as integrated into a host cell chromosome.

[0063] As used herein, an isolated nucleic acid “encodes” a reference polypeptide when at least a portion of the nucleic acid, or its complement, can be directly translated to provide the amino acid sequence of the reference polypeptide, or when the isolated nucleic acid can be used, alone or as part of an expression vector, to express the reference polypeptide in vitro, in a prokaryotic host cell, or in a eukaryotic host cell.

[0064] As used herein, the term “exon” refers to a nucleic acid sequence found in genomic DNA that is bioinformatically predicted and/or experimentally confirmed to contribute contiguous sequence to a mature mRNA transcript.

[0065] As used herein, the phrase “open reading frame” and the equivalent acronym “ORF” refer to that portion of an exon that can be translated in its entirety into a sequence of contiguous amino acids. As so defined, an ORF is wholly contained within its respective exon and has length, measured in nucleotides, exactly divisible by 3. As so defined, an ORF need not encode the entirety of a natural protein.

[0066] As used herein, the phrase “ORF-encoded peptide” refers to the predicted or actual translation of an ORF.

[0067] As used herein, the phrase “degenerate variant” of a reference nucleic acid sequence intends all nucleic acid sequences that can be directly translated, using the standard genetic code, to provide an amino acid sequence identical to that translated from the reference nucleic acid sequence.

[0068] As used herein, the term “microarray” and the equivalent phrase “nucleic acid microarray” refer to a substrate-bound collection of plural nucleic acids, hybridization to each of the plurality of bound nucleic acids being separately detectable. The substrate can be solid or porous, planar or non-planar, unitary or distributed.

[0069] As so defined, the term “microarray” and phrase “nucleic acid microarray” include all the devices so called in Schena (ed.), DNA Microarrays: A Practical Approach (Practical Approach Series), Oxford University Press (1999) (ISBN: 0199637768); Nature Genet. 21(1)(suppl): 1-60 (1999); and Schena (ed.), Microarray Biochip: Tools and Technology, Eaton Publishing Company/BioTechniques Books Division (2000) (ISBN: 1881299376), the disclosures of which are incorporated herein by reference in their entireties.

[0070] As so defined, the term “microarray” and phrase “nucleic acid microarray” include substrate-bound collections of plural nucleic acids in which the plurality of nucleic acids are distributably disposed on a plurality of beads, rather than on a unitary planar substrate, as is described, inter alia, in Brenner et al., Proc. Natl. Acad. Sci. USA 97(4):166501670 (2000), the disclosure of which is incorporated herein by reference in its entirety; in such case, the term “microarray” and phrase “nucleic acid microarray” refer to the plurality of beads in aggregate.

[0071] As used herein with respect to solution phase hybridization, the term “probe”, or equivalently, “nucleic acid probe” or “hybridization probe”, refers to an isolated nucleic acid of known sequence that is, or is intended to be, detectably labeled. As used herein with respect to a nucleic acid microarray, the term “probe” (or equivalently “nucleic acid probe” or “hybridization probe”) refers to the isolated nucleic acid that is, or is intended to be, bound to the substrate. In either such context, the term “target” refers to nucleic acid intended to be bound to probe by sequence complementarity.

[0072] As used herein, the expression “probe comprising SEQ ID NO: X”, and variants thereof, intends a nucleic acid probe, at least a portion of which probe has either (i) the sequence directly as given in the referenced SEQ ID NO: X, or (ii) a sequence complementary to the sequence as given in the referenced SEQ ID NO: X, the choice as between sequence directly as given and complement thereof dictated by the requirement that the probe be complementary to the desired target.

[0073] As used herein, the phrases “expression of a probe” and “expression of an isolated nucleic acid” and their linguistic equivalents intend that the probe or, respectively, the isolated nucleic acid, can hybridize detectably under high stringency conditions to a sample of nucleic acids that derive from mRNA transcripts from a given source. For example, and by way of illustration only, expression of a probe in “liver” means that the probe can hybridize detectably under high stringency conditions to a sample of nucleic acids that derive from mRNA obtained from liver.

[0074] As used herein, “a single exon probe” comprises at least part of an exon (“reference exon”) and can hybridize detectably under high stringency conditions to transcript-derived nucleic acids that include the reference exon. The single exon probe will not, however, hybridize detectably under high stringency conditions to nucleic acids that lack the reference exon but include one or more exons that are found adjacent to the reference exon in the genome.

[0075] For purposes herein, “high stringency conditions” are defined for solution phase hybridization as aqueous hybridization (i.e., free of formamide) in 6×SSC (where 20×SSC contains 3.0 M NaCl and 0.3 M sodium citrate), 1% SDS at 65° C. for at least 8 hours, followed by one or more washes in 0.2×SSC, 0.1% SDS at 65° C. “Moderate stringency conditions” are defined for solution phase hybridization as aqueous hybridization (i.e., free of formamide) in 6×SSC, 1% SDS at 65° C. for at least 8 hours, followed by one or more washes in 2×SSC, 0.1% SDS at room temperature.

[0076] For microarray-based hybridization, standard “high stringency conditions” are defined as hybridization in 50% formamide, 5×SSC, 0.2 μg/μl poly(dA), 0.2 μg/μl human cₒt1 DNA, and 0.5% SDS, in a humid oven at 42□C. overnight, followed by successive washes of the microarray in 1×SSC, 0.2% SDS at 55□C. for 5 minutes, and then 0.1×SSC, 0.2% SDS, at 55□C. for 20 minutes. For microarray-based hybridization, “moderate stringency conditions”, suitable for cross-hybridization to mRNA encoding structurally- and functionally-related proteins, are defined to be the same as those for high stringency conditions but with reduction in temperature for hybridization and washing to room temperature (approximately 25□C.).

[0077] As used herein, the terms “protein”, “polypeptide”, and “peptide” are used interchangeably to refer to a naturally-occurring or synthetic polymer of amino acid monomers (residues), irrespective of length, where amino acid monomer here includes naturally-occurring amino acids, naturally-occurring amino acid structural variants, and synthetic non-naturally occurring analogs that are capable of participating in peptide bonds. The terms “protein”, “polypeptide”, and “peptide” explicitly permits of post-translational and post-synthetic modifications, such as glycosylation.

[0078] The term “oligopeptide” herein denotes a protein, polypeptide, or peptide having 25 or fewer monomeric subunits.

[0079] The phrases “isolated protein”, “isolated polypeptide”, “isolated peptide” and “isolated oligopeptide” refer to a protein (or respectively to a polypeptide, peptide, or oligopeptide) that is nonidentical to any protein molecule of identical amino acid sequence as found in nature; “isolated” does not require, although it does not prohibit, that the protein so described has itself been physically removed from its native environment.

[0080] For example, a protein can be said to be “isolated” when it includes amino acid analogues or derivatives not found in nature, or includes linkages other than standard peptide bonds.

[0081] When instead composed entirely of natural amino acids linked by peptide bonds, a protein can be said to be “isolated” when it exists at a purity not found in nature—where purity can be adjudged with respect to the presence of proteins of other sequence, with respect to the presence of non-protein compounds, such as nucleic acids, lipids, or other components of a biological cell, or when it exists in a composition not found in nature, such as in a host cell that does not naturally express that protein.

[0082] A “purified protein” (equally, a purified polypeptide, peptide, or oligopeptide) is an isolated protein, as above described, present at a concentration of at least 95%, as measured on a mass basis with respect to total protein in a composition. A “substantially purified protein” (equally, a substantially purified polypeptide, peptide, or oligopeptide) is an isolated protein, as above described, present at a concentration of at least 70%, as measured on a mass basis with respect to total protein in a composition.

[0083] As used herein, the phrase “protein isoforms” refers to a plurality of proteins having nonidentical primary amino acid sequence but that share amino acid sequence encoded by at least one common exon.

[0084] As used herein, the phrase “alternative splicing” and its linguistic equivalents includes all types of RNA processing that lead to expression of plural protein isoforms from a single gene; accordingly, the phrase “splice variant(s)” and its linguistic equivalents embraces mRNAs transcribed from a given gene that, however processed, collectively encode plural protein isoforms. For example, and by way of illustration only, splice variants can include exon insertions, exon extensions, exon truncations, exon deletions, alternatives in the 5′ untranslated region (“5′ UT”) and alternatives in the 3′ untranslated region (“3′ UT”). Such 3′ alternatives include, for example, differences in the site of RNA transcript cleavage and site of poly(A) addition. See, e.g., Gautheret et al., Genome Res. 8:524-530 (1998).

[0085] As used herein, “orthologues” are separate occurrences of the same gene in multiple species. The separate occurrences have similar, albeit nonidentical, amino acid sequences, the degree of sequence similarity depending, in part, upon the evolutionary distance of the species from a common ancestor having the same gene.

[0086] As used herein, the term “paralogues” indicates separate occurrences of a gene in one species. The separate occurrences have similar, albeit nonidentical, amino acid sequences, the degree of sequence similarity depending, in part, upon the evolutionary distance from the gene duplication event giving rise to the separate occurrences.

[0087] As used herein, the term “homologues” is generic to “orthologues” and “paralogues”.

[0088] As used herein, the term “antibody” refers to a polypeptide, at least a portion of which is encoded by at least one immunoglobulin gene, or fragment thereof, and that can bind specifically to a desired target molecule. The term includes naturally-occurring forms, as well as fragments and derivatives.

[0089] Fragments within the scope of the term include those produced by digestion with various proteases, those produced by chemical cleavage and/or chemical dissociation, and those produced recombinantly, so long as the fragment remains capable of specific binding to a target molecule. Among such fragments are Fab, Fab′, Fv, F(ab)′2, and single chain Fv (scFv) fragments.

[0090] Derivatives within the scope of the term include antibodies (or fragments thereof) that have been modified in sequence, but remain capable of specific binding to a target molecule, including: interspecies chimeric and humanized antibodies; antibody fusions; heteromeric antibody complexes and antibody fusions, such as diabodies (bispecific antibodies), single-chain diabodies, and intrabodies (see, e.g., Marasco (ed.), Intracellular Antibodies: Research and Disease Applications, Springer-Verlag New York, Inc. (1998) (ISBN: 3540641513), the disclosure of which is incorporated herein by reference in its entirety).

[0091] As used herein, “antigen” refers to a ligand that can be bound by an antibody; an antigen need not itself be immunogenic. The portions of the antigen that make contact with the antibody are denominated “epitopes”.

[0092] “Specific binding” refers to the ability of two molecular species concurrently present in a heterogeneous (inhomogeneous) sample to bind to one another in preference to binding to other molecular species in the sample. Typically, a specific binding interaction will discriminate over adventitious binding interactions in the reaction by at least two-fold, more typically by at least 10-fold, often at least 100-fold; when used to detect analyte, specific binding is sufficiently discriminatory when determinative of the presence of the analyte in a heterogeneous (inhomogeneous) sample. Typically, the affinity or avidity of a specific binding reaction is least about 10⁻⁷ M, with specific binding reactions of greater specificity typically having affinity or avidity of at least 10⁻⁸ M to at least about 10−9 M.

[0093] As used herein, “molecular binding partners”—and equivalently, “specific binding partners”—refer to pairs of molecules, typically pairs of biomolecules, that exhibit specific binding. Nonlimiting examples are receptor and ligand, antibody and antigen, and biotin to any of avidin, streptavidin, neutrAvidin and captAvidin.

[0094] As used herein with respect to the visual display of annotated genomic sequence, the term “rectangle” means any geometric shape that has at least a first and a second border, wherein each of the first and second borders is capable of mapping uniquely to a point of another visual object of the display.

[0095] Methods and Apparatus for Generating Single Exon Probes from Genomic Sequence Data

[0096] In a first aspect, the present invention provides 13,700 human genome-derived single exon nucleic acid probes useful for gene expression analysis, particularly for gene expression analysis by microarray hybridization. FIG. 1 illustrates in broad outline the process by which these probes were generated.

[0097] FIG. 1 illustrates a process for predicting functional regions from genomic sequence, confirming and characterizing the functional activity of such regions experimentally, and then associating and displaying the information so obtained in meaningful and useful relationship to the original genomic sequence data. The process is further described in commonly owned and copending U.S. application Ser. No. 09/774,203, filed Jan. 29, 2001, the disclosure of which is incorporated herein by reference in its entirety, and is detailed additionally in experimental Examples 1-4, infra. To generate single exon nucleic acid probes useful for gene expression analysis, the functional activity to be predicted, confirmed, associated and displayed is the ability of the predicted region to contribute to a mature mRNA transcript.

[0098] As shown, the initial input into process 10 is drawn from one or more databases 100 containing genomic sequence data. Because genomic sequence is usually obtained from subgenomic fragments, the sequence data typically will be stored in a series of records corresponding to these subgenomic sequenced fragments. Some fragments will have been catenated to form larger contiguous sequences (“contigs”); others will not. A finite percentage of sequence data in the database will typically be erroneous, consisting inter alia of vector sequence, sequence created from aberrant cloning events, sequence of artificial polylinkers, and sequence that was erroneously read.

[0099] Each sequence record in database 100 will minimally contain as annotation a unique sequence identifier (accession number), and will typically be annotated further to identify the date of accession, species of origin, and depositor. Because database 100 can contain nongenomic sequence, each sequence will typically be annotated further to permit query for genomic sequence. Chromosomal origin, optionally with map location, can also be present. Data can be, and over time increasingly will be, further annotated with additional information, in part through use of the present invention, as described below. Annotation can be present within the data records, in information external to database 100 and linked to the records thereto, or through a combination of the two.

[0100] Databases useful as genomic sequence database 100 in the present invention include GenBank, and particularly include several divisions thereof, including the htgs (draft), NT (nucleotide, command line), and NR (nonredundant) divisions. GenBank is produced by the National Institutes of Health and is maintained by the National Center for Biotechnology Information (NCBI). Databases of genomic sequence from species other than human, such as mouse, rat, Arabidopsis thaliana, C. elegans, C. brigsii, Drosophila melanogaster, zebra fish, and other higher eukaryotic organisms will also prove useful as genomic sequence database 100.

[0101] Genomic sequence obtained by query of genomic sequence database 100 is then input into one or more processes 200 for identification of regions therein that are predicted to have a biological function as specified by the user. Such functions include, but are not limited to, contributing to a mature mRNA transcript, encoding protein, regulating transcription, regulating message transport after transcription, regulating message splicing after transcription, regulating message degradation after transcription, contributing to or controlling chromosomal somatic recombination, contributing to chromosomal stability or movement, contributing to allelic exclusion or X chromosome inactivation, and the like. To generate single exon probes useful for gene expression analysis, the functional activity to be predicted will be the ability to contribute to a mature mRNA transcript and/or protein coding.

[0102] The particular genomic sequence to be input into process 200 will depend upon the function for which relevant sequence is to be identified as well as upon the approach chosen for such identification. Process step 200 can be iterated to identify different functions within a given genomic region. In such case, the input often will be different for the several iterations.

[0103] Sequences predicted to have the requisite function by process 200 are then input into process 300, where a subset of the input sequences suitable for experimental confirmation is identified. Experimental confirmation can involve physical and/or bioinformatic assay. Where the subsequent experimental assay is bioinformatic, rather than physical, there are fewer constraints on the sequences that can be tested, and in this latter case therefore process 300 can output the entirety of the input sequence.

[0104] The subset of sequences output from process 300 is then used in process 400 for experimental verification and characterization of the function predicted in process 200, which experimental verification can, and often will, include both physical and bioinformatic assay.

[0105] Process 500 annotates the sequence data with the functional information obtained in the physical and/or bioinformatic assays of process 400. Such annotation can be done using any technique that usefully relates the functional information to the sequence, as, for example, by incorporating the functional data into the sequence data record itself, by linking records in a hierarchical or relational database, by linking to external databases, by a combination thereof, or by other means well known within the database arts. The data can even be submitted for incorporation into databases maintained by others, such as GenBank, which is maintained by NCBI.

[0106] As further noted in FIG. 1, additional annotation can be input into process 500 from external sources 600.

[0107] The annotated data is then optionally displayed in process 800, either before, concomitantly with, or after optional storage 700 on nontransient media, such as magnetic disk, optical disc, magnetooptical disk, flash memory, or the like.

[0108] FIG. 1 shows that the experimental data output from process 400 can be used in each preceding step of process 10: e.g., facilitating identification of functional sequences in process 200, facilitating identification of an experimentally suitable subset thereof in process 300, and facilitating creation of physical and/or informational substrates for, and performance of subsequent assay, of functional sequences in process 400.

[0109] Information from each step can be passed directly to the succeeding process, or stored in permanent or interim form prior to passage to the succeeding process. Often, data will be stored after each, or at least a plurality, of such process steps. Any or all process steps can be automated.

[0110] FIG. 2 further elaborates the prediction of functional sequence within genomic sequence according to process 200.

[0111] Genomic sequence database 100 is first queried 20 for genomic sequence.

[0112] The sequence required to be returned by query 20 will depend, in the first instance, upon the function to be identified.

[0113] For example, genomic sequences that function to encode protein can be identified inter alia using gene prediction approaches, comparative sequence analysis approaches, or combinations of the two. In gene prediction analysis, sequence from one genome is input into process 200 where at least one, preferably a plurality, of algorithmic methods are applied to identify putative coding regions. In comparative sequence analysis, by contrast, corresponding, e.g., syntenic, sequence from a plurality of sources, typically a plurality of species, is input into process 200, where at least one, possibly a plurality, of algorithmic methods are applied to compare the sequences and identify regions of least variability.

[0114] The exact content of query 20 will also depend upon the database queried. For example, if the database contains both genomic and nongenomic sequence, perhaps derived from multiple species, and the function to be predicted is protein coding in human genomic DNA, the query will accordingly require that the sequence returned be genomic and derived from humans.

[0115] Query 20 can also incorporate criteria that compel return of sequence that meets operative requirements of the subsequent analytical method. Alternatively, or in addition, such operative criteria can be enforced in subsequent preprocess step 24.

[0116] For example, if the function sought to be identified is protein coding, query 20 can incorporate criteria that return from genomic sequence database 100 only those sequences present within contigs sufficiently long as to have obviated substantial fragmentation of any given exon among a plurality of separate sequence fragments.

[0117] Such criteria can, for example, consist of a required minimal individual genomic sequence fragment length, such as 10 kb, more typically 20 kb, 30 kb, 40 kb, and preferably 50 kb or more, as well as an optional further or alternative requirement that sequence from any given clone, such as a bacterial artificial chromosome (“BAC”), be presented in no more than a finite maximal number of fragments, such as no more than 20 separate pieces, more typically no more than 15 fragments, even more typically no more than about 10-12 fragments.

[0118] Our results have shown that genomic sequence from bacterial artificial chromosomes (BACS) is sufficient for gene prediction analysis according to the present invention if the sequence is at least 50 kb in length, and if additionally the sequence from any given BAC is presented in fewer than 15, and preferably fewer than 10, fragments. Accordingly, query 20 can incorporate a requirement that data accessioned from BAC sequencing be in fewer than 15, preferably fewer than 10, fragments.

[0119] An additional criterion that can be incorporated into the query can be the date, or range of dates, of sequence accession. Although the process has been described above as if genomic sequence database 100 were static, it is of course understood that the genomic sequence databases need not be static, and indeed are typically updated on a frequent, even hourly, basis.

[0120] Thus, as further described in experimental Examples 1, 2, and 4, infra, it is possible to query the database for newly added sequence, either newly added after an absolute date or newly added relative to a prior analysis performed using the methods and apparatus of the present invention. In this way, the process herein described can incorporate a dynamic, temporal component.

[0121] One utility of such temporal limitation is to identify, from newly accessioned genomic sequence, the presence of novel genes, particularly those not previously identified by EST sequencing (or other sequencing efforts that are similarly based upon gene expression). As further described in Example 1, such an approach has shown that newly accessioned human genomic sequence, when analyzed for sequences that function to encode protein, readily identifies genes that are novel over those in existing EST and other expression databases. In fact, as shown below, fully ⅔ of genes identified in newly accessioned human genomic sequence have not hitherto been identified. This makes the methods of the present invention extremely powerful gene discovery tools. And as would be appreciated, such gene discovery can be performed using genomic sequence from species other than human. Particularly useful species are those used as model systems during drug development, such as rodent, particularly mouse and rat, Arabidopsis thaliana, C. elegans, C. brigsii, Drosophila melanogaster, and zebra fish.

[0122] If query 20 incorporates multiple criteria, such as above-described, the multiple criteria can be performed as a series of separate queries or as a single query, depending in part upon the query language, the complexity of the query, and other considerations well known in the database arts.

[0123] If query 20 returns no genomic sequence meeting the query criteria, the negative result can be reported by process 22, and process 200 (and indeed, entire process 10) ended 23, as shown. Alternatively, or in addition to report and termination of the initial inquiry, a new query 20 can be generated that takes into account the initial negative result.

[0124] When query 20 returns sequence meeting the query criteria, the returned sequence is then passed to optional preprocessing 24, suitable and specific for the desired analytical approach and the particular analytical methods thereof to be used in process 25.

[0125] Preprocessing 24 can include processes suitable for many approaches and methods thereof, as well as processes specifically suited for the intended subsequent analysis.

[0126] Preprocessing 24 suitable for most approaches and methods will include elimination of sequence irrelevant to, or that would interfere with, the subsequent analysis. Such sequence includes repetitive sequence, such as Alu repeats and LINE elements, vector sequence, artificial sequence, such as artificial polylinkers, and the like. Such removal can readily be performed by identification and subsequent masking of the undesired sequence.

[0127] Identification can be effected by comparing the genomic sequence returned by query 20 with public or private databases containing known repetitive sequence, vector sequence, artificial sequence, and other artifactual sequence. Such comparison can readily be done using programs well known in the art, such as CROSS_MATCH or REPEATMASKER, the latter available on-line at http:H/ftp.genome.washington.edu/RM/RepeatMasker.html, or by proprietary sequence comparison programs the engineering of which is well within the skill in the art.

[0128] Alternatively, or in addition, undesirable, including artifactual, sequence can be identified algorithmically without comparison to external databases and thereafter removed. For example, synthetic polylinker sequence can be identified by an algorithm that identifies a significantly higher than average density of known restriction sites. As another example, vector sequence can be identified by algorithms that identify nucleotide or codon usage at variance with that of the bulk of the genomic sequence.

[0129] Once identified, undesired sequence can be removed. Removal can usefully be done by masking the undesired sequence as, for example, by converting the specific nucleotide references to one that is unrecognized by the subsequent bioinformatic algorithms, such as “X”. Alternatively, but at present less preferred, the undesired sequence can be excised from the returned genomic sequence, leaving gaps.

[0130] Preprocessing 24 can further include selection from among duplicative sequences of that one sequence of highest quality. Higher quality can be measured as a lower percentage of, fewest number of, or least densely clustered occurrence of ambiguous nucleotides, defined as those nucleotides that are identified in the genomic sequence using symbols indicating ambiguity. Higher quality can also or alternatively be valued by presence in the longest contig.

[0131] Preprocessing 24 can, and often will, also include formatting of the data as specifically appropriate for passage to the analytical algorithms of process 25. Such formatting can and typically will include, inter alia, addition of a unique sequence identifier, either derived from the original accession number in genomic sequence database 100, or newly applied, and can further include additional annotation. Formatting can include conversion from one to another sequence listing standard, such as conversion to or from FASTA or the like, depending upon the input expected by the subsequent process.

[0132] Preprocessing, which can be optional depending upon the function desired to be identified and the informational requirements of the methods for effecting such identification, is followed by sequence processing 25, where sequences with the desired function are identified within the genomic sequence.

[0133] As mentioned above, such functions can include, but are not limited to, encoding protein, regulating transcription, regulating message transport after transcription, regulating message splicing after transcription, regulating message degradation after transcription, contributing to or controlling chromosomal somatic recombination, contributing to chromosomal stability or movement, contributing to allelic exclusion or X chromosome inactivation, and the like.

[0134] Where the function specified is protein coding, the above-described process can be used rapidly and efficienty to identify individual exons in genomic sequence. As discussed below, we have used the methods and apparatus of the present invention to identify 13,700 exons in human genomic sequence whose expression we have confirmed in at least one human tissue or cell type. Fully two-thirds of the exons initially characterized belong to genes that were not at the time of our discovery represented in existing public expression (EST, cDNA) databases, making the methods and apparatus of the present invention extremely powerful tools for novel gene discovery.

[0135] And as further mentioned below and described in detail in commonly owned and copending U.S. patent application Ser. No. 09/632,366, filed Aug. 3, 2000, the disclosure of which is incorporated herein by reference in its entirety, the genome-derived single exon probes and microarrays of the present invention prove exceedingly useful in the high throughput identification of a large variety of alternative splice events in eukaryotic cells and tissues.

[0136] To generate such probes, process 25 is used to identify putative coding regions. Two exemplary approaches useful in process 25 for identifying sequence that encodes putative genes are gene prediction and comparative sequence analysis.

[0137] Gene prediction can be performed using any of a number of algorithmic methods, embodied in one or more software programs, that identify open reading frames (ORFs) using a variety of heuristics, such as GRAIL, DICTION, GENSCAN, and GENEFINDER.

[0138] Comparative sequence analysis similarly can be performed using any of a variety of known programs that identify regions with lower sequence variability.

[0139] An advantage of comparative sequence analysis is that genomic sequence can be input into process 200 that is less comprehensive and/or of lesser quality than that required by gene prediction programs.

[0140] We have, for example, recently used comparative sequence analysis to identify sequences that are orthologous as between human and mouse genomes, and output the mouse sequences so identified (“similons”) into process 300; this approach has permitted us to identify, and then to confirm and measure expression of, novel mouse exons and genes. As is well known in the pharmaceutical arts, genes identified in model systems permit targets of pharmaceutical intervention to be validated in a model system; validated targets facilitate screening for potential therapeutic lead agents.

[0141] As further described in Example 1, below, gene prediction software programs yield a range of results. For the newly accessioned human genomic sequence input in Example 1, for example, GRAIL identified the greatest percentage of genomic sequence as putative coding region, 2% of the data analyzed; GENEFINDER was second, calling 1%; and DICTION yielded the least putative coding region, with 0.8% of genomic sequence called as coding region.

[0142] Increased reliability can be obtained when consensus is required among several such methods. Although discussed herein particularly with respect to exon calling, consensus among methods will in general increase reliability of predicting other functions as well.

[0143] Thus, as indicated by query 26, sequence processing 25, optionally with preprocessing 24, can be repeated with a different method, with consensus am song such iterations determined and reported in process 27.

[0144] Process 27 compares the several outputs for a given input genomic sequence and identifies consensus among the separately reported results. The consensus itself, as well as the sequence meeting that consensus, is then stored in process 29a, displayed in process 29b, and/or output to process 300 for subsequent identification of a subset thereof suitable for assay.

[0145] Multiple levels of consensus can be calculated and reported by process 27.

[0146] For example, as further described in Example 1, infra, process 27 can report consensus as between all specific pairs of methods of gene prediction, as consensus among any one or more of the pairs of methods of gene prediction, or as among all of the gene prediction algorithms used. Thus, in Example 1, process 27 reported that GRAIL and GENEFINDER programs agreed on 0.7% of genomic sequence, that GRAIL and DICTION agreed on 0.5% of genomic sequence, and that the three programs together agreed on 0.25% of the data analyzed. Put another way, 0.25% of the genomic sequence was identified by all three of the programs as containing putative coding region.

[0147] As another example, three of the four gene prediction algorithms that we presently use—GENEFINDER, GENSCAN, and GRAIL—predict frame information in addition to the position of exons. If there is overlap in position and frame of the predicted exons, even if not complete identity, the predicted exons are merged in process 27 to generate the largest possible consensus coding region. The process is iterated until all possible overlaps have been merged. This approach reduces the mean number of exons present in each amplicon, and is preferred in generating exon-specific probes useful for detecting exon elongation and exon truncation alternative splice events.

[0148] Furthermore, consensus can be required among different approaches to identifying a chosen function.

[0149] For example, if the function desired to be identified is coding of protein sequence, and a first used approach to exon calling is gene prediction, the process can be repeated on the same input sequence, or subset thereof, with another approach, such as comparative sequence analysis. In such a case, where comparative sequence analysis follows gene prediction, the comparison can be performed not only on genomic nucleic acid sequence, but additionally or alternatively can be performed on the predicted amino acid sequence translated from exons prior-identified by the gene prediction approach.

[0150] Although shown as an iterative process, the multiple analyses required to achieve consensus can be done in series, in parallel, or some combination thereof.

[0151] Predicted functional sequence, optionally representing a consensus among a plurality of methods and approaches for determination thereof, is passed to process 300 for identification of a subset thereof for functional assay.

[0152] Where the function sought to be identified is protein coding, process 300 is used to identify a subset thereof suitable for experimental verification by physical and/or bioinformatic approaches.

[0153] Where the goal is the identification and confirmation of expression of only a single exon of gene, putative exons identified in process 200 can be classified, or binned, bioinformatically into putative genes. This binning can be based inter alia upon consideration of the average number of exons/gene in the species chosen for analysis, upon density of exons that have been called on the genomic sequence, and other empirical rules; the putative gene structure is also provided by various of these gene prediction programs. Thereafter, one or more among the exons can be chosen for subsequent use in gene expression assay.

[0154] Where the goal is, instead, the identification and confirmation of expression of all, or of a plurality, of the exons of a gene—as is typically desired for detection of alternative splice events, as further described in commonly owned and copending U.S. patent application Ser. No. 09/632,366, filed Aug. 3, 2000, the disclosure of which is incorporated herein by reference in its entirety—putative exons identified in process 200 can be classified, or binned, bioinformatically into putative genes; thereafter, all of the exons of the gene can be chosen for subsequent confirmation in gene expression assay.

[0155] Where such subsequent gene expression assay uses amplified nucleic acid, considerations such as desired amplicon length, primer synthesis requirements, putative exon length, sequence GC content, existence of possible secondary structure, and the like can be used to identify and select those exons that appear most likely successfully to amplify.

[0156] Where subsequent gene expression assay relies upon nucleic acid hybridization, whether or not using amplified product, further considerations involving hybridization stringency can be applied to identify that subset of sequences that will most readily permit sequence-specific discrimination at a chosen hybridization and wash stringency. One particular such consideration is avoidance of putative exons that span repetitive sequence; such sequence can hybridize spuriously to nonspecific message, reducing specific signal in the hybridization.

[0157] For bioinformatic assay, there are fewer constraints on the sequences that can be tested experimentally, and in this latter case, therefore, process 300 can output the entirety of the input sequence.

[0158] The subset of sequences identified by process 300 as suitable for use in assay is then used in process 400 to create the physical and/or informational substrate for experimental verification of the predictions made in process 200, and thereafter to assay those substrates.

[0159] Where the goal is to generate single exon nucleic acid probes useful for gene expression analysis, as by microarray hybridization, process 400 is used to confirm expression of the predicted exon. In a particularly useful approach, used herein to confirm expression of the 13,700 genome-derived single exon probes of the present invention, expression is confirmed and measured using genome-derived single exon nucleic acid microarrays, as follows.

[0160] Predicted exons are amplified from genomic DNA. Amplification can be performed using the polymerase chain reaction (PCR). Although PCR is conveniently used, other amplification approaches, such as rolling circle amplification, can also be used.

[0161] Amplification schemes can be designed to capture the entirety of each predicted exon in an amplicon with minimal additional (that is, flanking intronic or intergenic) sequence. Because exons predicted from genomic sequence using the methods of the present invention differ in length, such an approach results in amplicons of varying length.

[0162] However, we have found that most exons predicted from human genomic sequence are shorter than 500 bp in length. Although amplicons of at least about 75 base pairs, more preferably at least about 100 base pairs, even more preferably at least about 200 base pairs can be immobilized as probes on nucleic acid microarrays, our early experimental results using the methods of the present invention suggested that longer amplicons, at least about 400 base pairs, more preferably about 500 base pairs, are more effectively immobilized on glass slides or other prepared surfaces.

[0163] Although we had suspected that the intronic and intergenic material flanking putative exons in such longer amplicons might cause interference with exon-specific hybridization during microarray experiments, we have found instead, to our surprise, that 11<s the ratio of expression of any such probe as between an experimental tissue (or cell type) and a control tissue is not significantly affected by the presence in the probes of sequence that does not contribute to hybridization to message or cDNA.

[0164] Equally surprising, the art had suggested that single exon probes would not provide sufficient signal intensity for high stringency hybridization analyses. Although low stringency hybridization conditions have been designed that permit informative hybridization to highly redundant oligonucleotide-based microarrays, it was believed that the high stringency hybridization conditions typically used for EST-based microarrays would not be usable with single exon probes. We have found, surprisingly, that single-exon probes provide adequate signal at high stringency.

[0165] As a result, we have found that we are readily able to use genome-derived amplification products having a single exon flanked by intergenic and/or intronic sequence to confirm the expression of bioinformatically predicted exons.

[0166] To the extent that chemical synthesis methods permit oligonucleotides to be generated of sufficient length to encompass an exon, such oligonucleotides can be used as probes in lieu of amplified material. At present, however, amplified products can be generated that exceed the reasonable size limit of chemically synthesized oligonucleotides; amplification thus more readily permits probes to be generated that have single exons flanked by intronic and/or intergenic sequence.

[0167] Probes having flanking intergenic and/or intronic sequence permit a wider range of alternative splice events to be detected than do probes that contain only exonic sequence. For example, exon extension would be detectable with such probes as an increase in signal intensity: we have found a near-linear relationship between signal intensity and length of hybridizing sequence. And when used to assay heteronucloear, i.e., immature mRNA, probes having intronic and/or intergenic flanking sequence permit a wider variety of events to be assessed.

[0168] Furthermore, certain advantages derive from application to the microarray of amplicons of defined size.

[0169] Therefore, amplification schemes can alternatively, and preferably, be designed to amplify regions of defined size, preferably at least about 300 bp, more preferably at least about 400 bp, most preferably about 500 bp, centered about each predicted exon. Such an approach results in a population of amplicons of limited size diversity, but that typically contain intronic and/or intergenic nucleic acid in addition to, and flanking, the putative exon.

[0170] Conversely, somewhat fewer than 10% of exons predicted from human genomic sequence according to the methods of the present invention exceed 500 bp in length. Portions of such longer exons, preferably at least about 300 bp, more preferably at least about 400 bp, most preferably about 500 bp, can be amplified. However, in our early experiments we found that the percentage success at amplifying pieces of such exons is low, and that such putative exons are more effectively amplified when larger fragments, at least about 1000 bp, typically at least about 1500 bp, and even as large as 2000 bp are amplified. Further routine optimization of the PCR reaction would permit 500 bp portions of the longer exons to be amplified.

[0171] For amplification, the putative exons selected in process 300 are input into one or more primer design programs, such as PRIMER3 (available online for use at http://www-genome.wi.mit.edu/cgi-bin/primer/), with a goal of amplifying at least about 500 base pairs of genomic sequence centered within or about exons predicted to be no more than about 500 bp (or at least about 1000-1500 bp 1500 bp of genomic sequence for exons predicted to exceed 500 bp in length) and the primers synthesized by standard techniques. Primers with the requisite sequences can be purchased commercially or synthesized by standard techniques.

[0172] Conveniently, a first predetermined sequence can be added commonly to each exon-specific 5′ primer and a second, typically different, predetermined sequence commonly added to each 3′ exon-unique primer. This serves to immortalize the amplicon; that is, it serves to permit further amplification of any amplicon using a single set of primers complementary respectively to the common 5′ and common 3′ sequence elements. The presence of these “universal” priming sequences further facilitates later sequence verification, providing a sequence common to all amplicons at which to prime sequencing reactions. The common 5′ and 3′ sequences can further serve to add a cloning site should any of the exons warrant further study.

[0173] Such predetermined sequence is usefully at least about 10 nt in length, typically at least about 12 nt, more typically about 15 nt in length, and usually does not exceed about 25 nt in length. The “universal” priming sequences used in the examples presented infra were each 16 nt long and are further described in commonly owned and copending U.S. patent application Ser. No. 09/608,408, filed Jun. 30, 2000, the disclosure of which is incorporated herein by reference in its entirety. To conserve space, the 5′ and 3′ universal primer sequences are omitted from the probe sequences set forth in the Sequence Listing, the disclosure of which is incorporated herein by reference in its entirety.

[0174] The genomic DNA to be used as substrate for amplification will come from the eukaryotic species from which the genomic sequence data had originally been obtained, or a closely related species, and can conveniently be prepared by well known techniques from somatic or germline tissue or cultured cells of the organism. See, e.g., Short Protocols in Molecular Biology: A Compendium of Methods from Current Protocols in Molecular Biology, Ausubel et al. (eds.), 4^{th} edition (April 1999), John Wiley & Sons (ISBN: 047132938X) and Maniatis et al, Molecular Cloning: A Laboratory Manual, 2^{nd} edition (December 1989), Cold Spring Harbor Laboratory Press (ISBN: 0879693096), the disclosures of which are incorporated herein by reference in their entireties. Many such prepared genomic DNAs are available commercially, with the human genomic DNAs typically also having certification of donor informed consent.

[0175] After partial purification, as by size exclusion spin column or adsorption to glass, with or without confirmation as to amplicon quality as by gel electrophoresis, each amplicon (single exon probe) is disposed in an array upon a support substrate.

[0176] Methods for creating microarrays by deposition and fixation of nucleic acids onto support substrates are well known in the art. Reviewed in Schena (ed.), DNA Microarras: A Practical Approach (Practical Approach Series), Oxford University Press (1999) (ISBN: 0199637768); Nature Genet. 21(1)(suppl):1-60 (1999); Schena (ed.), Microarray Biochip: Tools and Technology, Eaton Publishing Company/BioTechniques Books Division (2000) (ISBN: 1881299376), the disclosures of which are incorporated herein by reference in their entireties.

[0177] Typically, the support substrate can be glass, although other materials, such as amorphous silicon, crystalline silicon, or plastics, can be used. Plastics usefully can include polymethylacrylic, polyethylene, polypropylene, polyacrylate, polymethylmethacrylate, polyvinylchloride, polytetrafluoroethylene, polystyrene, polycarbonate, polyacetal, polysulfone, celluloseacetate, cellulosenitrate, nitrocellulose, or mixtures or copolymers thereof.

[0178] Typically, the support can be rectangular, although other shapes, particularly circular disks and even spheres, present certain advantages. Particularly advantageous alternatives to glass slides as support substrates for array of nucleic acids are optical discs, as described in Demers, “Spatially Addressable Combinatorial Chemical Arrays in CD-ROM Format,” international patent publication WO 98/12559, incorporated herein by reference in its entirety.

[0179] The amplified nucleic acids can be attached covalently to a surface of the support substrate or, more typically, applied to a derivatized surface in a chaotropic agent that facilitates denaturation and adherence by presumed noncovalent interactions, or some combination thereof.

[0180] Robotic spotting devices useful for arraying nucleic acids on support substrates can be constructed using public domain specifications (The MGuide, version 2.0, http://cmgm.stanford.edu/pbrown/mguide/index.html), or can conveniently be purchased from commercial sources, such as the Molecular Dynamics MicroArray Generation III Array Spotter, which is available from Amersham Pharmacia Biotech (Piscataway, N.J., USA). Spotting can also be effected by printing methods, including those using ink jet technology.

[0181] As is well known in the art, microarrays typically also contain immobilized control nucleic acids. For controls useful in providing measurements of background signal for the genome-derived single exon microarrays of the present invention, a plurality of E. coli genes can readily be used. As further described in Example 1, 16 or 32 E. coli genes suffice to provide a robust measure of nonspecific hybridization in such microarrays.

[0182] As is well known in the art, the amplified product disposed in arrays on a support substrate to create a nucleic acid microarray can consist entirely of natural nucleotides linked by phosphodiester bonds, or alternatively can include either nonnative nucleotides, alternative internucleoside linkages, or both, so long as complementary binding can be obtained in the hybridization reaction. If enzymatic amplification is used to produce the immobilized probes, the amplifying enzyme will impose certain further constraints upon the types of nucleic acid analogs that can be generated.

[0183] Although particularly described herein as using high density microarrays constructed on planar substrates, the methods of the present invention for confirming the expression of exons predicted from genomic sequence can use any of the known types of microarrays, as herein defined, including microarrays on nonplanar, nonunitary, distributed substrates, such as the nonplanar, bead-based microarrays as are described in Brenner et al., Proc. Natl. Acad. Sci. USA 97(4):166501670 (2000); U.S. Pat. No. 6,057,107; and U.S. Pat. No. 5,736,330, the disclosures of which are incorporated herein by reference in their entireties. In theory, a packed collection of such beads provides in aggregate a higher density of nucleic acid probe than can be achieved with spotting or lithography techniques on a single planar substrate.

[0184] In addition, gene expression can be confirmed using hybridization to lower density arrays, such as those constructed on membranes, such as nitrocellulose, nylon, and positively-charged derivatized nylon membranes.

[0185] Planar microarrays on solid substrates, however, provide certain useful advantages, including compatibility with existing readers. For example, each standard microscope slide can include at least 1000, typically at least 2000, preferably 5000 or more, and up to 19,000 or more nucleic acid probes of discrete sequence.

[0186] Each putative gene can be represented in the array by a single predicted exon or by a plurality of exons predicted to belong to the same gene. And as is well known in the art, each probe of defined sequence, representing a single predicted exon, can be deposited in a plurality of locations on a single microarray to provide redundancy of signal.

[0187] The genome-derived single exon microarrays described above differ in several fundamental and advantageous ways from microarrays presently used in the gene expression art, including (1) those created by deposition of mRNA-derived nucleic acids, (2) those created by in situ synthesis of oligonucleotide probes, and (3) those constructed from yeast genomic DNA.

[0188] Most nucleic acid microarrays that are in use for study of eukaryotic gene expression have as immobilized probes nucleic acids that are derived—either directly or indirectly—from expressed message. It is common, for example, for such microarrays to be derived from cDNA/EST libraries, either from those previously described in the literature, such as those from the I.M.A.G.E. consortium, Lennon et al., “The I.M.A.G.E. Consortium: an Integrated Molecular Analysis of Genomes and Their Expression, Genomics 33(1):151-2 (1996), or from the de novo construction of “problem specific” libraries targeted at a particular biological question, R. S. Thomas et al., Toxicologist 54:68-69 (2000), incorporated herein by reference in their entireties. Such microarrays are herein collectively denominated “EST microarrays”.

[0189] Such EST microarrays by definition can measure expression only of those genes found in EST libraries, which we show herein (see infra) to represent only a fraction of expressed genes. Thus, as further discussed in Example 1, infra, fully ⅔ of genes identified from newly-accessioned human genomic sequence data by the methods of the present invention—for which expression was subsequently confirmed—do not appear in EST or other expression databases, and could not, therefore, have been represented as probes on an EST microarray.

[0190] Furthermore, EST and cDNA libraries—and thus microarrays based thereupon—are biased by the tissue or cell type of message origin.

[0191] In addition, representation of a message in an EST and/or cDNA library depends upon the successful reverse transcription, optionally but typically with subsequent successful cloning, of the message. This introduces substantial bias into the population of probes available for arraying in EST microarrays. For example, as we show in the Examples, infra, the subset of genes identified from genomic sequence by the methods of the present invention that had previously been accessioned in EST or other expression databases are biased toward genes with higher expression levels.

[0192] In contrast, neither reverse transcription nor cloning is required to produce the probes arrayed on the genome-derived single exon microarrays of the present invention. And although the ultimate deposition of a probe on the genome-derived single exon microarray of the present invention depends upon a successful amplification from genomic material, a priori knowledge of the sequence of the desired amplicon affords greater opportunity to recover any given probe sequence recalcitrant to amplification than is afforded by the requirement for successful reverse transcription and cloning of unknown message in EST approaches. Furthermore, if the sequence cannot be amplified, the sequence can at times be chemically synthesized in its entirety for use in the present invention.

[0193] Thus, the genome-derived single exon microarrays of the present invention present a far greater diversity of probes for measuring gene expression, with far less bias, than do EST microarrays presently used in the art.

[0194] As a further consequence of their ultimate origin from expressed message, the probes in EST microarrays often contain poly-A (or complementary poly-T) stretches derived from the poly-A tail of mature mRNA. These homopolymeric stretches contribute to cross-hybridization, that is, to a spurious signal occasioned by hybridization to the homopolymeric tail of a labeled cDNA that lacks sequence homology to the gene-specific portion of the probe.

[0195] In contrast, the probes arrayed in the genome-derived single exon microarrays of the present invention lack homopolymeric stretches derived from message polyadenylation, and thus can provide more specific signal. Typically, at least about 50% of the probes on the genome-derived single exon microarrays of the present invention lack homopolymeric regions consisting of A or T, where a homopolymeric region is defined for purposes herein as stretches of 25 or more, typically 30 or more, identical nucleotides. More typically, at least about 60%, even more typically at least about 75%, of probes on the genome-derived single exon microarrays of the present invention lack such homopolymeric stretches.

[0196] A further distinction, which also affects the specificity of hybridization, is occasioned by the typical derivation of EST microarray probes from cloned material. Because much of the probe material disposed as probes on EST microarrays is excised or amplified from plasmid, phage, or phagemid vectors, EST microarrays typically include a fair amount of vector sequence, more so when the probes are amplified, rather than excised, from the vector.

[0197] In contrast, the vast majority of probes in the genome-derived single exon microarrays of the present invention contain no prokaryotic or bacteriophage vector sequence, having been amplified directly or indirectly from genomic DNA. Typically, therefore, at least about 50%, more typically at least about 60%, 70%, and even 80% or more of individual exon-including probes disposed on a genome-derived single exon microarray of the present invention lack vector sequence, and particularly lack sequences drawn from plasmids and bacteriophage. Preferably, at least about 85%, more preferably at least about 90%, most preferably more than 90% of exon-including probes in the genome-derived single exon microarray of the present invention lack vector sequence. With attention to removal of vector sequences through preprocessing 24, percentages of vector-free exon-including probes can be as high as 95-99%. The substantial absence of vector sequence from the genome-derived single exon microarrays of the present invention results in greater specificity during hybridization, since spurious cross-hybridization to a probe vector sequence is reduced.

[0198] As a further consequence of excision or amplification of probes from vectors in construction of EST microarrays, the probes arrayed thereon often contain artificial sequence, derived from vector polylinker multiple cloning sites, at both 5′ and 3′ ends. The probes disposed upon the genome-derived single exon microarrays need have no such artificial sequence appended thereto.

[0199] As mentioned above, however, the exon-specific primers used to amplify putative exons can include artificial sequences, typically 5′ to the exon-specific primer sequence, useful for “universal” (that is, independent of exon sequence) priming of subsequent amplification or sequencing reactions. When such “universal” 5′ and/or 3′ priming sequences are appended to the amplification primers, the probes disposed upon the genome-derived single exon microarray will include artificial sequence similar to that found in EST microarrays. However, the genome-derived single exon microarray of the present invention can be made without such sequences, and if so constructed, presents an even smaller amount of nonspecific sequence that would contribute to nonspecific hybridization.

[0200] Yet another consequence of typical use of cloned material as probes in EST microarrays is that such microarrays contain probes that result from cloning artifacts, such as chimeric molecules containing coding region of two separate genes. Derived from genomic material, typically not thereafter cloned, the probes of the genome-derived single exon microarrays of the present invention lack such cloning artifacts, and thus provide greater specificity of signal in gene expression measurements.

[0201] A further consequence of the cloned origin of probes on many EST microarrays is that the individual probes often have disparate sizes, which can cause the optimal hybridization stringency to vary among probes on a single microarray. In contrast, as discussed above, the probes arrayed on the genome-derived single exon microarrays of the present invention can readily be designed to have a narrow distribution in sizes, with the range of probe sizes no greater than about 10% of the average size, typically no greater than about 5% of the average probe size.

[0202] Because of their origin from filly- or partially-spliced message, probes disposed upon EST arrays will often include multiple exons. The percentage of such exon-spanning probes in an EST microarray can be calculated, on average, based upon the predicted number of exons/gene for the given species and the average length of the immobilized probes. For human genes, the near-complete sequence of human chromosome 22, Dunham et al., Nature 402(6761):489-95 (1999), predicts that human genes average 5.5 exons/gene. Even with probes of 200-500 bp, the vast majority of human EST microarray probes include more than one exon.

[0203] In contrast, by virtue of their origin from algorithmically identified exons in genomic sequence, the probes in the genome-derived single exon microarrays of the present invention can comprise individual exons, which provides the ability, as further discussed in commonly owned and copending U.S. patent application Ser. No. 09/632,366, filed Aug. 3, 2000, incorporated herein by reference in its entirety, to detect and to characterize the expression of splice variants.

[0204] Although the presence of multiexon probes will not interfere with the ability to confirm expression of predicted exons in a first level screen, it is preferred that at least about 50%, typically at least about 60%, even more typically at least about 70% of probes disposed on the genome-derived microarray of the present invention consist of, or include, no more than one exon. In preferred embodiments, at least about 75%, more preferably at least about 80%, 85%, 90%, 95%, and even 99% of probes in the genome-derived microarrays of the present invention consist of, or include, no more than one exon.

[0205] Although, in the most preferred embodiments, at least about 95%, and even at least about 99% of probes in the genome-derived microarray consist of, or include, no more than one exon, we have found that our early bioinformatic parameters typically produce, at this stage of analysis, about 10% of probes that potentially contain two exons. We expect that some fraction of these probes will prove to encode only a single exon, and that further optimization of our bioinformatic approach will reduce the percentage of probes having more than one potential exon. Nonetheless, we exclude such probes from the appended tables and Sequence Listing, incorporated herein by reference in their entireties.

[0206] Further distinguishing the genome-derived single exon microarrays of the present invention from the EST arrays in the art, the exons that are represented in EST microarrays are often biased toward the 3′ or 5′ end of their respective genes, since sequencing strategies used for EST identification are so biased. In contrast, no such 3′ or 5′ bias necessarily inheres in the selection of exons for disposition on the genome-derived single exon microarrays of the present invention.

[0207] Conversely, the probes provided on the genome-derived single exon microarrays of the present invention typically, but need not necessarily, include intronic and/or intergenic sequence that is absent from EST microarrays, which are derived from mature mRNA. As above-mentioned, such inclusion, although not mandatory, is advantageous, particularly in use of the probes for detection of alternative splice events. Typically, therefore, at least about 50%, more typically at least about 60%, and even more typically at least about 70% of the exon-including probes on the genome-derived single exon microarrays of the present invention include sequence drawn from noncoding regions. In some embodiments, at least about 80%, more typically at least about 85%, 90%, 91%, 92%, 93%, 94%, 95%, 96%, 97%, 98%, and even 99% or more of exon-including probes on the genome-derived single exon microarrays of the present invention will include sequence drawn from noncoding regions.

[0208] The genome-derived single exon microarrays of the present invention are also quite different from in situ synthesis microarrays, where probe size is severely constrained by limitations of the photolithographic or other in situ synthesis processes.

[0209] Typically, probes arrayed on in situ synthesis microarrays are limited to a maximum of about 25 bp. As a well known consequence, hybridization to such chips must be performed at low stringency. In order, therefore, to achieve unambiguous sequence-specific hybridization results, the in situ synthesis microarray requires substantial redundancy, with concomitant programmed arraying for each probe of probe analogues with altered (i.e., mismatched) sequence.

[0210] In contrast, the longer probe length of the genome-derived single exon microarrays of the present invention allows much higher stringency hybridization and wash. Typically, therefore, exon-including probes on the genome-derived single exon microarrays of the present invention average at least about 100 bp, more typically at least about 200 bp, preferably at least about 250 bp, even more preferably about 300 bp, 400 bp, or in preferred embodiments, at least about 500 bp in length. By obviating the need for substantial probe redundancy, this approach permits a higher density of probes for discrete exons or genes to be arrayed on the microarrays of the present invention than can be achieved for in situ synthesis microarrays.

[0211] A further distinction is that the probes in in situ synthesis microarrays typically are covalently linked to the substrate surface. In contrast, the probes disposed on the genome-derived microarray of the present invention typically are, but need not necessarily be, bound noncovalently to the substrate.

[0212] Furthermore, the short probe size on in situ microarrays causes large percentage differences in the melting temperature of probes hybridized to their complementary target sequence, and thus causes large percentage differences in the theoretically optimum stringency across the array as a whole.

[0213] In contrast, the larger probe size in the microarrays of the present invention create lower percentage differences in melting temperature across the range of arrayed probes.

[0214] A further significant advantage of the microarrays of the present invention over in situ synthesized arrays is that the quality of each individual probe can be confirmed before deposition. In contrast, the quality of probes cannot be assessed on a probe-by-probe basis for the in situ synthesized microarrays presently being used.

[0215] The genome-derived single exon microarrays of the present invention are also distinguished over, and present substantial benefits over, the genome-derived microarrays from lower eukaryotes such as yeast. See, e.g., Lashkari et al., Proc. Natl. Acad. Sci. USA 94:13057-13062 (1997).

[0216] Only about 220-250 of the 6100 or so nuclear genes in Saccharomyces cerevisiae—that is, only about 4 to 5%—have standard, spliceosomal, introns, Lopez et al., Nucl. Acids Res. 28:85-86 (2000); Spingola et al., RNA 5(2):221-34 (1999), permitting the ready amplification and disposition of single-exon amplicons on such microarray without the requirement for antecedent use of gene prediction and/or comparative sequence analyses.

[0217] A significant aspect of the present invention is the ability to identify and to confirm expression of predicted coding regions in genomic sequence drawn from eukaryotic organisms that have a higher percentage of genes having introns than do yeast such as Saccharomyces cerevisiae, particularly in genomic sequence drawn from eukaryotes in which at least about 10%, typically at least about 20%, more typically at least about 50% of protein-encoding genes have introns. In preferred embodiments, the methods and apparatus of the present invention are used to identify and confirm expression of exons of novel genes from genomic sequence of eukaryotes in which the average number of introns per gene is at least about one, more typically at least about two, even more typically at least about three or more.

[0218] After the physical substrate is prepared, experimental verification of predicted function is performed. To verify the expression of the 13,700 single exon probes of the present invention, the single exon microarrays were used in simultaneous two-color hybridization reactions, as follows.

[0219] Expression is conveniently measured and reported for each probe in the microarray both as a signal intensity and as a ratio of the expression measured relative to a control, according to techniques well known in the microarray art, reviewed in Schena (ed.), DNA Microarras: A Practical Approach (Practical Approach Series), Oxford University Press (1999) (ISBN: 0199637768); Nature Genet. 21(1)(suppl):1-60 (1999); Schena (ed.), Microarray Biochip: Tools and Technology, Eaton Publishing Company/BioTechniques Books Division (2000) (ISBN: 1881299376), the disclosures of which are incorporated herein by reference in their entireties. See also Example 2, infra. The mRNA source for the reference (control) used to calculate expression ratios can be heterogeneous, as from a pool of multiple tissues and/or cell types or, alternatively, can be drawn from a homogeneous mRNA source, such as a single cultured cell-type.

[0220] In Examples 1 and 2, infra, we used a pool of 10 tissues/cell types as control. We have since observed that almost every probe that demonstrates expression in the control pool can readily be shown to be expressed in HeLa cells. Since use of a pooled control might mask subtle alternative splice events, we have used HeLa as the source of control message in more recent experiments, such as those reported in Example 4, infra.

[0221] mRNA can be prepared by standard techniques, Short Protocols in Molecular Biology: A Compendium of Methods from Current Protocols in Molecular Biology, Ausubel et al. (eds.), 4^{th} edition (April 1999), John Wiley & Sons (ISBN: 047132938X) and Maniatis et al., Molecular Cloning: A Laboratory Manual, 2^{nd} edition (December 1989), Cold Spring Harbor Laboratory Press (ISBN: 0879693096), the disclosures of which are incorporated herein by reference in their entireties, or purchased commercially. The mRNA is then typically reverse-transcribed in the presence of labeled nucleotides: the index source (that in which expression is desired to be measured) is reverse transcribed in the presence of nucleotides labeled with a first label, typically a fluorophore (equivalently denominated fluorochrome; fluor; fluorescent dye); the reference source is reverse transcribed in the presence of a second label, typically a fluorophore, typically fluorometrically-distinguishable from the first label.

[0222] As further described in Example 2, infra, Cy3 and Cy5 dyes prove particularly useful in these methods. After partial purification of the index and reference targets, hybridization to the probe array is conducted according to standard techniques, typically under a coverslip or in an automatic slide processing unit.

[0223] After wash, microarrays are conveniently scanned using a commercial microarray scanning device, such as a Molecular Dynamics Generation III Array Scanner (Amersham Pharmacia Biotech, Piscataway, N.J., USA) or Molecular Dynamics Avalanche Scanner (Amersham Pharmacia Biotech, Piscataway, N.J., USA). Data on expression is then passed, with or without interim storage, to process 500, where the results for each probe are related to the original sequence.

[0224] Although the use of high density genome-derived microarrays on solid planar substrates is presently a preferred approach for the physical confirmation and characterization of the expression of sequences predicted to encode protein, other types of microarrays, as well as lower density macro arrays, can also be used.

[0225] Experimental verification in process 400 of the function predicted from genomic sequence in process 200 can be bioinformatic, rather than, or additional to, physical verification. Where the function desired to be identified is protein coding, as in the generation of the 13,700 single exon probes of the present invention, the predicted exons can be compared bioinformatically to sequences known or suspected of being expressed.

[0226] Thus, the sequences output from process 300 (or process 200), can be used to query expression databases, such as EST databases, SNP (“single nucleotide polymorphism”) databases, known cDNA and mRNA sequences, SAGE (“serial analysis of gene expression”) databases, and more generalized sequence databases that allow query for expressed sequences. Such query can be done by any sequence query algorithm, such as BLAST (“basic local alignment search tool”). The results of such query—including information on identical sequences and information on nonidentical sequences that have diffuse or focal regions of sequence homology to the query sequence—can then be passed directly to process 500, or used to inform analyses subsequently undertaken in process 200, process 300, or process 400.

[0227] Experimental data, whether obtained by physical or bioinformatic assay in process 400, is passed to process 500 where it is usefully related to the sequence data itself, a process colloquially termed “annotation”. Such annotation can be done using any technique that usefully relates the functional information to the sequence, as, for example, by incorporating the functional data into the record itself, by linking records in a hierarchical or relational database, by linking to external databases, or by a combination thereof. Such database techniques are well within the skill in the art.

[0228] The annotated sequence data can be stored locally, uploaded to genomic sequence database 100, and/or displayed 800.

[0229] Display of Annotated Genomic Sequence

[0230] The methods and apparatus of the present invention rapidly produce functional information from genomic sequence. As is further discussed below, we have, for example, used the methods and apparatus of the present invention to identify 13,700 exons (in 13,700 separate single exon probes) in human genomic sequence whose expression we have confirmed in at least one human tissue or cell type. Fully two-thirds of the exons belong to genes that were not then represented in existing public expression (EST, cDNA) databases. We have also used these single exon probes to identify alternative splice events in novel genes.

[0231] Coupled with the escalating pace at which sequence now accumulates, the ability rapidly to identify and confirm the function of regions of genomic DNA provided by the present invention produces a need for methods of displaying the information in meaningful ways. It is, therefore, another aspect of the present invention to provide means for displaying annotated sequence, and in particular for displaying sequence annotated according to the methods and apparatus of the present invention. Further, such display can be used as a preferred graphical user interface for electronic search, query, and analysis of such annotated sequence.

[0232] FIG. 3 schematizes visual display 80 presenting a single genomic sequence annotated according to the present invention. Because of its nominal resemblance to artistic works of Piet Mondrian, visual display 80 is alternatively described herein as a “Mondrian”.

[0233] Each of the visual elements of display 80 is aligned with respect to the genomic sequence being annotated (the “annotated sequence”). Given the number of nucleotides typically represented in an annotated sequence, representation of individual nucleotides would rarely be readable in hard copy output of display 80. Typically, therefore, the annotated sequence is schematized as rectangle 89, extending from the left border of display 80 to its right border. By convention herein, the left border of rectangle 89 represents the first nucleotide of the sequence and the right border of rectangle 89 represents the last nucleotide of the sequence.

[0234] As further discussed below, however, the Mondrian visual display of annotated sequence can serve as a convenient graphical user interface for computerized representation, analysis, and query of information stored electronically. For such use, the individual nucleotides can conveniently be linked to the X axis coordinate of rectangle 89. This permits the annotated sequence at any point within rectangle 89 readily to be viewed, either automatically—for example, by time-delayed appearance of a small overlaid window (“tool tip”) upon movement of a cursor or other pointer over rectangle 89—or through user intervention, as by clicking a mouse or other pointing device at a point in rectangle 89.

[0235] Visual display 80 is generated after user specification of the genomic sequence to be displayed. Such specification can consist of or include an accession number for a single clone (e.g., a single BAC accessioned into GenBank), wherein the starting and stopping nucleotides are thus absolutely identified, or alternatively can consist of or include an anchor or fulcrum point about which a chosen range of sequence is anchored, thus providing relative endpoints for the sequence to be displayed. For example, the user can anchor such a range about a given chromosomal map location, gene name, or even a sequence returned by query for similarity or identity to an input query sequence. When visual display 80 is used as a graphical user interface to computerized data, additional control over the first and last displayed nucleotide will typically be dynamically selectable, as by use of standard zooming and/or selection tools.

[0236] Field 81 of visual display 80 is used to present the output from process 200, that is, to present the bioinformatic prediction of those sequences having the desired function within the genomic sequence. Functional sequences are typically indicated by at least one rectangle 83 (83a, 83b, 83c), the left and right borders of which respectively indicate, by their X-axis coordinates, the starting and ending nucleotides of the region predicted to have function.

[0237] Where a single bioinformatic method or approach identifies a plurality of regions having the desired function, a plurality of rectangles 83 is disposed horizontally in field 81. Where multiple methods and/or approaches are used to identify function, each such method and/or approach can be represented by its own series of horizontally disposed rectangles 83, each such horizontally disposed series of rectangles offset vertically from those representing the results of the other methods and approaches.

[0238] Thus, rectangles 83a in FIG. 3 represent the functional predictions of a first method of a first approach for predicting function, rectangles 83b represent the functional predictions of a second method and/or second approach for predicting that function, and rectangles 83c represent the predictions of a third method and/or approach.

[0239] Where the function desired to be identified is protein coding, field 81 is used to present the bioinformatic prediction of sequences encoding protein. For example, rectangles 83a can represent the results from GRAIL or GRAIL II, rectangles 83b can represent the results from GENEFINDER, and rectangles 83c can represent the results from DICTION.

[0240] Optionally, and preferably, rectangles 83 collectively representing predictions of a single method and/or approach are identically colored and/or textured, and are distinguishable from the color and/or texture used for a different method and/or approach.

[0241] Alternatively, or in addition, the color, hue, density, or texture of rectangles 83 can be used further to report a measure of the bioinformatic reliability of the prediction. For example, many gene prediction programs will report a measure of the reliability of prediction. Thus, increasing degrees of such reliability can be indicated, e.g., by increasing density of shading. Where display 80 is used as a graphical user interface, such measures of reliability, and indeed all other results output by the program, can additionally or alternatively be made accessible through linkage from individual rectangles 83, as by time-delayed window (“tool tip” window), or by pointer (e.g., mouse)-activated link.

[0242] As described above, increased predictive reliability can be achieved by requiring consensus among methods and/or approaches to determining function. Thus, field 81 can include a horizontal series of rectangles 83 that indicate one or more degrees of consensus in predictions of function, including the combined length of the separately predicted exons that overlap in frame.

[0243] Although FIG. 3 shows three series of horizontally disposed rectangles in field 81, display 80 can include as few as one such series of rectangles and as many as can discriminably be displayed, depending upon the number of methods and/or approaches used to predict a given function. For example, addition of a fourth gene prediction program, such as GENSCAN (http://genes.mit.edu/GENSCANinfo.html), to the three gene prediction programs used in our first experiments (GRAIL, GENEFINDER, DICTION) would be accommodated by a fourth series of rectangles disposed horizontally in field 81, but offset vertically from rectangles 81a, 81b, and 81c.

[0244] Furthermore, field 81 can be used to show predictions of a plurality of different functions. However, the increased visual complexity occasioned by such display makes more useful the ability of the user to select a single function for display. When display 80 is used as a graphical user interface for computer query and analysis, such function can usefully be indicated and user-selectable, as by a series of graphical buttons or tabs (not shown in FIG. 3).

[0245] Rectangle 89 is shown in FIG. 3 as including interposed rectangle 84. Rectangle 84 represents the portion of annotated sequence for which predicted functional information has been assayed physically, with the starting and ending nucleotides of the assayed material indicated by the X axis coordinates of the left and right borders of rectangle 84. Rectangle 85, with optional inclusive circles 86 (86a, 86b, and 86c) displays the results of such physical assay.

[0246] Although a single rectangle 84 is shown in FIG. 3, physical assay is not limited to just one region of annotated genomic sequence. It is expected that an increasing percentage of regions predicted to have function by process 200 will be assayed physically, and that display 80 will accordingly, for any given genomic sequence, have an increasing number of rectangles 84 and 85, representing an increased density of sequence annotation. For example, for purposes of generating exon-specific probes for alternative splice detection, it is preferred that a plurality of exons, preferably all of the exons, that commonly belong to a single gene will be assayed experimentally for expression; accordingly, display 80 will have, for the genomic sequence encompassing such exons, a series of rectangles 84 and 85 for each of the assayed exons.

[0247] Where the function desired to be identified is protein coding, rectangle 84 identifies the sequence of the probe used to measure expression. In embodiments of the present invention where expression is measured using genome-derived single exon microarrays, rectangle 84 identifies the sequence included within the probe immobilized on the solid support surface of the microarray. As noted supra, such probe will often include a small amount of additional, synthetic, material incorporated during amplification and designed to permit reamplification of the probe, which sequence is typically not shown in display 80.

[0248] Rectangle 87 is used to present the results of bioinformatic assay of the genomic sequence. For example, where the function desired to be identified is protein coding, process 400 can include bioinformatic query of expression databases with the sequences predicted in process 200 to encode exons. And as discussed above, because bioinformatic assay presents fewer constraints than does physical assay, often the entire output of process 200 can be used for such assay, without further subsetting thereof by process 300. Therefore, rectangle 87 typically need not have separate indicators therein of regions submitted for bioinformatic assay; that is, rectangle 87 typically need not have regions therein analogous to rectangles 84 within rectangle 89.

[0249] Rectangle 87 as shown in FIG. 3 includes smaller rectangles 880 and 88. Rectangles 880 indicate regions that returned a positive result in the bioinformatic assay, with rectangles 88 representing regions that did not return such positive results. Where the function desired to be predicted and displayed is protein coding, rectangles 880 indicate regions of the predicted exons that identify sequence with significant similarity in expression databases, such as EST, SNP, SAGE databases, with rectangles 88 indicating genes novel over those identified in existing expression data bases.

[0250] Rectangles 880 can further indicate, through color, shading, texture, or the like, additional information obtained from bioinformatic assay.

[0251] For example, where the function assayed and displayed is protein coding, the degree of shading of rectangles 880 can be used to represent the degree of sequence similarity found upon query of expression databases. The number of levels of discrimination can be as few as two (identity, and similarity, where similarity has a user-selectable lower threshold). Alternatively, as many different levels of discrimination can be indicated as can visually be discriminated.

[0252] Where display 80 is used as a graphical user interface, rectangles 880 can additionally provide links directly to the sequences identified by the query of expression databases, and/or statistical summaries thereof. As with each of the precedingly-discussed uses of display 80 as a graphical user interface, it should be understood that the information accessed via display 80 need not be resident on the computer presenting such display, which often will be serving as a client, with the linked information resident on one or more remotely located servers.

[0253] Rectangle 85 displays the results of physical assay of the sequence delimited by its left and right borders.

[0254] Rectangle 85 can consist of a single rectangle, thus indicating a single assay, or alternatively, and increasingly typically, will consist of a series of rectangles (85a, 85b, 85c) indicating separate physical assays of the same sequence.

[0255] Where the function assayed is gene expression, and where gene expression is assayed as herein described using simultaneous two-color fluorescent detection of hybridization to genome-derived single exon microarrays, individual rectangles 85 can be colored to indicate the degree of expression relative to control. Conveniently, shades of green can be used to depict expression in the sample over control values, and shades of red used to depict expression less than control, corresponding to the spectra of the Cy3 and Cy5 dyes conventionally used for respective labeling thereof.

[0256] Additional functional information can be provided in the form of circles 86 (86a, 86b, 86c), where the diameter of the circle can be used to indicate a parameter different from that set forth in rectangle 85. For example, where the annotated functions are the distribution of expression of the one or more predicted exons, rectangle 85 can report expression relative to control and circle 86 can be used to report signal intensity. As discussed infra, such relative expression (expression ratio) and absolute expression (signal intensity) can be expressed using normalized values.

[0257] Where display 80 is used as a graphical user interface, rectangle 85 can be used as a link to further information about the assay. For example, where the assay is one for gene expression, each rectangle 85 can be used to link to information about the source of the hybridized mRNA, the identity of the control, raw or processed data from the microarray scan, or the like.

[0258] For purposes of illustration only, FIG. 4 shows an embodiment of display 80 showing typical color conventions when hypothetical genomic sequence is annotated with exon-specific expression data. As would of course readily be understood, the color choice is arbitrary, and alternative colors can be used.

[0259] In this typical presentation, BAC sequence (“Chip seq.”) 89 is presented in red, with the physically assayed region thereof (corresponding to rectangle 84 in FIG. 3) shown in white. Algorithmic gene predictions are shown in field 81, with predictions by GRAIL shown in green, predictions by GENEFINDER shown in blue, and predictions by DICTION shown in pink. Within rectangle 87, regions of sequence that, when used to query expression databases, return identical or similar sequences (“EST hit”) are shown as white rectangles (corresponding to rectangles 880 in FIG. 3), gray indicates low homology, and black indicates unknowns (where black and gray would correspond to rectangles 88 in FIG. 3).

[0260] Although FIGS. 3 and 4 show a single stretch of sequence, uninterrupted from left to right, longer sequences are usefully represented by vertical stacking of such individual Mondrians, as shown in FIGS. 9 and 10.

[0261] Using our visual display tool, the Mondrian, we have found that consensus in the pattern of expression of individual exons is a powerful means for identifying exons that commonly belong to a single gene. It is, therefore, another aspect of the present invention to provide methods, including methods based upon visual display, for associating exons that commonly belong to a single gene using, as the criterion for association, consensus in their patterns of expression in a plurality of tissues and/or cell types.

[0262] As further discussed in Example 3, FIG. 9 presents a Mondrian of BAC AC008172 (bases 25,000 to 130,000 shown), containing the carbamyl phosphate synthetase gene (AF154830.1), the sequence and structure of which has previously been reported. Purple background within the region shown as field 81 in FIG. 3 indicates all 37 known exons for this gene.

[0263] As can be seen, GRAIL II successfully identified 27 of the known exons (73%), GENEFINDER successfully identified 37 of the known exons (100%), while DICTION identified 7 of the known exons (19%).

[0264] Seven of the predicted exons were selected for physical assay, of which 5 successfully amplified by PCR and were sequenced. These five exons were all found to be from the same gene, the carbamyl phosphate synthetase gene (AF154830.1).

[0265] The five exons were arrayed and gene expression measured across 10 tissues. As is readily seen by visual inspection of the resulting Mondrian (FIG. 5), the five single-exon probes report identical expression ratio patterns: each exon is expressed above control (i.e., in green) in the tissues represented by the fourth, seventh, and eighth rectangles (corresponding to rectangles 85 in FIG. 3) and is expressed at or below control in the remaining tissues.

[0266] Of course, an exon that is removed or truncated by alternatively splicing in one of the assayed tissues would produce a variant expression pattern. For purposes of associating exons as belonging commonly to a single gene, however, a consensus among assayed tissues would still identify the exon as presumptively belonging to the same gene.

[0267] The methods of this aspect of the invention can, and typically will, be automated. For example, WO 99/58720, incorporated herein by reference in its entirety, describes algorithms for ordering the relatedness of a plurality of multidimensional expression data sets. The methods set forth therein can readily be adapted to ordering the relatedness of data sets, wherein each data set comprises expression ratios of an individual exon across a plurality of tissues and cell types, permitting exons with related, but not necessarily identical, patterns of expression to be classified as belonging to a common gene.

[0268] Utility of Genome-Derived Single Exon Probes and Microarrays

[0269] The methods and apparatus above-described rapidly produce functional information from genomic sequence. When the functions to be identified are protein coding and the distribution of expression of the predicted exon, the methods and apparatus of the present invention rapidly identify and confirm the expression of portions of genomic sequence that function to encode protein. Using these methods and apparatus, we have, for example, generated 13,700 single exon probes that demonstrate significant expression in one or more of eight tested human tissues or cell types.

[0270] As would immediately be appreciated by one of skill in the art, each single exon probe having demonstrable expression in one or more tissues is currently available for use in measuring the level of its exon's expression in each of the tissues in which expression has been confirmed. The utility is specific to the probe; under high stringency hybridization conditions, each probe reports the level of expression of message specifically containing that exon.

[0271] Accordingly, each single exon probe of the present invention, each of which has been shown to have demonstrable expression in one or more tissues or cell types, is currently available as a tool for specifically measuring the expression of the probe's exon in at least one tissue or cell type. Sequences of the probes and respective expression data can be found in the appended Sequence Listing and Tables 4-11, incorporated herein by reference.

[0272] Measuring tools are well known in many arts, not just in molecular biology, and are known to possess credible, specific, and substantial utility. For example, U.S. Pat. No. 6,016,191 describes and claims a tool for measuring characteristics of fluid flow in a hydrocarbon well; U.S. Pat. No. 6,042,549 describes and claims a device for measuring exercise intensity; U.S. Pat. No. 5,889,351 describes and claims a device for measuring viscosity and for measuring characteristics of a fluid; U.S. Pat. No. 5,570,694 describes and claims a device for measuring blood pressure; U.S. Pat. No. 5,930,143 describes and claims a device for measuring the dimensions of machine tools; U.S. Pat. No. 5,279,044 describes and claims a measuring device for determining an absolute position of a movable element; U.S. Pat. No. 5,186,042 describes and claims a device for measuring action force of a wheel, and U.S. Pat. No. 4,246,774 describes and claims a device for measuring the draft of smoking articles such as cigarettes.

[0273] As for those genome-derived single exon probes identified by the methods of the present invention, for which expression has not yet been demonstrated (and that are, on that basis, excluded from the appended Sequence Listing), such probes are currently available as tools for surveying tissues to detect the presence of expressed messages that contain their specific exon.

[0274] Survey tools—i.e., tools for determining the presence and/or location of a desired object by search of an area—are well known in many arts, not just in molecular biology, and are known to possess credible, specific, and substantial utility. For example, U.S. Pat. No. 6,046,800 describes and claims a device for surveying an area for objects that move; for example, U.S. Pat. No. 6,025,201 describes and claims an apparatus for locating and discriminating platelets from non-platelet particles or cells on a cell-by-cell basis in a whole blood sample; U.S. Pat. No. 5,990,689 describes and claims a device for detecting and locating anomalies in the electromagnetic protection of a system, and U.S. Pat. No. 5,984,175 describes and claims a device for detecting and identifying wearable user identification units.

[0275] It will be appreciated, of course, that those probes for which expression has been demonstrated are useful for both measurement in the tissues for which expression has been confirmed and for survey in other tissues.

[0276] It will also be appreciated that the inability to demonstrate expression of certain of the probes predicted by the methods of the present invention, making such probes more useful as survey, than as measurement, tools, confers upon these probes some of their useful advantages over prior nucleic acid probes.

[0277] Significant among such advantages is the presence of probes for novel genes.

[0278] As mentioned above and further detailed in Examples 1 and 2, infra, fully ⅔ of the exons identified using the methods of the present invention are not present in existing expression databases. And the fewer the number of tissues in which the exon can be shown to be expressed, the more likely the exon will prove to be part of a novel gene: as further discussed in Example 2, exons whose expression was measurable in only a single of the tested tissues were represented in existing expression databases at a rate of only 11%, whereas 36% of exons whose expression was measurable in 9 tissues were present in existing expression databases, and fully 45% of those exons expressed in all ten tested tissues were present in existing expressed sequence databases.

[0279] Thus, the genome-derived single exon probes of the present invention that have not yet been shown to be expressed in one of our ten standard tissues will likely contain the largest percentage of unknown genes.

[0280] And it should further be appreciated that the genome-derived single exon probes of the present invention for which significant expression has not yet been shown, and that are thus useful principally as survey tools, will later be demonstrated to be expressed in other tissues, cell types, and/or developmental stages, and will thus assume substantial additional utility as tools for measuring specific gene expression.

[0281] Either as tools for measuring gene expression or tools for surveying gene expression, the genome-derived single exon probes of the present invention have significant advantages over the cDNA or EST-based probes that are currently available for achieving these utilities.

[0282] As mentioned earlier with respect to the genome-derived single exon microarrays used to confirm expression of predicted exons, which discussion is incorporated herein by reference in its entirety, the genome-derived single exon probes of the present invention advantageously lack the biases inherent in probes drawn from EST libraries, such as expression level bias, 3′ or 5′ end-bias, bias imposed by reverse transcription, bias imposed by cloning limitations; advantageously lack the homopolymeric stretches often seen in probes derived from expressed message; advantageously lack the prokaryotic or bacteriophage vector sequence often seen in probes derived from expressed message; advantageously lack cloning artifacts; and provide a much enhanced ability to monitor the expression of individual exons, and thus to detect alternative splicing events.

[0283] The genome-derived single exon probes of the present invention are useful in constructing genome-derived single exon microarrays; the genome-derived single exon microarrays, in turn, are saleable products of manufacture that are useful for measuring and for surveying gene expression.

[0284] When included on a microarray, each genome-derived single exon probe of the present invention makes the microarray specifically useful for detecting the probe's specific exon, thus imparting upon the microarray device the ability to detect a signal where, absent such probe, it would have reported no signal. This utility makes each individual probe on such microarray akin to an antenna, circuit, firmware or software element included in an electronic apparatus, where the antenna, circuit, firmware or software element imparts upon the apparatus the ability newly and additionally to detect signal in a portion of the radio-frequency spectrum where previously it could detect no signal; such devices are known to have specific, substantial, and credible utility.

[0285] Gene expression analysis using microarrays—conventionally using microarrays having probes derived from expressed message—is well-established as useful.

[0286] For example, Kaminski et al., “Global Analysis of Gene Expression in Pulmonary Fibrosis Reveals Distinct Programs Regulating Lung Inflammation and Fibrosis,” Proc. Natl. Acad. Sci. USA 97(4):1778-83 (2000), incorporated herein by reference, describe the use of microarrays to analyze the gene expression programs that underlie pulmonary fibrosis in a mouse model; the analysis identified two distinct groups of genes involved in the time-dependent inflammatory and fibrotic responses to the drug bleomycin.

[0287] For example, Livesey et al., “Microarray Analysis of the Transcriptional Network Controlled by the Photoreceptor Homeobox Gene Crx,” Curr. Biol. 10(6):301-310 (2000), incorporated herein by reference, used microarrays to study the transcriptional network of the Crx transcription factor, which is preferentially expressed in the retina, and mutation of which results in congenital blindness or photoreceptor degeneration in humans;

[0288] the analysis identified genes differentially expressed as between mutated mice which completely lacked the mouse version of the Crx gene and normal mice.

[0289] For example, Geiss et al., “Large-scale Monitoring of Host Cell Gene Expression During HIV-1 Infection Using cDNA Microarrays,” Virology 266(1):8-16 (2000), incorporated herein by reference, used nucleic acid microarrays to monitor the expression of approximately 1500 cellular cDNAs in infected CD4⁺ T-cells: twenty cellular genes were identified as differentially expressed at 3 days post infection, and thus promising targets for development of anti-HIV drugs.

[0290] For example, Alon et al, “Broad Patterns of Gene Expression Revealed by Clustering Analysis of Tumor and Normal Colon Tissues Probed by Oligonucleotide Arrays,” Proc. Natl. Acad. Sci. USA 96(12):6745-50 (1999), incorporated herein by reference, describe use of microarrays to distinguish colon cancer samples from samples of normal colon tissue based on subtle differences in gene expression patterns, even when expression of individual genes varied only slightly between the tissues.

[0291] For example, Scherf et al., “A Gene Expression Database for the Molecular Pharmacology of Cancer,” Nat. Genet. 24(3):236-44 (2000), incorporated herein by reference, used microarrays to assess gene expression profiles in 60 human cancer cell lines used in drug discovery screens by the National Cancer Institute; the expression data were then correlated to drug responsiveness to identify particular genes, the expression of which may predict drug sensitivity and resistance.

[0292] For example, Alizadeh et al., “Distinct types of diffuse large B-cell lymphoma identified by gene expression profiling,” Nature 403(6769):503-11 (2000), incorporated herein by reference, used microarrays to stratify patients having diffuse large B-cell lymphoma according to expression patterns indicative of different stages of B-cell differentiation, providing improved diagnostic resolution.

[0293] For example, Perou et al., “Distinctive Gene Expression Patterns in Human Mammary Epithelial Cells and Breast Cancers, Proc. Natl. Acad. Sci. USA 96(16):9212-7 (1999), incorporated herein by reference, used microarrays to identify patterns of gene expression in human mammary epithelial cells growing in culture and in primary human breast tumors. Two such clusters were found to have patterns that correlated with variation in cell proliferation rates and with activation of the IFN-regulated signal transduction pathway, respectively. This analysis demonstrates that variation in gene expression patterns in human cancers can serve as a means to classify solid tumors.

[0294] For example, Sgroi et al., “In vivo Gene Expression Profile Analysis of Human Breast Cancer Progression,” Cancer Res. 59(22):5656-61 (1999), incorporated herein by reference, used cDNA microarrays to monitor in vivo gene expression levels in purified normal, invasive, and metastatic breast cell populations from a single patient; the analysis demonstrated that microarrays can be used to track gene expression changes associated with progression of cancer, with diagnostic, prognostic, and therapeutic implications.

[0295] For example, Wang et al., “Identification of Genes Differentially Over-expressed in Lung Squamous Cell Carcinoma Using Combination of cDNA Subtraction and Microarray Analysis,” Oncogene 19(12): 1519-28 (2000), incorporated herein by reference, used a combination of cDNA library subtraction and microarrays to identify seventeen genes preferentially over-expressed in lung squamous cell carcinoma, including four novel genes; the analysis demonstrated that microarrays can be used to identify tumor-specific genes useful for diagnosis and therapy.

[0296] For example, Whitney et al., “Analysis of Gene Expression in Multiple Sclerosis Lesions Using cDNA Microarrays,” Ann. Neurol. 46(3):425-8 (1999), incorporated herein by reference, used microarrays to monitor the expression pattern of over 5,000 genes and compare the gene expression profile of normal white matter to that found in acute lesions from the brain of a single patient with multiple sclerosis (MS); sixty-two differentially expressed genes were identified.

[0297] For example, Shelton et al., “Microarray Analysis of Replicative Senescence,” Curr. Biol. 9(17):939-45 (1999), incorporated herein by reference, used microarrays to study gene expression associated with cell aging, or senescence, an arrested state in which cells remain viable but stop replicating and display an altered pattern of gene and protein expression, in dermal fibroblasts, retinal pigrment epithelial cells, and vascular endothelial cells. Comparison of early- and late-passage cells stimulated with serum showed specific deficits in the early and mid G1 response of senescent cells, demonstrating that microarrays can be used to identify genes involved in the cellular aging process.

[0298] For example, Voehringer et al., “Gene Microarray Identification of Redox and Mitochondrial Elements That Control Resistance or Sensitivity to Apoptosis,” Proc. Natl. Acad. Sci. USA 97(6):2680-5 (2000), incorporated herein by reference, used microarrays to study gene expression patterns in an apoptosis-sensitive and apoptosis-resistant murine B cell lymphoma model system before and after irradiation; the analysis demonstrated that microarrays can be used to explore a fundamental cell biological process, programmed cell death, that figures prominently in the ability of cancer cells to survive exposure to chemotherapeutic agents and tumor killing radiation.

[0299] For example, Heller et al., “Discovery and Analysis of Inflammatory Disease-related Genes Using cDNA Microarrays,” Proc. Natl. Acad. Sci. USA 94(6):2150-5 (1997), incorporated herein by reference, used cDNA microarrays to profile gene expression associated with rheumatoid arthritis and inflammatory bowel disease; the cytokine IL-3, the chemokine Gro alpha, and the metalloproteinase matrix metallo-elastase were implicated in both diseases, whereas tissue inhibitor of metalloproteinase 1, ferritin light chain, and manganese superoxide dismutase genes were identified as differentially expressed between the two diseases.

[0300] For example, Nuwaysir et al, “Microarrays and Toxicology: the Advent of Toxicogenomics,” Mol. Carcinog. 24(3):153-9 (1999), incorporated herein by reference, used cDNA microarrays to measure gene expression as a means to identify compounds potentially toxic to humans and the environment, and to determine their mechanism of action.

[0301] For example, Bartosiewicz et al., “Development of a Toxicological Gene Array and Quantitative Assessment of This Technology,” Arch. Biochem. Biophys. 376(l):66-73 (2000), incorporated herein by reference, used microarrays containing expressed sequence tags for xenobiotic metabolizing enzymes, proteins associated with glutathione regulation, DNA repair enzymes, heat shock proteins, and housekeeping genes to examine gene expression in mouse liver in response to administration of beta-naphthoflavone (beta-NF); the analysis demonstrated that microarrays can be used to observe the effects of toxic compounds on gene expression in organs, such as liver, responsible for their metabolism.

[0302] In such toxicologic screens, and analogously in microarray-based gene expression screens of pharmacologic drug candidates upon cells, each probe provides specific useful data. In particular, it should be appreciated that even those probes that show no change in expression are as informative as those that do change, serving, in essence, as negative controls.

[0303] For example, where gene expression analysis is used to assess toxicity of chemical agents on cells, the failure of the agent to change a gene's expression level is evidence that the drug likely does not affect the pathway of which the gene's expressed protein is a part. Analogously, where gene expression analysis is used to assess side effects of pharmacologic agents—whether in lead compound discovery or in subsequent screening of lead compound derivatives—the inability of the agent to alter a gene's expression level is evidence that the drug does not affect the pathway of which the gene's expressed protein is a part.

[0304] WO 99/58720, incorporated herein by reference in its entirety, provides methods for quantifying the relatedness of a first and second gene expression profile and for ordering the relatedness of a plurality of gene expression profiles. The methods so described permit useful information to be extracted from a greater percentage of the individual gene expression measurements from a microarray than methods previously used in the art. Furthermore, the function of the genes need not be known for the level of expression to provide useful information.

[0305] Other uses of microarrays are described in Gerhold et al., “DNA Chips: Promising Toys Have Become Powerful Tools,” Trends Biochem. Sci. 24(5):168-173 (1999) and Zweiger, “Knowledge Discovery in Gene-expression-microarray Data: Mining the Information Output of the Genome,” Trends Biotechnol. 17(11):429-436 (1999); Schena (ed.), DNA Microarrays: A Practical Approach (Practical Approach Series), Oxford University Press (1999) (ISBN: 0199637768); Nature Genet. 21 (l)(suppl): 1-60 (1999); Schena (ed.), Microarray Biochip: Tools and Technology, Eaton Publishing Company/BioTechniques Books Division (2000) (ISBN: 1881299376), the disclosures of each of which is incorporated herein by reference in its entirety.

[0306] The genome-derived single exon microarrays of the present invention have each of the above-described well-established utilities in gene expression analysis.

[0307] In addition, the genome-derived single exon microarrays of the present invention present substantial and useful advantages in the conduct of such analyses over the devices conventional in the art. Those advantages include each of the advantages over EST-based and in situ synthesized oligo-based microarrays that were discussed hereinabove with respect to conformation of expression of predicted exons, which discussion is incorporated herein by reference in its entirety, including, inter alia: inclusion of novel probes; absence of the biases inherent in EST libraries, such as expression level bias, 3′ or 5′ end-bias, bias imposed by reverse transcription or by cloning limitations; the absence from the probes of homopolymeric stretches; the absence from the probes of prokaryotic or bacteriophage vector sequence; the absence from the probes of cloning artifacts; the ability to monitor the expression of individual exons; and the uniformity in size and in duplex melting temperature of the arrayed probes.

[0308] Gene expression analysis by microarray hybridization is, of course, principally a laboratory-based art. Devices and apparatus used principally in laboratories to facilitate laboratory research are well-established to possess specific, substantial, and credible utility. For example, U.S. Pat. No. 6,001,233 describes and claims a gel electrophoresis apparatus having a cam-activated clamp; for example, U.S. Pat. No. 6,051,831 describes and claims a high mass detector for use in time-of-flight mass spectrometers; for example, U.S. Pat. No. 5,824,269 describes and claims a flow cytometer—as is well known, few gel electrophoresis apparatuses, TOF-MS devices, or flow cytometers are sold for home use.

[0309] Indeed, and in particular, nucleic acid microarrays, as devices intended for laboratory use in measuring gene expression, are well-established to have specific, substantial and credible utility. Thus, the genome-derived single exon microarrays of the present invention have at least the specific, substantial and credible utilities of the microarrays claimed as devices and articles of manufacture in the following U.S. patents, the disclosures of each of which is incorporated herein by reference: U.S. Pat. Nos. 5,445,934 (“Array of oligonucleotides on a solid substrate”); 5,744,305 (“Arrays of materials attached to a substrate”); and 6,004,752 (“Solid support with attached molecules”).

[0310] The genome-derived single exon nucleic acid microarrays of the present invention have further utility as products of manufacture that are specifically useful in methods of doing business.

[0311] For example, a first such method comprises selling and/or licensing genome-derived single-exon microarrays to a customer desiring to measure gene expression, in consideration of fees paid by such customer.

[0312] Such methods can usefully be implemented on a computer. In such computerized embodiments, the method comprises: making available for computerized query a database having a record corresponding to each genome-derived single exon microarray available for sale and/or license; responding to a customer query of the database by returning to the customer at least one record, or an identifier of that record, that best meets the customer query criteria; and offering for sale or license to the querying customer the genome-derived single exon microarray identified in that at least one record.

[0313] This method can usefully be implemented by making the database resident on a server computer and available for query by a remotely located client, for example by query over the Internet, an intranet, LAN or WAN. The method can usefully include a later step of permitting the customer to place an order for the identified microarray. This later step can usefully employ the one-click method described and claimed in U.S. Pat. No. 5,960,411, incorporated herein by reference in its entirety.

[0314] The genome-derived single exon microarrays of the present invention, as final products of manufacture, also have utility in a second method of doing business, the method comprising designing and/or manufacturing a genome-derived single exon microarray, in consideration of fees paid by those desiring a custom nucleic acid microarray, that has genome-derived single exon probes sharing at least one common attribute.

[0315] Such method can usefully be implemented on a computer. In such computerized embodiments, the method comprises: receiving from a customer at least one criterion for common probe attribute, such as tissue of expression; using the at least one criterion to identify within a database having records corresponding to available genome-derived single exon probes those that meet the criterion; and then disposing such identified probes on a support substrate capable of functioning in microarray hybridization experiments.

[0316] One useful common probe attribute is expression in a given tissue or cell type. Each of Examples 5-12, infra, presents (in Tables 4-11, respectively) genome-derived single exon probes demonstrated to have significant expression in the identified tissue or cell type; the probes presented therein are thus specifically useful in such a method.

[0317] The genome-derived single exon microarrays of the present invention are further useful in a third method of doing business, wherein expression data obtained from use of the genome-derived single exon probes and genome-derived single exon microarrays of the present invention are made available by subscription to customers that desire such information, in consideration for fees.

[0318] This aspect of the invention can usefully be implemented on a computer. In such computerized embodiments, the method comprises: making available to a subscription client for computerized query a database having records containing expression data generated using genome-derived single exon probes disposed upon microarrays; and responding to a customer query of the database by returning to the customer at least one record, or an identifier of the at least one record, that best meets the customer query criteria. Each of examples 5-12 presents records from such a database, organized by tissue and/or cell type, and collectively containing expression data for 13,700 single exon probes having unique exons.

[0319] The response to the customer in this method can usefully return only the amount of information minimally required to permit the customer to decide whether to pay for further information from the identified record or records. The method can also usefully include a later step of permitting the customer to place an order for the identified microarray. This later step can usefully employ the one-click method described and claimed in U.S. Pat. No. 5,960,411, incorporated herein by reference in its entirety. The third method of doing business, in each of its embodiments, can usefully be performed by making the database resident on a server computer and available for query by a remotely located client, for example by query over the Internet, an intranet, a LAN or WAN.

[0320] Each single exon probe has specific utility in such a method, providing information not hitherto present therein. Furthermore, the specific utility is amplified for each successive addition, it being well-established in the database and network arts that each new record or node added to the database or network increases the value of all preceding records or nodes.

[0321] The genome-derived single exon nucleic acid probes and microarrays of the present invention have the further real world use in a fourth method of doing business, comprising attracting investment to a company that makes and sells the same. One of ordinary skill in the art would immediately appreciate from the fact that the market capitalization of Affymetrix, Inc. (Sunnyvale, Calif.) on May 14, 2001 was $1.692 billion, although earnings per share were $−1.05, and from the fact that the market capitalization of Incyte Genomics, Inc. (Palo Alto, Calif.) on May 14, 2001 was $1.182 billion, with an earnings/share of −$0.61, that nucleic acid microarrays attract investor dollars without expectation of their sale generating profits.

[0322] Thus, the genome-derived single exon nucleic acid microarrays of the present invention are further useful in a method of doing business, the method comprising: advertising the availability for distribution, sale, or license of genome-derived single exon probes, microarrays, and/or data therefrom; and then selling stock in the company.

[0323] This method can usefully be implemented on a computer, wherein the advertising is performed on an Internet web page, in an Internet chat room, and/or a Usenet newsgroup; and wherein the stock sale is consummated through an electronic brokerage.

[0324] The genome-derived single exon probes and microarrays of the present invention have the further credible, specific, and substantial real world utility of providing income to the drafter of the patent specification in which the probes and microarrays are specifically described and claimed. Specificity of this utility derives from the requirements of 35 U.S.C. § § 102(a), (b), (f) and (g); given the present structure of legal compensation in the United States, the income, and thus utility, is substantial; one or ordinary skill in the art would find the compensation not incredible.

[0325] The genome-derived single exon probes of the present invention have additional utilities.

[0326] For example, as mentioned above, the single exon probes are particularly useful for identifying and characterizing alternative splicing events, as further described in commonly owned and copending U.S. patent application Ser. No. 09/632,366, filed Aug. 3, 2000, the disclosure of which is incorporated herein by reference in its entirety.

[0327] As another example, the single exon probes of the present invention can be used as hybridization probes to detect, characterize, and quantify copy number of their included exon in samples of genomic nucleic acid.

[0328] Thus, the probes of the present invention can be used to detect and characterize gross alterations in the genomic locus that includes their exon, such as deletions, insertions, translocations, and duplications through fluorescence in situ hybridization (FISH) to chromosome spreads. See, e.g., Andreeff et al. (eds.), Introduction to Fluorescence In Situ Hybridization: Principles and Clinical Applications, John Wiley & Sons (1999) (ISBN: 0471013455), the disclosure of which is incorporated herein by reference in its entirety.

[0329] The probes of the present invention can be used to assess smaller genomic alterations using, e.g., Southern blot detection of restriction fragment length polymorphisms.

[0330] The probes can also be used to isolate nucleic acids that include their exon, both from transcript-derived nucleic acid samples, such as pools or libraries of cDNA, and from genomic DNA-derived nucleic acid samples.

[0331] The probes of the present invention can also be used to prime synthesis of nucleic acid, for purpose of either analysis or isolation, using mRNA, cDNA, or genomic DNA as template.

[0332] For use as primers, at least 17 contiguous nucleotides of the probe will typically be used. Often, at least 18, 19, or 20 contiguous nucleotides of the probe will be used, and on occasion at least 20, 22, 24, or 25 contiguous nucleotides of exon will be used, and even 30 nucleotides or more of the probe can be used to prime specific synthesis.

[0333] The nucleic acid primers of the present invention can be used, for example, to prime first strand cDNA synthesis on an mRNA template. In such case, the primer will typically be drawn from the exonic portion of the single exon probe.

[0334] Such primer extension can be done directly to analyze the message. Alternatively, synthesis on an mRNA template can be done to produce first strand cDNA. The first strand cDNA can thereafter be used, inter alia, directly as a single-stranded probe, as a template for sequencing—permitting identification of alterations, including deletions, insertions, and substitutions, both normal allelic variants and mutations associated with abnormal phenotypes—or as a template, either for second strand cDNA synthesis (e.g., as an antecedent to insertion into a cloning or expression vector), or for amplification.

[0335] The nucleic acid primers of the present invention can also be used, for example, to prime single base extension (SBE) for SNP detection (see, e.g., U.S. Pat. No. 6,004,744, the disclosure of which is incorporated herein by reference in its entirety).

[0336] The nucleic acid primers of the present invention can also be used to prime specific amplification of the probe, or portions thereof, using transcript-derived or genomic DNA as template.

[0337] Primer-directed amplification methods are now well-established in the art. Methods for performing the polymerase chain reaction (PCR) are compiled, inter alia, in McPherson, PCR (Basics: From Background to Bench), Springer Verlag (2000) (ISBN: 0387916008); Innis et al. (eds.), PCR Applications: Protocols for Functional Genomics, Academic Press (1999) (ISBN: 0123721857); Gelfand et al. (eds.), PCR Strategies, Academic Press (1998) (ISBN: 0123721822); Newton et al., PCR, Springer-Verlag New York (1997) (ISBN: 0387915060); Burke (ed.), PCR: Essential Techniques, John Wiley & Son Ltd (1996) (ISBN: 047195697X); White (ed.), PCR Cloning Protocols: From Molecular Cloning to Genetic Engineering, Vol. 67, Humana Press (1996) (ISBN: 0896033430); McPherson et al. (eds.), PCR 2: A Practical Approach, Oxford University Press, Inc. (1995) (ISBN: 0199634254), the disclosures of which are incorporated herein by reference in their entireties.

[0338] Methods for performing RT-PCR are collected, e.g., in Siebert et al. (eds.), Gene Cloning and Analysis by RT-PCR, Eaton Publishing Company/Bio Techniques Books Division, 1998 (ISBN: 1881299147); Siebert (ed.), PCR Technique:RT-PCR, Eaton Publishing Company/BioTechniques Books (1995) (ISBN:1881299139), the disclosure of which is incorporated herein by reference in its entirety.

[0339] Isothermal amplification approaches, such as rolling circle amplification, are also now well-described. See, e.g., Schweitzer et al., Curr. Opin. Biotechnol. 12(1):21-7 (2001); U.S. Pat. Nos. 5,854,033 and 5,714,320 and international patent publications WO 97/19193 and WO 00/15779, the disclosures of which are incorporated herein by reference in their entireties. Rolling circle amplification can be combined with other techniques to facilitate SNP detection. See, e.g., Lizardi et al., Nature Genet. 19(3):225-32 (1998).

[0340] Nucleic acids of the present invention, inserted into vectors that flank the nucleic acid insert with a phage promoter, such as T7, T3, or SP6 promoter, can be used to drive in vitro expression of RNA complementary to either strand of the nucleic acids of the present invention. The RNA can be used, inter alia, as a single-stranded probe, to effect subtraction, or for in vitro translation.

[0341] Additionally, the nucleic acids of the present invention can be used to express the ORF-encoded peptide, or fragments thereof, either alone, or as part of fusion proteins.

[0342] Protein expression can be effected in eukaryotic or in prokaryotic cells using vectors, host cells, and methods well known in the art.

[0343] Expressed in vitro, the ORF-encoded peptide or fusion thereof can thereafter be isolated, to be used, inter alia, as a standard in immunoassays specific for the ORF-encoded peptide; to be used as a therapeutic agent, e.g., to be administered as passive replacement therapy in individuals deficient in the protein of which the ORF-encoded peptide is an active moiety or to be administered as a vaccine; to be used for in vitro production of specific antibody, the antibody thereafter to be used, e.g., as an analytical reagent for detection and quantitation of proteins containing the ORF-encoded peptide or to be used as an immunotherapeutic agent.

[0344] The isolated nucleic acids of the present invention (genome-derived single exon probes) can also be used to drive in vivo expression of the ORF-encoded peptides of the present invention. In vivo expression can be driven from a vector—typically a viral vector, often a vector based upon a replication incompetent retrovirus, an adenovirus, or an adeno-associated virus (AAV)—for purpose of gene therapy. In vivo expression can also be driven from plasmid vectors, including for purpose of “naked” nucleic acid vaccination, as further described in U.S. Pat. Nos. 5,589,466; 5,679,647; 5,804,566; 5,830,877; 5,843,913; 5,880,104; 5,958,891; 5,985,847; 6,017,897; 6,110,898; 6,204,250, the disclosures of which are incorporated herein by reference in their entireties.

[0345] The nucleic acids of the present invention can also be used for antisense inhibition of translation. See Phillips (ed.), Antisense Technology, Part B, Methods in Enzymology Vol. 314, Academic Press, Inc. (1999) (ISBN: 012182215X); Phillips (ed.), Antisense Technology Part A, Methods in Enzymology Vol. 313, Academic Press, Inc. (1999) (ISBN: 0121822141); Hartmann et al. (eds.), Manual of Antisense Methodology (Perspectives in Antisense Science), Kluwer Law International (1999) (ISBN:079238539X); Stein et al. (eds.), Applied Antisense Oligonucleotide Technology, Wiley-Liss (cover (1998) (ISBN: 0471172790); Agrawal et al. (eds.), Antisense Research and Application, Springer-Verlag New York, Inc. (1998) (ISBN: 3540638334); Lichtenstein et al. (eds.), Antisense Technology: A Practical Approach, Vol. 185, Oxford University Press, INC. (1998) (ISBN: 0199635838); Gibson (ed.), Antisense and Ribozyme Methodology: Laboratory Companion, Chapman & Hall (1997) (ISBN: 3826100794); Chadwick et al. (eds.), Oligonucleotides as Therapeutic Agents—Symposium No. 209, John Wiley & Son Ltd (1997) (ISBN: 0471972797), the disclosures of which are incorporated herein by reference in their entireties.

[0346] The single exon probes of the present invention, and fragments thereof, can be integrated non-homologously into the genome of somatic cells, e.g. CHO cells, COS cells, or 293 cells, with or without amplification of the insertional locus, in order, e.g., to create stable cell lines capable of producing the ORF-encoded peptides of the present invention.

[0347] The single exon probes of the present invention, and fragments thereof, can also be used for targeted gene correction or alteration, possibly by cellular mechanisms different from those engaged during homologous recombination.

[0348] For example, partially duplexed RNA/DNA chimeras have been shown to have utility in targeted gene correction, U.S. Pat. Nos. 5,945,339, 5,888,983, 5,871,984, 5,795,972, 5,780,296, 5,760,012, 5,756,325, 5,731,181, the disclosures of which are incorporated herein by reference in their entireties. So too have small oligonucleotides fused to triplexing domains have been shown to have utility in targeted gene correction, Culver et al., “Correction of chromosomal point mutations in human cells with bifunctional oligonucleotides,” Nature Biotechnol. 17(10):989-93 (1999), as have oligonucleotides having modified terminal bases or modified terminal internucleoside bonds, Gamper et al., Nucl. Acids Res. 28(21):4332-9 (2000), the disclosures of which are incorporated herein by reference.

[0349] Genome-Derived Single Exon Probes

[0350] In light of the above-described credible, specific, and substantial utilities, it is an aspect of the present invention to provide genome-derived single exon nucleic acid probes. The invention particularly provides genome-derived single-exon probes known to be expressed in one or more tissues. In particular embodiments, the present invention provides human single-exon probes that include specifically-hybridizable fragments of the exons presented in SEQ ID NOs: 13,701-27,400, wherein the fragment hybridizes at high stringency (under high stringency conditions) to an expressed human gene. In particular embodiments, the invention provides single exon probes having SEQ ID NOs: 1-13,700.

[0351] It will be appreciated that the Sequence Listing appended hereto and incorporated herein by reference presents, by convention, only that strand of the probe and exon sequences that can be directly translated, reading from 5′ to 3′ end. As would be well understood by one of skill in the art, single stranded probes must be complementary in sequence to the target; it is well within the skill in the art to determine such complementary sequence. It will further be understood that double stranded probes can be used in both solution-phase hybridization and microarray-based hybridization if suitably denatured.

[0352] Thus, it is an aspect of the present invention to provide single-stranded nucleic acid probes that have sequence complementary to those described herein above and below, and double-stranded probes one strand of which has sequence complementary to the probes described herein.

[0353] Unless otherwise indicated, each nucleotide sequence is set forth herein as a sequence of deoxyribonucleotides. It is intended, however, that the given sequence be interpreted as would be appropriate to the polynucleotide composition: for example, if the isolated nucleic acid is composed of RNA, the given sequence intends ribonucleotides, with uridine substituted for thymidine.

[0354] Unless otherwise indicated, nucleotide sequences of the isolated nucleic acids of the present invention were determined by sequencing a DNA molecule that had resulted, directly or indirectly, from at least one enzymatic polymerization reaction (e.g., reverse transcription and/or polymerase chain reaction) using an automated sequencer (such as the MegaBACE□ 1000, Molecular Dynamics, Sunnyvale, Calif., USA), or by reliance upon such sequence or upon genomic sequence prior-accessioned into a public database. Unless otherwise indicated, all amino acid sequences of the polypeptides of the present invention were predicted by translation from the nucleic acid sequences so determined.

[0355] As a consequence, any nucleic acid sequence presented herein may contain errors introduced by erroneous incorporation of nucleotides during polymerization, by erroneous base calling by the automated sequencer (although such sequencing errors have been minimized for the nucleic acids directly determined herein, unless otherwise indicated, by the sequencing of each of the complementary strands of a duplex DNA), or by similar errors accessioned into the public database.

[0356] Furthermore, single nucleotide polymorphisms (SNPs) occur frequently in eukaryotic genomes—more than 1.4 million SNPs have already identified in the human genome, International Human Genome Sequencing Consortium, Nature 409:860-921 (2001)—and the sequence determined from one individual of a species may differ from other allelic forms present within the population. Additionally, small deletions and insertions, rather than single nucleotide polymorphisms, are not uncommon in the general population, and often do not alter the function of the protein.

[0357] Accordingly, it is an aspect of the present invention to provide nucleic acids not only identical in sequence to those described with particularity herein, but also to provide isolated nucleic acids at least about 90% identical in sequence to those described with particularity herein, typically at least about 91%, 92%, 93%, 94%, or 95% identical in sequence to those decribed with particularity herein, usefully at least about 96%, 97%, 98%, or 99% identical in sequence to those described with particularity herein, and, most conservatively, at least about 99.5%, 99.6%, 99.7%, 99.8% and 99.9% identical in sequence to those described with particularity herein. These sequence variants can be naturally occurring or can result from human intervention, as by random or directed mutagenesis.

[0358] For purposes herein, percent identity of two nucleic acid sequences is determined using the procedure of Tatiana et al., “Blast 2 sequences—a new tool for comparing protein and nucleotide sequences”, FEMS Microbiol Lett. 174:247-250 (1999), which procedure is effectuated by the computer program BLAST 2 SEQUENCES, available online at

[0359] http://www.ncbi.nlm.nih.gov/blast/b12seq/b12.html.

[0360] To assess percent identity of nucleic acids, the BLASTN module of BLAST 2 SEQUENCES is used with default values of (i) reward for a match: 1; (ii) penalty for a mismatch: −2; (iii) open gap 5 and extension gap 2 penalties; (iv) gap X_dropoff 50 expect 10 word size 11 filter, and both sequences are entered in their entireties.

[0361] As is well known, the genetic code is degenerate, with each amino acid except methionine translated from a plurality of codons, thus permitting a plurality of nucleic acids of disparate sequence to encode the identical protein. As is also well known, codon choice for optimal expression varies from species to species. The isolated nucleic acids of the present invention being useful for expression of ORFs encoded by the exons present within the probes (ORF-encoded peptides), it is, therefore, another aspect of the present invention to provide isolated isolated nucleic acids that encode the ORF-encoded peptides, and portions thereof, not only identical in sequence to those described with particularity herein, but degenerate variants thereof as well.

[0362] As is also well known, amino acid substitutions occur frequently among natural allelic variants, with conservative substitutions often occasioning only de minimis change in protein function.

[0363] Accordingly, it is an aspect of the present invention to provide nucleic acids not only identical in sequence to those described with particularity herein, but also to provide isolated nucleic acids that encode the ORF-encoded peptides, and fragments thereof, having conservative amino acid substitutions. It is a further aspect to provide nucleic acids that encode the ORF-encoded peptides having moderately conservative amino acid substitutions.

[0364] Although there are a variety of metrics for calling conservative amino acid substitutions, based primarily on either observed changes among evolutionarily related proteins or on predicted chemical similarity, for purposes herein a conservative replacement is any change having a positive value in the PAM250 log-likelihood matrix reproduced herein below (see Gonnet et al., Science 256(5062):1443-5 (1992)):

$$\begin{matrix} & A & R & N & D & C & Q & E & G & H & I & L & K & M & F & P & S & T & W & Y & V \\ A & 2 & - 1 & 0 & 0 & 0 & 0 & 0 & 0 & - 1 & - 1 & - 1 & 0 & - 1 & - 2 & 0 & 1 & 1 & - 4 & - 2 & 0 \\ R & - 1 & 5 & 0 & 0 & - 2 & 2 & 0 & - 1 & 1 & - 2 & - 2 & 3 & - 2 & - 3 & - 1 & 0 & 0 & - 2 & - 2 & - 2 \\ N & 0 & 0 & 4 & 2 & - 2 & 1 & 1 & 0 & 1 & - 3 & - 3 & 1 & - 2 & - 3 & - 1 & 1 & 0 & - 4 & - 1 & - 2 \\ D & 0 & 0 & 2 & 5 & - 3 & 1 & 3 & 0 & 0 & - 4 & - 4 & 0 & - 3 & - 4 & - 1 & 0 & 0 & - 5 & - 3 & - 3 \\ C & 0 & - 2 & - 2 & - 3 & 12 & - 2 & - 3 & - 2 & - 1 & - 1 & - 2 & - 3 & - 1 & - 1 & - 3 & 0 & 0 & - 1 & 0 & 0 \\ Q & 0 & 2 & 1 & 1 & - 2 & 3 & 2 & - 1 & 1 & - 2 & - 2 & 2 & - 1 & - 3 & 0 & 0 & 0 & - 3 & - 2 & - 2 \\ E & 0 & 0 & 1 & 3 & - 3 & 2 & 4 & - 1 & 0 & - 3 & - 3 & 1 & - 2 & - 4 & 0 & 0 & 0 & - 4 & - 3 & - 2 \\ G & 0 & - 1 & 0 & 0 & - 2 & - 1 & - 1 & 7 & - 1 & - 4 & - 4 & - 1 & - 4 & - 5 & - 2 & 0 & - 1 & - 4 & - 4 & - 3 \\ H & - 1 & 1 & 1 & 0 & - 1 & 1 & 0 & - 1 & 6 & - 2 & - 2 & 1 & - 1 & 0 & - 1 & 0 & 0 & - 1 & 2 & - 2 \\ I & - 1 & - 2 & - 3 & - 4 & - 1 & - 2 & - 3 & - 4 & - 2 & 4 & 3 & - 2 & 2 & 1 & - 3 & - 2 & - 1 & - 2 & - 1 & 3 \\ L & - 1 & - 2 & - 3 & - 4 & - 2 & - 2 & - 3 & - 4 & - 2 & 3 & 4 & - 2 & 3 & 2 & - 2 & - 2 & - 1 & - 1 & 0 & 2 \\ K & 0 & 3 & 1 & 0 & - 3 & 2 & 1 & - 1 & 1 & - 2 & - 2 & 3 & - 1 & - 3 & - 1 & 0 & 0 & - 4 & - 2 & - 2 \\ M & - 1 & - 2 & - 2 & - 3 & - 1 & - 1 & - 2 & - 4 & - 1 & 2 & 3 & - 1 & 4 & 2 & - 2 & - 1 & - 1 & - 1 & 0 & 2 \\ F & - 2 & - 3 & - 3 & - 4 & - 1 & - 3 & - 4 & - 5 & 0 & 1 & 2 & - 3 & 2 & 7 & - 4 & - 3 & - 2 & 4 & 5 & 0 \\ P & 0 & - 1 & - 1 & - 1 & - 3 & 0 & 0 & - 2 & - 1 & - 3 & - 2 & - 1 & - 2 & - 4 & 8 & 0 & 0 & - 5 & - 3 & - 2 \\ S & 1 & 0 & 1 & 0 & 0 & 0 & 0 & 0 & 0 & - 2 & - 2 & 0 & - 1 & - 3 & 0 & 2 & 2 & - 3 & - 2 & - 1 \\ T & 1 & 0 & 0 & 0 & 0 & 0 & 0 & - 1 & 0 & - 1 & - 1 & 0 & - 1 & - 2 & 0 & 2 & 2 & - 4 & - 2 & 0 \\ W & - 4 & - 2 & - 4 & - 5 & - 1 & - 3 & - 4 & - 4 & - 1 & - 2 & - 1 & - 4 & - 1 & 4 & - 5 & - 3 & - 4 & 14 & 4 & - 3 \\ Y & - 2 & - 2 & - 1 & - 3 & 0 & - 2 & - 3 & - 4 & 2 & - 1 & 0 & - 2 & 0 & 5 & - 3 & - 2 & - 2 & 4 & 8 & - 1 \\ V & 0 & - 2 & - 2 & - 3 & 0 & - 2 & - 2 & - 3 & - 2 & 3 & 2 & - 2 & 2 & 0 & - 2 & - 1 & 0 & - 3 & - 1 & 3\end{matrix}$$

[0365] For purposes herein, a “moderately conservative” replacement is any change having a nonnegative value in the PAM250 log-likelihood matrix reproduced herein above.

[0366] As is also well known in the art, relatedness of nucleic acids can also be characterized using a functional test, the ability of the two nucleic acids to base-pair to one another at defined hybridization stringencies.

[0367] It is, therefore, another aspect of the invention to provide isolated nucleic acids not only identical in sequence to those described with particularity herein, but also to provide isolated nucleic acids (“cross-hybridizing nucleic acids”) that hybridize under high stringency conditions (as defined herein) to all or to a portion of the nucleic acids of the present invention, as set forth in the appended Sequence Listing (“reference nucleic acids”). It is a further aspect of the invention to provide isolated nucleic acids that hybridize under moderate stringency conditions to all or to a protion of the nucleic acids of the present invention, as set forth in the appended Sequence Listing (“reference nucleic acids”).

[0368] Such cross-hybridizing nucleic acids are useful, inter alia, as probes for, and to drive expression of, proteins related to the ORF-encoded peptides of the present invention as alternative isoforms, homologues, paralogues, and orthologues. Particularly preferred orthologues are those from other primate species, such as chimpanzee, rhesus macaque, baboon, and gorilla, from rodents, such as rats, mice, guinea pigs, and from livestock, such as cow, pig, sheep, horse, goat.

[0369] The hybridizing portion of the reference nucleic acid is typically at least 15 nucleotides in length, often at least 17 nucleotides in length. Often, however, the hybridizing portion of the reference nucleic acid is at least 20 nucleotides in length, 25 nucleotides in length, and even 30 nucleotides, 35 nucleotides, 40 nucleotides, and 50 nucleotides in length. Of course, cross-hybridizing nucleic acids that hybridize to a larger portion of the reference nucleic acid—for example, to a portion of at least 50 nt, at least 100 nt, at least 150 nt, 200 nt, 250 nt, 300 nt, 350 nt, 400 nt, 450 nt, or 500 nt or more—or even to the entire length of the reference nucleic acid, are also useful.

[0370] The hybridizing portion of the cross-hybridizing nucleic acid is at least 75% identical in sequence to at least a portion of the reference nucleic acid. Typically, the hybridizing portion of the cross-hybridizing nucleic acid is at least 80%, often at least 85%, 86%, 87%, 88%, 89% or even at least 90% identical in sequence to at least a portion of the reference nucleic acid. Often, the hybridizing portion of the cross-hybridizing nucleic acid iiiwill be at least 91%, 92%, 93%, 94%, 95%, 96%, 97%, 98%, or 99% identical in sequence to at least a portion of the reference nucleic acid sequence. At times, the hybridizing portion of the cross-hybridizing nucleic acid will be at least 99.5% identical in sequence to at least a portion of the reference nucleic acid.

[0371] The invention also provides fragments of various of the nucleic acids set forth in the appended Sequence Listing (“reference nucleic acids”).

[0372] By “fragments” of a reference nucleic acid is here intended isolated nucleic acids, however obtained, that have a nucleotide sequence identical to a portion of the reference nucleic acid sequence, which portion is at least 17 nucleotides and less than the entirety of the reference nucleic acid. As so defined, “fragments” need not be obtained by physical fragmentation of the reference nucleic acid, although such provenance is not thereby precluded.

[0373] In theory, an oligonucleotide of 17 nucleotides is of sufficient length as to occur at random less frequently than once in the three gigabase human genome, and thus to provide a nucleic acid probe that can uniquely identify the reference sequence in a nucleic acid mixture of genomic complexity. As is well known, further specificity can be obtained by probing nucleic acid samples of subgenomic complexity, and/or by using plural fragments as short as 17 nucleotides in length collectively to prime amplification of nucleic acids, as, e.g., by polymerase chain reaction (PCR).

[0374] As is well known in the art, nucleic acid fragments that encode at least 6 contiguous amino acids (i.e., fragments of 18 nucleotides or more) are useful in directing the expression or the synthesis of peptides that have utility in mapping the epitopes of the protein encoded by the reference nucleic acid. See, e.g., Geysen et al., “Use of peptide synthesis to probe viral antigens for epitopes to a resolution of a single amino acid,” Proc. Natl. Acad. Sci. USA 81:3998-4002 (1984); and U.S. Pat. Nos. 4,708,871 and 5,595,915, the disclosures of which are incorporated herein by reference in their entireties.

[0375] As is also well known, fragments that encode at least 8 contiguous amino acids (i.e., fragments of 24 nucleotides or more) are useful in directing the expression or the synthesis of peptides that have utility as immunogens. See, e.g., Lemer, “Tapping the immunological repertoire to produce antibodies of predetermined specificity,” Nature 299:592-596 (1982); Shinnick et al., “Synthetic peptide immunogens as vaccines,” Annu. Rev. Microbiol. 37:425-46 (1983); Sutcliffe et al., “Antibodies that react with predetermined sites on proteins,” Science 219:660-6 (1983), the disclosures of which are incorporated herein by reference in their entireties.

[0376] The nucleic acid fragment of the present invention is thus at least 17 nucleotides in length, typically at least 18 nucleotides in length, and often at least 24 nucleotides in length. Often, the nucleic acid of the present invention is at least 25 nucleotides in length, and even 30 nucleotides, 35 nucleotides, 40 nucleotides, or 45 nucleotides in length. Of course, larger fragments having at least 50 nt, at least 100 nt, at least 150 nt, 200 nt, 250 nt, 300 nt, 350 nt, 400 nt, 450 nt, or 500 nt or more are also useful, and at times preferred.

[0377] The isolated nucleic acids of the present invention—including single exon probes and fragments thereof—can be composed of natural nucleotides in native 5′-3′ phosphodiester internucleoside linkage—e.g., DNA or RNA—or can contain any or all of nonnatural nucleotide analogues, nonnative internucleoside bonds, or post-synthesis modifications, either throughout the length of the nucleic acid or localized to one or more portions thereof As is well known in the art, when the isolated nucleic acid is used as a hybridization probe, the range of such nonnatural analogues, nonnative internucleoside bonds, or post-synthesis modifications will be limited to those that permit sequence-discriminating basepairing of the resulting nucleic acid. When used to direct expression or RNA or protein in vitro or in vivo, the range of such nonnatural analogues, nonnative internucleoside bonds, or post-synthesis modifications will be limited to those that permit the nucleic acid to function properly as a polymerization substrate. When the isolated nucleic acid is used as a therapeutic agent, the range of such changes will be limited to those that do not confer toxicity upon the isolated nucleic acid.

[0378] For example, when desired to be used as probes, the isolated nucleic acids of the present invention can usefully include nucleotide analogues that incorporate labels that are directly detectable, such as radiolabels or fluorophores, or nucleotide analogues that incorporate labels that can be visualized in a subsequent reaction, such as biotin or various haptens.

[0379] Common radiolabeled analogues include those labeled with ³³p, ³²p, and ³⁵S, such as α-³²P-dATP, α-³²P-dCTP, α-³²P-dGTP, α-³²-dTTP,α-³²P-3′dATP, α-³²P-ATP, α-³²P-CTP, α-³²P-GTP, α-³²P-UTP, α-³⁵S-dATP, γ-³⁵S-GTP, γ-33P-dATP, and the like.

[0380] Commercially available fluorescent nucleotide analogues readily incorporated into the nucleic acids of the present invention include Cy3-dCTP, Cy3-dUTP, Cy5-dCTP, Cy3-dUTP (Amersham Pharmacia Biotech, Piscataway, N.J., USA), fluorescein-12-dUTP, tetramethylrhodamine-6-dUTP, Texas Red®-5-dUTP, Cascade Blue®-7-dUTP, BODIPY®FL-14-dUTP, BODIPY®TMR-14-dUTP, BODIPY® TR-14-dUTP, Rhodamine Green□-5-dUTP, Oregon Green® 488-5-dUTP, Texas Red®-12-dUTP, BODIPY® 630/650-14-dUTP, BODIPY® 650/665-14-dUTP, Alexa Fluor® 488-5-dUTP, Alexa Fluor® 532-5-dUTP, Alexa Fluor® 568-5-dUTP, Alexa Fluor® 594-5-dUTP, Alexa Fluor® 546-14-dUTP, fluorescein-12-UTP, tetramethylrhodamine-6-UTP, Texas Red®-5-UTP, Cascade Blue®-7-UTP, BODIPY® FL-14-UTP, BODIPY® TMR-14-UTP, BODIPY® TR-14-UTP, Rhodamine Green□-5-UTP, Alexa Fluor® 488-5-UTP, Alexa Fluor® 546-14-UTP (Molecular Probes, Inc. Eugene, Oreg., USA).

[0381] Protocols are available for custom synthesis of nucleotides having other fluorophores. Henegariu et al., “Custom Fluorecent-Nucleotide Synthesis as an Alternative Method for Nucleic Acid Labeling,” Nature Biotechnol. 18:345-348 (2000), the disclosure of which is incorporated herein by reference in its entirety.

[0382] Haptens that are commonly conjugated to nucleotides for subsequent labeling include biotin (biotin-11-dUTP, Molecular Probes, Inc., Eugene, Oreg., USA; biotin-21-UTP, biotin-21-dUTP, Clontech Laboratories, Inc., Palo Alto, Calif., USA), digoxigenin (DIG-11-dUTP, alkali labile, DIG-11-UTP, Roche Diagnostics Corp., Indianapolis, Ind., USA), and dinitrophenyl (dinitrophenyl-11-dUTP, Molecular Probes, Inc., Eugene, Oreg., USA).

[0383] As another example, when desired to be used for antisense inhibition of translation, the isolated nucleic acids of the present invention can usefully include altered, often nuclease-resistant, internucleoside bonds. See Hartmann et al. (eds.), Manual of Antisense Methodology (Perspectives in Antisense Science), Kluwer Law International (1999) (ISBN:079238539X); Stein et al. (eds.), Applied Antisense Oligonucleotide Technology, Wiley-Liss (cover (1998) (ISBN: 0471172790); Chadwick et al. (eds.), Oligonucleotides as Therapeutic Agents—Symposium No. 209, John Wiley & Son Ltd (1997) (ISBN: 0471972797), or for targeted gene correction, Gamper et al., Nucl. Acids Res. 28(21):4332-9 (2000), the disclosures of which are incorporated herein by reference in their entireties.

[0384] Modified oligonucleotide backbones often preferred when the nucleic acid is to be used for antisense purposes are, for example, phosphorothioates, chiral phosphorothioates, phosphorodithioates, phosphotriesters, aminoalkylphosphotriesters, methyl and other alkyl phosphonates including 3′-alkylene phosphonates and chiral phosphonates, phosphinates, phosphoramidates including 3′-amino phosphoramidate and aminoalkylphosphoramidates, thionophosphoramidates, thionoalkylphosphonates, thionoalkylphosphotriesters, and boranophosphates having normal 3′-5′ linkages, 2′-5′ linked analogs of these, and those having inverted polarity wherein the adjacent pairs of nucleoside units are linked 3-5′ to 5′-3′ or 2′-5′ to 5′-2′. Representative U.S. patents that teach the preparation of the above phosphorus-containing linkages include, but are not limited to, U.S. Pat. Nos. 3,687,808; 4,469,863; 4,476,301; 5,023,243; 5,177,196; 5,188,897; 5,264,423; 5,276,019; 5,278,302; 5,286,717; 5,321,131; 5,399,676; 5,405,939; 5,453,496; 5,455,233; 5,466,677; 5,476,925; 5,519,126; 5,536,821; 5,541,306; 5,550,111; 5,563,253; 5,571,799; 5,587,361; and 5,625,050, the disclosures of which are incorporated herein by reference in their entireties.

[0385] Preferred modified oligonucleotide backbones for antisense use that do not include a phosphorus atom have backbones that are formed by short chain alkyl or cycloalkyl internucleoside linkages, mixed heteroatom and alkyl or cycloalkyl internucleoside linkages, or one or more short chain heteroatomic or heterocyclic internucleoside linkages. These include those having morpholino linkages (formed in part from the sugar portion of a nucleoside); siloxane backbones; sulfide, sulfoxide and sulfone backbones; formacetyl and thioformacetyl backbones; methylene formacetyl and thioformacetyl backbones; alkene containing backbones; sulfamate backbones; methyleneimino and methylenehydrazino backbones; sulfonate and sulfonamide backbones; amide backbones; and others having mixed N, O, S and CH₂ component parts. Representative U.S. patents that teach the preparation of the above backbones include, but are not limited to, U.S. Pat. Nos. 5,034,506; 5,166,315; 5,185,444; 5,214,134; 5,216,141; 5,235,033; 5,264,562; 5,264,564; 5,405,938; 5,434,257; 5,466,677; 5,470,967; 5,489,677; 5,541,307; 5,561,225; 5,596,086; 5,602,240; 5,610,289; 5,602,240; 5,608,046; 5,610,289; 5,618,704; 5,623,070; 5,663,312; 5,633,360; 5,677,437; and 5,677,439, the disclosures of which are incorporated herein by reference in their entireties.

[0386] In other preferred oligonucleotide mimetics, both the sugar and the internucleoside linkage are replaced with novel groups, such as peptide nucleic acids (PNA).

[0387] In PNA compounds, the phosphodiester backbone of the nucleic acid is replaced with an amide-containing backbone, in particular by repeating N-(2-aminoethyl) glycine units linked by amide bonds. Nucleobases are bound directly or indirectly to aza nitrogen atoms of the amide portion of the backbone, typically by methylene carbonyl linkages.

[0388] The uncharged nature of the PNA backbone provides PNA/DNA and PNA/RNA duplexes with a higher thermal stability than is found in DNA/DNA and DNA/RNA duplexes, resulting from the lack of charge repulsion between the PNA and DNA or RNA strand. In general, the Tm of a PNA/DNA or PNA/RNA duplex is 1□C. higher per base pair than the Tm of the corresponding DNA/DNA or DNA/RNA duplex (in 100 mM NaCl).

[0389] The neutral backbone also allows PNA to form stable DNA duplexes largely independent of salt concentration. At low ionic strength, PNA can be hybridized to a target sequence at temperatures that make DNA hybridization problematic or impossible. And unlike DNA/DNA duplex formation, PNA hybridization is possible in the absence of magnesium. Adjusting the ionic strength, therefore, is useful if competing DNA or RNA is present in the sample, or if the nucleic acid being probed contains a high level of secondary structure.

[0390] PNA also demonstrates greater specificity in binding to complementary DNA. A PNA/DNA mismatch is more destabilizing than DNA/DNA mismatch. A single mismatch in mixed a PNA/DNA 15-mer lowers the Tm by 8-20□C. (15□C. on average). In the corresponding DNA/DNA duplexes, a single mismatch lowers the Tm by 416□C. (11□C. on average). Because PNA probes can be significantly shorter than DNA probes, their specificity is greater.

[0391] Additionally, nucleases and proteases do not recognize the PNA polyamide backbone with nucleobase sidechains. As a result, PNA oligomers are resistant to degradation by enzymes, and the lifetime of these compounds is extended both in vivo and in vitro. In addition, PNA is stable over a wide pH range.

[0392] Because its backbone is formed from amide bonds, PNA can be synthesized using a modified peptide synthesis protocol. PNA oligomers can be synthesized by both Fmoc and tBoc methods. Representative U.S. patents that teach the preparation of PNA compounds include, but are not limited to, U.S. Pat. Nos. 5,539,082; 5,714,331; and 5,719,262, each of which is herein incorporated by reference; automated PNA synthesis is readily achievable on commercial synthesizers (see, e.g., “PNA User's Guide,” Rev. 2, February 1998, Perseptive Biosystems Part No. 60138, Applied Biosystems, Inc., Foster City, Calif.).

[0393] PNA chemistry and applications are reviewed, inter alia, in Ray et al., FASEB J. 14(9):1041-60 (2000); Nielsen et al., Pharmacol Toxicol. 86(1):3-7 (2000); Larsen et al., Biochim Biophys Acta. 1489(1):159-66 (1999); Nielsen, Curr. Opin. Struct. Biol. 9(3):353-7 (1999), and Nielsen, Curr. Opin. Biotechnol. 10(1):71-5 (1999), the disclosures of which are incorporated herein by reference in their entireties.

[0394] Differences from nucleic acid compositions found in nature—e.g., nonnative bases, altered internucleoside linkages, post-synthesis modification—can be present throughout the length of the nucleic acid or can, instead, usefully be localized to discrete portions thereof. As an example of the latter, chimeric nucleic acids can be synthesized that have discrete DNA and RNA domains and demonstrated utility for targeted gene repair, as further described in U.S. Pat. Nos. 5,760,012 and 5,731,181, the disclosures of which are incorporated herein by reference in their entireties. As another example, chimeric nucleic acids comprising both DNA and PNA have been demonstrated to have utility in modified PCR reactions. See Misra et al., Biochem. 37: 1917-1925 (1998); see also Finn et al., Nucl. Acids Res. 24: 3357-3363 (1996), incorporated herein by reference.

[0395] Unless otherwise specified, nucleic acids of the present invention can include any topological conformation appropriate to the desired use; the term thus explicitly comprehends, among others, single-stranded, double-stranded, triplexed, quadruplexed, partially double-stranded, partially-triplexed, partially-quadruplexed, branched, hairpinned, circular, and padlocked conformations. Padlock conformations and their utility are further described in Baner et al., Curr. Opin. Biotechnol. 12:11-15 (2001); Escude et al., Proc. Natl. Acad. Sci. USA 14;96(19):10603-7 (1999); Nilsson et al., Science 265(5181):2085-8 (1994), the disclosures of which are incorporated herein by reference in their entireties. Triplex and quadruplex conformations, and their utility, are reviewed in Praseuth et al., Biochim. Biophys. Acta. 1489(1):181-206 (1999); Fox, Curr. Med. Chem. 7(1):17-37 (2000); Kochetkova et al., Methods Mol. Biol. 130:189-201 (2000); Chan et al., J. Mol. Med. 75(4):267-82 (1997), the disclosures of which are incorporated herein by reference in their entireties.

[0396] The nucleic acids of the present invention can be detectably labeled. Commonly-used labels include radionuclides, such as ³²P, ³³P, ³⁵S, ³H (and for nmr detection, ¹³C and ¹⁵N), haptens that can be detected by specific antibody or high affinity binding partner (such as avidin), and fluorophores.

[0397] As noted above, detectable labels can be incorporated by inclusion of labeled nucleotide analogues in the nucleic acid. Such analogues can be incorporated by enzymatic polymerization, such as by nick translation, random priming, polymerase chain reaction (PCR), terminal transferase tailing, and end-filling of overhangs, for DNA molecules, and in vitro transcription driven, e.g., from phage promoters, such as T7, T3, and SP6, for RNA molecules. Commercial kits are readily available for each such labeling approach.

[0398] Analogues can also be incorporated during automated solid phase chemical synthesis.

[0399] As is well known, labels can also be incorporated after nucleic acid synthesis, with the 5′ phosphate and 3′ hydroxyl providing convenient sites for post-synthetic covalent attachment of detectable labels.

[0400] Various other post-synthetic approaches permit internal labeling of nucleic acids.

[0401] For example, fluorophores can be attached using a cisplatin reagent that reacts with the N7 of guanine residues (and, to a lesser extent, adenine bases) in DNA, RNA, and PNA to provide a stable coordination complex between the nucleic acid and fluorophore label (Universal Linkage System) (available from Molecular Probes, Inc., Eugene, Oreg., USA and Amersham Pharmacia Biotech, Piscataway, N.J., USA); see Alers et al., Genes, Chromosomes & Cancer, Vol. 25, pp. 301-305 (1999); Jelsma et al., J. NIH Res. 5:82 (1994); Van Belkum et al., BioTechniques 16:148-153 (1994), incorporated herein by reference. As another example, nucleic acids can be labeled using a disulfide-containing linker (FastTag□ Reagent, Vector Laboratories, Inc., Burlingame, Calif., USA) that is photo- or thermally coupled to the target nucleic acid using aryl azide chemistry; after reduction, a free thiol is available for coupling to a hapten, fluorophore, sugar, affinity ligand, or other marker.

[0402] Multiple independent or interacting labels can be incorporated into the nucleic acids of the present invention. For example, both a fluorophore and a moiety that in proximity thereto acts to quench fluorescence can be included to report specific hybridization through release of fluorescence quenching, Tyagi et al., Nature Biotechnol. 14: 303-308 (1996); Tyagi et al., Nature Biotechnol. 16, 49-53 (1998); Sokol et al., Proc. Natl. Acad. Sci. USA 95: 11538-11543 (1998); Kostrikis et al., Science 279:1228-1229 (1998); Marras et al., Genet. Anal. 14: 151-156 (1999); U.S. Pat. Nos. 5,846,726, 5,925,517, 5925517, or to report exonucleotidic excision, U.S. Pat. No. 5,538,848; Holland et al., Proc. Natl. Acad. Sci. USA 88:7276-7280 (1991); Heid et al., Genome Res. 6(10):986-94 (1996); Kuimelis et al., Nucleic Acids Symp Ser. (37):255-6 (1997); U.S. Pat. No. 5,723,591, the disclosures of which are incorporated herein by reference in their entireties.

[0403] In one aspect, the invention provides the individual single exon probes of the present invention as isolated nucleic acids.

[0404] In one series of embodiments of this aspect of the invention, the probe is provided in quantity sufficient to perform a hybridization reaction.

[0405] When provided in quantity sufficient to perform a hybridization reaction, the probe can be in any form directly hybridizable to the target that contains the probe's exon or ORF (or their complement), such as double stranded DNA, single-stranded DNA complementary to the target, single-stranded RNA complementary to the target, or chimeric DNA/RNA molecules so hybridizable.

[0406] Usefully, however, such probes are instead provided in a form and quantity suitable for amplification. Typically, such probes are provided in a form and quantity suitable for amplification by PCR or by other well known amplification technique. One such technique additional to PCR is rolling circle amplification, as is described, inter alia, in U.S. Pat. Nos. 5,854,033 and 5,714,320 and international patent publications WO 97/19193 and WO 00/15779, the disclosures of which are incorporated herein by reference in their entireties. As is well understood, where the probes are to be provided in a form suitable for amplification, the range of nucleic acid analogues and/or internucleoside linkages will be constrained by the requirements and nature of the amplification enzyme.

[0407] Where the probe is to be provided in form suitable for amplification, the quantity need not be sufficient for direct hybridization, and need be sufficient only to function as an amplification template, typically at least about 1 pg, more typically at least about 10 pg, and usually at least about 100 pg or more.

[0408] Each discrete amplifiable probe can also be packaged with amplification primers, either in a single composition that comprises probe template and primers, or in a kit that comprises such primers separately packaged therefrom. As mentioned above, which discussion is incorporated here by reference, the exon-specific 5′ primers used for genomic amplification can have a first common sequence added thereto, and the exon-specific 3′ primers used for genomic amplification can have a second, different, common sequence added thereto, thus permitting, in this embodiment, the use of a single set of 5′ and 3′ primers to amplify any one of the probes. The probe composition and/or kit can also include buffers, enzyme, etc., required to effect amplification.

[0409] In another embodiment, only amplification primers are provided. The primers are sufficient to permit generation of the single exon probe by amplification from genomic DNA, which can be provided by the user.

[0410] As mentioned above, when intended for use on a genome-derived single exon microarray of the present invention, the genome-derived single exon probes of the present invention will typically average at least about 50-100 bp, more typically at least about 200 bp, preferably at least about 250 bp, even more preferably about 300 bp, 400 bp, or in preferred embodiments, at least about 500 bp in length, including (and typically, but not necessarily centered about) the exon. Furthermore, when intended for use on a genome-derived single exon microarray of the present invention, the genome-derived single exon probes of the present invention will typically not contain a detectable label.

[0411] When intended for use in solution phase hybridization, however—that is, for use in a hybridization reaction in which the probe is not first bound to a support substrate (although the target may indeed be so bound)—length constraints that are imposed in microarray-based hybridization approaches will be relaxed, and such probes will typically be labeled.

[0412] In such case, the only functional constraint that dictates the minimum size of such probe is that each such probe must be capable of specific hybridization. In theory, a probe of as little as 17 nucleotides is capable of uniquely identifying its cognate sequence in the human genome. For hybridization to expressed message—a subset of target sequence that is much reduced in complexity as compared to genomic sequence—even fewer nucleotides are required for specificity.

[0413] Therefore, the probes of the present invention can include as few as 20 bp of exon, typically at least about 25 bp of exon, more typically at least about 50 bp or exon, or more. The minimum amount of exon required to be included in the probe of the present invention in order to provide specific signal in either solution phase or microarray-based hybridizations can readily be determined by routine experimentation using standard high stringency conditions.

[0414] When intended for use in solution phase hybridization, the maximum size of the single exon probes of the present invention is dictated by the proximity of other expressed exons in genomic DNA: although each single exon probe can include intergenic and/or intronic material contiguous to the exon in the human genome, each probe of the present invention will typically include portions of only one expressed exon.

[0415] Thus, each single exon probe will include no more than about 25 kb of contiguous genomic sequence, more typically no more than about 20 kb of contiguous genomic sequence, more usually no more than about 15 kb, even more usually no more than about 10 kb. Usually, probes that are maximally about 5 kb will be used, more typically no more than about 3 kb.

[0416] And when intended for use in solution hybridization, the probes of the present invention can usefully have detectable labels.

[0417] As mentioned above, which discussion is incorporated here by reference, the probes can, but need not, contain intergenic and/or intronic material that flanks the exon, on one or both sides, in the same linear relationship to the exon that the intergenic and/or intronic material bears to the exon in genomic DNA. The probes typically do not, however, contain nucleic acid derived from more than one expressed exon; that is, they do not contain as contiguous sequence nucleic acids that are expressed from, but present discontinuously in, the genome.

[0418] The probes, either in quantity sufficient for hybridization or sufficient for amplification, can be provided in individual vials or containers, and can be provided dry (e.g., lyophilized), or solvated. If solvated, the solution can usefully include buffers and salts as desired for hybridization and/or amplification. Furthermore, if desired to be spotted on a microarray, the probes can usefully be provided in a solution of chaotropic agent to facilitate adherence to the microarray support substrate.

[0419] Alternatively, such probes can usefully be packaged as a plurality of such individual genome-derived single exon probes.

[0420] In one embodiment of this aspect, a small quantity of each probe is disposed, typically without attachment to substrate, in a spatially-addressable ordered set, typically one per well of a microtiter dish. Although a 96 well microtiter plate can be used, greater efficiency is obtained using higher density arrays, such as are provided by microtiter plates having 384, 864, 1536, 3456, 6144, or 9600 wells. And although microtiter plates having physical depressions (wells) are conveniently used, any device that permits addressable withdrawal of reagent from fluidly-noncommunicating areas can be used.

[0421] Each of the probes of the ordered set can be provided in any of the forms that are described above with respect to the probes as individually packaged.

[0422] As mentioned above, the exon-specific 5′ primers used for genomic amplification can have a first common sequence added thereto, and the exon-specific 3′ primers used for genomic amplification can have a second, different, common sequence added thereto, thus permitting, in certain embodiments, the use of a single set of 5′ and 3′ primers to amplify any one of the probes from the amplifiable ordered set.

[0423] Such collections of genome-derived single exon probes can usefully include a plurality of probes chosen for a common attribute, such as common expression in a given tissue, cell type, developmental stage, disease state, or the like.

[0424] In such defined subsets, typically at least 50% of the probes will have the common attribute, such as expression in the defined tissue or cell type. More typically, at least about 60% of the probes will be expressed in the defined tissue, even more typically at least about 75%, and preferably at least about 80%, 85%, or, in preferred embodiments, at least about 90%, and even 95% or more of the probes will have the common attribute, such as expression in the defined tissue or cell type.

[0425] In exemplified embodiments of this aspect of the invention, the present invention particularly provides subsets of probes having SEQ ID NOs: 1-13,700, the plurality of probes in each subset chosen for their common expression in one of human brain, heart, liver, fetal liver, placenta, lung, bone marrow, or HeLa cells. Examples 5-12, infra, present such subsets in Tables 4-11, respectively; probes that have been shown to be expressed in a plurality of the tested tissues appear in the respective plurality of examples and tables.

[0426] Genome-Derived Single Exon Microarrays

[0427] In light of the above-described credible, specific, and substantial utilities, it is another aspect of the present invention to provide genome-derived single exon nucleic acid microarrays useful for gene expression analysis.

[0428] In a first series of embodiments of this aspect of the invention, the genome-derived single exon nucleic acid microarrays are as described hereinabove (“Methods and Apparatus for Generating Single Exon Probes from Genomic Sequence Data”), which discussion is incorporated here by reference in its entirety.

[0429] In preferred embodiments, the microarrays include a plurality of probes known to be expressed in one or more tissues. In particular embodiments, the genome-derived single exon microarrays of the present invention include a plurality of probes, each of which plurality includes a nucleotide sequence as set forth in any one of SEQ ID NOs: 13,701-27,400, the complement thereof, or a fragment of the referenced SEQ ID NO: or complement thereof, wherein the probe hybridizes at high stringency (i.e., under high stringency conditions) to a nucleic acid expressed in human cells, and wherein the probe includes portions of no more than one human exon.

[0430] Among these embodiments are microarrays that include a plurality of probes, each of which plurality comprises a nucleotide sequence as set forth in SEQ ID NOs. 1-13,700 or the complement thereof. It would be understood that although SEQ ID NOs: 1-13,700 exclude the 5′ and 3′ universal primer sequences above-described, such sequences can, and often will, be present in the probes as disposed on the microarray substrate.

[0431] Single exon microarrays of the present invention can usefully include a plurality of genome-derived single exon probes chosen for a common attribute, such as common expression in a given tissue, cell type, developmental stage, disease state, or the like.

[0432] These “subset-defined” genome-derived single exon microarrays can be distinguished by the percentage of probes thereon that are known to have a common attribute, such as expression in a defined tissue or cell type. On such “subset-defined” microarrays, typically at least 50% of the probes will have the common attribute, typically expression in the defined tissue or cell type. More typically, at least about 60% of the probes will be expressed in the defined tissue, even more typically at least about 75%, and preferably at least about 80%, 85%, or, in preferred embodiments, at least about 90%, and even 95% or more of the probes will have the common attribute, such as expression in the defined tissue or cell type.

[0433] The invention particularly provides defined subset genome-derived single exon microarrays in which the common attribute is expression respectively in human brain, heart, liver, fetal liver, placenta, lung, bone marrow, or HeLa cells.

[0434] When used for gene expression analysis, the “defined subset” genome-derived single exon microarrays provide greater physical informational density than do the genome-derived single exon microarrays that have lower percentages of probes known to be expressed commonly in the tested tissue. At a fixed probe density, for example, a given microarray surface area of the defined subset genome-derived single exon microarray can yield a greater number of expression measurements. Alternatively, at a given probe density, the same number of expression measurements can be obtained from a smaller substrate surface area. Alternatively, at a fixed probe density and fixed surface area, probes can be provided redundantly, providing greater reliability in signal measurement for any given probe. Furthermore, with a higher percentage of probes known to be expressed in the assayed tissue, the dynamic range of the detection means can be adjusted to reveal finer levels discrimination among the levels of expression.

[0435] The present invention particularly provides defined subset genome-derived single exon microarrays having subsets of the probes having SEQ ID NOs: 1-13,700, the plurality of probes in each subset chosen for their common expression in one of human brain, heart, liver, fetal liver, placenta, lung, bone marrow, or HeLa cells. Examples 5-12, infra, present such subsets in Tables 4-11, presented herewith in electronic format and incorporated by reference in the respective examples.

[0436] In another aspect of the present invention, a genome-derived single-exon microarray is packaged together with an addressable set of individual probes, the set of individual probes including at least a subset of the probes on the microarray. In alternative embodiments, the ordered set of amplifiable probes is packaged separately from the genome-derived single exon microarray.

[0437] In some embodiments, the microarray and/or ordered probe set are further packaged with recorded media that provide probe identification and addressing information, and that can additionally contain annotation information, such as gene expression data. Such recordable media can be packaged with the microarray, with the ordered probe set, or with both.

[0438] If the microarray is constructed on a substrate that incorporates recorded media, such as is described in international patent application no. WO 98/12559, entitled “Spatially addressable combinatorial chemical arrays in CD-ROM format,” incorporated herein by reference in its entirety, then separate packaging of the genome-derived single exon microarray and the bioinformatic information is not required.

[0439] Vectors and Host Cells

[0440] In another aspect, the present invention provides vectors that comprise one or more of the isolated nucleic acids of the present invention, and host cells in which such vectors have been introduced.

[0441] The vectors can be used, inter alia, for propagating the nucleic acids of the present invention in host cells (cloning vectors), for shuttling the nucleic acids of the present invention between host cells derived from disparate organisms (shuttle vectors), for inserting the nucleic acids of the present invention into host cell chromosomes (insertion vectors), for expressing sense or antisense RNA transcripts of the nucleic acids of the present invention in vitro or within a host cell, and for expressing polypeptides encoded by the nucleic acids of the present invention, alone or as fusions to heterologous polypeptides. Vectors of the present invention will often be suitable for several such uses.

[0442] Vectors are by now well-known in the art, and are described, inter alia, in Jones et al. (eds.), Vectors: Cloning Applications: Essential Techniques (Essential Techniques Series), John Wiley & Son Ltd 1998 (ISBN: 047196266X); Jones et al. (eds.), Vectors: Expression Systems: Essential Techniques (Essential Techniques Series), John Wiley & Son Ltd, 1998 (ISBN:0471962678); Gacesa et al., Vectors: Essential Data, John Wiley & Sons, 1995 (ISBN: 0471948411); Cid-Arregui (eds.), Viral Vectors: Basic Science and Gene Therapy, Eaton Publishing Co., 2000 (ISBN: 188129935X); Sambrook et al., Molecular Cloning: A Laboratory Manual (3^{rd} ed.), Cold Spring Harbor Laboratory Press, 2001 (ISBN: 0879695773); Ausubel et al. (eds.), Short Protocols in Molecular Biology: A Compendium of Methods from Current Protocols in Molecular Biology (4^{th} ed.), John Wiley & Sons, 1999 (ISBN: 047132938X), the disclosures of which are incorporated herein by reference in their entireties. Furthermore, an enormous variety of vectors are available commercially. Use of existing vectors and modifications thereof being well within the skill in the art, only basic features need be described here.

[0443] Typically, vectors are derived from virus, plasmid, prokaryotic or eukaryotic chromosomal elements, or some combination thereof, and include at least one origin of replication, at least one site for insertion of heterologous nucleic acid, typically in the form of a polylinker with multiple, tightly clustered, single cutting restriction sites, and at least one selectable marker, although some integrative vectors will lack an origin that is functional in the host to be chromosomally modified, and some vectors will lack selectable markers. Vectors of the present invention will further include at least one nucleic acid of the present invention inserted into the vector in at least one location.

[0444] Where present, the origin of replication and selectable markers are chosen based upon the desired host cell or host cells; the host cells, in turn, are selected based upon the desired application.

[0445] For example, prokaryotic cells, typically E. coli, are typically chosen for cloning. In such case, vector replication is predicated on the replication strategies of coliform-infecting phage—such as phage lambda, M13, T7, T3 and P1—or on the replication origin of autonomously replicating episomes, notably the ColE1 plasmid and later derivatives, including pBR322 and the pUC series plasmids. Where E. coli is used as host, selectable markers are, analogously, chosen for selectivity in gram negative bacteria: e.g., typical markers confer resistance to antibiotics, such as ampicillin, tetracycline, chlorampenicol, kanamycin, streptomycin, zeocin; auxotrophic markers can also be used.

[0446] As another example, yeast cells, typically S. cerevisiae, are chosen, inter alia, for eukaryotic genetic studies, due to the ease of targeting genetic changes by homologous recombination and to the ready ability to complement genetic defects using recombinantly expressed proteins, for identification of interacting protein components, e.g. through use of a two-hybrid system, and for protein expression. Vectors of the present invention for use in yeast will typically, but not invariably, contain an origin of replication suitable for use in yeast and a selectable marker that is functional in yeast.

[0447] Integrative YIp vectors do not replicate autonomously, but integrate, typically in single copy, into the yeast genome at low frequencies and thus replicate as part of the host cell chromosome; these vectors lack an origin of replication that is functional in yeast, although they typically have at least one origin of replication suitable for progation of the vector in bacterial cells. YEp vectors, in contrast, replicate episomally and autonomously due to presence of the yeast 2 micron plasmid origin (2 μm ori). The YCp yeast centromere plasmid vectors are autonomously replicating vectors containing centromere sequences, CEN, and autonomously replicating sequences, ARS; the ARS sequences are believed to correspond to the natural replication origins of yeast chromosomes. YACs are based on yeast linear plasmids, denoted YLp, containing homologous or heterologous DNA sequences that function as telomeres (TEL) in vivo, as well as containing yeast ARS (origins of replication) and CEN (centromeres) segments.

[0448] Selectable markers in yeast vectors include a variety of auxotrophic markers, the most common of which are (in Saccharomyces cerevisiae) URA3, HIS3, LEU2, TRP1 and LYS2, which complement specific auxotrophic mutations, such as ura3-52, his3-D1, leu2-D1, trp1-D1 and lys2-201. The URA3 and LYS2 yeast genes further permit negative selection based on specific inhibitors, 5-fluoro-orotic acid (FOA) and α-aminoadipic acid (αAA), respectively, that prevent growth of the prototrophic strains but allows growth of the ura3 and lys2 mutants, respectively. Other selectable markers confer resistance to, e.g., zeocin.

[0449] As yet another example, insect cells are often chosen for high efficiency protein expression. Where the host cells are from Spodoptera frugiperda—e.g., Sf9 and Sf21 cell lines, and expresSF^{□} cells (Protein Sciences Corp., Meriden, Conn., USA)—the vector replicative strategy is typically based upon the baculovirus life cycle. Typically, baculovirus transfer vectors are used to replace the wild-type AcMNPV polyhedrin gene with a heterologous gene of interest. Sequences that flank the polyhedrin gene in the wild-type genome are positioned 5′ and 3′ of the expression cassette on the transfer vectors. Following cotransfection with AcMNPV DNA, a homologous recombination event occurs between these sequences resulting in a recombinant virus carrying the gene of interest and the polyhedrin or p10 promoter. Selection can be based upon visual screening for lacZ fusion activity.

[0450] As yet another example, mammalian cells are often chosen for expression of proteins intended as pharmaceutical agents, and are also chosen as host cells for screening of potential agonist and antagonists of a protein or a physiological pathway.

[0451] Where mammalian cells are chosen as host cells, vectors intended for autonomous extrachromosomal replication will typically include a viral origin, such as the SV40 origin (for replication in cell lines expressing the large T-antigen, such as COS1 and COS7 cells), the papillomavirus origin, or the EBV origin for long term episomal replication (for use, e.g., in 293-EBNA cells, which constitutively express the EBV EBNA-1 gene product and adenovirus EIA). Vectors intended for integration, and thus replication as part of the mammalian chromosome, can, but need not, include an origin of replication functional in mammalian cells, such as the SV40 origin. Vectors based upon viruses, such as adenovirus, adeno-associated virus, vaccinia virus, and various mammalian retroviruses, will typically replicate according to the viral replicative strategy.

[0452] Selectable markers for use in mammalian cells include resistance to neomycin (G418), blasticidin, hygromycin and to zeocin, and selection based upon the purine salvage pathway using HAT medium.

[0453] Vectors of the present invention will also often include elements that permit in vitro transcription of RNA from the inserted heterologous nucleic acid. Such vectors typically include a phage promoter, such as that from T7, T3, or SP6, flanking the nucleic acid insert. Often two different such promoters flank the inserted nucleic acid, permitting separate in vitro production of both sense and antisense strands.

[0454] Expression vectors of the present invention—that is, those vectors that will drive expression of polypeptides from the inserted heterologous nucleic acid—will often include a variety of other genetic elements operatively linked to the protein-encoding heterologous nucleic acid insert, typically genetic elements that drive transcription, such as promoters and enhancer elements, those that facilitate RNA processing, such as transcription termination and/or polyadenylation signals, and those that facilitate translation, such as ribosomal consensus sequences.

[0455] For example, vectors for expressing proteins of the present invention in prokaryotic cells, typically E. coli, will include a promoter, often a phage promoter, such as phage lambda pL promoter, the trc promoter, a hybrid derived from the trp and lac promoters, the bacteriophage T7 promoter (in E. coli cells engineered to express the T7 polymerase), or the araBAD operon. Often, such prokaryotic expression vectors will further include transcription terminators, such as the aspA terminator, and elements that facilitate translation, such as a consensus ribosome binding site and translation termination codon, Schomer et al., Proc. Natl. Acad. Sci. USA 83:8506-8510 (1986).

[0456] As another example, vectors for expressing proteins of the present invention in yeast cells, typically S. cerevisiae, will include a yeast promoter, such as the CYC1 promoter, the GAL1 promoter, ADH1 promoter, or the GPD promoter, and will typically have elements that facilitate transcription termination, such as the transcription termination signals from the CYC1 or ADH1 gene.

[0457] As another example, vectors for expressing proteins of the present invention in mammalian cells will include a promoter active in mammalian cells. Such promoters are often drawn from mammalian viruses—such as the enhancer-promoter sequences from the immediate early gene of the human cytomegalovirus (CMV), the enhancer-promoter sequences from the Rous sarcoma virus long terminal repeat (RSV LTR), and the enhancer-promoter from SV40. Often, expression is enhanced by incorporation of polyadenylation sites, such as the late SV40 polyadenylation site and the polyadenylation signal and transcription termination sequences from the bovine growth hormone (BGH) gene, and ribosome binding sites. Furthermore, vectors can include introns, such as intron II of rabbit β-globin gene and the SV40 splice elements.

[0458] Vector-drive protein expression can be constitutive or inducible.

[0459] Inducible vectors include either naturally inducible promoters, such as the trc promoter, which is regulated by the lac operon, and the pL promoter, which is regulated by tryptophan, the MMTV-LTR promoter, which is inducible by dexamethasone, or can contain synthetic promoters and/or additional elements that confer inducible control on adjacent promoters. Examples of inducible synthetic promoters are the hybrid Plac/ara-1 promoter and the PLtetO-1 promoter. The PltetO-1 promoter takes advantage of the high expression levels from the PL promoter of phage lambda, but replaces the lambda repressor sites with two copies of operator 2 of the Tn10 tetracycline resistance operon, causing this promoter to be tightly repressed by the Tet repressor protein and induced in response to tetracycline (Tc) and Tc derivatives such as anhydrotetracycline.

[0460] As another example of inducible elements, hormone response elements, such as the glucocorticoid response element (GRE) and the estrogen response element (ERE), can confer hormone inducibility where vectors are used for expression in cells having the respective hormone receptors. To reduce background levels of expression, elements responsive to ecdysone, an insect hormone, can be used instead, with coexpression of the ecdysone receptor.

[0461] Expression vectors can be designed to fuse the expressed polypeptide to small protein tags that facilitate purification and/or visualization.

[0462] For example, proteins of the present invention can be expressed with a polyhistidine tag that facilitates purification of the fusion protein by immobilized metal affinity chromatography, for example using NiNTA resin (Qiagen Inc., Valencia, Calif., USA) or TALON^{□} resin (cobalt immobilized affinity chromatography medium, Clontech Labs, Palo Alto, Calif., USA). As another example, the fusion protein can include a chitin-binding tag and self-excising intein, permitting chitin-based purification with self-removal of the fused tag (IMPACT^{□} system, New England Biolabs, Inc., Beverley, Mass., USA). Alternatively, the fusion protein can include a calmodulin-binding peptide tag, permitting purification by calmodulin affinity resin (Stratagene, La Jolla, Calif., USA), or a specifically excisable fragment of the biotin carboxylase carrier protein, permitting purification of in vivo biotinylated protein using an avidin resin and subsequent tag removal (Promega, Madison, Wis., USA).

[0463] Other tags include, for example, the Xpress epitope, detectable by anti-Xpress antibody (Invitrogen, Carlsbad, Calif., USA), a myc tag, detectable by anti-myc tag antibody, the V5 epitope, detectable by anti-V5 antibody (Invitrogen, Carlsbad, Calif., USA), FLAG® epitope, detectable by anti-FLAG® antibody (Stratagene, La Jolla, Calif., USA), and the HA epitope.

[0464] For secretion of expressed proteins, vectors can include appropriate sequences that encode secretion signals, such as leader peptides. For example, the pSecTag2 vectors (Invitrogen, Carlsbad, Calif., USA) are 5.2 kb mammalian expression vectors that carry the secretion signal from the V-J2-C region of the mouse Ig kappa-chain for efficient secretion of recombinant proteins from a variety of mammalian cell lines.

[0465] Expression vectors can also be designed to fuse proteins encoded by the heterologous nucleic acid insert to polypeptides larger than purification and/or identification tags. Useful protein fusions include those that permit display of the encoded protein on the surface of a phage or cell, fusions to intrinsically fluorescent proteins, such as green fluorescent protein (GFP), fusions to the IgG Fc region, and fusions for use in two hybrid systems.

[0466] Vectors for phage display fuse the encoded polypeptide to, e.g., the gene III protein (pIII) or gene VIII protein (PVIII) for display on the surface of filamentous phage, such as M13. See Barbas et al., Phage Display: A Laboratory Manual, Cold Spring Harbor Laboratory Press (2001) (ISBN 0-87969-546-3); Kay et al. (eds.), Phage Display of Peptides and Proteins: A Laboratory Manual, San Diego: Academic Press, Inc., 1996; Abelson et al. (eds.), Combinatorial Chemistry, Methods in Enzymology vol. 267, Academic Press (May 1996).

[0467] Vectors for yeast display, e.g. the pYD1 yeast display vector (Invitrogen, Carlsbad, Calif., USA), use the α-agglutinin yeast adhesion receptor to display recombinant protein on the surface of S. cerevisiae. Vectors for mammalian display, e.g., the pDisplay□ vector (Invitrogen, Carlsbad, Calif., USA), target recombinant proteins using an N-terminal cell surface targeting signal and a C-terminal transmembrane anchoring domain of platelet derived growth factor receptor.

[0468] A wide variety of vectors now exist that fuse proteins encoded by heterologous nucleic acids to the chromophore of the substrate-independent, intrinsically fluorescent green fluorescent protein from Aequorea Victoria (“GFP”) and its variants. These proteins are intrinsically fluorescent: the GFP-like chromophore is entirely encoded by its amino acid sequence and can fluoresce without requirement for cofactor or substrate.

[0469] Structurally, the GFP-like chromophore comprises an 11-stranded β-barrel (β-can) with a central α-helix, the central α-helix having a conjugated π-resonance system that includes two aromatic ring systems and the bridge between them. The π-resonance system is created by autocatalytic cyclization among amino acids; cyclization proceeds through an imidazolinone intermediate, with subsequent dehydrogenation by molecular oxygen at the Cα-Cβ bond of a participating tyrosine.

[0470] The GFP-like chromophore can be selected from GFP-like chromophores found in naturally occurring proteins, such as A. victoria GFP (GenBank accession number AAA27721), Renilla reniformis GFP, FP583 (GenBank accession no. AF168419) (DsRed), FP593 (AF27271 1), FP483 (AF168420), FP484 (AF168424), FP595 (AF246709), FP486 (AF168421), FP538 (AF168423), and FP506 (AF168422), and need include only so much of the native protein as is needed to retain the chromophore's intrinsic fluorescence. Methods for determining the minimal domain required for fluorescence are known in the art. Li et al., “Deletions of the Aequorea victoria Green Fluorescent Protein Define the Minimal Domain Required for Fluorescence,” J. Biol. Chem. 272:28545-28549 (1997).

[0471] Alternatively, the GFP-like chromophore can be selected from GFP-like chromophores modified from those found in nature. Typically, such modifications are made to improve recombinant production in heterologous expression systems (with or without change in protein sequence), to alter the excitation and/or emission spectra of the native protein, to facilitate purification, to facilitate or as a consequence of cloning, or are a fortuitous consequence of research investigation.

[0472] The methods for engineering such modified GFP-like chromophores and testing them for fluorescence activity, both alone and as part of protein fusions, are well-known in the art. Early results of these efforts are reviewed in Heim et al., Curr. Biol. 6:178-182 (1996), incorporated herein by reference in its entirety; a more recent review, with tabulation of useful mutations, is found in Palm et al., “Spectral Variants of Green Fluorescent Protein,” in Green Fluorescent Proteins, Conn (ed.), Methods Enzymol. vol. 302, pp. 378-394 (1999), incorporated herein by reference in its entirety. A variety of such modified chromophores are now commercially available and can readily be used in the fusion proteins of the present invention.

[0473] For example, EGFP (“enhanced GFP”), Cormack et al., Gene 173:33-38 (1996); U.S. Pat. Nos. 6,090,919 and 5,804,387, is a red-shifted, human codon-optimized variant of GFP that has been engineered for brighter fluorescence, higher expression in mammalian cells, and for an excitation spectrum optimized for use in flow cytometers. EGFP can usefully contribute a GFP-like chromophore to the fusion proteins of the present invention. A variety of EGFP vectors, both plasmid and viral, are available commercially (Clontech Labs, Palo Alto, Calif., USA), including vectors for bacterial expression, vectors for N-terminal protein fusion expression, vectors for expression of C-terminal protein fusions, and for bicistronic expression.

[0474] Toward the other end of the emission spectrum, EBFP (“enhanced blue fluorescent protein”) and BFP2 contain four amino acid substitutions that shift the emission from green to blue, enhance the brightness of fluorescence and improve solubility of the protein, Heim et al., Curr. Biol. 6:178-182 (1996); Cormack et al., Gene 173:33-38 (1996). EBFP is optimized for expression in mammalian cells whereas BFP2, which retains the original jellyfish codons, can be expressed in bacteria; as is farther discussed below, the host cell of production does not affect the utility of the resulting fusion protein. The GFP-like chromophores from EBFP and BFP2 can usefully be included in the fusion proteins of the present invention, and vectors containing these blue-shifted variants are available from Clontech Labs (Palo Alto, Calif., USA).

[0475] Analogously, EYFP (“enhanced yellow fluorescent protein”), also available from Clontech Labs, contains four amino acid substitutions, different from EBFP, Ormö et al., Science 273:1392-1395 (1996), that shift the emission from green to yellowish-green. Citrine, an improved yellow fluorescent protein mutant, is described in Heikal et al., Proc. Natl. Acad. Sci. USA 97:11996-12001 (2000). ECFP (“enhanced cyan fluorescent protein”) (Clontech Labs, Palo Alto, Calif., USA) contains six amino acid substitutions, one of which shifts the emission spectrum from green to cyan. Heim et al., Curr. Biol. 6:178-182 (1996); Miyawaki et al., Nature 388:882-887 (1997). The GFP-like chromophore of each of these GFP variants can usefully be included in the fusion proteins of the present invention.

[0476] The GFP-like chromophore can also be drawn from other modified GFPs, including those described in U.S. Pat. Nos. 6,124,128; 6,096,865; 6,090,919; 6,066,476; 6,054,321; 6,027,881; 5,968,750; 5,874,304; 5,804,387; 5,777,079; 5,741,668; and 5,625,048, the disclosures of which are incorporated herein by reference in their entireties. See also Conn (ed.), Green Fluorescent Protein, Methods in

[0477] Fusions to the IgG Fc region increase serum half life of protein pharmaceutical products through interaction with the FcRn receptor (also denominated the FcRp receptor and the Brambell receptor, FcRb), further described in international patent application nos. WO 97/43316, WO 97/34631, WO 96/32478, WO 96/18412.

[0478] The present invention further includes host cells comprising the vectors of the present invention, either present episomally within the cell or integrated, in whole or in part, into the host cell chromosome.

[0479] As noted earlier, host cells can be prokaryotic or eukaryotic. Representative examples of appropriate host cells include, but are not limited to, bacterial cells, such as E. coli, Caulobacter crescentus, Streptomyces species, and Salmonella typhimurium; yeast cells, such as Saccharomyces cerevisiae, Schizosaccharomyces pombe, Pichia pastoris, Pichia methanolica; insect cell lines, such as those from Spodopterafrugiperda—e.g., Sf9 and Sf21 cell lines, and expresSF^{□} cells (Protein Sciences Corp., Meriden, Conn., USA)—Drosophila S2 cells, and Trichoplusia ni High Five® Cells (Invitrogen, Carlsbad, Calif., USA); and mammalian cells. Typical mammalian cells include COS1 and COS7 cells, chinese hamster ovary (CHO) cells, NIH 3T3 cells, 293 cells, HEPG2 cells, HeLa cells, L cells, murine ES cell lines (e.g., from strains 129/SV, C57/BL6, DBA-1, 129/SVJ), K562, Jurkat cells, and BW5147. Other mammalian cell lines are well known and readily available from the American Type Culture Collection (ATCC) (Manassas, Va., USA) and the National Institute of General medical Sciences (NIGMS) Human Genetic Cell Repository at the Coriell Cell Repositories (Camden, N.J., USA).

[0480] Methods for introducing the vectors and nucleic acids of the present invention into the host cells are well known in the art; the choice of technique will depend primarily upon the specific vector to be introduced and the host cell chosen.

[0481] For example, phage lambda vectors will typically be packaged using a packaging extract (e.g., Gigapack® packaging extract, Stratagene, La Jolla, Calif., USA), and the packaged virus used to infect E. coli. Plasmid vectors will typically be introduced into chemically competent or electrocompetent bacterial cells.

[0482] E. coli cells can be rendered chemically competent by treatment, e.g., with CaCl₂, or a solution of Mg²⁺, Mn²⁺, Ca⁺, Rb⁺ or K⁺, dimethyl sulfoxide, dithiothreitol, and hexamine cobalt (III), Hanahan, J. Mol. Biol. 166(4):557-80 (1983), and vectors introduced by heat shock. A wide variety of chemically competent strains are also available commercially (e.g., Epicurian Coli® XL10-Gold® Ultracompetent Cells (Stratagene, La Jolla, Calif., USA); DH5α competent cells (Clontech Laboratories, Palo Alto, Calif., USA); TOP10 Chemically Competent E. coli Kit (Invitrogen, Carlsbad, Calif., USA)).

[0483] Bacterial cells can be rendered electrocompetent—that is, competent to take up exogenous DNA by electroporation—by various pre-pulse treatments; vectors are introduced by electroporation followed by subsequent outgrowth in selected media. An extensive series of protocols is provided online in Electroprotocols (BioRad, Richmond, Calif., USA) (http://www.bio-rad.com/LifeScience/pdf/New_Gene_Pulser.pdf).

[0484] Vectors can be introduced into yeast cells by spheroplasting, treatment with lithium salts, electroporation, or protoplast fusion.

[0485] Spheroplasts are prepared by the action of hydrolytic enzymes—a snail-gut extract, usually denoted Glusulase, or Zymolyase, an enzyme from Arthrobacter luteus—to remove portions of the cell wall in the presence of osmotic stabilizers, typically 1 M sorbitol. DNA is added to the spheroplasts, and the mixture is co-precipitated with a solution of polyethylene glycol (PEG) and Ca²⁺. Subsequently, the cells are resuspended in a solution of sorbitol, mixed with molten agar and then layered on the surface of a selective plate containing sorbitol.

[0486] For lithium-mediated transformation, yeast cells are treated with lithium acetate, which apparently permeabilizes the cell wall, DNA is added and the cells are co-precipitated with PEG. The cells are exposed to a brief heat shock, washed free of PEG and lithium acetate, and subsequently spread on plates containing ordinary selective medium. Increased frequencies of transformation are obtained by using specially-prepared single-stranded carrier DNA and certain organic solvents. Schiestl et al, Curr. Genet. 16(5-6):339-46 (1989).

[0487] For electroporation, freshly-grown yeast cultures are typically washed, suspended in an osmotic protectant, such as sorbitol, mixed with DNA, and the cell suspension pulsed in an electroporation device. Subsequently, the cells are spread on the surface of plates containing selective media. Becker et al., Methods Enzymol. 194:182-7 (1991). The efficiency of transformation by electroporation can be increased over 100-fold by using PEG, single-stranded carrier DNA and cells that are in late log-phase of growth. Larger constructs, such as YACs, can be introduced by protoplast fusion.

[0488] Mammalian and insect cells can be directly infected by packaged viral vectors, or transfected by chemical or electrical means.

[0489] For chemical transfection, DNA can be coprecipitated with CaPO₄ or introduced using liposomal and nonliposomal lipid-based agents. Commercial kits are available for CaPO₄ transfection (CalPhos□ Mammalian Transfection Kit, Clontech Laboratories, Palo Alto, Calif., USA), and lipid-mediated transfection can be practiced using commercial reagents, such as LIPOFECTAMINE□ 2000, LIPOFECTAMINE□ Reagent, CELLFECTIN® Reagent, and LIPOFECTIN® Reagent (Invitrogen, Carlsbad, Calif., USA), DOTAP Liposomal Transfection Reagent, FuGENE 6, X-tremeGENE Q2, DOSPER, (Roche Molecular Biochemicals, Indianapolis, Ind. USA), Effectene^{□}, PolyFecte®, Superfect® (Qiagen, Inc., Valencia, Calif., USA).

[0490] Protocols for electroporating mammalian cells can be found online in Electroprotocols (Bio-Rad, Richmond, Calif., USA) (http://www.bio-rad.com/LifeScience/pdf/New_Gene_Pulser.pdf). See also, Norton et al. (eds.), Gene Transfer Methods: Introducing DNA into Living Cells and Organisms, BioTechiques Books, Eaton Publishing Co. (2000) (ISBN 1-881299-34-1), incorporated herein by reference in its entirety.

[0491] ORF-Encoded Peptides

[0492] It is another aspect of the present invention to provide peptides encoded by the ORFs presented in SEQ ID NOs: 1-27,400; the sequences of the ORF-encoded peptides are set forth in SEQ ID NOs: 27,401-34,288. The concordance among probe, exon, and ORF-encoded peptide SEQ ID NOs: is set forth in Tables 4-11, infra. It is another aspect to provide fragments and fusions of the ORF-encoded peptides of the present invention.

[0493] Unless otherwise indicated, amino acid sequences of the proteins of the present invention were determined as a predicted translation from a nucleic acid sequence. Accordingly, any amino acid sequence presented herein may contain errors due to errors in the nucleic acid sequence, as described in detail above. Furthermore, single nucleotide polymorphisms (SNPs) occur frequently in eukaryotic genomes—more than 1.4 million SNPs have already identified in the human genome, International Human Genome Sequencing Consortium, Nature 409:860-921 (2001)—and the sequence determined from one individual of a species may differ from other allelic forms present within the population. Small deletions and insertions can often be found that do not alter the function of the protein.

[0494] Accordingly, it is an aspect of the present invention to provide proteins not only identical in sequence to those described with particularity herein, but also to provide, for each ORF-encoded peptide described herein, isolated proteins at least about 90% identical in sequence, typically at least about 91%, 92%, 93%, 94%, or 95% identical in sequence to those decribed with particularity herein, usefully at least about 96%, 97%, 98%, or 99% identical in sequence to those described with particularity herein, and, most conservatively, at least about 99.5%, 99.6%, 99.7%, 99.8% and 99.9% identical in sequence to those described with particularity herein. These sequence variants can be naturally occurring or can result from human intervention by way of random or directed mutagenesis.

[0495] For purposes herein, percent identity of two amino acid sequences is determined using the procedure of Tatiana et al., “Blast 2 sequences—a new tool for comparing protein and nucleotide sequences”, FEMS Microbiol Lett. 174:247-250 (1999), which procedure is effectuated by the computer program BLAST 2 SEQUENCES, available online at

[0496] http://www.ncbi.nlm.nih.gov/blast/b12seq/b12.html,

[0497] To assess percent identity of amino acid sequences, the BLASTP module of BLAST 2 SEQUENCES is used with default values of (i) BLOSUM62 matrix, Henikoff et al., Proc. Natl. Acad. Sci USA 89(22):10915-9 (1992); (ii) open gap 11 and extension gap 1 penalties; and (iii) gap x_dropoff 50 expect 10 word size 3 filter, and both sequences are entered in their entireties.

[0498] As is well known, amino acid substitutions occur frequently among natural allelic variants, with conservative substitutions often occasioning only de minimis change in protein function.

[0499] Accordingly, it is an aspect of the present invention to provide proteins not only identical in sequence to those described with particularity herein, but also to provide isolated proteins having the sequence of the ORF-encoded peptides, or portions thereof, with conservative amino acid substitutions. It is a further aspect to provide isolated proteins having the sequence of ORF-encoded peptides, and portions thereof, with moderately conservative amino acid substitutions. These conservatively-sustituted or moderately conservatively-substituted variants can be naturally occurring or can result from human intervention.

[0500] Although there are a variety of metrics for calling conservative amino acid substitutions, based primarily on either observed changes among evolutionarily related proteins or on predicted chemical similarity, for purposes herein a conservative replacement is any change having a positive value in the PAM250 log-likelihood matrix reproduced herein below (see Gonnet et al., Science 256(5062):1443-5 (1992)):

$$\begin{matrix} & A & R & N & D & C & Q & E & G & H & I & L & K & M & F & P & S & T & W & Y & V \\ A & 2 & - 1 & 0 & 0 & 0 & 0 & 0 & 0 & - 1 & - 1 & - 1 & 0 & - 1 & - 2 & 0 & 1 & 1 & - 4 & - 2 & 0 \\ R & - 1 & 5 & 0 & 0 & - 2 & 2 & 0 & - 1 & 1 & - 2 & - 2 & 3 & - 2 & - 3 & - 1 & 0 & 0 & - 2 & - 2 & - 2 \\ N & 0 & 0 & 4 & 2 & - 2 & 1 & 1 & 0 & 1 & - 3 & - 3 & 1 & - 2 & - 3 & - 1 & 1 & 0 & - 4 & - 1 & - 2 \\ D & 0 & 0 & 2 & 5 & - 3 & 1 & 3 & 0 & 0 & - 4 & - 4 & 0 & - 3 & - 4 & - 1 & 0 & 0 & - 5 & - 3 & - 3 \\ C & 0 & - 2 & - 2 & - 3 & 12 & - 2 & - 3 & - 2 & - 1 & - 1 & - 2 & - 3 & - 1 & - 1 & - 3 & 0 & 0 & - 1 & 0 & 0 \\ Q & 0 & 2 & 1 & 1 & - 2 & 3 & 2 & - 1 & 1 & - 2 & - 2 & 2 & - 1 & - 3 & 0 & 0 & 0 & - 3 & - 2 & - 2 \\ E & 0 & 0 & 1 & 3 & - 3 & 2 & 4 & - 1 & 0 & - 3 & - 3 & 1 & - 2 & - 4 & 0 & 0 & 0 & - 4 & - 3 & - 2 \\ G & 0 & - 1 & 0 & 0 & - 2 & - 1 & - 1 & 7 & - 1 & - 4 & - 4 & - 1 & - 4 & - 5 & - 2 & 0 & - 1 & - 4 & - 4 & - 3 \\ H & - 1 & 1 & 1 & 0 & - 1 & 1 & 0 & - 1 & 6 & - 2 & - 2 & 1 & - 1 & 0 & - 1 & 0 & 0 & - 1 & 2 & - 2 \\ I & - 1 & - 2 & - 3 & - 4 & - 1 & - 2 & - 3 & - 4 & - 2 & 4 & 3 & - 2 & 2 & 1 & - 3 & - 2 & - 1 & - 2 & - 1 & 3 \\ L & - 1 & - 2 & - 3 & - 4 & - 2 & - 2 & - 3 & - 4 & - 2 & 3 & 4 & - 2 & 3 & 2 & - 2 & - 2 & - 1 & - 1 & 0 & 2 \\ K & 0 & 3 & 1 & 0 & - 3 & 2 & 1 & - 1 & 1 & - 2 & - 2 & 3 & - 1 & - 3 & - 1 & 0 & 0 & - 4 & - 2 & - 2 \\ M & - 1 & - 2 & - 2 & - 3 & - 1 & - 1 & - 2 & - 4 & - 1 & 2 & 3 & - 1 & 4 & 2 & - 2 & - 1 & - 1 & - 1 & 0 & 2 \\ F & - 2 & - 3 & - 3 & - 4 & - 1 & - 3 & - 4 & - 5 & 0 & 1 & 2 & - 3 & 2 & 7 & - 4 & - 3 & - 2 & 4 & 5 & 0 \\ P & 0 & - 1 & - 1 & - 1 & - 3 & 0 & 0 & - 2 & - 1 & - 3 & - 2 & - 1 & - 2 & - 4 & 8 & 0 & 0 & - 5 & - 3 & - 2 \\ S & 1 & 0 & 1 & 0 & 0 & 0 & 0 & 0 & 0 & - 2 & - 2 & 0 & - 1 & - 3 & 0 & 2 & 2 & - 3 & - 2 & - 1 \\ T & 1 & 0 & 0 & 0 & 0 & 0 & 0 & - 1 & 0 & - 1 & - 1 & 0 & - 1 & - 2 & 0 & 2 & 2 & - 4 & - 2 & 0 \\ W & - 4 & - 2 & - 4 & - 5 & - 1 & - 3 & - 4 & - 4 & - 1 & - 2 & - 1 & - 4 & - 1 & 4 & - 5 & - 3 & - 4 & 14 & 4 & - 3 \\ Y & - 2 & - 2 & - 1 & - 3 & 0 & - 2 & - 3 & - 4 & 2 & - 1 & 0 & - 2 & 0 & 5 & - 3 & - 2 & - 2 & 4 & 8 & - 1 \\ V & 0 & - 2 & - 2 & - 3 & 0 & - 2 & - 2 & - 3 & - 2 & 3 & 2 & - 2 & 2 & 0 & - 2 & - 1 & 0 & - 3 & - 1 & 3\end{matrix}$$

[0501] For purposes herein, a “moderately conservative” replacement is any change having a nonnegative value in the PAM250 log-likelihood matrix reproduced herein above.

[0502] As is also well known in the art, relatedness of proteins can also be characterized using a functional test, the ability of the encoding nucleic acids to base-pair to one another at defined hybridization stringencies.

[0503] It is, therefore, another aspect of the invention to provide isolated proteins not only identical in sequence to those described with particularity herein, but also to provide, for each ORF-encoded peptide of the present invention, isolated proteins (“hybridization related proteins”) that are encoded by nucleic acids that hybridize under high stringency conditions (as defined herein above) to all or to a portion of the ORF-encoded peptide's encoding exon (“reference nucleic acids”). It is a further aspect of the invention to provide, for each ORF-encoded peptide described with particularity herein, isolated proteins (“hybridization related proteins”) that are encoded by nucleic acids that hybridize under moderate sringency conditions (as defmed herein above) to all or to a portion of each of the encoding exon of the respective ORF-encoded peptide.

[0504] The hybridization related proteins can be alternative isoforms, homologues, paralogues, and orthologues of the ORF-encoded peptides of the present invention. Particularly preferred orthologues are those from other primate species, such as chimpanzee, rhesus macaque, baboon, and gorilla, from rodents, such as rats, mice, guinea pigs, and from livestock, such as cow, pig, sheep, horse, goat.

[0505] Relatedness of proteins can also be characterized using a second functional test, the ability of a first protein competitively to inhibit the binding of a second protein to an antibody.

[0506] It is, therefore, another aspect of the present invention to provide isolated proteins not only identical in sequence to the ORF-encoded peptides described with particularity herein, but also to provide, for each ORF-encoded peptide, isolated proteins (“cross-reactive proteins”) that competitively inhibit the binding of antibodies to all or to a portion of the respective ORF-encoded peptide of the present invention (“reference proteins”). Such competitive inhibition can readily be determined using immunoassays well known in the art.

[0507] As further described below, the isolated proteins of the present invention can readily be used as specific immunogens to raise antibodies that specifically recognize the ORF-encoded peptides, their isoforms, homologues, paralogues, and/or orthologues. The antibodies, in turn, can be used, inter alia, specifically to assay for the respective ORF-encoded peptides of the present invention—e.g. by ELISA for detection of protein fluid samples, such as serum, by imrnmunohistochemistry or laser scanning cytometry, for detection of protein in tissue samples, or by flow cytometry, for detection of intracellular protein in cell suspensions—for specific antibody-mediated isolation and/or purification of ORF-encoded peptides of the present invention, as for example by immunoprecipitation, and for use as specific agonists or antagonists of ORF-encoded peptide action.

[0508] The isolated proteins of the present invention are also immediately available for use as specific standards in assays used specifically to determine the concentration and/or amount of the respective ORF-encoded peptide (and proteins comprising the same) of the present invention. For example, ELISA kits for detection and quantitation of protein analytes include purified protein of known concentration for use as a measurement standard (e.g., the human interferon-γ OptElA kit, catalog no. 555142, Pharmingen, San Diego, Calif., USA includes human recombinant gamma interferon, baculovirus produced).

[0509] The isolated proteins of the present invention are also immediately available for use as specific biomolecule capture probes for surface-enhanced laser desorption ionization (SELDI) detection of protein-protein interactions, WO 98/59362; WO 98/59360; WO 98/59361; and Merchant et al., Electrophoresis 21(6):1164-77 (2000), the disclosures of which are incorporated herein by reference in their entireties. The isolated proteins of the present invention are also immediately available for use as specific biomolecule capture probes on BIACORE surface plasmon resonance probes.

[0510] The isolated proteins of the present invention are also useful as a therapeutic supplement in patients having a specific deficiency in ORF-encoded peptide production.

[0511] In another aspect, the invention also provides fragments of various of the proteins of the present invention. The protein fragments are useful, inter alia, as antigenic and immunogenic fragments of the ORF-encoded peptide.

[0512] By “fragments” of a protein is here intended isolated proteins (equally, polypeptides, peptides, oligopeptides), however obtained, that have an amino acid sequence identical to a portion of the reference amino acid sequence, which portion is at least 6 amino acids and less than the entirety of the reference nucleic acid. As so defined, “fragments” need not be obtained by physical fragmentation of the reference protein, although such provenance is not thereby precluded.

[0513] Fragments of at least 6 contiguous amino acids are useful in mapping B cell and T cell epitopes of the reference protein. See, e.g., Geysen et al., “Use of peptide synthesis to probe viral antigens for epitopes to a resolution of a single amino acid,” Proc. Natl. Acad. Sci. USA 81:3998-4002 (1984) and U.S. Pat. Nos. 4,708,871 and 5,595,915, the disclosures of which are incorporated herein by reference in their entireties. Because the fragment need not itself be immunogenic, part of an immunodominant epitope, nor even recognized by native antibody, to be useful in such epitope mapping, all fragments of at least 6 amino acids of the proteins of the present invention have utility in such a study.

[0514] Fragments of at least 8 contiguous amino acids, often at least 15 contiguous amino acids, have utility as immunogens for raising antibodies that recognize the proteins of the present invention. See, e.g., Lemer, “Tapping the immunological repertoire to produce antibodies of predetermined specificity,” Nature 299:592-596 (1982); Shinnick et al., “Synthetic peptide immunogens as vaccines,” Annu. Rev. Microbiol. 37:425-46 (1983); Sutcliffe et al, “Antibodies that react with predetermined sites on proteins,” Science 219:660-6 (1983), the disclosures of which are incorporated herein by reference in their entireties. As further described in the above-cited references, virtually all 8-mers, conjugated to a carrier, such as a protein, prove immunogenic—that is, prove capable of eliciting antibody for the conjugated peptide; accordingly, all fragments of at least 8 amino acids of the proteins of the present invention have utility as immunogens.

[0515] Fragments of at least 8, 9, 10 or 12 contiguous amino acids are also useful as competitive inhibitors of binding of the entire protein, or a portion thereof, to antibodies (as in epitope mapping), and to natural binding partners, such as subunits in a multerimic complex or to receptors or ligands of the subject protein; this competitive inhibition permits identification and separation of molecules that bind specifically to the protein of interest, U.S. Pat. Nos. 5,539,084 and 5,783,674, incorporated herein by reference in their entireties.

[0516] The protein, or protein fragment, of the present invention is thus at least 6 amino acids in length, typically at least 8, 9, 10 or 12 amino acids in length, and often at least 15 amino acids in length. Often, the protein or the present invention, or fragment thereof, is at least 20 amino acids in length, even 25 amino acids, 30 amino acids, 35 amino acids, or 50 amino acids or more in length. Of course, larger fragments having at least 75 amino acids, 100 amino acids, or even 150 amino acids are also useful, and at times preferred.

[0517] The present invention further provides fusions of each of the proteins and protein fragments of the present invention to heterologous polypeptides.

[0518] By fusion is here intended that the protein or protein fragment of the present invention is linearly contiguous to the heterologous polypeptide in a peptide-bonded polymer of amino acids or amino acid analogues; by “heterologous polypeptide” is here intended a polypeptide that does not naturally occur in contiguity with the protein or protein fragment of the present invention. As so defined, the fusion can consist entirely of a plurality of fragments of the ORF-encoded peptide in altered arrangement; in such case, any of the ORF-encoded peptide fragments can be considered heterologous to the other ORF-encoded peptide fragments in the fusion protein. More typically, however, the heterologous polypeptide is not drawn from the ORF-encoded peptide itself.

[0519] The fusion proteins of the present invention will include at least one fragment of the protein of the present invention, which fragment is at least 6, typically at least 8, often at least 15, and usefully at least 16, 17, 18, 19, or 20 amino acids long. The fragment of the protein of the present to be included in the fusion can usefully be at least 25 amino acids long, at least 50 amino acids long, and can be at least 75, 100, or even 150 amino acids long. Fusions that include the entirety of the ORF-encoded peptide of the present invention have particular utility.

[0520] The heterologous polypeptide included within the fusion protein of the present invention is at least 6 amino acids in length, often at least 8 amino acids in length, and usefully at least 15, 20, and 25 amino acids in length. Fusions that include larger polypeptides, such as the IgG Fc region, and even entire proteins (such as GFP chromophore-containing proteins), have particular utility.

[0521] As described above in the description of vectors and expression vectors of the present invention, which discussion is incorporated here by reference in its entirety, heterologous polypeptides to be included in the fusion proteins of the present invention can usefully include those designed to facilitate purification and/or visualization of recombinantly-expressed proteins. Although purification tags can also be incorporated into fusions that are chemically synthesized, chemical synthesis typically provides sufficient purity that further purification by HPLC suffices; however, visualization tags as above described retain their utility even when the protein is produced by chemical synthesis, and when so included render the fusion proteins of the present invention useful as directly detectable markers of the presence of the respective ORF-encoded peptide.

[0522] As also discussed above, heterologous polypeptides to be included in the fusion proteins of the present invention can usefully include those that facilitate secretion of recombinantly expressed proteins—into the periplasmic space or extracellular milieu for prokaryotic hosts, into the culture medium for eukaryotic cells—through incorporation of secretion signals and/or leader sequences.

[0523] Other useful protein fusions of the present invention include those that permit use of the protein of the present invention as bait in a yeast two-hybrid system. See Bartel et al. (eds.), The Yeast Two-Hybrid System, Oxford University Press (1997) (ISBN: 0195109384); Zhu et al., Yeast Hybrid Technologies, Eaton Publishing, (2000) (ISBN 1-881299-15-5); Fields et al., Trends Genet. 10(8):286-92 (1994); Mendelsohn et al., Curr. Opin. Biotechnol. 5(5):482-6 (1994); Luban et al., Curr. Opin. Biotechnol. 6(1):59-64 (1995); Allen et al., Trends Biochem. Sci. 20(12):511-6 (1995); Drees, Curr. Opin. Chem. Biol. 3(1):64-70 (1999); Topcu et al., Pharm. Res. 17(9):1049-55 (2000); Fashena et al., Gene 250(1-2):1-14 (2000), the disclosures of which are incorporated herein by reference in their entireties. Typically, such fusion is to either E. coli LexA or yeast GAL4 DNA binding domains. Related bait plasmids are available that express the bait fused to a nuclear localization signal.

[0524] Other useful protein fusions include those that permit display of the encoded protein on the surface of a phage or cell, fusions to intrinsically fluorescent proteins, such as green fluorescent protein (GFP), and fusions to the IgG Fc region.

[0525] The proteins and protein fragments of the present invention can also usefully be fused to protein toxins, such as Pseudomonas exotoxin A, diphtheria toxin, shiga toxin A, anthrax toxin lethal factor, ricin, in order to effect ablation of cells that bind or take up the proteins of the present invention.

[0526] The isolated proteins, protein fragments, and protein fusions of the present invention can be composed of natural amino acids linked by native peptide bonds, or can contain any or all of nonnatural amino acid analogues, normative bonds, and post-synthetic (post translational) modifications, either throughout the length of the protein or localized to one or more portions thereof.

[0527] As is well known in the art, when the isolated protein is used, e.g., for epitope mapping, the range of such nonnatural analogues, normative inter-residue bonds, or post-synthesis modifications will be limited to those that permit binding of the peptide to antibodies. When used as an immunogen for the preparation of antibodies in a non-human host, such as a mouse, the range of such nonnatural analogues, normative inter-residue bonds, or post-synthesis modifications will be limited to those that do not interfere with the immunogenicity of the protein. When the isolated protein is used as a therapeutic agent, such as a vaccine or for replacement therapy, the range of such changes will be limited to those that do not confer toxicity upon the isolated protein.

[0528] Non-natural amino acids can be incorporated during solid phase chemical synthesis or by recombinant techniques, although the former is typically more common.

[0529] Solid phase chemical synthesis of peptides is well established in the art. Procedures are described, inter alia, in Chan et al. (eds.), Fmoc Solid Phase Peptide Synthesis: A Practical Approach (Practical Approach Series, (Paper)), Oxford Univ. Press (March 2000) (ISBN: 0199637245); Jones, Amino Acid and Peptide Synthesis (Oxford Chemistry Primers, No 7), Oxford Univ. Press (August 1992) (ISBN: 0198556683); and Bodanszky, Principles of Peptide Synthesis (Springer Laboratory), Springer Verlag (December 1993) (ISBN: 0387564314), the disclosures of which are incorporated herein by reference in their entireties.

[0530] Non-natural amino acids can be incorporated during solid phase chemical synthesis. For example, D-enantiomers of natural amino acids can readily be incorporated during chemical peptide synthesis: peptides assembled from D-amino acids are more resistant to proteolytic attack; incorporation of D-enantiomers can also be used to confer specific three dimensional conformations on the peptide. Other amino acid analogues commonly added during chemical synthesis include omithine, norleucine, phosphorylated amino acids (typically phosphoserine, phosphothreonine, phosphotyrosine), L-malonyltyrosine, a non-hydrolyzable analog of phosphotyrosine (Kole et al., Biochem. Biophys. Res. Com. 209:817-821 (1995)), and various halogenated phenylalanine derivatives.

[0531] Amino acid analogues having detectable labels are also usefully incorporated during synthesis to provide a labeled polypeptide.

[0532] Biotin, for example, can be added using biotinoyl-(9-fluorenylmethoxycarbonyl)-L-lysine (FMOC biocytin) (Molecular Probes, Eugene, Oreg., USA). The FMOC and tBOC derivatives of dabcyl-L-lysine (Molecular Probes, Inc., Eugene, Oreg., USA) can be used to incorporate the dabcyl chromophore at selected sites in the peptide sequence during synthesis. The aminonaphthalene derivative EDANS, the most common fluorophore for pairing with the dabcyl quencher in fluorescence resonance energy transfer (FRET) systems, can be introduced during automated synthesis of peptides by using EDANS—FMOC-L-glutamic acid or the corresponding tBOC derivative (both from Molecular Probes, Inc., Eugene, Oreg., USA). Tetramethylrhodamine fluorophores can be incorporated during automated FMOC synthesis of peptides using (FMOC)—TMR-L-lysine (Molecular Probes, Inc. Eugene, Oreg., USA).

[0533] Other useful amino acid analogues that can be incorporated during chemical synthesis include aspartic acid, glutamic acid, lysine, and tyrosine analogues having allyl side-chain protection (Applied Biosystems, Inc., Foster City, Calif., USA); the allyl side chain permits synthesis of cyclic, branched-chain, sulfonated, glycosylated, and phosphorylated peptides.

[0534] A large number of other FMOC-protected non-natural amino acid analogues capable of incorporation during chemical synthesis are available commercially, including, e.g., Fmoc-2-aminobicyclo[2.2.1]heptane-2-carboxylic acid, Fmoc-3-endo-aminobicyclo[2.2.1]heptane-2-endo-carboxylic acid, Fmoc-3-exo-aminobicyclo[2.2.1]heptane-2-exo-carboxylic acid, Fmoc-3-endo-amino-bicyclo[2.2.1 ]hept-5-ene-2-endo-carboxylic acid, Fmoc-3-exo-amino-bicyclo[2.2.1 ]hept-5-ene-2-exo-carboxylic acid, Fmoc-cis-2-amino-1-cyclohexanecarboxylic acid, Fmoc-trans-2-amino-1-cyclohexanecarboxylic acid, Fmoc-1-amino-1-cyclopentanecarboxylic acid, Fmoc-cis-2-amino-1-cyclopentanecarboxylic acid, Fmoc-1-amino-1-cyclopropanecarboxylic acid, Fmoc-D-2-amino-4-(ethylthio)butyric acid, Fmoc-L-2-amino-4-(ethylthio)butyric acid, Fmoc-L-buthionine, Fmoc-S-methyl-L-Cysteine, Fmoc-2-aminobenzoic acid (anthranillic acid), Fmoc-3-aminobenzoic acid, Fmoc-4-aminobenzoic acid, Fmoc-2-aminobenzophenone-2′-carboxylic acid, Fmoc-N-(4-aminobenzoyl)-b-alanine, Fmoc-2-amino-4,5-dimethoxybenzoic acid, Fmoc-4-aminohippuric acid, Fmoc-2-amino-3-hydroxybenzoic acid, Fmoc-2-amino-5-hydroxybenzoic acid, Fmoc-3-amino-4-hydroxybenzoic acid, Fmoc-4-amino-3-hydroxybenzoic acid, Fmoc-4-amino-2-hydroxybenzoic acid, Fmoc-5-amino-2-hydroxybenzoic acid, Fmoc-2-amino-3-methoxybenzoic acid, Fmoc-4-amino-3-methoxybenzoic acid, Fmoc-2-amino-3-methylbenzoic acid, Fmoc-2-amino-5-methylbenzoic acid, Fmoc-2-amino-6-methylbenzoic acid, Fmoc-3-amino-2-methylbenzoic acid, Fmoc-3-amino-4-methylbenzoic acid, Fmoc-4-amino-3-methylbenzoic acid, Fmoc-3-amino-2-naphtoic acid, Fmoc-D,L-3-amino-3-phenylpropionic acid, Fmoc-L-Methyldopa, Fmoc-2-amino-4,6-dimethyl-3-pyridinecarboxylic acid, Fmoc-D,L-?-amino-2-thiophenacetic acid, Fmoc-4-(carboxymethyl)piperazine, Fmoc-4-carboxypiperazine, Fmoc-4-(carboxymethyl)homopiperazine, Fmoc-4-phenyl-4-piperidinecarboxylic acid, Fmoc-L-1,2,3,4-tetrahydronorharman-3-carboxylic acid, Fmoc-L-thiazolidine-4-carboxylic acid, all available from The Peptide Laboratory (Richmond, Calif., USA).

[0535] Non-natural residues can also be added biosynthetically by engineering a suppressor tRNA, typically one that recognizes the UAG stop codon, by chemical aminoacylation with the desired unnatural amino acid and. Conventional site-directed mutagenesis is used to introduce the chosen stop codon UAG at the site of interest in the protein gene. When the acylated suppressor tRNA and the mutant gene are combined in an in vitro transcription/translation system, the unnatural amino acid is incorporated in response to the UAG codon to give a protein containing that amino acid at the specified position. Liu et al., Proc. Natl Acad. Sci. USA 96(9):4780-5 (1999).

[0536] The isolated proteins, protein fragments and fusion proteins of the present invention can also include nonnative inter-residue bonds, including bonds that lead to circular and branched forms.

[0537] The isolated proteins and protein fragments of the present invention can also include post-translational and post-synthetic modifications, either throughout the length of the protein or localized to one or more portions thereof.

[0538] For example, when produced by recombinant expression in eukaryotic cells, the isolated proteins, fragments, and fusion proteins of the present invention will typically include N-linked and/or O-linked glycosylation, the pattern of which will reflect both the availability of glycosylation sites on the protein sequence and the identity of the host cell. Further modification of glycosylation pattern can be performed enzymatically.

[0539] As another example, recombinant polypeptides of the invention may also include an initial modified methionine residue, in some cases resulting from host-mediated processes.

[0540] When the proteins, protein fragments, and protein fusions of the present invention are produced by chemical synthesis, post-synthetic modification can be performed before deprotection and cleavage from the resin or after deprotection and cleavage. Modification before deprotection and cleavage of the synthesized protein often allows greater control, e.g. by allowing targeting of the modifying moiety to the N-terminus of a resin-bound synthetic peptide.

[0541] Useful post-synthetic (and post-translational) modifications include conjugation to detectable labels, such as fluorophores.

[0542] A wide variety of amine-reactive and thiol-reactive fluorophore derivatives have been synthesized that react under nondenaturating conditions with N-terminal amino groups and epsilon amino groups of lysine residues, on the one hand, and with free thiol groups of cysteine residues, on the other.

[0543] Kits are available commercially that permit conjugation of proteins to a variety of amine-reactive or thiol-reactive fluorophores: Molecular Probes, Inc. (Eugene, Oreg., USA), e.g., offers kits for conjugating proteins to Alexa Fluor 350, Alexa Fluor 430, Fluorescein-EX, Alexa Fluor 488, Oregon Green 488, Alexa Fluor 532, Alexa Fluor 546, Alexa Fluor 546, Alexa Fluor 568, Alexa Fluor 594, and Texas Red-X.

[0544] A wide variety of other amine-reactive and thiol-reactive fluorophores are available commercially (Molecular Probes, Inc., Eugene, Oreg., USA), including Alexa Fluor® 350, Alexa Fluor® 488, Alexa Fluor® 532, Alexa Fluor® 546, Alexa Fluorg 568, Alexa Fluor® 594, Alexa Fluor® 647 (monoclonal antibody labeling kits available from Molecular Probes, Inc., Eugene, Oreg., USA), BODIPY dyes, such as BODIPY 493/503, BODIPY FL, BODIPY R6G, BODIPY 530/550, BODIPY TMR, BODIPY 558/568, BODIPY 558/568, BODIPY 564/570, BODIPY 576/589, BODIPY 581/591, BODIPY TR, BODIPY 630/650, BODIPY 650/665, Cascade Blue, Cascade Yello, Dansyl, lissamine rhodamine B, Marina Blue, Oregon Green 488, Oregon Green 514, Pacific Blue, rhodamine 6G, rhodamine green, rhodamine red, tetramnethylrhodamine, Texas Red (available from Molecular Probes, Inc., Eugene, Oreg., USA).

[0545] The polypeptides of the present invention can also be conjugated to fluorophores, other proteins, and other macromolecules, using bifunctional linking reagents.

[0546] Common homobifunctional reagents include, e.g., APG, AEDP, BASED, BMB, BMDB, BMH, BMOE, BM[PEO]3, BM[PEO]4, BS3, BSOCOES, DFDNB, DMA, DMP, DMS, DPDPB, DSG, DSP (Lomant's Reagent), DSS, DST, DTBP, DTME, DTSSP, EGS, HBVS, Sulfo-BSOCOES, Sulfo-DST, Sulfo-EGS (all available Pierce, Rockford, Ill., USA); common heterobifunctional cross-linkers include ABH, AMAS, ANB-NOS, APDP, ASBA, BMPA, BMPH, BMPS, EDC, EMCA, EMCH, EMCS, KMUA, KMUH, GMBS, LC-SMCC, LC-SPDP, MBS, M2C2H, MPBH, MSA, NHS-ASA, PDPH, PMPI, SADP, SAED, SAND, SANPAH, SASD, SATP, SBAP, SFAD, SIA, SIAB, SMCC, SMPB, SMPH, SMPT, SPDP, Sulfo-EMCS, Sulfo-GMBS, Sulfo-HSAB, Sulfo-KMUS, Sulfo-LC-SPDP, Sulfo-MBS, Sulfo-NHS-LC-ASA, Sulfo-SADP, Sulfo-SANPAH, Sulfo-SIAB, Sulfo-SMCC, Sulfo-SMPB, Sulfo-LC-SMPT, SVSB, TFCS (all available Pierce, Rockford, Ill., USA).

[0547] The proteins, protein fragments, and protein fusions of the present invention can be conjugated, using such cross-linking reagents, to fluorophores that are not amine- or thiol-reactive.

[0548] Other labels that usefully can be conjugated to the proteins, protein fragments, and fusion proteins of the present invention include radioactive labels, echosonographic contrast reagents, and MRI contrast agents.

[0549] The proteins, protein fragments, and protein fusions of the present invention can also usefully be conjugated using cross-linking agents to carrier proteins, such as KLH, bovine thyroglobulin, and even bovine serum albumin (BSA), to increase immunogenicity for raising antibodies that recognize the ORF-encoded peptide immunogen.

[0550] The proteins, protein fragments, and protein fusions of the present invention can also usefully be conjugated to polyethylene glycol (PEG); PEGylation increases the serum half life of proteins administered intravenously for replacement therapy. Delgado et al., Crit. Rev. Ther. Drug Carrier Syst. 9(3-4):249-304 (1992); Scott et al., Curr. Pharm. Des. 4(6):423-38 (1998); DeSantis et al., Curr. Opin. Biotechnol. 10(4):324-30 (1999), incorporated herein by reference in their entireties. PEG monomers can be attached to the protein directly or through a linker, with PEGylation using PEG monomers activated with tresyl chloride (2,2,2-trifluoroethanesulphonyl chloride) permitting direct attachment under mild conditions.

[0551] The isolated proteins of the present invention, including fusions thereof, can be produced by recombinant expression, typically using the expression vectors of the present invention as above-described or, if fewer than about 100 amino acids, by chemical synthesis (typically, solid phase synthesis), and, on occasion, by in vitro translation.

[0552] Production of the isolated proteins of the present invention can optionally be followed by purification.

[0553] Purification of recombinantly expressed proteins is now well within the skill in the art. See, e.g., Thomer et al. (eds.), Applications of Chimeric Genes and Hybrid Proteins, Part A: Gene Expression and Protein Purification (Methods in Enzymology, Volume 326), Academic Press (2000), (ISBN: 0121822273); Harbin (ed.), Cloning, Gene Expression and Protein Purification : Experimental Procedures and Process Rationale, Oxford Univ. Press (2001) (ISBN: 0195132947); Marshak et al., Strategies for Protein Purification and Characterization: A Laboratory Course Manual, Cold Spring Harbor Laboratory Press (1996) (ISBN: 0-87969-385-1); and Roe (ed.), Protein Purification Applications, Oxford University Press (2001), the disclosures of which are incorporated herein by reference in their entireties, and thus need not be detailed here.

[0554] Briefly, however, if purification tags have been fused through use of an expression vector that appends such tag, purification can be effected, at least in part, by means appropriate to the tag, such as use of immobilized metal affinity chromatography for polyhistidine tags. Other techniques common in the art include ammonium sulfate fractionation, immunoprecipitation, fast protein liquid chromatography (FPLC), high performance liquid chromatography (HPLC), and preparative gel electrophoresis.

[0555] Purification of chemically-synthesized peptides can readily be effected, e.g., by HPLC.

[0556] Accordingly, it is an aspect of the present invention to provide the isolated proteins of the present invention in pure or substantially pure form.

[0557] A purified protein of the present invention is an isolated protein, as above described, that is present at a concentration of at least 95%, as measured on a mass basis with respect to total protein in a composition. Such purities can often be obtained during chemical synthesis without further purification, as, e.g., by HPLC. Purified proteins of the present invention can be present at a concentration (measured on a mass basis with respect to total protein in a composition) of 96%, 97%, 98%, and even 99%. The proteins of the present invention can even be present at levels of 99.5%, 99.6%, and even 99.7%, 99.8%, or even 99.9% following purification, as by HPLC.

[0558] Although high levels of purity are preferred when the isolated proteins of the present invention are used as therapeutic agents—such as vaccines, or for replacement therapy—the isolated proteins of the present invention are also useful at lower purity. For example, partially purified proteins of the present invention can be used as immunogens to raise antibodies in laboratory animals.

[0559] Thus, in another aspect, the present invention provides the isolated proteins of the present invention in substantially purified form. A “substantially purified protein” of the present invention is an isolated protein, as above described, present at a concentration of at least 70%, measured on a mass basis with respect to total protein in a composition. Usefully, the substantially purified protein is present at a concentration, measured on a mass basis with respect to total protein in a composition, of at least 75%, 80%, or even at least 85%, 90%, 91%, 92%, 93%, 94%, 94.5% or even at least 94.9%.

[0560] In preferred embodiments, the purified and substantially purified proteins of the present invention are in compositions that lack detectable ampholytes, acrylamide monomers, bis-acrylamide monomers, and polyacrylamide.

[0561] The proteins, fragments, and fusions of the present invention can usefully be attached to a substrate. The substrate can porous or solid, planar or non-planar; the bond can be covalent or noncovalent.

[0562] For example, the proteins, fragments, and fusions of the present invention can usefully be bound to a porous substrate, commonly a membrane, typically comprising nitrocellulose, polyvinylidene fluoride (PVDF), or cationically derivatized, hydrophilic PVDF; so bound, the proteins, fragments, and fusions of the present invention can be used to detect and quantify antibodies, e.g. in serum, that bind specifically to the immobilized protein of the present invention.

[0563] As another example, the proteins, fragments, and fusions of the present invention can usefully be bound to a substantially nonporous substrate, such as plastic, to detect and quantify antibodies, e.g. in serum, that bind specifically to the immobilized protein of the present invention. Such plastics include polymethylacrylic, polyethylene, polypropylene, polyacrylate, polymethylmethacrylate, polyvinylchloride, polytetrafluoroethylene, polystyrene, polycarbonate, polyacetal, polysulfone, celluloseacetate, cellulosenitrate, nitrocellulose, or mixtures thereof; when the assay is performed in standard microtiter dish, the plastic is typically polystyrene.

[0564] The proteins, fragments, and fusions of the present invention can also be attached to a substrate suitable for use as a surface enhanced laser desorption ionization source; so attached, the protein, fragment, or fusion of the present invention is useful for binding and then detecting secondary proteins that bind with sufficient affinity or avidity to the surface-bound protein to indicate biologic interaction therebetween. The proteins, fragments, and fusions of the present invention can also be attached to a substrate suitable for use in surface plasmon resonance detection; so attached, the protein, fragment, or fusion of the present ivnention is useful for binding and then detecting secondary proteins that bind with sufficient affinity or avidity to the surface-bound protein to indicate biological interaction therebetween.

[0565] Antibodies and Antibody-Producing Cells

[0566] In another aspect, the invention provides antibodies, including fragments and derivatives thereof, that bind specifically to the ORF-encoded peptides, and fragments thereof, of the present invention, or that bind to one or more of the proteins and protein fragments encoded by the isolated nucleic acids of the present invention. The antibodies of the present invention specifically recognize any or all of linear epitopes, discontinuous epitopes, or conformational epitopes of such proteins or protein fragments, either as present on the protein in its native conformation or, in some cases, as present on the proteins as denatured, as, e.g., by solubilization in SDS.

[0567] In other embodiments, the invention provides antibodies, including fragments and derivatives thereof, the binding of which can be competitively inhibited by one or more of the ORF-encoded peptides and peptide fragments of the present invention, or by one or more of the proteins and protein fragments encoded by the isolated nucleic acids of the present invention.

[0568] As used herein, the term “antibody” refers to a polypeptide, at least a portion of which is encoded by at least one immunoglobulin gene, which can bind specifically to a first molecular species, and to fragments or derivatives thereof that remain capable of such specific binding.

[0569] By “bind specifically” and “specific binding” is here intended the ability of the antibody to bind to a first molecular species in preference to binding to other molecular species with which the antibody and first molecular species are admixed. An antibody is said specifically to “recognize” a first molecular species when it can bind specifically to that first molecular species.

[0570] As is well known in the art, the degree to which an antibody can discriminate as among molecular species in a mixture will depend, in part, upon the conformational relatedness of the species in the mixture; typically, the antibodies of the present invention will discriminate over adventitious binding to proteins other than the ORF-encoded peptide by at least two-fold, more typically by at least 5-fold, typically by more than 10-fold, 25-fold, 50-fold, 75-fold, and often by more than 100-fold, and on occasion by more than 500-fold or 1000-fold. When used to detect the proteins or protein fragments of the present invention, the antibody of the present invention is sufficiently specific when it can be used to determine the presence of the protein of the present invention in human serum.

[0571] Typically, the affinity or avidity of an antibody (or antibody multimer, as in the case of an IgM pentamer) of the present invention for a protein or protein fragment of the present invention will be at least about 1×10⁻⁶ molar (M), typically at least about 5×10⁻⁷ M, usefully at least about 1×10⁻⁷ M, with affinities and avidities of at least 1×10⁻8 M, 5×10⁻⁹ M, and 1×10⁻¹⁰ M proving especially useful.

[0572] The antibodies of the present invention can be naturally-occurring forms, such as IgG, IgM, IgD, IgE, and IgA, from any mammalian species.

[0573] Human antibodies can, but will infrequently, be drawn directly from human donors or human cells. In such case, antibodies to the proteins of the present invention will typically have resulted from fortuitous immunization, such as autoimmune immunization, with the protein or protein fragments of the present invention. Such antibodies will typically, but will not invariably, be polyclonal.

[0574] Human antibodies are more frequently obtained using transgenic animals that express human immunoglobulin genes, which transgenic animals can be affirmatively immunized with the protein immunogen of the present invention. Human Ig-transgenic mice capable of producing human antibodies and methods of producing human antibodies therefrom upon specific immunization are described, inter alia, in U.S. Pat. Nos. 6,162,963; 6,150,584; 6,114,598; 6,075,181; 5,939,598; 5,877,397; 5,874,299; 5,814,318; 5,789,650; 5,770,429; 5,661,016; 5,633,425; 5,625,126; 5,569,825; 5,545,807; 5,545,806, and 5,591,669, the disclosures of which are incorporated herein by reference in their entireties. Such antibodies are typically monoclonal, and are typically produced using techniques developed for production of murine antibodies.

[0575] Human antibodies are particularly useful, and often preferred, when the antibodies of the present invention are to be administered to human beings as in vivo diagnostic or therapeutic agents, since recipient immune response to the administered antibody will often be substantially less than that occasioned by administration of an antibody derived from another species, such as mouse.

[0576] IgG, IgM, IgD, IgE and IgA antibodies of the present invention are also usefully obtained from other mammalian species, including rodents—typically mouse, but also rat, guinea pig, and hamster—lagomorphs, typically rabbits, and also larger mammals, such as sheep, goats, cows, and horses. In such cases, as with the transgenic human-antibody-producing non-human mammals, fortuitous immunization is not required, and the non-human mammal is typically affirmatively immunized, according to standard immunization protocols, with the protein or protein fragment of the present invention.

[0577] As discussed above, virtually all fragments of 8 or more contiguous amino acids of the proteins of the present invention can be used effectively as immunogens when conjugated to a carrier, typically a protein such as bovine thryoglobulin, keyhole limpet hemocyanin, or bovine serum albumin, conveniently using a bifunctional linker such as those described elsewhere above, which discussion is incorporated by reference here.

[0578] Immunogenicity can also be conferred by fusion of the proteins and protein fragments of the present invention to other moieties.

[0579] For example, peptides of the present invention can be produced by solid phase synthesis on a branched polylysine core matrix; these multiple antigenic peptides (MAPs) provide high purity, increased avidity, accurate chemical definition and improved safety in vaccine development. Tam et al., Proc. Natl. Acad. Sci. USA 85:5409-5413 (1988); Posnett et al., J. Biol. Chem. 263, 1719-1725 (1988).

[0580] Protocols for immunizing non-human mammals are well-established in the art, Harlow et al. (eds.), Antibodies: A Laboratory Manual, Cold Spring Harbor Laboratory (1998) (ISBN: 0879693142); Coligan et al. (eds.), Current Protocols in Immunology, John Wiley & Sons, Inc. (2001) (ISBN: 0-471-52276-7); Zola, Monoclonal Antibodies: Preparation and Use of Monoclonal Antibodies and Engineered Antibody Derivatives (Basics: From Background to Bench), Springer Verlag (2000) (ISBN: 0387915907), the disclosures of which are incorporated herein by reference, and often include multiple immunizations, either with or without adjuvants such as Freund's complete adjuvant and Freund's incomplete adjuvant.

[0581] Antibodies from nonhuman mammals can be polyclonal or monoclonal, with polyclonal antibodies having certain advantages in immunohistochemical detection of the proteins of the present invention and monoclonal antibodies having advantages in identifying and distinguishing particular epitopes of the proteins of the present invention.

[0582] Following immunization, the antibodies of the present invention can be produced using any art-accepted technique. Such techniques are well known in the art, Coligan et al. (eds.), Current Protocols in Immunology, John Wiley & Sons, Inc. (2001) (ISBN: 0-471-52276-7); Zola, Monoclonal Antibodies: Preparation and Use of Monoclonal Antibodies and Engineered Antibody Derivatives (Basics: From Background to Bench), Springer Verlag (2000) (ISBN: 0387915907); Howard et al. (eds.), Basic Methods in Antibody Production and Characterization, CRC Press (2000) (ISBN: 0849394457); Harlow et al. (eds.), Antibodies: A Laboratory Manual, Cold Spring Harbor Laboratory (1998) (ISBN: 0879693142); Davis (ed.), Monoclonal Antibody Protocols, Vol. 45, Humana Press (1995) (ISBN: 0896033082); Delves (ed.), Antibody Production: Essential Techniques, John Wiley & Son Ltd (1997) (ISBN: 0471970107); Kenney, Antibody Solution: An Antibody Methods Manual, Chapman & Hall (1997) (ISBN: 0412141914), incorporated herein by reference in their entireties, and thus need not be detailed here.

[0583] Briefly, however, such techniques include, inter alia, production of monoclonal antibodies by hybridomas and expression of antibodies or fragments or derivatives thereof from host cells engineered to express immunoglobulin genes or fragments thereof. These two methods of production are not mutually exclusive: genes encoding antibodies specific for the proteins or protein fragments of the present invention can be cloned from hybridomas and thereafter expressed in other host cells. Nor need the two necessarily be performed together: e.g., genes encoding antibodies specific for the proteins and protein fragments of the present invention can be cloned directly from B cells known to be specific for the desired protein, as further described in U.S. Pat. No. 5,627,052, the disclosure of which is incorporated herein by reference in its entirety, or from antibody-displaying phage.

[0584] Recombinant expression in host cells is particularly useflul when fragments or derivatives of the antibodies of the present invention are desired.

[0585] Host cells for recombinant antibody production—either whole antibodies, antibody fragments, or antibody derivatives—can be prokaryotic or eukaryotic.

[0586] Prokaryotic hosts are particularly useful for producing phage displayed antibodies of the present invention.

[0587] The technology of phage-displayed antibodies, in which antibody variable region fragments are fused, for example, to the gene III protein (pIII) or gene VIII protein (pVIII) for display on the surface of filamentous phage, such as M13, is by now well-established, Sidhu, Curr. Opin. Biotechnol. 11 (6):610-6 (2000); Griffiths et al., Curr. Opin. Biotechnol. 9(1):102-8 (1998); Hoogenboom et al., Immunotechnology, 4(1):1-20 (1998); Rader et al., Current Opinion in Biotechnology 8:503-508 (1997); Aujame et al., Human Antibodies 8:155-168 (1997); Hoogenboom, Trends in Biotechnol. 15:62-70 (1997); de Kruif et al., 17:453-455 (1996); Barbas et al., Trends in Biotechnol. 14:230-234 (1996); Winter et al., Ann. Rev. Immunol. 433-455 (1994), and techniques and protocols required to generate, propagate, screen (pan), and use the antibody fragments from such libraries have recently been compiled, Barbas et al., Phage Display: A Laboratory Manual, Cold Spring Harbor Laboratory Press (2001) (ISBN 0-87969-546-3); Kay et al. (eds.), Phage Display of Peptides and Proteins: A Laboratory Manual, Academic Press, Inc. (1996); Abelson et al. (eds.), Combinatorial Chemistry, Methods in Enzymology vol. 267, Academic Press (May 1996), the disclosures of which are incorporated herein by reference in their entireties.

[0588] Typically, phage-displayed antibody fragments are scFv fragments or Fab fragments; when desired, fuill length antibodies can be produced by cloning the variable regions from the displaying phage into a complete antibody and expressing the full length antibody in a further prokaryotic or a eukaryotic host cell.

[0589] Eukaryotic cells are also useful for expression of the antibodies, antibody fragments, and antibody derivatives of the present invention.

[0590] For example, antibody fragments of the present invention can be produced in Pichia pastoris, Takahashi et al., Biosci. Biotechnol. Biochem. 64(10):2138-44 (2000); Freyre et al., J. Biotechnol. 76(2-3):157-63 (2000); Fischer et al., Biotechnol. Appl. Biochem. 30 (Pt 2):1 17-20 (1999); Pennell et al., Res. Immunol. 149(6):599-603 (1998); Eldin et al., J. Immunol. Methods. 201(l):67-75 (1997); and in Saccharomyces cerevisiae, Frenken et al., Res. Immunol. 149(6):589-99 (1998); Shusta et al., Nature Biotechnol. 16(8):773-7 (1998), the disclosures of which are incorporated herein by reference in their entireties.

[0591] Antibodies, including antibody fragments and derivatives, of the present invention can also be produced in insect cells, Li et al., Protein Expr. Purif. 21(1):121-8 (2001); Ailor et al., Biotechnol. Bioeng. 58(2-3):196-203 (1998); Hsu et al., Biotechnol. Prog. 13(1):96-104 (1997); Edelman et al., Immunology 91(1):13-9 (1997); and Nesbit et al., J. Immunol. Methods. 151(1-2):201-8 (1992), the disclosures of which are incorporated herein by reference in their entireties.

[0592] Antibodies and fragments and derivatives thereof of the present invention can also be produced in plant cells, Giddings et al., Nature Biotechnol. 18(11): 1151-5 (2000); Gavilondo et al., Biotechniques 29(l):128-38 (2000); Fischer et al., J. Biol. Regul. Homeost. Agents 14(2):83-92 (2000); Fischer et al., Biotechnol. Appl. Biochem. 30 (Pt 2):113-6 (1999); Fischer et al., Biol. Chem. 380(7-8):825-39 (1999); Russell, Curr. Top. Microbiol. ImmunoL. 240:119-38 (1999); and Ma et al., Plant Physiol. 109(2):341-6 (1995), the disclosures of which are incorporated herein by reference in their entireties.

[0593] Mammalian cells useful for recombinant expression of antibodies, antibody fragments, and antibody derivatives of the present invention include CHO cells, COS cells, 293 cells, and myeloma cells.

[0594] Verma etal., J. Immunol. Methods 216(1-2):165-81 (1998), review and compare bacterial, yeast, insect and mammalian expression systems for expression of antibodies.

[0595] Antibodies of the present invention can also be prepared by cell free translation, as further described in Merk et al, J. Biochem. (Tokyo). 125(2):328-33 (1999) and Ryabova et al., Nature Biotechnol. 15(1):79-84 (1997), and in the milk of transgenic animals, as further described in Pollock et al., J. Immunol. Methods 231(1-2):147-57 (1999), the disclosures of which are incorporated herein by reference in their entireties.

[0596] The invention further provides antibody fragments that bind specifically to one or more of the proteins and protein fragments of the present invention, to one or more of the proteins and protein fragments encoded by the isolated nucleic acids of the present invention, or the binding of which can be competitively inhibited by one or more of the proteins and protein fragments of the present invention or one or more of the proteins and protein fragments encoded by the isolated nucleic acids of the present invention.

[0597] Among such useful fragments are Fab, Fab′, Fv, F(ab)′₂, and single chain Fv (scFv) fragments. Other useful fragments are described in Hudson, Curr. Opin. Biotechnol. 9(4):395-402 (1998).

[0598] It is also an aspect of the present invention to provide antibody derivatives that bind specifically to one or more of the proteins and protein fragments of the present invention, to one or more of the proteins and protein fragments encoded by the isolated nucleic acids of the present invention, or the binding of which can be competitively inhibited by one or more of the proteins and protein fragments of the present invention or one or more of the proteins and protein fragments encoded by the isolated nucleic acids of the present invention.

[0599] Among such useful derivatives are chimeric, primatized, and humanized antibodies; such derivatives are less immunogenic in human beings, and thus more suitable for in vivo administration, than are unmodified antibodies from non-human mammalian species.

[0600] Chimeric antibodies typically include heavy and/or light chain variable regions (including both CDR and framework residues) of immunoglobulins of one species, typically mouse, fused to constant regions of another species, typically human. See, e.g., U.S. Pat. No. 5,807,715; Morrison et al., Proc. Natl. Acad. Sci USA.81(21):6851-5 (1984); Sharon et al., Nature 309(5966):364-7 (1984); Takeda et al., Nature 314(6010):452-4 (1985), the disclosures of which are incorporated herein by reference in their entireties. Primatized and humanized antibodies typically include heavy and/or light chain CDRs from a murine antibody grafted into a non-human primate or human antibody V region framework, usually further comprising a human constant region, Riechmann et al., Nature 332(6162):323-7 (1988); Co et al., Nature 351(6326):501-2 (1991); U.S. Pat. Nos. 6,054,297; 5,821,337; 5,770,196; 5,766,886; 5,821,123; 5,869,619; 6,180,377; 6,013,256; 5,693,761; and 6,180,370, the disclosures of which are incorporated herein by reference in their entireties.

[0601] Other useful antibody derivatives of the invention include heteromeric antibody complexes and antibody fusions, such as diabodies (bispecific antibodies), single-chain diabodies, and intrabodies.

[0602] The antibodies of the present invention, including fragments and derivatives thereof, can usefully be labeled. It is, therefore, another aspect of the present invention to provide labeled antibodies that bind specifically to one or more of the proteins and protein fragments of the present invention, to one or more of the proteins and protein fragments encoded by the isolated nucleic acids of the present invention, or the binding of which can be competitively inhibited by one or more of the proteins and protein fragments of the present invention or one or more of the proteins and protein fragments encoded by the isolated nucleic acids of the present invention.

[0603] The choice of label depends, in part, upon the desired use.

[0604] For example, when the antibodies of the present invention are used for immunohistochemical staining of tissue samples, the label can usefully be an enzyme that catalyzes production and local deposition of a detectable product.

[0605] Enzymes typically conjugated to antibodies to permit their immunohistochemical visualization are well known, and include alkaline phosphatase, β-galactosidase, glucose oxidase, horseradish peroxidase (HRP), and urease. Typical substrates for production and deposition of visually detectable products include o-Nitrophenyl-beta-D-galactopyranoside (ONPG); o-Phenylenediamine Dihydrochloride (OPD); p-Nitrophenyl Phosphate (PNPP); p-Nitrophenyl-beta-D-galactopryanoside (PNPG); 3′,3′Diaminobenzidine (DAB); 3-Amino-9-ethylcarbazole (AEC); 4-Chloro-1-naphthol (CN); 5-Bromo-4-chloro-3-indolyl-phosphate (BCIP); ABTS®; BluoGal; iodonitrotetrazolium (INT); nitroblue tetrazolium chloride (NBT); phenazine methosulfate (PMS); phenolphthalein monophosphate (PMP); tetramethyl benzidine (TMB); tetranitroblue tetrazolium (TNBT); X-Gal; X-Gluc; and X-Glucoside.

[0606] Other substrates can be used to produce products for local deposition that are luminescent. For example, in the presence of hydrogen peroxide (H₂O₂), horseradish peroxidase (HRP) can catalyze the oxidation of cyclic diacylhydrazides, such as luminol. Immediately following the oxidation, the luminol is in an excited state (intermediate reaction product), which decays to the ground state by emitting light. Strong enhancement of the light emission is produced by enhancers, such as phenolic compounds. Advantages include high sensitivity, high resolution, and rapid detection without radioactivity and requiring only small amounts of antibody. See, e.g., Thorpe et al., Methods Enzymol. 133:331-53 (1986); Kricka et al., J. Immunoassay 17(1):67-83 (1996); and Lundqvist et al., J. Biolumin. Chemilumin. 10(6):353-9 (1995), the disclosures of which are incorporated herein by reference in their entireties. Kits for such enhanced chemiluminescent detection (ECL) are available commercially.

[0607] The antibodies can also be labeled using colloidal gold.

[0608] As another example, when the antibodies of the present invention are used, e.g., for flow cytometric detection, for scanning laser cytometric detection, or for fluorescent immunoassay, they can usefully be labeled with fluorophores.

[0609] There are a wide variety of fluorophore labels that can usefully be attached to the antibodies of the present invention.

[0610] For flow cytometric applications, both for extracellular detection and for intracellular detection, common useful fluorophores can be fluorescein isothiocyanate (FITC), allophycocyanin (APC), R-phycoerythrin (PE), peridinin chlorophyll protein (PerCP), Texas Red, Cy3, Cy5, fluorescence resonance energy tandem fluorophores such as PerCP-Cy5.5, PE-Cy5, PE-Cy5.5, PE-Cy7, PE-Texas Red, and APC-Cy7.

[0611] Other fluorophores include, inter alia, Alexa Fluor® 350, Alexa Fluor® 488, Alexa Fluor® 532, Alexa Fluor® 546, Alexa Fluor® 568, Alexa Fluor® 594, Alexa Fluor® 647 (monoclonal antibody labeling kits available from Molecular Probes, Inc., Eugene, Oreg., USA), BODIPY dyes, such as BODIPY 493/503, BODIPY FL, BODIPY R6G, BODIPY 530/550, BODIPY TMR, BODIPY 558/568, BODIPY 558/568, BODIPY 564/570, BODIPY 576/589, BODIPY 581/591, BODIPY TR, BODIPY 630/650, BODIPY 650/665, Cascade Blue, Cascade Yello, Dansyl, lissamine rhodamine B, Marina Blue, Oregon Green 488, Oregon Green 514, Pacific Blue, rhodamine 6G, rhodamine green, rhodamine red, tetramethylrhodamine, Texas Red (available from Molecular Probes, Inc., Eugene, Oreg., USA), and Cy2, Cy3, Cy3.5, Cy5, Cy5.5, Cy7, all of which are also useful for fluorescently labeling the antibodies of the present invention.

[0612] For secondary detection using labeled avidin, streptavidin, captavidin or neutravidin, the antibodies of the present invention can usefully be labeled with biotin.

[0613] When the antibodies of the present invention are used, e.g., for western blotting applications, they can usefully be labeled with radioisotopes, such as ³³P, ³²P, ³⁵S, ³H, and ¹²⁵I.

[0614] As another example, when the antibodies of the present invention are used for radioimmunotherapy, the label can usefully be ²²⁸Th, ²²⁷Ac, ²²⁵Ac, ²²³Ra, ²¹³Bi, ²¹²Pb, ²¹²Bi, ²¹¹At, ²⁰³Pb, ¹⁹⁴Os, ¹⁸⁸Re, ¹⁸⁶Re, ¹⁵³Sm, ¹⁵⁹Tb, ¹³¹I, ¹²⁵I, ¹¹¹In, ¹⁰⁵Rh, ^{99m}Tc, ⁹⁷Ru, ⁹⁰Y, ⁹⁰Sr, ⁸⁸Y, ⁷²Se, ⁶⁷Cu, or ⁴⁷Sc.

[0615] As another example, when the antibodies of the present invention are to be used for in vivo diagnostic use, they can be rendered detectable by conjugation to MRI contrast agents, such as gadolinium diethylenetriaminepentaacetic acid (DTPA), Lauffer et al., Radiology 207(2):529-38 (1998), or by radioisotopic labeling

[0616] As would be understood, use of the labels described above is not restricted to the application as for which they were mentioned.

[0617] The antibodies of the present invention, including fragments and derivatives thereof, can also be conjugated to toxins, in order to target the toxin's ablative action to cells that display and/or express the proteins of the present invention. Commonly, the antibody in such immunotoxins is conjugated to Pseudomonas exotoxin A, diphtheria toxin, shiga toxin A, anthrax toxin lethal factor, or ricin. See Hall (ed.), Immunotoxin Methods and Protocols (Methods in Molecular Biology, Vol 166), Humana Press (2000) (ISBN:0896037754); and Frankel et al. (eds.), Clinical Applications of Immunotoxins, Springer-Verlag New York, Incorporated (1998) (ISBN:3540640975), the disclosures of which are incorporated herein by reference in their entireties, for review.

[0618] The antibodies of the present invention can usefully be attached to a substrate, and it is, therefore, another aspect of the invention to provide antibodies that bind specifically to one or more of the proteins and protein fragments of the present invention, to one or more of the proteins and protein fragments encoded by the isolated nucleic acids of the present invention, or the binding of which can be competitively inhibited by one or more of the proteins and protein fragments of the present invention or one or more of the proteins and protein fragments encoded by the isolated nucleic acids of the present invention, attached to a substrate.

[0619] Substrates can be porous or nonporous, planar or nonplanar.

[0620] For example, the antibodies of the present invention can usefully be conjugated to filtration media, such as NHS-activated Sepharose or CNBr-activated Sepharose for purposes of immunoaffinity chromatography.

[0621] For example, the antibodies of the present invention can usefully be attached to paramagnetic microspheres, typically by biotin-streptavidin interaction, which microsphere can then be used for isolation of cells that express or display the proteins of the present invention. As another example, the antibodies of the present invention can usefully be attached to the surface of a microtiter plate for ELISA.

[0622] As noted above, the antibodies of the present invention can be produced in prokaryotic and eukaryotic cells. It is, therefore, another aspect of the present invention to provide cells that express the antibodies of the present invention, including hybridoma cells, B cells, plasma cells, and host cells recombinantly modified to express the antibodies of the present invention.

[0623] In yet a further aspect, the present invention provides aptamers evolved to bind specifically to one or more of the proteins and protein fragments of the present invention, to one or more of the proteins and protein fragments encoded by the isolated nucleic acids of the present invention, or the binding of which can be competitively inhibited by one or more of the proteins and protein fragments of the present invention or one or more of the proteins and protein fragments encoded by the isolated nucleic acids of the present invention.

[0624] Business Methods

[0625] As mentioned above, the genome-derived single exon probes and microarrays of the present invention are useful in methods of doing business. In another aspect, therefore, the present invention provides such methods of doing business.

[0626] A first such method comprises: selling and/or licensing genome-derived single-exon microarrays to a customer desiring to measure gene expression, in consideration of fees paid by such customer.

[0627] Such methods can usefully be implemented on a computer. In such computerized embodiments, the method comprises: making available for computerized query a database having a record corresponding to each genome-derived single exon microarray available for sale and/or license; responding to a customer query of the database by returning to the customer at least one record, or an identifier of that record, that best meets the customer query criteria; and offering for sale or license to the querying customer the genome-derived single exon microarray identified in that at least one record.

[0628] This method can usefully be implemented by making the database resident on a server computer and available for query by a remotely located client, for example by query over the Internet, an intranet, LAN or WAN. The method can usefully include a later step of permitting the customer to place an order for the identified microarray. This later step can usefully employ the one-click method described and claimed in U.S. Pat. No. 5,960,411, incorporated herein by reference in its entirety.

[0629] The genome-derived single exon microarrays of the present invention, as final products, have utility in a second method of doing business, the method comprising designing and/or manufacturing a genome-derived single exon microarray, in consideration of fees paid by those desiring a custom nucleic acid microarray, that has genome-derived single exon probes sharing at least one common attribute.

[0630] Such method can usefully be implemented on a computer. In such computerized embodiments, the method comprises: receiving from a customer at least one criterion for common probe attribute, such as tissue of expression; using the at least one criterion to identify within a database having records corresponding to available genome-derived single exon probes those that meet the criterion; and then disposing such identified probes on a support substrate capable of functioning in microarray hybridization experiments. Examples 5-12, infra, identify the level of expression in one or more of ten tissues or cell types of 13,700 human genome-derived single exon probes, each of which is specifically useful in such a method.

[0631] The genome-derived single exon microarrays of the present invention are further useful in a third method of doing business, wherein expression data obtained from use of the genome-derived single exon probes and genome-derived single exon microarrays of the present invention are made available by subscription to customers that desire such information, in consideration for fees.

[0632] This aspect of the invention can usefully be implemented on a computer. hi such computerized embodiments, the method comprises: making available to a subscription client for computerized query a database having records containing expression data generated using genome-derived single exon probes disposed upon microarrays; and responding to a customer query of the database by returning to the customer at least one record, or an identifier of the at least one record, that best meets the customer query criteria. Each of examples 5-12 presents records from such a database, organized by tissue and/or cell type, and collectively containing expression data for 13,700 single exon probes collectively including 13,700individual exons.

[0633] The response to the customer in this method can usefully return only the amount of information minimally required to permit the customer to decide whether to pay for further information from the identified record or records. The method can also usefully include a later step of permitting the customer to place an order for the identified microarray. This later step can usefully employ the one-click method described and claimed in U.S. Pat. No. 5,960,411, incorporated herein by reference in its entirety. The third method of doing business, in each of its embodiments, can usefully be performed by making the database resident on a server computer and available for query by a remotely located client, for example by query over the Internet, an intranet, a LAN or WAN.

[0634] Thus, the genome-derived single exon nucleic acid microarrays of the present invention are further useful in a method of doing business, the method comprising: advertising the availability for distribution, sale, or license of genome-derived single exon probes, microarrays, and/or data therefrom; and then selling stock in the company. This method can usefully be implemented on a computer, wherein the advertising is performed on an Internet web page, in an Internet chat room, and/or a Usenet newsgroup; and wherein the stock sale is consummated through an electronic brokerage.

[0635] The following examples are offered by way of illustration and not by way of limitation.

### EXAMPLE 1

### Preparation of Single Exon Microarrays from Exons Predicted in Human Genomic Sequence Bioinformatics Results

[0636] All human BAC sequences in fewer than 10 pieces that had been accessioned in a five month period immediately preceding this study were downloaded from GenBank. This corresponds to ≈2200 clones, totaling ≈350 MB of sequence, or approximately 10% of the human genome.

[0637] After masking repetitive elements using the program CROSS_MATCH, the sequence was analyzed for open reading frames using three separate gene finding programs. The three programs predict genes using independent algorithmic methods developed on independent training sets: GRAIL uses a neural network, GENEFINDER uses a hidden Markoff model, and DICTION, a program proprietary to Genetics Institute, operates according to a different heuristic. The results of all three programs were used to create a prediction matrix across the segment of genomic DNA.

[0638] The three gene finding programs yielded a range of results. GRAIL identified the greatest percentage of genomic sequence as putative coding region, 2% of the data analyzed. GENEFINDER was second, calling 1%, and DICTION yielded the least putative coding region, with 0.8% of genomic sequence called as coding region.

[0639] The consensus data were as follows. GRAIL and GENEFINDER agreed on 0.7% of genomic sequence, GRAIL and DICTION agreed on 0.5% of genomic sequence, and the three programs together agreed on 0.25% of the data analyzed. That is, 0.25% of the genomic sequence was identified by all three of the programs as containing putative coding region.

[0640] Exons predicted by any two of the three programs (“consensus exons”) were assorted into “gene bins” using two criteria: (1) any 7 consecutive exons within a 25 kb window were placed together in a bin as likely contributing to a single gene, and (2) all exons within a 25 kb window were placed together in a bin as likely contributing to a single gene if fewer than 7 exons were found within the 25 kb window.

[0641] PCR

[0642] The largest exon from each gene bin that did not span repetitive sequence was then chosen for amplification, as were all consensus exons longer than 500 bp. This method approximated one exon per gene; however, a number of genes were found to be represented by multiple elements.

[0643] Previously, we had determined that DNA fragments fewer than 250 bp in length do not bind well to the amino-modified glass surface of the slides used as support substrate for construction of microarrays; therefore, amplicons were designed in the present experiments to approximate 500 bp in length.

[0644] Accordingly, after selecting the largest exon per gene bin, a 500 bp fragment of sequence centered on the exon was passed to the primer picking software, PRIMER3 (available online for use at http://www-genome.wi.mit.edu/cgi-bin/primer/). A first additional sequence was commonly added to each exon-unique 5′ primer, and a second, different, additional sequence was commonly added to each exon-unique 3′ primer, to permit subsequent reamplification of the amplicon using a single set of “universal” 5′ and 3′ primers, thus immortalizing the amplicon. The addition of universal priming sequences also facilitates sequence verification, and can be used to add a cloning site should some exons be found to warrant further study.

[0645] The exons were then PCR amplified from genomic DNA, verified on agarose gels, and sequenced using the universal primers to validate the identity of the amplicon to be spotted in the microarray.

[0646] Primers were supplied by Operon Technologies (Alameda, Calif.). PCR amplification was performed by standard techniques using human genomic DNA (Clontech, Palo Alto, Calif.) as template. Each PCR product was verified by SYB® green (Molecular Probes, Inc., Eugene, Oreg.) staining of agarose gels, with subsequent imaging by Fluorimager (Molecular Dynamics, Inc., Sunnyvale, Calif.). PCR amplification was classified as successful if a single band appeared.

[0647] The success rate for amplifying exons of interest directly from genomic DNA using PCR was approximately 75%. FIG. 5 graphs the distribution of predicted exon length and distribution of amplified PCR products, with exon length shown by dashed line and PCR product length shown by solid line. Although the range of exon sizes is readily seen to extend to beyond 900 bp, the mean predicted exon size was only 229 bp, with a median size of 150 bp (n=9498). With an average amplicon size of 475±25 bp, approximately 50% of the average PCR amplification product contained predicted coding region, with the remaining 50% of the amplicon containing either intron, intergenic sequence, or both.

[0648] Using a strategy predicated on amplifying about 500 bp, it was found that long exons had a higher PCR failure rate. To address this, the bioinformatics process was adjusted to amplify 1000, 1500 or 2000 bp fragments from exons larger than 500 bp. This improved the rate of successful amplification of exons exceeding 500 bp, constituting about 9.2% of the exons predicted by the gene finding algorithms.

[0649] Approximately 75% of the probes disposed on the array (90% of those that successfully PCR amplified) were sequence-verified by sequencing in both the forward and reverse direction using MegaBACE sequencer (Molecular Dynamics, Inc., Sunnyvale, Calif.), universal primers, and standard protocols.

[0650] Some genomic clones (BACs) yielded very poor PCR and sequencing results. The reasons for this are unclear, but may be related to the quality of early draft sequence or the inclusion of vector and host contamination in some submitted sequence data.

[0651] Although the intronic and intergenic material flanking coding regions could theoretically interfere with hybridization during microarray experiments, subsequent empirical results demonstrated that differential expression ratios were not significantly affected by the presence of noncoding sequence. The variation in exon size was similarly found not to affect differential expression ratios significantly; however, variation in exon size was observed to affect the absolute signal intensity (data not shown).

[0652] The 350 MB of genomic DNA was, by the above-described process, reduced to 9750 discrete probes, which were spotted in duplicate onto glass slides using commercially available instrumentation (MicroArray GenII Spotter and/or MicroArray GenIII Spotter, Molecular Dynamics, Inc., Sunnyvale, Calif.). Each slide additionally included either 16 or 32 E. coli genes, the average hybridization signal of which was used as a measure of background biological noise.

[0653] Each of the probe sequences was BLASTed against the human EST data set, the NR data set, and SwissProt GenBank (May 7, 1999 release 2.0.9).

[0654] One third of the probe sequences (as amplified) produced an exact match (BLAST Expect (“E”) values less than 1 e-100) (i.e., 1×10⁻¹⁰⁰) to either an EST (20% of sequences) or a known mRNA (13% of sequences). A further 22% of the probe sequences showed some homology to a known EST or mRNA (BLAST E values from 1 e-5 to 1e-99) (1×10⁻⁵ to 1×10⁻⁹⁹). The remaining 45% of the probe sequences showed no significant sequence homology to any expressed, or potentially expressed, sequences present in public databases.

[0655] All of the probe sequences (as amplified) were then analyzed for protein similarities with the SwissProt database using BLASTX, Gish et al., Nature Genet. 3:266 (1993). The predicted fimctional breakdowns of the ⅔ of probes identical or homologous to known sequences are presented in Table 1.

TABLE 1
Function of Predicted Exons As Deduced
From Comparative Sequence Analysis

| | | | Function Predicted from |
|---|---|---|---|
| Total | V6 chip | V7 chip | Comparative Sequence Analysis |
| 211 | 96 | 115 | Receptor |
| 120 | 43 | 77 | Zinc Finger |
| 30 | 11 | 19 | Homeobox |
| 25 | 9 | 16 | Transcription Factor |
| 17 | 11 | 7 | Transcription |
| 118 | 57 | 61 | Structural |
| 95 | 39 | 56 | Kinase |
| 36 | 18 | 18 | Phosphatase |
| 83 | 31 | 52 | Ribosomal |
| 45 | 19 | 26 | Transport |
| 21 | 7 | 14 | Growth Factor |
| 17 | 12 | 5 | Cytochrome |
| 50 | 33 | 17 | Channel |

[0656] As can be seen, the two most common types of genes were transcription d receptors, making up 2.2% and 1.8% of the arrayed elements, respectively.

### EXAMPLE 2

### Gene Expression Measurements From Genome-Derived Single Exon Microarrays

[0657] The two genome-derived single exon microarrays prepared according to Example 1 were hybridized in a series of simultaneous two-color fluorescence experiments to (1) Cy3-labeled cDNA synthesized from message drawn individually from each of brain, heart, liver, fetal liver, placenta, lung, bone marrow, HeLa, BT 474, or HBL 100 cells, and (2) CyS-labeled cDNA prepared from message pooled from all ten tissues and cell types, as a control in each of the measurements. Hybridization and scanning were carried out using standard protocols and Molecular Dynamics equipment.

[0658] Briefly, mRNA samples were bought from commercial sources (Clontech, Palo Alto, Calif. and Amersham Pharmacia Biotech (APB)). Cy3-dCTP and Cy5-dCTP (both from APB) were incorporated during separate reverse transcriptions of 1 μg of polyA⁺ mRNA performed using 1 μg oligo(dT)12-18 primer and 2 μg random 9 mer primers as follows. After heating to 70° C., the RNA:primer mixture was snap cooled on ice. After snap cooling on ice, added to the RNA to the stated final concentration was: 1× Superscript II buffer, 0.01 M DTT, 100 μM dATP, 100 μM dGTP, 100 μM dTTP, 50 μM dCTP, 50 μM Cy3-dCTP or Cy5-dCTP 50 μM, and 200 U Superscript II enzyme. The reaction was incubated for 2 hours at 42° C. After 2 hours, the first strand cDNA was isolated by adding 1 U Ribonuclease H, and incubating for 30 minutes at 37° C. The reaction was then purified using a Qiagen PCR cleanup column, increasing the number of ethanol washes to 5. Probe was eluted using 10 mM Tris pH 8.5.

[0659] Using a spectrophotometer, probes were measured for dye incorporation. Volumes of both Cy3 and Cy5 cDNA corresponding to 50 pmoles of each dye were then dried in a Speedvac, resuspended in 30 μl hybridization solution containing 50% formamide, 5×SSC, 0.2 μg/μl poly(dA), 0.2 μg/μl human cₒt1 DNA, and 0.5% SDS.

[0660] Hybridizations were carried out under a coverslip, with the array placed in a humid oven at 42° C. overnight. Before scanning, slides were washed in 1×SSC, 0.2% SDS at 55° C. for 5 minutes, followed by 0.1×SSC, 0.2% SDS, at 55° C. for 20 minutes. Slides were briefly dipped in water and dried thoroughly under a gentle stream of nitrogen.

[0661] Slides were scanned using a Molecular Dynamics Gen3 scanner, as described. Schena (ed.), Microarray Biochip: Tools and Technology, Eaton Publishing Company/BioTechniques Books Division (2000) (ISBN: 1881299376).

[0662] Although the use of pooled cDNA as a reference permitted the survey of a large number of tissues, it attenuates the measurement of relative gene expression, since every highly expressed gene in the tissue/cell type-specific fluorescence channel will be present to a level of at least 10% in the control channel. Because of this fact, both signal and expression ratios (the latter hereinafter, “expression” or “relative expression”) for each probe were normalized using the average ratio or average signal, respectively, as measured across the whole slide.

[0663] Data were accepted for further analysis only when signal was at least three times greater than biological noise, the latter defined by the average signal produced by the E. coli control genes.

[0664] The relative expression signal for these probes was then plotted as a function of tissue or cell type, and is presented in FIG. 6.

[0665] FIG. 6 shows the distribution of expression across a panel of ten tissues. The graph shows the number of sequence-verified products that were either not expressed (“0”), expressed in one or more but not all tested tissues (“1”-“9”), and expressed in all tissues tested (“10”).

[0666] Of 9999 arrayed elements on the two microarrays (including positive and negative controls and “failed” products), 2353 (51%) were expressed in at least one tissue or cell type. Of the gene elements showing significant signal—where expression was scored as “significant” if the normalized Cy3 signal was greater than 1, representing signal 5-fold over biological noise (0.2)—39% (991) were expressed in all 10 tissues. The next most common class (15%) consisted of gene elements expressed in only a single tissue.

[0667] The genes expressed in a single tissue were further analyzed, and the results of the analyses are compiled in FIG. 7.

[0668] FIG. 7A is a matrix presenting the expression of all verified sequences that showed signal intensity greater than 3 in at least one tissue. Each clone is represented by a column in the matrix. Each of the 10 tissues assayed is represented by a separate row in the matrix, and relative expression (expression ratio) of a clone in that tissue is indicated at the respective node by intensity of green shading, with the intensity legend shown in panel B. The top row of the matrix (“EST Hit”) contains “bioinformatic” rather than “physical” expression data—that is, presents the results returned by query of EST, NR and SwissProt databases using the probe sequence. The legend for “bioinformatic expression” (i.e., degree of homology returned) is presented in panel C. Briefly, white is known, black is novel, with gray depicting nonidentical with significant homology. “E”xpect values are: white—E values<1e-100) (i.e., <1×10⁻¹⁰⁰); gray—E values from 1e-05 to 1e-99 (i.e., 1×10⁻⁵ to 1×10⁻⁹⁹); black—E values>1e-05 (i.e., >1×10⁻⁵).

[0669] As FIG. 7 readily shows, heart and brain were demonstrated to have the greatest numbers of genes that were shown to be uniquely expressed in the respective tissue. In brain, 200 uniquely expressed genes were identified; in heart, 150. The remaining tissues gave the following figures for uniquely expressed genes: liver, 100; lung, 70; fetal liver, 150; bone marrow, 75; placenta, 100; HeLa, 50; HBL, 100; and BT474, 50.

[0670] It was further observed that there were many more “novel” genes among those that were up-regulated in only one tissue, as compared with those that were down-regulated in only one tissue. In fact, it was found that exons whose expression was measurable in only a single of the tested tissues were represented in sequencing databases at a rate of only 11%, whereas 36% of the exons whose expression was measurable in 9 of the tissues were present in public databases. As for those exons expressed in all ten tissues, fully 45% were present in existing expressed sequence databases. These results are not unexpected, since genes expressed in a greater number of tissues have a higher likelihood of being, and thus of having been, discovered by EST approaches.

[0671] Comparison of Signal from Known and Unknown Genes

[0672] The normalized signal of the genes found to have high homology to genes present in the GenBank human EST database were compared to the normalized signal of those genes not found in the GenBank human EST database. The data are shown in FIG. 8.

[0673] FIG. 8 shows in dashed line the normalized Cy3 signal intensity for all sequence-verified products with a BLAST Expect (“E”) value of greater than 1e-30 (designated “unknown”) upon query of existing EST, NR and SwissProt databases, and shows in blue the normalized Cy3 signal intensity for all sequence-verified products with a BLAST Expect value of less than 1e-30 (“known”). Note that biological background noise has an averaged normalized Cy3 signal intensity of 0.2.

[0674] As expected, the most highly expressed of the exons were “known” genes. This is not surprising, since very high signal intensity correlates with very commonly-expressed genes, which have a higher likelihood of being found by EST sequence.

[0675] However, a significant point is that a large number of even the high expressers were “unknown”. Since the genomic approach used to identify genes and to confirm their expression does not bias exons toward either the 3′ or 5′ end of a gene, many of these high expression genes will not have been detected in an end-sequenced cDNA library.

[0676] The significant point is that presence of the gene in an EST database is not a prerequisite for incorporation into a genome-derived microarray, and further, that arraying such “unknown” exons can help to assign function to as-yet undiscovered genes.

[0677] Verification of Gene Expression

[0678] To ascertain the validity of the approach described above to identify genes from raw genomic sequence, expression of two of the probes was assayed using reverse transcriptase polymerase chain reaction (RT PCR) and northern blot analysis.

[0679] Two microarray probes were selected on the basis of exon size, prior sequencing success, and tissue-specific gene expression patterns as measured by the microarray experiments. The primers originally used to amplify the two respective exons from genomic DNA were used in RT PCR against a panel of tissue-specific cDNAs (Rapid-Scan gene expression panel 24 human cDNAs) (OriGene Technologies, Inc., Rockville, Md.).

[0680] Sequence AL079300_{—}1 was shown by microarray hybridization to be present in cardiac tissue, and sequence AL031734_{—}1 was shown by microarray experiment to be present in placental tissue (data not shown). RT-PCR on these two sequences confirmed the tissue-specific gene expression as measured by microarrays, as ascertained by the presence of a correctly sized PCR product from the respective tissue type cDNAs.

[0681] Clearly, all microarray results cannot, and indeed should not, be confirmed by independent assay methods, or the high throughput, highly parallel advantages of microarray hybridization assays will be lost. However, in addition to the two RT-PCR results presented above, the observation that ⅓ of the arrayed genes exist in expression databases provides powerful confirmation of the power of our methodology—which combines bioinformatic prediction with expression confirmation using genome-derived single exon microarrays—to identify novel genes from raw genomic data.

[0682] To verify that the approach further provides correct characterization of the expression patterns of the identified genes, a detailed analysis was performed of the microarrayed sequences that showed high signal in brain.

[0683] For this latter analysis, sequences that showed high (normalized) signal in brain, but which showed very low (normalized) signal (less than 0.5, determined to be biological noise) in all other tissues, were further studied. There were 82 sequences that fit these criteria, approximately 2% of the arrayed elements. The 10 sequences showing the highest signal in brain in microarray hybridizations are detailed in Table 2, along with assigned function, if known or reasonably predicted.

TABLE 2
Function of the Most Highly
Expressed Genes Expressed Only in Brain

| Microarray | | | Homology to | Gene Function |
|---|---|---|---|---|
| Sequence | Normalized | Expression | EST present | as described |
| Name | Signal | Ratio | in GenBank | by GenBank |
| AP000217-1 | 5.2 | +7.7 | High | S-100 protein, |
| | | | | _-chain, Ca²⁺ |
| | | | | binding protein |
| | | | | expressed in |
| | | | | central nervous |
| | | | | system |
| AP000047-1 | 2.3 | | High | Unknown |
| | | | | Function |
| AC006548-9 | 1.7 | | High | Similar to |
| | | | | mouse |
| | | | | membrane |
| | | | | glycoprotein |
| | | | | M6, expressed |
| | | | | in central |
| | | | | nervous system |
| AC007245-5 | 1.5 | | High | Similar to |
| | | | | amphiphysin, |
| | | | | a synaptic |
| | | | | vesicle- |
| | | | | associated |
| | | | | protein. Ref 21 |
| L44140-4 | 1.2 | +2.0 | High | Endothelial |
| | | | | actin-binding |
| | | | | protein found |
| | | | | in nonmuscle |
| | | | | filamin |
| AC004689-9 | 1.2 | +3.5 | High | Protein |
| | | | | Phosphatase |
| | | | | PP2A, |
| | | | | neuronal/ |
| | | | | downregulates |
| | | | | activated |
| | | | | protein kinases |
| AL031657-1 | 1.2 | +3.0 | High | Unknown |
| | | | | function/ |
| | | | | Contains the |
| | | | | anhyrin motif, |
| | | | | a common |
| | | | | protein |
| | | | | sequence motif |
| AC009266-2 | 1.1 | +3.7 | Low | Low homology |
| | | | | to the |
| | | | | Synaptotagmin |
| | | | | I protein in rat/ |
| | | | | present at low |
| | | | | levels |
| | | | | throughout |
| | | | | rat brain |
| AP000086-1 | 1.0 | +2.7 | Low | Unknown, very |
| | | | | poor homology |
| | | | | to collagen |
| AC004689-3 | 1.0 | | High | Protein |
| | | | | Phosphatase |
| | | | | PP2A, |
| | | | | neuronal/ |
| | | | | downregulates |
| | | | | activated |
| | | | | protein kinases |

[0684] Of the ten sequences studied by these latter confirmatory approaches, eight were previously known. Of these eight, six had previously been reported to be important in the central nervous system or brain. The exon giving the highest signal (AP00217-1) was found to be the gene encoding an S100B Ca²⁺ binding protein, reported in the literature to be highly and uniquely expressed in the central nervous system. Heizmann, Neurochem. Res. 9:1097 (1997).

[0685] A number of the brain-specific probe sequences (including AC006548-9, AC009266-2) did not have homology to any known human cDNAs in GenBank but did show homology to rat and mouse cDNAs. Sequences AC004689-9 and AC004689-3 were both found to be phosphatases present in neurons (Millward et al., Trends Biochem. Sci. 24(5):186-191 (1999)). Two microarray sequences, AP000047-1 and AP000086-1 have unknown function, with AP000086-1 being absent from GenBank. Functionality can now be narrowed down to a role in the central nervous system for both of these genes, showing the power of designing microarrays in this fashion.

[0686] Next, the function of the chip sequences with the highest (normalized) signal intensity in brain, regardless of expression in other tissues, was assessed. In this latter analysis, we found expression of many more common genes, since the sequences were not limited to those expressed only in brain. For example, looking at the 20 highest signal intensity spots in brain, 4 were similar to tubulin (AC00807905; AF146191-2; AC007664-4; AF14191-2), 2 were similar to actin (AL035701-2; AL034402-1), and 6 were found to be homologous to glyceraldehyde-3-phosphate dehydrogenase (GAPDH) (AL035604-1; Z86090-1; AC006064-L, AC006064-K; AC035604-3; AC006064-L). These genes are often used as controls or housekeeping genes in microarray experiments of all types.

[0687] Other interesting genes highly expressed in brain were a ferritin heavy chain protein, which is reported in the literature to be found in brain and liver (Joshi et al., J. Neurol. Sci. 134(Suppl):52-56 (1995)), a result confirmed with the array. Other highly expressed chip sequences included a translation elongation factor 1α (AC007564-4), a DEAD-box homolog (AL023804-4), and a Y-chromosome RNA-binding motif (Chai et al., Genomics 49(2):283-89 (1998))(AC007320-3). A low homology analog (AP00123-1/2) to a gene, DSCR1, thought to be involved in trisomy 21 (Down's syndrome), showed high expression in both brain and heart, in agreement with the literature (Fuentes et al., Mol. Genet. 4(10):1935-44 (1995)).

[0688] As a further validation of the approach, we selected the BAC AC006064 to be included on the array. This BAC was known to contain the GAPDH gene, and thus could be used as a control for the exon selection process. The gene finding and exon selection algorithms resulted in choosing 25 exons from BAC AC006064 for spotting onto the array, of which four were drawn from the GAPDH gene. Table 3 shows the comparison of the average expression ratio for the 4 exons from BAC006064 compared with the average expression ratio for 5 different dilutions of a commercially available GAPDH cDNA (Clontech).

TABLE 3
Comparison of Expression Ratio, for each tissue, of GAPDH

| | AC006064 (n = 4) | Control (n = 5) |
|---|---|---|
| Bone Marrow | −1.81 _ 0.11 | −1.85 _ 0.08 |
| Brain | −1.41 _ 0.11 | −1.17 _ 0.05 |
| BT474 | 1.85 _ 0.09 | 1.66 _ 0.12 |
| Fetal Liver | −1.62 _ 0.07 | −1.41 _ 0.05 |
| HBL100 | 1.32 _ 0.05 | 2.64 _ 0.12 |
| Heart | 1.16 _ 0.09 | 1.56 _ 0.10 |
| HeLa | 1.11 _ 0.06 | 1.30 _ 0.15 |
| Liver | −1.62 _ 0.22 | −2.07 _ |
| Lung | −4.95 _ 0.93 | −3.75 _ 0.21 |
| Placenta | −3.56 _ 0.25 | −3.52 _ 0.43 |

[0689] Each tissue shows excellent agreement between the experimentally chosen exons and the control, again demonstrating the validity of the present exon mining approach. In addition, the data also show the variability of expression of GAPDH within tissues, calling into question its classification as a housekeeping gene and utility as a housekeeping control in microarray experiments.

### EXAMPLE 3

### Representation of Sequence and Expression Data as a “Mondrian”

[0690] For each genomic clone processed for microarray as above-described, a plethora of information was accumulated, including full clone sequence, probe sequence within the clone, results of each of the three gene finding programs, EST information associated with the probe sequences, and microarray signal and expression for multiple tissues, challenging our ability to display the information.

[0691] Accordingly, we devised a new tool for visual display of the sequence with its attendant annotation which, in deference to its visual similarity to the paintings of Piet Mondrian, is hereinafter termed a “Mondrian”. FIGS. 3 and 4 present the key to the information presented on a Mondrian.

[0692] FIG. 9 presents a Mondrian of BAC AC008172 (bases 25,000 to 130,000 shown), containing the carbamyl phosphate synthetase gene (AF154830.1). Purple background within the region shown as field 81 in FIG. 3 indicates all 37 known exons for this gene.

[0693] As can be seen, GRAIL II successfully identified 27 of the known exons (73%), GENEFINDER successfully identified 37 of the known exons (100%), while DICTION identified 7 of the known exons (19%).

[0694] Seven of the predicted exons were selected for physical assay, of which 5 successfully amplified by PCR and were sequenced. These five exons were all found to be from the same gene, the carbamyl phosphate synthetase gene (AF154830.1).

[0695] The five exons were arrayed, and gene expression measured across 10 tissues. As is readily seen in the Mondrian, the five chip sequences on the array show identical expression patterns, elegantly demonstrating the reproducibility of the system.

[0696] FIG. 10 is a Mondrian of BAC AL049839. We selected 12 exons from this BAC, of which 10 successfully sequenced, which were found to form between 5 and 6 genes. Interestingly, 4 of the genes on this BAC are protease inhibitors. Again, these data elegantly show that exons selected from the same gene show the same expression patterns, depicted below the red line. From this figure, it is clear that our ability to find known genes is very good. A novel gene is also found from 86.6 kb to 88.6 kb, upon which all the exon finding programs agree. We are confident we have two exons from a single gene since they show the same expression patterns and the exons are proximal to each other. Backgrounds in the following colors indicate a known gene (top to bottom): red=kallistatin protease inhibitor (P29622); purple=plasma serine protease inhibitor (P05154); turquoise=α1 anti-chymotrypsin (P01011); mauve=40S ribosomal protein (P08865). Note that chip sequence 8 and 12 did not sequence verify.

### EXAMPLE 4

### Genome-Derived Single Exon Probes Useful For Measuring Human Gene Expression

[0697] The protocols set forth in Examples 1 and 2, supra, were applied with some modification to additional human genomic sequence as it became newly available in GenBank. From the collective efforts of these and the experiments reported in Example 2, we generated 13,700 unique human genome-derived single exon probes that could be shown to be expressed at significant levels in one or more of eight tested tissues.

[0698] Modifications to the protocols for bioinformatic prediction of exons set forth in Examples 1 and 2 were as follows.

[0699] First, we added a fourth gene prediction program, GENSCAN, to the three originally used, DICTION, GENEFINDER, and GRAIL.

[0700] Second, we added Mouse comparative genomics as a fifth gene prediction method, as follows. The UCSC human genome assembly (http://genome.ucsc.edu/) and finished and unfinished public mouse BAC sequence (http://www.ncbi.nlm.nih.gov/genome/seq/MmHome.html) were compared using the sequence alignment tool BLAST. Returns were filtered to meet the following requirements: conserved elements greater than 100 bp in length with expect scores less than 0.05 and having an open reading frame (ORF) of greater than 90% of their length. The 100 base pair cutoff was necessary to provide an adequate target for microarray hybridization and the ORF requirement eliminated non-expressed regulatory regions and non-coding RNAs.

[0701] Third, we increased the resolution of our exon predictions, as follows.

[0702] In the experiments reported in Examples 1 and 2, we applied a 25 bp window in scanning genomic sequence: exons were called when any two of the three gene prediction programs identified an exon anywhere within the window. In the more recent experiments, we looked for consensus on a nucleotide by nucleotide basis: when any two or more of the four programs identified the nucleotide as falling within an exon, the nucleotide was called as belonging to an exon. This had the additional benefit of merging overlapping predicted exons.

[0703] Finally, we applied a lower size threshold of 75 contiguous nucleotides to each consensus exon.

[0704] Each probe was completely sequenced on both strands prior to its use on a genome-derived single exon microarray; sequencing confirmed the exact chemical structure of each probe. An added benefit of sequencing is that it placed us in possession of a set of single base-incremented fragments of the sequenced nucleic acid, starting from the sequencing primer 3′ OH. (Since the single exon probes were first obtained by PCR amplification from genomic DNA, we were of course additionally in possession of an even larger set of single base incremented fragments of each of the 13,700 single exon probes, each fragment corresponding to an extension product from one of the two amplification primers.)

[0705] Hybridization analysis was conducted essentially as set forth in Examples 1 and 2, with several modifications.

[0706] In Examples 1 and 2, we used a pool of 10 tissues/cell types as control. We have since observed that every probe that demonstrates expression in the control pool can readily be shown to be expressed in HeLa cells, and have used HeLa as the source of control message in the more recent experiments.

[0707] In the analysis of hybridization results, the uniform absolute signal intensity threshold used in Examples 1 and 2 to identify signals large enough to be considered biologically significant (0.5, representing a level roughly 10 times greater than the average of all E. coli control spots on a first iteration chip) was replaced with a statistical threshold determined for each channel and each hybridization as follows.

[0708] Starting typically with 32 E. coli sequences, spotted in duplicate (left and right side) for a total of 64 control spots per microarray, control spots were eliminated if we observed more than a five-fold difference between the left and right side raw (unnormalized) signals for the probe.

[0709] The median of the normalized signal from the remaining control spots was calculated (see infra for normalization routine).

[0710] Control spots were eliminated as outliers if they had signal intensity greater than the median of the normalized signals plus 2.4 (where 2.4 is roughly 12 times the observed standard deviation of control spot populations) and normalization was performed as set forth below.

[0711] The mean and standard deviation of the normalized signal intensity from the remaining control spots were calculated, and the mean plus three standard deviations of the controls was then applied as a minimum intensity threshold for the particular hybridization experiment, giving a 99% confidence that expression is significant.

[0712] To increase our confidence an additional quality metric has been imposed before an amplicon is classified as significantly expressed. As each DNA probe is spotted twice on each slide we require that the signal intensities of duplicate spots must be within 25% of each other. To pass this metric the lower intensity spot must have a signal intensity >80% of the brighter spot.

[0713] Signal normalization was accomplished as follows. For each hybridization (each microarray, separately for each of the two colors), the median value of all of the spots was determined. For each probe, the normalized signal value is the arithmetic mean of the probe's duplicate intensities (each DNA probe, including controls, is spotted twice per slide) divided by the population median.

[0714] Using this threshold, we identified a total of 13,700 single exon probes that produce significant signal in one or more of eight tested tissues/cell types. The structures of these 13,700 single exon probes are clearly presented in the Sequence Listing appended hereto as SEQ ID NOs: 1-13,700. The 16 nt 5′ primer universal primer sequence and 16 nt 3′ universal primer sequence present on the amplicon are not included in the sequence listing, and may be found in commonly owned and copending U.S. patent application Ser. No. 09/608,408, filed Jun. 30, 2000, the disclosure of which is incorporated herein by reference in its entirety.

[0715] The sequences of the exons present within each of the single exon probes is presented in the Sequence Listing as SEQ ID NOs: 13,701-27,400. Certain of the exons appear in a plurality of probes, accounting for the slight discrepancy in the number of probe sequences versus the number of exon sequences.

[0716] We also predicted the sequence of the ORF within the exon of each of the 13,700 probes, where ORF was defined as that portion of an exon that can be translated in its entirety into a sequence of contiguous amino acids.

[0717] To predict the ORF, we first looked for consensus as between any two or more of the four gene prediction programs. Consensus was required in two parameters: (1) as with prediction of the exon, each nucleotide must have been identified by two or more programs as falling within an exon; and, additionally, (2) the programs relied upon to establish that consensus must have agreed on the frame. Presence of a stop codon disqualified the predicted ORF. ORFs shorter than 50 nt were also disregarded.

[0718] Absent consensus as to nucleotide and frame, each of the six frames of the predicted exon were examined individually for stop codons and the longest open reading frame of at least 51 nt selected as the exon's likely ORF. Certain of the exons have no ORF as defined by either set of criteria.

[0719] We then translated the predicted ORFs using the standard genetic code. Translations of the ORF-encoded peptides are presented in the Sequence Listing as SEQ ID NOs: 27,401-34,288.

[0720] Concordance as among PROBE SEQ ID NO:, EXON SEQ ID NO:, and ORF-encoded peptide SEQ ID NO: is presented collectively in Tables 4-11, presented in electronic format and incorporated by reference respectively in Examples 5-12, infra. The tables also provide the expression data for each probe.

[0721] Each example, with its respective table, presents the subset of probes that is significantly expressed in the respective tissue and/or cell type: human brain, heart, liver, fetal liver, placenta, lung, bone marrow, or HeLa cells; each example thus presents the subset of probes that was recognized to be useful for measuring expression of their cognate genes in the respective tissue.

[0722] The sequence of each of the probes, exons, and ORF-encoded peptides was used as a query to identify the most similar sequence in each of dbEST, GenBank NR, and SWISSPROT. The query programs used were BLAST (nucleic acid sequence query of dbEST and NR), BLASTX (nucleic acid sequence query of SWISSPROT), TBLASTX (peptide sequence query of dbEST and NR), and BLASTP (peptide sequence query of SWISSPROT). Because the query sequences are themselves derived from genomic sequence in GenBank, only nongenomic hits from NR were scored.

[0723] The attached Sequence Listing reports, for each SEQ ID NO:, the accession number of the entry from each of the three queried databases that gave the highest absolute expect (“E”) value (the “top hit”), along with the “E” value itself. The Sequence Listing is incorporated herein by reference in its entirety.

[0724] Tables 4-11 provide a subset of these query results.

[0725] The smallest in value of the expect (“E”) scores for each exon query sequence across the three database divisions was used as a measure of the “expression novelty” of the probe's exon. Each of Tables 4-11 is sorted in descending order based on this measure, reported as “Most Similar (top) Hit BLAST E Value”.

[0726] As sorted, each table thus lists its respective probes from least similar to sequences known to be expressed (i.e., highest BLAST E value), at the beginning of each table, to most similar to sequences known to be expressed (i.e., lowest BLAST E value), at the bottom of each table.

[0727] Each table further provides, for each listed probe, the accession number of the database sequence that yielded the “Most Similar (top) Hit BLAST E Value” (when queried with exon sequence), along with the name of the database in which the database sequence is found (“Top Hit Database Source”), and a portion of the descriptor for the top hit (“Top Hit Descriptor”) as provided in the sequence database. For those exons that are similar in sequence, but nonidentical to known sequences (e.g., those with BLAST E values between about 1e-05 and 1e-100), the descriptor reveals the likely function of the protein encoded by the probe's exon.

[0728] Using BLAST E value cutoffs of 1e-05 (i.e., 1×10⁻⁵) and 1e-100 (i.e., 1×10⁻¹⁰⁰) as evidence of similarity to sequences known to be expressed is of course arbitrary: in Example 2, supra, a BLAST E value of 1e-30 was used as the boundary when only two classes were to be defined for analysis (unknown, >1e-30; known <1e-30) (see also FIG. 8). Furthermore, even when the “Most Similar (Top) Hit BLAST E Value” is low, e.g., less than about 1e-100—which is probative evidence that the query sequence has previously been shown to be expressed—the top hit is highly unlikely exactly to match the probe sequence.

[0729] First, such expression entries typically will not have the intronic and/or intergenic sequence present within the single exon probes listed in the Tables. Second, even the exon itself is unlikely in such cases to be present identically in the databases, since most of the EST and mRNA clones in existing databases include multiple exons, without any indication of the location of exon boundaries.

[0730] As noted, the data presented in tables 4-11 represent a subset of the data present within the appended Sequence Listing, which is incorporated herein by reference in its entirety. For each probe (SEQ ID NOs: 1-13,700), exon (SEQ ID NOs: 13,701-27,400, respectively), and ORF-encoded peptide (SEQ ID NOs: 27,401-34,288, the sequence listing further provides, through iterated annotation fields <220> and <223> (not necessarily presented in the Sequence Listing LISTING in this order):

[0731] (a) the accession number of the BAC or contig from which the sequence was derived (“MAP TO”), thus providing a link to the chromosomal map location and other information about the genomic milieu of the probe sequence;

[0732] (b) the name of each tissue or cell type in which significant expression could be demonstrated, with the expression signal in the respective tissue;

[0733] (c) the most similar sequence provided by BLAST query of the EST database, with accession number and BLAST E value for the “hit”;

[0734] (d) the most similar sequence provided by BLAST query of the GenBank NR/NT database, with accession number and BLAST E value for the “hit”; and

[0735] (e) the most similar sequence provided by BLASTX query of the SWISSPROT database, with accession number and BLAST E value for the “hit”.

### EXAMPLE 5

### Genome-Derived Single Exon Probes Usefull For Measuring Expression of Genes in Human Brain

[0736] Diseases of the brain and nervous system are a significant cause of human morbidity and mortality. hicreasingly, genetic factors are being found that contribute to predisposition, onset, and/or aggressiveness of most, if not all, of these diseases. Although mutations in single genes have been identified as causative for some diseases of the brain and nervous system, for the most part these disorders are believed to have polygenic etiologies.

[0737] For example, over the past few decades Alzheimer's disease (AD), once considered a rare disorder, has become recognized as a major public health problem; over 4,000,000 people in the United States are now estimated to suffer with various stages of this progressive, degenerative brain disorder.

[0738] Although there is no agreement on the exact incidence or prevalence of Alzheimer's disease, in part due to varying diagnostic criteria and difficulties of differential diagnosis among dementias, the studies are consistent in pointing to an exponential rise in prevalence of this disease with age. After age 65, the percentage of affected people approximately doubles with every decade of life, regardless of definition. Among people age 85 or older, studies suggest that 25 to 35 percent have dementia, including Alzheimer's disease; one study reports that 47.2 percent of people over age 85 have Alzheimer's disease, exclusive of other dementias.

[0739] Alzheimer's disease progressively destroys memory, reason, judgment, language, and, eventually, the ability to carry out even the simplest of tasks. Anatomic changes associated with Alzheimer's disease begin in the entorhinal cortex, proceed to the hippocampus, and then gradually spread to other regions, particularly the cerebral cortex. Chief among such anatomic changes are the presence of characteristic extracellular plaques and internal neurofibrillary tangles.

[0740] Alzheimer's disease has been suspected to have a multifactorial genetic etiological component for almost half a century. Sjogren et al., Acta Psychiat. Neurol. Scand. 82(suppl.): 1-152 (1952).

[0741] At least four genes have been identified to date that contribute to development of Alzheimer's disease: AD1 is caused by mutations in the amyloid precursor gene (APP); AD2 is associated with the APOE4 allele on chromosome 19; AD3 is caused by mutation in a chromosome 14 gene encoding a 7-transmembrane domain protein, presenilin-1 (PSEN1), and AD4 is caused by mutation in a gene on chromosome 1 that encodes a similar 7-transmembrane domain protein, presenilin-2 (PSEN2).

[0742] There is strong evidence, however, for additional, as yet uncharacterized, AD loci on other chromosomes.

[0743] For example, Daw et al., Am. J. Hum. Genet. 66: 196-204 (2000), estimated the number of additional quantitative trait loci (QTLs) and their contribution to the variance in age at onset of AD, and reported that 4 loci make a contribution to the variance in age at onset of late-onset AD similar to or greater in magnitude than that made by apoE, with one locus making a contribution several times greater than that of apoE. These results suggest that several genes not yet localized may play a larger role than does apoE in late-onset AD.

[0744] In accord, three groups recently announced the possible existence of an AD susceptibility gene on chromosome 10. Bertram et al., Science 290(5500):2302-2303 (2000); Ertekin-Taner et al., Science 290(5500):2303-2304 (2000); and Myers et al., Science 290(5500):2304-23055 (2000).

[0745] As another example, multiple sclerosis (MS) affects about 350,000 Americans, with approximately 200 new cases diagnosed each week, with an estimated annual monetary cost in the U.S. alone of $2.5 billion.

[0746] Clinically, MS is an unpredictable disorder, with symptoms, presentation and course falling broadly into one of several clinical patterns. In relapsing-remitting (RR) MS, the disease first manifests as a series of attacks followed by complete or partial remissions, with symptoms returning later after a period of stability. In primary-progressive (PP) MS, there is a gradual clinical decline with no distinct remissions, although there may be temporary plateaus or minor relief from symptoms. Secondary-progressive (SP) MS begins with a relapsing-remitting course followed by a later primary-progressive course. Rarely, patients may have a progressive-relapsing (PR) course in which the disease takes a progressive path punctuated by acute attacks. PP, SP, and PR MS are sometimes lumped together and called chronic progressive MS. The waxing and waning course characteristic of RR, SP and PR MS makes differential diagnosis difficult.

[0747] Anatomically, MS attacks are associated with focal inflammation in areas of the white matter of the central nervous system (CNS), accompanied or followed by demyelination in these areas, termed plaques. Destruction of the myelin sheath slows or blocks neurological transmission, leading to diminished or lost function. Clinical manifestations depend upon the location of the plaques and severity of demyelination, and range from fatigue, the most common symptom of MS, to visual impairment, due to inflammation of the optic nerve, termed optic neuritis, to numbness and paresthesias, to focal muscular weakness, ataxia, and bladder incontinence.

[0748] Increasing evidence suggests that genotype contributes to susceptibility to MS.

[0749] As early as 1965, McAlpine, in Multiple Sclerosis: A Reappraisal (McAlpine, ed.), Williams and Wilkins Co. pp. 61-74 (1965), concluded that the risk to a first-degree relative of a patient with multiple sclerosis is at least 15 times that for a member of the general population, but could discern no definite genetic pattern of inheritance.

[0750] Subsequently, many studies associated MS with HLA (MUC) haplotype. Haines et al., Hum. Molec. Genet. 7:1229-1234 (1998), studying a data set of 98 multiplex MS families, confirmed earlier reports that genetic linkage to the MHC can be explained by association with the HLA-DR2 allele, but suggested that MHC association explains only between 17% and 62% of the genetic etiology of MS.

[0751] From a review of genomic screens, Dyment et al., Hum. Molec. Genet. 6: 1693-1698 (1997), concluded that a number of genes with interacting effects are likely and that no single region has a major influence on familial risk. Chataway et al, Brain 121: 1869-1887 (1998), reporting a follow-up on U.K. studies using a systematic genome screen to determine the genetic basis of MS, stated that a gene of major effect had been excluded from 95% of the genome and one with a moderate role from 65%, results thus suggesting that multiple sclerosis depends on independent or epistatic effects of several genes, each with small individual effects, rather than a very few genes of major biologic importance.

[0752] As a yet further example, schizophrenia has long been recognized to have complex, likely polygenic, genetic contributions.

[0753] Schizophrenia is a common psychiatric disorder, occurring in 1 to 1.5 percent of the population worldwide, and is characterized by variable constellations of symptoms drawn from a universe of behavioral abnormalities. Although there are accepted alternative diagnostic criteria, primary criteria for diagnosis require two or more of the following, each present for a significant portion of time during a 1-month period (or less if successfully treated): (1) delusions; (2) hallucinations ; (3) disorganized speech (e.g., frequent derailment or incoherence); (4) grossly disorganized or catatonic behavior; (5) negative symptoms, i.e., affective flattening, alogia, or avolition. See Diagnostic and Statistic Manual of Mental Disorders DSM-IV-TR, American Psychiatric Association (2000).

[0754] Only one such symptom is required if delusions are bizarre or hallucinations consist of a voice keeping up a running commentary on the person's behavior or thoughts, or consist of two or more voices conversing with each other.

[0755] Three-quarters of persons with schizophrenia develop the disease between 16 and 25 years of age: onset is uncommon after age 30, rare after age 40. In the 16 to 25 year old age group, schizophrenia affects more men than women; in the 25-30 year old group, the incidence is higher in women than in men. Studies have shown that some persons with schizophrenia recover completely, and many others improve to the point where they can live independently, often with the maintenance of drug therapy. However, approximately 15 percent of people with schizophrenia respond only moderately to medication and require extensive support throughout their lives, while another 15 percent simply do not respond to existing treatment.

[0756] Schizophrenia has long been known to have a significant genetic component. Studies have consistently demonstrated that the risk to relatives of a proband with schizophrenia is higher than the risk to relatives of controls. Moldin, in Genetics and Mental Disorders: Report of the NIMH Genetics Workgroup (NIE publication 98-4268, (1998), reviewed family and twin studies published between 1920 and 1987 and found the recurrence risk ratios to be 48 for monozygotic twins, 11 for first-degree relatives, 4.25 for second-degree relatives, and 2 for third-degree relatives. He also found that concordance rates for monozygotic twins averaged 46%, even when reared in different families, whereas the concordance rates for dizygotic twins averaged only 14%. The prevalence of schizophrenia is known to be higher in biologic than in adoptive relatives of schizophrenic adoptees.

[0757] The mode of inheritance is unclear, however. Susceptibility has been mapped to many loci, including chromosomes 1q21-q22, 5, 6p23, 8p22-p21, 11q, 13q14-q21, 13q32, 15q15, 15q14, 18p, and22q11. Chromosome 19 has also been implicated in schizophrenia, at 2 different sites, as have sites on the X chromosome. Wei et al., Nature Genet. 25:376-377 (2000) report more specifically that the NOTCH4 locus is associated with susceptibility to schizophrenia.

[0758] In general, however, it is believed that development of schizophrenia involves multiple loci.

[0759] For example, Williams et al, iHum. Molec. Genet. 8: 1729-1739 (1999) undertook a systematic search for linkage in 196 affected sib pairs (ASPs) with schizophrenia. Using 229 microsatellite markers at an average intermarker distance of 17.26 cM, followed in a second stage by a further 54 markers allowing the regions identified in stage 1 to be typed at an average spacing of 5.15 cM, Williams et al. considered results on chromosomes 4p, 18q, and Xcen as suggestive; however, given the scores, Williams et al. interpreted their results as suggesting that common genes of major effect (susceptibility ratio more than 3) are unlikely to exist for schizophrenia.

[0760] Similarly, Shaw et al., Am. J. Med. Genet. 81(5):364-76 (1998), in a genome-wide search for schizophrenia susceptibility genes, found that twelve chromosomes (1, 2, 4, 5, 8, 10, 11, 12, 13, 14, 16, and 22) had at least one region with a nominal P value <0.05, that two of these chromosomes had a nominal P value <0.01 (chromosomes 13 and 16), and that five chromosomes (1, 2, 4, 11, and 13) had at least one marker with a lod score >2.0, suggesting the existence of multiple loci that contribute to schizophrenia susceptibility.

[0761] As yet another example, multiple genes are thought to predispose to epilepsy.

[0762] Epilepsy is characterized by recurrent, paroxysmal disorders of cerebral function (seizures); that is, by sudden, brief attacks of altered consciousness, motor activity, sensory phenomena, or inappropriate behavior. The risk of developing epilepsy is 1% in the period from birth to age 20, and 3% at age 75.

[0763] Epilepsy is caused by excessive discharge of cerebral neurons. Clinical manifestations depend on the type and location of discharge. In partial seizures, for example, the excess neuronal discharge is contained within one region of the cerebral cortex. Simple partial seizures consist of motor, sensory, or psychomotor phenomena without loss of consciousness; the specific phenomenon reflects the affected area of the brain. In generalized seizures, the discharge bilaterally and diffusely involves the entire cortex. Sometimes a focal lesion of one part of a hemisphere activates the entire cerebrum bilaterally so rapidly that it produces a generalized tonic-clonic seizure before a focal sign appears.

[0764] Epilepsy is a family of disorders. Those that are idiopathic are believed to have multiple genetic contributions. For example, idiopathic generalized epilepsy (IGE) is characterized by recurring generalized seizures in the absence of detectable brain lesions and/or metabolic abnormalities. Twin and family studies suggest that genetic factors play a key part in its etiology. Although a mutation in the CACNB4 gene can cause the disorder, linkage to 8q24, Zara et al., Hum. Molec. Genet. 4: 1201-1207(1995), 3q26 and 14q23, Sander et al., Hum. Molec. Genet. 9:1465-1472 (2000), and 2q36 has been also demonstrated, with a multilocus model appearing to fit best the observed familial patterns.

[0765] Polygenic contributions to the etiology of various neurologic cancers have similarly been described.

[0766] For example, gliomas account for 45% of intracranial tumors, and multiple loci have been implicated in its development, with losses of chromosome 17p, increase in copy number of chromosome 7, structural abnormalities of chromosomes 9p and 19q, and genes on chromosome 10 among the suspects.

[0767] Other significant diseases of brain and nervous tissue are also believed to have a genetic, typically polygenic, etiologic component. These diseases include, for example, Parkinson's disease, dementia with Lewy bodies, frontotemporal dementia, corticobasal ganglionic degeneration, progressive supranuclear palsy, prion diseases (Creutzfeld-Jakob, Gerstmann-Strausller-Shenker, familial fatal insomnia), Tourette's Syndrome, corticobasal degeneration, multiple system atrophy, striatonigral degeneration, Shy-Drager syndrome, olivopontocerebellar atrophy, spinocerebellar ataxia, Friedreich ataxia, ataxia-telangiectasia, amyotrophic lateral sclerosis, bulbospinal atrophy (Kennedy's syndrome), spinal muscular atrophy, neuronal storage diseases (sphingolipid, mucopolysaccharide, mucolipid), leukodystrophy, Krabbe disease, metachromic leukodystrophy, adrenoleukodystrophy, Pelizaeus-Merzbacher disease, Canavan disease, mitochondrial encephalomyopathy, Leigh disease, neurofibromatosis (Type 1 and Type II), tuberous sclerosis, paraneoplastic syndrome, subacute cerebellar degeneration, subacute sensory neuropathy, opsoclonus/myoclonus, retinal degeneration, stiff-man syndrome and Von Hippel-Lindau disease.

[0768] Many neurologic cancers other than gliomas have also been shown or suspected to have genetic bases or contributions. Among these cancers are astrocytoma, fibrillary astrocytoma, pilocytic astrocytoma, pleomorphic xanthoastrocytoma, oligodendroglioma, ependymoma, gangliocytoma, ganglioglioma, medulloblastoma, primary brain germ cell tumor, pineocytoma, pineoblastoma, and meningioma.

[0769] Other disorders of brain and central nervous system that likely have genetic components include the various forms of neural deafness, catatonia, depression, bipolar (manic-depressive) disorder, Wilson's Disease, Pick disease, neuromyelitis optica (Devic disease), central pontine myelinolysis, Marchiafava-Bignami disease, Guillain-Barre syndrome, sleep disorders (insomnia, myoclonus, narcolepsy, cataplexy, sleep apnea), amnesia, aphasias (including Broca's aphasia and Wernicke's aphasia), cortical blindness, visual agnosia, auditory agnosia, and Kluver-Bucy syndrome.

[0770] The human genome-derived single exon nucleic acid probes and microarrays of the present invention are useful for predicting, diagnosing, grading, staging, monitoring and prognosing diseases of human brain, particularly those diseases with polygenic etiology. With each of the single exon probes described in this Example having been shown to be expressed at detectable levels in human brain, and with about ⅔ of the probes identifying novel genes, single exon microarrays of the present invention that include such probes provide exceptionally high informational content for such studies.

[0771] For example, diagnosis (including differential diagnosis among clinically indistinguishable disorders), staging, and/or grading of a disease can be based upon the quantitative relatedness of a patient gene expression profile to one or more reference expression profiles known to be characteristic of a given neurologic disease, or to specific grades or stages thereof.

[0772] In one embodiment, the patient gene expression profile is generated by hybridizing nucleic acids obtained directly or indirectly from transcripts expressed in the patient's brain (or other CNS tissues, including cultured tissues) to the genome-derived single exon microarray of the present invention. Reference profiles are obtained similarly by hybridizing nucleic acids from individuals with known disease. Methods for quantitatively relating gene expression profiles, without regard to the function of the protein encoded by the gene, are disclosed in WO 99/58720, incorporated herein by reference in its entirety.

[0773] In another approach, the genome-derived single exon probes and microarrays of the present invention can be used to interrogate genomic DNA, rather than pools of expressed message; this latter approach permits predisposition to and/or prognosis of neurologic disease to be assessed through the massively parallel determination of altered copy number, deletion, or mutation in the patient's genome of exons known to be expressed in human brain. The algorithms set forth in WO 99/58720 can be applied to such genomic profiles without regard to the function of the protein encoded by the interrogated gene.

[0774] Table 4, presented herewith in electronic format and incorporated herein by reference in its entirety, presents expression, homology, and finctional information for the genome-derived single exon probes of the present invention that are expressed significantly in human brain.

### EXAMPLE 6

### Genome-Derived Single Exon Probes Useful For Measuring Expression of Genes in Heart

[0775] Diseases of the heart and vascular system are a significant cause of human morbidity and mortality. Increasingly, genetic factors are being found that contribute to predisposition, onset, and/or aggressiveness of most, if not all, of these diseases. Although mutations in single genes have on occasion been identified as causative, these disorders are for the most part believed to have polygenic etiologies.

[0776] For example, cardiovascular disease (CVD), which includes coronary heart disease, stroke, and peripheral arterial vascular disease, is the leading cause of death in the United States and other developed countries. In developing regions, coronary heart disease and stroke are ranked second and third, respectively, as causes of mortality. In the United States alone, about 1 million deaths (about 42% of total deaths per year) result from CVD each year. CVD is also a significant cause of morbidity, with about 1.5 million people suffering myocardial infarction, and about 500,000 suffering strokes in the United States each year. With risk for CVD increasing with age, and an increasingly aging population, CVD will continue to be a major health problem into the future.

[0777] CVD is caused by arterial lesions that begin as fatty streaks, which consist of lipid-laden foam cells, and develop into fibrous plaques. The atherosclerotic plaque may grow slowly, and over several decades may produce a severe stenosis or result in arterial occlusion. Some plaques are stable, but other, more unstable, ones may rupture and induce thrombosis. The thrombi may embolize, rapidly occluding the lumen and leading to myocardial infarction or acute ischemic syndrome.

[0778] Risk factors for CVD include age and gender. In addition, a family history of CVD significantly increases risk, indicating a genetic basis for development of this disease complex. Obesity, especially truncal obesity, the cause of which is suspected to be genetic, is yet another risk factor for CVD. Familial disorders such as hyperlipidemia, hypoalphalipoproteinemia, hypertriglyceridemia, hypercholesterolemia, hyperinsulinemia, homocystinuria, and dysbetalipoproteinemia, all of which lead to lipid or lipoprotein abnormalities, can predispose one to the development of CVD. Both insulin-dependent and non-insulin-dependent diabetes mellitus, both of which have genetic components, have been also linked to the development of atherosclerosis.

[0779] The literature is replete with evidence for genetic causes of cardiovascular diseases. For example, studies by Allayee et al., Am. J. Hum. Genet. 63:577-585(1998), indicated a genetic association between familial combined hyperlipidemia (FCHL) and small dense LDL particles. The studies also concluded that the genetic determinants for LDL particle size are shared, at least in part, among FCHL families and the more general population at risk for CVD. Juo et al, Am. J. Hum. Genet. 63: 586-594 (1998) demonstrated that small, dense LDL particles and elevated apolipoprotein B levels, both of which are commonly found in members of FCHL families, share a common major gene plus individual polygenic components. The common major gene was estimated to explain 37% of the variants of adjusted LDL particle size and 23% of the variants of adjusted apoB levels.

[0780] The atherogenic lipoprotein phenotype (ALP) is a common heritable trait, symptoms of which include a prevalence of small, dense LDL particles, increased levels of triglyceride-rich lipoproteins, reduced levels of high density lipoprotein, and increased risk of CVD, particularly myocardial infarction. Both Nishina et al., Proc. Nat. Acad. Sci. 89: 708-712 (1992) and Rotter et al., Am. J. Hum. Genet. 58: 585-594(1996) demonstrated linkage between ALP and the LDLR locus. Rotter et al., supra, also reported linkage to the CETP locus on chromosome 16 and to the SOD1 locus on chromosome 6, and possibly also to the APOA1/APOC3/APOA4 cluster on chromosome 11.

[0781] Mutations in genes identified as components of lipid metabolism, e.g., apolipoprotein E (apoE) and LDL receptor (LDLR), have been shown to be associated with predisposition to the development of CVD. For example, several apoE variants had been found to be associated with familial dysbetalipoproteinemia, characterized by elevated plasma cholesterol and triglyceride levels and an increased risk for atherosclerosis (de Knijff et al., Mutat 4: 178-194 (1994)). Mutations in the LDLR gene have been associated with the familial hypercholesterolemia, an autosomal dominant disorder characterized by elevation of serum cholesterol bound to low density lipoprotein (LDL), that can lead to increased susceptibility to CVD.

[0782] To date, mutations in numerous genes have been shown to be associated with increased CVD susceptibility. However, the identified genetic associations are believed not to account for all genetic contributions to CVD.

[0783] As yet another example, hypertension is a major health problem because of its high prevalence and its association with increased risk of CVD. Approximately 25% of all adults and over 60% of persons older than 60 years in the United States have high blood pressure.

[0784] Arterial or systemic hypertension is diagnosed when the average of two or more diastolic BP measurements on at least two subsequent visits is 90 mm Hg or more, or when the average of multiple systolic BP readings on two or more subsequent visits is consistently greater than 140 mm Hg. Pulmonary hypertension is defined as pressure within the pulmonary arterial system elevated above the normal range; pulmonary hypertension may lead to right ventricle (RV) failure.

[0785] Hypertension, together with other cardiovascular risk factors, leads to atherosclerosis and other forms of CVD, primarily by damaging the vascular endothelium. In more than 40% of the U.S. population, hypertension is accompanied by hyperlipidemia and leads to the development of atherosclerotic plaques. In the absence of hyperlipidemia, intimal thickening occurs. Non-atherosclerotic hypertension-induced vascular damage can lead to stroke or heart failure.

[0786] Familial diseases associated with secondary hypertension include familial renal disease, polycystic kidney disease, medullary thyroid cancer, pheochromocytoma, and hyperparathyroidism. Hypertension is also twice as common in patients with diabetes mellitus.

[0787] More than 95% of all hypertension cases are essential hypertension, that is, lack identifiable antecedent clinical cause. Essential hypertension shows clustering in families and can result from a variety of genetic diseases. In most cases, high blood pressure results from a complex interaction of factors with both genetic and environmental components. The recent search for genes that contribute to the development of essential hypertension has shown that the disorder is polygenic in origin. However, with several exceptions (such as angiotensinogen, angiotensin receptor-1, beta-3 subunit of guanine nucleotide-binding protein, tumor necrosis factor receptor-2, and α-adducin), the particular genes involved are still being sought.

[0788] Susceptibility loci for essential hypertension have been mapped to chromosomes 17 and 15q. Hasstedt et al., Am. J. Hum. Genet. 43: 14-22 (1988) measured red cell sodium in 1,800 normotensive members of 16 Utah pedigrees ascertained through hypertensive or normotensive probands, siblings with early stroke death, or brothers with early coronary disease, and suggested that red blood cell sodium was determined by 4 alleles at a single locus. This major locus was thought to explain 29% of the variance in red cell sodium, and polygenic inheritance explained another 54.6%. A higher frequency of the high red blood cell sodium genotype in pedigrees in which the proband was hypertensive rather than normotensive provided evidence that this major locus increases susceptibility to hypertension.

[0789] From a study of systolic blood pressure in 278 pedigrees, Perusse et al., Am. J. Hum. Genet. 49: 94-105 (1991) reported that variability in systolic blood pressure is likely influenced by allelic variation of a single gene, with gender and age dependence. They also suggested that a single gene may be associated with a steeper increase of blood pressure with age among males and females.

[0790] There is strong evidence, however, for additional as yet uncharacterized, hypertension-associated loci on other chromosomes.

[0791] For example, Xu et al., Am. J. Hum. Genet. 64: 1694-1701 (1999) carried out a systematic search for chromosomal regions containing genes that regulate blood pressure by scanning the entire autosomal genome using 367 polymorphic markers. Because of the sampling design, the number of sib pairs, and the availability of genotyped parents, this study represented one of the most powerful of its kind. Although no regions achieved a 5% genomewide significance level, maximum lod scores were greater than 2.0 for regions of chromosomes 3, 11, 15, 16, and 17.

[0792] As another example, cardiac arrhythmias account for several thousand deaths each year. Arrhythmias such as ventricular fibrillation, which causes more than 300,000 sudden deaths annually in the United States alone, encompass a multitude of disorders. Another type of arrhythmia, idiopathic dilated cardiomyopathy, of which familial dilated cardiomyopathy accounts for 20-25%, is responsible for more than 10,000 deaths in the United States annually and is the predominant indication for cardiac transplantation.

[0793] Cardiac arrhythmias can be divided into bradyarrhythmias (slowed rhythms) or tachyarrhythmias (speeded rhythms). Bradyarrhythmias result from abnormalities of intrinsic automatic behavior or conduction, primarily within the atrioventricular node and the His-Purkinje's network. Tachyarrhythmias are caused by altered automaticity, reentry, or triggered automaticity.

[0794] Bradyarrhythmias arising from suspected polygenic disorders include Long QT syndrome 4, atrioventricular block, familial sinus node disease, progressive cardiac conduction defect, and familial cardiomyopathy. Tachyarrhythmias with possible underlying polygenic causes include familial ventricular tachycardia, Wolff-Parkinson-White syndrome, familial arrhythmogenic right ventricular dysplasia, heart-hand syndrome V, Mal de Meleda, familial ventricular fibrillation, and familial noncompaction of left ventricular myocardium.

[0795] For some of the arrhythmias, one or more of the causative genes have been identified.

[0796] For example, atrioventricular block has been associated with mutations in the SCN5A gene, as well as mutations in a locus mapped to 19q13. Studies have shown linkage of familial sinus node disease to a marker on 10q22-q24. Familial ventricular tachycardia has been linked to mutations in genes encoding the G protein subunit alpha-i2 (GNAI1), and/or related genes. Examination of families with Wolff-Parkinson-White syndrome suggest an autosomal dominant pattern of inheritance and evidence of linkage of the disorder to DNA markers on band 7q3. Linkage analysis shows strong evidence for localization of a gene for Mal de Meleda disease on 8qter. Familial ventricular fibrillation can be caused by mutations in the cardiac sodium channel gene SCN5A. Familial noncompaction of left ventricular myocardium has been linked to mutations in the gene encoding tafazzin (TAZ), or in the FK506-binding protein 1A gene (FKBP1A).

[0797] Familial dilated cardiomyopathy is characterized by an autosomal dominant pattern of inheritance with age-related penetrance. The linkage of familial dilated cardiomyopathy to several loci indicate that it is polygenic. These loci include CMD1A on 1p11-q11, CMD1B on 9q13, CMD1C on 10q21, CMD1D on 1q32, CMD1L on 3p, CMD1F on 6q, CMD1G on 2q31, CMD1H on 2q14-q22, and CMD11, which results from mutation in the DES gene on 2q35. In addition, cardiomyopathy can also be caused by mutations in the ACTC gene, the cardiac beta-myosin heavy chain gene (MYH7), or the cardiac troponin T gene.

[0798] Familial arrhythmogenic right ventricular dysplasia is inherited as an autosomal dominant with reduced penetrance and is one of the major genetic causes of juvenile sudden death. It is estimated that the prevalence of familial arrhythmogenic right ventricular dysplasia ranges from 6 per 10,000 in the general population to 4.4 per 1,000 in some areas. Several loci for familial arrhythmogenic right ventricular dysplasia have been mapped indicating that this disease is also polygenic in nature. These loci include ARVD 1 on 14q23-q24, ARVD2 on 1q42-q43, ARVD3 on 14q12-q22, ARVD4 on 2q32.1-q32.3, ARVD5 on 3p23, and ARVD6 on 10p14-p12.

[0799] Progressive cardiac conduction defect (PCCD), also called Lenegre-Lev disease, is one of the most common cardiac conduction diseases. It is characterized by progressive alteration of cardiac conduction through the His-Purkinje system with right or left bundle branch block and widening of QRS complexes, leading to complete atrioventricular block and ultimately causing syncope and sudden death. It represents the major cause of pacemaker implantation in the world (0.15 implantations per 1,000 inhabitants per year in developed countries). The cause of PCCD is unknown but familial cases with right bundle branch block have been reported suggesting that at least some cases are of genetic origin. Reports have linked PCCD to HB1 on 19q13.3, and to mutations in the SCN5A gene (Schott et aL, Nature Genet. 23: 20-21 (1999)).

[0800] As yet a further example, congenital heart disease occurs at a rate of 8 per 1000 live births, which corresponds to approximately 32,000 infants with newly diagnosed congenital heart disease each year in the United States. Twenty percent of infants with congenital heart disease die within the first year of life. Approximately 80% of the first-year survivors live to reach adulthood. Congenital heart disease also has economic impact due to the estimated 20,000 surgical procedures performed to correct circulatory defects in these patients. The estimated number of adults with congenital heart disease in the United States is currently about 900,000.

[0801] In 90% of patients, congenital heart disease is attributable to multifactorial inheritance. Only 5-10% of malformations are due to primary genetic factors, which are either chromosomal or a result of a single mutant gene.

[0802] The most common congenital heart disease found in adults is bicuspid aortic valve. This defect occurs in 2% of the general population and accounts for approximately 50% of operated cases of aortic stenosis in adults. Atrial septal defect is responsible for 30-40% of congenital heart disease seen in adults. The most common congenital cardiac defect observed in the pediatric population is ventricular septal defect, which accounts for 15-20% of all congenital lesions. Tetralogy of Fallot is the most common cyanotic congenital anomaly observed in adults. Other congenital heart diseases include Eisenmenger's syndrome, patent ductus arteriosus, pulmonary stenosis, coarctation of the aorta, transposition of the great arteries, tricuspid atresia, univentricular heart, Ebstein's anomaly, and double-outlet right ventricle.

[0803] A number of studies have identified putative genetic loci associated with one or more congenital heart diseases.

[0804] Congenital heart disease affects more than 40% of all Down syndrome patients. The candidate chromosomal region containing the putative gene or genes for congenital heart disease associated with Down syndrome is 21q22.2-q22.3, between ETS2 and MX1.

[0805] DiGeorge syndrome (DGS) is characterized by several symptoms including outflow tract defects of the heart such as teratology of Fallot. Most cases result from a deletion of chromosome 22q11.2 (the DiGeorge syndrome chromosome region, or DGCR). The 22q11 deletion is the second most common cause of congenital heart disease after Down syndrome. Several genes are lost in this deletion including the putative transcription factor TUPLE1. This deletion is associated with a variety of phenotypes, e.g., Shprintzen syndrome; conotruncal anomaly face (or Takao syndrome); and isolated outflow tract defects of the heart including Tetralogy of Fallot, trancus arteriosus, and interrupted aortic arch.

[0806] Whereas 90% of cases of DGS may now be attributed to a 22q11 deletion, other associated chromosome defects have been identified. For example, Greenberg et al., Am. J. Hum. Genet. 43:605-611 (1988), reported 1 case of DGS with del10p13 and one with a 18q21.33 deletion. Fukushima et al., Am. J. Hum. Genet. 51 (suppl.):A80 (1992) reported linkage with a deletion of 4q21.3-q25. Gottlieb et al., Am. J. Hum. Genet. 62: 495-498 (1998) concluded that the deletion of more than 1 region on 10p could be associated with the DGS phenotype. The association of the DiGeorge syndrome with at least 2 and possibly more chromosomal locations suggests strongly the involvement of several genes in this disease.

[0807] Digilio et al., J. Med. Genet. 34: 188-190 (1997), calculated empiric risk figures for recurrence of isolated Tetralogy of Fallot in families after exclusion of del(22q11), and concluded that gene(s) different from those located on 22q11 must be involved in causing familial aggregation of nonsyndromic Tetralogy of Fallot. Johnson et al., Am. J. Med. Genet. (1997) conducted a cytogenetic evaluation of 159 cases of Tetralogy of Fallot. They reported that a del(22q11) was identified in 14% who underwent fluorescence in situ hybridization (FISH) testing with the N25 cosmid probe.

[0808] Other congenital heart disease are also suspected to be of polygenic origin. For example, Holmes et al., Birth Defects Orig. Art. Ser. X(4): 228-230 (1974) described familial clustering of hypoplastic left heart syndrome in siblings consistent with multifactorial causation.

[0809] Other significant diseases of the heart and vascular system are also believed to have a genetic, typically polygenic, etiological component. These diseases include, for example, hypoplastic left heart syndrome, cardiac valvular dysplasia, Pfeiffer cardiocranial syndrome, oculofaciocardiodental syndrome, Kapur-Toriello syndrome, Sonoda syndrome, Ohdo Blepharophimosis syndrome, heart-hand syndrome, Pierre-Robin syndrome, Hirschsprung disease, Kousseff syndrome, Grange occlusive arterial syndrome, Kearns-Sayre syndrome, Kartagener syndrome, Alagille syndrome, Ritscher-Schinzel syndrome, Ivemark syndrome, Young-Simpson syndrome, hemochromatosis, Holzgreve syndrome, Barth syndrome, Smith-Lemli-Opitz syndrome, glycogen storage disease, Gaucher-like disease, Fabry disease, Lowry-Maclean syndrome, Rett syndrome, Opitz syndrome, Marfan syndrome, Miller-Dieker lissencephaly syndrome, mucopolysaccharidosis, Bruada syndrome, humerospinal dysostosis, Phaver syndrome, McDonough syndrome, Marfanoid hypermobility syndrome, atransferrinemia, Comelia de Lange syndrome, Leopard syndrome, Diamond-Blackfan anemia, Steinfeld syndrome, progeria, and Williams-Beuren syndrome.

[0810] The human genome-derived single exon nucleic acid probes and microarrays of the present invention are useful for predicting, diagnosing, grading, staging, monitoring and prognosing diseases of human heart and vascular system, particularly those diseases with polygenic etiology. With each of the single exon probes described in this Example shown to be expressed at detectable levels in human heart, and with about ⅔ of the probes identifying novel genes, single exon microarrays of the present invention that include such probes provide exceptionally high informational content for such studies.

[0811] For example, diagnosis (including differential diagnosis among clinically indistinguishable disorders), staging, and/or grading of a disease can be based upon the quantitative relatedness of a patient gene expression profile to one or more reference expression profiles known to be characteristic of a given heart or vascular disease, or to specific grades or stages thereof.

[0812] In one embodiment, the patient gene expression profile is generated by hybridizing nucleic acids obtained directly or indirectly from transcripts expressed in the patient's heart or vascular tissues to the genome-derived single exon microarray of the present invention. Reference profiles are obtained similarly by hybridizing nucleic acids obtained directly or indirectly from transcripts expressed in heart or vascular tissue of individuals with known disease. Methods for quantitatively relating gene expression profiles, without regard to the function of the protein encoded by the gene, are disclosed in WO 99/58720, incorporated herein by reference in its entirety.

[0813] In another approach, the genome-derived single exon probes and microarrays of the present invention can be used to interrogate genomic DNA, rather than pools of expressed message; this latter approach permits predisposition to and/or prognosis of heart or vascular disease to be assessed through the massively parallel determination of altered copy number, deletion, or mutation in the patient's genome of exons known to be expressed in human heart. The algorithms set forth in WO 99/58720 can be applied to such genomic profiles without regard to the function of the protein encoded by the interrogated gene.

[0814] Table 5, presented herewith in electronic format and incorporated herein by reference in its entirety, presents expression, homology, and functional information for the genome-derived single exon probes of the present invention that are expressed significantly in human heart.

### EXAMPLE 7

### Genome-Derived Single Exon Probes Useful For Measuring Expression of Genes in Liver

[0815] Diseases of the liver are a significant cause of human morbidity and mortality. Increasingly, genetic factors are being found that contribute to predisposition, onset, and/or aggressiveness of most, if not all, of these diseases; although causative mutations in single genes have been identified for some, these disorders are believed for the most part to have polygenic etiologies.

[0816] For example, cirrhosis is a major public health problem. In the industrialized world, it is among the top ten causes of death; among patients aged 45 to 65, it is the third leading cause of death. The high prevalence is largely the result of alcohol abuse, but other major contributors include chronic hepatitis, biliary disease and iron overload. Approximately 10-15% are cryptogenic.

[0817] Cirrhosis is a broad description encompassing the common end stage of many forms of liver injury. Many patients with cirrhosis will remain asymptomatic for years, while others show generalized weakness, anorexia, malaise, and weight loss or, occasionally, more severe symptoms.

[0818] The progression from fibrosis, an early consequence of liver disease, to cirrhosis, and the specific histologic morphology that characterizes cirrhosis depend on the extent of injury, the presence of continuing damage, and the response of the liver to damage. The liver may be injured acutely and severely (e.g. necrosis with hepatitis), moderately over months or years (e.g. biliary tract obstruction and chronic active hepatitis), or modestly but continuously (e.g. alcohol abuse).

[0819] During the repair process, new vessels connecting the hepatic artery and portal vein to the hepatic venules form within the fibrous sheath that surrounds the surviving nodules of liver cells. These vessels restore the intrahepatic circulatory pathway, but provide relatively low-volume, high-pressure drainage that is less efficient than normal and results in increased portal vein pressure (portal hypertension). Thus, cirrhosis is not static and its features depend on the disease activity and stage.

[0820] As cirrhosis is the end stage of many forms of liver disease, many genes have been identified that can contribute to the development of cirrhosis. These include, e.g., the genes responsible for Wilson disease (Online Mendelian Inheritance of Man (“OMIM”) 277900), type IV glycogen storage disease (OMIM 232500), galactosemia (OMIM 230400), and a deficiency of alpha-1-antitrypsin (OMIM 107400). There is substantial evidence, however, for as yet uncharacterized loci which cause cirrhosis.

[0821] For example, lber and Maddrey, Prog. Liver Dis. 2: 290-302 (1965), reviewed 13 previously reported families and 8 new to this study, each with 2 or more affected members. They pointed out that, with a single exception, the multiple cases were in the same generation. Within a given family, the age of onset, clinical course, and biopsy findings were very similar, but there were wide differences between families.

[0822] Kalra et al., Hum. Hered. 32:170-175 (1982) studied the families of 220 cases of Indian childhood cirrhosis and 70 families of age-matched controls. The hypotheses of autosomal recessive, partial sex-linkage, and doubly recessive inheritance were found untenable and the authors concluded that multifactorial inheritance was most plausible. Lefkowitch et al, New Eng. J. Med. 307:271-277 (1982) described 4 white American sibs who died between ages 4.5 and 6 years of cirrhosis that closely resembled that of the childhood cirrhosis of Asiatic Indians.

[0823] Another example of uncharacterized loci which cause cirrhosis are those related to the risk of alcoholism.

[0824] Cloninger, Science 236:410-416 (1987), defined two separate types of alcoholism. According to these definitions, type 1 alcohol abuse has its usual onset after the age of 25 years and is characterized by severe psychological dependence and guilt. Type 1 occurs in both men and women and requires both genetic and environmental factors to become manifest. By contrast, type 2 alcohol abuse has its onset before the age of 25; persons with this type of alcoholism are characterized by their inability to abstain from alcohol and by frequent aggressive and antisocial behavior. Type 2 alcoholism is rarely found in women and is much more heritable.

[0825] Despite considerable effort to identify genes related to the risk of alcoholism, relatively few genes have been identified. Some of this work has suggested a relationship between the metabolism of dopamine and alcoholism. Blum et al, J.A.M.A. 263:2055-2060 (1990) and Bolos et al., J.A.M.A. 264:3156-3160 (1990) investigated the relationship of the dopamine D2 receptor (DRD2; OMIM 126450) to alcoholism, but the sample size was small and their results were inconclusive. However, Tiihonen et al., Molec. Psychiat. 4, 286-289 (1999), found a markedly higher frequency in a population of type 1 alcoholics of the low activity allele of the enzyme catechol-O-methyltransferase (COMT, OMIM 116790), which has a crucial role in the metabolism of dopamine, suggesting a role for dopamine metabolism in increased risk of alcoholism. For a brief review of recent progress toward the identification of genes related to risk for alcoholism see Buck, Genome 9:927-928 (1998).

[0826] As another example, multiple genes have been shown to predispose to hyperlipoproteinemia or hyperlipidemia. Much attention has been focused on these disorders because there is a strong association of hyperlipidemia, especially hypercholesterolemia, with development of coronary artery disease. Coronary artery disease accounts for at least 25% of all deaths in the United States. Coronary artery disease results when the arteries supplying the heart muscle become occluded by plaques composed of lipids like cholesterol, blood clotting components and blood cells.

[0827] The major plasma lipids circulate bound to proteins as macromolecular complexes called lipoproteins. Although closely interrelated, the major lipoprotein classes—chylomicron, very-low-density lipoprotein (VLDL), low-density lipoprotein (LDL), and high-density lipoprotein (HDL)—are usually classified in terms of physicochemical properties (e.g., density after centrifugation). Chylomicrons, the largest lipoproteins, carry exogenous triglyceride from the intestine via the thoracic duct to the venous system and into peripheral sites. VLDL carries endogenous triglyceride primarily from the liver to the same peripheral sites for storage or use. Lipases quickly degrade the triglyceride in VLDL to produce intermediate density lipoproteins (IDL) and within 2 to 6 h, IDL is degraded further to generate LDL, which has a plasma half-life of 2 to 3 days. While the overall fate of LDL is unclear, the liver is responsible for removing approximately 70% and active receptor sites have been found on the surfaces of hepatocytes.

[0828] Several monogenic conditions that lead to elevated levels of one or more serum lipoproteins have been defined and the responsible gene identified, including, e.g., hyperlipoproteinemia type I (OMIM 238600), familial hypercholesterolemia (OMIM 143890), and familial defective apolipoprotein B (OMIM 107730). However, in many cases the etiology is unknown and there is strong evidence for additional uncharacterized loci.

[0829] For example, Zuliani et al., Arterioscler. Thromb. Vasc. Biol. 19:802-809 (1999) identified a Sardinian family with a recessive form of hypercholesterolemia with the clinical features of familial hypercholesterolemia (OMIM 603813), and found that previously identified genes were not responsible for this disorder. They proposed that in this new lipid disorder, a recessive defect causes a selective impairment of the LDL receptor function in the liver. Ciccarese et al, Am. J. Hum. Genet. 66:453-460 (2000) recently mapped this novel disease locus.

[0830] Another example is designated familial combined hyperlipidemia (OMIM 144250) which affects approximately 1-2% of the population in the Western world. This disorder can have its basis in mutation in several novel genes, two of which have been mapped to chromosome 1 (Pajukanta et al., Nature Genet. 18:369-373 (1998)) and chromosome 11 (Aouizerat et al., Am. J. Hum. Genet. 65, 397-412 (1999)). The high frequency of this disorder suggests that most, if not all, hyperlipidemias are of multifactorial genetic etiology.

[0831] As yet a further example, primary schlerosing cholangitis (PSC) is a disorder characterized by a patchy obliterative inflammatory fibrosis of the large bile ducts. Chronic inflammation leads to extensive bile duct strictures, cholestasis, and gradual progression to biliary cirrhosis. PSC occurs most often in young men and is commonly associated with inflammatory bowel disease, especially ulcerative colitis. The onset is usually insidious, with gradual, progressive fatigue, pruritus, and jaundice. There is no specific therapy for sclerosing cholangitis, and liver transplantation is the only apparent cure.

[0832] The etiology of PSC is not known, but both genetic and immunologic X abnormalities have been implicated. However, the frequency of HLA-B8 and HLA-DT2, which are associated with a number of autoimmune diseases, is higher in PSC than normal individuals. Prochazka et al., New Eng. J. Med. 322:1842-1844 (1990) found that 100% of 29 patients with primary sclerosing cholangitis carried the HLA-DRw52a antigen, which is normally present in 35% of the population.

[0833] As a still further example, sarcoidosis is a disease of unknown cause characterized by non-caseating granulomas in one or more organ systems. These granulomas may resolve completely or proceed to fibrosis. The disorder is systemic, but the liver is affected in approximately 75% of cases. Sarcoidosis occurs mainly in persons aged 20 to 40 yr and is most common in Northern Europeans and American blacks. The lifetime risk of developing sarcoidosis is particularly high among Swedish men (1.15%), Swedish women (1.6%), and African Americans (2.4%).

[0834] The much greater frequency in African Americans relative to the United States population overall suggests a genetic contribution to etiology. Early research studying familial aggregation indicated that the disease may have a nongenetic basis because the family pattern did not conform to a simple Mendelian mode of inheritance (Allison, Sth. Med. J. 57: 27-32 (1964)). However, Headings et al., Ann. N.Y. Acad. Sci. 278:377-385 (1976) favored multifactorial genetic inheritance of susceptibility. Nowack et al., Arch. Intern. Med. 147:481-483 (1987), found an unusually high frequency of HLA-DR5 in a study of 440 patients with sarcoidosis in Marburg, Germany. They also concluded that the role of an environmental or infectious agent triggering sarcoidosis cannot be envisaged without considering genetically linked cofactors.

[0835] Other significant diseases of liver are also believed to have a genetic, typically polygenic, etiologic component. These diseases include, e.g., primary biliary cirrhosis, Zellweger syndrome, cholestasis-lymphedema syndrome, Alstrom syndrome, primary pulmonary hypertension, Berardinelli-Seip congenital lipodystrophy, iron overload in Africa, neonatal cholestatic hepatitis, autosomal recessive KID syndrome, familial hypotransferrinemia, type I congenital dyserythropoietic anemia, porphyria variegata, Finnish lactic acidosis with hepatic hemosiderosis, Rotor syndrome, essential hypertension, ARC syndrome, type II conjugated hyperbilirubinemia, Lambert syndrome, ichthyosis congenita with biliary atresia, Kabuki make-up syndrome, Meckel syndrome, cerebral aneurysm-cirrhosis syndrome, glycogen storage diseases, polycystic kidney and hepatic disease, isolated Caroli disease, trisomy 18-like syndrome, Osler-Rendu-Weber syndrome 3, fatal intrahepatic cholestasis, Coach syndrome, type C Niemann-Pick disease, and hepatocellular cancer.

[0836] Altered responses to a variety of infectious agents that target the liver, especially acute viral hepatitis, have also been shown or are suspected to have genetic bases or contributions. In addition to differential susceptibility to primary infectious agents, these altered responses include predisposition to complicating conditions following contact with particular infectious agents. These include, e.g., development of hepatocellular carcinoma 2 correlated with Hepatitis B infection, and severe hepatic fibrosis following Schistosoma mansoni infection.

[0837] The central role of the liver in drug metabolism results in exposure of this organ to a large variety of potentially toxic chemical agents and metabolites. These include naturally occurring plant alkaloids and mycotoxins, industrial chemicals, and, additionally, pharnacologic agents used in treating disease. The range of manifestations of toxin- and drug-induced liver disease are virtually as broad as the range of acute and chronic disorders and have also been shown or suspected to have genetic bases or contributions.

[0838] Such interactions between drugs and genotype have been shown in the response, e.g., to the anticonvulsant phenytoin, which can cause severe hepatitis-like disease in individuals who are impaired in the ability to detoxify a metabolite of phenytoin in the liver, and in the response to the drug sodium valproate, which can produce severe hepatotoxicity in certain individuals. The abnormal responses to both of these drugs are believed to be influenced by underlying genetic factors.

[0839] The human genome-derived single exon nucleic acid probes and microarrays of the present invention are useful for predicting, diagnosing, grading, staging, monitoring and prognosing diseases of human liver, particularly those diseases with polygenic etiology. With each of the single exon probes described in this Example shown to be expressed at detectable levels in human liver, and with about ⅔ of the probes identifying novel genes, single exon microarrays of the present invention that include such probes provide exceptionally high informational content for such studies.

[0840] For example, diagnosis (including differential diagnosis among clinically indistinguishable disorders, such as cirrhosis), staging, and/or grading of a disease can be based upon the quantitative relatedness of a patient gene expression profile to one or more reference expression profiles known to be characteristic of a given liver disease, or to specific grades or stages thereof.

[0841] In one embodiment, the patient gene expression profile is generated by hybridizing nucleic acids obtained directly or indirectly from transcripts expressed in the patient's liver to the genome-derived single exon microarray of the present invention. Reference profiles are obtained similarly, using nucleic acids obtained directly or indirectly from transcripts expressed by liver of individuals with known liver disease. Methods for quantitatively relating gene expression profiles, without regard to the function of the protein encoded by the gene, are disclosed in WO 99/58720, incorporated herein by reference in its entirety.

[0842] In another approach, the genome-derived single exon probes and microarrays of the present invention can be used to interrogate genomic DNA, rather than pools of expressed message; this latter approach permits predisposition to and/or prognosis of liver disease to be assessed through the massively parallel determination of altered copy number, deletion, or mutation in the patient's genome of exons known to be expressed in human liver. The algorithms set forth in WO 99/58720 can be applied to such genomic profiles without regard to the function of the protein encoded by the interrogated gene.

[0843] Table 6, presented herewith in electronic format and incorporated herein by reference in its entirety, presents expression, homology, and functional information for the genome-derived single exon probes of the present invention that are expressed significantly in human liver.

### EXAMPLE 8

### Genome-Derived Single Exon Probes Useful For Measuring Expression of Genes in Fetal Liver

[0844] Table 7, presented herewith in electronic format and incorporated herein by reference in its entirety, presents expression, homology, and functional information for the genome-derived single exon probes of the present invention that are expressed significantly in human fetal liver.

### EXAMPLE 9

### Genome-Derived Single Exon Probes Useful For Measuring Expression of Genes in Placenta

[0845] Given the substantial impact on human morbidity and mortality of diseases directly caused by genetic defect, and given the profound influence of genetic factors on the predisposition, onset, and/or aggressiveness of most, if not all human diseases, there has long been interest in efficient and safe means for early detection of gene defects and polymorphisms that cause, are associated with, or are implicated in development of disease.

[0846] Classically, such antenatal diagnosis was effected during second trimester by metaphase karyotyping of fetal cells that had shed spontaneously into amniotic fluid.

[0847] More recently, techniques have been developed that permit direct sampling of placenta earlier in pregnancy.

[0848] One technique in current clinical practice is chorionic villus sampling, which can be used to detect gene defects or polymorphisms in cells from the developing fetus, usually between 10 and 12 weeks of pregnancy. In chorionic villus sampling, a small sample of chorionic villi, which are tiny projections that make up part of the placenta, a fetal-derived tissue, is removed through the mother's cervix or the abdominal wall. Placental chromosomal DNA is then isolated from the chorionic villus cells and analyzed to detect a small number of known genetic defects. Such defects range from gross karyotypic changes, such as triploidy, to discrete point mutations known to cause diseases having significant morbidity or mortality.

[0849] Although only a few diseases are at present diagnosed by antenatal analysis of human placenta, a far higher number of human diseases and disorders have been catalogued in which dysfunction or misregulation of one or more genes contributes to the disease phenotype. At one end of the spectrum of genetic diseases are those, such as sickle cell trait, in which a single point mutation is responsible for the disease phenotype. At the other end of the spectrum lie disorders such as Down syndrome wherein the presence of a supernumerary chromosome manifests itself in variety of phenotypic defects that vary in severity among affected individuals. For most, possibly all genetic diseases, the precise phenotypic manifestation and its severity is a function of a complex interaction between the definable genetic lesion and the action of many other genes and environmental factors.

[0850] Although the incidence of many genetic diseases is low, a sufficient number of such genetic diseases affect a sufficiently large population that they impact the national health economy. For example, cystic fibrosis, caused by mutations in a gene encoding a chloride ion channel and resulting in lung and other disorders, occurs at a rate of about 1 in 3000 births among Caucasians and costs over $1 billion annually for direct medical treatment in the U.S. alone. Furthermore, it is increasingly thought that for many diseases where no clear-cut genetic lesion appears responsible, possession by individuals of particular gene alleles naturally occurring within certain populations places such individuals at increased risk for developing those diseases. Examples include heart disease, neurogenerative disorders, diabetes, cancer and autoimmune disorders.

[0851] For yet other diseases, especially cancer, the etiology is truly polygenic in that defects in multiple genes must cooincide in the same individual or even the same cell for the disease to develop and/or progress.

[0852] The human genome-derived single exon nucleic acid probes and microarrays of the present invention are useful for antenatal diagnosis of human genetic disorders. With each of the single exon probes described in this Example shown to be expressed at detectable levels in human placenta, and with about 2/3 of the probes identifying novel genes, single exon microarrays of the present invention that include such probes provide exceptionally high informational content for such studies.

[0853] For example, antenatal diagnosis can be based upon the quantitative relatedness of a placental gene expression profile to one or more reference expression profiles known to be characteristic of a given disease, or to specific grades or stages thereof.

[0854] In one embodiment, the gene expression profile is generated by hybridizing nucleic acids obtained directly or indirectly from placenta, typically through chorionic villus sampling, to the genome-derived single exon microarray of the present invention. Reference profiles are obtained similarly by hybridizing nucleic acids from individuals with known disease. Methods for quantitatively relating gene expression profiles, without regard to the function of the protein encoded by the gene, are disclosed in WO 99/58720, incorporated herein by reference in its entirety.

[0855] In another approach, the genome-derived single exon probes and microarrays of the present invention can be used to interrogate genomic DNA, rather than pools of expressed message; this latter approach permits presence and/or predisposition to disease to be assessed through the massively parallel determination of altered copy number, deletion, or mutation of exons known to be expressed in human placenta. The algorithms set forth in WO 99/58720 can be applied to such genomic profiles without regard to the function of the protein encoded by the interrogated gene.

[0856] Table 8, presented herewith in electronic format and incorporated herein by reference in its entirety, presents expression, homology, and fumctional information for the genome-derived single exon probes of the present invention that are expressed significantly in human placenta.

### EXAMPLE 10

### Genome-Derived Single Exon Probes Usefull For Measuring Expression of Genes in Lung

[0857] Diseases of the lung are a significant cause of human morbidity and mortality. Increasingly, genetic factors are being found that contribute to predisposition, onset, and/or aggressiveness of most, if not all, of these diseases; although causative mutations in single genes have been identified for some, these disorders are, for the most part, believed to have polygenic etiologies.

[0858] For example, asthma affects about 5% of the adult population in the United States, making it the seventh-ranking chronic condition. The worldwide prevalence of asthma has increased more than 30% since the late 1970s, mostly in areas of increased industrialization. The yearly economic costs (including both direct and indirect costs) are estimated at almost $12 billion dollars. Asthma is also one of the most common reasons to seek medical treatment, with over 1.5 million emergency room visits, 500,000 hospitalizations and over 5,500 deaths each year. Outpatient visits are estimated at 15 million per year.

[0859] Patients with asthma suffer shortness of breath accompanied by cough, wheezing, and anxiety. Common features of acute asthma attacks include a rapid respiratory rate, tachycardia, and pulsus paradoxus. Acute attacks can be triggered by environmental factors such as allergens, changes in temperature, and exercise; other acute exacerbations have no discernible precipitating cause. If asthma is not treated, it can be life-threatening.

[0860] It is now well known that genetic factors predispose to asthma, but the exact nature of this genetic component is still imprecise.

[0861] A 1986 human genetic study supported polygenic inheritance, Townley, et. al., J. Allergy Clin. Immun. 77: 101-107 (1986), and more recent studies have suggested that predisposing factors for asthma, if not the disease itself, are heritable. Slutsky, J. Clin. Pharmacol. 39: 246-51 (1999).

[0862] In one approach to elaborating the polygenic contributions to asthma, candidate genes have been suggested based upon presumed involvement in the physiologic processes known to contribute to the asthmatic state. Huss et al., Nurs. Clin. North Am. 35: 695-705 (2000).

[0863] In other studies, linkages and/or associations of genetic markers with atopy, bronchial hyperresponsiveness and/or asthma have been reported in candidate regions, including the 6p region, which includes both the HLA complex and the Tumor Necrosis Factor a gene (TNF-a), the 11q region which includes the gene coding for the b sub-unit of the high-affinity IgE receptor (FcE R1), the T-cell receptor a gene on chromosome 14, the 5q region bearing numerous candidate genes among which are the interleukin (IL-3, 4, 5, 9, 13) cluster and the b₂-adrenergic receptor gene, the 12q region containing the genes for interferon-gamma (IFNg), a mast cell growth factor (MGF), and an insulin-like growth factor (IGF1). The strongest of these linkages are associated with chromosomes 5 and 11. Other linkage regions have been reported on chromosomes 6, 7, 11, 12 and 13. Demenais, The European Network For Understanding Mechanisms of Severe Asthma, BIOMED 2 Program—European Commission (1998).

[0864] Linkage regions have also been suggested on chromosomes 3, 16 and 14. Duffy, D., “Review of Molecular Genetics of Asthma and Allergy”, (http://www2.qimr.edu.au/davidD/asthma6.html).

[0865] As another example, chronic obstructive pulmonary disease (COPD) is the fourth most common cause of death in the United States. Although cigarette smoking is the most common cause of COPD, with smokers having a rate 10 to 30 times higher for developing emphysema than non-smokers, genetic factors are thought to play a significant role in susceptibility to COPD; indeed, only 15-20% of long-term cigarette smokers will develop COPD, suggesting that genetic factors strongly affect outcome.

[0866] COPD includes both chronic bronchitis and emphysema, which share similar symptoms and frequently coexist. More than 16 million Americans have COPD at a cost currently estimated at $30 billion dollars each year. Chronic obstructive lung disease is characterized by a decline in lung function resulting in difficulty in breathing and physiological changes. In severe COPD, patients breathe at very high lung volumes, having lost the lung's normal elastic recoil. Because COPD does not affect the lung uniformly, ventilation and perfusion distribution is impaired. In areas of the lung with low ventilation-perfusion ratios, arterial hypoxia results. This can further lead to pulmonary hypertension, right ventricular failure, and, ultimately, tissue ischemia, such as coronary artery disease.

[0867] The only confirmed genetic risk factor for COPD is the inherited deficiency of alpha 1-proteinase inhibitor (familial emphysema). Familial emphysema accounts for less than 5 percent of all cases of COPD, however, and familial clustering of lung function and COPD suggest the presence of other genetic risk factors. Luisetti et al., Mondaldi Arch. Chest Dis. 50:28-32 (1995); Khouryet. al., Genet Epidemiol. 2: 155-66 (1985).

[0868] Among such additional genetic factors are the presence of the GC2 allele, which appears to exert a protective effect against COPD. Home et. al., Hum. Hered. 40: 173-76 (1990). Other suspected genetic involvement includes genes coding for alpha1-antichymotrypsin, alpha2-macroglobulin, vitamin D-binding protein and blood group antigens. Sandford et. al., Eur. Respir. J. 10: 1380-91 (1997). Finally, the form of the enzyme microsomal epoxide hydrolase is correlated to susceptibility to COPD. Smith et al., The Lancet 350: 630-33 (1997). It remains uncertain, however, whether other loci contribute to predisposition and aggressiveness of COPD.

[0869] As yet a further example, lung cancer is the leading cause of cancer death in both men and women in the United States. Although smoking is the primary risk factor, genetics plays a known role in susceptibility to these bronchogenic carcinomas.

[0870] The most common of the bronchogenic carcinomas is non-small cell lung cancer (NSCLC), which accounts for 75% of all primary lung cancers. NSCLCs are divided into adenocarcinomas, squamous cell carcinomas, and large cell carcinomas. Small cell lung cancer (SCLC) comprises 20% of primary lung cancers, and carcinoids make up 5%. Other rare forms of lung cancer (all totaling less than 1%) include lymphoma, carcinosarcoma, mucoepidermoid carcinoma, malignant fibrous histiocytoma, melanoma, sarcoma, and blastoma. Lung cancer is generally not associated with clinical symptoms until late in the course of the disease; this late diagnosis is likely to contribute to the poor 5-year survival rate of 14%.

[0871] Premalignant changes are thought to include a number of successive mutations in various growth regulation genes. A chromosome 3p deletion, chromosome 9p deletion, and p53 gene mutations have been identified in premalignant lesions. Chromosomal abnormalities identified in both SCLC and NSCLC include deletions involving chromosomes 3p, 5q, 9p, 11p, 13q, and 17p. Weston et. al., Proc. Nat. Acad. Sci. 86: 5099-5103 (1989). For most of these regions, suspected loci are tumor suppressor genes. Additionally, transforming oncogenes such as Ki-ras, H-ras, N-ras, myc, her2neu, c-kit, bc1-2 and cyclin D1 (prad) have also been shown to be activated in certain types of bronchogenic carcinomas. Perucho et. al., Cell 27: 467-76 (1981); Cecil Textbook of Medicine, 21^{St} ed. (2000).

[0872] Other contributing genetic loci have been identified, including a deletion of the phosphatase and tensin homolog (PTEN) at 10q23.3. Overexpression of PTEN can inhibit invasion in lung cancer cells, and appears to downregulate integrin alpha(6), laminin beta(3), heparin-binding epidermal growth factor-like growth factor, urokinase-type plasminogen activator, myb protein B, and Akt2. Hong et. al., Am. J Respir. Cell Mol. Biol 23: 355-63 (2000). In a recent study assessing the risk of lung cancer from environmental tobacco smoke (ETS), women who were homozygous null for glutathione S-transferase (GST)-1 (GSTM1) had a statistically significant greater risk of developing lung cancer from ETS. Bennett et. al., J. Nat. Cancer. Inst. 91: 2009-2014 (1999). The identified genetic factors are believed to be only a subset, however, of loci that contribute to disease.

[0873] As a still further example, the interstitial lung diseases (ILDs) share certain pathogenic mechanisms and histopathologic features. ILDs comprise more than 100 disorders characterized by diffuse inflammation and scarring of the lung interstitium, derangement of the alveolar walls and loss of functional alveolar capillary units. Symptoms include breathlessness, exercise intolerance, and progressive respiratory insufficiency. ILD is estimated to account for 100,000 hospital admissions each year.

[0874] Genetic factors are known to contribute to the development of some types of ILD. Examples are familial idiopathic pulmonary fibrosis, neurofibromatosis, tuberous sclerosis, Gaucher's disease, Niemann-Pick disease and Hermansky-Pudlak syndrome. ILDs with unknown etiology include, e.g., sarcoidosis, pulmonary hemosiderosis, pulmonary histiocytosis, lymphangioleiomyomatosis, pulmonary alveolar proteinosis, and nonspecific interstitial lung disease.

[0875] As an example of still undefined polygenic basis, the etiology of sarcoidosis remains enigmatic, but has long been suspected to have a genetic component. Ethnic preponderance, familial clustering and multigenerational involvement all point towards hereditary susceptibility. Rybicki et. al, Clin. Chest Med. 18: 707-717 (1997). Some studies have shown an association between susceptibility to sarcoidosis and HLA type. Nowack et al., Arch. Intern. Med. 147: 481-83 (1987); Ishihara et. al., Tissue Antigens 50: 650-53 (1997).

[0876] Other significant diseases of the lung are also believed to have a genetic, typically polygenic, etiologic component. These diseases include, for example, Kartagener syndrome, fibrocystic pulmonary dysplasia, primary ciliary dyskinesis, pulmonary hypertension, and hyaline membrane disease.

[0877] The human genome-derived single exon nucleic acid probes and microarrays of the present invention are useful for predicting, diagnosing, grading, staging, monitoring and prognosing diseases of human lung, particularly those diseases with polygenic etiology. With each of the single exon probes described in this Example shown to be expressed at detectable levels in human lung, and with about ⅔ of the probes identifying novel genes, single exon microarrays of the present invention that include such probes provide exceptionally high informational content for such studies.

[0878] For example, diagnosis (including differential diagnosis among clinically indistinguishable disorders, such as the ILDs), staging, and/or grading of a disease can be based upon the quantitative relatedness of a patient gene expression profile to one or more reference expression profiles known to be characteristic of a given lung disease, or to specific grades or stages thereof.

[0879] In one embodiment, the patient gene expression profile is generated by hybridizing nucleic acids obtained directly or indirectly from transcripts expressed in the patient's lung to the genome-derived single exon microarray of the present invention. Reference profiles are obtained similarly by hybridizing nucleic acids from individuals with known disease. Methods for quantitatively relating gene expression profiles, without regard to the function of the protein encoded by the gene, are disclosed in WO 99/58720, incorporated herein by reference in its entirety.

[0880] In another approach, the genome-derived single exon probes and microarrays of the present invention can be used to interrogate genomic DNA, rather than pools of expressed message; this latter approach permits predisposition to and/or prognosis of lung disease to be assessed through the massively parallel determination of altered copy number, deletion, or mutation in the patient's genome of exons known to be expressed in human lung. The algorithms set forth in WO 99/58720 can be applied to such genomic profiles without regard to the function of the protein encoded by the interrogated gene.

[0881] Table 9, presented herewith in electronic format and incorporated herein by reference in its entirety, presents expression, homology, and finctional information for the genome-derived single exon probes of the present invention that are expressed significantly in human lung.

### EXAMPLE 11

### Genome-Derived Single Exon Probes Useful For Measuring Expression of Genes in Bone Marrow

[0882] Because bone marrow is the tissue in which blood cells originate, diseases of the bone marrow are a significant cause of human morbidity and mortality. Increasingly, genetic factors are being found that contribute to predisposition, onset, and/or aggressiveness of most, if not all, of these diseases. Although mutations in single genes have in some cases been identified as causal—notably in the thalassemias and sickle cell anemia—disorders of the bone marrow are, for the most part, believed to have polygenic etiologies.

[0883] For example, cancers that originate in the bone marrow and lymphatic tissues such as the lymphomas, leukemias, and myeloma have been recognized as a major health concern. An estimated 632,000 Americans are presently living with lymphoma, leukemia or myeloma, and over 110,000 new cases are anticipated each year. The new cases alone account for 11% of all cancer cases reported in the United States.

[0884] Lymphoma is a general term for a group of cancers of lymphocytes that manifest in the tissues of the lymphatic system. Eventually, monoclonal proliferation crowds out healthy cells and creates tumors which enlarge lymph nodes. Approximately 450,000 members of the U.S. population are living with lymphoma: 160,000 with Hodgkin disease (HD) and 290,000 with non-Hodgkin lymphoma.

[0885] Hodgkin disease (HD) is a specialized form of lymphoma, and represent about 8% of all lymphomas. HD can be distinguish in tissues by the presence of an abnormal cell called the Reed-Stemberg cell. Incidence rates of HD are higher in adolescents and young adults, but HD is considered to be one of the most curable forms of cancer. Symptoms of HD include painless welling of lymph glands, fatigue, recurrent high fever, sweating at night, skin irritations and loss of weight.

[0886] Although an infectious etiology has been proposed to account for the disproportionate incidence of HD among siblings reared together—particularly an association with Epstein Barr Virus (EBV)—multiple genetic contributions have also been suggested.

[0887] As early as 1986, linkage to HLA was suggested, with Klitz et al., Am. J. Hum. Genet. 54: 497-505 (1994) reporting an overall association of the nodular sclerosing (NSHD) group with the HLA class II region. Results of the study suggested that susceptibility to NSHD is influenced by more than 1 locus within the class II region. Through a literature search, Shugart and Collins (2000), Europ. J. Hum. Genet. 8: 460-463 (2000), performed a combined segregation and linkage analysis on 59 nuclear families with HD and concluded that HD is most likely determined by both an HLA-associated major gene and other non-HLA genetic factors, in conjunction with environmental effects.

[0888] Non-Hodgkin lymphoma (NHL) is a malignant monoclonal proliferation of the lymphoid cells in the immune system, including bone marrow, spleen, liver and GI tract. The pathologic classification of NHL continues to evolve, reflecting new insights into the cells of origin and the biologic bases of these heterogeneous diseases. The course of NHL varies from indolent and initially well tolerated to rapidly fatal. Furthermore, common clinical symptoms of NHL, but rare in HD, are congestion and edema of the face and neck and ureteral compression.

[0889] Non-Hodgkin lymphoma (NHL) has been linked to a variety of specific genetic defects, including 26 mutated genes and at least 9 identified chromosomal translocations. Among the mutated genes are: ALK (2p23); AP12 (MIHC, cIAP2) (11q22-q23); API4 (survivin, SVV)(17q25(?)); ATM (ATA, ATC) (11q22.3); BCL1 (11q13.3); BCL10 (CLAP, CIPER)(1p22); BCL2 (18q21.3); BCL6 (LAZ3,ZNF51) (3q27); BLYM (1p32); BMI1 (10p13); CCND1 (D11S287E, Cyclin D,PRAD1)(1q13); CD44 (MDU3, HA, MDU2)(11pter-p13); FRAT1 (10q23-q24(?)); FRAT2 (GBP)(10(?)); IL6 (IFNB2)(7p21); IRF4 (MUM1, LSIRF) (6p25-p23); LCP1 (PLS2)(13q14.1-q14.3); MALT1 (MLT)(18q21); MUC1 (PUM,PEM)(1q21); MYBL1 (AMYB, A-MYB)(8q22); MYC (CMYC, C-MYC )(8q24.12-q24.13); NBS1(8q21); NPM1 (B23)(5q35); PCNA (20p12); TLKM1 (21q22.1); and TP53 (p53, P53)(17q13.1).

[0890] Among the chromosomal abnormalities are: t(1;14) (p22;q32); t(14;18)(q32;q21); t(3;14)(q27;q32); t(6;14)(p25,q32); t(11;18)(q21;q21); t(1;14)(q21;q32); t(2;5)(p23;q35); add(14q32)/dup(14p32); and t(11;14)(q13;q32).

[0891] Additional genetic loci, as yet undiscovered, are believed to account for other occurrences of NHL.

[0892] As another example, acute leukemia is a malignant disease of blood-forming tissues such as the bone marrow. It is characterized by the uncontrolled growth of white blood cells. As a result, immature myeloid cells (in acute myelogenous leukemia (AML)) or lymphoid cells (in acute lymphocytic leukemia (ALL)) rapidly accumulate and progressively replace the bone marrow; diminished production of nornal red cells, white cells, and platelets ensues. This loss of normal marrow function in turn gives rise to the typical clinical complications of leukemia: anemia, infection, and bleeding.

[0893] If untreated, ALL is rapidly fatal; most patients die within several months of diagnosis. With appropriate therapy, many patients can be cured. The survival rate for patients diagnosed with AML or ALL is 14% and 58% respectively. However, the incidences of AML is expected to be greater than ALL: an estimated 10,000 new cases of AML, predominantly in older adults, is anticipated in the U.S. alone, whereas 3,100 new cases of ALL are expected, with 1,500 of these new cases occurring among children.

[0894] The etiology of acute leukemia is not known. Although human T-cell lymphotropic virus type I (HTLV-I), a causative agent of adult T-cell leukemia, and HTLV-II, obtained from several patients with a syndrome resembling hairy cell leukemia, have been isolated, the etiologic link between HTLV and malignancy is uncertain. There is, however, evidence which suggests a genetic predisposition to incidences of acute leukemia.

[0895] For example, genetic disorders such as Fanconi anemia and Down syndrome appear to increase risk of acute leukemia, specifically, AML. Evidence supporting a chromosome 21 locus for acute myelogenous leukemia (AML) includes the finding of linkage to 21q22.1-q22.2 in a family with a platelet disorder and propensity to develop AML (Ho et al., Blood 87: 5218-5224 (1996), an increased incidence of leukemia in Down syndrome, and frequent somatic translocation in leukemia involving the CBFA gene on 21q22.3. In addition, Horwitz et al., Am. J. Hum. Genet. 61:873-881 (1997), suggest that a gene on 16q22 may be a second cause of acute myelogenous leukemia. Nonparametric linkage analysis gave a P-value of 0.00098 for the conditional probability of linkage. Mutational analysis excluded expansion of the AT-rich minisatellite repeat FRA16B fragile site and the CAG trinucleotide repeat in the E2F-4 transcription factor. Large CAG repeat expansion was excluded as a cause of leukemia in this family.

[0896] Similarly, acute lymphoblastic leukemia (ALL) has been suggested to have a genetic predisposition. In particular, linkage to chromosome 9p has been reported by a number of groups. Chilcote et al., New Eng. J. Med. 313: 286-291 (1985), found that 6 of 8 patients with clinical features of lymphomatous ALL (LALL), a distinct category of ALL of T-cell lineage, had karyotypic abnormalities leading to loss of bands 9p22-p21. The mechanisms varied and included deletions, unbalanced translocations, and loss of the entire chromosome; only 1 of 57 patients without LALL had an abnormality of chromosome 9 at diagnosis. Kowalczyk et al., Cancer Genet. Cytogenet. 9:383-385 (1981), had earlier found changes in 9p in a subgroup of ALL cases. Chilcote et al. (1985) pointed out that there is a fragile site at 9p21 and raised the question of familial predisposition on this basis. This fragile site is the breakpoint in the translocation t(9;11)(p21-22;q23), which is associated with acute nonlymphocytic leukemia with monocytic features, ANLL-AMoL-M5a. In a large series, Murphy et al., New Eng. J. Med. 313:1611 (1985), confirmed an abnormality of 9p in 10 to 11% of cases (33 out of more than 300) of acute lymphoblastic leukemia. The breakpoints in 9p clustered in the p22-p21 region. They could not, however, corroborate the specific association with T-cell origin or so-called lymphomatous clinical features. In addition, Taki et al., Proc. Natl. Acad. Sci. USA 96:14535 (1999), recently identified AF5q31, a new AF4-related gene, fused to MLL in infant ALL with ins(5;11)(q31;q13q23), and suspects that AF5q31 and AF4 might define a new family particularly involved in the pathogenesis of 11q23-associated-ALL.

[0897] As yet a further example of a disease affecting bone marrow with likely polygenic etiology is multiple myeloma (MM).

[0898] MM is a cancer of plasma cells, the final differentiated stage of B lymphocyte maturation. The malignant clone proliferates in the bone marrow and frequently invades the adjacent bone, producing extensive skeletal destruction that results in bone pain and fractures. Anemia, hypercalcemia, and renal failure are some clinical manifestations associated with MM.

[0899] MM causes 1% of all cancer deaths in Western countries. A genetic component to its etiology is suggested by disparate incidence among various groups in the country. Its incidence is higher in men than in women, in people of African descent relative to the U.S. population at large, and in older adults as compared to the young. It has been estimated that 14,000 new cases of myeloma will be diagnosed in the U.S., and over 11,000 persons will die from MM within the year.

[0900] Although, Kaposi's sarcoma-associated herpes virus has been associated with MM (Retig et al., Science 276:1851 (1997)), there is evidence that chromosomal abnormalities, such as the deletion of 13q14 and rearrangements of 14q increase the proliferation of myeloma cells.

[0901] Up to 30% of patients who suffer with MM have a balanced translocation, t(4;14)(p16.3;q32), that places the fibroblast growth factor receptor 3 (FGFR3) gene under the control of IgH promoter elements (Chesi et al., Nat. Genet. 16:260 (1997)). This results in increased expression of FGFR3, a member of a family of tyrosine kinase receptors implicated in control of cellular proliferation.

[0902] According to Zoger et al., Blood 95:1925 (2000), monoallelic deletions of the retinoblastoma-1 (rb-1) gene and the D13S319 locus were observed in 48 of 104 patients (46.2%) and in 28 of 72 (38.9%) patients, respectively, with newly diagnosed MM. Fluorescence in situ hybridization (FISH) studies found that 13q14 was deleted in all 17 patients with karyotypic evidence of monosomy 13 or deletion of 13q but also in 9 of 19 patients with apparently normal karyotypes. Patients with a 13q14 deletion were more likely to have higher serum levels of beta(2)-microglobulin (P=0.059) and a higher percentage of bone marrow plasma cells (P=0.085) than patients with a normal 13q14 status on FISH analysis. In patients with a deletion of 13q14, myeloma cell proliferation was markedly increased. The presence of a 13q14 deletion on FISH analysis was associated with a significantly lower rate of response to conventional-dose chemotherapy (40.8% compared with 78.6%; P=0.009) and a shorter overall survival (24.2 months compared with >60 months; P<0.005) than in patients without the deletion.

[0903] There are numerous other mutated genes and chromosomal abnormalities that may predispose to MM. Examples of such genes are: B2M (15q21-q22); CCND1 (D11S287E, CyclinD, PRAD1)(11q13); CD19 (16p11.2); HGF (HPTA)(7q21.1); IL6 (IFNB2)(7p21); IRF4 (MUM1, LSIRF)(6p25-p23); LTA (TNFB, LT)(6p21.3); SDC1 (2p24.1); and TNF (TNFA, TNFSF2, DIF)(6p21.3). Examples of chromosomal abnormalities include: t(6; 14)(p25;q32) and t(11; 14)(q13;q32).

[0904] Other significant diseases or disorders of the bone marrow are also believed, or likely to have, a genetic, typically polygenic, etiologic component. These diseases include, for example, chronic myeloid leukemia, chronic lymphoid leukemia, polycythemia vera, myelofibrosis, primary thrombocythemia, myelodysplastic syndromes, Wiskott-Aldrich, lymphoproliferative syndrome, aplastic anemia, Fanconi anemia, Down syndrome, sickle cell disease, thalassemia, granulocyte disorders, Kostmann syndrome, chronic granulomatous disease, Chediak-Higashi syndrome, platelet disorders, Glanzmann thrombasthenia, Bernard-Soulier syndrome, metabolic storage diseases, osteopetrosis, congenital hemophagocytic syndrome.

[0905] The human genome-derived single exon nucleic acid probes and microarrays of the present invention are useful for predicting, diagnosing, grading, staging, monitoring and prognosing diseases of human bone marrow, particularly those diseases with polygenic etiology. With each of the single exon probes described in this Example shown to be expressed at detectable levels in human bone marrow, and with about ⅔ of the probes identifying novel genes, single exon microarrays of the present invention that include such probes provide exceptionally high informational content for such studies.

[0906] For example, diagnosis, grading, and/or staging of a disease can be based upon the quantitative relatedness of a patient gene expression profile to one or more reference expression profiles known to be characteristic of a given bone marrow disease, or to specific grades or stages thereof.

[0907] In one embodiment, the patient gene expression profile is generated by hybridizing nucleic acids obtained directly or indirectly from transcripts expressed in the patient's bone marrow (or cells cultured therefrom) to the genome-derived single exon microarray of the present invention. Reference profiles are obtained similarly by hybridizing nucleic acids obtained directly or indirectly from transcripts expressed in the bone marrow of individuals with known disease. Methods for quantitatively relating gene expression profiles, without regard to the function of the protein encoded by the gene, are disclosed in WO 99/58720, incorporated herein by reference in its entirety.

[0908] In another approach, the genome-derived single exon probes and microarrays of the present invention can be used to interrogate genomic DNA, rather than pools of expressed message; this latter approach permits predisposition to and/or prognosis of diseases of bone marrow to be assessed through the massively parallel determination of altered copy number, deletion, or mutation in the patient's genome of exons known to be expressed in human bone marrow. The algorithms set forth in WO 99/58720 can be applied to such genomic profiles without regard to the function of the protein encoded by the interrogated gene.

[0909] Table 10, presented herewith in electronic format and incorporated herein by reference in its entirety, presents expression, homology, and functional information for the genome-derived single exon probes of the present invention that are expressed significantly in human bone marrow.

### EXAMPLE 12

### Genome-Derived Single Exon Probes Useful For Measuring Expression of Genes in HeLa Cells

[0910] Table 11, presented herewith in electronic format and incorporated herein by reference in its entirety, presents expression, homology, and functional information for the genome-derived single exon probes of the present invention that are expressed significantly in HeLa cells.

[0911] All patents, patent publications, and other published references mentioned herein are hereby incorporated by reference in their entireties as if each had been individually and specifically incorporated by reference herein. While preferred illustrative embodiments of the present invention are described, one skilled in the art will appreciate that the present invention can be practiced by other than the described embodiments, which are presented for purposes of illustration only and not by way of limitation. The present invention is limited only by the claims that follow.

What is claimed is:

1. A nucleic acid probe for measuring human gene expression, comprising:
a nucleotide sequence as set forth in any one of SEQ ID NOs: 13,701-27,400, the complement thereof, or a fragment of said SEQ ID NO: or said complement,
wherein said probe is a single exon probe that hybridizes under high stringency conditions to a nucleic acid molecule expressed in human cells or tissues.

2. A single exon nucleic acid probe according to claim 1, wherein:
said nucleotide sequence is selected from the exon SEQ iID NOs: set forth in Table 4, the complement thereof, or a fragment of said SEQ ID NO: or said complement,
and wherein said probe hybridizes under high stringency conditions to a nucleic acid molecule expressed in human brain.

3. A single exon nucleic acid probe according to claim 1, wherein:
said nucleotide sequence is selected from the exon SEQ ID NOs: set forth in Table 5, the complement thereof, or a fragment of said SEQ ID NO: or said complement,
and wherein said probe hybridizes under high stringency conditions to a nucleic acid molecule expressed in human heart.

4. A single exon nucleic acid probe according to claim 1, wherein:
said nucleotide sequence is selected from the exon SEQ ID NOs: set forth in Table 6, the complement thereof, or a fragment of said SEQ ID NO: or said complement,
and wherein said probe hybridizes under high stringency conditions to a nucleic acid molecule expressed in human liver.

5. A single exon nucleic acid probe according to claim 1, wherein:
said nucleotide sequence is selected from the exon SEQ ID NOs: set forth in Table 7, the complement thereof, or a fragment of said SEQ ID NO: or said complement,
and wherein said probe hybridizes under high stringency conditions to a nucleic acid molecule expressed in human fetal liver.

6. A single exon nucleic acid probe according to claim 1, wherein:
said nucleotide sequence is selected from the exon SEQ ID NOs: set forth in Table 8, the complement thereof, or a fragment of said SEQ ID NO: or said complement,
and wherein said probe hybridizes under high stringency conditions to a nucleic acid molecule expressed in human placenta.

7. A single exon nucleic acid probe according to claim 1, wherein:
said nucleotide sequence is selected from the exon SEQ ID NOs: set forth in Table 9, the complement thereof, or a fragment of said SEQ ID NO: or said complement,
and wherein said probe hybridizes under high stringency conditions to a nucleic acid molecule expressed in human lung.

8. A single exon nucleic acid probe according to claim 1, wherein:
said nucleotide sequence is selected from the exon SEQ ID NOs: set forth in Table 10, the complement thereof, or a fragment of said SEQ ID NO: or said complement,
and wherein said probe hybridizes under high stringency conditions to a nucleic acid molecule expressed in human bone marrow.

9. A single exon nucleic acid probe according to claim 1, wherein:
said nucleotide sequence is selected from the exon SEQ ID NOs: set forth in Table 11, the complement thereof, or a fragment of said SEQ ID NO: or said complement,
and wherein said probe hybridizes under high stringency conditions to a nucleic acid molecule expressed in HeLa cells.

10. The single exon nucleic acid probe of claim 1, wherein said fragment includes at least 20 contiguous nucleotides of said SEQ ID NO: or the complement thereof.

11. The single exon nucleic acid probe of claim 1, wherein said fragment includes at least 25 contiguous nucleotides of said SEQ ID NO: or the complement thereof.

12. The single exon nucleic acid probe of claim 1, wherein said fragment includes at least 50 contiguous nucleotides of said SEQ ID NO: or the complement thereof.

13. The single exon nucleic acid probe of claim 1, wherein said probe further comprises, contiguous to a first end of said fragment, a first intronic and/or intergenic sequence that is identically contiguous to said fragment in the human genome.

14. The single exon nucleic acid probe of claim 13, wherein said probe further comprises, contiguous to a second end of said fragment, a second intronic and/or intergenic sequence that is identically contiguous to said fragment in the human genome.

15. The single exon nucleic acid probe of claim 14, wherein said probe comprises a nucleotide sequence selected from any one of SEQ ID NOs: 1-13,700, or the complement thereof.

16. The single exon nucleic acid probe of claim 15, wherein:
said probe comprises a nucleotide sequence selected from the probe SEQ ID NOs:
set forth in Table 4, or the complement thereof,
and wherein said probe hybridizes under high stringency conditions to a nucleic acid molecule expressed in human brain.

17. The single exon nucleic acid probe of claim 15, wherein:
said probe comprises a nucleotide sequence selected from the probe SEQ ID NOs:
set forth in Table 5, or the complement thereof,
and wherein said probe hybridizes under high stringency conditions to a nucleic acid molecule expressed in human heart.

18. The single exon nucleic acid probe of claim 15, wherein:
said probe comprises a nucleotide sequence selected from the probe SEQ ID NOs:
set forth in Table 6, or the complement thereof,
and wherein said probe hybridizes under high stringency conditions to a nucleic acid molecule expressed in human liver.

19. The single exon nucleic acid probe of claim 15, wherein:
said probe comprises a nucleotide sequence selected from the probe SEQ ID NOs:
set forth in Table 7, or the complement thereof,
and wherein said probe hybridizes under high stringency conditions to a nucleic acid molecule expressed in human fetal liver.

20. The single exon nucleic acid probe of claim 15, wherein:
said probe comprises a nucleotide sequence selected from the probe SEQ ID NOs:
set forth in Table 8, or the complement thereof,
and wherein said probe hybridizes under high stringency conditions to a nucleic acid molecule expressed in human placenta.

21. The single exon nucleic acid probe of claim 15, wherein said probe comprises a nucleotide sequence selected from the probe SEQ ID NOs: set forth in Table 9, or the complement thereof,
and wherein said probe hybridizes under high stringency conditions to a nucleic acid molecule expressed in human lung.

22. The single exon nucleic acid probe of claim 15, wherein:
said probe comprises a nucleotide sequence selected from the probe SEQ ID NOs:
set forth in Table 10, or the complement thereof,
and wherein said probe hybridizes under high stringency conditions to a nucleic acid molecule expressed in human bone marrow.

23. The single exon nucleic acid probe of claim 15, wherein:
said probe comprises a nucleotide sequence selected from the probe SEQ ID NOs:
set forth in Table 11, the complement thereof, or a fragment of said SEQ ID NO: or said complement,
and wherein said probe hybridizes under high stringency conditions to a nucleic acid molecule expressed in HeLa cells.

24. The single exon nucleic acid probe of claim 1, wherein said probe is no more than 25 kbin length.

25. The single exon nucleic acid probe of claim 1, wherein said probe is no more than 5 kb in length.

26. The single exon nucleic acid probe of claim 1, wherein said probe lacks prokaryotic and bacteriophage vector sequence.

27. The single exon nucleic acid probe of claim 1, wherein said probe lacks homopolymeric stretches of A or T.

28. A nucleic acid probe for measuring human gene expression, comprising:
a nucleotide sequence that encodes, or the complement of which encodes, at least 8 amino acids of any one of SEQ ID NOs: 27,401-34,288,
wherein said probe is a single exon probe that hybridizes under high stringency conditions to a nucleic acid molecule expressed in human cells or tissues.

29. A spatially-addressable set of single exon nucleic acid probes for measuring human gene expression, comprising:
a plurality of single exon nucleic acid probes according to claim 1,
wherein each of said plurality of probes is separately and addressably isolatable or amplifiable from said plurality.

30. The spatially-addressable set of single exon nucleic acid probes of claim 29,
wherein each of said plurality of probes is amplifiable using at least one common primer.

31. The spatially-addressable set of single exon nucleic acid probes of claim 29,
wherein said set comprises between 50-20,000 single exon nucleic acid probes.

32. The spatially-addressable set of single exon nucleic acid probes of claim 29,
wherein the average length of the single exon nucleic acid probes is between 50 bp and 750 bp.

33. The spatially-addressable set of single exon nucleic acid probes of claim 29,
wherein at least 50% of said single exon nucleic acid probes lack prokaryotic and bacteriophage vector sequence.

34. The spatially-addressable set of single exon nucleic acid probes of claim 29,
wherein at least 50% of said single exon nucleic acid probes lack homopolymeric stretches of A or T.

35. The spatially-addressable set of single exon nucleic acid probes of claim 29,
wherein said probes are addressably disposed upon a substrate.

36. A single exon microarray for measuring human gene expression, comprising:
a spatially-addressable plurality of single exon nucleic acid probes according claim 1.

37. A single exon microarray for measuring human gene expression, comprising:
a spatially-addressable plurality of single exon nucleic acid probes according to any one of claims 2-28.

38. The single exon microarray of claim 36, wherein said plurality of single exon nucleic acid probes averages at least 50 bp in length.

39. The single exon microarray of claim 36, wherein said plurality of single exon nucleic acid probes averages at least 75 bp in length.

40. The single exon nucleic acid microarray of claim 36, wherein said single exon nucleic acid probes are noncovalently bound to the substrate of said microarray.

41. A method of measuring human gene expression, comprising:
contacting the microarray of claim 36 with a first plurality of detectably labeled nucleic acids, said first plurality of nucleic acids being derived from human gene transcripts; and then
measuring the label detectably bound to each probe of said microarray,
said measures of detected label providing a measure of human gene expression.

42. The method of claim 41, further comprising:
contacting said microarray with a second plurality of detectably labeled nucleic acids;
measuring the label detectably bound to each probe of said microarray; and
comparing said first and second measurements,
said comparative measures of detected label providing a measure of human gene expression.

43. The method of claim 42, wherein said first and second pluralities are distinguishably labeled and simultaneously contacted to said microarray.

44. A vector, comprising: the single exon probe of claim 1.

45. An ORF-encoded peptide, comprising: at least 8 contiguous amino acids of any one of SEQ ID NOs: 27,401-34,288 or at least 8 contiguous amino acids of any one of SEQ ID NOs: 27,401-34,288 with conservative amino acid substitutions.

46. The ORF-encoded peptide of claim 45, wherein said peptide comprises at least 15 contiguous amino acids of any one of SEQ ID NOs: 27,401-34,288 or at least 15 contiguous amino acids of any one of SEQ ID NOs: 27,401-34,288 with conservative amino acid substitutions.

47. An isolated antibody, wherein said antibody binds specifically to a peptide according to claim 45.

48. A method of selling and/or licensing single exon probes to a customer desiring to measure gene expression, comprising:
making available for computerized query a database having a plurality of records, each record corresponding to a single exon probe according to claim 1,
wherein said database responds to a customer query by returning to the customer at least one record, or an identifier of said record, that satisfies the customer query criteria, the probes to which said records correspond being available for sale and/or licensing.

49. A method of selling and/or licensing single-exon microarrays to a customer desiring to measure gene expression, comprising:
making available for computerized query a database having a plurality of records, each record corresponding to a microarray according to claim 36,
wherein said database responds to a customer query by returning to the customer at least one record, or an identifier of said record, that satisfies the customer query criteria, the microarrays to which said records correspond being available for sale and/or licensing.

50. A method of providing human gene expression data by subscription, comprising:
making available for computerized query a database having a plurality of records, each record including data on the expression of a single exon probe according to claim 1,
wherein said database responds to a query by a customer having a subscription, but not to a query by a customer lacking such subscription, by returning at least one record, or identifier of said at least one record, that satisfies the customer query criteria.

51. A computer readable storage medium storing instructions that, when executed by a computer, causes the computer to perform the method of any one of claims 48 to 51.

52. A computer system, comprising a processor programmed to perform the method of any one of claims 48 to 51.

53. A computer readable storage medium containing a database having a plurality of records, each record including data on the expression of a single exon probe according to claim 1.

The application's sequence listing, which the Patent Office published only in electronic form, follows.

SEQUENCE LISTING (34288 sequences)

SEQ ID NO: 1 - DNA, 539 bp, Homo sapiens
  MAP TO CHR22_227.0; EXPRESSED IN BONE MARROW, SIGNAL = 1.7; EXPRESSED IN HELA, SIGNAL = 2.5; EXPRESSED IN BRAIN, SIGNAL = 1.5; EXPRESSED IN FETAL LIVER, SIGNAL = 1.4; EXPRESSED IN HEART, SIGNAL = 1.1; EXPRESSED IN LUNG, SIGNAL = 0.86; EXPRESSED IN PLACENTA, SIGNAL = 0.65; EXPRESSED IN ADULT LIVER, SIGNAL = 0.83; EST_HUMAN HIT: BI051415.1, EVALUE 0.00e+00; NT HIT: gi14779288, EVALUE 1.00e-44; SWISSPROT HIT: O35253, EVALUE 2.00e-01
tgaccaagtcctgaactccctgcgccccagcaaggctgtgccttcagcacttgcttgcgcctggcttgtgccagctgagcgtgagctgagattaactgagcctcaaatccaacccagggtcaagggacccagctgtgggagttggggtagcccaggctttggtttctcctcagaggcctgaacccagggcaggatgggggcaccgctgggaggcggttctaagatgaaccccaacaacccccaactcctcactttccagagcagtccacggatattttgatccaagagagaattactctgacaaggagtccctgtcgttcatgatagacacaatgaaatccaccctcaaagaagtaaggcggggctcatgcagctggtgtccagccactgtcgcccactctggtcccacctcacccatctcttctcatgcactgggaaagacccctggtctgcccccaggcccaacaagtgaccaccaggatctatcaggcctcatgctccagtgatcagtccctagaggcctggggacacatgtaatc

SEQ ID NO: 2 - DNA, 534 bp, Homo sapiens
  MAP TO AL139141.1; EXPRESSED IN BRAIN, SIGNAL = 0.51; EXPRESSED IN PLACENTA, SIGNAL = 0.77; EXPRESSED IN LUNG, SIGNAL = 0.64; EXPRESSED IN FETAL LIVER, SIGNAL = 0.67; EXPRESSED IN BONE MARROW, SIGNAL = 0.61; EST_HUMAN HIT: BE972141.1, EVALUE 3.00e+00; NT HIT: gi6678630, EVALUE 7.90e+00
gcaagtggcctcctcatatcaggataagatgcacctgtgtggtttaaaaggacccttgtcctttaagttattcagtctcattcttttttatctatataacttcctcattgtttatgctgtcatgtaagtctgtctttgcataactcccaggcatttgttaataaaacccctttcatatgaatgccatatttcttgctctgaattactgttttgccaccttaaattccaaattcatatctcacattatagttagacctgagctaaaatttcattcacatctgtcaagttagggaattattattagcctcaggtagcattttcatagctggttgactagagttccctagatgtggaacttaaattcttaagctccatacctgggttggtgcccatagattatatcatatctcaccactggaatggtcacatcatcatacagcataaatgtaattaatgtccctttgtctgagatggccatcttttgtgtcttcagccatagcacacatctacttagccctgatcttctcgcgtaac

SEQ ID NO: 3 - DNA, 559 bp, Homo sapiens
  MAP TO CHR22_19.0; EXPRESSED IN BONE MARROW, SIGNAL = 1.8; EXPRESSED IN BRAIN, SIGNAL = 1.8; EXPRESSED IN HELA, SIGNAL = 1.3; EXPRESSED IN HEART, SIGNAL = 1.8; EXPRESSED IN FETAL LIVER, SIGNAL = 1.8; EXPRESSED IN LUNG, SIGNAL = 1.9; EXPRESSED IN PLACENTA, SIGNAL = 1.8; EST_HUMAN HIT: BF748444.1, EVALUE 1.00e-108; SWISSPROT HIT: P42498, EVALUE 6.10e-01; NT HIT: AB024597.1, EVALUE 4.00e-48
gacccaaagtctcctctccccgcctgccaggatctctctcctctccaggcagagcactgggcccctgcgaaaacaggcggctattcacgacactgcaaaagatgttagactgctggaggctcagtccgcctccaggttccgagtgccgcagagaacacaggccaggttgattcagggcaagagatttgaggagacagctagggatgtcgacacaaggcccagaaaggtagcctgggctcatacattctcctcccgtggaaaaacgaagggcaaagacctcttcttcttttccctgaagctcaaactgtgatgggcacagagaggacccctcagatcccaacctcattctcccctgttgaaggaggggtgccacaagtaccaaagcaccgacacttgagtctgggctccgagtggtgcacgtttagccaagccacctcccagctctgagcttgggtttccttaaacagcaaatgggaggaaggaccctgtcctccccaggtcacagaattaataaaagcttctaccggcatgcagagccgcgatgaaaggttgcagaaca

SEQ ID NO: 4 - DNA, 535 bp, Homo sapiens
  MAP TO AL138995.1; EXPRESSED IN BRAIN, SIGNAL = 1.3; EXPRESSED IN PLACENTA, SIGNAL = 1.5; EXPRESSED IN LUNG, SIGNAL = 1.3; EXPRESSED IN ADULT LIVER, SIGNAL = 1.4; EXPRESSED IN HELA, SIGNAL = 0.67; EXPRESSED IN FETAL LIVER, SIGNAL = 1.8; EST_HUMAN HIT: AW057541.1, EVALUE 7.50e-01; SWISSPROT HIT: P27571, EVALUE 2.60e-01; NT HIT: X95887.1, EVALUE 3.00e-05
tcttccgtaaggacggtctgtcccttctccttcatttaaatatttattcagttttttatatcaaaatggagtttgggatatttattttgtcctatgattgtaattcaaagaagtaaattgttatttacttttttgctcagactgtttcagctttggccattgttgagtttcagcatgttggctcctgtgtccttttgacatgccccattgggcacttccttgatttttagcagcatatgatgttttaggctcaccttgtattttccctgtctcagcctgcaatcaaccactttttcacagagcctcatttccttttattggaagatgatatttagaagtcaggatctgggtgctaattgaactcattgctactggattatcattgcttccagactatcttggtggagagctaggaaaaacatgcatgtatactagcatatgcttgtatatacatctatatttatttctatatacatgtatttgtgtgtgtgcatgtgtatactcatactgtactaccgctgattccagtctaaca

SEQ ID NO: 5 - DNA, 590 bp, Homo sapiens
  MAP TO AL138478.1; EXPRESSED IN PLACENTA, SIGNAL = 0.53; EXPRESSED IN BONE MARROW, SIGNAL = 0.47; EXPRESSED IN LUNG, SIGNAL = 0.51; EXPRESSED IN ADULT LIVER, SIGNAL = 0.39; EXPRESSED IN BRAIN, SIGNAL = 0.53; EXPRESSED IN FETAL LIVER, SIGNAL = 0.45; EST_HUMAN HIT: BE090441.1, EVALUE 9.00e-10; SWISSPROT HIT: O64240, EVALUE 8.70e-01; NT HIT: gi14785738, EVALUE 2.00e-07
gccttcagagagaatgtggccccaccaacacctggattttggacttccagcctccagactgtgggagaacacatttctgttgttttatgccagcaagtgtgtggcagtttgctatggcaaccccgggaaactaatacaagagcttcatttgtcagtttcagaagagaagctgacaccttgtgcccaccctgtacccagcaaggtgctcagaatcaactgtgagggcagctcagctctgcgttagtccttagttcatggagcgttgtggcagtgactgacaggcctgtggtacaggggtcagcccatggtgggcactcgggaaacagtaaccaaaaagcccccaacagcaacgtggctgatttagctggttcatctggggtccagcaggcttccattctggtgggagactctgacgataaacaaataaattatacagctatgatgtgggatgaggtagtgatcagtgctatgaaggaaaattacccagcataaggagatagagagggatggagagcagggactccatgctgtttttaaatggggtggttgagaaggtgatatttgaacaaggacctgaacaccaagtgggt

SEQ ID NO: 6 - DNA, 515 bp, Homo sapiens
  MAP TO AC018667.5; EXPRESSED IN BONE MARROW, SIGNAL = 2.4; EXPRESSED IN BRAIN, SIGNAL = 2.2; EXPRESSED IN HELA, SIGNAL = 0.88; EXPRESSED IN HEART, SIGNAL = 1.9; EXPRESSED IN PLACENTA, SIGNAL = 2.5; EXPRESSED IN LUNG, SIGNAL = 2.4; EXPRESSED IN FETAL LIVER, SIGNAL = 2.2; EXPRESSED IN ADULT LIVER, SIGNAL = 2.2; SWISSPROT HIT: P54269, EVALUE 6.20e+00; NT HIT: AF196779.1, EVALUE 5.00e-07; EST_HUMAN HIT: BF680202.1, EVALUE 3.00e-09
ctgcttcccttttccatgagagcttccaggagtaatcacattacagatgagacagactgtaggtgaggagatgatactctgtttcatagctgttggactactgtaaagcccgggccatttctactggaacatttaattgcattcttgtttatgccaccacatgtgatagggagaataattcatccctcccacccaaagctgtttacatcctaatccccggaacctgtgaatatattaccttttatggcatacatgtttccttacttgcaaaagcgactaaatttaggattttgaggtgggaagattgttctggattatccatgtgggctcacattaatcacaacggtcttcataagagggaggagcagcatcataatcagaagagacgtgatgatgaaaatagattccagagtgatgcagccatgagtgagcaacctctagaagccagcaacggccaggaatgtgttcttccctaggacctctacaaagaattaagctctgctgccatcttgatt

SEQ ID NO: 7 - DNA, 564 bp, Homo sapiens
  MAP TO AL137861.1; EXPRESSED IN HELA, SIGNAL = 0.5; EXPRESSED IN FETAL LIVER, SIGNAL = 0.79; EXPRESSED IN BONE MARROW, SIGNAL = 0.83; EXPRESSED IN PLACENTA, SIGNAL =   1; EXPRESSED IN LUNG, SIGNAL = 0.99; EXPRESSED IN BRAIN, SIGNAL = 0.74; EXPRESSED IN ADULT LIVER, SIGNAL =   1; SWISSPROT HIT: P51786, EVALUE 6.00e-08; NT HIT: gi7305646, EVALUE 2.00e-06; EST_HUMAN HIT: BG764597.1, EVALUE 3.00e-40
cctagcaacaagggtggttctagatctataaggtgaactttgtaatataattttattaattcataagttattacagtggaagcatatttctactgtgattactccttctcccaccataaacagtacaaaacaaactacgtcttatataaaatacatataagacacatggacacacaaaagagtgaattcccagattcttgttcttttgaccctgggctgatgctttgacttgaggaaatatgtgccattacaggggttggtgtcctttgaagatgtggctctgcacttcacctgggaggagtgtcagggcctggatgatgctcagaggaccctctacagggacgtgattgtggagacctacagcagcctggtatcattgggtgagtgaaacttcccagtaactcccaggaatgtgtattgttgttggtaaatatagaaacccttttaaggtataataatatttacttgtaagattctggttgatgaaaaatgtgtcattattctaatgaaatgttcaaattggctccttcattacacagtccctgaagcccagctcttgtcatt

SEQ ID NO: 8 - DNA, 585 bp, Homo sapiens
  MAP TO CHR22_212.0; EXPRESSED IN HELA, SIGNAL = 3.3; EXPRESSED IN FETAL LIVER, SIGNAL = 2.4; EXPRESSED IN LUNG, SIGNAL = 3.9; EXPRESSED IN BONE MARROW, SIGNAL = 2.8; EXPRESSED IN BRAIN, SIGNAL = 2.1; EXPRESSED IN HEART, SIGNAL = 1.8; NT HIT: AB041775.1, EVALUE 1.40e-01; EST_HUMAN HIT: AA114990.1, EVALUE 2.10e-01
tgagttgagcatggttgaggaagtcaattcccaagctgtcggagctgctgccgaccaaccaacagtaaattagagaaacttttctaactggaccccccacttggtagcttatagtataaaccaggagagtacaaacaaacttctcttaacttttcttcaccaacattggagatttacatttgttcatcaccaaataaaagagtactcttttccccaggacacccacaaagaagggaaagagagagagagagaaaagaagaagaagaaggaggaggaggaggagaaggagaaggagaagaagaaggagaagaagaaggagaaggagaaggaggggaaggggaagaggaagaggaggaagaggaagaagatgaggaggaggaggaggagaaggaagaggaagaggaagaaaaacttgtctattttgaattacaggaatttctcatgcatctatttctctactaccctctctacttctttttaagtgaatgtgatttgaaacaaattattagcaatccaaggtgctgtgctgagaaaaatcacatagggatgtagctaaaactcatctcaacaggtgaaaaacttgcc

SEQ ID NO: 9 - DNA, 546 bp, Homo sapiens
  MAP TO CHR21_60.0; EXPRESSED IN HELA, SIGNAL = 3.4; EXPRESSED IN FETAL LIVER, SIGNAL =   2; EXPRESSED IN HEART, SIGNAL = 1.2; EXPRESSED IN LUNG, SIGNAL =   1; EXPRESSED IN BRAIN, SIGNAL = 1.8; EXPRESSED IN BONE MARROW, SIGNAL = 1.9; EXPRESSED IN ADULT LIVER, SIGNAL = 1.1; EXPRESSED IN PLACENTA, SIGNAL = 0.93; EST_HUMAN HIT: AA789323.1, EVALUE 1.00e-08; SWISSPROT HIT: O15230, EVALUE 1.30e+00; NT HIT: AL163278.2, EVALUE 0.00e+00
cattccaaatggtgcagatgaagagactttgataaaggaaagtttcctgggctgtcacagtttcgtatgacagtttcctgggcggagataaaggcttggacaagagatggtgagactcccaggggctagcactagagaaaaggtagtcttacctctggacctaaaaggaggaggatgtggtgtcatctgagcccagtgaagaactgtcttgggacctgaagaaactagagctagaggtgcctactaaggtggccacggcgcattgctggagctgtgccccatgctccaactgtctctgcagccggctggggagggtgggaacatcaaggaaggctctctggaggaggtggtccctgagcttaacactgatgaatgagtaggagctacctccaatgcttttcacacatgaaggggtagatgaatcacttggagatctttcactaagcaggttcagattatcaggtcttgcagcaggagctgagaccccgggttgctcccaggtgatgcctacagcaggatgagatgtggaacagcaagaatccttcg

SEQ ID NO: 10 - DNA, 545 bp, Homo sapiens
  MAP TO AC004845.2; EXPRESSED IN BRAIN, SIGNAL = 0.56; EXPRESSED IN BONE MARROW, SIGNAL = 0.57; EXPRESSED IN PLACENTA, SIGNAL = 0.66; EXPRESSED IN LUNG, SIGNAL = 0.59; EXPRESSED IN ADULT LIVER, SIGNAL = 0.64; EST_HUMAN HIT: BE065537.1, EVALUE 1.00e-08; SWISSPROT HIT: Q61555, EVALUE 5.10e+00; NT HIT: AL163267.2, EVALUE 3.30e-02
ttgatggcaaattctagcccccagaacagtgagacaatagacttctgttgttgaagccacctggcctgtggtcctttgttatggcagccctaacaaatggatacaggatcgtcttacaggcaatgatgagcttgtgagaatctaaccagggagatagcaaggacgggaaggcagtgtgagggccaagggtgataatatggccagctggtagatagtgcctaaggcttttgtcattgtgaacagcctcatgatgcaggctcatgacaacagtgtcatcgtcaccatcatcatcatcatcatcatcatcatcatcatatcatcacagcaaatagttattgagcatctactctatgctggacaagtatactttgcatgttttacattactgagtccttaaacttacacgattgatgttagtaacattcccattttacaaatgaaaaaactgagacacacagaaggaagaaacttgcccaagagtatatatggctggtaggtggagaggcccaatgtagcctttctcagcccctctcacgttctctctg

SEQ ID NO: 11 - DNA, 505 bp, Homo sapiens
  MAP TO CHR21_64.0; EXPRESSED IN PLACENTA, SIGNAL = 0.75; EXPRESSED IN FETAL LIVER, SIGNAL = 1.2; EXPRESSED IN ADULT LIVER, SIGNAL = 0.68; EXPRESSED IN BONE MARROW, SIGNAL = 1.4; EXPRESSED IN HELA, SIGNAL = 3.7; EXPRESSED IN BRAIN, SIGNAL = 1.5; EST_HUMAN HIT: BI824247.1, EVALUE 0.00e+00; SWISSPROT HIT: P57071, EVALUE 4.00e-49; NT HIT: AF276513.1, EVALUE 0.00e+00
agagccaagggaccataaccccttcggcgaggcacaagggaaggtgggctccggatcgggggccgccacataccgtggacgccagagccggcctgcttcagcatgggcttgtccatcttcttggcatagaaggccgcataccacacgcgcagctcggtacccggggggatgtctctggaggtggtgaagtacacgtcgctgccgtgctggtaggccgtcaggttctggtgctcggcctccgccgctggccgcaccagcatcatccagttgcagtcatcctcgttggaggtgtcgaagcacacggggtgcccgtccttctggaacacctgaaggtgagtcggcccatggagaagccggggaaatggctgattacccatctgtgtatcagcgtgtggggggcaggtgctgaggaacccatctagacagtgccacgtcagaggccataagggctcctgtacgggatgttgaggtgtttacaatagtgaggagggtcacaggtagacca

SEQ ID NO: 12 - DNA, 557 bp, Homo sapiens
  MAP TO CHR22_105.0; EXPRESSED IN HELA, SIGNAL = 1.1; EXPRESSED IN PLACENTA, SIGNAL = 1.9; EXPRESSED IN FETAL LIVER, SIGNAL =   2; EXPRESSED IN LUNG, SIGNAL = 1.8; EXPRESSED IN ADULT LIVER, SIGNAL = 1.9; EXPRESSED IN BONE MARROW, SIGNAL = 2.1; EXPRESSED IN BRAIN, SIGNAL =   2; EXPRESSED IN HEART, SIGNAL =   2; EST_HUMAN HIT: BI561134.1, EVALUE 1.00e-102; SWISSPROT HIT: P26954, EVALUE 2.40e+00; NT HIT: AF050085.2, EVALUE 5.30e-01
aacccaagggttgggattagctacttctcaccatcattcccagtgcttacacgtagaatttgtacattctgtctccacagccttaggatctgctggattagagcctgtttcccaggtaggaacgcttccacgagggcactcctgctggttgcaggaaggatacctctgctgagcctgaatctgcaaagaccaccaggttactctcagctcctcatactggtggaccagcaggccacaaaggaggggatacttgatcctgataaacggtgaggaggtagcgtggctgctgcgtaacggggcaagcaggcattgatctggcacttagaggattcatctaggtctgtcttggtgcttccatgccaagtaatgacaatgaaaaggtcttttcagcagccatagcccctaagggctcagatgcctcagggtgaaggtctgggcagcgtcaccaggcaagccatggagacaagctggaatgctggtgagggtgaggccaaggaggaggtggctgctgaatatctgttacttgggagaagctgtggcagtggggattgtatttg

SEQ ID NO: 13 - DNA, 560 bp, Homo sapiens
  MAP TO AC021607.4; EXPRESSED IN LUNG, SIGNAL = 2.9; EXPRESSED IN PLACENTA, SIGNAL =   3; EXPRESSED IN ADULT LIVER, SIGNAL = 2.8; EXPRESSED IN BRAIN, SIGNAL = 2.6; EXPRESSED IN HELA, SIGNAL = 1.3; EXPRESSED IN FETAL LIVER, SIGNAL = 2.6; EXPRESSED IN BONE MARROW, SIGNAL = 2.9; EST_HUMAN HIT: AW517231.1, EVALUE 1.00e-101; SWISSPROT HIT: P44613, EVALUE 9.20e+00; NT HIT: D89969.1, EVALUE 5.30e-01
taagcctttgatggtgcctccctcccgagatcacaaagcactagctatgaagtctggtgggagaagggcagatttcacccaagagtagaatatctgtaattgcatatggttgggcctgaaagattccatttaggattttgtcctgaagttgtactcttcaacttcacctcttaatttttcaggatccttgaaagaagcaaagactaccctatcatggtcctaaataaatggaatttgcgggattatgacaataacccggtaattagtctgagccagcaatggaccaagttcatcattgaaatgtttccaaataggatgataaggacttcttggaagattaaacatagccatgagcccccaacaatgccaatccaggataagatgtttcaaaggtcagcagagtctgctttagagagccggactcttccactttgtcagattcattgatccaggtgcaccacgaggtgttgacagtggcacagactctccttggctggccagctggaagtccagggctatgcagctgctcaaatactcaaaccaaagagctgaggctgatc

SEQ ID NO: 14 - DNA, 562 bp, Homo sapiens
  MAP TO AL136234.2; EXPRESSED IN PLACENTA, SIGNAL = 1.6; EXPRESSED IN LUNG, SIGNAL = 1.5; EXPRESSED IN ADULT LIVER, SIGNAL = 1.6; EXPRESSED IN BRAIN, SIGNAL = 1.6; EXPRESSED IN FETAL LIVER, SIGNAL = 1.6; EXPRESSED IN BONE MARROW, SIGNAL = 1.4; EXPRESSED IN HELA, SIGNAL = 0.89; EXPRESSED IN HEART, SIGNAL = 1.4; NT HIT: AF157623.1, EVALUE 9.00e-09; EST_HUMAN HIT: AI091821.1, EVALUE 1.00e-05; SWISSPROT HIT: O88796, EVALUE 3.10e+00
tcaaagggacctcagagagctccctcattctttcaacatgtgaggacacagcaagaaagtggccatctatgaaccaaggagcaggccctcaccagacaccaaatctgctggcacattgatcttagtcttcttagcctccaggtctctgagaaattcccattgtttataaaccatccagtctgtggtattctgttataccaccctgaactaaaacaagtgcttaataataagtactattattatcttttatagatacagtaactgaagaaaactgattaaataacctacctaaaatcatgaagttagtaagtcataaaaggtaaaattcaaattcaggcaatcttgaactagagataattcttggtatgaacaaatgctgctgtctccattagcaggaacagcagtatacttaatgatttattttatgatttttatttatgatattcctggccacaacaaactttcatgctatgaagataataatttatgtaattgccccaaagtatatgttaaattgtttaattgatttccaaatttgggatcattcttgtcgcttgaacca

SEQ ID NO: 15 - DNA, 564 bp, Homo sapiens
  MAP TO AL135783.6; EXPRESSED IN FETAL LIVER, SIGNAL = 0.55; EXPRESSED IN PLACENTA, SIGNAL = 0.62; EXPRESSED IN BRAIN, SIGNAL = 0.52; EXPRESSED IN LUNG, SIGNAL = 0.51; SWISSPROT HIT: Q14155, EVALUE 6.00e-27; NT HIT: gi14765025, EVALUE 1.00e-110; EST_HUMAN HIT: F20693.1, EVALUE 0.00e+00
gggtggaccagttgtctgagctttgaattcctttgctttttttatttttctgctgccttaatgtaatctaaatacaatttgtttcaaaatatctaatcacagatttttcccagttctgttctactcttatttttggcatacacatacaagtataaacagcttctgttaaccaattaaaactacacaattttcagtaagaataccaagaaagtacaagagtcacaatcaaaaagccttttaaaaacttcacttaccactggatttaatttcacggacataattactggggaaccagcctgttctcccatttaatgtgccttcccaccagcctccttcttcaactcgtgtgacgtaaatgatgtcccccttacaaactgacagttcatcctcattagtctgcttaaagttgaatcttgcttttactatcaactgatgacttccattttccgtcatctcctagagaaacaaaagccacaccagattaagcactcatctaaataaggcaggggtagaaatgatatggatataggcaaataaagtggaggaagcaaagacaaaacccca

SEQ ID NO: 16 - DNA, 598 bp, Homo sapiens
  MAP TO CHR21_62.0; EXPRESSED IN BRAIN, SIGNAL = 2.3; EXPRESSED IN FETAL LIVER, SIGNAL = 2.3; EXPRESSED IN PLACENTA, SIGNAL = 1.8; EXPRESSED IN LUNG, SIGNAL = 1.6; EXPRESSED IN BONE MARROW, SIGNAL = 2.6; EXPRESSED IN ADULT LIVER, SIGNAL = 1.7; EXPRESSED IN HELA, SIGNAL = 3.7; SWISSPROT HIT: P41479, EVALUE 3.00e-01; NT HIT: AJ271338.1, EVALUE 8.90e+00; EST_HUMAN HIT: BF239156.1, EVALUE 8.40e-01
cttagaaccaagctggcaggtgagaacgttcagtaagtgtgatgtgcgttttggttccttcttcctccaaaatctctttccctccttcctcccctgtgatcaccgctgcctttaaactcaaagagtcatttctcttccatttttattttacctttccccaattttcttctctccttactttctctccctcttttttgttctatttgtgatgtgaaaatgatccccggggctggcgctctatatggaaagcctcaaggtcacacgcccttgactactgggccccaagtccaggaacatggccttcccagtcatcaggagctcacctcgaacactgcgtgcagcgtgggggcacgtcggtgagagagagggggtgagagggaggggtgggcacgtcggtgagagggagggggtgagagggaggggtgacctcctccgggaagcttcctttctagggagatgcagggaattgggggtgggcaatactcagagatcatcaaaatataccactaagtaatgtatatgttcgtatgtcgtgcggctcctgtgtgccatggaggcttggcacacattgtctctaagtgggctgcactacatacga

SEQ ID NO: 17 - DNA, 501 bp, Homo sapiens
  MAP TO AL136162.4; EXPRESSED IN BRAIN, SIGNAL = 1.1; EXPRESSED IN FETAL LIVER, SIGNAL = 0.94; EXPRESSED IN PLACENTA, SIGNAL = 0.99; EXPRESSED IN LUNG, SIGNAL = 0.86; EXPRESSED IN BONE MARROW, SIGNAL = 0.75; EXPRESSED IN ADULT LIVER, SIGNAL = 0.85; EST_HUMAN HIT: BG960448.1, EVALUE 1.80e-01; NT HIT: gi15920163, EVALUE 1.20e-01
atgccttcggatgtgtcttcagcctagcgaatgatgacagcaatgacgaagcatttcatcagcttgaacacatccttcaccccagaatttccacctggtacccccacagaagagccctcacaatgtggttggaagagcagaggaaatgaggcccagttagtcaactgcctcgtgcaactcctactaaaccagtgattcagctcttggcccacaaaaaccaacttttttattcctaagagaaaaaagagaaagaattcaaagttagtactgatttaggaaaatgaatcaaattccctctgagcaaatgaaagtcagcagaattgctaaaagtccactaattttccactaagttatttcactttctggaagtttatccactcagataatcaacaaaagccacatctatagagaggtgggtaaagaaggtaggccagcttctggaactgtctggattactcctaaacatgaggggaaatatttcacactcacagaactgcagga

SEQ ID NO: 18 - DNA, 515 bp, Homo sapiens
  MAP TO AC017072.4; EXPRESSED IN FETAL LIVER, SIGNAL = 1.3; EXPRESSED IN HEART, SIGNAL = 1.4; EXPRESSED IN LUNG, SIGNAL = 1.7; EXPRESSED IN ADULT LIVER, SIGNAL = 1.3; EXPRESSED IN BONE MARROW, SIGNAL = 1.4; EXPRESSED IN HELA, SIGNAL = 1.4; EXPRESSED IN PLACENTA, SIGNAL = 1.9; EXPRESSED IN BRAIN, SIGNAL = 1.7; EST_HUMAN HIT: AA927155.1, EVALUE 9.00e-56; SWISSPROT HIT: Q9WTL3, EVALUE 5.50e-01; NT HIT: AF380190.1, EVALUE 1.20e-01
ttttctccctgaagacctgcagggctgtctgcacaggagaccctctcacgagaaacacattcttgcctcccgcctctccgcctggacaacccagataaccagataagggcctctttgatttcccgtgtgtttacacaagctgtggccccaagtcttggaaagaatcaaccaccgccaggcaagtcaggacgcctccaggtggggtgaggggagacggccgccttacctgctcctgggaattcatcactcgaagcttcatctgcttcaggtaggtggaggtgaggggcatgttgtaatcaataatcccagagaccagtggagatggaggctcgttttctggcagaaagaacaaaaggaaagccctttcagtctgtgctgcgggcctgttgcccacatggagcatttaacagagcccgtggaagaggaagccaccttggaggagaagggacaggtcagaggtcgcagactctgtggctcacccacatctggcccagagatgtggactgcatggtgtc

SEQ ID NO: 19 - DNA, 581 bp, Homo sapiens
  MAP TO AL133330.5; EXPRESSED IN BRAIN, SIGNAL =   2; EXPRESSED IN HEART, SIGNAL = 1.7; EXPRESSED IN HELA, SIGNAL = 1.2; EXPRESSED IN PLACENTA, SIGNAL = 1.3; EXPRESSED IN FETAL LIVER, SIGNAL = 1.6; EXPRESSED IN BONE MARROW, SIGNAL = 1.9; EST_HUMAN HIT: BG986593.1, EVALUE 8.20e-01; SWISSPROT HIT: P57280, EVALUE 5.60e+00; NT HIT: AY027898.1, EVALUE 9.00e-03
ttttgattcagggcttcagggacattttgttatggcctaaaaaacaaaccattaaagaggcagcaattttgtacaacaaagaaatgtgtggcacaggcatccaaccacattgccaggttgggtgtgtatgctaacctaatgtttgtgtgttttcactttgacatggctgttttgatgcctgacgcttccattacatcatatggatcttgccagaatggttgctttaaatacttcctagttttacttgaataccaaccatgtgcctgattctcatttcaatggcaggagggattcaaatgaagcagaaggcaaggagattaatgatctcaaggggactggagagttttgccaagagctggctaaggaaatacattcaccatttcagaacgcatactacctccattctttgtttgacatttcctggtttagagcttcagattacttgctggagacatgtttaaaaatggaaaaagatcccactgcaaacacagaaatatggtctatccacgttaaaaaggtcattttgatcatttccccctgctgtgttgtaaaatgaattttctgtctgtttcacttggcga

SEQ ID NO: 20 - DNA, 534 bp, Homo sapiens
  MAP TO AC015930.3; EXPRESSED IN BONE MARROW, SIGNAL =   2; EXPRESSED IN HELA, SIGNAL = 3.9; EXPRESSED IN BRAIN, SIGNAL =   2; EXPRESSED IN HEART, SIGNAL =   2; EXPRESSED IN PLACENTA, SIGNAL = 4.3; EXPRESSED IN LUNG, SIGNAL = 2.5; EXPRESSED IN FETAL LIVER, SIGNAL = 2.9; EXPRESSED IN ADULT LIVER, SIGNAL = 3.1; SWISSPROT HIT: P36598, EVALUE 6.50e+00; EST_HUMAN HIT: AA363053.1, EVALUE 4.80e-02; NT HIT: AF332860.1, EVALUE 2.00e+00
ttcatctcacctctcccacccccaactgaactgttagatttcttgtttatattcagtagaatggcacggaataccaattcttctatgccagagatcattctcatagcaaggaactatagtgaaaatgccctcccatgctgaacatcaaaaattccacagaattcaaatgaaaataatttatgtcctaatctctaggaaaaaaaaaaatccccatcctaaacccgtatagctacaatagttcctagctggcagttcactaaaataacagatgattatctaaagtaataatttccacttcccagaatataatgacaaaaactcacctagagctgaaataaccatctgccacagattgttccacatcggttgtttgcttgtttgttttttaattctcagaaagaattcaaaaatggcattggcaaagaaagatgatttcagaaaaatgacccagtttccaacctgcattgccactatcatcctaattttttttttatctgacttaggagaacagcaggctgagaaaaggagccttga

SEQ ID NO: 21 - DNA, 599 bp, Homo sapiens
  MAP TO AL133553.2; EXPRESSED IN BRAIN, SIGNAL = 1.6; EXPRESSED IN HEART, SIGNAL = 1.5; EXPRESSED IN HELA, SIGNAL = 0.94; EXPRESSED IN ADULT LIVER, SIGNAL = 4.2; EXPRESSED IN FETAL LIVER, SIGNAL = 1.8; EXPRESSED IN PLACENTA, SIGNAL = 1.8; EXPRESSED IN LUNG, SIGNAL = 1.8; EXPRESSED IN BONE MARROW, SIGNAL = 1.6; NT HIT: gi14730483, EVALUE 3.00e-61; EST_HUMAN HIT: BF724457.1, EVALUE 2.00e-47; SWISSPROT HIT: P21128, EVALUE 3.00e-08
tctaaggtgggaaatggctgtcaaatacgtgggcctggcttcacaatgaataatctgtaacttcttgttttgctctgggtagagctttcctgtaaaggccgctgctttgagtccttcgagagagggagggagtgtgactgcgacgcccaatgtaagaagtatgacaagtgctgtcccgattatgagagtttctgtgcagaaggtaagcatcacagtaccaaccaatgcttctcagtacagccagatctgtgcacctaccttagcatcactgataatgtctaacacgcagtccatcttaggccttgattttactaacatataagctatttcataataattttgttttgtggagatgaattaaagaagaaaagcgccttccaacagcagaacccccaggctcagccaggctccaagagtacaagatgttgccagagggggaacatagaggatgaggctgaatgtatatgtcttttttttcttcagatatggttcaatttcaggttaaatcaacagtaatcaaatcacttgatgatttcttgtctcacccttgctgacttcacgaagtcaactatcctttgagctatctgtgcttttggcct

SEQ ID NO: 22 - DNA, 587 bp, Homo sapiens
  MAP TO AL118512.8; EXPRESSED IN FETAL LIVER, SIGNAL = 0.7; EXPRESSED IN BONE MARROW, SIGNAL = 0.72; EXPRESSED IN BRAIN, SIGNAL = 0.73; EXPRESSED IN PLACENTA, SIGNAL = 1.2; EXPRESSED IN ADULT LIVER, SIGNAL = 0.81; NT HIT: gi15296873, EVALUE 2.00e-87; SWISSPROT HIT: Q62234, EVALUE 2.00e-04
ggccgttctaagctgttctctttctaaattttatcatttcttgaaggagaccttgttatttgtacattcccactaaaatcagagaagtctacaaaatcttaccttaatgaccacaaatgggcaaagagaggcatttactgtgaataaataaatgaagcacgacaaaagtttggaaatacactaatttgaaatgctgtttgtattaaaataaagatgagaaaattttgcctgctttataataagaagttccttaccaggcacaatgagagtatttgtgttcagtttgatgggctgttcattcttgagccagctgaggtcaggaggtggaaaaccagagacctcacaggtcaaagagatgaaattgttcaccacgacggtaagattttcagatttaggaccaatgacacttggaggaactataatagtaaatatattaaaagtgaaagcaggtgttatcaacatatattcccatttactaaatataaatccaaccactgtactctgctaaaggactgagttaacgattctgttcattatctagctgtctgtcttacaattccctaatgccttcatcaaactcacgttgg

SEQ ID NO: 23 - DNA, 530 bp, Homo sapiens
  MAP TO CHR22_127.0; EXPRESSED IN PLACENTA, SIGNAL = 0.48; EXPRESSED IN HELA, SIGNAL = 0.75; EXPRESSED IN BRAIN, SIGNAL = 0.77; EXPRESSED IN FETAL LIVER, SIGNAL = 0.61; EXPRESSED IN BONE MARROW, SIGNAL = 0.7; NT HIT: X98485.1, EVALUE 1.30e-01; EST_HUMAN HIT: AA825395.1, EVALUE 1.90e-01
cccctaaagggaggaaacagaaaaaatattggaagaaataatactcagttaaaaaaaatcatatggaacctataaacctgtagaattgagaatgtgaatgaatgccaaccgagcagaaaacatgaagaaaaccagaacaaggcatgtcataatccaattgcccaaaactactaatataaagaaaacatcagaagcatccagaggagaagagacaccctgcattacaaaggtaagcatgacaacagcagtctcattggaagcatcaagcctggagacaagggagcagcctgtttggactattcaaagaacagcaaaccagagaaacctgttaaccagcaaaagtatctttcagagatggaggtgaaatacgtgctgtttcagacatataaaagctaaaggaattcgacaccaggagaccgggatacctgcatgacaagcaataggtaaacttgcaggtggaaggaatatggtcctagatgaccgtgtggacctgcacaaagattgaggagtgcccaaagtggcaagtctag

SEQ ID NO: 24 - DNA, 545 bp, Homo sapiens
  MAP TO CHR22_233.0; EXPRESSED IN BONE MARROW, SIGNAL =  19; EXPRESSED IN HEART, SIGNAL =  10; EXPRESSED IN LUNG, SIGNAL =  15; EXPRESSED IN BRAIN, SIGNAL =  15; EXPRESSED IN PLACENTA, SIGNAL =  16; EXPRESSED IN HELA, SIGNAL =  14; EXPRESSED IN FETAL LIVER, SIGNAL =  16; NT HIT: AB022881.1, EVALUE 2.00e+00; EST_HUMAN HIT: BG014868.1, EVALUE 1.20e-02; SWISSPROT HIT: Q9R0L1, EVALUE 2.60e-01
gactcagaggcagaagctggaacccccagctcactgtgctcaggaggcacctactaagcccagcctggctgctgctccccaagagccaagggaacccacggccaccccagctgcaggaacactgcctctgtcttccagtgggaagcctggcggtctaagaacagggtccgctgtggccgaacatcgccaagtgtccaaactacccgtgggactcacccggacactgcctggctcaggtccacacgtggctccctgtgctccgtccttgggcagcaaagcctggacaaccgacgcagaacagttcgactgcctgatcatgccacgggcctccatttccccagcagcggacatgaccacctctgctcagtatttctctgagaaggggaaactgaagccaaaacctgtgttcatggacagatgcactatggctgggatgctgcaggagggggtctcccttgggccccgtgtgcccacatgccagggctgggccctctgtgttgagtctgtgcaccaagaatgaaccctggcaccttcctgaactgaaa

SEQ ID NO: 25 - DNA, 595 bp, Homo sapiens
  MAP TO AL139021.1; EXPRESSED IN BONE MARROW, SIGNAL = 0.85; EXPRESSED IN PLACENTA, SIGNAL = 0.98; EXPRESSED IN ADULT LIVER, SIGNAL = 1.1; EXPRESSED IN BRAIN, SIGNAL = 0.75; EXPRESSED IN LUNG, SIGNAL = 1.2; EXPRESSED IN HELA, SIGNAL = 0.58; EXPRESSED IN FETAL LIVER, SIGNAL = 0.79; SWISSPROT HIT: Q03609, EVALUE 3.40e+00; NT HIT: gi14753102, EVALUE 0.00e+00; EST_HUMAN HIT: BG956758.1, EVALUE 0.00e+00
tgggatctcccaactagaggtttaagagtttttgtctctttaatctttacattttatgatgtatttttaagtgttgagtagtgcttaactgaccaaagactaactccacttaattgagccaaacaaaatttttgctgacaatttgttactccttcatgtgacatataagaggcctgtgattaaggtgaataatgttaagaattttatttctaatttgctgttagctgggtatctttgtgtaacagtttttggatctaacatagttgttttgattccacagtgtctcatgcgggagcctccatgtcatctgcttcatcagacactggaatgagtccctcatcatcatctcccccacaaaatgtacttgctgtagaatgcaggtgataaacattttctctaccttcccagcagtttgctgccatggacataaatccccaaaccctgaattacaaccacagaaagcactcaactggtttgacattgctaagtatatcctgtatacttttccaggctggattgtatctattcccctctctcttcttttttcttgttgcaaaaaataagctgattaataagtgaaggttaagcagcctgc

SEQ ID NO: 26 - DNA, 565 bp, Homo sapiens
  MAP TO AC012360.2; EXPRESSED IN HELA, SIGNAL = 0.87; EXPRESSED IN BRAIN, SIGNAL = 1.2; EXPRESSED IN FETAL LIVER, SIGNAL = 1.1; EXPRESSED IN HEART, SIGNAL = 1.2; EXPRESSED IN PLACENTA, SIGNAL = 1.6; EXPRESSED IN LUNG, SIGNAL = 1.5; EXPRESSED IN BONE MARROW, SIGNAL = 1.2; EXPRESSED IN ADULT LIVER, SIGNAL = 1.4; SWISSPROT HIT: O02813, EVALUE 1.00e-16; NT HIT: gi14729730, EVALUE 0.00e+00
agccagcagacaaagaatggcagccacccaagtgctgaggggagccctcccggccatttctgtcccagctccaagggtctctccacgatggcctgcaacagcacgtcccttgaggcttacacatacctgctgctgaacaccagcaacgcctcagactcggggtccacccagttgcccgcacccctcaggatctccttggccatagtgatgctgctgatgaccgtggtggggttcctgggcaacactgtggtctgcatcatcgtgtaccagaggccggctatgcgctcggccatcaacctgctgctggccaccctggccttctccgacatcatgctgtccctctgctgcatgcccttcaccgccgtcaccctcatcaccgtgcgctggcactttggggaccacttctgccgcctctcagccacgctctactggttttttgtcctggagggcgtggccatcctgctcatcatcagcgtggaccgcttcctcatcatcgtccagcgccaggacaagctgaacccgcgcagggccaaggtgatcatcgcggtctcctgggtgctgtcct

SEQ ID NO: 27 - DNA, 588 bp, Homo sapiens
  MAP TO CHR22_215.0; EXPRESSED IN FETAL LIVER, SIGNAL = 1.6; EXPRESSED IN BONE MARROW, SIGNAL = 1.7; EXPRESSED IN BRAIN, SIGNAL = 1.6; EXPRESSED IN LUNG, SIGNAL = 0.89; EXPRESSED IN PLACENTA, SIGNAL = 0.84; EXPRESSED IN ADULT LIVER, SIGNAL = 0.77; EXPRESSED IN HELA, SIGNAL = 3.1; EST_HUMAN HIT: BE812227.1, EVALUE 2.00e-75; SWISSPROT HIT: P35579, EVALUE 2.00e-22; NT HIT: M69180.1, EVALUE 1.00e-75
accctttctgaatgcctgtggtaccaccaggaacaaataaccttgaacctcaaatctgaggaatcattttcccatacactgaaggccttccccttcccctggcctctagcaggctccccaggcccatcggctaccctgatgccccgaggccgtgggtaccagccttcctctgccccacactcgaccataggagggccagccctgtacccatttgctcctcttctgggatgcccataatcctcatggcctccatggtctcctggaacatgtccttgtcctgctgcccggggatggtgacgtgtccattggacaggaagcggtatttgttgtacggctccaacaggagatcggctgtaaggggtggagggcaagggcgcctcagcgaggtgctgaaagtggaggctccatcagcgctgtgacctcaaaggttggagagactgggacagaccctgagccctgacgcaccctggaaaccgcagagtagccagtgacgttcagctttcctcagtgtctgagactctgacactcccgtctcctggcccaggagagcgccaggtcctgtgatttgcagctacatgtgcaacccac

SEQ ID NO: 28 - DNA, 560 bp, Homo sapiens
  MAP TO AL136113.1; EXPRESSED IN BRAIN, SIGNAL = 0.44; SWISSPROT HIT: O54946, EVALUE 3.00e-09; NT HIT: gi9910321, EVALUE 6.00e-10
aaccgaaccaaaagggaaacagaggagatggcagagacaaaaaacatttggaggaggaactatgcattctcaggattctcaggtgatgatttttcccttggccttgtgggtaaagccaggagattccactcctccatctttgatgtggctcccatattggacacaggattttccacttttttatctctgggctccagagcaagtacctctacctctgagacatttgaaccctttgtaagcagcggactgagaaacttcagactggtcaccatttgtagccagacagtaaatggcaagagagttgttacaaagaaagtgctagaagatgtgagggggaagaatgaagcagaaaaagactgtttcatgagattcctccacatcattggtaagaagttgctgctgtgttctttaacagggagattttcatatgaggctggggtgttctgatgcttatgaaagactgaattggtgtttgagaatgttttgaactaggatggacagaggtcagcttagttcaaacctctcatttcacagaggaggggaatgtgccagatgttgtg

SEQ ID NO: 29 - DNA, 500 bp, Homo sapiens
  MAP TO AC021260.4; EXPRESSED IN LUNG, SIGNAL = 1.3; EXPRESSED IN BONE MARROW, SIGNAL = 1.2; EXPRESSED IN PLACENTA, SIGNAL = 1.5; EXPRESSED IN HELA, SIGNAL = 0.67; EXPRESSED IN BRAIN, SIGNAL = 1.2; EXPRESSED IN FETAL LIVER, SIGNAL = 1.1; EST_HUMAN HIT: BF820324.1, EVALUE 7.00e-04; NT HIT: AB025333.1, EVALUE 4.70e-01
ttttccatttgtcctgtcccttatcttggggtcattctttttaaatgttgtagagtcaaattaatttgcagtcttacaaaaagctttacttgtgaatatttgggagtggtgtcttgttgatcagattcacatgttgatcttttttctcttccccattttcctctcctttactcacactggtattaagggaactttgatcctgaaagaagacagtgctaggcatactttggcatgagtggtgttgggagctgtgtgacttccgggattggctggcatgggaattcattttatttcctccacctctgtttctgtctcttttttccccactgcccactctttttctttttaatacttttagtagtaactgttaaattaacttcttttgtttccttagccactacctatttttttttttttttaacatagggctgttgttttgaagaaagtatcatttcttccttcaccataaaatcagataaaggcactcaggaatgaggtgt

SEQ ID NO: 30 - DNA, 553 bp, Homo sapiens
  MAP TO AC025810.1; EXPRESSED IN FETAL LIVER, SIGNAL = 0.55; EXPRESSED IN LUNG, SIGNAL = 0.59; EXPRESSED IN BRAIN, SIGNAL = 0.81; EST_HUMAN HIT: BG008710.1, EVALUE 7.80e-01; SWISSPROT HIT: P13039, EVALUE 7.90e-01
cggtcccatctctcaaactcaccccattgacaccaagggtatgccctataccagtgtccctttctcaacaagccagccttaccggcccactgggccaaggctgctggggtggctacattgagacagcatggcttagcggttaaaggcgtggatgcccagaactgggctctaatccggctccagctcctgcttgcctggagccttgaacatggagcttcaactccaccagcctcattttctctcttaaataaagtagagacgacagcacgcacctcataaaggttgctgcaaggattagctgggataatgaatggggaagcaccctgaatgctgtgtctgatacattgtgagtgctcagcggagtgagaaagaacaatagtaatggttgccatctttatgattttctcttctttttcatctttaccgtcaccatcatcatcatcatcatcatcatcatcatcatcatcaccatcatcaatcatcactccccacctggccatctcagcctccacaggctctcagcagaaagaacccagtctcagagggaaggctg

SEQ ID NO: 31 - DNA, 579 bp, Homo sapiens
  MAP TO CHR22_108.0; EXPRESSED IN FETAL LIVER, SIGNAL = 1.4; EXPRESSED IN BONE MARROW, SIGNAL = 1.2; EXPRESSED IN HELA, SIGNAL = 0.7; EXPRESSED IN BRAIN, SIGNAL = 1.3; EXPRESSED IN PLACENTA, SIGNAL = 1.2; EXPRESSED IN LUNG, SIGNAL = 1.1; EXPRESSED IN ADULT LIVER, SIGNAL = 1.1; NT HIT: AF320594.1, EVALUE 2.20e+00; EST_HUMAN HIT: W56894.1, EVALUE 1.30e-02; SWISSPROT HIT: Q51342, EVALUE 1.30e-01
gggctgtttggagttctgtcacctggttaggctgtttgtttgtgtttttcctgggctgatggcatccttggggcctgagttgggagcaagctcatgagctcacttgctatgtggcttgagaccagttgggttcccctgctgggtgggcctcagtttccccatctgcattacagccattctgttctacaggcagagatgaaagcacagcagactgtgtcctcatacaggatcatggtttttggaagaaggatatttgagaacacgttctcaaatggaaatcacaagttcagaaaggtccatttatatacatctgcccaggagccgccctgatggaagccaggagccaggacaagaaggtccagataaatatacgtgccaagagccacacggtgacgctgctgtgaggctgccagtgcaccagtctcaaaatgacaagacggcagagatggagaacagattagcggtcgcctggggataggagcaggatgggagagggacgcaattctaaaggggcagcacaaggaagctcttctagggtgatgaagtcattctgtatcttgactgtggtggtggtcacag

SEQ ID NO: 32 - DNA, 579 bp, Homo sapiens
  MAP TO AC020721.4; EXPRESSED IN BRAIN, SIGNAL = 1.1; EXPRESSED IN PLACENTA, SIGNAL =   1; EXPRESSED IN LUNG, SIGNAL = 1.6; EXPRESSED IN ADULT LIVER, SIGNAL = 1.4; EXPRESSED IN FETAL LIVER, SIGNAL = 1.1; EXPRESSED IN BONE MARROW, SIGNAL = 1.5; EXPRESSED IN HEART, SIGNAL = 1.4; NT HIT: AF181897.1, EVALUE 1.00e-72; EST_HUMAN HIT: BF035327.1, EVALUE 8.00e-69; SWISSPROT HIT: P27316, EVALUE 2.50e+00
ttcttggatttctggaacggtaagcaagcattagcttcaacttagtcactagctgtatttgcccctaacaagagaatcagcctgtcctttgaagctttgaagccaagcattctttctagctatgaaagtcctagatggtactttcttgcagtaaaaggctgccttttctatattgaaaatttgttgattagtgtagtcaaccttaattatctttgctagatattctgaataacttgctgcagcttctccaacagcacatgctgtttcactttgcacctttatgttctggaggtggcttctttccttaaacctaatgaaacaacctctgctagcttccaacttttcttctgcagcttcctcatctctctcagccttcagagaattgaagaaagttaggcccttactctggattaggctatggcttaaagaatgtcatggctggtttagtcttctatttagaccactaatactttctccatatcagcaataaggccgaaaatgtttaaaatgttgtaagaattaccaaaatgtgacacagagacacaaactgaacacacgactttggaaaaatgaggccaa

SEQ ID NO: 33 - DNA, 539 bp, Homo sapiens
  MAP TO AL137008.1; EXPRESSED IN BRAIN, SIGNAL =   4; EXPRESSED IN HEART, SIGNAL =   3; EXPRESSED IN LUNG, SIGNAL = 2.1; EXPRESSED IN FETAL LIVER, SIGNAL = 3.3; EXPRESSED IN BONE MARROW, SIGNAL = 4.4; NT HIT: AB040903.1, EVALUE 1.00e-125; EST_HUMAN HIT: BG697142.1, EVALUE 1.00e-125; SWISSPROT HIT: P12348, EVALUE 3.00e+00
tagcatctgcttggatcacggatgctaattataactggaaagggggtgttttggggagtgtattcaggaaaggaaaaaagaaaaaacttaaaaaaaaaaaaactctagattgctcaaagtttctacctcttctgtaggaatggtaagtcaactatgagcaagtattttaattcgacattaaggggaaaaacgtactttggaaagcatagaaaaaaaggtggttaacgttggatcacttgtaaaacggaacctcaaggagtctaaacaaaaatgcacctttggtcgactttcacttttttaaattcctcatttcacttcacgaagtcccagtgcacatggaaatgacagctgccgccagaggtatggagtcggaggagtctccggaagcatgggagggttcggggttgtattctggcagtttcttgatctctttctcggtctcactttcgtctcttgctatcaccaaggagtgtgagtagcccatggcgaccttctctgagaaaatgaagactgtggatgcagagtcttcacctcctggg

SEQ ID NO: 34 - DNA, 531 bp, Homo sapiens
  MAP TO AL136163.3; EXPRESSED IN BRAIN, SIGNAL = 1.1; EXPRESSED IN LUNG, SIGNAL = 1.2; EXPRESSED IN ADULT LIVER, SIGNAL = 0.59; SWISSPROT HIT: Q57759, EVALUE 9.80e-01; EST_HUMAN HIT: BF912368.1, EVALUE 2.00e-81
tccagtttttaggctgtgggatatcattatacttttccacttcatggtgatagaaaaaagctccttagaatgtgactgtatttggaagtatgatccatttgcattttggagatgatcctgaaatatgtaggggtgaaatgccataatgattgggatttacttcaaaatatttcagcagagaaaaaacaaagataaaagacacagaaggcaaaatcctgttaactgtggaatctgggtgatggaagtatatggtactagtctctctactgttgggaattttgaaaaattattaaaaaatattctttatgagagggacaggcctcacctgattatccatatctttgatgaccaataggacaggactgtctagtgatgccgatttccggtagagcgtctttaagctggtcccgtgctctaacgtgctataggccagtctccatggatacccttgcacccttgcaggaaggcgtcgggccagctacaaagccaaaggaagagatgtaaacagaaggttcacccacaaattgctca

SEQ ID NO: 35 - DNA, 513 bp, Homo sapiens
  MAP TO AL138691.2; EXPRESSED IN BONE MARROW, SIGNAL = 6.8; EXPRESSED IN PLACENTA, SIGNAL = 7.5; EXPRESSED IN LUNG, SIGNAL = 7.2; EXPRESSED IN HELA, SIGNAL =   5; EXPRESSED IN BRAIN, SIGNAL = 5.9; EXPRESSED IN FETAL LIVER, SIGNAL = 6.2; EXPRESSED IN HEART, SIGNAL = 5.8; SWISSPROT HIT: P11532, EVALUE 6.20e+00; NT HIT: Y13436.1, EVALUE 1.00e-109; EST_HUMAN HIT: AW576081.1, EVALUE 7.20e-01
ttggcatcttattgcaggtgcttcgtgcacagtcagctgaaatagccaatgccaggtgctccaaccaccttatttccttgttttgttgattagaacaacacagaaaaaagcaaatataaatttttaatgactccatttaaaaatatcacagggtgggggcaaggaaattagctgagattcatctcaggattgagattctatccccccttccccgcccccagcagtgtcgctccaattcaaattagtggagaaaagattacagtaggccctgagccgactgtgaattcggtgcttggccaaggtaacactcatcgtattcacggagtgaaatactatatgatgatagttattatattatatgacgacttcattcacttcccaaatcacagggtggtgcttctgtcgcttagtccaattatgtttgcaacccgtgtagggaaggcggataggagtctttgaggcctagtgcaaagtttgcatcagtttctgcgggggcgacagtgtgacttcgta

SEQ ID NO: 36 - DNA, 588 bp, Homo sapiens
  MAP TO AF235095.1; EXPRESSED IN HEART, SIGNAL = 1.2; EXPRESSED IN BONE MARROW, SIGNAL = 0.99; EXPRESSED IN LUNG, SIGNAL = 0.98; EXPRESSED IN HELA, SIGNAL = 0.96; EXPRESSED IN BRAIN, SIGNAL = 1.1; EXPRESSED IN ADULT LIVER, SIGNAL = 0.69; EXPRESSED IN FETAL LIVER, SIGNAL = 0.94; EST_HUMAN HIT: AI142302.1, EVALUE 0.00e+00; SWISSPROT HIT: Q27309, EVALUE 3.30e+00; NT HIT: AJ245479.1, EVALUE 5.60e-01
gttccgaggaacagctcaagttacatataatattaggggaaggagttataaggaatgaagaaaacagggatctcagccccaaaaggcctcgtgggaacccaggagaggccaaatcaccaagcctctggaagaacaggagcttcaagagcgagaagtctcatgaagactggagccaggacgtcatcgggaatccaaggttacctcaggacttcagcatcgggagttcacctcagcgatgagttatttttgtgaatctgctctcccttgcctctgtgcttgtcagtgtcgttcggtttctgggcttgcccctaactgacttcctcgtcctttctttggaatttgcaaactggcagctcctgacctatttcagcctgcagactcattgtgtttggccagcaggacgcctttgcattgttgagaattccgaagtctctgggcgtggcatgagcttggcagtccggaatctttacgtgcgggatcaccttcgccgcgccctcttctctcattggcactgcctgtctactgccgagggcatttgagtgtgggacccatgccctgcatttcttcgctaccccacagcttctgctc

SEQ ID NO: 37 - DNA, 517 bp, Homo sapiens
  MAP TO AC015889.3; EXPRESSED IN LUNG, SIGNAL = 0.48; EXPRESSED IN ADULT LIVER, SIGNAL = 0.44; EXPRESSED IN BRAIN, SIGNAL = 0.46; EXPRESSED IN FETAL LIVER, SIGNAL = 0.43; EST_HUMAN HIT: BI561167.1, EVALUE 2.90e+00; SWISSPROT HIT: P43251, EVALUE 3.60e+00
aagcacaaccagttcttgggaaacctaaattgagggcttcatgggtattgatgtggaaatatacccagactgtgaatgccattagcatagtccttcaagtccttcacccatgtaagctggatatgttcagataagtgtttgcgatgctccagccagatgtaggaagggcagctggtgagtcctggagaacatcgtcctggcaccatcagggctttagatgtggcatgggctttcttgccaactcgtctggtgtcctcagctggcaggaggatctggctgtgtgcagggcccttctgcccactgcacacctctgtgttaatatccttcacactaagcacaccattcagctgctgaagtccatgcctgtgagtccaacaaagtaggtgcatgtcagcatccaggagctctacaaggataggacaacagcagcccagctagttggaacacaggtgtgcaagcatctcagaggaccagtggggcatctgactgggttggttgagtggaaggcaatccagaa

SEQ ID NO: 38 - DNA, 569 bp, Homo sapiens
  MAP TO AL133266.3; EXPRESSED IN BRAIN, SIGNAL = 1.6; EXPRESSED IN HELA, SIGNAL = 1.4; EXPRESSED IN FETAL LIVER, SIGNAL = 1.3; EXPRESSED IN BONE MARROW, SIGNAL = 1.5; EXPRESSED IN HEART, SIGNAL = 1.3; EST_HUMAN HIT: BI830553.1, EVALUE 9.00e-81; NT HIT: gi14149790, EVALUE 4.00e-85
tggattatacttacatatcacagaaggataatcattatgctaacaatattaaaattaaagacagattctgacctaataacttctcaatttgaattttattaactcaggttagtggactgtttaagagatttgggtcctactgattggcagctggcctgcttggtttgtaaaactttatggaacttcagtgaaaacatcactaatgcttcgtcatgttttggaaatgaagacaccaacacactcttactcttgctctcatcatttttaggtaagactcttgactatgatgagtctgtgagttttatcagagtgtgagatagtttttttctgtgacctgttcggataaatattagtatgcatttaggtgactatatttctataagcaacaagagtatgttaaagattactataatttggaactgaaaaggctgaatgctatttacagtggggacagaaggactttcaactcattagatacattcatgatttcttctatggcttttttttttttttttttgcattttctctagagtgcataaatataagacctcagcgtaaatgtacttctg

SEQ ID NO: 39 - DNA, 567 bp, Homo sapiens
  MAP TO AC011803.4; EXPRESSED IN PLACENTA, SIGNAL = 3.9; EXPRESSED IN LUNG, SIGNAL = 3.4; EXPRESSED IN ADULT LIVER, SIGNAL = 3.3; EXPRESSED IN FETAL LIVER, SIGNAL = 3.2; EXPRESSED IN HEART, SIGNAL = 3.1; EXPRESSED IN BRAIN, SIGNAL = 3.5; EXPRESSED IN HELA, SIGNAL = 2.8; EXPRESSED IN BONE MARROW, SIGNAL = 3.5; SWISSPROT HIT: P73540, EVALUE 5.40e+00; NT HIT: J05096.1, EVALUE 8.40e+00
tacccctgtgctcacctacctctgccacccacaccctggctaccatgacttattttttacccaattgtattaccgataaaatggaaagaaggcaacttctcactggctttaccacactctgtagacacaactacgtgcatctcctgctggaactaatattccactcaattccttaaggattgccacagtgacagctcctattcgaatcaagccagccaacaaacaggctatttctatcaagaataagctcctcaaatccaaagctgtgacaaaaagagacacgattgcagaaactctgacagacaagaataaaagccaaaagcaggcttgacaaccaggatacaccccctccaagagcagaaaaaaataaggacagatcaagctggggtatctggggacaaaaccagacatggataaatagagataggaagagacaaccaaggaccaagtcacaataatcctagcaggggtcagagcagatgaatggaatgtgagtcagcaatgaagtatagtcatcaggaataaaaggaaaatcattgtgaaatgccctgggaggagtgtgacttg

SEQ ID NO: 40 - DNA, 547 bp, Homo sapiens
  MAP TO CHR22_229.0; EXPRESSED IN BONE MARROW, SIGNAL = 2.2; EXPRESSED IN BRAIN, SIGNAL = 1.8; EXPRESSED IN HELA, SIGNAL = 3.3; EXPRESSED IN LUNG, SIGNAL =   1; EXPRESSED IN FETAL LIVER, SIGNAL = 1.8; EXPRESSED IN PLACENTA, SIGNAL =   1; NT HIT: U51243.1, EVALUE 5.20e-01; EST_HUMAN HIT: AI348237.1, EVALUE 1.90e-01
cgctcgtgtctctctgtgtctctgtctctgtctctctctccttctctctctctctttcccccaaacctatctgagatcatcttggatccatgtctgccacgtccaggtatcatccagatgtttgagaaacgtctcttctagcataatgatgatgatgatggtgattatggtgataatgatgatggtgatgatggcgatgatgataatgatgatggtgatgatggtgatgatggtgatgttgatgatggtgatgatggtgatgatgatgatggtgatggtggtgatgatggtgatggtgatgatggtggtgatgacactcctgtatagcctctgatggtttacagagtttgtaatacgtaggctgctcaagttacacagttcaaaggagggggtaataacagcacttcactcaagaggtttattgcaaatgctcaggaagtgtttggctcagtgtgaagtgcccagtgggttacataggaagtgaatgactgtgaggggtggagcccagattcaaacccaagcagtgtggctccaagatcatgctttc

SEQ ID NO: 41 - DNA, 577 bp, Homo sapiens
  MAP TO CHR22_13.0; EXPRESSED IN BRAIN, SIGNAL = 1.7; EXPRESSED IN FETAL LIVER, SIGNAL = 1.4; EXPRESSED IN HEART, SIGNAL = 1.9; EXPRESSED IN PLACENTA, SIGNAL =   1; EXPRESSED IN BONE MARROW, SIGNAL = 1.4; EXPRESSED IN LUNG, SIGNAL = 1.1; NT HIT: U07000.1, EVALUE 0.00e+00; EST_HUMAN HIT: AL044101.1, EVALUE 0.00e+00; SWISSPROT HIT: P11274, EVALUE 3.00e-19
caggaaggaggacagcagactttaggaccccatagcacagcagtgctgactatttcagcctcttggtctccttgaggagtagggatggggagccctctggggatgggcaaggccttccaggacaggctcggttctggtcccctgctttttgaggttgggttaaaatgccgaccacggcagaggggttacagctcaggttcccacacctcgcttttcacagcctccgagggcagcagtgcacgtggaggagacgtctcccatgaggccaaggcctccagtgctcaccgatgccctctgcgaagttggggtagaactcgtcagtgaagaggggctcgggcagctcacggaagtacagcttcagcgtgcctgcgatggcgttcacgtccatctcgctcatcatcaccgacacgtccttgttatctggaaagagcacggaaatgcagcggcctccttgaagatcctgagtgagtcacccaccatccctgccttggctaaagcaccgtccctgccacactgaccactgtgcgggtccctcctgggctttgagcagctcatctgactcctcccaagagctgtg

SEQ ID NO: 42 - DNA, 568 bp, Homo sapiens
  MAP TO AF168787.1; EXPRESSED IN PLACENTA, SIGNAL = 1.1; EXPRESSED IN LUNG, SIGNAL = 1.2; EXPRESSED IN ADULT LIVER, SIGNAL = 1.3; EXPRESSED IN HELA, SIGNAL = 2.4; EXPRESSED IN BRAIN, SIGNAL =   1; EXPRESSED IN FETAL LIVER, SIGNAL = 1.2; SWISSPROT HIT: O60931, EVALUE 2.00e-32; NT HIT: Y15930.1, EVALUE 1.00e-120; EST_HUMAN HIT: BF854861.1, EVALUE 2.00e-87
tgtcattggtctgagcttcgacttcgtggctctgaacctgacgggcttcgtggcctacagtgtattcaacatcggcctcctctgggtgccctacatcaaggtacggccttgcctgccctacatctctgcccacatggcgtggtggcccggctgcccctcaccacccagcttctcccacccaccaaacaggagcagtttctcctcaaataccccaacggagtgaaccccgtgaacagcaacgacgtcttcttcagcctgcacgcggttgtcctcacgctgatcatcatcgtgcagtgctgcctgtatgaggtgagaccagccctggccccccacaggccaccccagccaacacccgccaccccacctcacctttgacagaagacacggcagagcctgggaaaggaagggtgtgtgttcattcatccaggtcctgtgctgggcatagaagacacccatgagtccaggccctcagagccccccaagtctggggtgagggactcagggagaggcagtgcctggactcaggctgagagccgtgcacagaggagcacagacagctcatggagga

SEQ ID NO: 43 - DNA, 592 bp, Homo sapiens
  MAP TO CHR22_218.0; EXPRESSED IN HEART, SIGNAL = 1.1; EXPRESSED IN BONE MARROW, SIGNAL = 1.5; EXPRESSED IN PLACENTA, SIGNAL = 0.66; EXPRESSED IN LUNG, SIGNAL = 0.68; EXPRESSED IN BRAIN, SIGNAL = 1.3; EXPRESSED IN HELA, SIGNAL =   2; EXPRESSED IN FETAL LIVER, SIGNAL = 1.3; SWISSPROT HIT: O43731, EVALUE 1.00e-45; NT HIT: gi11418116, EVALUE 0.00e+00; EST_HUMAN HIT: N94475.1, EVALUE 0.00e+00
ctggttgctttctctttggctcagatcctctggactttctctatctatctggaatcagtggctatcctgccccagctcttcatgatcagcaagactggagaggctgagaccataactactcactacctgttctttctgggtctgtaccgggcactctacctggctaactggatcaggcggtaccagactgagaatttctatgaccaaattgcagtcgtgtctggagtagtacaaaccatcttctactgtgacttcttctacttgtatgtgaccaaaggtaggtcctgggatgacagcaatgctgacactggcctaaggagttactcatccatttaataagtattccagcagatacagatgtgaacagtcaagtctctgccatccacaatgcttgtgttctaatgcaagaagacaaatattttcaataaagaaacaaatgccataaaaacatgcaggccaataggttatgtgtactatgcaagacagctgtgagatgacatttgacagaatacttggttagtagtgaaaaacattccagaacttattacaagccccaaggcaaccaccagcttggtgtgatggacaaaaagcc

SEQ ID NO: 44 - DNA, 585 bp, Homo sapiens
  MAP TO AL136094.1; EXPRESSED IN FETAL LIVER, SIGNAL = 1.3; EXPRESSED IN HEART, SIGNAL = 1.2; EXPRESSED IN BRAIN, SIGNAL = 1.3; EXPRESSED IN HELA, SIGNAL = 1.2; EXPRESSED IN PLACENTA, SIGNAL = 1.1; EXPRESSED IN ADULT LIVER, SIGNAL = 0.4; EST_HUMAN HIT: R81799.1, EVALUE 2.00e-13; NT HIT: AL163268.2, EVALUE 5.00e-23
gcaactggaagccttgattctcagttagtttcgaggtcaggaggcaaacttgccaactttaccccagtaataacaatatgattgaagattgagacattgggtattgttaccgaaacacctgggggttggtctcggtcctgctgctcacctcacagaaagccaattgctcgtcaagtactaccaatgaaggaaggaagagaaggaagacagctttagtcgggtgctgcagtcgaggagatgggagtcctaaatccgtctccctaactgactaaacgtaggggttttatatagtgggaggaaatgtaacaatgtataagaaaacaggaactaggaaggggcaatgaagcaatcatgatgggtgaatgagaggtctctcatctcattgtctgtatgtggtgatgtggtgagtttcagttctttgatactttctttttgagcagcttgaaggtcctttcctgaggaaggaacacagataaaatgaatacaagtttcaagctttaagaccagaaaggtcaatttctatgtttatttaaaaaacaagtgaacaaaaaaattatctatgggactgttgggtcagtttcagca

SEQ ID NO: 45 - DNA, 533 bp, Homo sapiens
  MAP TO CHR21_67.0; EXPRESSED IN BONE MARROW, SIGNAL = 1.3; EXPRESSED IN PLACENTA, SIGNAL = 0.71; EXPRESSED IN LUNG, SIGNAL = 0.73; EXPRESSED IN ADULT LIVER, SIGNAL = 0.66; EXPRESSED IN BRAIN, SIGNAL = 1.3; EXPRESSED IN HELA, SIGNAL = 3.1; EXPRESSED IN FETAL LIVER, SIGNAL = 1.1; SWISSPROT HIT: Q31125, EVALUE 8.00e-07; NT HIT: AB017602.1, EVALUE 0.00e+00
cctctgttcctcccagagtggggctcactgtgcctccaagggactcagtagatgcgatggtacacttgtcaatctggtcatcagggtgtcctgcccaactgacccatggccagctctgagcccacaggagaaagtgcatgtcaggcagacccttgtgtcagtgaggtcccagtgggcgtggccagcaccgtccccctcagtgaggccccccagtggacgtggccagtgctgcctccctcagtgaggtctcagtggacatggccagagccgtccccctcagtgagcgctcagtagacatggccagtgccgtcctcagcgaggtccccgtgggtgtggccagcgccatccccctcagcgaggtcctcgtgggtgtggccagcaccatcccactcagcgaggtcccagtggacatggccagcgccgcccccctcagtgaggcttcagtgggcatggccagtgccgtccccctcagcgaggtcccagtggacgtgtccagagctgtcctggtcagccgtcctccctgtcaccttgag

SEQ ID NO: 46 - DNA, 586 bp, Homo sapiens
  MAP TO CHR22_2.0; EXPRESSED IN BONE MARROW, SIGNAL = 2.1; EXPRESSED IN PLACENTA, SIGNAL = 2.2; EXPRESSED IN LUNG, SIGNAL = 2.1; EXPRESSED IN HELA, SIGNAL =   4; EXPRESSED IN BRAIN, SIGNAL = 2.1; EXPRESSED IN ADULT LIVER, SIGNAL =   2; EXPRESSED IN FETAL LIVER, SIGNAL = 2.2; EST_HUMAN HIT: BE932207.1, EVALUE 0.00e+00; SWISSPROT HIT: Q62203, EVALUE 3.00e-04; NT HIT: AF327657.1, EVALUE 8.70e+00
tacgagtgtctggtggcatcggagcagggtggactggccctgaggctcctgccaggccctgggtctgggcctgtggctgcagctcacctgctctttggtactggtcatctgcaggcgggtgcagaggtcatccaggcgttctcgctgctcatgttgccctaggcgctccagatactccctcagcatatggatgatctggaacaagagggtgagctgagctgcctgggttcctagggaggcagacaggctgatgctgcttccaaaaagcacagtggagcaggtgccaactggggtcagtgtgaaacaacccaggagccctgggaccagaggcaggtgtgtctgtggttagggcagcatctgtccagtgctgccttggtgccgtggtctccacacagaaggggtactcacctgcttcacctccagacgcacagcctctaggcactgggcatggccctcctgcaggatattcagctttgacttggccaggtgcaggggtgtgcgaccagctcggtccagggcatctacacgggcccctgcaggtaccagctgaggtgagcattctgggggtgagggggagaaagaggac

SEQ ID NO: 47 - DNA, 590 bp, Homo sapiens
  MAP TO AC022525.3; EXPRESSED IN BRAIN, SIGNAL = 1.4; EXPRESSED IN HELA, SIGNAL = 5.4; EXPRESSED IN FETAL LIVER, SIGNAL = 1.5; EXPRESSED IN BONE MARROW, SIGNAL = 1.5; NT HIT: gi4503840, EVALUE 0.00e+00; EST_HUMAN HIT: BI855730.1, EVALUE 0.00e+00; SWISSPROT HIT: P12956, EVALUE 4.00e-84
agcagctcctgcttcttcagcccatatgcctctttcagcatgggcacagtgaaattgcccagcatgcccttgctgatattggccttcagctcctcttctgaatacttcatcttgggtcttttgcttccaaaatcttcattattttgttttctcttggtaaatttcccttcaggattgtaatctggtgggtaaacaagctccttaaactcaaccaccagggagtccaatcttttattcattgcttcaaccttgggcaatgtcaggtccactgcttgttcagtctccatcaaatccaaggccaaggcctccaggttcctgaagtgctgctgcagcccagggttctcaaagctgtcacttctgcatgtgaagcggagcttctgaacgatagccttcatcttgtccacctgctctggagttgccatgactttcagtaaagggcatcttccttttatcatcagcaaagagtaaaaagacaagctggaatcctggaggagtcaccagaaatttctggtcatccaactcctcttcctgtggcaccaaagccacaaaataaagagagatgttcctgcggggtgtgtatctgcgtgatg

SEQ ID NO: 48 - DNA, 600 bp, Homo sapiens
  MAP TO CHR22_29.0; EXPRESSED IN BRAIN, SIGNAL =   2; EXPRESSED IN HELA, SIGNAL = 1.7; EXPRESSED IN HEART, SIGNAL =   2; EXPRESSED IN LUNG, SIGNAL = 1.9; EXPRESSED IN BONE MARROW, SIGNAL = 1.9; NT HIT: L44140.1, EVALUE 8.90e+00; EST_HUMAN HIT: R51740.1, EVALUE 5.40e-02; SWISSPROT HIT: P22894, EVALUE 3.40e+00
ggagtttgaccttcgctgagtacttactatgcgccttataacgtaatccccacaacggccgtgtaagcatactgcattactcacccttactttacaggtgaatacactggtgtgcaaagaggttctgtagctagtggaagcacacagagctactaaaggaccagaatccagagccagcaggaactccgtgcacagtgcagtgggagccagggatgtgggactgcaagtttcctctgcaggaggagcaccgccctgactcagttgctctggtcatcggtttcctccggcatatggtgagggatttggagtggatgatggccacacaccagctctactggagtgaggcaagggcagccctgaatccaggctgagttactaggaaacaggaagatgagattggaggctgagcggaactgctagaaagtaccttggacagagccagggagactaggccaaattctctctgccctaacttctctttctaggcttctgtagacaccacctctcccggctccacttggcatttccttttccccaggctggagggtttgcatgagcagagctcaccagattatctcctccaggaagggaagaaggaag

SEQ ID NO: 49 - DNA, 568 bp, Homo sapiens
  MAP TO AC024445.2; EXPRESSED IN BRAIN, SIGNAL = 0.88; EXPRESSED IN PLACENTA, SIGNAL = 0.99; EXPRESSED IN LUNG, SIGNAL = 0.84; EXPRESSED IN FETAL LIVER, SIGNAL = 0.73; EXPRESSED IN ADULT LIVER, SIGNAL = 0.69; EXPRESSED IN BONE MARROW, SIGNAL = 0.66; SWISSPROT HIT: P40352, EVALUE 5.40e+00
ttttccttcctgaggtgtgtgcaggaggcaagaaaaaaataacgaccacagctatcctattcaaaacagtccatgaatcatttttcttcttagtatttttcttcttaatatttaacagaaccatgagtggctaaagtcctagaaacttcaggtacttcagttctttaataaaaataaatgagactcttgttttcaaaacacaatgttcattgtaaaatatagatatttggctaatgtttaaaaatatcataggttccaacttaaaggaagaaatgatggagaggaggaaaaggttgtgcttgagctttattccaaagttcaatcaaacccttactaaatcagtagtttacgttgtcagcagcaaaagaagaaacctcaggacaagcagagaaaagcaagtgagaaacacccagaagagaatagttgagctgagaggacaagaaagggacgatgtgaggccttccttgaagatgagtttggacttcaacattgtttcatagcttattcttcaagaattttttccattcacaggatacatgtgttgcctactgcatttcaagggtcatca

SEQ ID NO: 50 - DNA, 555 bp, Homo sapiens
  MAP TO AC013624.4; EXPRESSED IN BONE MARROW, SIGNAL = 1.9; EXPRESSED IN LUNG, SIGNAL = 2.9; EXPRESSED IN BRAIN, SIGNAL = 1.1; EXPRESSED IN PLACENTA, SIGNAL = 1.7; EXPRESSED IN ADULT LIVER, SIGNAL = 3.6; EXPRESSED IN HELA, SIGNAL = 0.75; NT HIT: X56798.1, EVALUE 1.00e-04; EST_HUMAN HIT: BI254991.1, EVALUE 2.00e-01; SWISSPROT HIT: P03873, EVALUE 6.90e+00
tgggaaaggaatagccaatgatgactcattgctaccatttcagatagtagagtagcagtgctaaagaacaaaatccaacctataacatctaaagagaagttcctttcgcattagctagggcacaatgaggtagttaacgtttagcaccatcaccatcatcgtcatcaacattttcatcaatcaaatataataatctgggaactcctgggtggactgttccaaggtgaccttcatgtctgtctcactcatttgtgttcctccattcagggaggacatgggagaagaagatcatggggaagaagatggctccacaggcttttctccatggattttagaaacaccctctaaagctcctcctttgagaactgttagaagcctggaagatgagggaaaggtgagaaaacatataaagacacagaaaaaaattgcaaatcagaatgcagtccatttgaacaagagaatcctaagaaagaacaaagtgggggatggtgaagaagaaaagaggaaaggtctagaagggaatttgggacagagcctgccctggaaagactgatc

SEQ ID NO: 51 - DNA, 590 bp, Homo sapiens
  MAP TO AC016729.5; EXPRESSED IN BONE MARROW, SIGNAL = 0.76; EXPRESSED IN BRAIN, SIGNAL = 0.55; EXPRESSED IN PLACENTA, SIGNAL = 0.53; EXPRESSED IN HELA, SIGNAL = 1.5; EXPRESSED IN FETAL LIVER, SIGNAL = 0.65; SWISSPROT HIT: P28948, EVALUE 4.40e+00; NT HIT: X98294.1, EVALUE 2.00e-65; EST_HUMAN HIT: AA683102.1, EVALUE 3.00e-65
tttccattgattggctgttgtggtttggcatttctttttcaaattataactaacttacattccctatttcagatgacaaacttattagtaataatgatggcggtatctttgatgatccccctgccctctctgaggcaggggtgatgttgccagagcagcctgcacatgacgatatggatgaggatgataatgtatcaagtaagcatttcatgttcagtgattctggggatgattgtatggcatccagaaagatacttaccatagaagatgacaaactaaaagttgtagtttttagtgaattataaatatctttaagtacagtgcttatgattactggttctgattctatgtttaatcttgcacccctccccatttttttggccaattgggttcaagtctggcggggctttcccattaactagaaaaatattttttcttagtaataacaggatttctttccatttcatgaagagatttttctcctccccatttgtgggatatatgttatataccaaagctttttgtgactttttttttttttttttttttttacagtgggtgggcctgatagtcctgattcagtggatccc

SEQ ID NO: 52 - DNA, 523 bp, Homo sapiens
  MAP TO AC015478.3; EXPRESSED IN HELA, SIGNAL = 1.1; EXPRESSED IN HEART, SIGNAL =   2; EXPRESSED IN FETAL LIVER, SIGNAL = 1.5; EXPRESSED IN PLACENTA, SIGNAL = 2.4; EXPRESSED IN LUNG, SIGNAL = 1.9; EXPRESSED IN BONE MARROW, SIGNAL = 1.8; EXPRESSED IN BRAIN, SIGNAL = 1.9; EST_HUMAN HIT: R56377.1, EVALUE 1.90e-01; SWISSPROT HIT: P19070, EVALUE 2.80e+00; NT HIT: gi9634155, EVALUE 1.30e-01
tccctcagatcctgaaccacggggaccaggcaaaatttgctgacggcaaggatgagagggctcttcctccactcaggtctctgggaaagttaatccagctgccagggaagccaggccattctgggtaatggatgcctctttttaatgctctctgggagatgggtcccgccttaatctgctgcagtgccattaagagagaaaacattaactccatggggctcctgatggccttcagaaactgcaagttaaacactaaccaggaagggctgctcaagacttaaccctccccttcctagcacaggccaaggtgtcagacagacagctctgcagatcactggcctgggctcccagggaccctgggtcctgtttccaggctcttctcagcctggggaacaagtgaatgtgaggaaagagggaccacagagggagagaagaatccttgaggctctcggtccaggtgtttggaggtgcccccaccacctaccccagagctggttagaaagcagagcacttagaggctggg

SEQ ID NO: 53 - DNA, 522 bp, Homo sapiens
  MAP TO AC011731.4; EXPRESSED IN LUNG, SIGNAL = 3.4; EXPRESSED IN ADULT LIVER, SIGNAL = 2.4; EXPRESSED IN HEART, SIGNAL = 2.7; EXPRESSED IN PLACENTA, SIGNAL = 2.9; EXPRESSED IN BRAIN, SIGNAL = 2.4; EXPRESSED IN HELA, SIGNAL = 3.1; EXPRESSED IN FETAL LIVER, SIGNAL = 2.1; EXPRESSED IN BONE MARROW, SIGNAL = 2.5; EST_HUMAN HIT: BF796746.1, EVALUE 4.70e-02; SWISSPROT HIT: P50168, EVALUE 9.60e-01; NT HIT: AF115773.1, EVALUE 3.20e-02
ctctatcagcctgtgagcccaaggaaggcagggcacatcctactcagggttacatccccagcacctagcagagcacccagaggcataatttgaattgcaaaagagttggtgatttttacagtacttccaaaatttgtagtccaaatggaattaggagccattattttcaagtctcaggttagtcctttgtacgatgactacccctccacctccagaaaagaacaaaataatttactttttcaatgttagatttatcttcttggaatttgaagtcttcagtttcagtgatgcagtcagcagttgctacctgtgccttgccttctgccctgaaagggagggtttgttatctgtgaaaacgtattttttccttcaggtgggagtaggggtgttctggtagcttcaggccttgcattcccgccttgggaatttcactgggagcagtgttgatcttattattccaaattgccaaacatttgctgccatttggctgtgccattcagagcactttgcttccttcatgca

SEQ ID NO: 54 - DNA, 589 bp, Homo sapiens
  MAP TO AL136230.3; EXPRESSED IN BONE MARROW, SIGNAL = 0.87; EXPRESSED IN BRAIN, SIGNAL = 0.9; EXPRESSED IN HELA, SIGNAL = 0.58; EXPRESSED IN PLACENTA, SIGNAL =   1; EXPRESSED IN ADULT LIVER, SIGNAL = 0.59; EXPRESSED IN FETAL LIVER, SIGNAL = 0.82; EST_HUMAN HIT: BF903796.1, EVALUE 1.00e-92; NT HIT: AL163268.2, EVALUE 3.60e-02
tcatccaatcaaattgaaggcctcattagaaaaatatttacctccctggaagaagagggagttctgccagcagactgtctttggacttggactgagtacgtctctgggtctccagcctactggcccaccctgcagattttagacttgcatctccacagtcgtgtgatccagttttaaaaataccccctctctccatacacatatatgtgtacacatatatacacatatacatcttgttgattctgtttctctgaagaactctactaaaacaagtattatcaaaattaaaaaggagcttgaagtcatgtagcctaatgttcttctttttaaagatgaggaaaagagatattcagagaaacaagtgaatttacctaaattacccagccaaggagttacacttcccatatatcatatttattgcatatataagtaagcaacaacttctcttctttaagcaacaatacttaaagcagagagaatatatgagtataggtgactgtctgaagtttttatataaagattgctgttagtgggtagatttgatgagtgatcaaatacggcttactctagtgctgtttgtccaccattg

SEQ ID NO: 55 - DNA, 594 bp, Homo sapiens
  MAP TO AL160168.1; EXPRESSED IN FETAL LIVER, SIGNAL =   1; EXPRESSED IN PLACENTA, SIGNAL = 1.1; EXPRESSED IN ADULT LIVER, SIGNAL = 1.5; EXPRESSED IN BRAIN, SIGNAL = 1.2; NT HIT: J00098.1, EVALUE 7.00e-19; EST_HUMAN HIT: N69130.1, EVALUE 2.00e-17; SWISSPROT HIT: P11497, EVALUE 3.40e+00
catgcaagggatctaggtggcactccttatgagaacctaatgcctgatgatctgaggtggaacagtttcatcccaaaactatctaatccccaacccgccccctccgccaccagcaccctggtctgtggaaaaattgccttccacgaaactgggggaccgctgttttaggggaatattcaaagccaaaggatacaggtaatgattatgagtccttaggtagttatcaactggagctattactttctttgtacaaatgttttgagaggacaaagtaactaagtttcctcccagatgtgtcagtgaatggagcaataaagccagagaattccggatatataaagatccagtgagagatggagagggtaccttcaaaattgcaaagcaggctgcagcatactatattccacagtatttctatctctccaaagaccaggttctgcaatcacaacatgcaaccacaaacaggtaatagtgctgtgataaacatgtgcatgcatcaacagcatttcaactgtctggaactttaaaataaatatggtttaaagcttgaattatatctaagaatcaacaaatagctgaggaaaaccaaaacca

SEQ ID NO: 56 - DNA, 520 bp, Homo sapiens
  MAP TO AL137795.2; EXPRESSED IN BRAIN, SIGNAL = 0.7; EXPRESSED IN LUNG, SIGNAL = 0.68; EXPRESSED IN PLACENTA, SIGNAL = 0.61; EXPRESSED IN ADULT LIVER, SIGNAL = 0.62; EXPRESSED IN FETAL LIVER, SIGNAL = 0.56; EXPRESSED IN BONE MARROW, SIGNAL = 0.53; NT HIT: gi14783016, EVALUE 7.70e+00; SWISSPROT HIT: Q06846, EVALUE 2.80e+00
tttctgttgggaagtgggagtagaataagggatactttatctgttttgcatttgccttaaaaaataaaacttgcacccaatacttgacagcccattcattacacccgccacgccctttactaggttgatgcacaacgtggagaaaggctctgcgctctgccctgcattccccctctctggaaaggctgtggggaggacggtgcttggaatcctaatggtgctggcacagctgcctgggggaaacacagctgtacaatgggcaggccccctggaaaagctccagctgcaggaccttgagcaaggtgcctaattccttcccaggcttctgtgggtcacatacaacatggggattttgcttgtcccagccctagaggctgctgtgcagatgccatgaggccatgttcacaaaagcaccctgcacagagccacccatgtttctagctgttctcaatattattatttctaacctttgtttccaggcactcaggcagacctaagaggccaatgcaatcaaggtttt

SEQ ID NO: 57 - DNA, 566 bp, Homo sapiens
  MAP TO AC018692.5; EXPRESSED IN ADULT LIVER, SIGNAL = 0.45; EXPRESSED IN BONE MARROW, SIGNAL = 0.44; EXPRESSED IN BRAIN, SIGNAL = 0.38; EXPRESSED IN FETAL LIVER, SIGNAL = 0.39; EXPRESSED IN PLACENTA, SIGNAL = 0.51; EST_HUMAN HIT: BG475479.1, EVALUE 1.30e-02; SWISSPROT HIT: P53283, EVALUE 1.10e+00
tgctgaagcactggtttgacatgtcgagttgaagtgtttctactcaaaacacctgtctccctgccaaggtgaaggctagatggtaaaaaagaaagttcccttttttctgataaactaggctgtctccataggaagtaccctgaaggcccccagctccgactccgagagcagagcccagactctcctactttgaacggacatgagctctatgcctcttggggtttctctgcctgcccagtcaccctggataacgtgcttgccctagattgtctcctaggccaagtcctctccaagttcttggccctttgtcctaaggttggatctcttcctctcgcttcccttgctccgagctgtgtctctggatacaccccctgcaaactacgcttcctgagctcggctggcatctggctgtgttcagcaaatgggaagcccagacaggggactggagagcaggaagacgggagaacaaggagatttctcctccttcagcagccacagcagcaatggcgtgtcctccacagttaactggaagaaaaagcctgagtccttgtctcctcctggattgc

SEQ ID NO: 58 - DNA, 567 bp, Homo sapiens
  MAP TO AL138788.1; EXPRESSED IN FETAL LIVER, SIGNAL = 0.52; EXPRESSED IN BRAIN, SIGNAL = 0.6; EXPRESSED IN LUNG, SIGNAL = 0.74; SWISSPROT HIT: P49077, EVALUE 1.40e+00; NT HIT: X96999.1, EVALUE 5.40e-01; EST_HUMAN HIT: AW137776.1, EVALUE 1.00e-103
caatggaaatgggtgaggaggcaagaagggaaagaaaaaaacaaatgtcaaggcaaagcaataaaacaagaatgttaatcattggtgaatctaagtgaagatatattggtgttcaaggtattatcttctaacttttttgcaggtttgaaaataaaaaaaaaagaaaaacaaaacatcactacccctcacctggctggaagtgatggatttctcccttgtactcttctcatacttggcaatgtcactcatattactagtgatcacctctgggaatgtcttactttccatgagctcctgaaaggagacatctttcaattctttgtccccctctctgcagctagcatgctgcccagcgcagagcaggcagtggtaattacgggtaagaaatgagtccatgtaggctggaagatgcaaggcattcacctatgaggccagcgaatatgaagtcgaggcctggaattgcagtatcagttctgatgagaggcatgacaggtgtgtctcctggctgcctggcctggtcccagcagagagttactcaggcctggagccaggtctttctagggggac

SEQ ID NO: 59 - DNA, 558 bp, Homo sapiens
  MAP TO CHR22_49.0; EXPRESSED IN BONE MARROW, SIGNAL = 1.2; EXPRESSED IN BRAIN, SIGNAL = 0.97; EXPRESSED IN HELA, SIGNAL = 1.4; EXPRESSED IN HEART, SIGNAL = 1.7; EXPRESSED IN LUNG, SIGNAL = 0.53; SWISSPROT HIT: P98066, EVALUE 3.00e-10; NT HIT: gi14778050, EVALUE 0.00e+00; EST_HUMAN HIT: AA506741.1, EVALUE 0.00e+00
tctcagcgattcgttttgtgactgtcaggttttacagatagaaacaatgtcctaaatgggatcctgctcgttaggaaggctttagtgccttggtgttggaagcgcgcctgtggcaaaggcccagactgagggcgtggtgtctttttctctcctacagctctcgtgggcgcctgcggtgggaactactcagccatgtcttctgtggtctattcccctgacttccccgacacctatgccacggggagggtctgctactggaccatccgggttccgggggcctcccacatccacttcagcttccccctatttgacatcagggactcggcggacatggtggagcttctggatggctacacccaccgtgtcctagcccgcttccacgggaggagccgcccacctctgtccttcaacgtctctctggacttcgtcatcttgtatttcttctctgatcgcatcaatcaggcccagggatttgctgttttataccaaggtaagacatctttgcctccttgggggttcttcagggcccacgtgccttgggcttctcttcttcaccct

SEQ ID NO: 60 - DNA, 536 bp, Homo sapiens
  MAP TO CHR22_136.0; EXPRESSED IN PLACENTA, SIGNAL = 0.41; EXPRESSED IN FETAL LIVER, SIGNAL = 0.58; EXPRESSED IN BRAIN, SIGNAL = 0.75; EXPRESSED IN HELA, SIGNAL = 0.7; EST_HUMAN HIT: BE811922.1, EVALUE 5.00e-76; SWISSPROT HIT: P30432, EVALUE 2.20e+00; NT HIT: gi13648208, EVALUE 7.00e-68
ggaggctttaggctttccagaaagcccaaataagggtggaaaaaaaccaacaccccacaaagatgaaaagcatactcattctgctctcctgtgcccttatctctctcaccacattgcacataaatctcccagccatccatgcccctgggaggtcctctcggcccacctcaccctacctccagggatgtccctgtgttgaccctacctttagatcagacacgtctctgtagcactgctcggagcgggtgtggtctgacagctgcacattccagaagcaggggagctggtacacaaggaaggggttttgtttgatgacggcattgaaaatatcctgggggatgaaagccaaagacacagtcaagacagtcggatggtccagctgcccattttggctctcaaggcactgcatcccctgtgatagggcttctcttgaacctcctgctctgaacacaggctggctcgcactgtgaggcatctctcttgcctgttatctctaggaaccaagcaataatgtttggatagagacgggggaatgt

SEQ ID NO: 61 - DNA, 523 bp, Homo sapiens
  MAP TO AL137793.1; EXPRESSED IN HEART, SIGNAL =  12; EXPRESSED IN LUNG, SIGNAL =  14; EXPRESSED IN BRAIN, SIGNAL =  16; EXPRESSED IN ADULT LIVER, SIGNAL =  17; EXPRESSED IN HELA, SIGNAL = 4.7; EXPRESSED IN FETAL LIVER, SIGNAL =  21; EXPRESSED IN BONE MARROW, SIGNAL =  10; EST_HUMAN HIT: BG169579.1, EVALUE 2.90e+00; SWISSPROT HIT: P32017, EVALUE 1.90e-01; NT HIT: AF332194.1, EVALUE 5.00e-01
catccacacagacacacacgcattcacagagacacataatacacagacacacacattcacacacacactcacacagacccacacacaaacacacatttgcacacacccattcacacagagacatatacagacacacagaaacacacatttgcacagacagaagaaacaaaagttctacaaaacaagctggtccataccatgcgtgacgcatcttgatatgttctcttctttcatgctgatcaccacacactatgggcccttcagcattctgaagaatgctgctcaagccaacagtttcatcaggatgagaaccatgtgcacagatatttacagctctaggttctgcagtagaggtttctcctgagctgggaactggagcagggaggctgggaggggccacctggctcagctggagcaagtgatgaagggcgacccaggccatctgacagaggaggtagagctgggtgccgcaagccagctggaggtctggggaaaggcacccagttatgcgtggagggaagac

SEQ ID NO: 62 - DNA, 556 bp, Homo sapiens
  MAP TO AL133408.3; EXPRESSED IN HEART, SIGNAL = 2.7; EXPRESSED IN LUNG, SIGNAL = 3.6; EXPRESSED IN FETAL LIVER, SIGNAL = 3.3; EXPRESSED IN PLACENTA, SIGNAL = 3.9; EXPRESSED IN ADULT LIVER, SIGNAL = 3.5; EXPRESSED IN BONE MARROW, SIGNAL = 3.5; EXPRESSED IN HELA, SIGNAL = 2.2; EXPRESSED IN BRAIN, SIGNAL = 3.4; EST_HUMAN HIT: T95533.1, EVALUE 6.00e-20; SWISSPROT HIT: P55798, EVALUE 2.10e-01; NT HIT: AF288742.1, EVALUE 2.00e-16
gtttgtagggcatgactccctagatcccttagataggaatttgggcgagataaaaaagtcagagcttagtcctcacaagaaaaatgagaaaataggaggaaatggaggtgatggggtttggagttaaatctatgtcaacagatggattaatactcccaagggtagtgggagtattgccagagctttccaaccactgtctcgagacaccctgccatgtcgccagggagttgtagatgtcgattttctcagcccacaggggtggccaggatctctacctacagccaagggatgcctctgggctcccgacggggagcaccccggggcccctggaggcaaaagcacaatgaccaacatcagatacataaagtctacatttgttctccaccatggagactggacgaggccagctgcaaggcgtgacactgcccattctggacaaggggctcatagagctactgggcacacgacccagggtgtggctgatcagaaaagggtgcctgggagtctgggaagggccctagagggtggcaccaagtctctgccttcacctgtgaca

SEQ ID NO: 63 - DNA, 505 bp, Homo sapiens
  MAP TO AC018691.5; EXPRESSED IN BONE MARROW, SIGNAL = 0.43; EXPRESSED IN BRAIN, SIGNAL = 0.48; EXPRESSED IN PLACENTA, SIGNAL = 0.56; EXPRESSED IN LUNG, SIGNAL = 0.51; EXPRESSED IN ADULT LIVER, SIGNAL = 0.47; NT HIT: gi7524593, EVALUE 4.80e-01
ccacatacgtgcaagtcaccaagatgatctgtccctatctttcgtgtttatgtgtctataagcatacattctgttgaaaatgtgaaacattacttacttaaattgtagaatgataagtgagtagaagtttaaggttattttgaagcattaaatagttggtatggacttcagtttagctagttacagaatggtttgcctcatttttattgagttatttgaaataagaaaacctttagcacagtggtgatacactactatactgaacttttgacaaatttgttttgagtttacatttttacagataatttgtatctttccttaaacctcagtaagcgacattgatcaaatcactgccatctttgatgtcaaacttctggactttaccattaagggctcaaattatactttcagacttttgctcattgcctccaacacaaacccccatcccagagagacccacctggtccctgcctctgagcacagatgactttactcaggccaccca

SEQ ID NO: 64 - DNA, 584 bp, Homo sapiens
  MAP TO AF238280.1; EXPRESSED IN BONE MARROW, SIGNAL = 1.3; EXPRESSED IN HEART, SIGNAL = 1.3; EXPRESSED IN BRAIN, SIGNAL = 1.3; EXPRESSED IN PLACENTA, SIGNAL = 1.2; EXPRESSED IN HELA, SIGNAL = 0.76; EXPRESSED IN ADULT LIVER, SIGNAL = 0.98; EST_HUMAN HIT: AW861068.1, EVALUE 0.00e+00; SWISSPROT HIT: O18381, EVALUE 8.50e-01
  unsure 94
aagccccttatcattggtccatagtaaccatccctgtgagctctgttcatatctccttgccttctccttgatggtgatctgagtccaggagcancacccagcccttctttcttccccacatggcctatgggtgacacgtaccatcacgttgactccctgcaccatccttctgccacctttcttcacatcccctttgcagatccccttgaccacaccctcattctcagctggtgctcatgaaggacagaagagtcaatgtcagtacaatgtgagtgaagggctgaggtatgtcagtgctcccagtgggcacccgggcagggtatggtgcatttacacagtgaggggtgggggaatcagtaacatgtgaggagcccgtcatgccgccacgtgggagtgtcctctctcctgctcacagggagtagttaggactggagatgagcccaagtttgtgaatcttaacaagggtgttgatgcctcaagactggacataatcaccaaggaagttggtggcagtgcagaagtgcacactggggtgccaacatgaaatggggaatgagaggctaggagggagtagctggtgcaag

SEQ ID NO: 65 - DNA, 535 bp, Homo sapiens
  MAP TO AC013371.4; EXPRESSED IN BRAIN, SIGNAL = 0.63; EXPRESSED IN PLACENTA, SIGNAL = 2.4; EXPRESSED IN LUNG, SIGNAL = 1.1; EXPRESSED IN ADULT LIVER, SIGNAL = 1.5; EXPRESSED IN HELA, SIGNAL = 2.9; EXPRESSED IN FETAL LIVER, SIGNAL = 1.2; EXPRESSED IN BONE MARROW, SIGNAL = 0.47; NT HIT: AJ133269.1, EVALUE 8.00e-03; SWISSPROT HIT: Q14687, EVALUE 3.00e-02
tttgtccccctgctagtctgtgaacatcttgtgagatggaacttaatttcatttgtccatatatccctaagcctaggatagtctatcatatgtaataggacctcaagaaatacaagttgctgggtagaaaaaaaaaaaagagagatcatgacgacaaagggttagaaaaatatgattttggagaaataattgaaataactgagaatgccaacctcaaaaagaaagagcattttcaagatagagaggaaaaggctggtcagagtgtcagcatggagctccagaaagcagaactggaggcagagcagaaacatcacagagggacagatcacaacttcctgcagagtaagcggaaggcgccctcgggaacttgtgaggctcatatcactggaggtttccaaaacgacagttcagaaaccccagtgagaaatcactacacacccaccagaatggccaaaataaaaactagaacaccaagtgctggacaggatgcagagaaaccaaaccacccatgcattggtggagggaacgtaagaca

SEQ ID NO: 66 - DNA, 591 bp, Homo sapiens
  MAP TO AC021252.3; EXPRESSED IN BONE MARROW, SIGNAL = 1.4; EXPRESSED IN LUNG, SIGNAL =   2; EXPRESSED IN ADULT LIVER, SIGNAL =   2; EXPRESSED IN BRAIN, SIGNAL = 0.87; EXPRESSED IN FETAL LIVER, SIGNAL = 1.4; SWISSPROT HIT: Q62388, EVALUE 3.90e-01; NT HIT: AF069333.2, EVALUE 6.00e-10; EST_HUMAN HIT: BE552461.1, EVALUE 2.00e-10
gctggtcctccaaacaaaagagttggatcgttctcatgcttagcccatctctggatcaaaaagcacatgatcattttgcaatctgtgaaataactctattcaaataaaaataaaaatagacataaaaacctttaggcaaaccgttagtggagaactaggtatacacatggtgccaatgaattatttccatagacttgtatctcataagaagaaaacctctcactgtcattgtcttaagtagaaattaatcttgacatatgtcatggtggggccaccaaatatgacatgccccagcaagatgcagtacgaagtacctggcatcacttataaaatgagcatactgaaaatgctaaggggattctaatcaagtgtatatatttaatctccagcttattggaaacagagataagggagcagaggaagaagtttatcaacaccgtgatgaaccagttaaacaaatccagaatgtgggacagtctacagcaggggtccccaacccctgggctgtggcctgataccagtccgtggcctgttaggaactgggctgcacagcaggaggtgagtggcgaaccagcgagcattaccatctga

SEQ ID NO: 67 - DNA, 524 bp, Homo sapiens
  MAP TO AL138967.2; EXPRESSED IN BRAIN, SIGNAL = 0.71; EXPRESSED IN LUNG, SIGNAL = 0.78; EXPRESSED IN ADULT LIVER, SIGNAL = 0.77; EXPRESSED IN FETAL LIVER, SIGNAL = 0.72; EXPRESSED IN PLACENTA, SIGNAL = 0.72; EXPRESSED IN BONE MARROW, SIGNAL = 0.71; NT HIT: AB026898.1, EVALUE 3.00e-05; SWISSPROT HIT: P08547, EVALUE 1.70e-02; EST_HUMAN HIT: AW197226.1, EVALUE 3.00e-03
taaccgtggacttgtatgcccctaactttgaaatatacaaacaaaacctaacagatacacagagagaattaaacaaatccacaattatagcaagagatcttagcacatctctcttcaaaatagaaagaccaactgagataaatgtcgagtagagaatccaaaattactcagcatattaagaatcagaaaaaattgtccacgtccataaaaaataaacatatgccaaatgccaatatgatgcagttgttgaaattatatgacaaagactttaacgtagctatcaaatgctctatcaagtaagggtgaatgtttttgaagtaaatagaaatataaaaaatgtcctcaaagaaataaaagatataaagaaaaaataaatgaaaactttagatcttaaaactgcaataactaatataaaaaaactcattgcatgaactcaaaagtagaatggagatgacaaatgcaagaatcagtgatcttgaagaaaaatcaatagaaacaattcaatctgaacaaaagggagaaaa

SEQ ID NO: 68 - DNA, 600 bp, Homo sapiens
  MAP TO AL136366.3; EXPRESSED IN PLACENTA, SIGNAL = 2.7; EXPRESSED IN LUNG, SIGNAL = 2.4; EXPRESSED IN ADULT LIVER, SIGNAL = 1.8; EXPRESSED IN BRAIN, SIGNAL = 2.5; EXPRESSED IN FETAL LIVER, SIGNAL = 1.8; SWISSPROT HIT: P13622, EVALUE 1.00e-105; EST_HUMAN HIT: AU121764.1, EVALUE 0.00e+00; NT HIT: gi14743526, EVALUE 0.00e+00
ttgtaggcggtgtttgccgtgctagaaaaaagaacaatctgctcctaccttgctcctgcacgtagtatgccaaaaacaaatcaagctccttaactgatactgtgatatgatgtggctggacacaaagtgctgggtttgtgcaatgtggggatttcatgagccgctctccatcggtactttccaaggggatgcctttgaacaggatcaccatgactagatccagacgccagactttgtctgcctgtcgcaggcagtcgattctcctaatcttacccttctggtcgggattggataagacacagcacgggtgcttcttgccagtcacggtgagcacaaagtcctctcgatactcctggcgaatatctttgcgcagtttggcaaggagcctggatgcccacttctgtttgatttcaggcttttcactgagaagctcatctttgactgctctttcttcatcctttgacattcgcttctcatgctttttaaagtacttgcgttttcgagcctgcaggttgaaccaagtataggcaattgcacggacatgtggaagaagtgcctcgatgaatgggtgaaattcatcctgtggaagacagaggggtg

SEQ ID NO: 69 - DNA, 598 bp, Homo sapiens
  MAP TO AC021635.3; EXPRESSED IN FETAL LIVER, SIGNAL = 0.58; EXPRESSED IN BONE MARROW, SIGNAL = 0.65; EXPRESSED IN PLACENTA, SIGNAL = 0.74; EXPRESSED IN LUNG, SIGNAL = 0.7; EXPRESSED IN ADULT LIVER, SIGNAL = 0.73; EXPRESSED IN BRAIN, SIGNAL = 0.57; EST_HUMAN HIT: AI205673.1, EVALUE 0.00e+00
ttgtttgctgatggtgataaggatcatacatgtggcatatagataacatttcctctgcacttataccttacttctatagtaaccttcctttagtataaataattgatgtgtgctgttttaataaggtttgtttacatatttagaacataaatttaatttgaactatattattaactatactatagtattgaactctactgttttatgtagataaaatctgtattgtttttctccttttagctgaaaaagcaagcctccttagaaaaacctggtaatgatctagaaagcccattgatcaacaacattgaccaaacactccacagagtggcaaccacagcatcagtgatatacaagatctgggagcacaggtctcaccatccttcctctaagaaaattaagcactgcaaattaaagaagaagagtaaagaagaaggagccagaagatactaaataaatgcatatgcaaatgtagcttagtcaattatagatatcacaaaagaaatctatcatctaaggattaaaaattgttctttggaaacctttataaactttttgccacaatctttactaaaattttccaaagaagcctgggttgaaa

SEQ ID NO: 70 - DNA, 565 bp, Homo sapiens
  MAP TO CHR22_145.0; EXPRESSED IN HELA, SIGNAL = 2.1; EXPRESSED IN BRAIN, SIGNAL = 0.79; EXPRESSED IN LUNG, SIGNAL = 0.7; EXPRESSED IN PLACENTA, SIGNAL = 0.71; EXPRESSED IN ADULT LIVER, SIGNAL = 0.75; EXPRESSED IN BONE MARROW, SIGNAL = 0.92; SWISSPROT HIT: Q02080, EVALUE 2.00e-03; EST_HUMAN HIT: BE174158.1, EVALUE 0.00e+00; NT HIT: gi14778388, EVALUE 1.00e-69
ctaggaacagctgctcaggcagtggaggcgtgaggcggactgtggtgacacggggtgctccctggttgcttgcgggactttcccctacagtaccaggccctgtgtgcaggggcaggctagacactgagctggcacggccagtgcctgggaagcccagctcctgcagctgggagcctggtcttcccccacccctgcagggcaggcagtgacaaggacttggtgtccccctccctggcttcctcctagcttccttgctcagcatctacccttctttcctttgcaggtgtcagcacagcgggctactcctagggataagcccccggtcccctcatccctggccagtgtccctgacccccatctactccttcctggggacttctcagccaccagggctgggcctggactttcaactgcaggtgtgtacctggggcctgtcagggcagaaagcactcaggccactcccggacctgggacttgctatttaccctggtccccgaggggaaaatagtctgaaacaagcttacttctgtcgccataggcagcctggaccttgaggctgaacttg

SEQ ID NO: 71 - DNA, 581 bp, Homo sapiens
  MAP TO AC011225.5; EXPRESSED IN BRAIN, SIGNAL =   1; EXPRESSED IN FETAL LIVER, SIGNAL = 1.4; EXPRESSED IN LUNG, SIGNAL = 1.7; EXPRESSED IN BONE MARROW, SIGNAL = 1.4; EXPRESSED IN ADULT LIVER, SIGNAL = 1.9
tgcagtcctactctggatgcattttttaaaaagattttgttcactacatgagactgtttttcctctgctcttagtaccaaaataccacacttctcctgtgcatctggcttgatttttatcttccaaacactgaacgatgtgattgctagcttcttttttgttgttgcagttctctgaaagcatagagacaaatttgtgtttctactccaaataaatgcaccgtcttatactatatatacttttcaattctactttaaatccttctagggacaaacaggtacagaaacaaataattacccatataactaatctaaatttgatttttctagatttcatttactgtaacaactgcctgactctacatatggacatcaacctcctaagaatactggaaaattacaaatttataacctctctccttgagattgaacttgagatacaagttcattaatctttaaggtgagataaaacatgtttggtttgccttcaccctgaataatgggtggtggttgtgatgggttacgaaacatctaattatttgaaaaatcatgtgttcatgtggttagggctcctggcttctc

SEQ ID NO: 72 - DNA, 533 bp, Homo sapiens
  MAP TO AL138895.4; EXPRESSED IN BRAIN, SIGNAL = 1.7; EXPRESSED IN HELA, SIGNAL = 1.5; EXPRESSED IN FETAL LIVER, SIGNAL = 1.5; EXPRESSED IN HEART, SIGNAL = 1.5; EXPRESSED IN PLACENTA, SIGNAL =   2; NT HIT: AF304354.1, EVALUE 7.90e+00; SWISSPROT HIT: Q60865, EVALUE 5.80e-01; EST_HUMAN HIT: BE244362.1, EVALUE 1.00e-61
atgttttggggacaggacaccactgtagggggaggggtgtcagtctcaccttctcccgaagtctctcctgactcggaatcctgatgcccatcgggctgcgggtgtgggtcccactccaggggcggcaggtgctgctgggccaggcggaagtcctctaggagctcggggctggtggcattgggaaagagtctctcttcttcccagctttgtgaactacttctatccacatccctcttgtcctcggcccaggcccagcgccgccgctgggggcccttccccaggccaggctcagcccagcggatctcagtctccgagctggccattggggctggcctgggcttcacctgggccacttcatcttcaggagacagagctgctgccaggggccccagagtcaccgctggttcctgtcagcatcggccatcctgcctgtgccctgtcagggacacattcaagagagaacattaatcaatcctgatcccctcttttattcggaacaagaagttaccagcaggaactctggaattagcccc

SEQ ID NO: 73 - DNA, 523 bp, Homo sapiens
  MAP TO CHR22_83.0; EXPRESSED IN BONE MARROW, SIGNAL = 0.95; EXPRESSED IN BRAIN, SIGNAL = 0.93; EXPRESSED IN HELA, SIGNAL = 2.3; EXPRESSED IN LUNG, SIGNAL = 0.83; EXPRESSED IN PLACENTA, SIGNAL = 0.95; EXPRESSED IN ADULT LIVER, SIGNAL = 0.8; NT HIT: gi15147251, EVALUE 3.00e-79; SWISSPROT HIT: P55194, EVALUE 7.00e-16; EST_HUMAN HIT: BF769436.1, EVALUE 5.00e-79
ttcgagagatgtgacggatgatttcagatgtgtgcctggacagtcagtggcaggtggtaccaccttgaggacatgaagggggggtgcccctgcctgactgctcggggtgggaaggccctgggccgctgatctgtttcatccctgcagaccactccccttcgatgacagccacccacttccccagggtgtatggggtgtcgctggcaacccacctgcaagagctgggccgggagattgccctgcccatcgaggcctgcgtcatgatgctgctttctgagggcatgaaggaagaggtggggtcccctggggcaggtggggaaggagcactggggccctcattctgtcccaaaccgcccacttgctgccctttccgggtgcctgtaattccctcattcgagcccagctccctgggagaagacatgactgcctcctgcggcatccacactacctcccccgtgtcaatgctcgcgtgggccaagcgctgtactagaagcctttgcattccaggctccatttcacaatt

SEQ ID NO: 74 - DNA, 582 bp, Homo sapiens
  MAP TO AC015956.3; EXPRESSED IN BONE MARROW, SIGNAL = 0.87; EXPRESSED IN BRAIN, SIGNAL = 1.1; EXPRESSED IN HELA, SIGNAL = 0.79; EXPRESSED IN ADULT LIVER, SIGNAL = 0.74; NT HIT: gi5803144, EVALUE 1.00e-103; SWISSPROT HIT: Q10164, EVALUE 1.00e-03; EST_HUMAN HIT: BE888073.1, EVALUE 1.00e-103
ctgtctctgtttctttggcagctgaaggctatgcagcctttcaggaagatagctctggagatgaggcagaaagtccttctaaaatgaagaggtccaagggaatccatgttttcaagaagcccagcttttctaaaaagaaggaaaaggattttaaaataaaagagaaacccaaagaagaaaagcataaagaagaaaagcacaaagaagaaaaacataaagagaagaagtcaaaagacttgacagcagctgatgttgttaaacagtggaaggaaaagaagaaaaagaaaaagccaattcaggagccagaggtgcctcagattgatgttccaaatctcaaacccatttttggaattcctttggctgatgcagtagagaggaccatgatgtatgatggcattcggctgccagccgttttccgtgaatgtatagattacgtagagaagtatggcatgaagtgtgaaggcatctacagagtatcaggtactgggaatgtgcacttcacttgatggtttttaataataacttcagtttcatttttcgaaggaagaaaaattattgtgaggaaaatttggcctggatcct

SEQ ID NO: 75 - DNA, 583 bp, Homo sapiens
  MAP TO AL137863.3; EXPRESSED IN BONE MARROW, SIGNAL = 6.3; EXPRESSED IN BRAIN, SIGNAL = 5.6; EXPRESSED IN HEART, SIGNAL = 5.1; EXPRESSED IN PLACENTA, SIGNAL = 7.1; EXPRESSED IN LUNG, SIGNAL = 6.2; EXPRESSED IN FETAL LIVER, SIGNAL = 5.9; EXPRESSED IN ADULT LIVER, SIGNAL = 6.1; NT HIT: U07265.1, EVALUE 5.60e-01; SWISSPROT HIT: P25692, EVALUE 2.50e+00; EST_HUMAN HIT: AW902183.1, EVALUE 1.30e-02
tactgatcagggaccttgggatttgagaggatacaaggcagtgaattccctggggttttctttacttcctatgtatgctagcctgggtgttctacaaactggaaacactaatacacacagacaaaaaaaaaatacccaagaaaagcctgcttctggaagcaaacatcatgaaaaaagtggcactgctcctcaaccccaattggcacgcagcagtggagccagtgagtgaaactcactcattttatatatgccctatgttaatgaggtatctttctctatggagcctgtgggtgaaactcttacttctacctttggccctgctcctcccagtaatgagtggaacccatctcctatgcatccgtaggtggaactctgacttctgccgtaccctgcagtaatagtacggaggaagtagtacctcttcgttttggagactgtagatagagctctaactcctccctctcacccctgcattaactaggctatgcacttccccagctgagtcagttattggaattttatcattcactcctgccctgtagtaatgatttggtttccctcctcctccccaactagctctgtg

SEQ ID NO: 76 - DNA, 587 bp, Homo sapiens
  MAP TO AL136478.2; EXPRESSED IN BONE MARROW, SIGNAL = 1.1; EXPRESSED IN HEART, SIGNAL = 1.5; EXPRESSED IN BRAIN, SIGNAL = 1.1; EXPRESSED IN PLACENTA, SIGNAL = 1.2; EXPRESSED IN LUNG, SIGNAL = 1.1; EXPRESSED IN HELA, SIGNAL = 0.79; EXPRESSED IN FETAL LIVER, SIGNAL = 1.1; NT HIT: AF196288.1, EVALUE 3.60e-02; EST_HUMAN HIT: AI637995.1, EVALUE 3.30e+00
tccagggacatgcctacttctcagtttacctcctctttgtcagctgtggttagtggtatgatgctattgcagaatttccatgccacaaaaaattctgcctctcttaccattatatcacccgaatttctcttcaggcacagactagttctgttgaattccttaaggaagcagaagttggctatcagctataccttctttagtgtttctcattttgaagacatgtccactgatgtggggaagagtgaagtttggcctatgtcagagtcaccaggcactgactaatctgtttagcatagactgcacctgtgcacgttattgagaaaaaagcttcacagtcatgcaccagaggtaactgatgatcctccccaaattgctgaacaactatctggaattgcttgtgctgctgcaaatgaccagtggccatatgctttccccgtatcattcttttaatctttttctttatctcctaagtcagattgaatcttctcaacatgtagtactgaatctatggcctccagaatgatagagctttgtggttttgattcacataatagaacttgaatgggagagaaagccaggcaaaactg

SEQ ID NO: 77 - DNA, 590 bp, Homo sapiens
  MAP TO AL137159.1; EXPRESSED IN BRAIN, SIGNAL =   2; EXPRESSED IN HELA, SIGNAL =   1; EXPRESSED IN FETAL LIVER, SIGNAL = 1.6; EXPRESSED IN LUNG, SIGNAL = 1.7; EXPRESSED IN BONE MARROW, SIGNAL = 1.7; EXPRESSED IN HEART, SIGNAL = 2.4; EXPRESSED IN ADULT LIVER, SIGNAL = 1.7; SWISSPROT HIT: O13670, EVALUE 8.70e-01; EST_HUMAN HIT: BF115781.1, EVALUE 3.00e-03; NT HIT: gi14770646, EVALUE 2.00e-06
gctttctcccaacacctcacaggtggactgtgagatacctgagactttctcagggcatacattgtaagaggaaaaacgaaactgctttttctctctactgacacacttaacacagaacacatctgtgaccagatgtatggtggtatttccccacatccaatcaattctgcagctaacaccggctggatgtcctttaatacaatccaattctgatactatctacctagatagtgtcagattccacaggctcagtcccacaagactgctcccacttcaggcacaaatcgcaagtagtggagtgttaccaatacttctgaccaactggctataaatcatggttcccgttatcaccttgaaaaaactgcatgttttgggaatggcttaggggctgggatgaatttgtcccatgtcatgctgggtagtcaggtactgctgtcccaactaagttgctgaagtccaactagcttcttaccttgtccttgtgtggtcctggctgtctgggtaggtgtcctgggtggactcagtgtttctctgggttgtgtctgagatgactgtctttgacatggtgttcagggtggcataatgaatcc

SEQ ID NO: 78 - DNA, 578 bp, Homo sapiens
  MAP TO CHR21_18.0; EXPRESSED IN BRAIN, SIGNAL = 1.2; EXPRESSED IN HEART, SIGNAL = 2.6; EXPRESSED IN LUNG, SIGNAL =   4; EXPRESSED IN HELA, SIGNAL = 9.2; EXPRESSED IN FETAL LIVER, SIGNAL = 1.6; EXPRESSED IN ADULT LIVER, SIGNAL = 1.8; NT HIT: gi13357558, EVALUE 8.60e+00
gctaaacttatgcagatgggctagaatttacactgtttttattattacttgaatagcatttttagaaaacctaatcactaaaaaaaaattaagtgacatttaaagagcaaaatttccatatacctactgatggaactccttgatttttctgaagaatatgttttatgcttcatttttaaaatttgatgttttcagcattgtttctgtatacctggagttctatgacagtgtgtatatatcctatgatgatacatattacaaagttgcaagtgaaaataattccaagtacaagaaaatagatcagatttcaggtattatcagtgtttgaccatggtaatgtttaaaatgctcatttatttcatttttattcttaaaagtcgaaataatatattatattctaaacaaacctatgatttaaatttgcattagctaagcgatggaagtaatcttgggaaacattctttaccctaaagaaaatcattatagtgaagattttcaggataatttgaagttcccagaaggtgataaaggtatacttttttcctaacttttaactctcttcctagaccacagggcag

SEQ ID NO: 79 - DNA, 509 bp, Homo sapiens
  MAP TO AL137025.2; EXPRESSED IN BRAIN, SIGNAL = 4.3; EXPRESSED IN PLACENTA, SIGNAL = 6.6; EXPRESSED IN LUNG, SIGNAL = 4.6; EXPRESSED IN HELA, SIGNAL =   3; EXPRESSED IN ADULT LIVER, SIGNAL = 5.5; EXPRESSED IN FETAL LIVER, SIGNAL = 6.6; EXPRESSED IN HEART, SIGNAL = 3.8; EXPRESSED IN BONE MARROW, SIGNAL = 3.8; NT HIT: AF120982.1, EVALUE 2.00e-09; SWISSPROT HIT: P33621, EVALUE 4.20e-01; EST_HUMAN HIT: F06091.1, EVALUE 1.00e-11
ttaccgggatttgaccacacgcagtaatgggggctgataaagtctagaaggctgttgccttcatatctaatgctgcagcttgaagtctgcagggcaggcagttgggaagaaggctgtcagggggtgcaaagcagcaaggacaagatggaacccatctcaggctctctctgtctccaaccttcatgatgtgggtatcctgcaggagaacccggtgctctttgtcacagagataaacacacatctggttgaggatacacagtcagatgaggagtcagtgaagctgagggaagacccagcgaaagatggaacagctgcagcctgcttcctgccccacaccaaggagataagccagcagataaaataacaatatgcatgggccacaaaagcacctggagacctttccccagcctctgagcacaaaaaacaatactcttgatatagttgctcctccactctgtcctccaaatctcacacaagtacatctcttgtggcacacccttaactggaaa

SEQ ID NO: 80 - DNA, 598 bp, Homo sapiens
  MAP TO AC015938.3; EXPRESSED IN HEART, SIGNAL = 2.2; EXPRESSED IN BONE MARROW, SIGNAL = 2.7; EXPRESSED IN PLACENTA, SIGNAL = 2.9; EXPRESSED IN LUNG, SIGNAL = 2.8; EXPRESSED IN HELA, SIGNAL = 1.7; EXPRESSED IN BRAIN, SIGNAL = 2.8; EXPRESSED IN FETAL LIVER, SIGNAL = 2.6; NT HIT: gi14772683, EVALUE 1.40e-01; SWISSPROT HIT: P50282, EVALUE 9.00e-03; EST_HUMAN HIT: W67719.1, EVALUE 3.00e-03
gctctaaattcacgccgaagccggctgtatttgtctgtcacgggggttcataattttctgaggttgttttgatagacttattgtgcggactgcatagaaaactcatcagcatttgttgcctctgagcgttattgtcagaggtaactgcgtgtctgtagactgggggagataatggctgaagtagaaagcagataaagcccaggctcttctcattaaggactatctctgcctccgcagaccggccgggattgagtgactggggcggcagcacggggcatacattatgccagcaaaagcaaaaggcggcggcatgagtgcgggcagctggaggaccccgtggccctggatgaatggccgaggggagcgcttggatggtgcccgcagtgtggtcggctgcaggggtgccagtcggggacacccaggggctccctgagctctgggggtttatggcagagcaatgaggaggggttgcagtgcaggcaattctttggttccattctgacattgcacagagggggaaactgaggtctggagaggggaaggggtgtgtctggggcctcctactgagggagggcagagcaggttcctctgattctgg

SEQ ID NO: 81 - DNA, 522 bp, Homo sapiens
  MAP TO AL132765.16; EXPRESSED IN BONE MARROW, SIGNAL = 2.8; EXPRESSED IN PLACENTA, SIGNAL = 4.8; EXPRESSED IN BRAIN, SIGNAL =   3; EXPRESSED IN LUNG, SIGNAL = 4.1; EXPRESSED IN ADULT LIVER, SIGNAL =   5; EXPRESSED IN FETAL LIVER, SIGNAL = 3.1; NT HIT: gi15304922, EVALUE 0.00e+00; SWISSPROT HIT: Q40633, EVALUE 9.60e-01; EST_HUMAN HIT: BE908983.1, EVALUE 1.00e-122
cagccttcgaagtgagaacctggatggaattcactacagagctgacagctggttccacttttgccacttttttctccttcttctttttgtccttgggggaggaggccagcttctcctggggcatggctggaactgtggcgacaggagcaacgataatggggggctgcactggggttggagccacagccacagcaggagcccgcactggtcctcgatgaagacagtcacattgggggctggatcatgatcaggtatcttcccattaagtttcttcttccttttcttggactttcctttcttttccaccgttttctccttctttttcttctcgactttctggtggtgagttttcgccatctccttgcgctggttggctagggcttcttcatatgacgtttccttcatggagaaagtcgacaccaggaagatgccaatggcagaaacaaccatgaatcctccaaagaccacaacccccaaggtttgagtgtcgtaaatatccatcctggcttgctttcctttcac

SEQ ID NO: 82 - DNA, 566 bp, Homo sapiens
  MAP TO AL133263.2; EXPRESSED IN PLACENTA, SIGNAL = 2.6; EXPRESSED IN ADULT LIVER, SIGNAL = 2.7; EXPRESSED IN BONE MARROW, SIGNAL = 2.1; EXPRESSED IN HELA, SIGNAL = 1.3; EXPRESSED IN LUNG, SIGNAL = 2.6; EXPRESSED IN HEART, SIGNAL = 1.9; EXPRESSED IN FETAL LIVER, SIGNAL = 1.8; EXPRESSED IN BRAIN, SIGNAL = 1.9; NT HIT: gi9626681, EVALUE 2.10e+00; SWISSPROT HIT: Q07687, EVALUE 7.20e-02; EST_HUMAN HIT: W02560.1, EVALUE 5.10e-02
tttccatctctgcccatctctctgatgtttattccccgtcacccaccccattccctcccctacctccaacctccattttagtagtcaggactgatttgcctcagcaggaagtgaataaacaaaacagatcttgtttagccttgtgagttgatgctaagaggagcacggaagttattttcctgtagagctcactttttttgtgttgattttcctgacaaagatgtgtagtaaagcagtggaaagtccactctgaggacaaccgtgatgtccagggttgtggcaagggtcaggaggtctactgggatggaggagtgggattcacggagattcacaactatgcttccctgtatggaaatggggaacaaaagaggattctcacctccccatccccggtccatggccatgagggtctgcccaaggccagagtgagtcaggagctatggggggacgcagctgcagggcagggacagctggcagtgcagactctaggaccattttcagaactgggctgatatcacaggggactgggaggaggtgatgcaccctcaagggacaacttgggagaa

SEQ ID NO: 83 - DNA, 506 bp, Homo sapiens
  MAP TO U82695.2; EXPRESSED IN BRAIN, SIGNAL = 0.42; EST_HUMAN HIT: AA992462.1, EVALUE 5.00e-05; NT HIT: U82695.2, EVALUE 0.00e+00; SWISSPROT HIT: P08547, EVALUE 3.00e-08
aacatttgggctgtttcctgtttggggctattatgaaaaagctgctgtgaacgttggagtatgagtgtttgtatggttacatcaatccctttgtcttgggtaagtatctaggaggggaattgttggctgatgtggtaggtgcatgtttaacattttcggacactgccgaagtgttttcccaagtggctgccccattttcccttcccaccagaaaggcacgggcacccccggtgctccacatctcctccctggtaaaccaacacttggtgtggtcagtggtttttgttttacccattctaatagatgttaaacgtccaggaattttgagagctaaacaaacactatcattattaaaaagttaaattatgtaaactgacaaattatatgaaaaataaaggagatactcaaaactcacgtcttcattattcgagcatgctttactgttgctgtgtgttgacacctgtcagatgtgtgtggtggaaatcctggaatctcttcccaaggtc

SEQ ID NO: 84 - DNA, 503 bp, Homo sapiens
  MAP TO AL133261.4; EXPRESSED IN FETAL LIVER, SIGNAL = 0.61; EXPRESSED IN PLACENTA, SIGNAL = 0.95; EXPRESSED IN BRAIN, SIGNAL = 0.97; SWISSPROT HIT: Q27309, EVALUE 8.00e+00; NT HIT: gi15828471, EVALUE 1.90e+00
tcgacttgacatttctccccatgttcagctgtgccactagcaagcatattcaaagttccttcatcctgcttccataattatatgttggggtgcagaagtaatcatttactccattgcctacatgaaccttatcatcctctgctttgcaaaaggtacgttgtatcatcttttaaagtgttgaaatctccagagagaaaaatttattaggagaaagttactggtatggcagcaaaattaattctgccagaacatgtcaaattaaccaccctcctaaggactggagtcacagccaagctcagaaatggacaaatatccaggatcaatttcttcaatgtcactttaggtttgagtaaagccaaggtaagcatcgcgatctatctcaacattccaatgtttagtccaaaacaacactggctggaaaacaagaggttaagaactaaggaaacacttcaagcaattccttttttccctccccctttccaagcagcaacaaaggttgtcag

SEQ ID NO: 85 - DNA, 578 bp, Homo sapiens
  MAP TO CHR22_180.0; EXPRESSED IN BONE MARROW, SIGNAL = 0.55; EXPRESSED IN HELA, SIGNAL = 0.61; EXPRESSED IN BRAIN, SIGNAL = 0.62; EXPRESSED IN FETAL LIVER, SIGNAL = 0.49; SWISSPROT HIT: Q40554, EVALUE 2.00e-02; NT HIT: AF254822.1, EVALUE 8.60e+00
tatttgcagaccttggggagagagcgccagcatctctgctttccaaatggagaaactgaagctggagaggataaggaaactggccggtggtgatctagctcctacgggaagggagggacagggtttgaaagggtctgtctggcttcctaaggaaccagagaggaggaaaagagcctgtaactttggcacatcctgggagaaaaggacctgcctgccacattcctccctccccagggacactgtctctgtgggccccaggacgccttctccctcccagagaggaaaccaagatgggaaggaggcagggggccaggtccgtattcctgcaacagcaggacctcctgaaggtcacgccagccctcagggcacctcggggagctgtggattgctgctcagtgtccccaacgtgaagcttcagcaaaagcaaaattgccatgaaaccaaaccacccatcgagattggatatgcagaagccttatggctgtggacagagttctaatcaccgtttaagtggattagcagattcctctgtaaatcttggaataaaactaaagcacactcgataccatgtgcacctg

SEQ ID NO: 86 - DNA, 508 bp, Homo sapiens
  MAP TO AC021619.3; EXPRESSED IN PLACENTA, SIGNAL = 1.2; EXPRESSED IN LUNG, SIGNAL = 1.1; EXPRESSED IN FETAL LIVER, SIGNAL = 1.1; EXPRESSED IN ADULT LIVER, SIGNAL = 1.1; EXPRESSED IN BONE MARROW, SIGNAL = 1.2; EXPRESSED IN BRAIN, SIGNAL = 1.1; EXPRESSED IN HELA, SIGNAL = 0.57; SWISSPROT HIT: P34814, EVALUE 8.00e+00; EST_HUMAN HIT: AW801898.1, EVALUE 1.00e-05
taggctggcctagattttgccacctctttgggagttgctgtgtacacgtaaaaatccaaatgattttcttctgcccatctatcttatgtcaatgtaactctcaggcccagccaaagatcctaagaaaggagaggtaaagctttgccttccctatacaagtaatgatcataattacctctattctaaagagcctcccactgcgatgcagcacagcaatgaggagcagattcgctctgaagaacaacccgagcccattgtttacaagaaatagacctgtattaaggcctgttgctaaagagacagaaatggagtcgggacccacagaccatacctctgccaactttctgtctttgcttgccagagcatagaattgtgaaaaagtgaatcaagaagcagatgctaaattttcaaggtaaatacattgccacgggaatcccatgcctggattaccaaggctcaggacagcttaactcctgaggtacctcctcggcaggagaaccagtaccaa

SEQ ID NO: 87 - DNA, 562 bp, Homo sapiens
  MAP TO AL136317.2; EXPRESSED IN BONE MARROW, SIGNAL = 0.44; EXPRESSED IN BRAIN, SIGNAL = 0.52; EXPRESSED IN ADULT LIVER, SIGNAL = 0.3; SWISSPROT HIT: Q09800, EVALUE 2.70e-01; EST_HUMAN HIT: AJ003451.1, EVALUE 0.00e+00; NT HIT: AL163204.2, EVALUE 0.00e+00
cagctgactgctttgtttgggatacgttactttcaatcattttcctgatcctctgcatgatttacagaagccgagtgggtggctttagcatttccatggtcctccctctccactatcatgacattcttaggtgaattttttttagagccattattctccatttacaaaggcagaatgcagtggcaggagctgggactctgggaaaccaacagccaagaattcaaactacagcatactatgaaacactcagataagatgtccccatcatattctattattgggcaaaataaaaggtaaaccatgtgctcaaaacagcaaatattgtgggtgacagtgacactggtattcggaaagatgaagagatgcaattaagaaacctggcaaagaagtaaacatgccatgtagcttacaaaagaccagccacattgtgtgtattttaatattgtttaacagtaacacctaataaagagagcatcatgattgtgtgaactacattttcggtcataatgaatgctacaaaattaacctcccaagtttagacaggctacaacgtcttgggaaa

SEQ ID NO: 88 - DNA, 512 bp, Homo sapiens
  MAP TO AL080245.14; EXPRESSED IN BONE MARROW, SIGNAL = 0.69; EXPRESSED IN PLACENTA, SIGNAL = 0.84; EXPRESSED IN LUNG, SIGNAL = 0.71; EXPRESSED IN HELA, SIGNAL = 0.6; EXPRESSED IN BRAIN, SIGNAL = 0.78; EXPRESSED IN FETAL LIVER, SIGNAL = 0.67; NT HIT: AJ310932.1, EVALUE 0.00e+00; EST_HUMAN HIT: AA993492.1, EVALUE 0.00e+00; SWISSPROT HIT: P54697, EVALUE 6.00e-03
gaaaccagttctgctggaggcttggatcagtgtgctcctagattccatgccatctcagacattccacctctctcttctctccctagatccttttcctcccaccatctctccatggcctccatcatggtggtggactctccaggcttccagaacccccggcaccagggcaaggaccgggcggccacctttgaggagctgtgccacaactacgcccatgagcgcctgcagctgctgttctaccagcggacctttgtctccacgctacagcgatatcaagaggtatgcctgggctggagcagggctttcaccagagctccgtggatggtgtaaggtcagatgggaaggggtgggattcccattccccaggagcctgcagcttcaccctgtttggttcaccagagaacaaagccctttccccaggcctggctccccagacctctgttgctccctccacagcccagcctccccctgccaccttctgaaccccgcagcccagaagcaccaaggaactc

SEQ ID NO: 89 - DNA, 586 bp, Homo sapiens
  MAP TO AC013613.3; EXPRESSED IN HELA, SIGNAL = 1.5; EXPRESSED IN HEART, SIGNAL =   6; EXPRESSED IN PLACENTA, SIGNAL =   1; EXPRESSED IN BONE MARROW, SIGNAL = 0.55; EXPRESSED IN BRAIN, SIGNAL = 0.48; NT HIT: gi14786168, EVALUE 4.00e-08; EST_HUMAN HIT: AI630817.1, EVALUE 6.00e-08; SWISSPROT HIT: Q29003, EVALUE 2.50e+00
tccacacgaagacaccaatctctcctggccctgcctccattcttccatcagcttttcttcctacagtttaattgctgattttcttaggtcttgctcttcattctcctttcttctgacttcagtgctctctatggacaatctcatcaatatctatggcttccagtggcatctgtgtagaaatactaaccactcccagatctgcatctgcttctcacaagccacttctgagttcccagccaatacctgcaactgcctactacacatcttaacctgagaacgcaagtcaagcacatcaagtccaataaatataatactaaaataataaattttcctccccagccagctcctttttctgtattctctatctcaaatggttgtagcaccatataccaaatctccaatgagtgcctatcactcacatctaatcagaaataataatacatggcagacatccttctaaatattttccacacatttgcatttaatcctcacagcaacccaatgaggtaggttctgttattacccccatttgacagattaagatactgaaaaccagagaggttaagcaactggaccaaggtcacct

SEQ ID NO: 90 - DNA, 585 bp, Homo sapiens
  MAP TO AC021609.3; EXPRESSED IN FETAL LIVER, SIGNAL = 1.8; EXPRESSED IN BONE MARROW, SIGNAL = 1.9; EXPRESSED IN BRAIN, SIGNAL =   2; EXPRESSED IN PLACENTA, SIGNAL = 2.2; EXPRESSED IN LUNG, SIGNAL = 2.3; EXPRESSED IN ADULT LIVER, SIGNAL = 1.8; NT HIT: gi16159220, EVALUE 1.00e-38; EST_HUMAN HIT: AA195334.1, EVALUE 2.00e-38; SWISSPROT HIT: Q13591, EVALUE 2.00e-11
agttgtctcaggctgccatctagaggcaggtgctgaagcgacatcctcccctccatcctgccgccttttctctgacccttgggacacggaagccacggtttgggctgaggcagagctggacattggacaattacccaacatggggcagatctttatttcttgcttttcctttgttcctttataatctatgtgcccaaggtgacacgccatggtttcacaggcgccccaaagctagaaaggcagtttttcataaggggaacccttacctgtccccaactccgccaccagcgccacccccacagagctttgctgaaagtccccgcgtccacttgccttctgtgcacacctggctgctgctgatgctgccaactccttatcttgatggcctccaccgagtcgtacttgtccagtttgttggtgtggttggttatgctggtgttgaggagggtaggcgagacggggtggacgacagtcgcattgtgggattgctgttggtgctgctactgtaggtatagaccagcaggctgagccccacgtgatcatgtggaacacactgaaccctggggggacaggagcaaagtggta

SEQ ID NO: 91 - DNA, 600 bp, Homo sapiens
  MAP TO AL136128.2; EXPRESSED IN HELA, SIGNAL = 1.6; EXPRESSED IN BRAIN, SIGNAL = 2.4; EXPRESSED IN FETAL LIVER, SIGNAL = 2.1; EXPRESSED IN BONE MARROW, SIGNAL = 2.8; EXPRESSED IN HEART, SIGNAL = 2.1; EXPRESSED IN ADULT LIVER, SIGNAL = 1.4; NT HIT: AL163303.2, EVALUE 7.00e-16; EST_HUMAN HIT: AL521707.1, EVALUE 8.00e-69; SWISSPROT HIT: Q9UX16, EVALUE 7.70e+00
acgtggtcacccaagagttctgatggagatgtacaaagagattaacattgctcacacgtctactaacacaacatccactcttcagcttgtggatcagggagtaattttgactttcaagtcgtattatttaagaaatacatctcataagaaaacagctgccatagatagtgatttttttgttggaactaggcaaaataaattgaaaacattctggaaaggattcaccattctagatgtcattaagaacattcgtaattcatgggaggtggtcaaaatatcaacattaacaggagtttggaagatgtggactccaaccctcctgaatgagtttgaggtgtccaagatgtcagtggaggaaatgaagtgcagatgtggtagaaacagcaaaagaagcagaagtggagcctgaagatgtaactaaatttatgacattttaatctcatgctaaaacttgaatgaatgaggtgttgcttcttatggatgagcaaagagtggtttcttgagatggaatctactcccagtgaagatgttcacagcactgtgtaaatgacaacaaaggatttagaattatataaatttagtcgataaagcagtggcagg

SEQ ID NO: 92 - DNA, 518 bp, Homo sapiens
  MAP TO AL139152.1; EXPRESSED IN BRAIN, SIGNAL =   1; EXPRESSED IN HELA, SIGNAL = 0.67; EXPRESSED IN FETAL LIVER, SIGNAL = 0.95; EXPRESSED IN PLACENTA, SIGNAL = 1.4; EXPRESSED IN LUNG, SIGNAL = 1.2; EXPRESSED IN BONE MARROW, SIGNAL =   1; SWISSPROT HIT: P25580, EVALUE 2.10e+00; NT HIT: gi14729372, EVALUE 1.00e-126; EST_HUMAN HIT: AW393468.1, EVALUE 1.00e-119
catggaagaggaagcctcagctctggagagatgcaaagcatgaaaaaaaacaaaaatggtgggagaatgagataacatcaaaggaagaaagggcacaaggaaagagtgcacctaaagctacagatgtgattacctctgtgccttgggcttcaaggccagggaagctgcacgctgatctcacaagagacactatctttttgaccagcagcttgccctccgcaatctgctgtcttagggcactgtagtcatcaatgtggccaatgacatggcggccatgcttactggcaaaggagccatcagtagcatcaccctccagcttgggaggggtcttcattactggagaagtatccaaacccaagcctgaaaaagaaaatgacaacacaacagaatcttctgttattcatagtgatatcatcagtttactccaactcaaaagaggtaggaaacaagaaaaggacgaggccgggaacaagaaaggaagccttggaatgtacaagggtggggcaaagtccatagag

SEQ ID NO: 93 - DNA, 579 bp, Homo sapiens
  MAP TO AC015938.3; EXPRESSED IN PLACENTA, SIGNAL = 3.8; EXPRESSED IN BRAIN, SIGNAL = 3.9; EXPRESSED IN HELA, SIGNAL = 2.4; EXPRESSED IN ADULT LIVER, SIGNAL = 3.3; EXPRESSED IN FETAL LIVER, SIGNAL = 3.4; EXPRESSED IN HEART, SIGNAL = 3.4; EXPRESSED IN BONE MARROW, SIGNAL = 3.9; EST_HUMAN HIT: BG400226.1, EVALUE 1.30e-02; SWISSPROT HIT: Q14562, EVALUE 5.70e-02
ctgcagccttaggagctctggccaggagatctccaagagaaagctggagcgaaagaaagggacagatggagacagagacagaaagacagagagaaacagagagagagggaatatggagaggaaggagcacgtgggaagccggcaggccaggaccctagagagagacagaggcgtctgggagtggactggctcctctcccggctcctgccactgcccctcagctcctgacttcctgggagtggggggccttgggtgaggcaggtgatataggaggaaggtggccctacctgagaccccagggtggcctggaggagtggctggggctggaggacaagcagagtgggcctggaaagtccttggaggtcagcaggcagggaggtcccagtccactccctggtcactctgagttgctcctgtgcatgttacagcatcaggatcatcacagatgagccggggagcctcctggcggccaagaggatgagggtgtgagatcccaagatcagaaaggagagacctgcgggagacagagaaagggaaaagtcaagagtgagaaaagaaaggagagggaagagaaggacg

SEQ ID NO: 94 - DNA, 588 bp, Homo sapiens
  MAP TO AC011165.3; EXPRESSED IN HEART, SIGNAL =   5; EXPRESSED IN PLACENTA, SIGNAL = 6.8; EXPRESSED IN LUNG, SIGNAL = 6.4; EXPRESSED IN HELA, SIGNAL =   3; EXPRESSED IN BRAIN, SIGNAL = 6.1; EXPRESSED IN ADULT LIVER, SIGNAL = 5.7; EXPRESSED IN FETAL LIVER, SIGNAL = 5.9; EXPRESSED IN BONE MARROW, SIGNAL =   6; EST_HUMAN HIT: T07852.1, EVALUE 8.30e-01; SWISSPROT HIT: Q57813, EVALUE 4.30e+00; NT HIT: L13856.1, EVALUE 1.40e-01
cagcttggctttactcctggtagccttttctgggctcagctccaagtcaagggtcaggatcaggtctactttatatgtcttgtcattgtgggatccaggattgaacatactgaatgtcttgtccatttatgctccattggtaaaaataaatttcatggccaagttcacaatcaatgagcacagagacagagatgactatttgctgaataatacaatctatcacagttaccctcctgttcaccacgtttcctctatttatcttgcacataaatatactcactttatcttcaaggaagaatccccaaagtttcatcctattagatcatcagactcaaagttttggctcctacaatagtatctgcaacaatatttctagatatggcttttcttaatctggagaattataaaccagaaaaaggaggaatagaaggaggaggataaggagaagttgaagcagaagtataaggtgaatttgaaggagaagaaggatgagaaaaaggagaagaaagaggaagagaaggagaggggtaagtaagagaaaggtaaggaagaggagaaggaagcagtggaggaggaggaggaaggaga

SEQ ID NO: 95 - DNA, 592 bp, Homo sapiens
  MAP TO CHR22_151.0; EXPRESSED IN BONE MARROW, SIGNAL =  22; EXPRESSED IN BRAIN, SIGNAL = 0.69; EXPRESSED IN LUNG, SIGNAL =  11; EXPRESSED IN FETAL LIVER, SIGNAL = 0.99; SWISSPROT HIT: P15814, EVALUE 3.00e-53; EST_HUMAN HIT: W73790.1, EVALUE 0.00e+00; NT HIT: gi14777898, EVALUE 0.00e+00
ctccctctgccatctctcaccccctcctctgtccacacaggtcagcccaaggccaccccctcggtcactctgttcctgccgtcctctgaggagctccaagccaacaaggccacactggtgtgtctcatgaatgacttctatctgggaatcttgacggtgacctggaaggcagatggtacccccatcacccagggcgtggagatgaccacgccctccaaacagagcaacagcaagtacatggccagcagctacctgagcctgacgcccgagcagtggaggtcccgcagaagctacagctgccaggtcatgcatgaagggagcactgcagagaagacggtggcccctgcagaatgttcataggttcccagcccccaccccacccacaggggcctggagctgcaggatcccaggggaggcgtctctctctgcatcccaagccatccagcccttctccctgtacccagtaaaccctcagtaaatatcctctttgtcaaccagaaatcctgctccctctcttcatttcttatctctcatataatgtgatgcttctcctgggttctcagtgtggcgctgggagaatgctgacaccagt

SEQ ID NO: 96 - DNA, 517 bp, Homo sapiens
  MAP TO AC011792.5; EXPRESSED IN ADULT LIVER, SIGNAL = 0.84; EXPRESSED IN HELA, SIGNAL = 0.69; EXPRESSED IN FETAL LIVER, SIGNAL = 0.78; EXPRESSED IN BONE MARROW, SIGNAL = 0.83; EXPRESSED IN PLACENTA, SIGNAL =   1; EXPRESSED IN BRAIN, SIGNAL = 0.96; EXPRESSED IN LUNG, SIGNAL = 0.97; EST_HUMAN HIT: AW895129.1, EVALUE 1.00e-08; SWISSPROT HIT: O65403, EVALUE 1.60e+00; NT HIT: AJ229042.1, EVALUE 1.00e-07
ataatctcttgtgggcacggggggtcataaggatggggcagaaaaagacgtgcataggtagatagaagttatcaacaatgattggttttggagtcacatgatatgttcacaggtatgaattttatgattttttcttatccatgtttacttacatacacaactgttgctatgggttgaaacggtcctctaaatttcatgtgctggaaactaaatctccaaattaatatgttgattggaggtggggtctttgggaggtaactgagattagataaggtctgaatcaaggtggggctcccatgaggggattaatggctttttaaagagaagaaaagtgacttgagctagcacatttcctctgtctcaccaagtgatacccctgccatgttatgatgcagcaagaagaccttcaccagaagccgagcaggtaccagcaccatgcccttggacttctcaacttccagaactgcaagaaataaatctcttttctttataaattacccaggttgtggtatcctgt

SEQ ID NO: 97 - DNA, 562 bp, Homo sapiens
  MAP TO AJ239319.2; EXPRESSED IN BRAIN, SIGNAL = 1.1; EXPRESSED IN FETAL LIVER, SIGNAL = 1.1; EXPRESSED IN PLACENTA, SIGNAL = 1.3; EXPRESSED IN LUNG, SIGNAL = 1.4; EXPRESSED IN BONE MARROW, SIGNAL = 1.2; NT HIT: gi14759113, EVALUE 0.00e+00; EST_HUMAN HIT: BE379540.1, EVALUE 0.00e+00; SWISSPROT HIT: Q14202, EVALUE 3.00e-43
caccctctcatttcctcagcttccgcccctcctccaggatcaatgaccacagagccaaatactctgactctctccctacatcactctctcgcccagctccatcctgctaggttcttaccaacagtctctgtcttactcatactcctgcccagatccctgccctctgcatagcccccaagaccctcacgcacttcttgcagaaggtacaggtctttttgcccgagggcttcttggagaaagtggtgaggcaggatgacgagcagaagagctgaggcagccccttgcgctgataggcagtctgccccttctgcagtggtgtccggcaatgtgcacaagtcatcttggtgcccactgcagagcgcccggccctttgtgacacacttgagcgtagggacatgcgaggagagcgccggggccggaatggcacaaagtcctcatcattggggtcatctaccatggcatcagaatcctcatctgacactggaactgagaaagtggggggatggacatgagaaaggccaccaaaccaggtctccaaccatcccctgaccaacagttcagt

SEQ ID NO: 98 - DNA, 575 bp, Homo sapiens
  MAP TO CHR22_104.0; EXPRESSED IN PLACENTA, SIGNAL =   3; EXPRESSED IN HELA, SIGNAL = 8.1; EXPRESSED IN BRAIN, SIGNAL = 5.9; EXPRESSED IN FETAL LIVER, SIGNAL = 5.9; SWISSPROT HIT: P41157, EVALUE 1.90e+00
atttggactcgctgtcaaccaactgaaatctagagggaatctctaactagcagccaggatatgttcttgggcgggggccacctcacaagttcccacttatttcaagttgattacactcacaaggactaccactgctgtcagcagaatccaaatgttcctcccctcctttttccagtcttaataacaaagtcatcaggtccaaatgctctcaaacctctcaacctttgccctggcagatcctgcgtacaaagatgctggcatgacgatgacacagcaccagcctcagaagcaaagggccacagtttcaccagttagagatgtgggaaagtctgagctcagtgtaaaaccaaacactgcgggtgtccaggagggtcacgtggaagtcaagtttaaaggaccccagatgacatccgttgtatagagcacaatttcacgcctctaaacctctgcccatgctgttccctcgatcaggggcaaaccactgttccccagaccatagttacctggcaaacacctgctcagccttcaagacttagaactcagactctttggtctcgaactcctgcttctcagct

SEQ ID NO: 99 - DNA, 591 bp, Homo sapiens
  MAP TO AL160313.1; EXPRESSED IN PLACENTA, SIGNAL = 1.1; EXPRESSED IN BONE MARROW, SIGNAL = 0.45; EXPRESSED IN LUNG, SIGNAL = 0.55; EXPRESSED IN BRAIN, SIGNAL = 0.67; EXPRESSED IN FETAL LIVER, SIGNAL = 0.77; SWISSPROT HIT: Q99102, EVALUE 3.40e-02; NT HIT: U02278.1, EVALUE 8.80e+00; EST_HUMAN HIT: BE007834.1, EVALUE 7.00e-63
tgctcattcacctgctcatctgcatactcacttgctcacgcattcacctgctcacctgcacacctacctgctcactcattcacctgttcacctgcttgcttgttcatgtgaccttccccccactgcctccaatcccgtgtggcctctggcaggatgcgcatactggtggtgtgaacttggtggccaatctctagtgtctgtccagccccagtgctccgtgtacgctgtgaccctcaccccaccccaggactccgttagggctgggagggcatctcctctgccgcatatggaattagcattggtttgtcattatgtcacaagcagctagtggttccagtacttcatgctctacaaaacctcaactttagaatagagaagaggctatgcgctgtatgggtgataccacattggctttggatcaccttgcagtgtgcatgcctgcactgggtaatgttggcagtgatgtggtagcctttgctggattggtgatggaggctggtgccagcagcttggtcgagctggacccaggtgagcagtcgtatattggaggagtgtggcctgggcaccccaggcctgttatggtaccgctgt

SEQ ID NO: 100 - DNA, 511 bp, Homo sapiens
  MAP TO AC015930.3; EXPRESSED IN HEART, SIGNAL = 5.2; EXPRESSED IN PLACENTA, SIGNAL = 7.8; EXPRESSED IN LUNG, SIGNAL = 6.4; EXPRESSED IN BONE MARROW, SIGNAL = 5.8; EXPRESSED IN BRAIN, SIGNAL = 6.8; EXPRESSED IN HELA, SIGNAL = 4.8; EXPRESSED IN FETAL LIVER, SIGNAL = 5.9; SWISSPROT HIT: P03981, EVALUE 1.90e-01; NT HIT: AF224669.1, EVALUE 5.00e-10; EST_HUMAN HIT: AI202752.1, EVALUE 3.00e-65
gtaaggaactggggagggagggtaaacaggtttaggactggctagtctgagtaacttcaacaggctctagggtacaggagctatctagagttgtcaagtacttggccctggggtggggagggcaggtggatagtggcctagagtgtgagcctcacatctggaaggtggttggggtgttgtctctggattggttggtttgcatttgaaaggcatgctcccaggcagggtatttaccatctgtaggaactgactcaccaggggtgggaggggccattcctccaggattagcacggccccagatgtcaaagcaccagaatccagaatataaaaaggcttgcttagtacagctgctcaagagtactaacccttcccctcaccttgaaggcactgttggtattgagagaagaaaactcccccagatgaacttcgtgattcttatcacaggaaattaagtctacattaggcttagaaatgtctgtaaagtcatagtacaggatgtgtgaccaagcag

SEQ ID NO: 101 - DNA, 531 bp, Homo sapiens
  MAP TO AL137062.3; EXPRESSED IN FETAL LIVER, SIGNAL = 0.61; EXPRESSED IN PLACENTA, SIGNAL = 0.83; EXPRESSED IN LUNG, SIGNAL = 0.8; EXPRESSED IN ADULT LIVER, SIGNAL = 0.77; EXPRESSED IN BRAIN, SIGNAL = 0.69; EST_HUMAN HIT: AW851117.1, EVALUE 4.00e-18; NT HIT: AL163268.2, EVALUE 1.30e-01
cagtcagggtgcttcctctctccgtcagttggccttgctgaacttgccaatggaaattccttcagaatttctcaaattgagaggagccattcccactgtcggtatccacaaaagacactcacctatccacatgcagaagtcaaatttgaaaggctgttcttcctaggcaatcagaaatgtggttggggctggcagcagcaatgctaaatagaaagactaaaacccacatcctgcctaaaacacataggctgctgcttagggttgcggaaattctcccaactggtgacagccaagccaagagcaatgtcttcctgatgagggaaccaaaatctgttactgaaatgccagaggttcagcctaggtcccgttactcattgcacagaatgccaatcactgaggcaagtatttccaggggagatgactttattcagttgctgcagctgagaagaactgcagatcagtctcaaattcatctccccaagtgactgaaattgggggtttacatagcagaggagggatgtagctacgtgc

SEQ ID NO: 102 - DNA, 599 bp, Homo sapiens
  MAP TO AL137013.2; EXPRESSED IN HELA, SIGNAL = 0.93; EXPRESSED IN FETAL LIVER, SIGNAL = 2.1; EXPRESSED IN PLACENTA, SIGNAL = 1.6; EXPRESSED IN LUNG, SIGNAL = 1.4; EXPRESSED IN BONE MARROW, SIGNAL = 1.2; EXPRESSED IN ADULT LIVER, SIGNAL = 1.5; EXPRESSED IN BRAIN, SIGNAL = 1.3; EST_HUMAN HIT: AW104616.1, EVALUE 1.00e-52; SWISSPROT HIT: P30619, EVALUE 2.60e+00
cacaaagctggtaaggagcctcccaagctgcaatctaatcttatctaaactacccatggttactaaacaaatatggccatacttgctctccaccatccagaggacacttatgaggttgacatgcttataaaatctttctggacactatttactcaccacattacattggttgtattaatgtggacttcatagtctttgaccccacttaccttggttgtcatcctcgttgtcttcccaggtttcttcatttgctagcagtgggttctgtgactcattcatagacctcatagggaaggagtgtccatcaccagggctgatgggaaaagaaaggcagtgacctattgcagctgacatagacttttgtgaaggttataatcctcttaaaaacaagaggggggttcttagccatatttagtctcattgtctaaagccatggtggaatgggctcttacaatagcattatttagttgctatattgctctcgatttccatatcttatttgtgtgtctgcatcagtgttaacttcttgtttgtaagaactctatagtttgcttcccaaaatgcccagtatggcaatatgcacacacagcaagcttcat

SEQ ID NO: 103 - DNA, 584 bp, Homo sapiens
  MAP TO AL136317.2; EXPRESSED IN BRAIN, SIGNAL = 1.9; EXPRESSED IN HEART, SIGNAL = 1.5; EXPRESSED IN HELA, SIGNAL = 0.76; EXPRESSED IN PLACENTA, SIGNAL =   2; EXPRESSED IN LUNG, SIGNAL = 1.6; EXPRESSED IN ADULT LIVER, SIGNAL = 1.5; EXPRESSED IN FETAL LIVER, SIGNAL = 1.7; EXPRESSED IN BONE MARROW, SIGNAL = 1.7; EST_HUMAN HIT: BF112103.1, EVALUE 2.00e-13; NT HIT: AJ001684.1, EVALUE 2.00e-13
ttagcttctctgggccacactgcaagaagacgaattgtcttgggccacatataaaatgcactaacactaacgatagctgacaagctaaagaaaaaaaaatcaccaaaaaaaatcccataatgtttttaaaagtttaccaatttctattgggcctcattcaaagctgtcctggactgtgtgtggcctttgggctgtgggttggacaagcttattctagaaagtgaaaagtttcatgggaattgacagttgtagattaaatgatcacttactatcagttaagaaagaaatttctctcttcattaccactcctatttccagacttcagtcctagagtggtcagtagaagcagttatccaataggagagggggtaagtaaggtgaaaactgctgaaaaggaaaagaaaccaagaatgaccccttcccacagcctacagatgaaagaggtaggggagaaaacatatctgaattatattttaattaaaatatagaaattcatattataatttctgaaataaaattgtggtttacaacataatataactatctgttaaataccaataaccaaaagaagtcatgaaagctgc

SEQ ID NO: 104 - DNA, 570 bp, Homo sapiens
  MAP TO AL031602.14; EXPRESSED IN HELA, SIGNAL = 1.6; EXPRESSED IN LUNG, SIGNAL = 3.3; EXPRESSED IN FETAL LIVER, SIGNAL = 3.1; EXPRESSED IN PLACENTA, SIGNAL = 3.5; EXPRESSED IN ADULT LIVER, SIGNAL = 3.1; EXPRESSED IN BONE MARROW, SIGNAL =   3; EXPRESSED IN BRAIN, SIGNAL = 2.7; EXPRESSED IN HEART, SIGNAL = 2.2; SWISSPROT HIT: Q9NV58, EVALUE 1.00e-26; EST_HUMAN HIT: AA340392.1, EVALUE 4.00e-86; NT HIT: AF071560.1, EVALUE 5.00e-26
gtcctttgctctcccttgtgtaatgtattcatttcccataaactcttctgttaatccttactgaaaagaaggctgttgctgttatcaagccctatgataatactagctgtatttgtaatgttgacattaacttcagtctgtttcccctgcagcccctctggctgtacattctggggcaagaagccatggagccgtaagaagaaaattctttggcagctgggcacgttgattggtgctccagtggggatttctctcattgctggcattgccattcctgccatggtcattggcattcctgtttatgttggaaggaaggtaagaaagacatgctggtttctgtgcttgtttcaactttaggttcgttagtaaaggtttgagggaaatgggaaggagctatgtttcagagctgcctgaaaaccagctggttcttagataaaaataaccttactttcttaaatggattttcataaacccccatgagatctgaaagttcttattaacatcctgggcctggcttgtctcagtgacttaaaggtagaatgctgggccaggcatgatggttcacatttg

SEQ ID NO: 105 - DNA, 543 bp, Homo sapiens
  MAP TO AL136303.3; EXPRESSED IN BRAIN, SIGNAL = 1.9; EXPRESSED IN FETAL LIVER, SIGNAL = 1.8; EXPRESSED IN BONE MARROW, SIGNAL =   2; EXPRESSED IN HEART, SIGNAL = 1.6; EXPRESSED IN PLACENTA, SIGNAL = 2.1; EXPRESSED IN LUNG, SIGNAL =   2; EXPRESSED IN ADULT LIVER, SIGNAL = 2.1; NT HIT: AL163247.2, EVALUE 3.00e-05; EST_HUMAN HIT: AI792018.1, EVALUE 1.00e-14; SWISSPROT HIT: P08547, EVALUE 2.00e-21
aacatttgtgggatgcagtggaagcattgcttagagcattgtatgcatatattagaaaagaaaaaagatctaaaaatcaatcatctaagcttccaccttaggagactagaaaaacagcaaattaaatcaaaagtaagcagaagaaaataatgaaaattagaacagaaatcaatgaaattcgaaacaggaactcaatagagaaaatcaataaagccaaaagctggtttatcgaaaagaccaataaaattaataaactccttgccaggttactaaaaaagggggagaaaagaaaaattgccaacagaaatgaaagagtgggcatcactacagatctcatggacattaaaaacataataaaggcatattattaacaactcaatggccacaaatttagtaacctagatgaaatggagcaatttcttgataacgcaatcaaccagacttatacaaggagaaatagattatgtgcataagcctgtacctattaaagatactgaatcatttgttggtaatcacccaaaatggaaagcacaccatcacaaa

SEQ ID NO: 106 - DNA, 587 bp, Homo sapiens
  MAP TO AC021619.3; EXPRESSED IN BONE MARROW, SIGNAL = 3.7; EXPRESSED IN HELA, SIGNAL = 3.5; EXPRESSED IN BRAIN, SIGNAL = 3.7; EXPRESSED IN HEART, SIGNAL = 3.5; EXPRESSED IN FETAL LIVER, SIGNAL = 3.2; EXPRESSED IN PLACENTA, SIGNAL =   4; EXPRESSED IN LUNG, SIGNAL = 3.6; EXPRESSED IN ADULT LIVER, SIGNAL = 3.2; NT HIT: gi16157562, EVALUE 0.00e+00; EST_HUMAN HIT: BI197717.1, EVALUE 0.00e+00; SWISSPROT HIT: P24152, EVALUE 1.00e-05
ggacttggagcaggtctctgtaatggtggtctaaaacctggagctttggaagtatcagactgatgtaaaggatctgaatttggcaaatatgaggattttcctgatagcatagattctggtgttgactgagatgaaacaacagatcctccccagaaggcatgagcagaagtagggctgttttcaaacaatgtgctaaagggcccaaatggtaagggggcactgaaattgggagcaataggcttatttgctggatgtactgaattctgacaagcactttgtgtacttaaggtcgaaggtagctggacagaagagggaacactgtgaggtcttttaatgtgattgacactgaggactgcaacagatgaattttgcactgaagctgaattcttgtgaggggcagttgtgccatgagggggtggtctaatagcaggggtttccattttaggagtaggctgggggcatcccattggtgtctgaggcatagggtaagtcactggggcagtagaaggcaccgccactggagcagaacttgttgctaaaggaggaacagtcattctaacttccgggggaggaacctgagactgctg

SEQ ID NO: 107 - DNA, 564 bp, Homo sapiens
  MAP TO AL133476.4; EXPRESSED IN BONE MARROW, SIGNAL = 2.7; EXPRESSED IN HEART, SIGNAL = 1.9; EXPRESSED IN BRAIN, SIGNAL = 2.4; EXPRESSED IN LUNG, SIGNAL = 3.1; EXPRESSED IN HELA, SIGNAL = 1.6; EXPRESSED IN FETAL LIVER, SIGNAL = 2.7; EXPRESSED IN PLACENTA, SIGNAL = 2.9; EXPRESSED IN ADULT LIVER, SIGNAL = 3.1; SWISSPROT HIT: P06752, EVALUE 2.00e-03; NT HIT: AL163203.2, EVALUE 1.00e-105; EST_HUMAN HIT: AV703249.1, EVALUE 1.00e-103
ttgtaaagcgagagaagcccattataggtctttcaactctcacgtctatttagacacaattaaagtcccacggggaataccagatcaatttaaagcccaaaatcaaatagctgcaggatttgagtcaatattttggtgggtgacaattaataaaatgtagattggataaactacatctattacaatcaacagcgatttattaactacattagagatgctgttaaaggaatagctgagcaattaggggctaatagccaggtggcttgggaaaataggatagccttagacatgatattagcagaaagaagaggagtttgcgtcatgattaaaactcagcgttacaccttcatcccaaacaccaccacccgtaataaaagtataacaaaagcattgcaaggtctgactgctctatccaatgagttagccagcaactcaggggtaaatgacccctttacaggatggctaaaaaaaagttcggtagatggaatgatagcctcaagtcttacttctctcacagctgtaataggtgtatttattcttgtcaggtgctgtgtcataccatgc

SEQ ID NO: 108 - DNA, 572 bp, Homo sapiens
  MAP TO AL139177.1; EXPRESSED IN HEART, SIGNAL =   2; EXPRESSED IN LUNG, SIGNAL = 2.8; EXPRESSED IN ADULT LIVER, SIGNAL = 2.7; EXPRESSED IN BONE MARROW, SIGNAL = 2.5; EXPRESSED IN PLACENTA, SIGNAL = 3.7; EXPRESSED IN BRAIN, SIGNAL = 2.4; EXPRESSED IN FETAL LIVER, SIGNAL = 2.4; SWISSPROT HIT: Q22811, EVALUE 1.10e-02; NT HIT: gi15668172, EVALUE 8.50e+00
ttcaccactgaaatcctggacaattttctaagagctctttttacaagtaggcttcataaatagccaggacattgaggatttaattatgaaatcagaatgcttgattcacgaccctcttttcagagccaaatacctcttcattctcagactcactgtcttgaaagtgcaatcacaagcacttaccttgtttatttcccagtcttcctccaacttttccactgtagctgattcctgagtagactcctgcacatcagaagtggcctgcttctctctgcctggcagagtaaactttcctttcttttctgttgagcgttttgatttgagaatgttgttgagacaacattccatctcctgcttagcagatgcaagcctgttttccaaatctttttgtttacactgaagtgattttatatcatctttaataatcttctgccccactgaagatgtattttgcttgacggattttgctaaagctaaaatcttctttaatgtgccatcttgtaaactgagtctattctctagttcctacgagtggagaaaagattgttatatctccattcaattgccacaaa

SEQ ID NO: 109 - DNA, 561 bp, Homo sapiens
  MAP TO AL138499.1; EXPRESSED IN FETAL LIVER, SIGNAL = 0.97; EXPRESSED IN BONE MARROW, SIGNAL = 0.89; EXPRESSED IN BRAIN, SIGNAL = 1.1; EXPRESSED IN PLACENTA, SIGNAL =   1; EXPRESSED IN LUNG, SIGNAL = 1.3; EXPRESSED IN ADULT LIVER, SIGNAL = 1.3; EST_HUMAN HIT: AI056964.1, EVALUE 0.00e+00; NT HIT: gi15300836, EVALUE 6.00e-44
ttcaatcagctggtctgtgagtactacccaaaatatacttttttcagtgtctaagatttttgctttttatggtcatgtaacattttcatttagagttctgattaatttattatcagattaaaaggaaaagaggaacagatgaataccatgaaggctgttttggaagagaaagagaaagacctagccaatacagggaagtggttacaggtgagaaattaaaaacaataaaaaatagcctttttatacttgactatcaatttaatttacacctattctttttaaggatcttcaagaagaaaatgaatctttaaaagcacatgttcaggaagtagcacaacataacttgaaagaggtatagtataaacaaattaccaacatgttacataaggaatgataaatctttgtttaaggcattagaaagtaaagatgttaatatgttctgagtttctttgccagaaaaattatgttgtaccatagttttgttgttgtttaaataagttagcttttatttctggcaagtcatacttaactgcttaatctgtcaacctgagcctacaagca

SEQ ID NO: 110 - DNA, 512 bp, Homo sapiens
  MAP TO CHR22_88.0; EXPRESSED IN BRAIN, SIGNAL = 0.45; EXPRESSED IN PLACENTA, SIGNAL = 0.56; EXPRESSED IN HELA, SIGNAL = 0.6; EXPRESSED IN BONE MARROW, SIGNAL = 0.42; EST_HUMAN HIT: AU118263.1, EVALUE 1.00e-36; SWISSPROT HIT: P35626, EVALUE 1.00e-08; NT HIT: gi14777914, EVALUE 8.00e-37
gtctgtcctgtgcttcatggctttactcttagaaatccttgtggttctcagaagcccagaagctggtggactcacctcctgcccttgagaggcatgctgttgtggctgcgcaacagtccttggtacagtgaaaaggaaatgcttttaatgctgatgaactgttcccaacattcctgtgttacctgccccatgtttcattttctaatgagtagaatccttcgcctctgtcattaccactttgctgctgaagttaacatgaaagatattattctcagtatcatgccccactttgatgtgatgggctaaagctataatttgtgtttaggaacaaactatgataaaatagtgagatatcaggtgtctgcactcaaagttctcaaagcctgcatggcatttggggcactcttattaaagattattctctttctgtttagccagcaaatattctcttggatgaacatggacacgcaagaatatcagatcttggtcttgcctgcgatttttccaaaaag

SEQ ID NO: 111 - DNA, 591 bp, Homo sapiens
  MAP TO AL135926.3; EXPRESSED IN BRAIN, SIGNAL = 2.6; EXPRESSED IN BONE MARROW, SIGNAL =   6; EXPRESSED IN LUNG, SIGNAL =  16; EXPRESSED IN ADULT LIVER, SIGNAL =  20; EST_HUMAN HIT: AW582267.1, EVALUE 0.00e+00; SWISSPROT HIT: P47915, EVALUE 3.00e-31; NT HIT: gi4506628, EVALUE 0.00e+00
acacaacctgagacccttggcaatgcgggcacaagcacacttcccaagcttggggtgggtaatgtaggcaaattgattgagcttgaggctgacaccctttggcatctgggcttaacctcctttggctttatgaggaccttgatagcctcagtacgtgcactcatggccttggcattgttggcctgcatcttctttaggcccttcttgttgcacttcttggcaaagcccatgttcctcaggaacttggggtccacccccttaagagattcatatctttgcaatcggggtttcttgatgccattctgtgccattttcgggactggttgtgtgtggtgtggttcttggacttggccttgtctgcactgtaacacccagctcccaaagcacctggaaccagaagagaccatattatttttatactgtaagcttctgagggaaaagccctatgaaatcattttggctggcaagactacaccaacacaagactacattatttacgtgtcagtgattttcatggacaaccagaaataagtggcaatttattcataatttctattactgactatccattccattttcctttgcatccag

SEQ ID NO: 112 - DNA, 543 bp, Homo sapiens
  MAP TO AC015937.3; EXPRESSED IN HELA, SIGNAL = 1.4; EXPRESSED IN BRAIN, SIGNAL =   1; EXPRESSED IN FETAL LIVER, SIGNAL = 0.7; EXPRESSED IN PLACENTA, SIGNAL = 0.82; EXPRESSED IN BONE MARROW, SIGNAL = 0.62; EST_HUMAN HIT: BI523546.1, EVALUE 2.00e-81; SWISSPROT HIT: Q14168, EVALUE 1.00e-21; NT HIT: gi4885492, EVALUE 6.00e-81
tgggaagagaagggacaatggggcagtgtcccgggtctcttcccatcccagatccaacttcctgctggcccatccaacagcagcatgccccagtccacccacctcctgctccctcaccccagccctagcagccaggaacctggaagtggggctcctggaggatgtgggccagctcggcggctgtgctgctctgctcagccagctgcgccaggtcccgcaggatctcctgcaccagctccaggttgttgtctctcacggcctccagcttcgtctcctccagcctctcatgggcctgggggtggaagcagaacaggtggggctaggagcttccccaggagccctgggacaccaagcagggtcctccctcagcccccaggcattttccccatcccaccccccagcccccagcttcagctcctcactcactgacaatcatacccacacgtgcacatgcattccttgctgtctcctttcttccccaaaattactaggacctagtttagggaaggaagaaaccaaaggacaaaccttcctttccatccc

SEQ ID NO: 113 - DNA, 543 bp, Homo sapiens
  MAP TO AL137863.3; EXPRESSED IN BRAIN, SIGNAL = 3.8; EXPRESSED IN ADULT LIVER, SIGNAL = 4.2; EXPRESSED IN BONE MARROW, SIGNAL = 4.1; EXPRESSED IN LUNG, SIGNAL = 4.3; EXPRESSED IN PLACENTA, SIGNAL = 4.6; EXPRESSED IN HELA, SIGNAL =   2; EXPRESSED IN FETAL LIVER, SIGNAL = 3.6; EXPRESSED IN HEART, SIGNAL = 3.2; NT HIT: L38403.1, EVALUE 8.10e+00; EST_HUMAN HIT: AV760011.1, EVALUE 7.60e-01; SWISSPROT HIT: P44287, EVALUE 3.40e-01
taaatgctggcaaaaccctctccttgcaaaataaagcacaatgctgacaaaggacttaaatagtgaggcaatgcacactttccccttaaccatagttctaaaatctccttgtaactaacagagcttaccattaggatgtccattctctacctgtcaccattcaacttactgttgtacagttcttttcaagtcactggtcggaatgagtcaacatctgtgaaatcttccttgattcctaggaagaactagtcatattttactctgcttcccatagcacttaacacatttctctatgtgggttctcatactggtagattataattctttgttcaggaatttcatttctcaactgggctatgatgccttgaaagcaaggcccctggcttattctttttctctgttgtgcctcatacagtatctggtatacatgtttgtggaataaatcaaggcccatgagctctgtctcatgacagaggtcctgaaaataattattaagatttaaattttttctgtaacgaatcaactgggattgcaactatgcac

SEQ ID NO: 114 - DNA, 520 bp, Homo sapiens
  MAP TO CHR22_153.0; EXPRESSED IN BONE MARROW, SIGNAL = 0.43; EXPRESSED IN BRAIN, SIGNAL = 0.32; EXPRESSED IN HELA, SIGNAL =   2; EXPRESSED IN FETAL LIVER, SIGNAL = 0.38; NT HIT: gi14776874, EVALUE 1.00e-121; EST_HUMAN HIT: AW500988.1, EVALUE 1.00e-106
tcggagctgatgatcttgtgagtggccttgggtagggggcgtcagcgctatgcttgtcacagccggcatggaggtccttccagatttgggggtgaggggtggtccccagtcactgtggcttgtctccctcctgccctgcctcctcagtgcccgggagctggagctggaagaccggcagagtcgactgcagcaggagctccgggaacgcatggcagtggaaggtgagtggggtaaggcacccatggaggccagggtgggtgccacctccaggcccctcacctcatgccttcttctccttcaagatcaccttaagactgaggaggagctgtcagaagagaagcagattctcaatgagatgctggaggtggtggagcagagagactcactggtggcgctgctggaggagcagcggctccgggagagagaggaggacaaggacctggaggctgccatgctgtccaagggcttcagccttaactggtcctgagctcccacccaacgctccattttctgttggcat

SEQ ID NO: 115 - DNA, 502 bp, Homo sapiens
  MAP TO AL137062.3; EXPRESSED IN ADULT LIVER, SIGNAL = 1.1; EXPRESSED IN BONE MARROW, SIGNAL = 1.2; EXPRESSED IN BRAIN, SIGNAL = 1.1; EXPRESSED IN HELA, SIGNAL = 0.68; EXPRESSED IN PLACENTA, SIGNAL = 1.2; EXPRESSED IN FETAL LIVER, SIGNAL =   1; EXPRESSED IN LUNG, SIGNAL = 1.2; NT HIT: D14547.1, EVALUE 3.00e-08; EST_HUMAN HIT: AA782604.1, EVALUE 1.00e-11; SWISSPROT HIT: Q07108, EVALUE 6.00e-06
ttcatcctcattctggggaggggggaagctaacttacgggcctcaaactgtggaagcaaaaagtaaaattaatacacctgaatgagtagaaacactttttaacatatgctttatctgatcatttctttctttttttttcagccacatggtccaagcatgctaaacctgtggcatgttcaggggactggcttggagtgagagataagtgtttctatttttctgatgataccagaaattggacagccagtaaaatattttgtagtttgcagaaagcagaacttgctcagattgatacacaagaagacatggtaagaaaacagaaaagtcttcagtaatttcagagattatttgtataaaaacataataaaacaataatagctaatactataatacaattgatccttgaacaacatgggtttgaactatgtgggttcacttatacctggattatttttcctctgccacccttgagacagcaagagcaaaccctcctcttcttccc

SEQ ID NO: 116 - DNA, 528 bp, Homo sapiens
  MAP TO AL137008.1; EXPRESSED IN BONE MARROW, SIGNAL = 0.94; EXPRESSED IN BRAIN, SIGNAL = 1.1; EXPRESSED IN HELA, SIGNAL = 0.81; EXPRESSED IN FETAL LIVER, SIGNAL = 0.89; EXPRESSED IN ADULT LIVER, SIGNAL = 0.33; SWISSPROT HIT: P16788, EVALUE 3.70e+00; NT HIT: AF267747.1, EVALUE 7.80e+00
aatctgagcagggcttgatgggggcagcttatgtttgttgcacttcatgtccagtgaggtggctcaagagctggggctggtgttatctgagggctctctcacttgcctgcctgatgcccaggctgggagacccaaacagctggggctggaacaactgtgcttcctcaggcatcctttgctctctgtgtagcctcttctcatggtgtatcccgtgtggaagcttcagaagatccagacttcttatacgtgaacttaaggttcccaaggcttgtggctggcaaagagcagggatggggagggagagaggaaactgtatcacctttcatgacagccttagaagtacacagagtcactagccagtccatttttacagggggtggcggaggactagaatccattcaccttgttggagggagtgtgagtcaaagaggttctgaatattttttaaaactaccaggggacctaacaaactaaacagttagcaactgaatagttgaataaataaatagggaagggcaaatcactctt

SEQ ID NO: 117 - DNA, 531 bp, Homo sapiens
  MAP TO AL136084.2; EXPRESSED IN HELA, SIGNAL = 3.1; EXPRESSED IN FETAL LIVER, SIGNAL = 1.5; EXPRESSED IN LUNG, SIGNAL = 1.1; EXPRESSED IN BONE MARROW, SIGNAL = 1.6; EXPRESSED IN BRAIN, SIGNAL = 1.8; SWISSPROT HIT: Q29121, EVALUE 6.00e-09; NT HIT: gi14738925, EVALUE 1.00e-103; EST_HUMAN HIT: AA429393.1, EVALUE 1.00e-98
ttgttttaaagccctccgtggcccccagatctcccccatggtggtcacctgccagggctctgacacggctgcagacacctggaataagagaagcaggtctttctcagatgttcctccctcttattggaaggaagacaagaattcacccttgaatttcccaattgtcttcctgctgcccgtctgcataggagagacggatggatgtcttgggtgctttcaggatccatgaagaggagtcggcagtggtgtgcccggtgattgatgtgatcgactggaacaccttcgaatacctggggaactccggggagccccagatcggcggtttcgactggaggctggtgttcacgtggcacacagttcctgagagggagaggatacggatgcaatcccccgtcgatgtcatcaggtcaggagctgacttctgggtgacttgttttttaagcatgcctcattgaatctggctgacctgtgagcggaggccctcgggaggaatggttagctgtcagcttaactacctcccctcttcccact

SEQ ID NO: 118 - DNA, 547 bp, Homo sapiens
  MAP TO AL160236.1; EXPRESSED IN BRAIN, SIGNAL = 0.75; EXPRESSED IN HELA, SIGNAL = 0.51; EXPRESSED IN FETAL LIVER, SIGNAL = 0.84; EXPRESSED IN PLACENTA, SIGNAL =   1; EXPRESSED IN LUNG, SIGNAL = 0.75; EST_HUMAN HIT: AW249294.1, EVALUE 3.00e-65; SWISSPROT HIT: P38793, EVALUE 5.00e-03; NT HIT: gi14752838, EVALUE 2.00e-65
ttgcatgccacattacacacagtaggtgcagtctttatcaaccaaaagaaatacaactcatttctgtttcatattaacaatgttagcttttattttgcaaccaataggcagtattatggattttcattttttcttttaggccaggttatgattgacaaaaatccaggaatcacctcagcagtaaataaaataaataatattgacaatatgtaccgaaatttccaaatggaagtgctatctggagagcagaacatgatgacaaaggtatattttattatctccaagtaaggtgtatatcaatattatgtttagagtcagaatagatgacaaagatttaaaatacttgtaacatccagtgttggtgagtatgtgagaatgtgatcacttatgtatgctattgatggaataacactgataaagccttttcagaagaattggttaaattctcatatagtgatacaatggaatatttccatcattaaaggttttttagctccatatttgttaaaataagttgtccatcgataggttgacaatggacaattgc

SEQ ID NO: 119 - DNA, 522 bp, Homo sapiens
  MAP TO AL136105.2; EXPRESSED IN HELA, SIGNAL = 1.2; EXPRESSED IN FETAL LIVER, SIGNAL = 1.1; EXPRESSED IN PLACENTA, SIGNAL = 1.1; EXPRESSED IN LUNG, SIGNAL = 1.1; EXPRESSED IN ADULT LIVER, SIGNAL = 1.1; EXPRESSED IN BONE MARROW, SIGNAL = 1.2; EXPRESSED IN BRAIN, SIGNAL = 1.1; EST_HUMAN HIT: AI827817.1, EVALUE 1.00e-82; SWISSPROT HIT: Q9H583, EVALUE 2.00e-11; NT HIT: gi11427260, EVALUE 1.00e-07
ctaccagcccaactccaaagatctcacagaagaaaaaaaagccagaatacattccgcacaattaaagaagagaagcatctcgctaaaaagtgacccccatatcaatttcaagattaagtggcaaggatgatggaagagaaaaagtacacatttaataaaagcaagcacatctcttcagaaataagactcctttctgtcaaacggaaactaacccttaaagaaaaaacaaaatcactacatttgtgatcttttaccttccccagccaccctgcgtagcatgtcgtggctatcgtggctcacctgggagagaatgccttccagataggggctgatgaagtgcgggagagtctccacaaccttctgcagagcagccaaggcactgagcaggtagacctcgctggagaccagctcgctggtgttcttcattgttgtcagcaacgatggcatcaggctagaaacaaagtaagagctttagaagaacttgaagcagaaacagaggctagggaatggagtagagggcat

SEQ ID NO: 120 - DNA, 521 bp, Homo sapiens
  MAP TO AC022117.2; EXPRESSED IN FETAL LIVER, SIGNAL = 5.4; EXPRESSED IN PLACENTA, SIGNAL = 7.3; EXPRESSED IN LUNG, SIGNAL =   7; EXPRESSED IN BONE MARROW, SIGNAL = 6.1; EXPRESSED IN ADULT LIVER, SIGNAL = 6.8; EXPRESSED IN BRAIN, SIGNAL = 6.7; EXPRESSED IN HELA, SIGNAL = 2.9; EXPRESSED IN HEART, SIGNAL = 6.1; NT HIT: AF233535.2, EVALUE 1.30e-01; EST_HUMAN HIT: T63986.1, EVALUE 7.30e-01; SWISSPROT HIT: P30056, EVALUE 1.60e+00
tctcttcctcatccctcagcctttcctttacatatggctccacatacagattatagagctctttttttgttggctttagcattaaaaagaatctcgagctaatatgaaaccttaaagatgttaccttttttttttacgtttatttcctatacccttttaaaagctgagcttgttaggagactcttttctcaaacgtttttgctttttaggatcacttttcattgcagaaatgaaatcagagtcttgagttcttttcacaaggtatcatagaccttaagatgagatgctcacattctctcaaggtgcctgacccttctgctttatcaacaaattcctcttgctggtcatttttgtggtacagaatagtagcttcaatttttgctttctctatttcctggaagattagattttaggcatataaagaatttacagaatttctgggtttaaagtttttttgtttttgtttttagttattacaagtacatgataggtatctatatggggcacatgtgatgttttga

SEQ ID NO: 121 - DNA, 595 bp, Homo sapiens
  MAP TO AB017654.1; EXPRESSED IN PLACENTA, SIGNAL = 2.3; EXPRESSED IN LUNG, SIGNAL = 1.5; EXPRESSED IN ADULT LIVER, SIGNAL = 1.3; EXPRESSED IN BONE MARROW, SIGNAL = 1.6; EXPRESSED IN BRAIN, SIGNAL = 1.4; EXPRESSED IN HELA, SIGNAL = 1.1; EXPRESSED IN HEART, SIGNAL = 1.3; NT HIT: AF290025.1, EVALUE 5.70e-01; SWISSPROT HIT: P13063, EVALUE 2.60e+00
attgtgagagatgggcttggaaaggaagattcaagccaaattgtagagtaccttgaaacctgacaaaggggaatatatttttattttatctgtagacacgtaatggggaaacattgaggatgactgagcaggagagagaccatgtgaaggatggactgaatggagacttgtatcaaagagtctgagtatcaaagacttgtattagagagggttgttgtagtaatctagtcagggtatgagaaatggtttgtattagagtgtcaggagtagtcgtggcaaaaatatatagatcaggatgagggatgggcctcatctcacaccctgactccagtcaatggcagtggctccctggagtacactactataggaaggattttgtaaagttttgtctggcctcagtggagggtgaggtaggggaggagttctatgaacagttagtggtgtctgccatggttgaaacaatggagaagggggacaccttttctgtgcagatgttgcttctggtagatataatccacaatgtaatgggagaagtactaagaatcagtaaattatggagggtgtaaaagactactgatatttaagcctggcggac

SEQ ID NO: 122 - DNA, 535 bp, Homo sapiens
  MAP TO AL136304.2; EXPRESSED IN HEART, SIGNAL = 2.1; EXPRESSED IN HELA, SIGNAL =   2; EXPRESSED IN BRAIN, SIGNAL = 2.5; EXPRESSED IN PLACENTA, SIGNAL = 2.5; EXPRESSED IN FETAL LIVER, SIGNAL = 2.2; EXPRESSED IN ADULT LIVER, SIGNAL = 1.6; SWISSPROT HIT: Q14999, EVALUE 1.00e-96; NT HIT: gi14781548, EVALUE 0.00e+00; EST_HUMAN HIT: BI916222.1, EVALUE 0.00e+00
tcttttccttgtgtgctccaggtgccaggatggtgggagaactccgctacagggaattcagggtgcccctggggcccggcttacatgcctatcctgatgagctgatccgccagcgcgtgggccatgatgggcatcctgagtaccagatccgttggctcatcctgcggcgtggcgatgagggggacgggggctctggccaagtggactgcaaggctgagcacatcctgctgtggatgtccaaggatgagatctatgccaactgccacaagatgctgggcgaggatggccaggtcatcgggccctcccaggagtctgcaggggaggttggggccctggacaaatctgtgctggaggagatggaaaccgacgtgaagtccctcattcagagagcccttcggcagctggaggagtgtgtgggcactatccctcctgctcctctacttcacactgtccacgtgctcagcgcctatgccagcattgagcccctcactggagtattcaaggacccaagggtcctggacttgctcatgcacat

SEQ ID NO: 123 - DNA, 566 bp, Homo sapiens
  MAP TO CHR22_53.0; EXPRESSED IN FETAL LIVER, SIGNAL = 0.64; EXPRESSED IN LUNG, SIGNAL = 0.82; EXPRESSED IN BRAIN, SIGNAL = 0.64; EXPRESSED IN PLACENTA, SIGNAL = 0.74; EXPRESSED IN ADULT LIVER, SIGNAL = 0.74; EST_HUMAN HIT: BG336065.1, EVALUE 7.90e-01; SWISSPROT HIT: P18488, EVALUE 1.60e-01; NT HIT: gi14778007, EVALUE 0.00e+00
acagctgctgatgacaatggcagtagtggccagtgtctgccggcacgacctcccatcatcccgggaaggggcagcgccagtggggcgcagatgcctgccatcacagatggaaacagcaggtaaatggcacttgtttcctccaggtgtggagatgcttgtatctgggaccccctgccatttctcaggacaccctcctgctcctagctgggagatccagcatcctcatgaatgcggggcccaaggccaccaactgttccacctgctgtcagccaggcctgttgccccagccctacacccacagctcacccagcagggactggagtgtgctgctgcactgctggagccggtcgcccgggtcggaggttgggaagaagacagccgctggcaggccactggttggggggtccagccggaagcccacagcggtgaggagggcctgccagccagggatgccgcccactttgttctccacactctgctgggatgtgtacatggcattgcgctgcccattctggatgcgctgcagggatttctccacctgagggggaattgggggtgagtcagag

SEQ ID NO: 124 - DNA, 577 bp, Homo sapiens
  MAP TO CHR21_34.0; EXPRESSED IN HELA, SIGNAL = 3.9; EXPRESSED IN BRAIN, SIGNAL = 1.5; EXPRESSED IN LUNG, SIGNAL = 1.2; EXPRESSED IN HEART, SIGNAL = 1.4; EXPRESSED IN BONE MARROW, SIGNAL = 1.6; NT HIT: AF289664.1, EVALUE 1.40e-01; EST_HUMAN HIT: AA115538.1, EVALUE 3.20e+00; SWISSPROT HIT: P08519, EVALUE 3.20e+00
cagttgtgagatgggtggtgaatggggttggtgtatacctgacaagccctgccagttttccacgccgtgaaggtgccagtgtgtaagcactggcagatgtagtaggaaagagctggggcacagctcctttgtcagtctctccaaagtggaaggacacacacagttgttcagagctatttaagttagtcaatggaaggatcaggatttcaatggaaaggaacagcagagaagtggaacacaacatttacaccacctttttgttgaggctgatgcccattactaagctgctcaaaaggaagtgtttgagaaactaagtaatgagtaagaggctaaatatctaaacagagctatcagcatggttaaggtgttgagaaactaatgaaacttaaattttaccaaggaaagaatgggacgtgttaaatatgtcatgtgtcacataaaacccctaaaatactatttccaagggactggaaaaaaaccaagtaaagaaatcgtctacaacaagcctgaaatgtggcctgggaacatgggtggccctgatggctcaaggtaatttcccctcactctgtctaccaca

SEQ ID NO: 125 - DNA, 536 bp, Homo sapiens
  MAP TO CHR22_220.0; EXPRESSED IN BRAIN, SIGNAL = 1.3; EXPRESSED IN LUNG, SIGNAL = 0.69; EXPRESSED IN HELA, SIGNAL = 1.9; EXPRESSED IN ADULT LIVER, SIGNAL = 0.73; EXPRESSED IN FETAL LIVER, SIGNAL = 1.1; EXPRESSED IN BONE MARROW, SIGNAL = 1.2; EXPRESSED IN PLACENTA, SIGNAL = 0.63; NT HIT: gi15431300, EVALUE 0.00e+00; EST_HUMAN HIT: BE748843.1, EVALUE 0.00e+00; SWISSPROT HIT: P18124, EVALUE 1.00e-82
ggccacaggaagttatttgcttctttgaagcattttccaacagtatagatctcatgaatcagatcctccagcagatgatgccatatttaccaagagatcgagcaatcaaagtgttatctgtcaaagcaattcgcttcttactgaattctccataaccacgcttgtagataagttcatttagtgactttagatttgggtacccccaagcaatatatgactctacaatcctcagcatgttaattgaagccctgttgagcttcacaaacgttccattgaagatttcaggaaggcgaagaagctgcaacacctttcggacctttgggcttaccccattgatacctctgatcctgatggcaaatgccaatttgggttctgcaggtacatagaagttgccagcttttcttgccaccctcgccattcgaatttcagttctgtccatctgcctatgttccttgtgacagtgcttcgctttttcatggataaacttcctccttgccctttgaagcatcttttgggcaaacttctttctcaggcgc

SEQ ID NO: 126 - DNA, 587 bp, Homo sapiens
  MAP TO AC024195.2; EXPRESSED IN BONE MARROW, SIGNAL = 1.1; EXPRESSED IN BRAIN, SIGNAL = 0.99; EXPRESSED IN PLACENTA, SIGNAL = 1.8; EXPRESSED IN LUNG, SIGNAL = 1.5; EXPRESSED IN FETAL LIVER, SIGNAL = 1.1; NT HIT: AJ251961.1, EVALUE 2.00e-99; EST_HUMAN HIT: BI463578.1, EVALUE 7.00e-97; SWISSPROT HIT: Q03167, EVALUE 2.00e-29
caaccttctcctctctccccctgctcctccctgtgtttcacttggccataaccaggcctgcttccccaggaggaaaaaagaagggagggaatatggggggcggtggagaggcctggggccaaatgacccctcaggtcccttccaggtccaacattctgtaattctgtgattccttgccctaaccacctggtttcagaaaagaaaacaattgcctgtcataaatcagtcattaactgaagccacataaaatttaccttcccccactttaatataaatgtttcttgctatcttgagttcggtgaatgaagtaactgctccatactcttttcgggcccaatttaacagatgttcatttccatgggggaagttcctttcttctgtttctgctgtcaaggagaagtttgctgatgaaaactggaccacagaaccctcagacacctagaggaaagagaattgcgtatttaacatggtgcagtcaccggagctgaatcataattagagaaagtacttctcaaatcgaagtgcttgtaaatcgaacctcttccctttgttatacaagcagatcagcgtttttaagcagcggattc

SEQ ID NO: 127 - DNA, 576 bp, Homo sapiens
  MAP TO CHR22_104.0; EXPRESSED IN HELA, SIGNAL = 3.9; EXPRESSED IN FETAL LIVER, SIGNAL = 4.2; EXPRESSED IN HEART, SIGNAL = 4.8; EXPRESSED IN BONE MARROW, SIGNAL = 3.3; EXPRESSED IN ADULT LIVER, SIGNAL = 3.8; EXPRESSED IN BRAIN, SIGNAL = 3.6; EXPRESSED IN LUNG, SIGNAL = 3.3; EXPRESSED IN PLACENTA, SIGNAL = 4.8; SWISSPROT HIT: P53122, EVALUE 7.30e+00; NT HIT: AF284615.1, EVALUE 2.20e+00; EST_HUMAN HIT: AW946774.1, EVALUE 6.00e-08
tctatctccacatcccccacttccctgcatctacccctggggccaatctcccccaccccagtccagaccaccaccttctcctgcctggaggactctatcagcctcccccttggcctggtccacattggggcaggcatcaactttccaaaatgccactgtaaacatttcatcccctacataaaaagctttcagtgaaaatttttcacaaagtttctagaggaaaacatggaatagattgatcttaaagaaaatttctgttcattagaagacaccattaagaatgatataagcaaatcatagactggaattaaaaatatgtatatacacatgcacacacatacacatgcatatatatacacacacatacacacacacacacatatacacacacatacatatatacacatacatacacatacacacatatatacacacgtatatatacacatacatacacatacacacattttacaaagcactctattcagaatatataaagaactataaatcaataagaaaaaagacaactcagttttgtatttcttttttttttaagcacaaaagactcgaatggtt

SEQ ID NO: 128 - DNA, 525 bp, Homo sapiens
  MAP TO AC024445.2; EXPRESSED IN FETAL LIVER, SIGNAL =   4; EXPRESSED IN BONE MARROW, SIGNAL =   3; EXPRESSED IN PLACENTA, SIGNAL = 3.1; EXPRESSED IN LUNG, SIGNAL = 3.3; EXPRESSED IN ADULT LIVER, SIGNAL = 4.1; EXPRESSED IN HELA, SIGNAL = 3.8; EXPRESSED IN BRAIN, SIGNAL = 1.8; EXPRESSED IN HEART, SIGNAL = 2.2; SWISSPROT HIT: O46530, EVALUE 3.70e+00; NT HIT: U55194.1, EVALUE 7.80e+00; EST_HUMAN HIT: AI792796.1, EVALUE 4.70e-02
ttctccaccttcaccctcacctctgagagtctcgcagattaattgctccctcattcaacataggtaccatcatgttggacacaaagtacgacagggttgaaaccataaagtgcaatgtagggtttattacctggaaaataaatgacaaaaaaaaatggagagttaattgttgtatttaaatcttgagtagattccctctcttagttgcattttgcgaattgttcacatcgcatataaaagtgactttattaaaatttgaactgcaaaatgcatttcttgtgtcacaatgtaaaatgtatttcttaccatgcctcatggtcgaagaaagcttaaaaacacagaagattagggcagtggctacagggtaagagagaagggtcaaatcagagaaatttccgaggtaaaataatcaggacttattaaggactcgttaagccttgacaattttggcatttatcatagttggctttatatgaattttaataggtacctgtgtcatccttctgagcatcagcctcttgaagg

SEQ ID NO: 129 - DNA, 545 bp, Homo sapiens
  MAP TO AL138478.1; EXPRESSED IN BONE MARROW, SIGNAL = 0.83; EXPRESSED IN LUNG, SIGNAL = 1.3; EXPRESSED IN ADULT LIVER, SIGNAL = 1.2; EXPRESSED IN BRAIN, SIGNAL = 0.81; EXPRESSED IN FETAL LIVER, SIGNAL = 0.61; EST_HUMAN HIT: BG740732.1, EVALUE 0.00e+00; SWISSPROT HIT: P40986, EVALUE 1.00e-03; NT HIT: gi14761133, EVALUE 0.00e+00
aagccatgtttttggctgacacccacttgcttagggaattcctaggtcactggctggacaaattacgaagggaatggcaggtggagagagccttccagacagctctgtggttgctgcagccggaagtcgtcttcatcctggaggatgtctttgatgaagggaagtggagcacctctgaggcctgggtggatgatgtggagcagtttcggaaaatgttcagacacccaagtcatgtgcagctgaaggtagttgctggaaaccatgacactggcttccactatgagacgaacacatacgaagtagaacggtttgagaaagtgttcatctctgaaagcctgttttcttggaaaggattaacttcatgatggtcaacagcatggcactgaagggggacagctgtggcatctgttctgaagcagaagcagagctcactgaagtttcttacagactgaactgctcccaagagcgttatcctctgtattggagaagcgacactaactgttctggggaagatgttgctcctccggaggaaaagaacaccccat

SEQ ID NO: 130 - DNA, 500 bp, Homo sapiens
  MAP TO AL137025.2; EXPRESSED IN BRAIN, SIGNAL = 5.2; EXPRESSED IN HELA, SIGNAL = 3.6; EXPRESSED IN BONE MARROW, SIGNAL =   5; EXPRESSED IN HEART, SIGNAL = 4.5; EXPRESSED IN LUNG, SIGNAL =   6; EXPRESSED IN ADULT LIVER, SIGNAL = 5.3; NT HIT: D79206.1, EVALUE 5.00e-07; EST_HUMAN HIT: BF515185.1, EVALUE 5.00e-08; SWISSPROT HIT: P47241, EVALUE 3.10e-01
ttgagagtccatctgagccccctgggaagcttgtccagaaagctcccggcaggtcccattcctatcaattgtggttcaagaggcctaggaacccgagagggttctgagaagcagtggcagggcctgccgtgcatccagtacctacttggtagcaggtgtggaaggaggcctgtgccctcgttcagtccttacaacaaccctctgtggtagttggtaccatccccattttacagataaggaaactgaggctcggggaggtgatgtggggtgcctaaagcaccagagctgagcagtgatggagtctggactgcagtaccctgttgcgggcgatgagggggagctgtcacaggaacaagccaaatcctgcattaggaggctcagtgccaaaggtcggagcaggaccagagatgacgtggacctgcatgcctggtccacagcgctccttggggaccttctgttctccctgaggaaagggttggagtcaggtgggaacgtaggaa

SEQ ID NO: 131 - DNA, 555 bp, Homo sapiens
  MAP TO Z98044.13; EXPRESSED IN ADULT LIVER, SIGNAL = 0.73; EXPRESSED IN BONE MARROW, SIGNAL = 0.8; EXPRESSED IN BRAIN, SIGNAL = 0.74; EXPRESSED IN HELA, SIGNAL = 0.6; EXPRESSED IN PLACENTA, SIGNAL =   1; EXPRESSED IN FETAL LIVER, SIGNAL = 0.7; EXPRESSED IN LUNG, SIGNAL =   1; NT HIT: M65267.1, EVALUE 1.30e-01; EST_HUMAN HIT: BG250173.1, EVALUE 2.00e-01; SWISSPROT HIT: P30015, EVALUE 6.10e-01
ggaattagccaagggagaggcctgctggttgagggctgcagagcaaatgccactgttggcccccagcactctgtccctgcccactggtctctggttccctacggggaggtcaagggagacaggaacttcacaaatgggtcccggggaagagcagatgactccagtggggcttgtgaaaggaactacacaggatgaaatgaacaagggatggccgccctggcctctacggtcttcatatggccagaggcctccttccctcaggcaggcactgtctgggccaaagccaccacggggtgtttgggaagaggaggtgccagccgctgaggtgacatgagaccctcagggatgggcaggtgatggagggatcttagcctgggacaccttcatctctcagggagcagaacagggaagctggctgctaagtagctagtaagacaggagcggacctcggacggtgggggttgcatttcccaggcagcaaatccactgcagtgaatgaaatgatgcccaccacaccacccagtcacccccatgtcagatccactagctttgggg

SEQ ID NO: 132 - DNA, 588 bp, Homo sapiens
  MAP TO AL138994.1; EXPRESSED IN BONE MARROW, SIGNAL = 1.8; EXPRESSED IN PLACENTA, SIGNAL =   2; EXPRESSED IN LUNG, SIGNAL = 2.2; EXPRESSED IN ADULT LIVER, SIGNAL = 2.1; EXPRESSED IN BRAIN, SIGNAL = 1.8; EXPRESSED IN HELA, SIGNAL = 0.96; EXPRESSED IN FETAL LIVER, SIGNAL = 1.7; NT HIT: AL161571.2, EVALUE 5.60e-01
aaatttgaactgcgaatggggcatacttataccacatatactagaaagttattcatggtgtatttgcaattcaaatgtaactaggggtcctatagttgtatttgctgagtctggcaaccttgtcctgaattagcagtgccccgagaagcagcagggtggcctgtaggaggtgttcatctgttatgtggaatgaatggtgcctcttcagaattctgttgtgcagtcttctattagagaaaaccctttttatctgagcatggagttgggacattacctgtagttggatatgatctccttatccttctccctttgattgatctttttctttgagctgatttgagctttcttcttttctctgtagttggcggaatcagctcagttacattttttactaagttacccacattctgacactccttgacagttttaagatcttcttctaacacacttgaatagaatggatactggaatctattttgacagctgttgaaaatctattctgttgttacaggaggttaaggaggttatttgtaacactgggattatttaatgaaccttttgaaaaggtgtgcagactgttcaggcaaa

SEQ ID NO: 133 - DNA, 558 bp, Homo sapiens
  MAP TO AL135932.1; EXPRESSED IN FETAL LIVER, SIGNAL =   5; EXPRESSED IN BONE MARROW, SIGNAL =   6; EXPRESSED IN BRAIN, SIGNAL = 6.1; EXPRESSED IN HEART, SIGNAL = 4.8; EXPRESSED IN PLACENTA, SIGNAL = 4.7; EXPRESSED IN HELA, SIGNAL = 6.2; SWISSPROT HIT: O08901, EVALUE 4.70e-01; NT HIT: AL161510.2, EVALUE 8.30e+00; EST_HUMAN HIT: AV651235.1, EVALUE 1.30e-02
caaggctttctctgggactgggactgggacttccactgatgagttttggatcccagagaatgatctagaaacatatatctaaataatgtagcccatttgaataattacgatatatgataattaactgatctttggaaagaccaatttttagtatttttgactaagaatatcttgagagtaaagaatctataaaaattaaaattaaattcaactgagtttaataagtaacctatgaatagaccaaatagatggaattattttgcatttgtattttagtgtgtgtttttaaattcctgatgctctgcaattgtaagtaatatgtctttgcaatttgtgaatttctgctcagctcttgttttagaagtccaaagtgacattgtatctggaagcaagcttgctgtgcataaacctgtagcaatttttggagaagagaagcaagttacagaaccggaagaaaagcaaatgcaagaagatcctctaacaacggaaaatgcttccagtgaaattctgtaagtaatcagtgtagcctgaaaagctacctggctgctttttgaactc

SEQ ID NO: 134 - DNA, 545 bp, Homo sapiens
  MAP TO AC012661.4; EXPRESSED IN HELA, SIGNAL =   1; EXPRESSED IN PLACENTA, SIGNAL = 1.6; EXPRESSED IN ADULT LIVER, SIGNAL = 1.4; EXPRESSED IN FETAL LIVER, SIGNAL = 1.2; EXPRESSED IN LUNG, SIGNAL = 1.4; EXPRESSED IN BRAIN, SIGNAL = 1.5; EXPRESSED IN HEART, SIGNAL = 1.5; SWISSPROT HIT: Q03146, EVALUE 1.00e+00; NT HIT: U85056.1, EVALUE 0.00e+00; EST_HUMAN HIT: AJ003590.1, EVALUE 1.00e-113
ttatcaaagggtggagctgggggaagcccagacagaacaagtgagtccccagggtctccttaacctccctcagctcctccacatgcggccctgagggaaagtgagcggcctcctaacccctttgatagggttccagtactgcaggtctggacttccttattttctggaatcataggaggtgacaatgcaaacccaggccccttatttgccatccctcaatgccaggccaggcccagagccctgtgctgacacagcccaggggatgctcgaaacccacctcagcacagtcaccaatagcatagtgagatgagcaaggaggtgcaagtaggcacaaatccccatggacatggcctcaggcatgttccacaggctcagggtctccctgatgagctcccagccctccttcagggagcctgcagagcacacccccagggagcagtgctcagatgagcaggcagaccccagatcccccaccccaggatgctctgttccactttgcagggctgctgcattcgccagtccccactgctttctggtgggatgtt

SEQ ID NO: 135 - DNA, 541 bp, Homo sapiens
  MAP TO U82695.2; EXPRESSED IN FETAL LIVER, SIGNAL = 0.55; EXPRESSED IN BONE MARROW, SIGNAL = 0.7; EXPRESSED IN BRAIN, SIGNAL = 0.84; EXPRESSED IN PLACENTA, SIGNAL = 0.79; EXPRESSED IN HELA, SIGNAL = 0.8; EXPRESSED IN LUNG, SIGNAL = 0.77; EXPRESSED IN ADULT LIVER, SIGNAL = 0.85; EST_HUMAN HIT: BI767597.1, EVALUE 0.00e+00; SWISSPROT HIT: Q99871, EVALUE 7.00e-12; NT HIT: U82695.2, EVALUE 0.00e+00
cccacatcccaccttcatactcacccccggggccttgggcaacagccagcacccttgggacacagctgccccttgcccgtatgctgcccggcccctgattggccagccagatccccaagtggggtgtcacaccccagccagcatcagagggggagtgacaccccagcccctaccagctccagaactaggaccaagagaagcccgtcaatactgcccacctgggccatccacacctttacctcgagcaactggagcacccaatggtcaggctccggatggtatcgagcaactggtccatgaagtgtagctgcttctgggcgcaggcacagccctgggcaaggaagaccacagacattcactggctccatctaagccaggccaaggccagctgtccccagtgcccctgcccccacatgccacccatgccaggagccaggggaaaggaggggcctggcccatcaacgaccctgtgcctgcccagcaatgtcttggactagcaagtgctccctgcctggtccctgccttgggctgtaatgatgct

SEQ ID NO: 136 - DNA, 592 bp, Homo sapiens
  MAP TO AL135920.4; EXPRESSED IN FETAL LIVER, SIGNAL = 1.2; EXPRESSED IN ADULT LIVER, SIGNAL = 1.3; EXPRESSED IN BONE MARROW, SIGNAL = 1.3; EXPRESSED IN BRAIN, SIGNAL = 1.1; EXPRESSED IN PLACENTA, SIGNAL =   1; EXPRESSED IN HELA, SIGNAL = 0.61; EXPRESSED IN LUNG, SIGNAL = 1.4; EST_HUMAN HIT: AW582564.1, EVALUE 2.10e-01; SWISSPROT HIT: Q57350, EVALUE 5.70e+00
attggcctgttcttccaatggtaagtgctaaaactgtcttatccaagccttaatttgaaaatatgccattagaaactgtaaatacaatgaagacaaaactccactatttttggcattttcttcagctacgtatctgttgaagtattgagagcagcactgcgctagtattattgctttgcctcctgaatctgattactattatgatttttaaaaattacattaaattacatttaggcagataagagtcatctatttgactgttgatcctagtatcacatagtgctagaaggggcttattagttgctaatactttttaataataaagaagaaaaaaaggtaagtaattgtgaggaggcaaatagttgtgggattctgacttcctacctttgtgtccttgttgaggataagcatcatggcttcatcagctgctatattaatggctgatggatggtaatcaccaaacacatttctactagagaaatgaatgatcaaatgaaattcaacgctcttctttccctctgcatcttttttgttttgttttaggaagtactagttcattctgacttttaggacatccccagcccatcttata

SEQ ID NO: 137 - DNA, 584 bp, Homo sapiens
  MAP TO AL136140.2; EXPRESSED IN BRAIN, SIGNAL = 4.1; EXPRESSED IN FETAL LIVER, SIGNAL = 4.1; EXPRESSED IN HEART, SIGNAL = 3.8; EXPRESSED IN LUNG, SIGNAL = 4.5; EXPRESSED IN ADULT LIVER, SIGNAL = 5.4; EXPRESSED IN HELA, SIGNAL = 2.6; EXPRESSED IN BONE MARROW, SIGNAL = 3.6; EXPRESSED IN PLACENTA, SIGNAL = 4.6; SWISSPROT HIT: P11680, EVALUE 9.90e-02
tgagacctttactggcagggctgagaagatgagctggttggttgtggtgtgtttagaagtttaaaacagcaaaaagacatagtgagggtttgcaggaggggggcctgggcctgggatgggggtagcaagacctccagatctgctctcctctctactgtaaattacaagcctgcttttttaaatttcctttcccagaacaatgttattcattcaattccaaagtaaacattgggcttagatactcaacagtttcagagaacaaactgtcctcgttgtcagggtctttacctgtcaggggcctgattaaacccatatatcttcatggcagccatcagcagccacagtgggctgaggagggaccccgcaccagccccaccttctagcagcagggcagccccttggtgccagtcctgggcatgcagggctttctctttcactggatgggtgacagcatggtgtctgttcagggctccagcctgatcttggacctctggggcaaggaggcagatctgaggaaatgctaaggggctggagggcaccagggacaggggaagacaaggggaaggtggtgtttgaactgcctt

SEQ ID NO: 138 - DNA, 561 bp, Homo sapiens
  MAP TO AL160191.1; EXPRESSED IN PLACENTA, SIGNAL = 0.66; EXPRESSED IN BRAIN, SIGNAL = 0.56; EXPRESSED IN LUNG, SIGNAL = 0.58; EXPRESSED IN ADULT LIVER, SIGNAL = 0.76; EXPRESSED IN FETAL LIVER, SIGNAL = 0.42; EXPRESSED IN BONE MARROW, SIGNAL = 0.55; EST_HUMAN HIT: AA747580.1, EVALUE 9.00e-13; SWISSPROT HIT: P08547, EVALUE 4.00e-16; NT HIT: AL163203.2, EVALUE 2.00e-03
ttggccctcagtataggcaggtctcacatcctgcaaatactgcattttttatctgcttttggttgaaaaaatatatacatataagtggatcctcaaaattcaaacccctgtttttcaagggtcaactgtgtgcaagacctgtacattgaaaatgttaagacatcacttggagaaattaaagatctaaataaataaatattccatgttcataggtcagaagactcaatattgttaagatgtcaattctctccaatgtgatctataaattcagtgcaatcttaattaacttcccagctggcatttttacaaaaactgacaagctgattctaaaatttatgtgtaattgcaaagggccaaaaataaccaagatactcatgaagaagaacaaagaataaacactcattctaccagatattaaaatttcttgtaagctacagtaattaagacagtgtgatgtcgatacaagaggagagaaataaaccaatgaaacagagtagagagtccataaatagacccatacatacacaaaacttgattcataggaaaggtgacattgcaggt

SEQ ID NO: 139 - DNA, 562 bp, Homo sapiens
  MAP TO AL137918.1; EXPRESSED IN LUNG, SIGNAL =  10; EXPRESSED IN BONE MARROW, SIGNAL = 8.6; EXPRESSED IN PLACENTA, SIGNAL =  10; EXPRESSED IN ADULT LIVER, SIGNAL =  11; EXPRESSED IN BRAIN, SIGNAL = 9.4; EXPRESSED IN HELA, SIGNAL = 4.1; EXPRESSED IN FETAL LIVER, SIGNAL = 8.5; NT HIT: gi11420521, EVALUE 1.00e-113; EST_HUMAN HIT: BG699802.1, EVALUE 1.00e-113; SWISSPROT HIT: Q09810, EVALUE 3.00e-11
ccacatgcgtcattaaccaggtagcgagtggacacgttgtccgagcagtcgccaccacatcatatcggcggagcgggtctagggtagggaccggcataaaagggcctgagagtaccgcactcattccaccgccaaattgaggccgcgcagcgaggcggcggccgaagcggccttggcctgtgcagccagtgcctcgccatgcagcacttggtaggccaggttgctcatctctaccacatcataatccacaaggccaaggcggcccacgctggccgctgccaagtactgcgccagtggacagcggagcccaccgcagcccacgactagcacgtgtctgtgcacgcccagctcgggcagcactaactgccggctagagcgcagaatctcatcttggaacacagcggccttccgcggcagctgcaacaccgaaaccagtcgttctggctgcggttcctgctccgccaaaagggccgctgccagcttctgcttcagggaattcaattcctcctcacgttggacaacgtcagcctgtaaggggagtacctcctcctgggtcgtaata

SEQ ID NO: 140 - DNA, 533 bp, Homo sapiens
  MAP TO AL121976.2; EXPRESSED IN PLACENTA, SIGNAL = 0.63; EXPRESSED IN LUNG, SIGNAL = 0.7; EXPRESSED IN BRAIN, SIGNAL = 0.73; EXPRESSED IN ADULT LIVER, SIGNAL = 0.71; EXPRESSED IN FETAL LIVER, SIGNAL = 0.65; NT HIT: AF003530.2, EVALUE 5.10e-01; EST_HUMAN HIT: BG572220.1, EVALUE 8.00e-07; SWISSPROT HIT: P53675, EVALUE 3.80e+00
tttgtagggcaggtggagtcctgaaacagtgacaatctaaaactaagtgacagatgtgagaaaacaatgtactgatcatccctagaagggtgccacatcatcacatcactgtgtttcacatacctgcaggtactggtgaacagtcccaagagagtgcaggtggcacactaaccactttgtgtaaatagtcagatcttcctgtgtcaccaagttaggaggattgttttttcccatgaggaagttttctcgagcaacagacaatctttcagctctctgaagggtgtcattgtactcctgcataatgtagccaacttgtttctgtttaagagagatacaaagatagaacttggttatttgcaagccttatgctctgtatcatttgcttccaagcatagggtaatgttgttttgggtctaaataaaggagttctttgaatcccaaagttcttccatattctgaatttgacttataaggacagtggtcatattcttaggactttgaaggagacagactccaagcaaagagtcagtgca

SEQ ID NO: 141 - DNA, 553 bp, Homo sapiens
  MAP TO AF168787.1; EXPRESSED IN BONE MARROW, SIGNAL =   8; EXPRESSED IN PLACENTA, SIGNAL =  14; EXPRESSED IN ADULT LIVER, SIGNAL =  30; EXPRESSED IN BRAIN, SIGNAL =  13; EXPRESSED IN LUNG, SIGNAL = 9.9; EXPRESSED IN FETAL LIVER, SIGNAL = 9.6; SWISSPROT HIT: P43633, EVALUE 3.10e-02; NT HIT: gi14774354, EVALUE 0.00e+00; EST_HUMAN HIT: AL530641.1, EVALUE 0.00e+00
acttacactgggggaacgtgctcttaaagaaaaccagcctcaaaaaactccactacaccctcaatgggaagagcagcactatccccagctgtgggttgcaagtgagcatcattgactacaccctgtcgcgcttggaacgggatgggattgtggttttctgtgacgtttccatggatgaggacctgtttaccggtgacggtgactaccagtttgacatctacaggctcatgaagaaggagaataacaaccgctggggtgaatatcacccttatagtaatgtgctctggttacattacctgacagacaagatgctgaaacaaatgaccttcaagactaaatgtaacactcctgccatgaagcaaattaagagaaaaatccaggagttccacaggacaatgctgaacttcagctctgccactgacttgctctgccagcacagtctgtttaagtaagctaaatgtatcttactgccccgaaatgagaggagactggtcttgaagcctctggtgctgtttcaacctccgtccccacaggagggtggaactcccattct

SEQ ID NO: 142 - DNA, 581 bp, Homo sapiens
  MAP TO CHR22_81.0; EXPRESSED IN BONE MARROW, SIGNAL = 0.46; EXPRESSED IN PLACENTA, SIGNAL = 0.67; EXPRESSED IN LUNG, SIGNAL = 0.53; EXPRESSED IN ADULT LIVER, SIGNAL = 0.6; EXPRESSED IN BRAIN, SIGNAL = 0.6; EXPRESSED IN FETAL LIVER, SIGNAL = 0.57; SWISSPROT HIT: gi115267, EVALUE 4.90e-01; NT HIT: gi14779142, EVALUE 0.00e+00; EST_HUMAN HIT: BG400812.1, EVALUE 1.00e-129
tgctgacatcagccactttcagggggaagtccccagctatggcctgggcactccagtccctcttccatggagggcggtactgggagaggtgcagtgggttattgtctagaggaagctgccccagcagccattccagtccccgcccctccctgccagttcttcaagtgcctccgggccggggcaagcctgctggggtagggagctgactggcttggccactgcctcctttttctgccccaggattgcccaaaccatggcttcaaggtgggcatgaagctggaggccgtggacctgatggagccccggctcatctgtgtggccacggtgaaacgagtggtgcatcggctcctcagcatccactttgacggctgggacagcgagtacgaccagtgggtggactgcgagtccccagacatctaccccgtcggctggtgtgagctcaccggctaccagctccagcctcctgtggccgcaggtgtgggctctcgtggccctaagaggctctgactttctttcctcttcttttttccttcttcccccgcccctgtgcccatctccgttctttggcatgaggtggagat

SEQ ID NO: 143 - DNA, 544 bp, Homo sapiens
  MAP TO AL136128.2; EXPRESSED IN HELA, SIGNAL = 1.5; EXPRESSED IN FETAL LIVER, SIGNAL = 2.9; EXPRESSED IN HEART, SIGNAL = 2.9; EXPRESSED IN LUNG, SIGNAL = 2.9; EXPRESSED IN BONE MARROW, SIGNAL = 2.9; EXPRESSED IN PLACENTA, SIGNAL = 3.6; EXPRESSED IN BRAIN, SIGNAL =   3; SWISSPROT HIT: P08519, EVALUE 1.30e+00; NT HIT: AF324892.1, EVALUE 3.00e-05
ttcatcctccccacagaaaggaaaaaaacaatgaataaacaactatatttcaactagagtgactgaggaagaaagctgagagcaccaggggaacagcaacaactctgtggagtacaaaaacccagaagagtaccatagagaggaaagcaaggcatcctccctctgccacactgtctgccacactgtctcccacacagagatcaactgggagtcagagggaacttctttctacaaggaaaaggtgagctggagaaccctagtggcctccattgcttccacatatgctcacagtccttgctacaggagagcacctcagttctcacaggctctgaatcaagtctgcagtgtagctgggagtctgcgcagctgcactatttcatagtaagacccttcttgagcatgcccctccaccacaacctacactgttatagtttggtgccatcttgaaactgggactactattagagtgtgtcctgctctatggtcactagcaactgattccattgctgaggccctgctgttgtgccactgtgttcacacaagg

SEQ ID NO: 144 - DNA, 600 bp, Homo sapiens
  MAP TO AL133476.4; EXPRESSED IN BRAIN, SIGNAL =   1; EXPRESSED IN HELA, SIGNAL = 1.4; EXPRESSED IN FETAL LIVER, SIGNAL = 1.1; EXPRESSED IN BONE MARROW, SIGNAL = 1.3; EXPRESSED IN PLACENTA, SIGNAL = 0.76; EXPRESSED IN LUNG, SIGNAL = 0.99; EXPRESSED IN ADULT LIVER, SIGNAL = 0.91; EST_HUMAN HIT: BG623215.1, EVALUE 1.00e-79; SWISSPROT HIT: P39188, EVALUE 1.00e-04; NT HIT: AB050050.1, EVALUE 2.00e-13
ctttgtggagttggtgcttgtgatacttcttacagaaagtctggtgggtttggggaacattcaccatgttcgctggagtgctgtcagctggtaatgatgaatttagagtgatgctaaatatgctggcctgtacaactttctccagcaaagctgagctatttgagtacagacatggagaaggtaaggggttatattcattcagggttggggttttatcaggcaagtatacttttaaaagaatgtagtatcagtgaagttttattgaagttaaaggactactagtgaggatgcttcaacaagtgaatggaattcactaagctataaatcataaaatctatgtggcaacatggataaatgcttaggaactaaattaaagcagaatataaaataatcttaatgctacaattacatccatgcaaaatttatatatgcatgtaaacagaaagcataggaaagtgggattataggtgatttaaatttattttgtgattattcttatttttatttttttcttgagatagggtctccctctgttgcccaggccagagtgcagtggtataatcacagctcactgcagcctcaccctcctaggctcaaatg

SEQ ID NO: 145 - DNA, 588 bp, Homo sapiens
  MAP TO AL136457.1; EXPRESSED IN BRAIN, SIGNAL = 0.84; EXPRESSED IN ADULT LIVER, SIGNAL = 0.9; EXPRESSED IN HELA, SIGNAL = 0.73; EXPRESSED IN FETAL LIVER, SIGNAL = 0.78; EXPRESSED IN PLACENTA, SIGNAL = 0.75; EXPRESSED IN LUNG, SIGNAL = 0.87; EXPRESSED IN BONE MARROW, SIGNAL = 0.98; EST_HUMAN HIT: AI022259.1, EVALUE 1.00e-21; SWISSPROT HIT: Q9Z0U1, EVALUE 5.70e+00; NT HIT: M16779.1, EVALUE 1.00e-11
tgataagattagcgtgggggaccagccttccccacacactacgtagatgtcataactaatcaaaccaatctatgagccgtatgtaagtcagacactgcctccccaaactgtattataaaatggcgcattcgcaccaaccactccttttctctgctaggagatcttcttttgggctttctcagcttttttctctctttccttctttttctctctcttttctactttttctgttgaattttctgctccaaaacccactcctcatgtgtgtctgtgtcctgaattccttctacaccaagaccaagagccagggtatgtaccctagtcaagggaactgtttcaccaggataaagaaccagaaggaaaaggagaagttggagataacctccttctggcattggtgactgagcctctaagggcatggttcaccaatacagggaaaaggaaagaaagaaaggaggtcacgatagaggctctaatgtcatggctgtgtttgttaatctcaataatcaatttaactgtgtttgctcaggttattacaattgccttgtctatgaatggatacaacttaccttgttgccattaaccctg

SEQ ID NO: 146 - DNA, 588 bp, Homo sapiens
  MAP TO CHR21_41.0; EXPRESSED IN BRAIN, SIGNAL = 0.31; SWISSPROT HIT: Q10233, EVALUE 3.80e-01; NT HIT: AL163278.2, EVALUE 2.00e-13; EST_HUMAN HIT: BF670626.1, EVALUE 1.00e-08
ggggctgagaagagaaggactgatttaaaatgggtatataaaagtgggtagattccagatctcctctgccatgaaatgccacttgcatcgcttcccttttcagctccctccctctccactcctaattctccctgaccaccacaagtacctcatgttcagactctggataatttgaacaagagactttctggaatcagtgactggaagcatgactgcactaatgtaagcagggggtgttgtggtatgagatggtggtatcgcactaaagccttgttagtcctggtagaccatgatgagaagctcaaaattcattccaaatatggcaggaagatactgagagtttcaagaagaatttcatgatcgtaaataatgaatggtgtagcattattgcattggtgccgtcgttgccacagtcagtgaattctcgtaagatctggttgcttaaaagtgtgtggcacctccccgcaacctccactctctctattgctcccatcctcaccaggaccctggattcccctttaccttcggccataagtaaaagctccctgaggccaccccagaagctgagcagatgttggtgccatgttt

SEQ ID NO: 147 - DNA, 600 bp, Homo sapiens
  MAP TO CHR22_184_2.0; EXPRESSED IN FETAL LIVER, SIGNAL = 0.53; EXPRESSED IN BONE MARROW, SIGNAL = 0.53; EXPRESSED IN BRAIN, SIGNAL = 0.52; SWISSPROT HIT: P54772, EVALUE 5.90e+00; NT HIT: AL163278.2, EVALUE 1.00e-05; EST_HUMAN HIT: BF801438.1, EVALUE 4.00e-12
attgaccacatgctaagggctactttggcactaggagaacagcactgacacagttccaattcttaaggagtttatggtctaggggtacagagaaaatggccatactgctatgagggaggcatatagaaggctgtaataaagaatcattggtatagatggagtagtcagggagggctttcctgtggaggtggcttcttccctgagacttaaaggtagagaaaagtccccccaattgaagagttggggtgaaagagtgtactatgtggtgttgtggattagtgtcccccaaaattcatgtctacccagaacctcagaatgtgaccttgtttggaaatcaaggtcttagcagatgtaactattttaagatgaagtcatactgaattaggatgggccctgaatccagtgactggtgtccttataagaaggggagagacacagagacacagctgcacaggaaagaaggctgggtgatgacagagacagagattcaagtgatgcagctggaagccaaggatcactggcaaccaccaacgctggaagaggcaaggaagggtcatcccttggagccttcggagacggtgtggacctgctgacaccttt

SEQ ID NO: 148 - DNA, 509 bp, Homo sapiens
  MAP TO AJ239319.2; EXPRESSED IN BONE MARROW, SIGNAL = 0.54; EXPRESSED IN PLACENTA, SIGNAL = 0.65; EXPRESSED IN LUNG, SIGNAL = 0.57; EXPRESSED IN BRAIN, SIGNAL = 0.57; EXPRESSED IN ADULT LIVER, SIGNAL = 0.55; SWISSPROT HIT: Q24753, EVALUE 2.80e-02; NT HIT: L17432.1, EVALUE 1.90e+00; EST_HUMAN HIT: BI827666.1, EVALUE 6.00e-91
aagagcctgtgttccgattggttaaagcccagaggcctctgccaacaaagggcgcgctggttggtagagggggaccaatgagaagtcgcggcactggcgtcaagtgcacgcgcagaagccacgtgctgtcggggacatctggtacttccatccggggtgagggcagcggtgtcccgaaggcctcactgttcctgtcgcgtggcccgctccgccgggcttggcaggactcggctctccccttctgccgttaccaggacgaccgtctccccgcagcccaggctgcccagactggcgccatgagctcccccgacaaggtagccgtttgtggggccagtttcggcctggagggtggcaagcaggctggctcccgcatggccagccccggagccccacggggccagggccacggcctcgatttgggggcgccaggcagccgcgagggcgagagcagcttcacagatcccgaggtcttcagcttcgagtctgagagcgaattgatagagcaggga

SEQ ID NO: 149 - DNA, 575 bp, Homo sapiens
  MAP TO CHR22_0.0; EXPRESSED IN HEART, SIGNAL = 2.5; EXPRESSED IN PLACENTA, SIGNAL = 2.7; EXPRESSED IN ADULT LIVER, SIGNAL = 2.5; EXPRESSED IN FETAL LIVER, SIGNAL = 2.6; EXPRESSED IN BONE MARROW, SIGNAL = 2.7; EXPRESSED IN BRAIN, SIGNAL = 2.6; EXPRESSED IN HELA, SIGNAL =   2; EXPRESSED IN LUNG, SIGNAL = 2.4; EST_HUMAN HIT: BG198115.1, EVALUE 3.00e-40; SWISSPROT HIT: P05162, EVALUE 4.00e-09; NT HIT: M87858.1, EVALUE 2.00e-50
tgggtaaagagggtggtgtctctggggatttgggcgttccctagaggcacctgccccgcagggggccagacagagttccaggggcttctccacctgccccttcaatggctgttggggcaaaagaatagagcatatggcatcaactctgaaattctgcaggtccccaaacctagcctcagacatgaagtgggggccagcaggggtgtggggagaagggtgtgaaaaagggcccattggcctgacgtccctcttgcctgagcacttcacagggctgccctgcctgccccacccgccctgcctattccgggcctgcagactcccccaaccctgaaaccttgctcacccatcagtgccatcggcgatgctgcctgtgatcttcagggttgaccccggcttcatgtccatgttcttaacctcaagttccccctgggccaacagagaaacattccactcgagtccccacagaaaatcaatcccacacttgcccagcagcttcatccacctcatgccaacccagctgcaggtctcaatccccctgcccacgtgaggacgcaggagaccaccaagctggaaag

SEQ ID NO: 150 - DNA, 591 bp, Homo sapiens
  MAP TO CHR22_207.0; EXPRESSED IN FETAL LIVER, SIGNAL = 1.8; EXPRESSED IN PLACENTA, SIGNAL = 0.91; EXPRESSED IN HELA, SIGNAL = 3.5; EXPRESSED IN ADULT LIVER, SIGNAL =   1; EXPRESSED IN LUNG, SIGNAL = 1.2; EXPRESSED IN HEART, SIGNAL = 1.4; EXPRESSED IN BONE MARROW, SIGNAL =   2; EXPRESSED IN BRAIN, SIGNAL = 1.9; NT HIT: gi15318439, EVALUE 0.00e+00; EST_HUMAN HIT: BI463080.1, EVALUE 0.00e+00; SWISSPROT HIT: P08708, EVALUE 8.00e-69
ttctctgggctttccacaactgaactcccaatgagaaaaagggaaagagctcttttaccaaggacccgccaacatgtgccgcgtttgcaccaaaaccgtgaagaaggcggcccgggtcatcatagaaaagtactacacacgcctgggcaacgacttccacacgaacaagcgcgtgtgcaaggagatcgccattatccccagcaagaagctccgcaacaagatagcaggctatgtcacgcatctgatgaaatggattcagagaggcccagtaagaggtatctccatcaagctgcaggaggaggagagagaaaggagagacaattatgttcctgaggtctcagccttggatcaggagataattgaagtagatcctgacactaaggaaatgctgaagcttttggacttcggcagtctgtccaacctgcaggtcactcagcctacagttgggatgaacttcaaaatgcctcggggacctgtttgaattttttctgcagtgctgtattattttcaataaatctggcacaacagcaaaaaaaaaaaaaaaaaaaaagggaaagaagaaaaaattatagcagctctcttcatccctca

SEQ ID NO: 151 - DNA, 531 bp, Homo sapiens
  MAP TO CHR22_181.0; EXPRESSED IN BRAIN, SIGNAL = 0.91; EXPRESSED IN HELA, SIGNAL = 1.6; EXPRESSED IN FETAL LIVER, SIGNAL = 0.88; EXPRESSED IN HEART, SIGNAL = 1.4; EXPRESSED IN BONE MARROW, SIGNAL = 0.97; EXPRESSED IN LUNG, SIGNAL =   4; EXPRESSED IN ADULT LIVER, SIGNAL = 1.3; NT HIT: U33114.1, EVALUE 0.00e+00; EST_HUMAN HIT: BG014073.1, EVALUE 0.00e+00; SWISSPROT HIT: P35625, EVALUE 3.00e-36
ttactggctgtgtgacctgcagcaagttacttaacctctcagagcctcctaaaactgtgataagaattaaagagaataatatcaaagcacttatcagaatgtctgttagacagcagatgctcaagctagtgctatttatattatgatcactgagggactgatgtggctaggcttcccatgcagtggccccagggtctgaatccaggctcggtagcctcaggcctgggcataccatggcagagtccatcaactgctgcctgttatctaattgcagatcaagtcctgctactacctgccttgctttgtgacttccaagaacgagtgtctctggaccgacatgctctccaatttcggttaccctggctaccagtccaaacactacgcctgcatccggcagaagggcggctactgcagctggtaccgaggatgggcccccccggataaaagcatcatcaatgccacagacccctgagcgccagaccctgccccacctcacttccctcccttcccgctgagcttcccttggacact

SEQ ID NO: 152 - DNA, 563 bp, Homo sapiens
  MAP TO CHR22_83.0; EXPRESSED IN PLACENTA, SIGNAL =   2; EXPRESSED IN LUNG, SIGNAL = 1.7; EXPRESSED IN BONE MARROW, SIGNAL = 2.5; EXPRESSED IN ADULT LIVER, SIGNAL =   2; EXPRESSED IN HELA, SIGNAL = 6.2; EXPRESSED IN BRAIN, SIGNAL = 1.8; EXPRESSED IN FETAL LIVER, SIGNAL = 2.1; EXPRESSED IN HEART, SIGNAL = 1.6; NT HIT: gi15147251, EVALUE 4.00e-51; EST_HUMAN HIT: BG821494.1, EVALUE 0.00e+00; SWISSPROT HIT: P56591, EVALUE 7.00e+00
gttctcccctctgtggagtggctgtgatcaccaaatctgccaccagggggcaacccagagcactcatggcccagcctgggcagaggccccggccagtggagctctcagatctgcagctctaaatcctagaatcccatgtggtctgctgtatggaggggacacttggctctggacatgcaacagggcaggtgaccagctcaccttgggatcatctccaggctcagtcaggcaaccaagaattcaggcagcagtcaaggcctaggaggcagcccgggtagtcacagccatacgaccatggccaacaaggtggagacgctgaaggaggaggaggaggagctgaagaggaaagtggagcaatgcagggtgagggccatgggggtcccctggatatgtaggggtggcaggggtgggtcctggcccatctcacaggcaaggaagctgaagttcagagaggtgacatgacttgcctaaggccacgtggctaggagccagcagagctccgccattccctcgtagcctcttctgtctgtaccccatgcataacttgggaaggcagagacttg

SEQ ID NO: 153 - DNA, 562 bp, Homo sapiens
  MAP TO AC009802.13; EXPRESSED IN PLACENTA, SIGNAL = 2.9; EXPRESSED IN BONE MARROW, SIGNAL =   2; EXPRESSED IN LUNG, SIGNAL = 2.2; EXPRESSED IN ADULT LIVER, SIGNAL =   2; EXPRESSED IN HELA, SIGNAL = 1.1; EXPRESSED IN BRAIN, SIGNAL =   2; EXPRESSED IN FETAL LIVER, SIGNAL = 1.7; EXPRESSED IN HEART, SIGNAL = 1.9; SWISSPROT HIT: P05120, EVALUE 2.00e-26; NT HIT: M31547.1, EVALUE 0.00e+00; EST_HUMAN HIT: AL544856.1, EVALUE 2.00e-97
tgatgattgctgacctcctgagttaaaatgtctttagcataaaacaagagcagttctccaattccattcaggaactactcggcccaaatgtggagcttcagctcaaactcaccttggccatctggtcttcggtgctgcccctggagcccatgtagaccatggccatggtggacgagatgctccatggggagaggaagaggttctgggtggggcttgcttttgccagatgcttgaataaattgagggcaaagagtgtgtttgccacacaaagatcctccattgtttcaatctagaagcaaagagaggaagaaaaaaacagctctgaaacataaggtaacattttgggtgaggtcagcaacagtaggacaggctgcattctgtgtagggacagattccctgtctgttcttcctcatggaacaacatgaggcaggtcagggacagcttcatggacataccacctgtgcagccgtaaaaagccccttgtttagccaaatgccctcctatcgccatcttgaaattcttgataattttaaacaaaaggcccacattttcattgtgcac

SEQ ID NO: 154 - DNA, 519 bp, Homo sapiens
  MAP TO AC020550.2; EXPRESSED IN PLACENTA, SIGNAL = 1.4; EXPRESSED IN LUNG, SIGNAL = 1.3; EXPRESSED IN BONE MARROW, SIGNAL = 1.4; EXPRESSED IN ADULT LIVER, SIGNAL = 1.3; EXPRESSED IN HELA, SIGNAL = 0.75; EXPRESSED IN BRAIN, SIGNAL = 1.2; EXPRESSED IN FETAL LIVER, SIGNAL = 1.2; SWISSPROT HIT: P34349, EVALUE 2.00e-20; NT HIT: AF151853.1, EVALUE 3.00e-73; EST_HUMAN HIT: AI564285.1, EVALUE 5.00e-73
tactcgcagtgtgaccttggagtagtcgcttattttccctaggtgtcagtttctacacttgtaagcgagaaattggactatattgttcctaagattctatccagttctaagaatctatggtttcttttctacttctagggttagcataaaggaatcatctgtagcgaaactaggatcagtatgccgtaggatttacagaatattttcacatgcttattttcatcatcggcagatatttgatgaatatgaagtaagtatatttcactgattatcttgatgcattcttatcagtgtaacagtaatatatattgatgttatttctagtcttttagtttgggatagtgaattaaaataacatttttgtcttcctctctacagaatgaaacatttttgtgtcatcggtttactaagtttgtgatgaaatacaatttgatgtccaaggataacctgattgtaccaattttagaagaggaagtacagaattcagtttctggggaaagtgaagcatgaagggaatca

SEQ ID NO: 155 - DNA, 579 bp, Homo sapiens
  MAP TO AL136103.2; EXPRESSED IN HELA, SIGNAL =   4; EXPRESSED IN HEART, SIGNAL = 4.6; EXPRESSED IN LUNG, SIGNAL = 4.9; EXPRESSED IN FETAL LIVER, SIGNAL = 4.1; EXPRESSED IN PLACENTA, SIGNAL = 5.8; EXPRESSED IN ADULT LIVER, SIGNAL = 4.8; EXPRESSED IN BONE MARROW, SIGNAL = 4.3; EXPRESSED IN BRAIN, SIGNAL = 4.5; SWISSPROT HIT: Q29076, EVALUE 4.90e-01; NT HIT: AB063285.1, EVALUE 6.00e-13; EST_HUMAN HIT: AL043810.1, EVALUE 6.00e-08
ttctcaattccggtctccacatactagctgggttttcttggactagtactataacctctctctaaatctcaactgccttacctataaagtggtaatgttaatggtacttgtgatggcagcggcggcctgtctggagcagccgcttcgaagattagcttcagtggggcaggaagggctggtgggagccaggaacagacaagagccccaccccctacccagttgaaggggcgggagcccgcactccttggtgcagctgcagctcccagccgcactctggaccctggcatccctgtgctctcaggggcctgggaagcccctgccccagcgggcttggaagtgcctgctcctgctcccgggcctctccctgctcccggtgcccactccagtgcagagcaaagttgtggccaagcccgagggctgtcgtgactcagctgcgtttgcgtgcactcagggcagcactcacacgctagcgccccctgctgccttggccccctccagactttgggcgtcagtgagcgcaggaagcagcccagggggtgctgagggcagctccctgcgggcctgtagacacccctcaac

SEQ ID NO: 156 - DNA, 586 bp, Homo sapiens
  MAP TO AL136444.1; EXPRESSED IN HELA, SIGNAL = 0.61; EXPRESSED IN PLACENTA, SIGNAL = 0.99; EXPRESSED IN LUNG, SIGNAL = 0.86; EXPRESSED IN ADULT LIVER, SIGNAL = 0.95; EXPRESSED IN BONE MARROW, SIGNAL = 0.81; EXPRESSED IN BRAIN, SIGNAL = 0.83; SWISSPROT HIT: P40759, EVALUE 4.30e+00; NT HIT: AF335542.1, EVALUE 5.60e-01
tggcagttcagagcacactcactctttctccctttgacagaacctatttgagcttatatagaatccaaagggctgtgatggaatggcaaccacgattgtttagttttgtggatgattcctcttttcctccagattgtattgctgggaaaaacatgctcttaatagtcattgaagttgccataggacattttagtactagaaagcgtttaagatttttttagtccaattcgcacctttttacagataaggagagtgaggcgcagagtgccttgaagtcgagccacaactgacacttggggccctgagccagggcaaggtttctcttccttgctgttcttcctttctaaatttgtatctgagaaattgatggggaaagaaaaaaagttacctgaggcaagaaaggatgggtaaagaaaggagttgcttggtaagctcagtatatgatgcttgttgtatatgacgtttcctgcatttgatgcttcagctcacttttgaagactgaaattttcttgagctcaattaatcacaagatactcttaacgttactatataacatgaaattaatggaaaagggagtggcaggatt

SEQ ID NO: 157 - DNA, 579 bp, Homo sapiens
  MAP TO CHR22_177.0; EXPRESSED IN HELA, SIGNAL = 0.69; EXPRESSED IN PLACENTA, SIGNAL = 0.67; EXPRESSED IN ADULT LIVER, SIGNAL = 0.67; EXPRESSED IN BRAIN, SIGNAL = 0.66; NT HIT: gi11418322, EVALUE 0.00e+00; EST_HUMAN HIT: AI275081.1, EVALUE 0.00e+00; SWISSPROT HIT: P16383, EVALUE 7.30e+00
gtgaacagagcctcagggaccagtgggaaaacatcaagaggtctaacgtctgagtcactggagtcacagaaggagaggagaaagatcagtgcaagaaaagaaaactgaagaaataatggcaaaaaaaaaaagtcctcaaatttggtgaaagacaaaaactgcccatctaggctgtggcaggcctactagggaatggacaaaaagttccggcacgttccactggctgagggagcatgggacacggacagctcagctgcacgtccgtaaaccgtcccttccacggccaccctgggcatggggaggggcgggggtgtttgtggagaaaaaccagcaccgcagaagtacaaattcaaaaatcttaatttattgtagactcttctcatttgtaattccagtgttttgaacattaataaatacacgttctgttaaaaacctccagtgtctaatctctcccataaagtcttaagtaataaaaataggtttacatttttcccatctcaataaaactgacagttgttttttggtaacagttctgatcaaattaaaaattacacctcgtgatgttggctgtggagtacg

SEQ ID NO: 158 - DNA, 543 bp, Homo sapiens
  MAP TO CHR22_39.0; EXPRESSED IN HELA, SIGNAL = 4.9; EXPRESSED IN HEART, SIGNAL = 5.4; EXPRESSED IN PLACENTA, SIGNAL = 6.5; EXPRESSED IN BONE MARROW, SIGNAL = 7.6; EXPRESSED IN ADULT LIVER, SIGNAL = 4.2; EXPRESSED IN BRAIN, SIGNAL = 6.8; EXPRESSED IN FETAL LIVER, SIGNAL = 6.7; EXPRESSED IN LUNG, SIGNAL = 5.3; NT HIT: AF288742.1, EVALUE 2.00e-59; EST_HUMAN HIT: AW516809.1, EVALUE 0.00e+00; SWISSPROT HIT: P56785, EVALUE 8.80e+00
gaagcctgacttccaagctgtgcttttaacttccccaccatgttgcacctaaagctttggagttttcctgtgattagtgtttttggtgttgttttattttttttcttacaggaactcttgcaagaagaaaggactatgagttcaactttagagggagccatggggactaaacaaaattctgaggccccctcaaccatctaaatggacttccttctgggccaggacactcgaaaattaaacctgaaagactggttcaggccatgatgggaagtgggagtcgaacatgcctcatcataccctccagcattaacatcaacacagaccttaaggctgataagaagcatttacaatctattctctctgaagtcttctacctggaggcttcatctgcatgataaaactttggtctccacaacctcttacaacccaggcattcctttctatcgataattactctttcaaccaattgccaatcagaaaattgttatatctacctataatctagaagcccccacatcaagttgttttgcctttctggacagg

SEQ ID NO: 159 - DNA, 511 bp, Homo sapiens
  MAP TO AC022528.3; EXPRESSED IN BONE MARROW, SIGNAL = 0.86; EXPRESSED IN BRAIN, SIGNAL = 0.9; EXPRESSED IN FETAL LIVER, SIGNAL = 0.88; EXPRESSED IN LUNG, SIGNAL = 0.79; EXPRESSED IN PLACENTA, SIGNAL = 0.84; NT HIT: gi14740146, EVALUE 1.00e-07; EST_HUMAN HIT: AV660397.1, EVALUE 8.00e-10
tttcctcggttttgatgaccttgacagttttgaggagtaataatcagataatttatagcataatcttcagtgtgggtctctcagatggtgctctctgggatctattttgagtattaaacaaatgcatgatgcttcatcaggagaatatctagaataagctttgtattgccagagcctaggcatgcagatgagaagagcaattcctctatgctactccagggtcagtattaaatgagtttcttaggaaaagtgtacatatatacatcaaggacagatatgttcttttcaatgaatgaataaaagaacacatttctttagaaatccttcaccacagaaatatcatagacacactccccactgatcattataagaaagttagaaactttcagaataatatagtagatgaagccatgatttcagttaatgataaaattgtcattgtgaatagcatgttcgtggccaacaaaaacagatgtccatataaccatttggagccatccaatgcctaaag

SEQ ID NO: 160 - DNA, 522 bp, Homo sapiens
  MAP TO AL078623.28; EXPRESSED IN BONE MARROW, SIGNAL = 1.5; EXPRESSED IN BRAIN, SIGNAL = 1.8; EXPRESSED IN HEART, SIGNAL = 1.5; EXPRESSED IN FETAL LIVER, SIGNAL = 1.3; EXPRESSED IN PLACENTA, SIGNAL = 2.1; EXPRESSED IN LUNG, SIGNAL = 1.8; EXPRESSED IN ADULT LIVER, SIGNAL = 1.8; NT HIT: AY028079.1, EVALUE 3.00e-05; EST_HUMAN HIT: BF964183.1, EVALUE 4.70e-02; SWISSPROT HIT: P11260, EVALUE 4.30e-01
caaacagaagccttggaactgaagaattcaatgaatgaaacaaaaaaatacaactgagagcttcaatagtagactgtattagggagaagaaagagtttctcaacttgaagacaaatctttaataataacctcatcagatgaaggaagaaggaagaagagaagaagagaaggagaagagaaggaagataaaagaagaagaagaggaggaggagaaggaagaaaagaagaagaagaggaagaagaagaagagaagaagagaaggagaagagaaggaagagaaaagaagaagaggaggaggaggagaaggaagaaaagaagaagaagaggaggaagaggaggagacaatggcttatgtgacttatgagacagcatagagcaaccaaactttcaaatttttagagttccagaaggagaagagatgagcaaagacatggaaaaactacctaatacaataatagctgaaaacttctcaagtcttacgagagatatacacatctagatacaggaagtgcaaagattccc

SEQ ID NO: 161 - DNA, 600 bp, Homo sapiens
  MAP TO AC022263.3; EXPRESSED IN BONE MARROW, SIGNAL = 3.3; EXPRESSED IN HELA, SIGNAL = 2.1; EXPRESSED IN BRAIN, SIGNAL = 3.4; EXPRESSED IN HEART, SIGNAL = 2.8; EXPRESSED IN FETAL LIVER, SIGNAL = 2.5; EXPRESSED IN PLACENTA, SIGNAL = 3.4; EXPRESSED IN ADULT LIVER, SIGNAL = 2.7; SWISSPROT HIT: P43835, EVALUE 7.70e+00; NT HIT: AL163300.2, EVALUE 4.00e-14; EST_HUMAN HIT: BG432721.1, EVALUE 2.00e-13
atggatggtggtgatggttgtacaatcaggtgactgtatttagtgacactgaactatgcacttaaaaatggttaaaatggcaaattttatgctatgtatattttgccaaaataaaaattacaaacttttttaaaattaaaagctttagaataattaattaaaataaaagtaattaaatctattttaaagttaaagctaaaatgaattccccttcaatcccaataactatgtgccaaaagtgctacttctgctctaatcattctacctactgtgaatatccatgtgcgacttttggctagttcataaaataaacttgaatgggcattaattttttctaattctctttatccacaagctatattctacatcctacaacttgcagaccacacctgatacagatgaatcatttttctgctccctctcgcaattccgtctggtatctgtgatttgtatacgccctcctgctgctctaggtccaatctctgtgcagttggatgtcttgatattggtaactcttgacctgggtaagcaagaaacactgtgaaattgatgttttctctttgaagttgaccctgaaataggagaatctttgggtggtcc

SEQ ID NO: 162 - DNA, 584 bp, Homo sapiens
  MAP TO AL136312.1; EXPRESSED IN BONE MARROW, SIGNAL = 0.74; EXPRESSED IN BRAIN, SIGNAL = 0.66; EXPRESSED IN FETAL LIVER, SIGNAL = 0.66; EXPRESSED IN PLACENTA, SIGNAL = 0.74; EXPRESSED IN LUNG, SIGNAL = 0.73; NT HIT: AB019004.1, EVALUE 8.00e-25; EST_HUMAN HIT: BI766036.1, EVALUE 1.00e-21
agggtagggtgtggggatagtttggggatgaaactgttctacctcagatcatcaggcattagttagattctcataaggagaacacaacctagatccctgcataacagctcagaatagggttcctgctgctaaaagaatctaatgctgctgatgatctgataggaggcagagctcagacagtaatgctcgctagcccttggcttacttcctgcctaacaggccatggacaggtaccagtctgtggcccgggggttgtggacccctgccatagaggacactgtggtctatgttaactataataattctacccaccaactaccatcccaggccaatgattggattgcaaatggtcatgactgaattctgaacataagaggaaaagttttctgagcagttttggggaaagttatctctcccctaagcaagagacacaagaagaaaccacccatcttctaactctgagcactgtcctcgatgtggcccctggagctgctgccctcatcttatgccacacctgagaatgaaatcaacactgagaagcgcattttggagatatgggaaagcccgtgcttgatgacaacact

SEQ ID NO: 163 - DNA, 587 bp, Homo sapiens
  MAP TO AL136084.2; EXPRESSED IN FETAL LIVER, SIGNAL = 3.8; EXPRESSED IN BONE MARROW, SIGNAL = 4.4; EXPRESSED IN BRAIN, SIGNAL = 4.2; EXPRESSED IN HEART, SIGNAL = 4.5; EXPRESSED IN HELA, SIGNAL = 2.3; EXPRESSED IN PLACENTA, SIGNAL = 5.4; EXPRESSED IN LUNG, SIGNAL = 4.4; EXPRESSED IN ADULT LIVER, SIGNAL = 3.4; EST_HUMAN HIT: AA868555.1, EVALUE 1.00e-12; SWISSPROT HIT: P53814, EVALUE 1.50e+00; NT HIT: L14561.1, EVALUE 6.00e-04
tggacaccctgaacttctccagctctgtgcctttatccaccccgcaatgctgtcctgcccagtcctgaggcccaaggcatgccctggagggagccttaatgagccttcatcagaacttctcagaccttaatgagcctgagaatcacccaggagcttgttaaaatgcagattctgcttcagtaggtctgagtggggcctgagagtctgcatttctaacacgctccaagggaatgccagggctgctggtccatgacccacactatgagtagcatggtgccagatggtggggggggcgttaagccagatgggtgagtgatgatgggaagtccagtgctccctgagtcgtgggtgctgatcgcagctctagctctttccacccctcaaagtacaggagctggaagaggagaaaggaggtggcaacatggggcagctttgggtgaccttctcaggggaaataaccacttgtgagcccagagaagctcccctggaggaccacctgcttctgctgtcagcgggaagtcacctccaagctcctctggtcctttagtccatcactttcttgacatggatggggagactgagaccaa

SEQ ID NO: 164 - DNA, 541 bp, Homo sapiens
  MAP TO CHR22_99.0; EXPRESSED IN HELA, SIGNAL = 1.5; EXPRESSED IN FETAL LIVER, SIGNAL = 2.7; EXPRESSED IN LUNG, SIGNAL = 0.75; EXPRESSED IN PLACENTA, SIGNAL =   1; EXPRESSED IN ADULT LIVER, SIGNAL = 0.46; EXPRESSED IN BONE MARROW, SIGNAL = 3.3; EXPRESSED IN BRAIN, SIGNAL = 3.2; EXPRESSED IN HEART, SIGNAL = 2.8; EST_HUMAN HIT: AW207824.1, EVALUE 0.00e+00; SWISSPROT HIT: P43878, EVALUE 6.60e+00; NT HIT: AB058744.1, EVALUE 2.00e-03
aaagtggcctcacagaatggtgtcccatgcaccccagtggggaaatggggggaaaagacactaagagttgcaaagcgattgaggggagagcagaagggctaagagattgtaactggcccaaaggggcctgagttaggatgaagaagaaacagaaagcatggcctatcagtgggagaccacatagtaccacagacaccacagaagcaaatgtcaacacatggtgatagggacccaccttcttcagatatttcatcagagatcagcacgaacaaaggatgatcatggaccagatgccctatgcccatctgattcctgtcccttgaggagaaacaaaggaaaaaggagaagctaagcatcttgagttaattgtgtatttgtcccaaagagactgagtattaaactagacttggctgagcatacttggttttgcaagattaagttttttgcccttatggaattggaggcatgagagctaagacactgttttatacagaaataaagcaaattaacatctttacaaacctgagttggggtttttgtg

SEQ ID NO: 165 - DNA, 583 bp, Homo sapiens
  MAP TO CHR22_232.0; EXPRESSED IN HEART, SIGNAL = 1.4; EXPRESSED IN FETAL LIVER, SIGNAL = 1.3; EXPRESSED IN LUNG, SIGNAL =   1; EXPRESSED IN ADULT LIVER, SIGNAL = 1.1; EXPRESSED IN BONE MARROW, SIGNAL = 1.5; EXPRESSED IN BRAIN, SIGNAL = 1.5; EXPRESSED IN HELA, SIGNAL = 2.7; NT HIT: AF010317.1, EVALUE 3.60e-02; EST_HUMAN HIT: BF825530.1, EVALUE 5.30e-02; SWISSPROT HIT: P40889, EVALUE 1.10e-02
tgggagaccttgtggaagtcagtttatctttagagtttcagtttccttatctgtagaagggggtaagaatgcccccagggttgacccttcaggttcatgggatgataagaaaggaaaatggtggacgagaaaggtttctgaggctctgctgtgctcctggccctcttgcttgcttctgccctacctaaggcacagacaagttctctgtgtaggaaaaggattcttgttttccacatgtggtatcttccagagtatcctggaatgtctacatgcccgattagaatccagcattagaatgaagtcagactctcagcctcttctttgggaaacccctgcccatctggtcattggtgctgtgcaacaggaaagactcggggtgctggttgcattgctgcagcaggagagactcggggttctggttgcattgctgcagcaggagagactcagggttctcgttgcattgctgcagtaggagagacttggggttctcgttgcattgctgcaagcaggagagactcggggttctcgttgcattgctgcagcaggagagactcagggtactgcttgcattgctgcatctctc

SEQ ID NO: 166 - DNA, 523 bp, Homo sapiens
  MAP TO CHR21_47.0; EXPRESSED IN BRAIN, SIGNAL = 0.28; NT HIT: AJ400878.1, EVALUE 7.80e+00; SWISSPROT HIT: P97812, EVALUE 2.80e+00
accaccttcattccagcaacttgtagggttagcaataagactcactacaggtgtaatctatgacctagtaatttaatatacattttggacaatcacgcagaggtgtcacttacctttacgagcacattaattgggcatatagaaaaagctgtaaaataaacagcttttcattgtttttacttgccagttttttttcagaattttccagtatataatttctgattgagtaattacatttttctttcatgtccatgtcaccaggggctccagtgaatccatgctggagcttcagtttgctctcctgggcgttgtctttaggcataaagtaacctgagtagattaccgaggcagaaaatggtcctgatgttggctttctctctgcctcttgtctgtacaaataatttctcttctgtctaagcagtttagcacacatgtagctctctattctattgctccactaaagttgcagcactttgcatgtgagtgtgtatgatgatgctggggaaaatgaggagaggcatgc

SEQ ID NO: 167 - DNA, 566 bp, Homo sapiens
  MAP TO CHR22_211.0; EXPRESSED IN FETAL LIVER, SIGNAL = 1.3; EXPRESSED IN BONE MARROW, SIGNAL = 1.5; EXPRESSED IN BRAIN, SIGNAL = 1.3; EXPRESSED IN HELA, SIGNAL = 2.4; EXPRESSED IN PLACENTA, SIGNAL = 0.7; EXPRESSED IN LUNG, SIGNAL = 0.78; EXPRESSED IN ADULT LIVER, SIGNAL = 0.78; NT HIT: AL163227.2, EVALUE 0.00e+00; EST_HUMAN HIT: BE729966.1, EVALUE 0.00e+00; SWISSPROT HIT: Q01668, EVALUE 3.20e-02
attggtaccagcagagtggggcattgctgaaaagatacctgaaaatgtggaagcgactttgggactcggtaacagtaagaggttggaacagtttggagggctcagaagatgacaggaaaatgtgggaaagtttggaacttcctagagacttgttgaatgtctttgacaaaaatgctgatggtgatgtgaacaataaggtccaggctgaggtggtctcagatggagatgaggaacctgttgggaactggagcaaatgtgactcttgttatgttttagtaaagaaactggcagcattttgcccctgccctagagatttgtgcaactttaaacttaagagagatgatttagggtatctggtggaagaaatttctaagcagcaaactattcaagaggtgacttgggtgctgttaaaagcattcagtttcataaggaaagcagagtataaaagtttgggaaatttgcagcctgacaatgcaataaaaaagaaaaatcccattttctgagtagaaattaaagccagttgtagaaatctgcataagtaacaaggagccaaatgttaatcccca

SEQ ID NO: 168 - DNA, 580 bp, Homo sapiens
  MAP TO AL158093.3; EXPRESSED IN LUNG, SIGNAL = 2.1; EXPRESSED IN HEART, SIGNAL =   2; EXPRESSED IN BONE MARROW, SIGNAL = 1.8; EXPRESSED IN ADULT LIVER, SIGNAL = 2.5; EXPRESSED IN PLACENTA, SIGNAL = 1.5; EXPRESSED IN BRAIN, SIGNAL = 2.1; EXPRESSED IN HELA, SIGNAL = 1.6; EXPRESSED IN FETAL LIVER, SIGNAL = 2.2; NT HIT: AF030694.2, EVALUE 1.40e-01; EST_HUMAN HIT: AA063587.1, EVALUE 3.20e+00; SWISSPROT HIT: P57415, EVALUE 2.50e+00
ctgctttggcatatgtgctgcttaaaattatttatggaaatataatatgaaatatggttaacaaaacaatacctattgtagatgcaatggaaacaagactcaagtaaatcgaatcttctttttaaaaatatgtatttatttatttatttttaaccccacccaagccagaattttgaacttcttttatgagaattcttttcagcatcaattttttttttctcaacttggaaaatactatttaccccacagagatgggtcatcaaatattgtgcccaggatatgtagcaaaatagagaatcacatgattctcactgctttttggaaatcataaatgtgatcagccagctaattacatttccattttacttgtttgagattgagctcctgtgagagaatggtagtatttcctcccttccccttccccttcccttccttcttttttcttttttctcttcctctctttttcattcttcaggtattttcaaaacatggtaccttttatggctcgaaggcatgtttgtggcgggtgttggcaggttccctgtttatgtttgactctgctgatccacacagcaaggaa

SEQ ID NO: 169 - DNA, 509 bp, Homo sapiens
  MAP TO CHR22_21.0; EXPRESSED IN BONE MARROW, SIGNAL = 1.3; EXPRESSED IN BRAIN, SIGNAL = 1.1; EXPRESSED IN PLACENTA, SIGNAL = 1.4; EXPRESSED IN ADULT LIVER, SIGNAL = 1.7; EXPRESSED IN LUNG, SIGNAL = 1.4; EXPRESSED IN HEART, SIGNAL = 1.2; EXPRESSED IN HELA, SIGNAL = 1.4; EXPRESSED IN FETAL LIVER, SIGNAL = 1.3; NT HIT: gi14249397, EVALUE 9.00e-89; EST_HUMAN HIT: BI669844.1, EVALUE 1.00e-88; SWISSPROT HIT: Q9UH06, EVALUE 3.00e-30
caaagatttgcttcccttgcattcttccccttgatgcaaaataactgccttttattggactacacccagtttgactcacagaacttgaagaaattataacctagatgactagatgaacacagtaatctccatagaccataggagattgcagtggatggcaaagtgttactaaacaaaaggaggaaaggtcagatggaaagctgtacacttacgtccttctcctggatggtgcactccttacaataataggcatcagagaccccaggtcctccacagatcacacagcgcccctggtaagatccatagttacactcatcacatatgcgcaccagagtgcagggacgcacataggagtcacaaatcacacacttgccatcacctgtaaggaagagaatggagtcatgctcacaagttcttcagtcctctgctatctcctgccatggggaaatatactagtctcctgggaaatacactagtctccttttgacagtgactttagggccctcctc

SEQ ID NO: 170 - DNA, 560 bp, Homo sapiens
  MAP TO AC016763.5; EXPRESSED IN BRAIN, SIGNAL = 4.8; EXPRESSED IN HELA, SIGNAL =   2; EXPRESSED IN FETAL LIVER, SIGNAL = 4.7; EXPRESSED IN BONE MARROW, SIGNAL = 4.3; EXPRESSED IN PLACENTA, SIGNAL = 6.1; EXPRESSED IN ADULT LIVER, SIGNAL = 4.4; EXPRESSED IN LUNG, SIGNAL = 4.7; SWISSPROT HIT: P08071, EVALUE 9.20e+00; NT HIT: gi15295397, EVALUE 0.00e+00; EST_HUMAN HIT: BG391934.1, EVALUE 0.00e+00
tgcttttcagggtcataatggaccgaatatccacagaacatgacccagtcctgaaacagatagaccctgaaatgctgaatagtttttcaagctcttcccaaactatagacttttcttctaatttctctcggaccaatgcttccagtaaacattgtgaaaatagactgtctctttctgaaatattaagcaatatcagatcatgtcgactacagtgtttccagccaaggctactaaatttacaggacagtgatagtgaagaatgtacctcaagaaaaccagggcagactgtgaacaataaaagagtttctgcagcatctgtagctttattgaacaccagcaagaatggcatatcaggtaagctgttgctgtgttaaaagtatatcctgctattcttttttacttaattttattgggaaaggaattttatcttaacctacttaattttttttccaacctaagaaacaaaattgttctgttctgtctcacattttaaccaaattgtcctaactagtactgtaaaaccactgacatctgtttcgggtgtgtgcctggtacggtaa

SEQ ID NO: 171 - DNA, 522 bp, Homo sapiens
  MAP TO CHR22_178.0; EXPRESSED IN FETAL LIVER, SIGNAL = 0.57; EXPRESSED IN PLACENTA, SIGNAL = 0.67; EXPRESSED IN LUNG, SIGNAL = 0.73; EXPRESSED IN ADULT LIVER, SIGNAL = 0.69; EXPRESSED IN BRAIN, SIGNAL = 0.65; EXPRESSED IN HELA, SIGNAL = 0.56; SWISSPROT HIT: P81439, EVALUE 6.30e+00
aaagctgaaaggacgcaaagataacacagatagcaactgcaggaagcagctaccacccctaaggctgagttaacaaacgctcagaggagggacccagggaacttaaactcagacttctgagagggcactactcagctgtgctggtttttctaatttcccaggagaggcccaaggagcctgggactctagtggactctaaaggaagcttgataaaactggtcctcaaatgttgggaaaactgctaactggatccagtaactgctacaggaaggtactgctgctgcagagataaagaaatgtcattaaggcagcactcacaggaacagcagagaggaaggccatgacgaggatacgagcaaatccctctgcctcttctagatctttaccacccaccactcgcaacagggagcagctggcaaagctgaaatgttgcttgcagaatctcagtcccaggatcacaaagcagaatacataagatatctttgcagctaagaataaacaagatggatggatatgcagcaa

SEQ ID NO: 172 - DNA, 515 bp, Homo sapiens
  MAP TO AL121993.2; EXPRESSED IN BONE MARROW, SIGNAL = 1.3; EXPRESSED IN BRAIN, SIGNAL =   1; EXPRESSED IN HELA, SIGNAL = 1.4; EXPRESSED IN PLACENTA, SIGNAL = 1.4; EXPRESSED IN LUNG, SIGNAL = 1.4; EXPRESSED IN ADULT LIVER, SIGNAL = 1.4; NT HIT: gi14748718, EVALUE 3.00e-58; EST_HUMAN HIT: BG393049.1, EVALUE 5.00e-14; SWISSPROT HIT: Q9UNX4, EVALUE 3.00e-17
aacaacatgcctcctggaacatactatttcagcttttattttctcatttttataaaacagattgaagacccggaagaaccagaccccaagaaaatcaaaggatcttctcctggaatacaagatactcttgaggcagaggatggtgcctttgagacggatgaagcccctgaggatgtaattcattttcatttcttaagtttaattgtgttgaataatgggaaagtaagaattgcagatttttagggaatcatcactttagggaatatttttgtcacttgcacttattagaattatgtttttttcagaagttcagcagaacttacatctaaccttcatctgctcttgcttcttctgtagcgaatcctttcatgcagaaaagctggttccataatgcgggaaggaagagacagagttgtaaaccttgcagtcgacaagacaggcaggattcttgcttgccatgtgagtaccatacttaggagaaaataacaaggactaggctgttccttccaaacact

SEQ ID NO: 173 - DNA, 595 bp, Homo sapiens
  MAP TO CHR22_127.0; EXPRESSED IN BRAIN, SIGNAL = 1.2; EXPRESSED IN HELA, SIGNAL = 1.2; EXPRESSED IN HEART, SIGNAL = 1.2; EXPRESSED IN PLACENTA, SIGNAL = 1.3; EXPRESSED IN LUNG, SIGNAL = 1.3; EXPRESSED IN FETAL LIVER, SIGNAL = 0.97; EXPRESSED IN ADULT LIVER, SIGNAL = 1.2; EXPRESSED IN BONE MARROW, SIGNAL =   1; NT HIT: U92812.1, EVALUE 2.20e+00; EST_HUMAN HIT: BF956952.1, EVALUE 2.10e-01; SWISSPROT HIT: Q04725, EVALUE 1.70e-01
cagctaccaacagagcctccctctcccttctgagctgcctgggtgactgagggccccaaggggcttatgttcactggccctgtcctccctggcacctgtgcacacacctgcacagagcagaaggaatttggacccataggttcacctcttgtaactcgtgtacatggcccaggtgttcctgatgccccacctgcgggacaaactggacgcagcagggtgttttgggggcacagagccaccgtcggagtcacacatcgcacacacccagcaagtgatagtgtgtgaccggacatggtgctgaaggtggcctatgtcagccatgggcttggtgattttgagagccaggatgcggttcctggcgcaggtgcctgggggcgcctagaggagtgcgagactcccgagggtccctctgcctaagctgcctggggagggcggctcgctttatttaattcacacgctcaaagcatttcaggaacaatgaatgccttcggccctctgtttaaatgactgaattatagaggtgtgagggggccacgcccaccccgttttacacttggcgcctcccttctaatttcgaggaaacctgcaattcagc

SEQ ID NO: 174 - DNA, 580 bp, Homo sapiens
  MAP TO CHR21_2.0; EXPRESSED IN FETAL LIVER, SIGNAL = 1.2; EXPRESSED IN BONE MARROW, SIGNAL = 1.3; EXPRESSED IN LUNG, SIGNAL = 0.89; EXPRESSED IN ADULT LIVER, SIGNAL = 0.76; EXPRESSED IN HELA, SIGNAL = 3.6; EXPRESSED IN BRAIN, SIGNAL = 1.3; NT HIT: AL163201.2, EVALUE 0.00e+00; EST_HUMAN HIT: BI084551.1, EVALUE 1.00e-48; SWISSPROT HIT: Q90225, EVALUE 1.10e+00
tttgataaggtctgggtgggactcacttccaggtggtgaggacagctctccccgatctctctatcggcctgctctgggccacagagactggccctgacgacttctcagctcccggtcagccctgtcaccccgggccagttcttcatcgtacctggagacagaaacagccaggatcatggcaggctctctttcgaaggcaacaggcagggccaccaggctgctgtgtggcgaatacgacattacccagagaagcggcctgagagggccccccggctcctgctggctcccacccacctcccacctggctccagcctacctacctgcgaggtggcttttgcagcctggcaaacgctccccaaggccaccatgcctatgtgtacagccttgttgttattgtggacagtgttctcccctcagaagctgacattttatacaggtcaccagatcaaatttggcaatgactcgttttataaggtcaatatgtatttacaattactcacattatcttgagttctcaccgctgttgtgtccttcctgaattttcatgtcgcattgggtcagcttctcttctgcctttgga

SEQ ID NO: 175 - DNA, 551 bp, Homo sapiens
  MAP TO CHR22_179.0; EXPRESSED IN BONE MARROW, SIGNAL = 0.94; EXPRESSED IN BRAIN, SIGNAL = 1.2; EXPRESSED IN PLACENTA, SIGNAL = 1.1; EXPRESSED IN LUNG, SIGNAL = 1.3; EXPRESSED IN FETAL LIVER, SIGNAL = 0.79; EXPRESSED IN ADULT LIVER, SIGNAL = 1.1; SWISSPROT HIT: P10162, EVALUE 6.90e-02; NT HIT: gi16167426, EVALUE 2.00e-80; EST_HUMAN HIT: BF738511.1, EVALUE 0.00e+00
taacaggcatcctgaccctccatgttcagacccctactgaagtgacataaggagtacctccatgtctgtgctcaactgtcacacaaagcaatgacccaccccgtcctctgggcagttgtgagggtcaggaacccactggttcctcctggctgcaaacccctccttgccagctgccaactgcttcagagagcaccaggcccagccccaggcaccagcaaaccctctggagggaggcgctgggcccagatcacctagctggggcaggagagcgggcctcaaagccacctgaggtgggtgccaggaccccttggtggggacctgggagttcactggggagtgaggatgcagcgagtcctcgggcggcatgttgacctcgccgtagtagatgtagcgcagcatggactcgaaggcctgcctgctgggcaccatctccccgatggagatgttcacctgcccatcttcgggcatgaaggaccggaacatggcttcaaagtagctgcagacaacgagcggtaggcacctggccgtcagcagaacgaagacaccatcca

SEQ ID NO: 176 - DNA, 583 bp, Homo sapiens
  MAP TO AL136381.1; EXPRESSED IN BONE MARROW, SIGNAL = 0.97; EXPRESSED IN HELA, SIGNAL = 0.6; EXPRESSED IN BRAIN, SIGNAL = 0.88; EXPRESSED IN PLACENTA, SIGNAL = 0.81; EXPRESSED IN LUNG, SIGNAL = 0.93; EXPRESSED IN ADULT LIVER, SIGNAL = 1.2; SWISSPROT HIT: O28251, EVALUE 4.90e-01; NT HIT: U50871.1, EVALUE 2.00e-25; EST_HUMAN HIT: BI602105.1, EVALUE 2.00e-23
tgtccatcttttctggacccaactaatgtaccttttacatgtattgatagatggcttatgtctccctaaaatgtacaaaaccaagctgtaacccaaccaccttgggcacgtgttgtcaggacctcctgaggctgtgtcacgtatatccttaatcttggcaaaataaacttctaaattgagacctgtctcagatactttttggtttactatatagtcatctggtgtttcaacagacatttcctttaattcctgaagaagaaaagattgcctagtctttgcagctgggccctgtgcttgagcactcacccagacactttacaactctgcatttgctttgtgcagagcttgagagtcaaccataggttagagcttagggtgttctcagatctcttccgaggatgcctcttgcttgcacctagccttctagtttcccaataatatgtagaagcattgcaaagtcttttattctccaaagcatttcctctgctagcttttcctcccagtttctttggcttttctattgtttaccccaactgatcctctttttccttagtttgcagagactggttcatttgccttccat

SEQ ID NO: 177 - DNA, 576 bp, Homo sapiens
  MAP TO CHR22_206.0; EXPRESSED IN BRAIN, SIGNAL = 0.87; EXPRESSED IN HELA, SIGNAL =   1; EXPRESSED IN FETAL LIVER, SIGNAL = 0.84; EXPRESSED IN PLACENTA, SIGNAL = 1.1; EXPRESSED IN BONE MARROW, SIGNAL = 0.94; EXPRESSED IN LUNG, SIGNAL = 1.1; EXPRESSED IN ADULT LIVER, SIGNAL =   2; NT HIT: gi13648116, EVALUE 1.00e-126; EST_HUMAN HIT: BE241631.1, EVALUE 1.00e-126; SWISSPROT HIT: Q9BZC7, EVALUE 2.20e-01
cctgaccattttcatcaccctgaaatgaaaccccatccccttgaggagtcaccttccaactcctcctcccacccccagcaaccaataatctgctttctttctcaaagatttgcctatttgctacgtttcacataaatggaactatacagtatgtggccttgtgtgtcggcttcttttacttagcgtgtttttaaggtttatcaagttgtagcatgcatcatgaagaaaataagcatttgtgttgagtactccttctctcccctccacttttcccagtggccatgcagcagcccgccaccacctggcacacagcaggagtggacgacttcgccagcttccagcgcaagtggtttgaggtggcctttgtggcagaagagctcgtgcactctgagattcctgcctttctcctgccctggctgcctagccggccagcctcctatgcaagtaggcacagctcctttagccgaagttttggaggacggagccaggcggcagcacttttaggtacatgctcaacccagacaaggtctgagggtgtgccagtgggtggctgcgggaaagtagtggccagccaag

SEQ ID NO: 178 - DNA, 530 bp, Homo sapiens
  MAP TO AC011676.4; EXPRESSED IN BRAIN, SIGNAL = 0.42; EXPRESSED IN PLACENTA, SIGNAL = 0.73; EXPRESSED IN LUNG, SIGNAL = 0.54; EXPRESSED IN ADULT LIVER, SIGNAL = 0.42; SWISSPROT HIT: P33485, EVALUE 5.70e-01
gtcgctgacttcctattgggcttgagctttccttgcagcctggaattcacttttaggctgactggggagggaagaatgagacagacactgctggccctgtcccggccccccggcctgtctctccatcctcggcctgacctgctcatggtgtctgcggccttcaccccgtgaccactcccgagggaagccgcctgcgaccctggcaaccctcctgccttgtgtaccccagtcgtgggtctcctgctctggccagattctggattcctccagaggggacaggccagcacctggggtggcgccaggcccaccgagaggttcagcagcgacagctgtcgttgggtgtagatgcttggtgccaaggcgtgccgccccttccagggaaagcacgtggggcagggcaccttgcgcaccagcattgagagcaccccagcaggaggcccgtgtgctgctcgccgcactgagcatcgtgggtgggaggcacgggcggtggtgccacggtgggctctgtgtctccactgatcccctttgaa

SEQ ID NO: 179 - DNA, 515 bp, Homo sapiens
  MAP TO AL133261.4; EXPRESSED IN BRAIN, SIGNAL = 2.1; EXPRESSED IN FETAL LIVER, SIGNAL =   2; EXPRESSED IN HEART, SIGNAL = 1.8; EXPRESSED IN BONE MARROW, SIGNAL = 2.2; EXPRESSED IN PLACENTA, SIGNAL = 2.3; EXPRESSED IN ADULT LIVER, SIGNAL = 2.2; EXPRESSED IN HELA, SIGNAL = 1.1; EXPRESSED IN LUNG, SIGNAL = 2.1; EST_HUMAN HIT: BG257747.1, EVALUE 3.00e-03; SWISSPROT HIT: Q31673, EVALUE 8.20e+00
tgacataaagctgcccagtgacaagccttcttataaacactactcaactctacaaggccactggcatgtatttgggttaaagaactctgtgagacacacaaactatatgtttataagaaatttttaattgaaaacgtatgcctacatgagattgtattccttgtttatgaaactaaaaggtatttacctgtacaggttgctatacttgcattacgtgcaaatagacttagagataatttaaaagttctaagtagtgtatactttgaaaaactttgatccctaaagagagaaatagaagtcatcaataaacttggctctgactttgcattagtcatggattcagagaatcatgagctcagattccagtaaatacctgtacaacaggaggaaagccattcaacatttcaacactgggaaacatttgcgtgagaaagtttttcacaaagggaagatcaatcccccctccactaactgaaaacaaaattaattaccacagttggcaggagataaatggc

SEQ ID NO: 180 - DNA, 544 bp, Homo sapiens
  MAP TO AC015822.3; EXPRESSED IN BONE MARROW, SIGNAL = 1.5; EXPRESSED IN HEART, SIGNAL = 1.3; EXPRESSED IN LUNG, SIGNAL = 1.4; EXPRESSED IN BRAIN, SIGNAL = 1.4; EXPRESSED IN PLACENTA, SIGNAL = 1.5; EXPRESSED IN HELA, SIGNAL = 0.69; EXPRESSED IN ADULT LIVER, SIGNAL = 1.8; EXPRESSED IN FETAL LIVER, SIGNAL = 1.5; NT HIT: AL161585.2, EVALUE 2.00e+00; SWISSPROT HIT: Q9QZZ4, EVALUE 2.60e-01
atgtagcttgtgctgggaggtactgttctaccagagatggaactaaatttttactttaagttgtatgataaacccaaaaataaacccaacccaaaataaaaaacaggatcagttacaaagttcacagtattcatgatgtaaaaataattccagagtttttgttattcttttcgatagtgagatcagagaaaaacatctcccatgagacttcactatgaagacattatgaaatatggtaaaaacaaatgtcttcataatcatatttatgataaatatagtggtgagtttcatagggatttaaataaaatcatccagtgtagcctgacattgattcaaatcactattgaagaaaatgaattttgtgatgtgtgtgtggtagagagtataatgtaatgaattctggatactcaattttatgatgctctggcttaatctaagtataacttttagaataaagtatttctaaaccctgcctacacattagaatcacttttggtacttttgaaagacacgtatgcctgggcccatccccacaaattctgat

SEQ ID NO: 181 - DNA, 575 bp, Homo sapiens
  MAP TO CHR22_111.0; EXPRESSED IN BONE MARROW, SIGNAL = 0.94; EXPRESSED IN PLACENTA, SIGNAL = 1.1; EXPRESSED IN ADULT LIVER, SIGNAL = 0.78; EXPRESSED IN BRAIN, SIGNAL = 0.96; EXPRESSED IN FETAL LIVER, SIGNAL = 0.76; NT HIT: gi14777883, EVALUE 0.00e+00; EST_HUMAN HIT: BE548505.1, EVALUE 3.00e-56; SWISSPROT HIT: P51825, EVALUE 9.60e-02
aggtgtatggcaggtccaagatacatgcataagtgagtcccatttcaaagacagtgccctccgtacccactccaagggtccctggcacacagatcctacacctgaagtggcaattcacagagagaggctggaatttccatttaagaagaaatgctcctggccactgacttacatcaatgaaggagaagtcatctactctcttttcagggcaggcgtccggtggaggcggcccctccatcccatcggtggattccaggtcagtgctggagtggtccacgctggtgctccgctggtccctggagcagtcatactggtcccctgccgaggtgggctccgtttgggaggacagagaagacaaacggctgctggggggctgtttccttgtcgatgtggcactgctatctggggactcagtggccaagctgccaaaaaagggaatgaagggagacatggttatggagaacgtttcagagaacgggatttcaagtgaaggatgctgcaggcagcatagcttgggttatgttttataagccaagtaacaacagacagaacatcccagcagaagaccctctttg

SEQ ID NO: 182 - DNA, 544 bp, Homo sapiens
  MAP TO AC004846.2; EXPRESSED IN BONE MARROW, SIGNAL = 2.2; EXPRESSED IN PLACENTA, SIGNAL =   3; EXPRESSED IN HEART, SIGNAL = 2.5; EXPRESSED IN LUNG, SIGNAL = 2.5; EXPRESSED IN ADULT LIVER, SIGNAL = 2.8; EXPRESSED IN BRAIN, SIGNAL = 2.5; EXPRESSED IN FETAL LIVER, SIGNAL = 2.6; SWISSPROT HIT: Q9UKP5, EVALUE 3.00e-08; NT HIT: AF109907.1, EVALUE 0.00e+00
catgtacagagcttggcagcctcttggggaccacgagctgcccactcgccctctctccccacacccccatttacctcgatgaccaggggctccgaggtggggccccgggcatggagtcgctcaggggccaggtccccctcagcaccccgctcgtaatgcaggatggtgctggctgctggcagggcccgggccgcctcgatggtccagtgcccattgaggtagtattccccacgaacattcttcacagctgcgcagaggagaccgcctcagtcagccagagggagcagtgccgcacctccccctgcagccccagacctgcctaggacctaaccctaggctctcacccaggaagttcctgctggcagcagcctcgtcgatgaggatgctggtggcacccatgggaactatgaggatctggttgtagcctgggggcagagacgcaggtgctgggtgtgctgggctatccctctcccggcaccactcaaacaggactccaagtgccacacagcacagaatgggggcagggagggtacacaagagccag

SEQ ID NO: 183 - DNA, 572 bp, Homo sapiens
  MAP TO CHR22_20.0; EXPRESSED IN BRAIN, SIGNAL = 0.72; EXPRESSED IN HELA, SIGNAL = 0.59; EXPRESSED IN LUNG, SIGNAL = 0.63; EXPRESSED IN FETAL LIVER, SIGNAL = 0.63; EXPRESSED IN PLACENTA, SIGNAL = 0.74; SWISSPROT HIT: P38785, EVALUE 9.40e+00; NT HIT: V00574.1, EVALUE 1.40e-01
tcgtagccatgtctaagggcttttctgaggtacaggccccgctagaggaagctgctccaactctgttcctgtctgctcctgccccactctctgtttctagacagcctgcgttcaagtcattgtggcccaagactgaactgcagaatggaaaggagtgaggcgctgcagcagaaggagctcgctgtcaaagctccaaagagccggagaccatttgcagggtggggtctgagggaggttggcaaggaaaggggagcatcatgtggattcctttccatagttgtcatgagctaacacacttcgccccaacagctggcttagattctaattgtgcccaggactggccatgcaacccttgagtaaatgctggccacctctctatgacaccaaaaggccagaaattacctggcatgataaagaagaaggagtcaagtgtataggagaccggagggttagactggatttctcaggcgctttctgccctgactgtgtgctgccagggcccaggagattcccctttcctttgatgagaagaatcagtggatattctctagagctctctagaatgggggagg

SEQ ID NO: 184 - DNA, 564 bp, Homo sapiens
  MAP TO AL136304.2; EXPRESSED IN FETAL LIVER, SIGNAL = 0.81; EXPRESSED IN BONE MARROW, SIGNAL = 0.77; EXPRESSED IN BRAIN, SIGNAL = 0.73; EXPRESSED IN PLACENTA, SIGNAL = 1.1; EXPRESSED IN LUNG, SIGNAL = 1.2; SWISSPROT HIT: Q14999, EVALUE 7.00e-46; EST_HUMAN HIT: BG004189.1, EVALUE 1.00e-110; NT HIT: gi14781548, EVALUE 2.00e-93
ctgctctgctggtgctgtagaggaagtcccactgctgcatggtctctccttcatccgtgtttccgtgtgtgtctccgtgttccttctgcccctgtgccccttctctctgatgttctggctgcagatggtgctgggccagatcgaagaccacagacgaacccaccaacccatcaacatccctttctttgatgtgttcctcagatacctgtgccagggttcgtgcctgttgccgtgttgctccacctccccacacctatgtctgtttcccctctacaccctacctgaccgtgaccaccaccccttcccacttgcccccaggctccagtgtggaagtgaaggaggacaagtgctgggagaaggtggaggtgtcctccaacccgcaccgggccagcaagctgacggaccacaaccccaagacctattgggagtccaacggcagcgccggctcccactacatcaccctgcacatgcgccggggcatcctcatcaggtaactctcccacacatgtgctttgccacacacgtgtgctttcctgtgacgcccctgtgtttgttttgggggaa

SEQ ID NO: 185 - DNA, 543 bp, Homo sapiens
  MAP TO AL138722.2; EXPRESSED IN BRAIN, SIGNAL = 1.9; EXPRESSED IN HELA, SIGNAL = 0.87; EXPRESSED IN FETAL LIVER, SIGNAL = 1.1; EXPRESSED IN BONE MARROW, SIGNAL = 1.3; EXPRESSED IN HEART, SIGNAL = 1.3; EXPRESSED IN LUNG, SIGNAL = 1.3; EXPRESSED IN ADULT LIVER, SIGNAL = 1.3; SWISSPROT HIT: Q09749, EVALUE 6.00e-05; EST_HUMAN HIT: BG720179.1, EVALUE 0.00e+00
tatcttgtgctggctgttgctatgccaaatatcgttaccggaggccttatccagtcatgaggaagatctgtcaagtggtgccagcaggtctggcttttatcctagacatcagccctgtggcacaccgtgtggcgctctgtcacctggctggctgccaggagcaagcagcctggtaccacaccctccagatcctcttcttcctggttagcgcttatttcttctcctgccccgtgcctgagaagtacttcccgggttcctgtgacatcgtgggccatgggcatcagatcttccatgcatttctgtccatctgtacgctctcccagctggaggccatcctcctggactaccaggggcggcaggagatcttcctgcagcgccatggacccctatctgtccacatggcctgcctctccttcttcttcctggctgcctgcagtgctgccaccgcagcccttctgaggcacaaagtcaaggccagactgaccaagaaagattcctgaggctggcaagtggggcaacgtgtggaggaagcccctcataatt

SEQ ID NO: 186 - DNA, 530 bp, Homo sapiens
  MAP TO AC013614.4; EXPRESSED IN BONE MARROW, SIGNAL = 1.8; EXPRESSED IN BRAIN, SIGNAL =   2; EXPRESSED IN HEART, SIGNAL = 1.8; EXPRESSED IN HELA, SIGNAL = 1.4; EXPRESSED IN PLACENTA, SIGNAL = 2.1; EXPRESSED IN LUNG, SIGNAL =   2; EXPRESSED IN ADULT LIVER, SIGNAL = 1.8; EXPRESSED IN FETAL LIVER, SIGNAL = 1.6; SWISSPROT HIT: P53751, EVALUE 8.50e+00; EST_HUMAN HIT: BF365909.1, EVALUE 7.40e-01
ccatctcttctgcttctgccgaccccacagaggaccagcatgaaaggagatcattaggctattcagggcctccctcagactgcagaggtggctaagaactccctgcccacaacccctgcccagggttacatggggttttgaaagcattattctccccaaacaaaaaccacctctcccatttggactgaaggatccatccctgagccccttgtctcctatctccttttcagtagcctcctcgccatcagaactgtcactcccgctgccatcatcctctccttcagcaccatctccattctcatcactcgcatcaccaccacctcacacagaaccatctgcatccttctgctcacccagtggaccctcttctccctgtacccagggaggaaccctatcagcatttgctgcctttgatgctgcatccaaactctaagccctcctgagctaaggattttgcatggctgggctcccaactgtattctggcagctgggccccatggcagccagactgcagggctcagagaaacaac

SEQ ID NO: 187 - DNA, 596 bp, Homo sapiens
  MAP TO U82695.2; EXPRESSED IN BONE MARROW, SIGNAL = 3.6; EXPRESSED IN LUNG, SIGNAL = 8.8; EXPRESSED IN BRAIN, SIGNAL = 4.1; EXPRESSED IN ADULT LIVER, SIGNAL = 8.9; EXPRESSED IN FETAL LIVER, SIGNAL = 7.5; EXPRESSED IN HEART, SIGNAL = 2.8; EST_HUMAN HIT: AU117169.1, EVALUE 0.00e+00; NT HIT: U82695.2, EVALUE 0.00e+00; SWISSPROT HIT: P21810, EVALUE 1.00e-35
cacccacacaaataacacgcccatgccttggtttgctcctcccaacaacggggagcctctggtgtggcccttgaagtagggtgcagaggcaacagcaaaatgcctcctggaggcagcgggcttggcgtggagggagggaggcctgccgtgacccggcctctctgccttcaggtggtctatctgcactccaacaacatcaccaaagtgggtgtcaacgacttctgtcccatgggcttcggggtgaagcgggcctactacaacggcatcagcctcttcaacaaccccgtgccctactgggaggtgcagccggccactttccgctgcgtcactgaccgcctggccatccagtttggcaactacaaaaagtagaggcagctgcagccaccgcggggcctcagtgggggtctctggggaacacagccagacatcctgatggggaggcagagccaggaagctaagccagggcccagctgcgtccaacccagccccccacctcgggtccctgaccccagctcgatgccccatcaccgcctctccctggctcccaagggtgcaggtgggcgcaaggcccggcccccatcacatgttcccttggc

SEQ ID NO: 188 - DNA, 501 bp, Homo sapiens
  MAP TO AL031283.26; EXPRESSED IN BRAIN, SIGNAL = 0.59; EXPRESSED IN PLACENTA, SIGNAL = 0.61; EXPRESSED IN ADULT LIVER, SIGNAL = 0.58; EXPRESSED IN LUNG, SIGNAL = 0.58; EXPRESSED IN FETAL LIVER, SIGNAL = 0.42; NT HIT: gi15277339, EVALUE 1.20e-01; SWISSPROT HIT: P39922, EVALUE 1.00e-03
aggcccacacctagtaagcctcccatctgatctctacccaggatgaaataattctgctgctgggaaaagaggtcagccgtctctcagattatgaaattgaatccaaatacaaagacgtcataatagcaaacctgcagaatgaagtggctgagctgagtcagaaggtgtcagagaccaccacctccaggcagaatgagaaggagatctcgcagaagtgtcaggttctggatgaagacatcgatgccaaacagaaagagatccagagcttgaaaagccaggtaggcagagcctgagaggtacagcacagctctcaggccaaggcccgggaggccccaggaccaccaaccaaggtgagccacccagagttagggaacgcgtggtcagtggagcatggtggttaagaacacaaatccacaagactgggagattcggcagtttcctagcatggtaagaacaagatcagcctttgttcagcactggccatgtgcaagaactagtgca

SEQ ID NO: 189 - DNA, 553 bp, Homo sapiens
  MAP TO CHR22_215.0; EXPRESSED IN HEART, SIGNAL = 1.3; EXPRESSED IN BONE MARROW, SIGNAL = 1.8; EXPRESSED IN LUNG, SIGNAL = 0.97; EXPRESSED IN ADULT LIVER, SIGNAL =   1; EXPRESSED IN PLACENTA, SIGNAL = 0.94; EXPRESSED IN HELA, SIGNAL = 2.8; EXPRESSED IN BRAIN, SIGNAL = 1.5; EXPRESSED IN FETAL LIVER, SIGNAL = 1.8; EST_HUMAN HIT: AW609185.1, EVALUE 2.00e-78; NT HIT: AF324229.1, EVALUE 1.00e-88; SWISSPROT HIT: O14791, EVALUE 5.00e-13
actggcaaagttcccatcaccagcagatggcagaaatgaccctgttcctgtgggcttcctatcccctcagcctgaggctactcactgccagcgaaggacatggaggaaatattcctcctggagtgccgagaaggtcatcctcaagcccagcagagggggctgcctggaggaggtgtgcctgtcagggacaaccagcccaggggagatctgagtggcatcgctggggcgccccatggagttaaccccatggagcttacctgggcagttcagcagcagccacgaatccattccaggcttcatcatcagtcagcagttgtagcagattctctctgctcacttggtcctggaaatacttaaggtaatcctcaataaagatactgctctctagttggaaagaagaaaggataaggttggaggatagtgtaggggagcataacagccattgcacattaggtggttacatgttaatttttcctggacaactgtgatgtgggacatgtttgatggagtcatcagtgctatagagggattgtgtgcccccaaaattcatatg

SEQ ID NO: 190 - DNA, 563 bp, Homo sapiens
  MAP TO CHR22_130.0; EXPRESSED IN BRAIN, SIGNAL = 0.58; EXPRESSED IN PLACENTA, SIGNAL = 0.54; EXPRESSED IN LUNG, SIGNAL = 0.67; EXPRESSED IN ADULT LIVER, SIGNAL = 0.67; EXPRESSED IN FETAL LIVER, SIGNAL = 0.45; EXPRESSED IN BONE MARROW, SIGNAL = 0.52; SWISSPROT HIT: Q06205, EVALUE 1.80e+00; EST_HUMAN HIT: AW833902.1, EVALUE 7.00e-26; NT HIT: AF224669.1, EVALUE 2.00e-06
caaatccaacccgtaccatcccaatcaacctctatagtgagaagagtgaagggaagaaagaagcacaagatagaacacaagcagcacaatgataaagatgaaaacaccctcactttaagttgcaagaaaacacatgcaaaacaatggggaccactggtaagaactgttgacaaaaaagccaaactctgtaaaatatttgaagagacttatcctgagcctaatgtgaggaccatgacccatgacacagccccagggggtcctgacaacatgtgcccaacgtggctgcatcacagcttggttgtatatgttttaaggagacataaaacatcaatcaatgcacgtaaggtatgtattgattcaatccggaaaagcaggacaattcaaagggggaaaaaacaaaaggccgatgacaaaaagagacacattgggaaagcatttgaatcctaaaactgtattttttaaaaagagcaaatattgcaaatgtgactattcagggttacattcatgctaaaaacaaaataaagagagataggaaaagttacaagcacataaaatgatggctc

SEQ ID NO: 191 - DNA, 558 bp, Homo sapiens
  MAP TO CHR22_91.0; EXPRESSED IN BRAIN, SIGNAL = 0.93; EXPRESSED IN PLACENTA, SIGNAL = 1.5; EXPRESSED IN LUNG, SIGNAL = 1.1; EXPRESSED IN HELA, SIGNAL = 0.58; EXPRESSED IN ADULT LIVER, SIGNAL = 1.1; EXPRESSED IN FETAL LIVER, SIGNAL = 1.2; EXPRESSED IN BONE MARROW, SIGNAL = 0.77; SWISSPROT HIT: P01130, EVALUE 5.30e+00; EST_HUMAN HIT: BG010208.1, EVALUE 7.80e-01; NT HIT: AF168905.1, EVALUE 5.30e-01
tccatggagggagaacaaagatttacaaagggatggtcataagacaacataacaaacttgaactttgaagaattttactaaggccaggttcagaattgagagatatgaccagctaagagaaggcaaggcaacatcttttagattttctacctaacccaaattaggttttcctaaaatgccttactttgagttagatttccacagagtaaaaggggggaaaaaaattaatattatggagatttgttctcctcatagtctccatgataagaataatggccaaaatgaggtacatccttctgaaaatgaagctgttagtggctgagaccctcaatgaagaggttcttttgtctgcagagcaaaatccaaatctgctgccttattaggtagaatgaaaatgtccttcttattcttggagaattagtttaaaaagtggtcaatgaagcttattcatcaattctactttcctgtggctgtttgaaacagcatgttgaatatctgacaagcaaatttacattaactttaaaaagcaccttcatccccacataacaccccaacaca

SEQ ID NO: 192 - DNA, 583 bp, Homo sapiens
  MAP TO CHR21_7.0; EXPRESSED IN LUNG, SIGNAL = 0.98; EXPRESSED IN BONE MARROW, SIGNAL = 1.5; EXPRESSED IN ADULT LIVER, SIGNAL = 0.93; EXPRESSED IN HELA, SIGNAL = 3.7; EXPRESSED IN BRAIN, SIGNAL = 1.4; EXPRESSED IN FETAL LIVER, SIGNAL = 1.4; SWISSPROT HIT: P41997, EVALUE 4.00e-10; EST_HUMAN HIT: AW247142.1, EVALUE 0.00e+00; NT HIT: gi5730038, EVALUE 0.00e+00
ttaaactggctttgcatccctagaatatacctcaccaggtcactgtgtactaggttggtgcaaaagtgcttgccattttggaccatgaattttgaatcattaaaactaggctcaaacacatctgtattaatcaaagtaagaaccattacaatcaacacaattttgccaacaagaaataagtttgtttactcctgtagcataaaaatccgtgctttgagattcgaggaacttttggaaagcactttctgcatcctgctggttgtggaagcgttttccctgcaaaaagttgtcaagatgcttgaagaagtggtagtcggttggtgagaggtcaggtgaatatggtggataaggcaaaacttcatagcccaattagttcaacttttgaagcgttggttgtgcaacatgcagtcaggcattattgtggagaataactcggccctttctgttgactaatgccagctgcagggattacagttttcagtgcatcctatcgatttgctgagcaaacttctcagctataatggtttcaccaggaatcagaaagctgtagtggatcagaccggcagcagaccaccaaacagtg

SEQ ID NO: 193 - DNA, 557 bp, Homo sapiens
  MAP TO AC021009.3; EXPRESSED IN LUNG, SIGNAL = 0.51; EXPRESSED IN BONE MARROW, SIGNAL = 0.44; EXPRESSED IN PLACENTA, SIGNAL = 0.58; EXPRESSED IN ADULT LIVER, SIGNAL = 0.48; EXPRESSED IN BRAIN, SIGNAL = 0.62; EXPRESSED IN FETAL LIVER, SIGNAL = 0.47; SWISSPROT HIT: P39190, EVALUE 6.00e-05; EST_HUMAN HIT: BF942115.1, EVALUE 5.00e-05; NT HIT: AF111168.2, EVALUE 9.00e-06
tctgtgatgttgcagaaggcatttctgcacatgttaaggaccaagatagattatctctatgatccctttttgctctcagagatgtggtggtacccagattgcatgaagaggtacttgagagacacgcccttggcttttggatcacacccagtgtcttcattatagagcaggtgctgtccaaaaaagtaggctcttaaggagagagaaaatgtggcagtgcaggatagagaaatgtgattaaaaaaaatttgatgcttggagtggtggaacatgcctgtaattccagagctttgggagactgaagcaggaggatggcttgaatttgaggctgcaggagctatgatcgtgccactacacactagtctaggaaacagaataaaatctcgtcttgtaaaaataaaaaaagaaaaaaattccggctatgcttaccaaattctcacaatataacatctattttactacaagaaattattaacatttcatcaatcatcaacatttcccatcttttgattggtcaatacaattaattttattaatgcatggcactcttcattgtt

SEQ ID NO: 194 - DNA, 575 bp, Homo sapiens
  MAP TO AL136115.5; EXPRESSED IN BRAIN, SIGNAL = 2.3; EXPRESSED IN FETAL LIVER, SIGNAL = 2.2; EXPRESSED IN BONE MARROW, SIGNAL = 2.1; EXPRESSED IN HELA, SIGNAL = 1.6; EXPRESSED IN LUNG, SIGNAL = 2.3; EXPRESSED IN PLACENTA, SIGNAL = 2.2; EXPRESSED IN HEART, SIGNAL =   2; EXPRESSED IN ADULT LIVER, SIGNAL =   2; NT HIT: AL163282.2, EVALUE 1.40e-01; EST_HUMAN HIT: R91333.1, EVALUE 3.20e+00
agagctaggtggagggaagggtcattcacttggtcagacaatctactagatgaaaacaaacaagcaaacaatctgctagactgccccaaatagatccatttaagcaggggagaatctgaaaacaggcaattacaattccatgttaagtactatggtagagtattgcacaaggtgttttgcaactttatcggaagaatcaataactcacagacgcagcaaaagttttgcagaggtggtagctctttctttcaaatcagtctatgtttccaggaagtagaaaatactgcttgctggaggcagacagaatgcaagtgagcccagtctgtgctcctcacctaagggccttgctactgatctgcagcccctcctgctcctcaaggcctctctcaactcccacacagccctgctagccagccttgccctagaataccccctcctgggccacctggtggtgaacatcctggactctgtgctgtggcttgatgcggctgagtcataagacctttctttttactgctaagcgctaatggaagccttctggtcagaagcaatgccccaagtctaccttgtgggga

SEQ ID NO: 195 - DNA, 580 bp, Homo sapiens
  MAP TO AC017112.5; EXPRESSED IN FETAL LIVER, SIGNAL = 0.66; EXPRESSED IN LUNG, SIGNAL = 0.64; EXPRESSED IN BONE MARROW, SIGNAL = 0.61; EXPRESSED IN PLACENTA, SIGNAL = 0.78; EXPRESSED IN BRAIN, SIGNAL = 0.56; EXPRESSED IN ADULT LIVER, SIGNAL = 0.69; SWISSPROT HIT: O61608, EVALUE 5.60e+00; EST_HUMAN HIT: AU147463.1, EVALUE 2.10e-01
ctactcttcaggggcaatgggatccatcctgcacgaggcccagggcatggacatgacccaccctgaggagcctactcagcactagacagggactaagctaatttggaaacttctgacactctgagaataattgcaagtcagtttggccaagggcaaatgactgccaatggtgaagtcattttgcagaattttgcttacccaaacactacagctggaggaaataaatgaaatttaagcagtatattggactcccagagagaaacttgtaaggtagaaaaggaacccatttaaagaaccttagctcttcttagaaatccatggaattaatgaaatccagctctctctccctagttgacctcagtttcctcgtttcagtccaggcctggtaccgagaatcaggtttttagaagtattatctgagcctgcttagaagtcacttgattcttcttgctcacaagcaaggaagctaagatcaatgaatcttggcttcatgtcgttggaagctatatttttactcagaactgggaagagtgctttagtattgtagctgcctggcaatggaacagactgccttgggaga

SEQ ID NO: 196 - DNA, 559 bp, Homo sapiens
  MAP TO AC013718.3; EXPRESSED IN LUNG, SIGNAL = 0.75; EXPRESSED IN PLACENTA, SIGNAL = 0.74; EXPRESSED IN BRAIN, SIGNAL = 0.65; EXPRESSED IN ADULT LIVER, SIGNAL = 0.73; EST_HUMAN HIT: BF569434.1, EVALUE 3.10e+00; NT HIT: AL161572.2, EVALUE 9.00e-03; SWISSPROT HIT: Q42713, EVALUE 4.70e-01
ttcattccagaactgggtccacttccttccaaatgtaaaatagcagctgccaccccactctggctgcattgctgcactgcccttcccccaaacaaaccaccagcaattcccccacttacaggagctgggaacattcttcatgctctttatgggggcgggggggagatgaattttatgaggttgatgagaaaacaagttcaaaagtcaagtcagctcattttgaggggaggatctcctacctttagtttccccatactttccccttgcccatgtcagcatatgcatatacacatgtacaataatgataccagagtgaccaaagaacacaactttacaagaagcagcagaaccaaaaaggcaactacccttccatctccctcctgcccttgaaccactgattctccatgttaaatattccatcgttcaaaatatggctacacatattgaagactttgtccttcctaacggtgtcataaagctgaagggtttccttgtcaccatgagtgcgcatagaagtatcaacagcactgcaaccagcactgcttgggttcacacacac

SEQ ID NO: 197 - DNA, 528 bp, Homo sapiens
  MAP TO AL139144.1; EXPRESSED IN BONE MARROW, SIGNAL = 1.8; EXPRESSED IN HEART, SIGNAL = 1.9; EXPRESSED IN PLACENTA, SIGNAL = 2.4; EXPRESSED IN BRAIN, SIGNAL = 1.8; EXPRESSED IN LUNG, SIGNAL = 2.3; EXPRESSED IN ADULT LIVER, SIGNAL = 2.1; EXPRESSED IN FETAL LIVER, SIGNAL = 1.6; EST_HUMAN HIT: BE731493.1, EVALUE 7.40e-01; NT HIT: AB010274.1, EVALUE 5.00e-01; SWISSPROT HIT: Q9G2W6, EVALUE 3.70e+00
ggaagttcatgctctctgccttctcataccctataagccaccagccatgtccagtgtggagtcgtaactaccccaaggttccccaggtccaagacagtaaaggcccccaaggagtatgcaagtgctggtgaggaaggtgagtgtcccccagggatttcactgccagactctctcaggcatggaaactgtgacacgcttccatctagccataaaaaatgttctctcccggggcagaatgctagctcactgcctctggagattctgcatctagtctggaaagaggcatgccctgtgaatgaccagagcatcctggtgcccacttctggtggaacctaaaaaaggacctttatttaagtcgaagtccagaattgcatccaagatgataagcagaggactggcccgcctcgacctgaagctccctctctgtctccaggactcagacacccctgagcatcacgcctgacctcagcctcatggaagtgacctcagcctcatggaagtgcccactctggggaaagcatacaagga

SEQ ID NO: 198 - DNA, 586 bp, Homo sapiens
  MAP TO AL137071.3; EXPRESSED IN HEART, SIGNAL = 1.9; EXPRESSED IN BONE MARROW, SIGNAL = 2.5; EXPRESSED IN PLACENTA, SIGNAL = 2.2; EXPRESSED IN LUNG, SIGNAL = 2.3; EXPRESSED IN ADULT LIVER, SIGNAL = 2.4; EXPRESSED IN HELA, SIGNAL =   2; EXPRESSED IN BRAIN, SIGNAL = 2.3; EXPRESSED IN FETAL LIVER, SIGNAL = 2.6; EST_HUMAN HIT: AL541554.1, EVALUE 8.20e-01; NT HIT: gi6680438, EVALUE 1.40e-01; SWISSPROT HIT: O35181, EVALUE 5.70e+00
caaagtaaagagcttgcccgtggtgttattttcgtcaatgcacagaattactgtcagtaatttccctcttcttgtctgagcactgtatgtcttagagcaatgcatgtcttagagcaatgcatgaatcacatgaccttttgatgctttggtgaaataaagctcctctccttggtcatcagaaaggaggcctggcttggagaagtgcctcagggtgaagcccaagacagggactagactctcctagagccttcctatagcctgtatagactctgccaaagtcatcttcatgtttatcatctaccattcctcctttaggtactgacaccattctgtctttcttcttatcatccaccccctccaattatcccaatcccctctcaaaaaaacaaaattccatcccagaagttcagactagaaagtcaaaaatctaaggaaagtgttgcaagaatgatgaggactgtcagtggctgctcacggtatacagattccatctcacaagcactgtccaggattgcattagtcttggtggttctgacagaatggggagaaacaagaccgggtcaagaggaggcatcaggaacaggta

SEQ ID NO: 199 - DNA, 576 bp, Homo sapiens
  MAP TO AL133499.1; EXPRESSED IN HELA, SIGNAL = 0.5; EXPRESSED IN FETAL LIVER, SIGNAL = 0.49; EXPRESSED IN LUNG, SIGNAL = 0.92; EXPRESSED IN ADULT LIVER, SIGNAL = 0.84; EXPRESSED IN PLACENTA, SIGNAL = 0.74; EXPRESSED IN BONE MARROW, SIGNAL = 0.92; EXPRESSED IN BRAIN, SIGNAL = 0.65; SWISSPROT HIT: Q9T1P6, EVALUE 7.30e+00; EST_HUMAN HIT: AI695976.1, EVALUE 1.00e-130; NT HIT: AL163301.2, EVALUE 0.00e+00
tcagatgaaaaccctgacccagagggagaaggcagagagttggacttttgaaaacgtgagtgtgtccagcaaccaggcagcaacagtccttgtttttatcgaacttctataagcactttatttctccagaataatttcatcataaagaatccagagctcagacagctctttaccatctgtcttttccttttttcttaccctgtgtttggcttgatctggactgcacttaaccatgacaatgttaagtgctttcttctgggtaaaaattctggcttcttctccagaaattctggctccacttctcaaattgtttctgtccctgttaggagacccctggggcctcggctggagagacagtgcagctagtcccagcagccactgtgcttgggcctggccagcccctcctcaggggtcacggcactgctcacctggtgactaggtcttctcagccagatcagttcatgtgctctggtgtttttgagcttctggctagtcctcagtttctcagacctggttaatcacagtgtggagtcatttttcataactgtgcacctcacttgtttgatgcatggcaag

SEQ ID NO: 200 - DNA, 524 bp, Homo sapiens
  MAP TO CHR21_60.0; EXPRESSED IN HELA, SIGNAL = 4.7; EXPRESSED IN FETAL LIVER, SIGNAL = 1.5; EXPRESSED IN LUNG, SIGNAL = 0.84; EXPRESSED IN ADULT LIVER, SIGNAL = 0.29; EXPRESSED IN BONE MARROW, SIGNAL = 1.7; EXPRESSED IN BRAIN, SIGNAL = 1.7; SWISSPROT HIT: P42387, EVALUE 8.40e+00; NT HIT: AL163278.2, EVALUE 0.00e+00; EST_HUMAN HIT: BG221781.1, EVALUE 1.00e-27
tgggtttgttgtgcttcttggatctctagctctgtaattttcatccaatttggagacatttcagacattatttcttcaaatgttttgtcttttctctttgaggaatttcagttaccattacattagatgactttatatttttccacagatctctgtagctccatacaatttttcttagtcatttttctctctaggcttcattttggataaatcccattgctatatctacaagttcattgatcttaaaggaaaccagaatatttcaccccaaaatgtggctgagctaaagaagcagtctcaaggtctctttgatcccttctcctatctctcaatcctctgtctctcccaaagcacaggatgaagctgctctccaaagttcccttatctacctagaaactggacctaccaaagaggaacacacttttcttccctaaaatttcattaaccagagaagattaaaactcatatcaaaaggaagagactgaaaattaaacaccagatgaactcatcccaaaccgttgtct

SEQ ID NO: 201 - DNA, 530 bp, Homo sapiens
  MAP TO AL137011.1; EXPRESSED IN FETAL LIVER, SIGNAL = 0.4; EXPRESSED IN BONE MARROW, SIGNAL = 0.54; EXPRESSED IN PLACENTA, SIGNAL = 0.72; EXPRESSED IN ADULT LIVER, SIGNAL = 0.42; EXPRESSED IN BRAIN, SIGNAL = 0.52; NT HIT: AL161501.2, EVALUE 7.90e+00; SWISSPROT HIT: P02156, EVALUE 4.90e+00; EST_HUMAN HIT: BE250520.1, EVALUE 1.90e-01
tgacagcacttctgacagggtggcccaggttggcttcagaggctccctcatgccacaggctggcctgagctggatcttccaagtgttctgcttagattttgatggcaaggttttgctatctcaagatctctcttcctacattggaaaaaaattacctaaatgtaagaacatgcagctatgacaactgttgatactctgggttgaactggctgttcttgttctttctctccctccactccatgtgtgtcccctgagtctgtgtactggtaagatcttcacagggaaagtacaagttgacattccagggtatatgagtggatgtggttcccctgatcaaattcttaagccgttttggaaaagttaggaaagcactaagagttgtgtgcacctgcatacaattattaattgtaattacacaagatacccatgggatccttacactttggatctgaaagtattattcagcttttcttagtatggattatgtcttactaagtgtccttgagtagacattctggggaagcttttga

SEQ ID NO: 202 - DNA, 511 bp, Homo sapiens
  MAP TO AL136147.2; EXPRESSED IN BRAIN, SIGNAL = 1.1; EXPRESSED IN HELA, SIGNAL = 1.1; EXPRESSED IN FETAL LIVER, SIGNAL = 1.5; EXPRESSED IN PLACENTA, SIGNAL = 1.5; EXPRESSED IN LUNG, SIGNAL = 1.4; EXPRESSED IN ADULT LIVER, SIGNAL = 1.4; EXPRESSED IN BONE MARROW, SIGNAL = 1.2; EST_HUMAN HIT: AI432158.1, EVALUE 1.00e-27; NT HIT: AB031010.1, EVALUE 5.00e-38; SWISSPROT HIT: P38271, EVALUE 4.70e+00
acacaaacacatgcactggcctaggcctacatgggttcaggatcatcagtatcactgtctttctcttccacatttggtcccactagaaggtcttcaggggcaataatatacaagaagctgttatctcctataatagcaatgccttcttctggaatacttcctgaaggactttcctggggctgttttacagttaactttttaatctataagtagaaagagcacactctaaaataaaaattaaaagtgtagtatagtaaatacataaatcagtagcttagtcatttattaccattatcaactattatgtactgtacataaatgtatccactatacttttatactactggcagtgcagtaggtttgttgacaccagcatcaccacaaacacatgagtaatatgtgtttgtgactttacaactgctgcagtgtcacttggtgataggaatttttcagctccattataatcttatgggactatggtcatatatggtccatcactgaccaaaagtcc

SEQ ID NO: 203 - DNA, 545 bp, Homo sapiens
  MAP TO AL158093.3; EXPRESSED IN HELA, SIGNAL = 1.4; EXPRESSED IN BRAIN, SIGNAL = 1.7; EXPRESSED IN FETAL LIVER, SIGNAL = 2.1; EXPRESSED IN HEART, SIGNAL = 1.7; EXPRESSED IN LUNG, SIGNAL = 1.8; EXPRESSED IN BONE MARROW, SIGNAL = 1.9; EXPRESSED IN PLACENTA, SIGNAL = 2.1; EXPRESSED IN ADULT LIVER, SIGNAL =   2; EST_HUMAN HIT: BF572737.1, EVALUE 7.60e-01; NT HIT: AF164959.1, EVALUE 5.20e-01; SWISSPROT HIT: P32618, EVALUE 3.00e+00
tttgatttccttcactgcccaatggttgccctctattctgaacaggtagaatccttacttcctctgcaacccccctccacaatgtccgctttgactctctttatcctcctcatccttccaggcccgacctaagtcctgtttggtctggtaagccatcctgagagattctcctttctcggatacttagttttcaaatggccctggagtttgaggtttctggggagtgtgtcttagaggacggggagacagtgggagcagagtccttgcttctcactccagccgacactagagcagccatagtttttctgtttgatgcataggaactctgcttcagaaaagctccccatttctcattttgatgttgtgtaagcaccagggggtggtggtgtcagtagggctcctgaacatcaggttttggatagaggtgttggctcaggccagaaacatgccacaggtgactgatctataaaaatcagaatgctaattcattaatttagcttgggaaatataacaccaagaggaatggaatgccttagtcagcctgg

SEQ ID NO: 204 - DNA, 550 bp, Homo sapiens
  MAP TO CHR22_10.0; EXPRESSED IN BONE MARROW, SIGNAL = 1.7; EXPRESSED IN HELA, SIGNAL = 1.4; EXPRESSED IN BRAIN, SIGNAL =   2; EXPRESSED IN PLACENTA, SIGNAL = 2.4; EXPRESSED IN LUNG, SIGNAL = 1.9; EXPRESSED IN ADULT LIVER, SIGNAL = 1.9; SWISSPROT HIT: P23069, EVALUE 6.00e-01; NT HIT: AJ275967.1, EVALUE 8.20e+00
tgatgcctctgtgtctttgcccggctgcctctcttcctccttcaggattcctccccagcaatgcagaagggccccatgagggcccacacagggcatctgcggtctgttgggctcagcccagagccagtagcaccttggaagtctgtggtcaaggtcagttcttcattcacctgcttggaaaagcagcactgagcaccctcatggggtgccaggcctggggcagccactggggcaccagggaagcagcgcccatccccagtctctgctctgggtccctgtagcaggtgatttggaaagtgggatgtatttgctagagtgaggggtctttagcttaaaggacgccttccgggccccattgtagatccccattcccctcagccaccgaccacagtgcccagcttttgtattcccactgttctcacacacacaaggctgatcttgttcacatgcttatttctgagcttattgtctgtggttgcacacacacccacatgcagacacatgcgcagacacacgcgcagacacacgtgcagacacacatgcagacacg

SEQ ID NO: 205 - DNA, 533 bp, Homo sapiens
  MAP TO CHR22_213.0; EXPRESSED IN BONE MARROW, SIGNAL = 1.4; EXPRESSED IN PLACENTA, SIGNAL = 0.82; EXPRESSED IN LUNG, SIGNAL =   1; EXPRESSED IN BRAIN, SIGNAL = 1.3; EXPRESSED IN ADULT LIVER, SIGNAL = 0.83; EXPRESSED IN FETAL LIVER, SIGNAL = 1.2; SWISSPROT HIT: P13815, EVALUE 3.00e-28; EST_HUMAN HIT: BI916475.1, EVALUE 4.80e-02
agaatgcctgtgaaaatgcctgtgagaatccctgcgagaatacctgagagaatacctgtgtgaataccagtaagaatacctgtgggaatacctgtggggatacttgtgggaaagcctatagaaatacctttggaaatacctacaggaatacctatggaaatatctgtgggaatgcctatgggaatgcgtgtgggaatgcctgttgggatacctgtgggaatgcctgtataaataccggtgagaatccctgtgggaatacttgagagaatccctgtgtgaataccagtaagaatacctgtggggatgcctgtgggaatacttgagagaatgcctgtgtgaataccagtgagaatacctgtgtgaataccagtaagaatacctgtgggaatacttgtgcggatacttgtgggaaagcctgcagaaatacctttggaaatacctatgggaatacctatggaaatatctgtaagaatacctgtggaaatatcggtgggaatgcctgtgagaatacctgtgcgatcaccagtgagaat

SEQ ID NO: 206 - DNA, 563 bp, Homo sapiens
  MAP TO AL137068.1; EXPRESSED IN PLACENTA, SIGNAL = 5.4; EXPRESSED IN LUNG, SIGNAL = 5.3; EXPRESSED IN ADULT LIVER, SIGNAL = 5.1; EXPRESSED IN BONE MARROW, SIGNAL = 6.3; EXPRESSED IN BRAIN, SIGNAL = 4.9; EXPRESSED IN HELA, SIGNAL = 3.9; EXPRESSED IN FETAL LIVER, SIGNAL = 5.2; EXPRESSED IN HEART, SIGNAL = 4.4; SWISSPROT HIT: Q9UDY2, EVALUE 6.20e-01; EST_HUMAN HIT: AW503396.1, EVALUE 0.00e+00; NT HIT: gi6754595, EVALUE 5.00e-69
aaccatgggggtaaaacactcttttgttgaataaactcttctgtttatttctttgaagatgcagacagtggaggagatagtcaggaagagagtgagctggatgaccaagaagaacccccatttgtgcctcctcctggatacatgatgtatactgtgcttcctgatggttctcctgtaccccagggcatggccctgtatgcaccacctcctcccttgccaaacaatagccgacctctcacccctggcactgttgtttatggcccacctcctgctggggcccccatggtgtatgggcctccaccccccaacttctccatccccttcatccctatgggtgtgctgcattgcaacgtccctgaacaccataacttagtaagtggaaagacatacaactctctttccacactgcttccatgggtgactgataaggttatatacttaatgagttgacctatttatgactggattatatggcaaagtgtgtttgtaaggctgatgtttagaactgtgcaagcattctcttattaaaattctcttataaaagcagtggcatgtgcctataa

SEQ ID NO: 207 - DNA, 545 bp, Homo sapiens
  MAP TO AC012482.3; EXPRESSED IN PLACENTA, SIGNAL = 1.8; EXPRESSED IN LUNG, SIGNAL = 2.1; EXPRESSED IN ADULT LIVER, SIGNAL = 2.5; EXPRESSED IN BONE MARROW, SIGNAL = 1.5; EXPRESSED IN HEART, SIGNAL = 2.7; EXPRESSED IN BRAIN, SIGNAL = 1.7; EXPRESSED IN FETAL LIVER, SIGNAL = 1.7; NT HIT: AF071482.1, EVALUE 0.00e+00; EST_HUMAN HIT: AA001392.1, EVALUE 1.20e-02; SWISSPROT HIT: P58126, EVALUE 6.00e-26
gaacatgctcatgtgatgccctccacctctctctgactcttgacagtcaatctcacagaattggcctccaaggtagtgactcaccaggccccaccacagggcatctgcataggtctcaaactcctctttcatctcctctccttgtgcatccacctctgggacgtctttctcaaccaggtagacaagaaatgaagaaaggatgagtgtcaggaaaccgatgtaccaggccgtgatgagttcctgaaagaatgaacagtggacatgaaaagtggtcactggggagtcgttgagtggatgctggagccagacacaccagagttagagtccaagtttaccagctctgtgactgtggtcaaatcactcaccttctctgatcttcatcttccatcactgtaaaatgggatcattaacatggtagttatttcatcattaattaacagaaaaagtgtatggctccaggaggagaggaagatttctagcttagggccacttcaatatcacagctcaagaggcttcagaggaaggcaagaaggcaggaggaagtg

SEQ ID NO: 208 - DNA, 542 bp, Homo sapiens
  MAP TO CHR22_23.0; EXPRESSED IN HELA, SIGNAL = 0.67; EXPRESSED IN FETAL LIVER, SIGNAL = 0.92; EXPRESSED IN BONE MARROW, SIGNAL = 0.82; EXPRESSED IN PLACENTA, SIGNAL =   1; EXPRESSED IN LUNG, SIGNAL = 0.84; EXPRESSED IN BRAIN, SIGNAL = 0.77; EXPRESSED IN ADULT LIVER, SIGNAL = 0.93; SWISSPROT HIT: O28538, EVALUE 5.10e+00; EST_HUMAN HIT: BI039082.1, EVALUE 4.90e-02; NT HIT: AY057705.1, EVALUE 1.30e-01
tgagttggggattttgaagctgtggtagaatttgccaccagttcacccagagagccaaggcgccagagcttcgcaccaggtggggaaagcagccaaacctgcactttcctggggttgggccgctgtatggtgtggccatatttctccgcaggttgcaggatgaactccatcagtcttttaggctggaggaaaggcaaggccccctagtgataatgggaggaggctgtaaaaattcacatacagcctgttcttgtggacatggccaagggtagtcatctggccagctttcttttggtaaaggtactaagggaggctcccattcctgcagaatggatggaacaaacactgcaagtggttgggcttgttttcagagagctttgatatccagagatgagcacacgcaggggctggggcctgatacagatccacaacaaggccaagccacttttagtgcctggggtcaaggttggccggaggagacacgatgtctgcattcgaactgacaaccagtaaaaaggctgtcaggaaatgcaacagcagaa

SEQ ID NO: 209 - DNA, 552 bp, Homo sapiens
  MAP TO AL136163.3; EXPRESSED IN FETAL LIVER, SIGNAL = 2.9; EXPRESSED IN HEART, SIGNAL = 2.7; EXPRESSED IN LUNG, SIGNAL = 3.7; EXPRESSED IN ADULT LIVER, SIGNAL = 3.9; EXPRESSED IN BONE MARROW, SIGNAL = 3.2; EXPRESSED IN BRAIN, SIGNAL = 3.2; EXPRESSED IN PLACENTA, SIGNAL = 3.7; EXPRESSED IN HELA, SIGNAL =   2; SWISSPROT HIT: P38442, EVALUE 2.30e+00; NT HIT: AE006367.1, EVALUE 2.10e+00
gctacagttgggactttgggccaccggccagtatttgttcaaagagagctgtacggtagttcagtaatcagaaactggaaatttctcttttcccacacacaagcactacttcctccccttattttgcccagacatttcacaatccttgcaacggatggaggccaatatacacgcagcatttagtaccaggcaacagccaccttagccttaagtatttcttttattatttttcttaaggagggagaaatgttttcatgcttgttattcttttacctttggaaaaatctaatattcttcagacagtggtgaaagagcaaaaatttattggtatttactaaatataagacaggaatagtctttgtattcatgctcaggaaatttctattttggatgcagaaaacgatatacctattgtcaagatgatattttatcagattaggacaaacccacaaacacactttccatatcctcagtataaaatggaaagaaacatgacactgtatcatgcatatggtcatagcagctcaatagtccacctctgccagaaatacc

SEQ ID NO: 210 - DNA, 586 bp, Homo sapiens
  MAP TO CHR22_98.0; EXPRESSED IN BONE MARROW, SIGNAL = 1.3; EXPRESSED IN HELA, SIGNAL = 3.5; EXPRESSED IN BRAIN, SIGNAL = 1.2; EXPRESSED IN HEART, SIGNAL = 1.2; EXPRESSED IN PLACENTA, SIGNAL = 1.3; EXPRESSED IN LUNG, SIGNAL = 1.2; EXPRESSED IN ADULT LIVER, SIGNAL = 1.1; SWISSPROT HIT: P93736, EVALUE 5.70e+00; NT HIT: X91837.1, EVALUE 8.70e+00
ttatttggctgtttggagggaccactggagtaggtcatttatattcaactcttattcatgctttctttaaatagcatgtttaatttcacattaaaactagcttctgttcagctaaaacaaaaactgaaaagatggtttggaagaaagcaaaatgacagagaaaatgcagcatgcaatggaaattggctgcaagtcatctccataaggtgattgagaatgaagtgaagctcagctttctttccaaagaaccctcaacaaccctctatgttaacttaccttctcctgggagtcttggtggcctccttttgtccttggtgtatgttgcatgccaatcatgctgtagagaaggcagtaatatctagaaacacatcttgaactagcgttgggccgtgtgcaagtctcttttggtggggatatgcgagagtcactaactagcaacctttagggaaaaagaagtccaagagggttgaattagtaaccactggggcctgtacgtggtgatgtttgcttttttaaatgatccttgtggagcatcatttgccctgtgtcctatggggcatgtcaccccattccctggatgtcaaaa

SEQ ID NO: 211 - DNA, 559 bp, Homo sapiens
  MAP TO AL136231.3; EXPRESSED IN FETAL LIVER, SIGNAL = 1.7; EXPRESSED IN HEART, SIGNAL = 1.3; EXPRESSED IN PLACENTA, SIGNAL = 2.3; EXPRESSED IN LUNG, SIGNAL = 2.4; EXPRESSED IN BONE MARROW, SIGNAL = 1.6; EXPRESSED IN BRAIN, SIGNAL = 1.5; EXPRESSED IN ADULT LIVER, SIGNAL =   2; EST_HUMAN HIT: AW246578.1, EVALUE 2.00e-81; SWISSPROT HIT: P00377, EVALUE 4.00e+00; NT HIT: AB045983.1, EVALUE 5.30e-01
ttttcccagaccaataatccctagtcctcagaaatcaaagttcagagcatgagtttatttttggttttttaatatatcccaaacatacagacttttggttatttttatcagtctgaactcctgagcattttgtcactagtcttctcttctccagatcctcttctatttgcaggagatccctggggcaaatattctgtcatcttagcccgagttatcttccttgtccaacccccacccccagctctaaattaagcaaacagaagcaaaattacaactaaataatgcatattgtcactcaggttatcaaagagccagatgaacggattgttttaaggagtgactcatcatcatgtttagattcaagtcagtttggaaagtcttcatccagtaaacaaggggatgctgatttccacgggaaagcttcatttgccacctaccagcattccacctctcctggccccttggatcagccccttctcagagaaaggtcagtggcaagcacccatctgtttgcctgacgagtgcattgtggcctggcaggggtaaagctgggtcattt

SEQ ID NO: 212 - DNA, 511 bp, Homo sapiens
  MAP TO AC020759.3; EXPRESSED IN BONE MARROW, SIGNAL = 1.5; EXPRESSED IN BRAIN, SIGNAL = 1.5; EXPRESSED IN PLACENTA, SIGNAL = 1.5; EXPRESSED IN FETAL LIVER, SIGNAL = 1.4; EXPRESSED IN HEART, SIGNAL = 5.1; EXPRESSED IN LUNG, SIGNAL = 1.7; EXPRESSED IN ADULT LIVER, SIGNAL = 1.8; EST_HUMAN HIT: BG177023.1, EVALUE 1.00e-20; SWISSPROT HIT: Q14157, EVALUE 1.60e+00; NT HIT: AF175325.1, EVALUE 2.00e-03
tcgaggagggttctatgtgcagaaatgctgaactggttttggtgtttttcttttttcctctgtttaatgtttcctccctgaggtgggcttcacctgtattgctttctccttcagggtcatcagctgaggccggctgaaaccctggacagctcccagcagttccacggtcctgatgaatgtgtcttcctccatgcaccgcaggtcctccagggcccagcaggcgttggcttcggccaacttgaagatgtcatcagaagagggggccacgactccatggcaacctgaagaaaggagagatgcagggaaggagaagaggaaagagaatttcaggaaatgttagtgtattgaaatgagtaacattctttgccagtcagatttatgcatggaagggactacagagtaaaagcagagagcaggaggcagggaccagtttgaatcccacttctgccatttcttgctaattactgggtaacaaagtcatggaaatgccagctttttgcacatccacatg

SEQ ID NO: 213 - DNA, 570 bp, Homo sapiens
  MAP TO CHR22_27.0; EXPRESSED IN FETAL LIVER, SIGNAL = 1.8; EXPRESSED IN HEART, SIGNAL = 1.5; EXPRESSED IN LUNG, SIGNAL = 1.9; EXPRESSED IN PLACENTA, SIGNAL = 1.7; EXPRESSED IN HELA, SIGNAL = 1.2; EXPRESSED IN ADULT LIVER, SIGNAL = 2.3; EXPRESSED IN BONE MARROW, SIGNAL = 1.7; EXPRESSED IN BRAIN, SIGNAL = 1.7; NT HIT: AF109466.1, EVALUE 5.40e-01; EST_HUMAN HIT: BG540767.1, EVALUE 8.00e-01; SWISSPROT HIT: P38483, EVALUE 9.40e+00
acacttttccagatgcagggaattcccgggcacctgaggagcattttccccgaccccaataaccttctctcatgggcatgggcatgtctgggtgagggttagtggccagtgaccacagatgtctcagtctcttacctcgcctcctgtttcctctttcttttctttgcggtcttgcttttctgtcagaagcctactcatccttcaggataaggcttttgcgggcctcatcttcttttaatccttcccttagtatttgaagttaacccagctcctccttgggtttcagaagtgctttaatgtgataaaaggcaaagtatgttctctgttcctgtctccttctctcacaaaattgcaagtttcttaagagcaggatcattatttgtttttgccaccagtcctaacatgaagcctcacaaatgggaagttcttgacaagcgtggcttgaattcaccagaactctgtcttcatttcgtgttgttgtggtaaccctatcaaaacaggaaataaagctagtttagcatgacttgttcataattgactcatgctggttccctttccttccctaagcaa

SEQ ID NO: 214 - DNA, 554 bp, Homo sapiens
  MAP TO CHR22_220.0; EXPRESSED IN BONE MARROW, SIGNAL = 1.4; EXPRESSED IN BRAIN, SIGNAL = 1.3; EXPRESSED IN HELA, SIGNAL = 1.9; EXPRESSED IN LUNG, SIGNAL = 0.85; EXPRESSED IN ADULT LIVER, SIGNAL = 0.83; EXPRESSED IN PLACENTA, SIGNAL = 0.74; NT HIT: gi15318770, EVALUE 1.00e-91; EST_HUMAN HIT: BE409768.1, EVALUE 0.00e+00; SWISSPROT HIT: P45847, EVALUE 1.00e+00
gtttttgactcttggccaccagtgaccccagggcgaggtggtaccatctgagcagggcatgcctctgtgggcgtgtagacaccgtgtgcctcaccagtgcctttccccacccaggtcattgctgtggtcatggacctcttcactgatggtgatatctttcaagacattgtggatgctgcctgtaagcgccgggtcccagtgtacatcatcctggacgaggcaggagtgaagtatttcctggagatgtgtcaggacctgcagctcactgacttccggattcgggtaagttgcaccactggggtggaaagtggacaggagatgagacagagactacctctgccccgtcctgcagctcccccctgcctcttccctgaatgggggctcaggcgaacttcaagatctcaacacctttccttttgttgaaagtcaagcctttaaccttggctttactgttaactactgaatcatatgcccagtttcaattttatccctaggctgctgagactgaaggagggagctctgggctggtcctggggtgcttagcctgcagaatc

SEQ ID NO: 215 - DNA, 526 bp, Homo sapiens
  MAP TO AC015937.3; EXPRESSED IN BRAIN, SIGNAL = 7.4; EXPRESSED IN HEART, SIGNAL = 5.8; EXPRESSED IN PLACENTA, SIGNAL = 7.2; EXPRESSED IN LUNG, SIGNAL = 7.5; EXPRESSED IN ADULT LIVER, SIGNAL =   6; EXPRESSED IN HELA, SIGNAL = 3.9; EXPRESSED IN FETAL LIVER, SIGNAL = 6.3; EXPRESSED IN BONE MARROW, SIGNAL = 7.7; SWISSPROT HIT: O60309, EVALUE 2.00e-26; NT HIT: AJ314647.1, EVALUE 1.00e-84; EST_HUMAN HIT: AL564757.1, EVALUE 2.00e-90
ctcctctggaggctgaactggggcctcctgctgggcttgggaagattctgtcccattggtaggctctgaagttatggtaacctccacatccgcaggtttaactctaatgttgggtaagttataatgagcttgatcctcacctggaggttgaactgtcacctcatgattcagtagagtttgagctagactctccatagaggactctggagtctgagctggggcctcctgctggatctgagaaggttcaacccccccaggaaactcagaaggctgagccggctgctcctgctcactgggggaaggttcagcctccacaggagaacctagaggctcagctggggtctcttgctgggttgcaggaggttttgtctcctcagggcactctggtgtctgagctggggcctctaattgggttaaggaagagtccacctcctcggggtgccctggaggctgagctgcagcctgttcctggcttgatgtaagttccttacctggctctagagttactgcaagctccatatccaca

SEQ ID NO: 216 - DNA, 586 bp, Homo sapiens
  MAP TO AC018586.3; EXPRESSED IN LUNG, SIGNAL = 0.55; EXPRESSED IN ADULT LIVER, SIGNAL = 0.55; EXPRESSED IN BONE MARROW, SIGNAL = 0.52; EXPRESSED IN BRAIN, SIGNAL = 0.49; SWISSPROT HIT: P31309, EVALUE 9.70e+00; EST_HUMAN HIT: AA626496.1, EVALUE 3.00e-03; NT HIT: AL163249.2, EVALUE 3.60e-02
ttgtgcagggactcaaagtgagccagaggtgagaaattacatgttcttaggtctttcttgggcatgtacagaaccctgcaaatatatgtggttttctagatcccagtaatatgtcagaacttttaaagctccctatgaatactttgtttcccattttttattccttttcaattttttggtcatcctcttgttagcccaactggtaaccctgccttagttagccatgaagttgaataattgccagtgatttttttttttttttgacaaataccgtgggataggtcagtttgcaaagactgacctctgagttaagtgaaataatgataaaccctgaaaatggtgcttttcaaatgctgctggtcaggtcaaatatattctttagggttagatctttagggagctccaaacctattctcccttctctaatggctactaggctgaaggttttcacagttaccatcattgtgaggctgttggtttttaaagctactgcaatgctagaaaaaggagataggattagggcaagttaaagtgccacaaaatttgctcttcttactgaattttagctgctttccttgaatgaaca

SEQ ID NO: 217 - DNA, 573 bp, Homo sapiens
  MAP TO CHR21_62.0; EXPRESSED IN PLACENTA, SIGNAL = 0.73; EXPRESSED IN LUNG, SIGNAL = 0.77; EXPRESSED IN FETAL LIVER, SIGNAL = 1.4; EXPRESSED IN ADULT LIVER, SIGNAL = 0.8; EXPRESSED IN BONE MARROW, SIGNAL = 1.7; EXPRESSED IN HELA, SIGNAL = 4.9; EXPRESSED IN BRAIN, SIGNAL = 1.6; EST_HUMAN HIT: BE743019.1, EVALUE 1.00e-111; SWISSPROT HIT: Q9Y5Q5, EVALUE 8.30e-01; NT HIT: M11515.1, EVALUE 8.50e+00
caccttctctccagctttggcaacaagtgccagttcctcaagactgtgaggtgcagcccagcagctggggctccatcacatcagttacacatggcagctggggctccaccacatacatgttatgcatggcagtgggggctctgccaccacatattatgcgtggactggtctggttctctgcattgtgaagatgcaccgacatgcactcatgaccgctcacatcaaccggaaggtaagtgtctctctgtgattcctgtttgctagaaaccagcatatcctgagtgcaggacaaacacctgggctcagaactgaagcttccagaggagggagctctctcccccgtcttgactggtgtagccacacctgccacatctgcctaagaaggaggtcatgcagtctgctgtggacatccagaaacacagatcctgaagacaaggcaacgccccttctcagggaataaagggggcaggcggtagaactcccgacgcccacctctcatcccatttagacatgtgctcagtatccttaggtattcctgagggtgacatgaactgttctctgcctttgtctggg

SEQ ID NO: 218 - DNA, 597 bp, Homo sapiens
  MAP TO AL133215.16; EXPRESSED IN FETAL LIVER, SIGNAL =  11; EXPRESSED IN HEART, SIGNAL = 8.5; EXPRESSED IN LUNG, SIGNAL =  10; EXPRESSED IN ADULT LIVER, SIGNAL =  10; EXPRESSED IN HELA, SIGNAL = 5.1; EXPRESSED IN PLACENTA, SIGNAL =  11; EXPRESSED IN BONE MARROW, SIGNAL =  11; EXPRESSED IN BRAIN, SIGNAL = 9.7; EST_HUMAN HIT: BI824338.1, EVALUE 1.00e-115; SWISSPROT HIT: Q9NTN9, EVALUE 3.00e-40; NT HIT: gi14747317, EVALUE 1.00e-91
gtacggcttgaggtttcagcatccaggctgcagaccccacgcagtgtctcatacagtggaatgtggcagatgagacgggctttcaggaaggaagtccacttcttctgcaggatcttcttccctcccaggtctccctggggaggtagaggcacgggataaggggccagggtcagaggtccagcctctatacccgtgccccaacgtcagcccaatccaccttgcagacacgagccacacgggccacacggtgactgctgcggctctgagtgaagctgccagagccctcctcagtggcacgctccgtgaagaagtagtacaccttgtcatcatcacccactgcactggccttgctctcccgcacgaggacggagaacacaaactccgcatctgtgggtcaggcagtttgagaggcttttgagacaggctggggattcctttccctcactctgaggctgacccctcacttgacaacacacaggaatggaatggacaggctcacctggggatttgggggtggggtggtcagctggccaagggagtaaaaatgaagaaatagtcccctaccccccatcatcctgtgcctcatcctcctaacca

SEQ ID NO: 219 - DNA, 507 bp, Homo sapiens
  MAP TO CHR22_207.0; EXPRESSED IN HELA, SIGNAL = 3.1; EXPRESSED IN FETAL LIVER, SIGNAL = 1.7; EXPRESSED IN PLACENTA, SIGNAL = 0.98; EXPRESSED IN LUNG, SIGNAL = 1.1; EXPRESSED IN BONE MARROW, SIGNAL = 1.9; EXPRESSED IN ADULT LIVER, SIGNAL = 1.2; EXPRESSED IN BRAIN, SIGNAL = 1.6; EST_HUMAN HIT: AV687945.1, EVALUE 3.00e-06; SWISSPROT HIT: P05374, EVALUE 2.70e+00; NT HIT: AF092907.1, EVALUE 8.00e-06
acaagtgtgagccactgtgcctggcctggtttttgtgttcctggaatcccagcctcactggcaggttgactgaagggtggtcagctggcagtgtgggggatgaggctcacaggtgagtgccgtggtgaggtcctcagcagtgcctgcaggcctgtgggccacctcctctcgggagctgcttctctgcctcatcttacattgcagagggagctgaggtctgtggggtaacagtcacactgagacatggctcacagagagacgacttctgcaggtgctgagtgacatctaaccttcccactccacctgctctcatcctgggctctgagttttcagaaaaccaaggtgtttggcagacgatgatgcctacattacactgctgacttttgcctgcatttgttataattaatgactcattgaaatgcctctcactttcgtacagctgggtccaagtgtcaaactggaggtgaagtgggagaaggactagagggatgctggctttggagtagc

SEQ ID NO: 220 - DNA, 576 bp, Homo sapiens
  MAP TO AL135920.4; EXPRESSED IN HELA, SIGNAL = 0.74; EXPRESSED IN BRAIN, SIGNAL = 1.1; EXPRESSED IN FETAL LIVER, SIGNAL = 1.3; EXPRESSED IN HEART, SIGNAL = 1.3; EXPRESSED IN LUNG, SIGNAL = 1.2; EXPRESSED IN PLACENTA, SIGNAL = 1.3; EXPRESSED IN BONE MARROW, SIGNAL = 1.3; EST_HUMAN HIT: BG529711.1, EVALUE 8.10e-01; NT HIT: gi15791399, EVALUE 8.60e+00
gtaaaatgcgcccttttctggatttcagagaactctttaattgaagtaggataaagcgtattcttcattatacactcagaaagcccggcaacattcaaactcctatcagcagacaatctctaagactgcaggaaaccctgctacactgtagtttgctaaaataaagtgttttactatcgagtattattttattaatgccatggtcctcttttggtcaaggctatggattaggatcttgggcagataacaaattcctacatactactgtgagattttatttgacttatccaaatctcatgaataatgatctaccaatatgctatgagctcacaaagaaagaagggcttgaaaatgtatgttcttagaagaagctggaactagaaatgtaaaaaatgctagacaacattatcatgaaagctatgagtaagatggagccaaagtgaatgactggatttaaagatttctatgttctgtgtattttcagtactaataagctttagacttttctaatgtaagtatgaattataaaaactaaggataaaacaaaaccttatcaccaccacaaccacaacagaa

SEQ ID NO: 221 - DNA, 547 bp, Homo sapiens
  MAP TO AB017651.1; EXPRESSED IN HELA, SIGNAL = 2.1; EXPRESSED IN FETAL LIVER, SIGNAL = 2.9; EXPRESSED IN PLACENTA, SIGNAL = 4.4; EXPRESSED IN BONE MARROW, SIGNAL = 3.5; EXPRESSED IN LUNG, SIGNAL =   4; EXPRESSED IN ADULT LIVER, SIGNAL = 3.3; EXPRESSED IN BRAIN, SIGNAL = 3.5; NT HIT: U86783.1, EVALUE 5.20e-01; SWISSPROT HIT: P31414, EVALUE 3.90e+00
ccagaggagaaatccagcagggttttaaatccgggaccaaaacttgggagagaaatgtgaattggttatgcatccagaagagatagttgaatccatggaagggtgattattccctcacttggaagtaaaggaggaacagcagaaaagggaagacaacttataggaatctggatgttgcgggagaaagaggatgcagagaggaaactggaaatgagatgttaatttcttagaaacaaatgaaaaggaaaccatggaagtaaagagtttcacaaaggagggcacagcaagttcaaatgtggccaagacactatgagatggagaaccgagaaaaggcccttgaagcaggtggtgaaagacatcactgatcatctctgtgacagcagtttcactaacactaacaactgtacagtgtttttcagttcatggggagaaaacgtcttcctcatctattagctcatctgatgctcataacaaatgtgatgaagaaagcgaggttcggatagtaagtggctgatccagaaactgatccaggccttctgatctcaaa

SEQ ID NO: 222 - DNA, 520 bp, Homo sapiens
  MAP TO AL137019.1; EXPRESSED IN BONE MARROW, SIGNAL = 0.6; EXPRESSED IN BRAIN, SIGNAL = 0.66; EXPRESSED IN LUNG, SIGNAL = 0.61; EXPRESSED IN FETAL LIVER, SIGNAL = 0.65; EXPRESSED IN PLACENTA, SIGNAL = 0.8
acatggttgatgggattgtgggagggcttcttatttttccagtttcaaataatgagcatgtattttataattagaaaaatgtgattataattttttaacatagaaaattgaggatatattataatgaataaagaattcttaaaattttctctctcaatttgcttgatatacctatcagaataataatttatatacacacttgaaatttaatgtattaattgttattctgataggtttatcaagaaaattaagagagaaaattttaagaattattattatggttttttagagggagattatttttgtttttgtccaacacctgttggagctgtaactctacctgaagaatttgacattttcatcatgactaataaaagactgctgcttcgaaaagaagaaaaaaaagtaattctttgttcttgaaatcaaagacaaagaatcatgtagctctgtttcctctaacttacttcattcagtttgacttattttaacatctattccatgtcctgtttcaataccc

SEQ ID NO: 223 - DNA, 598 bp, Homo sapiens
  MAP TO AC011580.4; EXPRESSED IN FETAL LIVER, SIGNAL = 0.96; EXPRESSED IN BONE MARROW, SIGNAL = 0.85; EXPRESSED IN BRAIN, SIGNAL = 0.94; EXPRESSED IN LUNG, SIGNAL = 1.2; EXPRESSED IN HELA, SIGNAL = 0.64; EXPRESSED IN PLACENTA, SIGNAL = 0.92; EXPRESSED IN ADULT LIVER, SIGNAL = 1.1; NT HIT: gi11436372, EVALUE 8.00e-65; EST_HUMAN HIT: AW953081.1, EVALUE 1.00e-64
gtttcaccatgttggctgtgctgcttaggtggagaactggaatatttagaaagatattttatgacttaggacatggcaatttctttcttctctaaaaataaactttgtgtatgtaacattcacaatagaatcattctcaaacaggttgtgatcccaaagaatatcaacaaagcggcccactgagatctcagggttttgtatggaaccccaaataacacataatttcaaaatcgtgaaatagcactgacctttataacaatcagatataagatcccgaattattttttcatactgatgtatatacatactactaattttatttgttaaagttaaactaaatttactaacagttaatcctacctttaggagttgttccagttgttggtgtgacaacatttttctgtaatgattctgtgtttggtgttgttatagatggttttgttgtagtaacaacaagtgaattattagctgcctctaaaacacctgaaaaaagtaaagtagttgcattaacatttacatatagtttgccaattaatagactagtatatttaaacaagtgtactggtcagtagaatgtgaatttgcaaccaattttcca

SEQ ID NO: 224 - DNA, 545 bp, Homo sapiens
  MAP TO AL138478.1; EXPRESSED IN FETAL LIVER, SIGNAL = 0.5; EXPRESSED IN BONE MARROW, SIGNAL = 0.53; EXPRESSED IN BRAIN, SIGNAL = 0.6; EXPRESSED IN LUNG, SIGNAL = 0.59; EXPRESSED IN ADULT LIVER, SIGNAL = 0.67; EXPRESSED IN PLACENTA, SIGNAL = 0.7; NT HIT: AL163209.2, EVALUE 2.00e-12; SWISSPROT HIT: P35569, EVALUE 6.70e+00; EST_HUMAN HIT: BF996152.1, EVALUE 1.00e-05
tcctggtccctatgacttggttttcggcttcacccatgtctttggccactgttttggattgaattgtgtccctttcccaaaaatttatatgttaagatcgcagcccccagtgcctccgaatgtgaccttatttgggaatacaattgttgcagatgtaattagttaagatgaggtcatattggagtagtttgggctcttatccaatatgtctggtgtctttattaaaaggagatatgtggacacagactcacagggagaataccatgtggagactggagttatgttgccagaatctaagggactaccagaaactaggtgagaggcctggaatagatccttccataaccccgtcagagtgagtgtggccctgcagtcaccttgaccttcgacctctgacctccagaactgcaagacaatagctttccattgtttaagctactccttttgtggtacttacttatgaaagctctagcaaattaattcaaccaccaataactcttggattgtcttatgggtgtcaactcaggctgtttaatgggtggcta

SEQ ID NO: 225 - DNA, 501 bp, Homo sapiens
  MAP TO CHR22_216.0; EXPRESSED IN HEART, SIGNAL = 1.2; EXPRESSED IN BONE MARROW, SIGNAL = 1.4; EXPRESSED IN LUNG, SIGNAL = 0.85; EXPRESSED IN ADULT LIVER, SIGNAL = 0.77; EXPRESSED IN BRAIN, SIGNAL = 1.4; EXPRESSED IN HELA, SIGNAL = 2.4; EXPRESSED IN FETAL LIVER, SIGNAL = 1.1; NT HIT: gi14778617, EVALUE 3.00e-61; SWISSPROT HIT: P49103, EVALUE 4.70e-02; EST_HUMAN HIT: BF002934.1, EVALUE 7.00e-69
cttccctggggttagctttctggaattaacaactgatattacagcaccctcccgttattgagtctccccacagccctgccaggtgcgtgtcttcattcccgtttcctagactgggagaggtgtgtgtggtgactcaccgaggttggcatggctgctaagtggcagggccagtgtacgccttaggccatcaaagtccaagcccagggccccttctccacccacagctacctctgcaatgcccttgtgctcttgaaccaaaggacagagatgccgctgggaaacatgggtgtctgcagcccgtacctgggagagagatgcctggagcctgtgaccgagccttctccagccacttgctgcagttgttgaaggattcttcattggtcacatcatagacgagacataagacattgggactctcccactgtgcaagagggacaggatgagtatgggtcagtaacaggaaaagtgacttcaaggctgggagacaatttggccttccaa

SEQ ID NO: 226 - DNA, 559 bp, Homo sapiens
  MAP TO CHR22_162.0; EXPRESSED IN FETAL LIVER, SIGNAL = 0.76; EXPRESSED IN BRAIN, SIGNAL = 1.6; EXPRESSED IN PLACENTA, SIGNAL = 1.4; EXPRESSED IN LUNG, SIGNAL = 1.2; EXPRESSED IN ADULT LIVER, SIGNAL = 0.96; SWISSPROT HIT: O43759, EVALUE 1.00e-36; EST_HUMAN HIT: W52128.1, EVALUE 0.00e+00; NT HIT: gi11418145, EVALUE 0.00e+00
cttccttctccacagccaagcttggtctcatgtttggtgctttgaggatctttaaccctctcctgcctgtgtcctgtgaactaaccaccactaacccagtgctcttgtctgtctctcccctaaccaccccctcccgcctgtccttgtcctcgccggcctttgtccccaggcgggccaggctgtgctggccttccagcggtaccagattggcgccgactcggccctcttctcccaggactacatggaccccagccaggactccagcatgccttacgcgccctacgtggagcccactgggccggatcccgccggtatgggcggcacctaccagcagccggccaacaccttcgacaccgagccccagggctaccagtcgcagggctactgagccacagtgaccgcctgcccccgcccctccccatctgtcccctctctccacacccagcccctgctcctgcccaggctgccctgcccagcgcctcatcagcctctgccttgtcccactgaggtccagggtagctcggggcaggggtggggcagtccagtgttggggactgtc

SEQ ID NO: 227 - DNA, 557 bp, Homo sapiens
  MAP TO AL121836.9; EXPRESSED IN FETAL LIVER, SIGNAL = 2.4; EXPRESSED IN LUNG, SIGNAL = 2.7; EXPRESSED IN PLACENTA, SIGNAL = 2.5; EXPRESSED IN ADULT LIVER, SIGNAL = 2.7; EXPRESSED IN BONE MARROW, SIGNAL = 2.4; EXPRESSED IN BRAIN, SIGNAL = 2.4; EXPRESSED IN HELA, SIGNAL = 1.3; EXPRESSED IN HEART, SIGNAL = 2.3; EST_HUMAN HIT: BF886435.1, EVALUE 1.00e-18; NT HIT: AL163213.2, EVALUE 1.00e-11
atgaatcccaagtgcctgacacatactaagtgctcagcaatatttgttgaatatttgaataactgcatttaccttgaactaataaggttgcattatcactcctgagcagatatggggcctcgagaagtaagtttacttcagttttagagaaaaatatgttcaaccttagctcacctgaattctataaatgtgaaatttcttctttgctgtattcatttggaccagacattctaatcaagtcattgaatcctgagaacaaaagaattttctaaacaaaatacagtcaccatcattgtcattattgtcattgtcatcaacatcatcatctttgtgactgcttgtaaacccaaattgaaaggcaagaataaatttcaccagtccaatttttggagtgagacaatagacaaagcattgtttcagcttattttcattcattaattttgtaacagttctcctttttgagcctgatatagtttaaatatttgtccccacccaaatctcatgcttaattgtaatccccaatgctggatgtggggtctggtgggagatgtttggat

SEQ ID NO: 228 - DNA, 518 bp, Homo sapiens
  MAP TO CHR22_210.0; EXPRESSED IN HELA, SIGNAL = 2.8; EXPRESSED IN FETAL LIVER, SIGNAL = 1.6; EXPRESSED IN PLACENTA, SIGNAL = 0.92; EXPRESSED IN LUNG, SIGNAL = 0.73; EXPRESSED IN ADULT LIVER, SIGNAL = 0.84; EXPRESSED IN BONE MARROW, SIGNAL = 1.6; EXPRESSED IN BRAIN, SIGNAL = 1.3; SWISSPROT HIT: O11451, EVALUE 3.70e+00; EST_HUMAN HIT: AV695345.1, EVALUE 2.90e+00; NT HIT: AP003138.2, EVALUE 7.70e+00
ctgctcagggattcttctggcctattctttgtcttaatttactttagtaatggccacatggcttgtaagagagaaggaggatctagatgtgcttctctcttattctaaagtccatgctgtctccttgtactccactgttttattaatcgagggtgctcaaggtatgtttgctgtttatgatgctgctgccaatattctcaggttaattattttctttctttcaattcaggagccatttaattcttatagctctagcattttcgtgtaagtgttttagtctggtggctgacatttagtaagtatttacatataagaagatgattattcttttgttcacttatttctaacctttattaagtgtttactatgcggctggtattgtattctgtgctttatctgaatttcctgattcccagcactgcgacaggatacaactaatttttattattcccatttacagatgaataaatagggtcttaaaaagattatgcatcgtttccaaaagtcatgcaactggt

SEQ ID NO: 229 - DNA, 541 bp, Homo sapiens
  MAP TO U82695.2; EXPRESSED IN FETAL LIVER, SIGNAL = 2.7; EXPRESSED IN PLACENTA, SIGNAL = 4.4; EXPRESSED IN ADULT LIVER, SIGNAL =   3; EXPRESSED IN LUNG, SIGNAL = 3.9; EXPRESSED IN BONE MARROW, SIGNAL = 3.5; EXPRESSED IN BRAIN, SIGNAL = 3.8; EXPRESSED IN HELA, SIGNAL = 2.8; EXPRESSED IN HEART, SIGNAL = 3.2; SWISSPROT HIT: Q64568, EVALUE 1.00e-43; EST_HUMAN HIT: AW611841.1, EVALUE 8.00e-10; NT HIT: U82695.2, EVALUE 0.00e+00
caaagcaacccaagaccttcctgcagctggtgtgggaggccctgcaggacgtgaccctcatcatcctggaggtggctgccatcgtctctctgggcctctcgttctatgcgccgccaggagaggagagtgaaggtaaggcccgggggcctgggctggaaggaggaagaggaatggggcttgagatgagggacggtcacaggatggtgatgtctcctccactgcttcccttctgtcctccgcacagcctgtgggaatgtgtcgggaggcgcagaagatgagggcgaggccgaagctggctggatcgagggggctgccatcctgctgtccgtcatctgtgtggtgctggtcacggccttcaatgactggagcaaggagaagcagttccgaggcctgcagagccgaattgagcaggagcagaagttcacggtcatccggaacgggcagctcctccaggtccccgtggctgcgctggtggtgggggacattgcccaggtcaagtacggtgagtgccctggtcttcacccaccctgtcaaggaagct

SEQ ID NO: 230 - DNA, 523 bp, Homo sapiens
  MAP TO AL136140.2; EXPRESSED IN BRAIN, SIGNAL = 0.96; EXPRESSED IN PLACENTA, SIGNAL = 1.2; EXPRESSED IN LUNG, SIGNAL = 1.1; EXPRESSED IN ADULT LIVER, SIGNAL = 0.88; EXPRESSED IN FETAL LIVER, SIGNAL = 0.8; EXPRESSED IN BONE MARROW, SIGNAL = 0.79; NT HIT: AF342999.1, EVALUE 1.00e-04; SWISSPROT HIT: Q03878, EVALUE 2.50e-01; EST_HUMAN HIT: AI200749.1, EVALUE 1.00e-67
tcccctgaaacctcattctgcactcagcctcttcctcctttcactccaaggccagatctgttgtccaagggaagccgccattcatcaccttccacttcaactcacacaataaactcagggtgcctccttcccgtcccagcactgtgagggatatgaaaatgcaatccctgacctcgggaatacagacaggcagggaggaagggagggaagatgaacctaccaccaaaccagagaaggctgggctggggtgggacagggcgtccgaccgcggagcttcatggagagtggctggggagggactaggaagggtggtccagcatccagcacacacagattggcagggtgggggtggccattcagacggaggacttcagaatcatggtatggaggaggcggttcagggcatattcaggaatcagcaagtggcctcccagcaaagtgatgggagcaaaggccatgcatcaacagagtagtaggaggaggctggcaaggtagattggtaccagaccacacagggtctcaa

SEQ ID NO: 231 - DNA, 592 bp, Homo sapiens
  MAP TO AL137062.3; EXPRESSED IN FETAL LIVER, SIGNAL = 1.2; EXPRESSED IN BRAIN, SIGNAL = 1.3; EXPRESSED IN PLACENTA, SIGNAL = 1.3; EXPRESSED IN HELA, SIGNAL = 0.93; EXPRESSED IN HEART, SIGNAL = 1.2; EXPRESSED IN BONE MARROW, SIGNAL = 1.1; EXPRESSED IN ADULT LIVER, SIGNAL = 0.99; EXPRESSED IN LUNG, SIGNAL = 1.1; NT HIT: AL163280.2, EVALUE 2.00e-07; SWISSPROT HIT: Q01149, EVALUE 5.70e+00; EST_HUMAN HIT: AA723702.1, EVALUE 3.00e-16
aacccttgctgccttttatgcaaaattaccaggccaagtataataagcctaaaacttattttgcacacaaattggtcttgctataatttctctttaatagaaaaaaagggcggggggataaaggaattgcttcaaaggaaaacatttaatactcaatttcagtcctaatcttttttttttttttttcagtggagactgaaacatcattttttggctatggtaatccactagcaagtaccagattataatttttcttcgtatttttagttggtaccctaatggaataggttcctttttctattctgacgcacaaattgctcttttaatgatcaaactgtaaatgttatttatctcttcttgttttacttccaggaaaacccaaatcatgatattttgaagatcagagatgtggctctccgtcattttggcatcccactgggccgggatctgtatttcactgagaatgctctgctgcacaaactatacaagcccccttccctctaggcccagctactgtcacagaagaggagggggcagaagattgtaagggctggttttaaagaaaaaaattaggtcaaggtcaaacctccaa

SEQ ID NO: 232 - DNA, 545 bp, Homo sapiens
  MAP TO AL133476.4; EXPRESSED IN PLACENTA, SIGNAL = 1.3; EXPRESSED IN LUNG, SIGNAL = 1.3; EXPRESSED IN BONE MARROW, SIGNAL = 0.82; EXPRESSED IN BRAIN, SIGNAL = 0.93; EXPRESSED IN FETAL LIVER, SIGNAL = 0.92; NT HIT: gi15298905, EVALUE 3.00e-95; SWISSPROT HIT: Q9UKN7, EVALUE 4.50e-01; EST_HUMAN HIT: BI488744.1, EVALUE 4.00e-95
ttcctgcacttccctaccacacctacaggcaaagctgggaaacagttctgtgagccccaatgtgggccacctggttctgaagtacttgtgccctgccgtccgcgccgtgctggaggatgggctcaaggcctttgtactggacgtcatcatcgggcagcgtaagaacatgccatggagtgtggttgaggcttccacacagctaggtaggtgctgggtgccaagacggggacccagggctgaatttagggctccagaaattggtcatgtgacctgcaaccctggcttcctcccaggcccatccaccaaggtcctgcatggcctctacaacaaagtcagccaattcccagagctcaccagtcataccatgcgcttcaacgccttcatcctcggcctgctcaagtgagtgcacagagcagcaagatcccctaaacaacttgccctgccccccacccccgggctctgcctgcaccaaggaaacaacgccctggacagacagaaagggtggatctggagggtcccctcagcccgctatggcctctcagtag

SEQ ID NO: 233 - DNA, 581 bp, Homo sapiens
  MAP TO AC018608.4; EXPRESSED IN FETAL LIVER, SIGNAL =  10; EXPRESSED IN BONE MARROW, SIGNAL = 8.4; EXPRESSED IN BRAIN, SIGNAL = 4.2; EXPRESSED IN HEART, SIGNAL = 6.4; EXPRESSED IN LUNG, SIGNAL = 7.6; EXPRESSED IN ADULT LIVER, SIGNAL = 8.2; NT HIT: gi9845501, EVALUE 6.00e-84; SWISSPROT HIT: P38982, EVALUE 3.00e-34; EST_HUMAN HIT: BE208458.1, EVALUE 6.00e-82
gacccactgagtgaactccctatttgttgtatgacaagtcaatatgcacatattacagagtctgcgttacacagagcaatggtaggcagactaacataagatgcctctgagaggctggtgctcagccctgggatcagtaatcaccagcagatgtggcttcttggatcttggtagtgaagattccaagagtgaagcagccagtaataggagtggctccagtggaagcaacaaacatcatcacagcttgctggccaggattcctggagggtataacactgacatcaccagagttttcaatggcaacaatggcacaagctgccggcagaagcttctcccagttcctcttgacatttgtgtcataggtgcaatcacttttcattttgtagatacactgttcaatttgtaagtcaaggttggcaccaccttgagtgggttgctactgcaaggaatttaagaacatcctcctccttcatttgcaggacctcaagggctccagacattgtgagttcccctttttgttacaatgggaatccagaaggacactataggaacccttctccaggtagtgtggaaaggagcca

SEQ ID NO: 234 - DNA, 534 bp, Homo sapiens
  MAP TO AJ132411.1; EXPRESSED IN BRAIN, SIGNAL = 0.8; EXPRESSED IN FETAL LIVER, SIGNAL = 1.2; EXPRESSED IN ADULT LIVER, SIGNAL = 0.87; EXPRESSED IN PLACENTA, SIGNAL = 1.1; EXPRESSED IN LUNG, SIGNAL = 0.93; EXPRESSED IN BONE MARROW, SIGNAL = 1.4; EST_HUMAN HIT: BE246981.1, EVALUE 9.00e-50; NT HIT: AF115393.1, EVALUE 3.30e-02; SWISSPROT HIT: P23727, EVALUE 1.70e+00
gtttgccctgcgttacactcccaggcaggcacagaaccgatgttaaactctccattttatcacatgaaccctgcccagtgccctacccattcctcccacgccaggctcatgactgcatgtcaagcacagttgtgccaggtgtctacctgctccatttctcctcctcccagcagccctgcaaagtgcccgccaattttctctcctgttttgaagatgggaaaactaaagcagagagccacaaggtcactcacctggtaagctgcagaactgaacaaagtgtgcttgtgaaactttctgtttgttctaaggagacaactgtgggtgggtggactctgctggaggctgtcccttgcctggctggcagcaaccaagccttctgcttctgacttgctggggagcgggaggacgggaagggctgtcggtggggaaattggagagaatacaaaacctcccctcagctttaataggctctaccaacagttttcactttgcctcttttccttctctggtatagccttcctcctctttggtgaa

SEQ ID NO: 235 - DNA, 507 bp, Homo sapiens
  MAP TO AL137844.2; EXPRESSED IN LUNG, SIGNAL = 0.54; EXPRESSED IN ADULT LIVER, SIGNAL = 0.48; EXPRESSED IN PLACENTA, SIGNAL = 0.61; EXPRESSED IN BRAIN, SIGNAL = 0.64; EST_HUMAN HIT: AV759277.1, EVALUE 2.00e-04; NT HIT: AF095703.1, EVALUE 1.00e-04; SWISSPROT HIT: Q04806, EVALUE 6.10e+00
atttttggaccacagttggctgtgggtaattgaaaccactgaaagtgaaaccatgtataaagggggattactatatatttgagtaagagcttctagagactgctaaatttgctccgtaactatcagagtggaagtcagctaatgctgtcaaatatttttataaggcctatgagtattctggaattattttgatgctgttcacttctcctatttctgtattaaatctaattttatgtacacaaaaccagattatgttacagtcaaacagattccaggaatgttccacaaacaatattgttcagtagtcaatagaggacaaattggactataatcttgccagtgacttaaaacaaagtgaaacaaaacataaaaaactaaaacatgttactatagttgctgccatcaacttcctcatcatttttgaagttggtattaatagtagcatctttggaatatttcagcactttttcagtactacatttatgtagaaaggtctgtgctggcatt

SEQ ID NO: 236 - DNA, 584 bp, Homo sapiens
  MAP TO AC016683.4; EXPRESSED IN PLACENTA, SIGNAL = 0.48; EXPRESSED IN LUNG, SIGNAL = 0.54; EXPRESSED IN BRAIN, SIGNAL = 0.37; EXPRESSED IN ADULT LIVER, SIGNAL = 0.54; EXPRESSED IN BONE MARROW, SIGNAL = 0.44; SWISSPROT HIT: P49024, EVALUE 7.40e+00; EST_HUMAN HIT: BE542262.1, EVALUE 5.30e-02; NT HIT: AF309389.1, EVALUE 8.70e+00
gcgttcactccctctttgactcctgtctgttctttctcagcaaggtttcccagtctctgtactctcttttctcacagcagttcctgatccaggcttggactctgcactggaagcaccagcgggtggtcttccttcccacttttcaccaacaccagtcaagtgcaggtcctgccagtcccctgacagagagggccttgaaagtgaatgtcacagagagcacgcagtgagtgtgggatgagagatgagtaaaggatgccacatctccttttccttgaggagaaggatcctctgtgcttatcatacctttgcaattaatacaataattctgaagacagactggaggctcttctcaattcatcaagtttattgcatccctgaaactaatctagaaattttacccccctccactacctttacaccctcactccttccccctttctcctgattctgggccacagccgttcactgagtggcttccacacaacagctggggaagcgcccatgacaggaatcactgctgagctccacagcctgcctgcaggaggcagagggtcctggcctcacccacctactggcttctcctg

SEQ ID NO: 237 - DNA, 566 bp, Homo sapiens
  MAP TO AL137070.3; EXPRESSED IN BRAIN, SIGNAL = 0.58; EXPRESSED IN LUNG, SIGNAL = 0.84; EXPRESSED IN ADULT LIVER, SIGNAL = 0.89; EXPRESSED IN BONE MARROW, SIGNAL = 0.6; EXPRESSED IN PLACENTA, SIGNAL = 0.89; SWISSPROT HIT: P16390, EVALUE 9.30e+00; EST_HUMAN HIT: AV649917.1, EVALUE 0.00e+00; NT HIT: AL163204.2, EVALUE 1.00e-119
ccattgcagaatttgtgtggaattaaatttctttagtaaagaccaaatattatcagctggtcttttaaaaaggctatcagtgtgagagtcaacttctttcaggaataacggcaaggacaatctctgcaaaccacatggtttaaagagtttttccactctactgcattctcacttggaaaggttatggagtatattgtataattaaatatttgtagaaatgacccctgtcaagccttcctttaaagctatgatgtagttgatcttcagcaaaaatctggaattgaagaggtttgatcctgaaaataatagctgacttcaacatcgtcatagtttcttccaatctttcacctagatgcattttctcaacaggctgtattttcagactacacctgtcccacctgccgggatgcgcagcgggaccagcgctgcccgcgcctctcaccgcactgcatccgcctcccgccagccaggaagccactgcggcctgaggcttcccgccaccaccgcgcgcgccttcctccggggacatggggagctggctgaaggcgtaaaggagcgagcagaag

SEQ ID NO: 238 - DNA, 600 bp, Homo sapiens
  MAP TO AL136972.1; EXPRESSED IN BONE MARROW, SIGNAL =   3; EXPRESSED IN BRAIN, SIGNAL = 3.1; EXPRESSED IN HEART, SIGNAL = 4.6; EXPRESSED IN HELA, SIGNAL = 2.4; EXPRESSED IN PLACENTA, SIGNAL = 3.4; EXPRESSED IN LUNG, SIGNAL = 3.4; EXPRESSED IN FETAL LIVER, SIGNAL = 3.2; EXPRESSED IN ADULT LIVER, SIGNAL = 3.2; SWISSPROT HIT: Q29554, EVALUE 6.70e-01; EST_HUMAN HIT: BI054142.1, EVALUE 2.10e-01
acgtcaggatccttcaggtgtggaaagagcttcatatctgtgtgtcactccaatactgcccagtcttgtctttttgggggtcccattaagtcatttcacattcattttcgttttcctcccgcctcgttctcacttcctgataattttttctctatctttatactttccttactgattcattcctttcttctgtcaagacacactttattcctactaatgaactgaaggagatcagtctgaatttagagcacataaaacaccaggccaagaaacaaatcagtgcacacttagaagatcattgctacactcacctcagtacctccatgcttcctgaatcccaggctctgtggatgggatccaggaatctcctattgaagcaaaaccactacgtgagtcttgtaaacactagcgtttggacctgcatcaactctgactcctcccagggcagggtctctgtccttttcaccttcgtcatccagtgttcgggatagtgtttggttaaaaagtaggtgctcatcaaatcagtagtgaatgaaatactgaactaatgaaaaaatgacaaaattgaataaatattgaagccccagccttaggtaaaat

SEQ ID NO: 239 - DNA, 572 bp, Homo sapiens
  MAP TO AL133547.3; EXPRESSED IN BRAIN, SIGNAL = 3.1; EXPRESSED IN HEART, SIGNAL = 2.3; EXPRESSED IN HELA, SIGNAL = 1.5; EXPRESSED IN PLACENTA, SIGNAL = 2.6; EXPRESSED IN FETAL LIVER, SIGNAL = 2.5; EXPRESSED IN ADULT LIVER, SIGNAL = 0.93; EXPRESSED IN BONE MARROW, SIGNAL = 3.1; NT HIT: gi14741767, EVALUE 0.00e+00; SWISSPROT HIT: P04090, EVALUE 4.00e-57; EST_HUMAN HIT: BG206251.1, EVALUE 0.00e+00
tttggtacaaccaacatggcaacatttattagccaatgcactgtagagttgtctcttttttcgagaatgagtatccaagcctaagtattttaattctgaaggactgctgtctgcggcttcactttgtctattgcgaataagtttcttaaattcttcaaagagaagactggaatcttttaatacaggtacatgttgttgtagctgtggtaatgctggctgcatctcagacagggttaacttcagctcctgtggcaaattagcaacaaattctgacatcatatttatggtttctgtatctttgttgatgaaggatggcacaatttctgttaaatttaaaaaaaaaggtgtatgtgagggtatattcatgtcaaagagcactcagaaaaactatgaatgtttgcatagacaaaaaagcattgcctcagtataaattaaacattgaaacaaaataagcaagcatcctaatatctaaacacttagcttacttacagttggacaccttaaagtaccataattttaccaaggctctgctttaccccattggtcctctctcgtctctcttcatgatcccc

SEQ ID NO: 240 - DNA, 508 bp, Homo sapiens
  MAP TO AC013779.3; EXPRESSED IN FETAL LIVER, SIGNAL = 5.5; EXPRESSED IN BONE MARROW, SIGNAL = 4.6; EXPRESSED IN HEART, SIGNAL = 5.2; EXPRESSED IN PLACENTA, SIGNAL = 6.2; EXPRESSED IN LUNG, SIGNAL = 6.1; EXPRESSED IN ADULT LIVER, SIGNAL = 8.3; EXPRESSED IN HELA, SIGNAL = 5.3; EXPRESSED IN BRAIN, SIGNAL = 5.7
tatctccaaagggtggttggttgtgtagaggggagccgctttgtggtctggcttgggagcggaagggagacttttcactgccttttctgctttattcttacccacttcaacgtattatcttttcattaaaaataaaactcaagcacttttagatcatttttaaaacagtatttaattataattactgggttttttttctagggaaagaaaagaattaatcaataaatcaaactcagaattagagaaaggaggaaaaccaagccctcctgaagtttaagctatgtaagtcaacccttgaatgagatctaatttatcaaactatctaattcatcaaactactactccaactgcagctgctaatatgttttatttttactccgctcatttgactgcaatgtattgccattaattcaaacttagcttaataacattaacaggatttatttcttcccagatatataaacaactgtcatgttgtctttcaccagctccacctccactccaagaa

SEQ ID NO: 241 - DNA, 562 bp, Homo sapiens
  MAP TO AL137785.2; EXPRESSED IN FETAL LIVER, SIGNAL =   1; EXPRESSED IN BONE MARROW, SIGNAL = 1.2; EXPRESSED IN HEART, SIGNAL = 1.2; EXPRESSED IN LUNG, SIGNAL = 1.4; EXPRESSED IN PLACENTA, SIGNAL = 1.2; EXPRESSED IN ADULT LIVER, SIGNAL = 1.2; EXPRESSED IN HELA, SIGNAL = 0.67; EXPRESSED IN BRAIN, SIGNAL = 1.1; NT HIT: AF288787.1, EVALUE 3.40e-02; SWISSPROT HIT: O13731, EVALUE 1.40e+00; EST_HUMAN HIT: H85274.1, EVALUE 7.90e-01
tgagacaacactggcgtagcacttcatacaggctgcgctttgtggtaaatgctcaacaagtgggcgttgttctcatggaataatgggatactctttttcttcccactgtatttacttttcaactcaggggacggggttctttagtaaagtggataaagtgccagactgctagcttactagagcataggagctctgctctgagaagaggtcaatattaacagaagaacgatgtgtttgtcatgtaaatgcgctaccgggaagaagccgggacacctaagaaagccagagtaggatgtggaaattctggaatggagcctgcgtcctggagggtcagctttgaagcagggaaagagaagagcaagaggagaccacagagaacaggggggctccaggatgcccactggaggggcctctgtgtgaccagcaaggtgagttgacagcaaaggtaaacaatgtttagcattctctctgggctctgtgcatatgggtgccccggatcaggagccaagccactggggttcaaaccccagctcctcccttaacatctgtgttttcttgggca

SEQ ID NO: 242 - DNA, 566 bp, Homo sapiens
  MAP TO CHR21_66.0; EXPRESSED IN BONE MARROW, SIGNAL = 1.9; EXPRESSED IN ADULT LIVER, SIGNAL = 0.9; EXPRESSED IN LUNG, SIGNAL = 1.1; EXPRESSED IN PLACENTA, SIGNAL = 0.81; EXPRESSED IN HEART, SIGNAL = 1.3; EXPRESSED IN BRAIN, SIGNAL = 1.9; EXPRESSED IN HELA, SIGNAL = 7.6; EXPRESSED IN FETAL LIVER, SIGNAL = 1.7; SWISSPROT HIT: Q12241, EVALUE 2.40e+00; EST_HUMAN HIT: BF514916.1, EVALUE 0.00e+00
atggtagcaggtacatggggaaacagattatgtagaaacaagttattctgctgctttggcttttcggtttccctttgctaaaattaaagtcttttaaatgttttttggatttatactttcagaggtagtagacttttagttttattagttgacatttccagaatttgaaagcttagctaaatatttattttatcttgtgtgactgttccttccaaatgtatccagtcttaagtggttccccaaattccagctcttcgtgcgatccaaccctaggtctggctgcggaggtggctctccattgttcttggaacgctgcatttttgtctgagtgatgggtgggcaggaagttgttaagcaggtgttctactagactttgagaaaagaagattaaagcagacaagcctacataatcaccagttataacctggagaaaagcaggaataattttcttaccctcattgggattacgtcacccggcctgtagaccatcaggggcctgagaggcattagagtctctatcgtagaagaacgaggaaatcatccactgccagagacagtgcattcac

SEQ ID NO: 243 - DNA, 521 bp, Homo sapiens
  MAP TO AL136371.1; EXPRESSED IN FETAL LIVER, SIGNAL = 0.94; EXPRESSED IN BONE MARROW, SIGNAL = 0.87; EXPRESSED IN LUNG, SIGNAL = 0.83; EXPRESSED IN ADULT LIVER, SIGNAL = 0.79; EXPRESSED IN PLACENTA, SIGNAL =   1; EXPRESSED IN HELA, SIGNAL = 0.55; EXPRESSED IN BRAIN, SIGNAL = 0.92; EST_HUMAN HIT: BE743428.1, EVALUE 8.00e-04
cctagcttaaatttgccagccaataaacatgattttattattattaacaaaagtcaaagaataggcttcagaactagtttttttcaatgtgttaataagatcataaggcacattaagtttgtttccattaagtcacactaattttcttcttttcagatcaattcccttgcaaagttatcaaggtgctggcaacaatgcattaggtatccactttctagtctacatacaaggggaggaaggaaaggtcagtgaaggaggagagcttgaagctctctcaaaacgtcagtacaatctactttcccataatcttcatgcatttcttggtccagattagttcatgtttctatttctgaacatggggattgataatgatgatatttatagggctgagctcccattgcactctattatccaatatagtgttatttctcactcttctgtaggaagagtattagacacccagatgaaaaaaaaaaggggggtaaatcatccagtaaatgggcaatggatttgagagaggc

SEQ ID NO: 244 - DNA, 596 bp, Homo sapiens
  MAP TO AF235094.1; EXPRESSED IN PLACENTA, SIGNAL = 1.5; EXPRESSED IN LUNG, SIGNAL = 1.7; EXPRESSED IN ADULT LIVER, SIGNAL = 1.6; EXPRESSED IN BRAIN, SIGNAL = 1.7; EXPRESSED IN FETAL LIVER, SIGNAL = 1.7; EXPRESSED IN HEART, SIGNAL =   2; EXPRESSED IN BONE MARROW, SIGNAL = 1.5; EXPRESSED IN HELA, SIGNAL = 1.2; EST_HUMAN HIT: BF568137.1, EVALUE 2.00e-44; NT HIT: AF072469.1, EVALUE 0.00e+00; SWISSPROT HIT: P48988, EVALUE 5.00e-08
cagccaagctcctgaaaaacgcacagaactgctccgcggcctggtggtcggctgactgcttttcactggatgcatctagctttttaatgccgtgtctggccttaaagcgccaaagccaccctccggagaacacgcagggctcagtgagctgcatctgctcgtagaagtccttggccttctcgatgagcatggggcctgacacggggacgccctcggagcgcttccccaggaaccactcgtacaggacgcggtccaggtgctccagcttgggcgtgtgcagcgtgcgccgctgctccagcgccttgttggagtcggagctggcgaagaaccggagcagctgcgccttgtgggccctgatgtcgtaaagggtggacatgcccacattgtactcctgcatcagtgccttccggctctcgcccttctccaggcgcgtgcagatgtcaatcttctccttcagtgtcagcaccaccctcttccgcttctcccctctgctcttcccggcagccggcttggaggccatggggaggggtggctggtcctagcacttgcaggacacacgcctggcctgggctgctgccacaacttccctctcctcc

SEQ ID NO: 245 - DNA, 530 bp, Homo sapiens
  MAP TO AL031602.14; EXPRESSED IN BONE MARROW, SIGNAL = 2.8; EXPRESSED IN BRAIN, SIGNAL = 2.8; EXPRESSED IN LUNG, SIGNAL = 3.2; EXPRESSED IN PLACENTA, SIGNAL =   3; EXPRESSED IN ADULT LIVER, SIGNAL = 2.4; EXPRESSED IN FETAL LIVER, SIGNAL = 2.3; EST_HUMAN HIT: AA399232.1, EVALUE 0.00e+00; NT HIT: AF194974.1, EVALUE 3.20e-02; SWISSPROT HIT: Q9NV58, EVALUE 1.00e-02
atcctgaacccatgaactgcttttaccaacaggtttagcatgatccatgcatgactcagcaaagtggattttgtctccacagagaatgcaacaatatggaaatccaagtggacattgaagccaaaccaagccactatcagctggtgagtggaagcagcacggaggactcgctccatgttcatgctcagatggcagagaatgaagaagaaggtagtggtggcggaggcagtgaagaggatcccccctgcagacaccaaagctgtgaacagaaagactgcctggccagcaaaccttgggacatcagcctggcccagcctgaaagcatccgcagtgacctagagagttctgatgcacagtcagacgatgtgccagacatcacctcagatgagtgtggctccccccgctcccatactgcagcctgcccctcgacccccagagcccaaggtgcaccgagcccaagtgcccatatgaacctctctgccctagccgagggacaaactgtcttgaagccagaaggtggagaagccaga

SEQ ID NO: 246 - DNA, 587 bp, Homo sapiens
  MAP TO CHR22_101.0; EXPRESSED IN BONE MARROW, SIGNAL = 2.1; EXPRESSED IN BRAIN, SIGNAL =   2; EXPRESSED IN HELA, SIGNAL = 1.4; EXPRESSED IN HEART, SIGNAL = 1.9; EXPRESSED IN PLACENTA, SIGNAL = 2.1; EXPRESSED IN LUNG, SIGNAL = 2.1; EXPRESSED IN ADULT LIVER, SIGNAL =   2; NT HIT: gi14778384, EVALUE 0.00e+00; EST_HUMAN HIT: BG682321.1, EVALUE 0.00e+00; SWISSPROT HIT: Q63046, EVALUE 1.10e+00
ccaagtcaggctggaaactcaccagtttggagcaaacttggaagatgctgtggatgtactccctgggccagcatcctctgtaccaaccctgggtgaagctggtgagcaggcctaaccatagggacatgggggacaaggggaacttggtggacagggcggagaaaaggtgttgtaggaactggggatgccaaggtgggtgtttttctcccagttgctttaggtcgataatcttgttctttggtgtaacggttggcctgggacagtggggtggaacacgaagacctctgtaatgctgacagtttggaatttgtagtgggagaagagtctcgatcggcactgggtacagagctggatgacaggaggttttctgtgaggaaccaaacaaaaaatattttggcaaacctctcccaaacacttgtggcctcccactggtctaataaatctcatttcttaaggtcacaattcttatctgatacccttaacaagtttagaggactacacggtaggaaccatcgtttgcttcataaacaggaccagaagatgaattgttgggcacccttctctgcacaaatggctgtggcctagat

SEQ ID NO: 247 - DNA, 558 bp, Homo sapiens
  MAP TO CHR22_214.0; EXPRESSED IN FETAL LIVER, SIGNAL = 1.5; EXPRESSED IN BONE MARROW, SIGNAL = 1.6; EXPRESSED IN BRAIN, SIGNAL = 1.5; EXPRESSED IN HEART, SIGNAL = 1.4; EXPRESSED IN HELA, SIGNAL = 2.6; EXPRESSED IN PLACENTA, SIGNAL = 0.9; EXPRESSED IN LUNG, SIGNAL = 0.92; EXPRESSED IN ADULT LIVER, SIGNAL = 1.2; SWISSPROT HIT: P14903, EVALUE 5.30e+00; NT HIT: X81337.1, EVALUE 3.40e-02
ggaagccctgcagatacaaggacacagaaggttgtaaacattggacatactttacatcatgctctgagagttggatttttattattgttagcccctctatcaccatcttacccacatcactttatataagctaatttgtctctttttttcagaaaagagaagcaaaaagaaaaaaatctacattttgttgttgttcttctttgtgtgtttgggtttttttttttttttttaagcttcctggttgtctcaatatcagaaaaacaaaactagtcttcttcaaacaccatttttatcaagcctcttctaggcttaaaactctcagcacctcctcaccccacttgcctgcaggatcttgtccaaacacatcagcttggcattgaggtcttccatgatccatgttccatggatccagttccaaatgactgctctggccttatctcctgctatttctgcacatgcatttcctctaggtatactgtggaagtaacctactcgctgaaaaagaatacagaatgtgctgaagtttgattaagaaggagagtttaaaagtgttgctgg

SEQ ID NO: 248 - DNA, 568 bp, Homo sapiens
  MAP TO AL136103.2; EXPRESSED IN BRAIN, SIGNAL = 2.3; EXPRESSED IN HELA, SIGNAL = 1.5; EXPRESSED IN FETAL LIVER, SIGNAL = 2.5; EXPRESSED IN HEART, SIGNAL = 2.4; EXPRESSED IN BONE MARROW, SIGNAL = 2.5; EXPRESSED IN LUNG, SIGNAL = 2.6; EXPRESSED IN ADULT LIVER, SIGNAL = 2.5; SWISSPROT HIT: P28040, EVALUE 7.10e+00; EST_HUMAN HIT: BI760651.1, EVALUE 2.00e-01
ctcatgattgccagtggatgagtaatttactacagagttcgaggagtcagatagtgaagagatcattataaagagaaattataatagagttccctgtactcatgggtctggtaataaaagattgatataattagatggggcttggtaacaagtactattacattatgtctgaatcttatttaaatatattggccttttatcttaaacttattagtgggtggctgtagcttacgtcgacaccagctagctcttttactcttgcaaaaggagggctgagctatacaaaggagtcaatcatttgatgtttagaagcaatggcacggtatttaaggcagttctccctgttgatttttagaggaagagcaaggtataaggggaacttaagcttccacttggtcacaaactttctggataacaaattcaggggctgtgtttctctgtactgtggctgtggctaccttggaacctttaacttggccaaagtcatccttgagaaagcagataaaggaaagggcaggaaataatctgacaacgtagtgagaaaatgagctgtggagtaagacaggcc

SEQ ID NO: 249 - DNA, 564 bp, Homo sapiens
  MAP TO AL133266.3; EXPRESSED IN HELA, SIGNAL = 1.6; EXPRESSED IN BRAIN, SIGNAL = 2.7; EXPRESSED IN FETAL LIVER, SIGNAL = 2.6; EXPRESSED IN BONE MARROW, SIGNAL =   3; EXPRESSED IN LUNG, SIGNAL = 3.4; EXPRESSED IN ADULT LIVER, SIGNAL = 3.1; EXPRESSED IN PLACENTA, SIGNAL = 3.3; SWISSPROT HIT: P30397, EVALUE 2.40e+00; EST_HUMAN HIT: AA771857.1, EVALUE 2.00e-01; NT HIT: gi14759941, EVALUE 0.00e+00
tctttcattgctgccaagtgcttttaatctcctttgtcactttgcactgatcttgagaatcaaatactgtacaagtgagccgaagccagacgtgttccattttactattaatgcaattgtgaataaattaaatactatcttcttccccacgatgtgttccagccccctttgcacttttgactctgtctttcgtttattgcaggatttagtcgtccgtgttgtttttattcttggcaacctgacggcaaaaaataaccaggctcgtgaacaattttccaaagagaaagggagcatccaaactctgctgtcattattccagacgttccatcagctggatctgcattcccagaagccggtgggccaacgaggcgagcagcacagggcgcagaggccgccgtcagaggcagaggacgtgctcatcaagctgactcgtgtgctggccaacattgccatccacccgggcgtgggcccggtgctggccgccaacccggggatagtgggcctgctcctgaccacgctgggtgagaaccgcagcccactggttgcagcagacacaaccaactt

SEQ ID NO: 250 - DNA, 537 bp, Homo sapiens
  MAP TO CHR21_29.0; EXPRESSED IN PLACENTA, SIGNAL = 0.81; EXPRESSED IN ADULT LIVER, SIGNAL = 0.97; EXPRESSED IN HELA, SIGNAL = 4.3; EXPRESSED IN BONE MARROW, SIGNAL = 1.6; EXPRESSED IN LUNG, SIGNAL = 0.98; EXPRESSED IN HEART, SIGNAL = 1.2; EXPRESSED IN BRAIN, SIGNAL = 1.5; EXPRESSED IN FETAL LIVER, SIGNAL = 1.4; NT HIT: AF041427.1, EVALUE 7.00e-28; EST_HUMAN HIT: BE550699.1, EVALUE 1.00e-11
gaggagctgcttggggtaagcctgcctcccattctgttcaaaatgactgagataaattcatatctgattgcttcctttggaaaagctaatcagaaactagaaagaatgcaaccatttttctcccacctgtgatctgaaagcccacaagccccctcctcacctcgagctgtcccacctttccagaccaaaccaatgttcattttacctatgttgatggatgtctcatgtcttccttgtaaaaagtaaaaaattaagtacagtgaatagaataattgtttaggtaatgtttttgtgtaaattaaaatcttaaagttgtttttgatgctcatttaatatctgagtcatttccaataaagaaaatgttgtaatatagaaaaatatgtttccaaaaattgtggaattgtccttatctataaatgtccatatctgatagctcaggatttcttgctttttagagtttcagtatagttttagtttactaaggataaaattctagttaacatgtaattctgtataggaaatgtgccagaaagggtt

SEQ ID NO: 251 - DNA, 505 bp, Homo sapiens
  MAP TO AL136450.1; EXPRESSED IN BRAIN, SIGNAL =   5; EXPRESSED IN PLACENTA, SIGNAL = 7.3; EXPRESSED IN ADULT LIVER, SIGNAL = 5.7; EXPRESSED IN BONE MARROW, SIGNAL = 6.4; EXPRESSED IN LUNG, SIGNAL = 5.8; EXPRESSED IN HELA, SIGNAL =   4; EXPRESSED IN FETAL LIVER, SIGNAL = 5.1; EXPRESSED IN HEART, SIGNAL = 4.7; SWISSPROT HIT: P08640, EVALUE 3.40e-02; NT HIT: AL096777.1, EVALUE 0.00e+00; EST_HUMAN HIT: BF902121.1, EVALUE 0.00e+00
gagcagcaaacagaagggacttccgttaccttctctcctcttaagtcaccgccacagctggaacgagagatggcctctccacctgagtgcagcgagatgccccttgatctgtcctccaagtccaaccgccagaagcttccattgccgaaccagcgcaagacaccccccatgcctgtgttgacccccgtgcacaccagcagcaaggccctcctctccacagtcctgtctaggtctcagcgcacaacccaggctgccggtggcaatgtcacctcctgcctgggctccacttcctcgccctttgtcatctttcccgagatcgtgaggaatggggacccgagcacctgggtgaagaactcaactgcactgatcagcaccattcctggcacctacgtgggagtggccaacccagtgcctgcatccctgctgctgaacaaagaccccaacctgggcctcaaccgtgacccccgccatctccccaagcaggagcccatctccatcattgatc

SEQ ID NO: 252 - DNA, 543 bp, Homo sapiens
  MAP TO AJ239319.2; EXPRESSED IN BONE MARROW, SIGNAL = 1.9; EXPRESSED IN LUNG, SIGNAL = 2.3; EXPRESSED IN BRAIN, SIGNAL = 1.9; EXPRESSED IN PLACENTA, SIGNAL = 2.6; EXPRESSED IN ADULT LIVER, SIGNAL = 2.4; EXPRESSED IN FETAL LIVER, SIGNAL =   2; EXPRESSED IN HEART, SIGNAL = 1.9; NT HIT: gi16162711, EVALUE 0.00e+00; EST_HUMAN HIT: AL523288.1, EVALUE 0.00e+00; SWISSPROT HIT: Q14202, EVALUE 8.00e-41
tttctgtgaggatggggaaggagaggctgaggctggatttgtcccttcacttttattttttaaatgttttaaacatgaaatatttcaggcatacaaaaaaagtatagatgatgatgtaacaaagacctgtgtatccaccagccagcttcaaaaataaaacataacggatacaattgaaaccccctttatttgttttatttctcccagcccttgacccatcagccacctttatttataacccaagaaccacacccccttccacagccctctaatgcactactccctcggccccaccttcttgtacgcccccaagcaggttgtgttgcagaaccgcttttgttggccctcgtggaagaggagctcagggccaggactcccggtcttggtgtagatgtaagccccacactggtcacaacagttggttttcagtcccttgttggcccggaatttggagaagcaagaatcgctgcagagccggtgtaccacgctgccattgctgacctcgtgcaggacctgccacacacatacacgcaccctgagcta

SEQ ID NO: 253 - DNA, 566 bp, Homo sapiens
  MAP TO AC013624.4; EXPRESSED IN PLACENTA, SIGNAL = 0.74; EXPRESSED IN BONE MARROW, SIGNAL = 0.61; EXPRESSED IN LUNG, SIGNAL = 0.75; EXPRESSED IN BRAIN, SIGNAL = 0.71; EXPRESSED IN FETAL LIVER, SIGNAL = 0.74; NT HIT: AL139074.2, EVALUE 9.00e-03; EST_HUMAN HIT: AI675299.1, EVALUE 7.90e-01; SWISSPROT HIT: O22048, EVALUE 4.80e-01
aacacagttccaaaggccacagggtgacatcctctctcacctgatctttattcatatctggcttttaattgcatttttttccccatttctcaagcaccatacacctcccttcctccctgacaggaaggagcattttatttctcattcaaaacgctttcctactgatctctattcttcagaagctccagaggtcccttgttacctgttggtttttctcatgttggttgatctgttggccttgctgtagtttattgccttttcaacctttttttccctcctctttccgaacttagaccagaacttacaacctgctgtcttttctcatcttcactatcattatcttcagactgaatcttcccaaaatggatttttttaccaacctcgtcctctttcaagaaacaaagaggagaattatgtgatggtttccactgtcggagcgtctgtggctttgtttgagcgagagcttcaaatccaaagctaaaccttgactgaacacacaaactcaattgacgagaggagtacccatgttcaagcccaccaattggccgaggacacaatcagagggt

SEQ ID NO: 254 - DNA, 592 bp, Homo sapiens
  MAP TO AF235096.1; EXPRESSED IN PLACENTA, SIGNAL = 1.3; EXPRESSED IN LUNG, SIGNAL =   1; EXPRESSED IN BRAIN, SIGNAL = 0.99; EXPRESSED IN HEART, SIGNAL =   4; EXPRESSED IN ADULT LIVER, SIGNAL = 1.1; EXPRESSED IN FETAL LIVER, SIGNAL =   1; EXPRESSED IN BONE MARROW, SIGNAL = 0.96; NT HIT: gi14748908, EVALUE 1.00e-69; EST_HUMAN HIT: BG390704.1, EVALUE 1.00e-70
cttgtttcggtattgcctgggcaaatttttgatttactacttttgaataatgtcttatatctctattatatgattattagagtgaatggcataaaagtggtatttttgttgcaaaatctattttctcttggtttaggttcagagcactggtgaaggagaagcacagagatattttgatcatgcacttactctgagaaacacaatactgtttctgcgtcataacaaagatctagttgcgcaaactgcacagccagaccaacccaattatggtatgataaatatatttaattttgaagacatgatcatatgaaacttttttctaagaaattaaacagatcatgctcacttatataatcatcacttacgtattttgtgtagatagcatattgaatttataactagaggcctgttttgtgaatttcttgcttgttaactgtttcttaaccttattttacttttctcatgtgccactaacatttgtagtatttaaatctgttcaatacctgcaaaagtgttggtgttaatttatttaagtagctggatggaatttagaacaggcatcagctctgaggggtgaacaagggcaaaattt

SEQ ID NO: 255 - DNA, 597 bp, Homo sapiens
  MAP TO CHR21_68.0; EXPRESSED IN BONE MARROW, SIGNAL = 1.4; EXPRESSED IN LUNG, SIGNAL = 0.65; EXPRESSED IN BRAIN, SIGNAL = 1.4; EXPRESSED IN HELA, SIGNAL = 3.9; EXPRESSED IN FETAL LIVER, SIGNAL = 1.2; NT HIT: AL163202.2, EVALUE 6.00e-04; EST_HUMAN HIT: BI711342.1, EVALUE 5.40e-02; SWISSPROT HIT: P12259, EVALUE 5.80e+00
cgtacagtgctgttgttgggtagagttctgtgaatgtggagaaggtcatgtagattgacagtgtgttgagtgcttctatgtccttgtttgttttatgtccagcaacaatggcaatggtctttcactgagggctgcagccccaccagacagtcatctccatgcagccatctgctccacatccaggtgagtctcctctctgccatttcagacctaagggaaggcaggaaaggcacagctgcctgctctccctagccctggaatactgagttctctgccccctgcccacagctttgtaaatagtcccattactaaactttcctcagtgacccagttttccgtgatatctctggcccgctgtggccttatgacagatatcccagggggctactgccattacctaggactcctatggaagaaattcccactgaaaatgagctcacagagtgagtccattaggctgtggctgtaataagatgcataacggagacttccatttcctcttagaatgtagaaaactgcaaagaacattgctcccacactaacaatgagaacagtcaggtaatcctcaacgccactggagaggtgaatcacagggga

SEQ ID NO: 256 - DNA, 533 bp, Homo sapiens
  MAP TO AB017654.1; EXPRESSED IN FETAL LIVER, SIGNAL = 0.63; EXPRESSED IN PLACENTA, SIGNAL = 0.58; EXPRESSED IN LUNG, SIGNAL = 0.59; EXPRESSED IN BONE MARROW, SIGNAL = 0.6; EXPRESSED IN ADULT LIVER, SIGNAL = 0.81; EXPRESSED IN BRAIN, SIGNAL = 0.69; SWISSPROT HIT: P16452, EVALUE 5.00e+00
tgttatggtaacttgggggcttttaatttgattttattggattctttttttagactcttaaggcagtggtgttttcatcactacatctgcacaatttgttattggcattattgggaattgcggatgtaaagcagtctatgacttttgggaatattaataaactcctaaagtacttgttcaattagcttctctgacctgctgtccagaggttgagctgtcattaactgaggaagcttcctatggtttaagtggtggtgaggaaaaccattgtctttcttcctcctcatctttgtcttgcctacttcattcactactttcttgggagcagtgcaggaagaggccgtccaattccagagctgcagaggggctcctatgccctagagaatgagaaagagcatgctggttaggttttatattactactgtgcctatttttgattaagagaatgttttctgtgtgtccagaggtttaaaagattaataatttattttacatatctggagaattgcttctctctgcctcaagcattaggg

SEQ ID NO: 257 - DNA, 520 bp, Homo sapiens
  MAP TO AC022619.3; EXPRESSED IN FETAL LIVER, SIGNAL = 2.9; EXPRESSED IN BONE MARROW, SIGNAL = 2.2; EXPRESSED IN LUNG, SIGNAL = 1.9; EXPRESSED IN BRAIN, SIGNAL = 1.5; SWISSPROT HIT: Q9Z998, EVALUE 1.60e+00; NT HIT: L01574.1, EVALUE 8.00e-06; EST_HUMAN HIT: AW900533.1, EVALUE 8.00e-07
ccttcagctttcttcatgcctttttttttattatcgttttctctttcgctcctttgactgaataattttacatggccagtctttgacttcactgattctttcttctgcttgatctagtctgctgttgaagctccctagtaaatgttttagtgcagttaatgtaccgttaagctccaggatctctgtttggtaccctttaatattttctatatctttattgaaattctcattttgttcatgcattcttttgttaaccttggtgaacatactttatggcagttattttacattctccatcaggtatatcatataactcagtttcctctgggtcagcttctggagctgtattttgttcttttgtttggaacatatttcttgtttcttcattttccctgactctatgttggagtcttacacattagacaaaacagccacctctttcatattggcctcatacaggagaagaccctcacgaatcagccttgctagggattctaggagcctttttaaccttcgtgca

SEQ ID NO: 258 - DNA, 575 bp, Homo sapiens
  MAP TO CHR22_223.0; EXPRESSED IN BRAIN, SIGNAL =   1; EXPRESSED IN HELA, SIGNAL = 1.5; EXPRESSED IN PLACENTA, SIGNAL = 0.64; EXPRESSED IN LUNG, SIGNAL = 0.58; EXPRESSED IN FETAL LIVER, SIGNAL = 0.85; EXPRESSED IN BONE MARROW, SIGNAL = 1.1; SWISSPROT HIT: P11912, EVALUE 1.70e-01; NT HIT: AF011920.1, EVALUE 1.00e-08; EST_HUMAN HIT: AI692681.1, EVALUE 2.00e-04
gtgcaggattcatccatgtgggactcacataagaggaccagctggacggttttcctgggcgaactgctgatgtcactatctttgggtcttttctcttgagttgcttggactttggaaaaggatgttacaaggccgtacagagggcagctgagggggccaaccaggtctggtggaaggcgaagtggcccccaaagatgtcccagtcctgatccctggtagctgggaagatgttgttacaagacaaaaggaaatttgcaggtgtaattaaggttacgaaccttaaaatagggagggaaattatcctagacatggctgggatagtgggtctggtccagtcccatgagctgtaagagcagaaaaggactttctctggctggaagcagaagagagaccaggccgaatgggaagccagagagtttccaagtgtgaggactggacatgccgctgccggctccgagacgggggcccacgggcaaggacagagacaggcctctacttgctaaggctgggccctggctgacagccagccagggaacagggacttcagtcctatagccacagaaaccagatcccac

SEQ ID NO: 259 - DNA, 504 bp, Homo sapiens
  MAP TO AL136304.2; EXPRESSED IN BONE MARROW, SIGNAL = 3.5; EXPRESSED IN HELA, SIGNAL = 2.6; EXPRESSED IN HEART, SIGNAL = 3.6; EXPRESSED IN FETAL LIVER, SIGNAL = 3.7; EXPRESSED IN BRAIN, SIGNAL = 4.3; EXPRESSED IN ADULT LIVER, SIGNAL = 4.5; EXPRESSED IN LUNG, SIGNAL = 3.9; EXPRESSED IN PLACENTA, SIGNAL = 4.2; SWISSPROT HIT: Q9DBS5, EVALUE 1.00e-40; NT HIT: gi16174185, EVALUE 0.00e+00; EST_HUMAN HIT: AI929486.1, EVALUE 0.00e+00
agtgaggtgatcccaagcagccccaaacctttaatcagataactgctcctccatccaccctggaccacttggcaccacctttgccctctcacctgggcctcactcagcccgagctcaatgttttccatagaacggcgaagctgccgggccttctcatgcaccagcccttcctcatggcctccctgctgcagacactcaatggtctgggacaggctttgcagcacggcctggtgttcactgcgtagggcctctagcccttggctgaccagccgtgtgctccccaggatctcctcttggctgagccggtggcctgcaggctcatcccgctgccccaacaccaggcctgacatcctggcctgggggaccttgcccggtctagggagaaacaacagagttcagctggtgtaaagatgagacagagaagctgagcaactttctcagagagtggtgggaatccaagtgaagggacaaaagtaagagtgaccctgtggcttagctggagag

SEQ ID NO: 260 - DNA, 518 bp, Homo sapiens
  MAP TO CHR22_167.0; EXPRESSED IN BRAIN, SIGNAL = 0.88; EXPRESSED IN HELA, SIGNAL = 0.64; EXPRESSED IN FETAL LIVER, SIGNAL = 0.72; EXPRESSED IN PLACENTA, SIGNAL = 1.2; EXPRESSED IN ADULT LIVER, SIGNAL = 1.1; SWISSPROT HIT: P72689, EVALUE 4.20e-01; NT HIT: gi12738839, EVALUE 2.00e-34; EST_HUMAN HIT: AA631030.1, EVALUE 1.80e-01
ctgtccactccttgtccctcctcagactgtgatcacatgcccgaggcccagcacagaggagtgctcttcaaatgacagtgatgaccatgagggctgcagtccttctccccggcaggcctctgcatctctctgtcccctccccaggtgtctgtctcacctgcgtgcccaccactgtttaccccggctcatgtgcaaggaaggacagagtcagcatctgagtggccatgggcaaggactcaccgcatttgctgtcctgtagcacctggcctgcgccacatgccccctgcccctccagcgccttggctggcctctgggctacctcgtactcagtgcctgagacctggacatagaactgctgccggccgatggacttgcgcagggtcttgatggcggcctgcaggctctgttctgctcgcttccgcaagcagtccgcttcgcatgtgtctgcaggggcaggagagacagaacatgaatcgctggcaaccttgctagccgctgccttcttagctgagggctcc

SEQ ID NO: 261 - DNA, 526 bp, Homo sapiens
  MAP TO AC011985.3; EXPRESSED IN LUNG, SIGNAL = 1.1; EXPRESSED IN BRAIN, SIGNAL = 0.91; NT HIT: gi14760947, EVALUE 1.00e-04; EST_HUMAN HIT: AW897187.1, EVALUE 1.00e-08; SWISSPROT HIT: P06274, EVALUE 8.40e+00
tgaatggatggaggagaaggaaagctcctccttcaagtagactgccaactaacacacgtagaagggaggattgaattagaaacttaccatttggcaaccaccatagtaatgtttcaagcaagaaaaatcaatggatactaaaactagtgggtgaggcttgatgagaaacaatatatttacatagtctcaggatatctcccacaacataataattaaaaggaaaaatagttcagcggagaaacctggcagataccgccttaatcaagagatcaaagttaacatcaccagtcatgggactaatcaacagcatggtcgtctgatacactgcatcactctgatattcctgccagaagtacagaatctgaatctaatcattagaacacataagacaaaccccaactgagggtcattctatgaaggaaatgacctgtaatcttccaaaacatctaggtcacaaaaaacaagtgaagacttagagaaccatcccagaaggaagaaactaaacaccagaagacaacgaaatgca

SEQ ID NO: 262 - DNA, 531 bp, Homo sapiens
  MAP TO AL138995.1; EXPRESSED IN BONE MARROW, SIGNAL =  10; EXPRESSED IN PLACENTA, SIGNAL =  11; EXPRESSED IN LUNG, SIGNAL =  10; EXPRESSED IN BRAIN, SIGNAL = 9.1; EXPRESSED IN HELA, SIGNAL = 5.6; EXPRESSED IN FETAL LIVER, SIGNAL =  10; NT HIT: AF366053.1, EVALUE 2.00e-03; EST_HUMAN HIT: AA434461.1, EVALUE 1.20e-02; SWISSPROT HIT: P31368, EVALUE 4.90e+00
cttggcccaaatcaatgaagtttttcaacattgtaattatttatctgaatataccaaatgcaaatgacctaggatacttctaggaactgagttgtgcccatattttgctttgcaaagggtggtagagatgtggcttaccttgagatgcagatctatttgcaggcggtttattgggagtacgctgagaaacaatacccttcaggaaatgaaggaagcaggactgggcagagggagatgaatggtgatgcagttgcaacagagtcctcttttgatgccgtaggaacctctggagcttgagtggcccttcagaattatgcaaatcaaggaaagggtctgagcctttgtatagccaccactacccacatccacacccacactcatgttccctcttcaccctatgcactgaccagcctgggagggagaggacataacatcgggtgaggtaactcccttcagctcttggcaatttttaaagggtaactttgctgtgacccttcagcagccaacaccgcaggaagctgagggaatgag

SEQ ID NO: 263 - DNA, 531 bp, Homo sapiens
  MAP TO CHR22_228.0; EXPRESSED IN BONE MARROW, SIGNAL =   2; EXPRESSED IN BRAIN, SIGNAL = 1.8; EXPRESSED IN PLACENTA, SIGNAL = 1.1; EXPRESSED IN ADULT LIVER, SIGNAL = 1.3; EXPRESSED IN FETAL LIVER, SIGNAL =   2; EXPRESSED IN LUNG, SIGNAL = 1.1; EXPRESSED IN HEART, SIGNAL = 1.6; EXPRESSED IN HELA, SIGNAL = 3.4; NT HIT: gi14779515, EVALUE 1.00e-78; EST_HUMAN HIT: BF890881.1, EVALUE 0.00e+00; SWISSPROT HIT: Q9Y512, EVALUE 2.00e-26
ttgcaggtggaagtgagttggtcatctacatttgtggataaagttattgtcatgagactcatttcttcaaagcatttcacagatacgatgaatgacagagtgcattccttcctcaacgacattggctttgtttgcctcctcagttaaatcaaggtgtgaaacaaaccaggagaaaaagaaagattatttaaaatgaggccatcagtatcaggaatgagaagaacagctgcttgcaaactccagcactgtgtggcgttgtttacaggacagaaatcttgcttctgtaagttgtggaaagttaacgtgatgttaaccttgtcggaccttgtttttgttctgcacccctcctttgcttaggagactacctaggtggagaagcgtactgggccggcggcctgcacctctacaccccattacctttccggccaggccagggtggctttggagaacttttccgaacacacttctttctcaacgcaggaaacctctgcaacctcaactatggtaaaacttgcgctattcaagaaacca

SEQ ID NO: 264 - DNA, 553 bp, Homo sapiens
  MAP TO CHR22_8.0; EXPRESSED IN FETAL LIVER, SIGNAL = 1.1; EXPRESSED IN BONE MARROW, SIGNAL =   1; EXPRESSED IN BRAIN, SIGNAL =   1; EXPRESSED IN HELA, SIGNAL = 0.64; EXPRESSED IN PLACENTA, SIGNAL = 1.6; EXPRESSED IN ADULT LIVER, SIGNAL = 1.6; EXPRESSED IN LUNG, SIGNAL = 1.3; SWISSPROT HIT: O08912, EVALUE 6.80e+00; NT HIT: gi14766564, EVALUE 1.30e-01; EST_HUMAN HIT: AI424750.1, EVALUE 2.00e-01
aagaatgcgatgggaatcaggagttgcagttttaatgttgtccaggtagagatttaggccaggcactccagtcatagaagaagttacttactttgattggtctgacgccattggcacaccagctccatgagataggcagctgttttgctcactgtggtagcaccagcacttagacaagctcctgagacataaaagatgctcaacaaatacctgtaatgtgaatgagtgaatggttgaggaagttctcatttgagcagagggtggcaaaagagaaatattaacaagttctgctggatccaatcccctttcccacaagtgtgtattttcttctgtaccaggttccaaagcagaaatgacagtgagcatccactcttttaaatgttaacagtttaataaacatgaatcaccaaaaagtgcttttacagtaaggctaatggagccgagtttattccattttgttgcatggttaactagatccgaataattaccagctccacatttatagatgcctgttttaaggttatttttatgttgctctgtgaggtgaaggctc

SEQ ID NO: 265 - DNA, 536 bp, Homo sapiens
  MAP TO CHR22_38.0; EXPRESSED IN LUNG, SIGNAL =   2; EXPRESSED IN ADULT LIVER, SIGNAL = 1.7; EXPRESSED IN BONE MARROW, SIGNAL = 1.8; EXPRESSED IN PLACENTA, SIGNAL = 1.9; EXPRESSED IN BRAIN, SIGNAL = 1.6; EXPRESSED IN HELA, SIGNAL = 1.3; EXPRESSED IN FETAL LIVER, SIGNAL = 1.8; SWISSPROT HIT: O97939, EVALUE 1.30e+00; NT HIT: gi14770892, EVALUE 1.00e-04; EST_HUMAN HIT: AA913924.1, EVALUE 1.00e-08
ccccttcaaattgtcacctgtgcccttttgacatggcccagtcattctttgagtacttctttaccttctgatatgcaaggtgttccagctctgcctgaaaccagtcatttttccaaggagccctggttccgtttagtggagaacggtttttagaagccgagttctgggtattgggtgctttcttactattggggcgttgctgctgccaggctctccctgtcagagctagggaacatatctgtatgtctagattgattgattgattgatgcaaaccataagcttatatcagtatttccaattctaatacacaccacatagggttcattctagttctcaacatttgtaatgactccaacagtgagaagcctcactcccatgatgcattatagatttgtgtatttgagcagtcccctgtgtgtaatgcatccccattgccaccaccactgccctgtggggaccctccgtcaccccactcaggctcccacaccacacacgggtgtgggccactgtcactcctccacatgggcattcttct

SEQ ID NO: 266 - DNA, 503 bp, Homo sapiens
  MAP TO AL136362.1; EXPRESSED IN LUNG, SIGNAL = 2.2; EXPRESSED IN BONE MARROW, SIGNAL = 1.7; EXPRESSED IN PLACENTA, SIGNAL = 2.3; EXPRESSED IN ADULT LIVER, SIGNAL = 2.1; EXPRESSED IN HELA, SIGNAL =   1; EXPRESSED IN BRAIN, SIGNAL = 1.9; EXPRESSED IN FETAL LIVER, SIGNAL = 1.6; SWISSPROT HIT: P11369, EVALUE 1.00e-03; NT HIT: AL163278.2, EVALUE 1.00e-13; EST_HUMAN HIT: AI391684.1, EVALUE 7.00e-04
cacaaaccaaattccaaggcataatcataaacacaatttcaggaatttttaataagatttgtctattgaagtgtaattgaagcacaataaactgtacttattttaaaattcaaaatgtacaatttgctcagttttgacatacgtgaaaacattgccatagtcatgataattaacatatttgtcataactaaaagtttcctcatacccttttgcaatactttccttcttgccttcaccctgacccaaacaaccactaatatgtgtactgtaagtatatattagtttgctttttcaagaagtttatatcaatggaatcacacaatatgtgattttttttggtacgtggcttcttttacttactgtgaggatttcaaggtttatccatgtggataaagtagcatgtactttattcctttttattgctaaataatattcaactttatggatacaacacagttcatttattcattcatccattgataggcatttgtgttgtttccttt

SEQ ID NO: 267 - DNA, 568 bp, Homo sapiens
  MAP TO AJ132411.1; EXPRESSED IN BONE MARROW, SIGNAL = 3.7; EXPRESSED IN HEART, SIGNAL = 3.6; EXPRESSED IN PLACENTA, SIGNAL = 4.6; EXPRESSED IN BRAIN, SIGNAL = 4.9; EXPRESSED IN ADULT LIVER, SIGNAL =   2; EXPRESSED IN FETAL LIVER, SIGNAL = 3.6; SWISSPROT HIT: P93531, EVALUE 4.80e-01; NT HIT: M96950.1, EVALUE 1.40e-01; EST_HUMAN HIT: BG677950.1, EVALUE 8.00e-01
ggtgaagaactgaagctggcaaagacagtgggctccagcagcctggcagaggccacacacacaggacaaggtcacggtcctaatatctgggtctggccttggcacctttccaggggaaaactcatgggacaaaggctcattgcaagcaccaggaaagggcctccattgcagctgcttctcttcattcatggggcaattccacagtggaccttggggccagagaagaccaatctgttctggaaacagatttggaggggccagtgttttcctggcctgctctgggccatcagtggaatggaaagagcccaaaggaaccttaattcttaattcttcgtccatgtgctcagctgaaatataaagattcttttcagagccctccctgaagtagccctccagctttgggacacacacagcattgtgtgcagagacatttcctatagccaagcaaaagcgacagagaggccctttcagtttgctgcaaaataagcagggctctgtcccaagacaggcggcctttgcctcatgggccccttggtaattcataggctgcctgagctccatttactgc

SEQ ID NO: 268 - DNA, 535 bp, Homo sapiens
  MAP TO CHR22_216.0; EXPRESSED IN BONE MARROW, SIGNAL = 2.8; EXPRESSED IN PLACENTA, SIGNAL = 1.7; EXPRESSED IN BRAIN, SIGNAL = 2.1; EXPRESSED IN LUNG, SIGNAL = 1.9; EXPRESSED IN ADULT LIVER, SIGNAL = 1.9; EXPRESSED IN HELA, SIGNAL = 3.8; EXPRESSED IN FETAL LIVER, SIGNAL = 2.3; SWISSPROT HIT: P49777, EVALUE 9.90e-01; NT HIT: AJ271735.1, EVALUE 3.00e-42; EST_HUMAN HIT: BF035327.1, EVALUE 1.00e-125
aaaagatgggcaccagacagttagatcagttgtgaatgcaaaggaaaagttcttgaaggaaattaaaagttctactccagtgagcgcacgaatgataagaaagtgaaacaaccttattgatgatatggagaaagtttgagtggtcttgatagaaagtcaaaccagccacaacattcccttaagccagagcctgatccagagcaaggccctacttgtcttcaattctgtgaaggctgagagaggtgagcaagcttcagaaagaagcttgaaggtagcagaggttaatgcatgaggtttaaggaaagaagctgtctccataacataaaagtgcaaggtgaagcagcaggtgctgatggagaagctgcagcaagttatccagaagatctggctaaggtcattgatgaaggtggccacactaagtaagatattttccatgtggatgaaacagccctctgttggaagaagataccatctaggactttcatagctagacaggtgaaggcaatgcctgttttcaaagcttcaaaggacaggg

SEQ ID NO: 269 - DNA, 588 bp, Homo sapiens
  MAP TO CHR22_103.0; EXPRESSED IN BONE MARROW, SIGNAL = 1.8; EXPRESSED IN LUNG, SIGNAL = 2.5; EXPRESSED IN ADULT LIVER, SIGNAL = 2.6; EXPRESSED IN HELA, SIGNAL = 0.77; EXPRESSED IN PLACENTA, SIGNAL = 2.4; EXPRESSED IN HEART, SIGNAL = 2.4; EXPRESSED IN BRAIN, SIGNAL = 2.4; EXPRESSED IN FETAL LIVER, SIGNAL = 2.2; NT HIT: U76262.1, EVALUE 5.60e-01; EST_HUMAN HIT: BG341794.1, EVALUE 3.00e-03; SWISSPROT HIT: P34182, EVALUE 2.50e+00
gaggatagtggctccgactgtggaatcttaaagcactgtttaagtgcatggtgtagcaaaagatccgacagagacagcagagacacagggcccctgtgttaaacacagagcgagaaaaatgactgacaggcaaaggaagggttaattctgagaggggtggtctgagaggggcttgtcaagaagtaacttgagcagagccttgagaatgtagtaatactgtttgttctgagttttaccatccacatggcactcttcatacctgttgtctcctgccctcgttgagttccgggggtaggtctggtatccctattttacaggttagaggactgaggctcagggcattaggttacttacaagccctgttgcctggaattggacccacagactcaggcagcagagacctggatagatgtgtagcctcttccccgtcagggctgggagatctgggccagtggctgaggatggatttgcttccagagaagagcaggcataagccatgggcctggggtaggctgcaggagggatctcagggggcctgcagtgctcactggaggagaaaaacaggacagaaaagatggcaggaccaga

SEQ ID NO: 270 - DNA, 590 bp, Homo sapiens
  MAP TO AJ239319.2; EXPRESSED IN BRAIN, SIGNAL = 0.62; EXPRESSED IN FETAL LIVER, SIGNAL = 0.91; EXPRESSED IN LUNG, SIGNAL = 0.99; EXPRESSED IN PLACENTA, SIGNAL =   1; EXPRESSED IN BONE MARROW, SIGNAL =   1; EXPRESSED IN ADULT LIVER, SIGNAL = 0.86; NT HIT: AJ278581.1, EVALUE 0.00e+00; EST_HUMAN HIT: AA663213.1, EVALUE 0.00e+00; SWISSPROT HIT: P03332, EVALUE 6.00e-13
cactcaaggaaggcagaaggattttcttcctttccctgagttatggtggaaatcattgaataattcatgggctttttcctaattctctttagtccttctagaacgcaggtcagcatatgtttatgactccagtccccatgatctgagtctaggtcccagtggggatccatactggggacggcttgctgactggtagggaatttgtccctttcttcggctgtcattctatcattcacttgactaagataccaggtatctccaagctctcgggctgcagctaaagccacattcttttcattaaaggccagggtttgatctaacaatagcatgacatctctccaagtgagatcgaaggtttgccctagaccctgtaggacatctatatacctatcaggatcatctgaaaacttccccaggtctgccttgatctgctttaaatcagagagggagaaggggatatgtacccgggttgggcaaaattcccctcctcctacagcttgaaggggacataaccgatagcccgggggtttttgtggtcccttggagatctcttttcttgtttccttctgggtgggggagattagaggagg

SEQ ID NO: 271 - DNA, 591 bp, Homo sapiens
  MAP TO AC020698.2; EXPRESSED IN BRAIN, SIGNAL = 0.74; EXPRESSED IN HELA, SIGNAL = 0.55; EXPRESSED IN FETAL LIVER, SIGNAL = 0.79; EXPRESSED IN LUNG, SIGNAL = 0.83; EXPRESSED IN BONE MARROW, SIGNAL = 0.75; EXPRESSED IN PLACENTA, SIGNAL = 0.95; EXPRESSED IN ADULT LIVER, SIGNAL = 0.87; SWISSPROT HIT: Q64127, EVALUE 4.40e+00; NT HIT: gi15594346, EVALUE 8.80e+00
agagttccaacgttccatgccctgaccaacacaagctatgattcaatttttccagattatctcaaaattattttgttacatttaaaagaatattggtgttatttttaataaaagcattcttacgaaagtcttcaaaaacccccatgctaatgaatccaaaggtggattctctaaggcaggcacaatgtgtggctgcgccagtgctgtcttgtccgtgtcacagagaaacctcatactctacctccccactgtggcatggctggaacggtccgactccatgggctccatctgcctaagattggtgtgcactgtgcttcccacctgcaccagcgcagcagcacgtccagcccctcccagcccttcatgctgggctactgggtatgcttttgggatgtcaaggagggtcagtgtgtggtgccccaaagggtttgctttctcatgagggcaggaggaggaccctttctaacaattttgttttcaatgtttacatgacatccagcaaatttgggggcgaagggcggggtaattcctagtatgttgctggcattgtttcttgtttcccagcacagatgctcattttgcccagtgttt

SEQ ID NO: 272 - DNA, 564 bp, Homo sapiens
  MAP TO AL133378.4; EXPRESSED IN HELA, SIGNAL = 1.5; EXPRESSED IN BRAIN, SIGNAL = 2.6; EXPRESSED IN FETAL LIVER, SIGNAL =   2; EXPRESSED IN BONE MARROW, SIGNAL = 2.5; EXPRESSED IN HEART, SIGNAL = 2.5; EXPRESSED IN LUNG, SIGNAL = 2.8; EXPRESSED IN PLACENTA, SIGNAL = 2.5; EXPRESSED IN ADULT LIVER, SIGNAL = 2.4; NT HIT: AF076166.1, EVALUE 1.40e-01
ttgttgtggagatgactggcttccctcaatatttgttctttccttgttctcataacagaactgtaacaaatatgatgttggcacatggggcaccagaataaagaatggatttcccaactttggttttagctgaggtcatatgattaagttcctgccaatgaaaggtaagcaagaatagtgtgtaaaactttggataatattctttttctattttcctccttgttgtcagctggaatgtttacacgatggctggagcaggagcagccatcttgaatcttgaggtagacattgaaaatttagtatggcagaaaaaaaaatcagttagaaggaaattagttcctaatgatcaggagctacccacatttatgtgagaatgaaataaacctttattttttctttaccactcttttatcttttctatgttactcttctttcgcattttcctacaactaacagtcaaaattaaacctaaatattacctttggtattaatacacagaagacagacacatattattatgcttttagttgataaactatcatatgctgtgcttaggaaatgcaa

SEQ ID NO: 273 - DNA, 531 bp, Homo sapiens
  MAP TO AL136317.2; EXPRESSED IN BONE MARROW, SIGNAL = 0.52; EXPRESSED IN HELA, SIGNAL = 0.87; EXPRESSED IN BRAIN, SIGNAL = 0.68; EXPRESSED IN LUNG, SIGNAL = 0.64; EXPRESSED IN ADULT LIVER, SIGNAL = 0.66; SWISSPROT HIT: P11586, EVALUE 6.00e-07; EST_HUMAN HIT: BF379878.1, EVALUE 1.00e-48; NT HIT: gi14757749, EVALUE 1.00e-41
tgggagggatgaaagatcacacatcacctacaaacagggataccacccatatcagacacatttatagtcacagaagtaaatgatgcatggatcagaggatacatgcctcaccataaagttctaaatatagtttacactctacccgaggatattgctttcatctttgttaaccagaaaatagattaagcaaaggttagctggtgagacatgtacaaatcctcaagtcaagctgagtattctgagagcctaaggtgaattttttcttttcccctaaaagtacaacttttacctgctgagtgtaacgatctattttgacttgtgcctcaggacagagttcgatatctttggctccatagacagcctgggcaatggtccttatcttgtccacaattggaagctgcagaaacacaaattataaaaaaattgtgtaagtttaatctggttaaagatttttttaaaagtttagtgacacttactgtaattgcttaaaattcccttatcagggtaccccctcagcaactgcaggattcc

SEQ ID NO: 274 - DNA, 576 bp, Homo sapiens
  MAP TO CHR21_33.0; EXPRESSED IN BONE MARROW, SIGNAL = 1.5; EXPRESSED IN LUNG, SIGNAL = 1.1; EXPRESSED IN ADULT LIVER, SIGNAL = 1.1; EXPRESSED IN PLACENTA, SIGNAL = 0.95; EXPRESSED IN BRAIN, SIGNAL = 1.6; EXPRESSED IN HELA, SIGNAL = 4.2; EXPRESSED IN FETAL LIVER, SIGNAL = 1.5; SWISSPROT HIT: P52959, EVALUE 8.40e-01; EST_HUMAN HIT: AW853342.1, EVALUE 8.00e-04; NT HIT: AL163218.2, EVALUE 1.00e-07
aaatggccataaaggcactgtggagcttacaagtgtgaccgctcccatcacaggcccagagtgtcaaggcctgactgaaggaaatatgtcaaaggagaggtttcagtgctctcaggaacttggaacttactgtccagggccaactcaagtctcagttccctacattctagtgcagggctcgtcagctgccccagccacatctcaggactgccaggatcagctacacgcagctgagaatcaatcccacccacttctccagaaggtatgagcagcaaatcttggtggcacctaagtggtgttgtctgcaggcatgcaaaataaacaagctgtgaggggcatggtttccttcacctgaatttgaaagcatgttgctaacagcctggtgtcccgggaaaagacttgttataagggcagagccactgcaaaaagctcccattggagaaatacctagcaaaattttggggttggatctgtacagcgaatccccagtgggctgaggaaagctgttggaatggggcttcctttgagaccccagaaatggagagtcaccagtgttcaattccagcctgagagagc

SEQ ID NO: 275 - DNA, 535 bp, Homo sapiens
  MAP TO CHR22_33.0; EXPRESSED IN FETAL LIVER, SIGNAL = 1.5; EXPRESSED IN BONE MARROW, SIGNAL = 1.6; EXPRESSED IN BRAIN, SIGNAL = 1.6; EXPRESSED IN HEART, SIGNAL = 1.6; EXPRESSED IN LUNG, SIGNAL = 2.1; EXPRESSED IN ADULT LIVER, SIGNAL = 1.7; NT HIT: gi14779650, EVALUE 0.00e+00; SWISSPROT HIT: Q12114, EVALUE 1.30e+00; EST_HUMAN HIT: BE382471.1, EVALUE 0.00e+00
cttcgcctgctcttcttttggctgtctctgtgaattgtgtttgctttttcactcactattgctagatcaaagctgaacacttctatgcctgtcttttcacctgggaattctttcctggctggttttgggtgaagccttcgagcatgtacgagtaaagactgcctttgcattgcagtttgctcaggtccacggccaagatgccgaccacaccagtgaaggccaagagggtcagcaccttccaggagtttgagagcaataccagcgatgcctgggacgctggggaggacgacgatgagctcctggccatggcggcggagagcctgaactccgaggtggtcatggagacggccaaccgtgtgctgcgtaaccacagccagcggcaggggcggcccacgctgcaggaggggccagggcttcagcagaagcccaggcccgaggcagagccgccctcaccccccagcggcgacctccggctggtgaagtcggtcagtgagagccacacgtcctgtcctgcaggtacgatgggaggactgaa

SEQ ID NO: 276 - DNA, 577 bp, Homo sapiens
  MAP TO CHR22_106.0; EXPRESSED IN BONE MARROW, SIGNAL = 1.8; EXPRESSED IN PLACENTA, SIGNAL = 1.8; EXPRESSED IN LUNG, SIGNAL =   2; EXPRESSED IN ADULT LIVER, SIGNAL = 1.8; EXPRESSED IN HELA, SIGNAL = 1.9; EXPRESSED IN BRAIN, SIGNAL = 2.2; EXPRESSED IN FETAL LIVER, SIGNAL = 1.8; NT HIT: gi7657020, EVALUE 0.00e+00; SWISSPROT HIT: P11274, EVALUE 2.00e-16; EST_HUMAN HIT: AL044101.1, EVALUE 0.00e+00
cacagctcttgggaggagtcagatgagctgctcaaagcccgggagggacccacacagtggtcagcatagcagggacggtgctttagccaaggcagggatggcaggtgactcactcaggatcttcaaggaggccgctgcatttccgtgctctttccagataagaaggacatgtcggtgatgatgagcgagacggacatgaacgccatcgcaggcacgctgaagctgtacttccgtgagctgcctgagcccctcttcactgacgagttctaccccagcttcgcagagggcatcggtgagcattggaggccttggcctcgtgggagacgtctcctccatgtgcactgctgcccttggaggctgtgaaaagtgaggtgtgggaacctgagctgtgacccctctgccatggtcggcattttaacccaacctcaaaaagcaggggaccagaaccgagcctgtcctggaaggccttgctcatccccagagggctccccatccctattcctcaaggaggccaagtgggtgaaatggtcagcactgccatgctgtggggtcctaaagtctgctgtcctccttcctg

SEQ ID NO: 277 - DNA, 558 bp, Homo sapiens
  MAP TO CHR22_219.0; EXPRESSED IN PLACENTA, SIGNAL = 0.9; EXPRESSED IN LUNG, SIGNAL = 0.93; EXPRESSED IN ADULT LIVER, SIGNAL = 1.1; EXPRESSED IN BONE MARROW, SIGNAL = 1.5; EXPRESSED IN HELA, SIGNAL = 2.4; EXPRESSED IN BRAIN, SIGNAL = 1.4; EXPRESSED IN FETAL LIVER, SIGNAL = 1.4; EXPRESSED IN HEART, SIGNAL = 1.2; NT HIT: M92049.1, EVALUE 5.30e-01; SWISSPROT HIT: O14063, EVALUE 1.40e+00; EST_HUMAN HIT: BG912922.1, EVALUE 2.00e-04
ccagggctctgtttagcaagagaaataaggagggatggctgctgggcagggtctgccctcccaaaaattgccacaggaagcagttcccaggcatagtcccatttgatcctcacacaatctcataaagctgagacgattctctgccaatttagcagacaaggagacaaagctagcaaacagcagagctggcacctagacccaaacctgggttcctcaccactctgccgcctgcaggtcaccagaggcctcaaatgcacggggctgctgccgggtgtcagttacatccgcctcacctgcacctgccgtctcttggctctgagtgtgcaggtcagggtacttgagtgcccaggtactgacaggtgactgcaccatgcagagctccatgtggccgctgtgcactggagagctttgcccagagctatgggctgagcccctgccattggttccttcatccgtccagcgtctgcaggccccaggcaccaaggcaggccttaggaggcacaggcgcagatcctgacctcaaagacagactttggcacccagtgccttcctaattca

SEQ ID NO: 278 - DNA, 562 bp, Homo sapiens
  MAP TO AL121994.3; EXPRESSED IN LUNG, SIGNAL = 1.7; EXPRESSED IN PLACENTA, SIGNAL = 1.2; EXPRESSED IN BONE MARROW, SIGNAL = 2.3; EXPRESSED IN BRAIN, SIGNAL = 0.78; EXPRESSED IN FETAL LIVER, SIGNAL = 2.8; EXPRESSED IN HEART, SIGNAL = 2.4; EST_HUMAN HIT: AI207585.1, EVALUE 2.00e-01; NT HIT: gi14747140, EVALUE 1.40e-01; SWISSPROT HIT: P52742, EVALUE 2.70e-01
tgactggaggcccaataaagcaggcacctcgagaaatttagtattcaactcataaaggccttaaaagcatttttcaattatgaatggcctggggggagtcattctttcttcgccaggggatgaataaagatggaaaataatagcatatcaatattgttgcaacttagaaggattaatctggaagagttaaaggcgttgcgtctccctgctgcctgcgtgctcaggtgcatggagaaggacttggtcaaggtgaccttcaccaggacccccggagagaggcgaacctcccagtgggtcagcacctcagatgccttgaccctctctttacctcccctgcagtctcaccccagaacatcccctggctctgagccatatgaggcctcaggggctggccttgtcatgacaatcactaagatttgtaccatgattagggtctgaaggggtctttatcctgactgtggtgatagttactgtagtctgcaggtgatcaaatatcataaaactacacactctccaaaaaaataaagtgcacgtaaaagccgggtgaaggggacatttctgt

SEQ ID NO: 279 - DNA, 563 bp, Homo sapiens
  MAP TO AC015896.4; EXPRESSED IN LUNG, SIGNAL = 2.8; EXPRESSED IN PLACENTA, SIGNAL = 2.8; EXPRESSED IN BONE MARROW, SIGNAL = 2.3; EXPRESSED IN ADULT LIVER, SIGNAL = 3.4; EXPRESSED IN HELA, SIGNAL = 1.2; EXPRESSED IN BRAIN, SIGNAL = 2.5; EXPRESSED IN FETAL LIVER, SIGNAL = 2.4; EXPRESSED IN HEART, SIGNAL = 2.4; EST_HUMAN HIT: AW904491.1, EVALUE 0.00e+00; NT HIT: U57613.2, EVALUE 1.00e-20; SWISSPROT HIT: P48785, EVALUE 5.40e+00
taggttttggggaacaggtggtgcttggttacatgagtaagatctttagttgtgatttgtaagattttggtgcatctaccacctgagcagcatgcatttgtattttaaacttagcatttctaaaacaaaacttgtcttcttcaccttcagactccccagtatgggctaaagagacctttctggcctatcccctgctcacctttcctgtttcatctcttaccactcttctacaagcactcttttttccagtcatgtcaaataactgcagtttcacgaacatgtcacgtttcaaatgcctctatgctattgaaaactacgttctgtcccccgaaacatccttctccttgggcctgaattttttgtcccaaaacattccttcctcaaccctccaaatttttcttgtgtatcattttccttaggaaggcttcctgcatctgatgcccttctgctgtctcttatagcaccccttggaaacttctgttatagatcgtatcatactaaagtgtagctggttgcttacttgtttgtattcccaggtgaactgtgagcccttggaagtgaag

SEQ ID NO: 280 - DNA, 535 bp, Homo sapiens
  MAP TO CHR22_204.0; EXPRESSED IN HELA, SIGNAL = 1.3; EXPRESSED IN FETAL LIVER, SIGNAL = 0.96; EXPRESSED IN LUNG, SIGNAL = 1.3; EXPRESSED IN BONE MARROW, SIGNAL =   1; EXPRESSED IN PLACENTA, SIGNAL = 1.2; EXPRESSED IN ADULT LIVER, SIGNAL = 1.4; EXPRESSED IN BRAIN, SIGNAL = 0.99; SWISSPROT HIT: P08547, EVALUE 6.00e-05; EST_HUMAN HIT: BF846179.1, EVALUE 2.00e-16; NT HIT: AL163227.2, EVALUE 2.00e-06
cttcaggagagggattgtggggttggatggtagttctaagttctttgagaaatctccaaacttctttccacagtgtctgtactagcttgcttcccccaccaagaccatatcagcctttcctctcctcagctgcctcgccagtatctttctttctttctttgtctgcatagtcatcgccgctctgagtggtgtgggatggtatctcgacctgctcttgattggcatttctctgttgatgagtgagtttgagcatgtttccctctttgttggtcacttgcacattgtcctatgagaagtgtgtgttcacatcccttgcccatacactaatgggatttttttgttgttttttgttgaatgattggcataagatccttgaagattctggatattagaccttgatcagatgcagtttgggaacatgttctcccactctgtatgctgtctcttactctgttgctaatttattttgctgtgtggtggctctttagagtattaagcatggcttgtccatttttgttgtcatttcctttgggga

SEQ ID NO: 281 - DNA, 515 bp, Homo sapiens
  MAP TO AL139152.1; EXPRESSED IN HEART, SIGNAL = 7.7; EXPRESSED IN PLACENTA, SIGNAL =  10; EXPRESSED IN ADULT LIVER, SIGNAL = 9.2; EXPRESSED IN BONE MARROW, SIGNAL =  11; EXPRESSED IN HELA, SIGNAL = 2.7; EXPRESSED IN FETAL LIVER, SIGNAL = 8.5; EXPRESSED IN LUNG, SIGNAL =  12; EXPRESSED IN BRAIN, SIGNAL = 9.3; SWISSPROT HIT: P23960, EVALUE 1.00e-02; EST_HUMAN HIT: BI039156.1, EVALUE 0.00e+00; NT HIT: L78810.1, EVALUE 9.00e-09
ttgtttccagggaagtggtcccttaagatagattttgagcttctccttgttatgtccttggaaggtaaacttttgcttgacacaaagctcccttcctactccaagcattcatacactttcactaacagacacatccaaccttgtctttcttccaaggtgagaatcaccttttggccaatgcaacttgcttcctccttattttttggactcagccacctcaggaagcctcaagtctggcatgatagtaattttccctagattttctcccacaaaattctattctcaagcagatgtaagatctataataaatacctataaaattgctgtgaaagaaactaatcaaccattgcatttttttatgtgaacttttgtaatggagaaaaagttaatcaagaataaagattcaagcccaggtagtgtgcatctatagttgcagctactcaggaggctgaggcaagagaatctcttgagcccacgagttcagggccagcctgggcaacataatgagaccccca

SEQ ID NO: 282 - DNA, 550 bp, Homo sapiens
  MAP TO AL121830.11; EXPRESSED IN BRAIN, SIGNAL = 1.3; EXPRESSED IN FETAL LIVER, SIGNAL = 1.2; EXPRESSED IN LUNG, SIGNAL = 1.2; EXPRESSED IN BONE MARROW, SIGNAL = 1.3; NT HIT: Z97341.2, EVALUE 2.10e+00; SWISSPROT HIT: O59742, EVALUE 6.80e+00
cactgagaggcaaagggaaccacatggagcccagaagacgagggtattcatgtttgtgaaacagtgaaacattcaaccaccaatgagctgtagtggtgttttatttttgtaaattgaactggccaaatggacaggtagtttcagtgtttatttaactgattctctccctcctagaatatatccatatctagaatatatcccttccatatctacattcctatctatagtttttatagtaactctttttttgctttgatcacttacctcgattctcttgaaagcagttaattttaaaatgtagctgtggtcactgttttttgttttttttgtttgtttgtttttgtctctcagccttcaactattctcttttttggctacaatttctattatacctgttctaatggctacagtagtgagggagaaaggaaaatccccatgggaggcagtcgcaagtgggtgcctgtttttcacctttgcctgtagtgaagcattgtagtatagtgtctgggaacagggacccaaggcccaggcttcctggattcaaatccca

SEQ ID NO: 283 - DNA, 555 bp, Homo sapiens
  MAP TO AC016730.4; EXPRESSED IN BONE MARROW, SIGNAL =   1; EXPRESSED IN BRAIN, SIGNAL =   1; EXPRESSED IN HELA, SIGNAL = 0.94; EXPRESSED IN LUNG, SIGNAL = 1.1; EXPRESSED IN FETAL LIVER, SIGNAL = 1.1; EXPRESSED IN PLACENTA, SIGNAL = 1.2; EXPRESSED IN ADULT LIVER, SIGNAL =   1; NT HIT: AJ006345.1, EVALUE 9.00e-06; EST_HUMAN HIT: AW935137.1, EVALUE 2.00e-10
ttctgttgcctctgcatttgttgtcatatctaaggaatcattgctaactccaatgccaggaatattttaccccatattttcttctaagagttttataattttagcatttgcatgtaggtatttgattttgagttaatttttgtatgtgtgtaaggtttcttcttcttctcctcctcctcctcctcctcctcctccccctcctccttctccttctcctccttccccttctttcttctttcttcttctttttttttttttgcatgtggatttccagtattcccgtacatactgatactgatttaggctcattaaattgacttagtaatctcctagtaattatgagctataatatgtatgaaccattttatgaatcgtttcatagtatgaactattctatgaaaatatgggtagaaatggttttgaacagaataatttcaaaagtctacctattgcttttaattattgatcttaatttgttaacattgtatataatagcattcattttttacttaccacttccaacctaagtttcattcctgccaaacagcttcaatt

SEQ ID NO: 284 - DNA, 581 bp, Homo sapiens
  MAP TO CHR21_5.0; EXPRESSED IN BRAIN, SIGNAL = 1.1; EXPRESSED IN HELA, SIGNAL = 2.5; EXPRESSED IN FETAL LIVER, SIGNAL = 1.1; EXPRESSED IN LUNG, SIGNAL = 0.81; EXPRESSED IN ADULT LIVER, SIGNAL = 0.81; EXPRESSED IN PLACENTA, SIGNAL = 0.72; NT HIT: gi16156951, EVALUE 9.00e-06; SWISSPROT HIT: P48634, EVALUE 9.60e+00; EST_HUMAN HIT: BI494874.1, EVALUE 1.00e-08
tttttggcatgacatggttccttcttttctttgtcatcttgaaagcaagaacctgagactaatttcatatttttttttgtaaattacataaaacacctttattattgttttacaaggtcagtgtttaattacatttatccacatttccatccccctttcttttcttttctttttttccttttgaacttttattttagattcagggagtgcctgtgcagattagtcacatgggtagattctgtgtctctggggtttggtggacagattacttcctcacccaggtaaggaacatagtcctgatgggcagtttttttttttttaattctcaccttcatcccttttcttgtgctccctttccctttgcctctcttgagcttccgtttgggcttcaggattacattcatccttgctactggtggggcactggttccaggaacaccactcccctctctcccacgtggatacccaaatcccagcataatcaaatcgtgtagttgaggaaccctggaatatcgataagaggaacaactgtgtttattgcaaaaaaatctgcctataagtggaccgcacagttcaaactt

SEQ ID NO: 285 - DNA, 516 bp, Homo sapiens
  MAP TO CHR22_3.0; EXPRESSED IN FETAL LIVER, SIGNAL = 2.5; EXPRESSED IN BONE MARROW, SIGNAL = 2.5; EXPRESSED IN BRAIN, SIGNAL = 2.5; EXPRESSED IN HEART, SIGNAL = 2.2; EXPRESSED IN LUNG, SIGNAL = 2.6; EXPRESSED IN HELA, SIGNAL = 0.9; EXPRESSED IN PLACENTA, SIGNAL = 2.8; EXPRESSED IN ADULT LIVER, SIGNAL = 2.5; NT HIT: gi9629553, EVALUE 1.20e-01; SWISSPROT HIT: O22315, EVALUE 1.10e-01
agcagacggtacccaaaatgaaagaacgcaagaggaagagccagggtgaggacatgggaatgaggatgggcatccagtaaaggcacaaggccaaggggaggggcagaacagggtcagaacaggtcgagggagccacggtggccctccagccagagggcttcttctcatctgaccccgccagcccctgcagtacagagtccttttaggctccctggtgccgcccagcttggcacttgatctttcaatgggtgacctggtccctgcccaagctcccgccactcccgagcagcactaatgctgcacttctccccagagcaggttctcttatccttcggtgcttctgcactcccagatcccagaggttctagcacccttcccgctgtactctcaggatccatcaaccccagctgggatggcacccagtgtgacaagtccccggtgaccatcgtggaggtgagtgccctcctacccacggaacctgatttgcagacacttcccaccctgtgtcacaatgac

SEQ ID NO: 286 - DNA, 534 bp, Homo sapiens
  MAP TO CHR22_37.0; EXPRESSED IN FETAL LIVER, SIGNAL = 1.8; EXPRESSED IN BONE MARROW, SIGNAL = 1.7; EXPRESSED IN PLACENTA, SIGNAL = 1.8; EXPRESSED IN HEART, SIGNAL = 1.8; EXPRESSED IN BRAIN, SIGNAL = 1.8; EXPRESSED IN LUNG, SIGNAL = 1.7; EXPRESSED IN ADULT LIVER, SIGNAL = 1.5; NT HIT: gi15318458, EVALUE 0.00e+00; SWISSPROT HIT: O14994, EVALUE 4.00e-14; EST_HUMAN HIT: BG703843.1, EVALUE 0.00e+00
ttttccaattcccaaagcacttacttgagatgcggatggggtggtgctggcttcttggactcttcaccctgctgggaggtactacggccctgcacagggggccggggctgtgaggcgagggtggcacctggcttggaggcctggtttggggagctgccactggatgcccgggatagctgcggagagcctggtgacctttgctgctgtggagatccggactgggggctcaggggctgctggccttgtggggagagcctctgttgggaggggcttccagatctctggggctgaggagactgagcttggcgagggcctcctaaggggccagaaaaaaaaaggttcagttcaattttttttcttaggatagatatggctgtacacaaataatgttgcttcaaggatgttcattacagtgtttcttataatggtgaaaaactgaaaaccgtataaatacctaaccataaggaagtaattaggaacattaagatacatctgtataatggaatatgctgtggtcatcacataggatgtggc

SEQ ID NO: 287 - DNA, 562 bp, Homo sapiens
  MAP TO CHR22_207.0; EXPRESSED IN LUNG, SIGNAL =   1; EXPRESSED IN FETAL LIVER, SIGNAL = 1.8; EXPRESSED IN PLACENTA, SIGNAL = 0.78; EXPRESSED IN BONE MARROW, SIGNAL = 1.9; EXPRESSED IN BRAIN, SIGNAL = 1.6; EXPRESSED IN ADULT LIVER, SIGNAL = 1.3; EXPRESSED IN HELA, SIGNAL = 4.3; EXPRESSED IN HEART, SIGNAL = 1.1; SWISSPROT HIT: Q03690, EVALUE 9.20e+00; EST_HUMAN HIT: BG621614.1, EVALUE 0.00e+00
atttgcatgcagcatctcagttaatctcagaacatcccgtgacgcaggtatccttcttgtccctgattttacagttcaggaaacggcctcagagaggtgaggagacgcccacagtcgcgtggcatggtgcacctgtgttctgaactgtcacttgcctctccctgtgagcctctctttactctgccttgtcttcttgtcctggggcaagaagttagggttcaagacccttcgggatgtgaggatgtttctgccactctggacattagttttctcccctaagtggctctatctctcccggcctgagtttggaagggagacaccattctggtacgacttttcttaggcctgtgctgccatctatggggctcgaaggtgctcgccatgctccagaccggccacctggcagtcaggtgagcttgcaagtgtgaagagcagcgggatgcgggggagggagcaagcccagtaacaaataaagcaaatatcatcggcccttgtcctcagctgctcgctcaggccccccagaatcctgtagcatttctggggattaagagggtggtggggt

SEQ ID NO: 288 - DNA, 561 bp, Homo sapiens
  MAP TO CHR22_12.0; EXPRESSED IN BONE MARROW, SIGNAL = 0.85; EXPRESSED IN HEART, SIGNAL = 1.4; EXPRESSED IN BRAIN, SIGNAL = 0.87; EXPRESSED IN PLACENTA, SIGNAL = 1.1; EXPRESSED IN ADULT LIVER, SIGNAL = 1.1; EXPRESSED IN HELA, SIGNAL = 1.6; EXPRESSED IN LUNG, SIGNAL = 0.9; EXPRESSED IN FETAL LIVER, SIGNAL = 0.86; SWISSPROT HIT: O08638, EVALUE 6.00e-07; NT HIT: AJ310932.1, EVALUE 0.00e+00
cgctgtcttagaatgctccctaggcagtggctggatgggatggctgatacctgtgatcttcctgcaggtgcccaagggccgccgggatggcctgcctgcccacattggctccatggcacagcgggcatactgggcgctgctgaaccagcggagagaccagagcattgtggccctgggctggagtggcgctgggaagaccacctgctgtgagcaggtcctggaacacctggtggggatggcaggcagtgtggatggcagggtctcaggtatggtggtctctaggtgacatggagagttggggtcagcacggggagagttggaaggggatgctgagctgctttcttatattcattcagctagcattcactgagcaccagatatgtgcagaccccatgcttgctactgggcagggctatccctaggtcattgggatgcatttgttgaaattagaataaggtactccttcctcaagacattgacggccgtttgcagaacaatcatcatacatggacattgttagaaccggatacttgactgccatctgctgggaaatcgtcctaa

SEQ ID NO: 289 - DNA, 538 bp, Homo sapiens
  MAP TO CHR22_225.0; EXPRESSED IN BONE MARROW, SIGNAL = 1.9; EXPRESSED IN HELA, SIGNAL = 3.4; EXPRESSED IN BRAIN, SIGNAL = 1.6; EXPRESSED IN LUNG, SIGNAL = 0.93; EXPRESSED IN FETAL LIVER, SIGNAL = 1.7; EXPRESSED IN HEART, SIGNAL = 1.4; EXPRESSED IN PLACENTA, SIGNAL = 0.95; EXPRESSED IN ADULT LIVER, SIGNAL = 1.1; EST_HUMAN HIT: AA224325.1, EVALUE 3.00e+00; NT HIT: U55744.1, EVALUE 2.00e-06
cccaggaattgttggaaaagacaaagctttagttctttcacatcttgaacaacactgtgatcattgacatcaacatagtgacgatgatgatgatcagatacatcatcatcatcttcttcagcaccatcatcatcaatatcaccatcatcatcaccctcatcaacagcaccataacagcaccatcaacattatcatcaccaccatcaacattatcatcaccaccatcaacattatcatcaccaccatcaacattatcatcgccatcaacattatcatcacccccatcaccctcatcatcaatagcaccgtcatcatcatcacagtaagggcagctagtgcttatatacagcatcatatgtgccaagctatgttcaaaggctttaaatacattaactcatttaattctcacactatctgtatgaaataagtactaacattatgcctattttatagataaacaaatggaggttaaatgacttgcccaggctacacgggcaggatttgaacccaagccatctggcaccaaagtcaatgcttt

SEQ ID NO: 290 - DNA, 573 bp, Homo sapiens
  MAP TO CHR22_55.0; EXPRESSED IN BONE MARROW, SIGNAL = 1.1; EXPRESSED IN HELA, SIGNAL = 1.8; EXPRESSED IN BRAIN, SIGNAL = 1.3; EXPRESSED IN FETAL LIVER, SIGNAL = 1.1; EXPRESSED IN HEART, SIGNAL = 1.4; EXPRESSED IN PLACENTA, SIGNAL = 1.5; EXPRESSED IN LUNG, SIGNAL = 1.3; EXPRESSED IN ADULT LIVER, SIGNAL = 1.4; NT HIT: AB063285.1, EVALUE 2.20e+00; SWISSPROT HIT: P20649, EVALUE 1.40e+00; EST_HUMAN HIT: BF245271.1, EVALUE 3.00e-28
gtggctagttttgctctggcaggatctaggtcactgatgtgctttaagacctgccttgaaagcacagagattataacaactccttagtcctaaccatgctgattttgagagacaagatagaattttctgccactgtgctgggttcccctctgaaatggaggcaaaaataagtccagatcactgagcaaccctcttaacattgttccatgatgcaaaactaagtaggtggtttaaaccaactcttttctctcttatggctgtttagctgtcactaaagcttttgcctaagaagcctccaggtgcgcatatgtgacatcacacaaacaaacaaacaaagatacagaaaaatctaggcagacaataataataacccaggatatatgacagctgcctgttcaaagtgtcctaccaaatctgggacatctccagtttggagatcatggctggcagagacctgaagtttgttcatgagtcttacctcaagcagaggaagtgtccaaagctggagagcaccttcgattctctctgcctttgaagctgatgtgttctccaccttgcgccttaaactcagct

SEQ ID NO: 291 - DNA, 559 bp, Homo sapiens
  MAP TO AL137859.2; EXPRESSED IN FETAL LIVER, SIGNAL = 0.68; EXPRESSED IN BONE MARROW, SIGNAL = 0.67; EXPRESSED IN BRAIN, SIGNAL = 0.8; EXPRESSED IN HELA, SIGNAL = 0.66; EXPRESSED IN PLACENTA, SIGNAL = 0.78; EXPRESSED IN ADULT LIVER, SIGNAL = 0.82; NT HIT: gi4826867, EVALUE 1.00e-108; SWISSPROT HIT: Q9Z139, EVALUE 2.00e-31; EST_HUMAN HIT: BG386429.1, EVALUE 1.00e-108
tcgaggtttctaatccgcagccgagagccatagatggtggaccgaaaggagagcctccggggctcctggaccacaggagcatcatttttgaaccagcggatggtgggaggtggattcccagagactttgcagtgcagttctgctgtctggcccagagacgtggtgatgttattcattggttcatcgagggtcaggtaagaatctgtgagcacagagaggaggcaggtgagaggggcagacagcttgagagggcttccaagcagccaaatcccctccagtgtacccttgggatcacagagaggctgagcaggagaggcaggtgagacagacaaggaaagaaacaatcacattgattaagaccagaggactgctaaataaccacccatagagcctgctgcttggaagaaaatttgtcactaatcagagtatagaacccaaagtctccaaaagactacatggataagcttttgtgcttcagatcaaaaaatcatatacactccttgttccaaattccagcatagcaaaagagagaaaataaagttcacctcaaatctcccca

SEQ ID NO: 292 - DNA, 501 bp, Homo sapiens
  MAP TO CHR22_35.0; EXPRESSED IN FETAL LIVER, SIGNAL = 7.7; EXPRESSED IN PLACENTA, SIGNAL = 8.1; EXPRESSED IN ADULT LIVER, SIGNAL = 7.6; EXPRESSED IN BONE MARROW, SIGNAL = 7.6; EXPRESSED IN BRAIN, SIGNAL = 6.7; EXPRESSED IN HELA, SIGNAL = 4.2; EXPRESSED IN HEART, SIGNAL = 6.3; EXPRESSED IN LUNG, SIGNAL = 7.8; NT HIT: X70084.1, EVALUE 3.00e-02; SWISSPROT HIT: P80373, EVALUE 6.00e+00; EST_HUMAN HIT: AW821237.1, EVALUE 1.00e-91
ttactggtggctgagtgtggactagcttgagagttaaaaacttgttggagtcccgtcttgggggccccttatactttcatgaattttacttccagaaaccccaccaggttctcatgatgaaggccgaagaaaatttcctcaggctctttacacaaggaaaagggaaaagcaatcatttcaaaatataccctaattggaggatagagagggtgagtgggtacagcaaccattttgaaatggtacctaattcaattgcttcacttttaactaatatatagggcatcctgttaaacgtgcttgttaattaaatcattggcattttatccagtcagtacactcattaaatcagaatttcatccagttaaaatccagtttaaatcagtgctttaccgacttaaatctaaaatgtcaagttttaggtcagaaattgttaaattcagcagaatacattttaaatgacattaaaatgcatatgtggatgccatcaacagcctccctaaa

SEQ ID NO: 293 - DNA, 509 bp, Homo sapiens
  MAP TO AL139149.1; EXPRESSED IN LUNG, SIGNAL = 1.2; EXPRESSED IN FETAL LIVER, SIGNAL = 0.74; EXPRESSED IN PLACENTA, SIGNAL =   1; EXPRESSED IN ADULT LIVER, SIGNAL = 0.98; EXPRESSED IN BONE MARROW, SIGNAL = 0.97; EXPRESSED IN BRAIN, SIGNAL = 0.96; EXPRESSED IN HELA, SIGNAL = 0.53; SWISSPROT HIT: P93263, EVALUE 4.70e+00; EST_HUMAN HIT: BG231719.1, EVALUE 3.00e-09; NT HIT: AF202635.1, EVALUE 2.00e-03
cacttgtctccctttttgccatattcaccatctctttcatgattttccttattggctttatcacaaatcttgtgaagttatgcacagcttctggaaacaattttctctggcaggaatttattatttggagcttaatgcctttcacagcattttttgtaacatcaatgacgtccatggtgtaattccgccaaactttcatggtactctctccattggggttctcttccataacattgacaattctttcaattaaggtcatgtgtaataacccttaaaggtctttatgatcaggtctcaagaccctgatccagaggccaacttagagacattgtgttttggggcaagtagaccactttgaactcatgaggttctggttaccagggtcattgtccaataacaaaaggactttaaaagcggttccttactagcaagcttcttcttgacttcagggacaaagcatcatttgaatcaacccagaaaaatatttttcgttgtccagatctcccatt

SEQ ID NO: 294 - DNA, 589 bp, Homo sapiens
  MAP TO CHR21_73.0; EXPRESSED IN HELA, SIGNAL = 3.7; EXPRESSED IN BRAIN, SIGNAL = 1.3; EXPRESSED IN PLACENTA, SIGNAL = 0.63; EXPRESSED IN LUNG, SIGNAL = 0.72; EXPRESSED IN ADULT LIVER, SIGNAL = 0.78; EXPRESSED IN FETAL LIVER, SIGNAL = 1.3; EXPRESSED IN BONE MARROW, SIGNAL = 1.2; NT HIT: AB001517.1, EVALUE 0.00e+00; SWISSPROT HIT: Q15269, EVALUE 2.00e-45; EST_HUMAN HIT: BE876606.1, EVALUE 1.00e-120
tgatccattcattccttcccaggggagtagtggggtgggggctagaggcagacgtcccggttcctcctgatttttgcactttgtcccaggggaatgtacttaatactgtttctttaaaaaaaaaaaaaaagaaaaaaaatgttgggaggaatgagcttaaatttttaggaaagcactgcttaatttcccagggcgctgctgggcggccaccaccacggagggactcctcatctactccctggacacccgcgtgctctttgacccgtttgagctggacaccagcgtcacccccgggagggtgcgcgaggcactgcgccagcaggacttcaccagggccatcctcatggccctccggctcaacgagagcaaactggtgcaggaggccctggaggcggtgcccaggggcgagagtgagttggggcttcggtgtcgggcgccggggtcatcctctcttcccctggtttgagttggtggcagaataagcatgattttttctccttttgcagttgaagtggtcacctcctcccttcctgaactgtatgtggagaaagtgctggagtttttagcttcctcctttgaagtgtctcgc

SEQ ID NO: 295 - DNA, 535 bp, Homo sapiens
  MAP TO AL133328.5; EXPRESSED IN BRAIN, SIGNAL = 0.43; EXPRESSED IN ADULT LIVER, SIGNAL = 0.3; NT HIT: gi14575809, EVALUE 5.00e-07; SWISSPROT HIT: O96615, EVALUE 2.90e+00; EST_HUMAN HIT: BI000882.1, EVALUE 2.00e-07
aaaccagccacatagcgttcacaagaattgcctgctaggttctgttcagaaataaagttataattaagctttagttgggctacattttgactcactttcttgttgctagaagtctcaccatttgcattcccattgttcctatagacaggatctctgacattagaatcacaaggctttttttttttaaggatcacttaatatgttttttcagatcctggattccagcaactagtttaaagacctccacagaggaatgagatcagcatgaaaatgcaactttatctccctgtaccatcacttcactctgcactcattgaccaatcaataatctccacactttggactactccaaaattcttaagaatcttaacttcaaattcctggagaagataggtttgatgttttctcccatctccttttccagtgactttatgatcaaacctctttatctgctgcagcctagtgtctcagcatattgagttcagaacttactatagttacagaacatacatagaccccgtaggaatttgcataa

SEQ ID NO: 296 - DNA, 573 bp, Homo sapiens
  MAP TO CHR22_229.0; EXPRESSED IN HELA, SIGNAL = 3.7; EXPRESSED IN BRAIN, SIGNAL = 3.1; EXPRESSED IN FETAL LIVER, SIGNAL = 2.5; EXPRESSED IN BONE MARROW, SIGNAL = 2.7; EXPRESSED IN PLACENTA, SIGNAL =   2; EXPRESSED IN HEART, SIGNAL =   2; EXPRESSED IN LUNG, SIGNAL =   2; EXPRESSED IN ADULT LIVER, SIGNAL =   2; NT HIT: AF223391.1, EVALUE 8.50e+00
tgcttttagcacttcctggcccaagcacgtactcacaaaatgctagctgtgatcacaatcactttcctcaaaaccatcatgcttcataccgaacctgtcaggacctgattcaccctctttgcagcagacgttttcctgggtaaagagaagtgaccgctgacaggcacatatccaggaattgctcttccacattctacgtccgtgctgtcagacaatatgccagagtgccacttgatagaggattctgctggtcctttagttttctccccgagcatcacatttggcactaatttgggggttgctttcactacctcctcagcagccacttcacctcctctgctttcgctacagaaagagcaactttgaatggtgttgtttttgtctcatttcagcctttattagtgaaattactcaattttcatgggcacgcctggttttgtgcttgaaatgcgatttccttgccagagagatccccacactttccttgaaaaagagatgaagcgttcctccacttcaggaggctgtttgacaaagcttcacaacagataatgaagtgcaaggtctaaggggtga

SEQ ID NO: 297 - DNA, 562 bp, Homo sapiens
  MAP TO CHR22_3.0; EXPRESSED IN BONE MARROW, SIGNAL = 3.3; EXPRESSED IN BRAIN, SIGNAL = 3.1; EXPRESSED IN HELA, SIGNAL =   2; EXPRESSED IN HEART, SIGNAL = 2.9; EXPRESSED IN FETAL LIVER, SIGNAL =   3; EXPRESSED IN PLACENTA, SIGNAL = 3.2; EXPRESSED IN LUNG, SIGNAL = 3.8; EXPRESSED IN ADULT LIVER, SIGNAL = 3.4; NT HIT: X65224.1, EVALUE 3.40e-02; SWISSPROT HIT: P35191, EVALUE 6.20e-01; EST_HUMAN HIT: BG029586.1, EVALUE 2.00e-01
gcaagacaaaggacagcctctgaagggactgggagggagagggaagggcaggtgcagagggtcgaggcagtgcctatcacatggcctctgcttcctctggaagtggcaggagagcaggttcgatggagatgaggatgaaggcctgcggatgaaggagaaaggcgagtactccagggattcctggcagctctgaggatctggctgtgactggagaagatgaccttgtcgtgaccgcagctgttgttgcagtggtggttgtggtcgcgatggtggcttctctccagaagccagagcagctggcatgcaggagtgaagtgcacggagcagcagtgccccagcgatggttttacaggcttggcacaaaaggactcagaccagggctggcacatctccaggtatattgaagctgctgggggtggggaggggggggaggttttagagggaaaatgatggagggctggggaaaaatggagcatgtgcagtactgtttcaggttcctaaaatatcagtttgcaaacataaaaatgtattctctaaaataggcaaagcacacgaacaaaag

SEQ ID NO: 298 - DNA, 562 bp, Homo sapiens
  MAP TO AL049860.8; EXPRESSED IN BRAIN, SIGNAL = 0.62; EXPRESSED IN LUNG, SIGNAL = 0.63; EXPRESSED IN FETAL LIVER, SIGNAL = 0.45; EXPRESSED IN PLACENTA, SIGNAL = 0.72; EXPRESSED IN ADULT LIVER, SIGNAL = 0.36; EXPRESSED IN BONE MARROW, SIGNAL = 0.62; NT HIT: gi15828471, EVALUE 2.10e+00; EST_HUMAN HIT: BI521625.1, EVALUE 3.00e-03; SWISSPROT HIT: P26327, EVALUE 8.10e-01
gaaaacagtggccttcatcccaccgtcttccttttgacatagttagaccttaggctctgactttgatggattattattcagctttcccaaccatttactataatatttcttatcactgttttgctgaaaccttgcaaaacaatcctaataaccaatgggaaactttacaattcacctgtgtccttgtaaaatcatatcaaaatatttatcaagataaaatttaaaacttttgtcgtactgttaattacaagattatacacgaataaaaatagtaaaacatttttacttagtactgaaatttaatgaagatgggataaatgtcattatactctgacttattgaaaattaaagggctctatttctgggtttacagtagcttggatagtgcttaccttcttgttggtcatataacttacatggtgtgtcatttccatggctaggccaatagtcatactccttttgaagttcttattatcttccaacattttgtcctttcagctttcaatgtcataaaaatctcctagtgtttctttaatgtgaactttgttgcagctaccagtcc

SEQ ID NO: 299 - DNA, 552 bp, Homo sapiens
  MAP TO CHR22_227.0; EXPRESSED IN BONE MARROW, SIGNAL = 1.8; EXPRESSED IN BRAIN, SIGNAL = 1.6; EXPRESSED IN HEART, SIGNAL = 1.2; EXPRESSED IN LUNG, SIGNAL = 1.1; EXPRESSED IN PLACENTA, SIGNAL =   1; EXPRESSED IN ADULT LIVER, SIGNAL = 1.1; EXPRESSED IN HELA, SIGNAL = 3.2; EXPRESSED IN FETAL LIVER, SIGNAL = 1.7; NT HIT: gi14779316, EVALUE 0.00e+00; SWISSPROT HIT: Q9Z319, EVALUE 7.90e-01; EST_HUMAN HIT: BE743542.1, EVALUE 0.00e+00
cctctgtccccagtgttaccacagttccgctttcatagactgctgtagatacccagatccacttaatattgattgcaatttatatttacaggcttaatgccagaccgggagttggaggtgtccgatctcgagttgggatccagcaaggccttctcagccagtcaacacgcacagccaccttccagcagagatttgatgcccggcagaagattggcctctcagatgcccggctcaaactgggagtcaaggatgcccgggagaagcttttgcagaaagatgcccgatttcgaatcaaagggaaagtgcaggatgccagagagatgttgaactctcgcaagcagcagaccacggtgccccagaagccccgccaggttgctgatgcccgggagaagatcagcttgaagaggagttcccctgctgccttcataaacccacccattgggacagtgacccctgctctgaagctcaccaaaaccatccaggtgagttgtggcttttgtcatgaattcccagaaagctagtaacaaaggtagatttagaggcaaggtgcca

SEQ ID NO: 300 - DNA, 556 bp, Homo sapiens
  MAP TO AF239614.1; EXPRESSED IN BONE MARROW, SIGNAL = 1.9; EXPRESSED IN PLACENTA, SIGNAL =   2; EXPRESSED IN LUNG, SIGNAL =   2; EXPRESSED IN ADULT LIVER, SIGNAL =   2; EXPRESSED IN HELA, SIGNAL = 1.4; EXPRESSED IN BRAIN, SIGNAL =   2; SWISSPROT HIT: P54296, EVALUE 5.00e-34; NT HIT: gi4505314, EVALUE 1.00e-102
tcagagggcacagtgttcaggcccgtctccacgttgcttcctcctccctctgccacactggagctggctgccccggggacaaagcccccaactgaggccctcggtaactccctggttgtgcttccttgcagccgtcccgtcccatccttatgggattacgctcctcaactgtgacggccactccatgaccctcggctggaaggtcccgaaattcagtggtggctcgcccatcctgggctactacctggacaagcgtgaagttcaccataaaaactggcacgaggtcaattcctcacccagcaaaccgacaatcctaacggtcagttggtttttattccttcgtctatttttgcctgggtggttctttacatttttggcaatgtttctgcgtttgatgacattagatagtttgatacagacacaaaaatggattaaaaaatagcatcatgagatcatgaagttttggagctaaaaagatcctaggaatcatattctttttctttctgagaagcagtgaagaagggagctcagtgatggagtgggcctgacagtgagt

SEQ ID NO: 301 - DNA, 558 bp, Homo sapiens
  MAP TO CHR22_8.0; EXPRESSED IN BONE MARROW, SIGNAL = 1.8; EXPRESSED IN LUNG, SIGNAL = 1.7; EXPRESSED IN BRAIN, SIGNAL = 1.7; EXPRESSED IN ADULT LIVER, SIGNAL = 1.6; EXPRESSED IN HELA, SIGNAL =   2; EXPRESSED IN FETAL LIVER, SIGNAL = 1.8; EST_HUMAN HIT: AW880067.1, EVALUE 3.10e+00; NT HIT: AL163249.2, EVALUE 5.30e-01
tgatccaagctggtgagatgggcgtgtgaatttcagtccctccaaggggacttgagcaattactctgactaggggaatgaggctcagtttttgcactggacgatcacagggcagaatacttgtaaacagaaataatgtgctttcctttttttgtgaacactctaatatctcaatggctgaacacagtaccagactcacagtggggttcaataattggcaaatcatattgttgctacagtgtggaatgttcaacggcagaagcaggaagaagagaataattaaccaagctgggaggaagtggtgagtttcaagttgggttttgagggatgcataagagtttgatgacaggcagacctattagaagtaaagacattcctggaaaagaggttaatggacagaaaggctggaagttatggtgtgtttggggaataatgtaattgaggaagggagtattctctggtttttcaggtagagttggaggagggataagagataaattatgaaaccctcttagtaggtaccaagccagtccatccatgggcaacactacaaagaggg

SEQ ID NO: 302 - DNA, 539 bp, Homo sapiens
  MAP TO CHR22_161.0; EXPRESSED IN LUNG, SIGNAL = 0.65; EXPRESSED IN PLACENTA, SIGNAL = 0.69; EXPRESSED IN ADULT LIVER, SIGNAL = 0.66; EXPRESSED IN BRAIN, SIGNAL = 0.55; EXPRESSED IN FETAL LIVER, SIGNAL = 0.42; NT HIT: AF274008.1, EVALUE 5.10e-01; SWISSPROT HIT: P31361, EVALUE 2.30e-02; EST_HUMAN HIT: BI023979.1, EVALUE 0.00e+00
aacaaatgcatgacctgtgcagcgcgatctccgatcaaactgtagaacatcagccttactgcagaacgttctccagggccctttggcagtgcacacactgtgtagccacgcccagcgggcagcttcgggagatgagttggggagggagggctttggcgccctgacaggtagggatgttccagagctgctgttgcgtgcccagggcatgccttgacagcatcacagttgaatggagcagtgtctgggtgacatcgatgagaagggagctgaaggaggtgctgcggcccatgttcatgaggagatggaaggagtgcagaatggcagggctgggatcctgatgtaccctgggacttggctgtctctgagtgtctgcagtgcctcgagcacactgtgcgtacctgaggcagttggtgggaaatggatttagttccatgcgttcagctgggtggccggatttcagggcatcatttgtgaaatgacccactgtaatgtggtggttcaaggggaggcactgagccagttctgctgctcgcctttag

SEQ ID NO: 303 - DNA, 531 bp, Homo sapiens
  MAP TO AC018608.4; EXPRESSED IN BRAIN, SIGNAL = 0.77; EXPRESSED IN HELA, SIGNAL = 0.77; EXPRESSED IN FETAL LIVER, SIGNAL = 0.93; EXPRESSED IN PLACENTA, SIGNAL = 0.67; EXPRESSED IN BONE MARROW, SIGNAL = 0.78; EXPRESSED IN ADULT LIVER, SIGNAL = 0.94; NT HIT: gi14861871, EVALUE 8.00e-03; SWISSPROT HIT: gi120126, EVALUE 1.30e+00; EST_HUMAN HIT: T95346.1, EVALUE 3.00e-06
cggcttccaaaattttacccttggtactttcagtgtgttacttcctctgggacatcttcattctttttctcacaatcacgttttcatttcctctgactttgtgtctggagtttctggagtcttttgcatgccaataatgtcaacatttccaagattaggtatagctccaattacattaatttgtattttattttcggtagatttttgtttgttcgcgtcactttcatttttgttggccagttctctccttcgattatttattctctgcttcatggtatttgggtttctcactaggtgatgagtatgctgtacaactaaatgctttgctgtctgtacagagactgaataatagacatgtagtgaccagtcaccaaaagactccaaaaaagtgatgtggtcactaattataatgtgcatcgattatttatgatttttagaccaaagatttaacaacaaaatttatattttatgtaattagttaatagactataataactaaaatttgaaccatgatgttgggagaaatcggtt

SEQ ID NO: 304 - DNA, 558 bp, Homo sapiens
  MAP TO AC017050.4; EXPRESSED IN HELA, SIGNAL = 1.7; EXPRESSED IN FETAL LIVER, SIGNAL = 2.6; EXPRESSED IN HEART, SIGNAL = 2.5; EXPRESSED IN BONE MARROW, SIGNAL = 3.1; EXPRESSED IN BRAIN, SIGNAL = 2.8; EXPRESSED IN ADULT LIVER, SIGNAL = 2.9; EXPRESSED IN LUNG, SIGNAL = 2.6; EXPRESSED IN PLACENTA, SIGNAL = 2.9; NT HIT: AF003528.1, EVALUE 2.00e-09; SWISSPROT HIT: P08547, EVALUE 2.00e-36; EST_HUMAN HIT: AU118960.1, EVALUE 1.00e-18
caacaaaaacaggccaggaccaaatgcctttactggtgaattctattaaacatttaaagaagaattaatgaaattcttcccaaactcttccaaaaaattgaagaggagggaacatttctaaattcactttaagaggccattattactttgatagcaaagccagacaaaaatatcacaagaaaagaaaactgcagatcaatatccctgatgattatagttgcaaaaatcctcaacaaagtactaacaagccaaatccatcagaacatcaaaaggatcatacactatgaccaaatgagatttatccatgaaatgtaaggatgactcaacatacaaaaattagttaatgtgatacaccataatcacagaataaggaataaaagttacacaataatctcaatagatgcagaataagcatttgacaaaatctgatatcatttattgattacaaaaagaaaagtctcaacaaactaggaacagaaaaaagtgcctcaacataataaaggccatatatgacaaaaccacagctaacattacattcaacagtgaaagcctgaaagc

SEQ ID NO: 305 - DNA, 585 bp, Homo sapiens
  MAP TO CHR22_210.0; EXPRESSED IN HELA, SIGNAL = 4.5; EXPRESSED IN HEART, SIGNAL = 2.6; EXPRESSED IN FETAL LIVER, SIGNAL = 3.3; EXPRESSED IN ADULT LIVER, SIGNAL = 2.5; EXPRESSED IN BONE MARROW, SIGNAL = 3.6; EXPRESSED IN LUNG, SIGNAL = 2.7; EXPRESSED IN BRAIN, SIGNAL = 2.6; NT HIT: AL163248.2, EVALUE 1.40e-01; SWISSPROT HIT: P44951, EVALUE 1.50e+00; EST_HUMAN HIT: BE009410.1, EVALUE 0.00e+00
acagaaaagcaggccatctgcccactcacagaggacaagaggaggagatggagacctgaggtgaccagagtagaaaactaggatggaatggactcaggcaggtctcctgggaggctacatattagttatctattgctgtgtaacaaactgtcacaaagttgatggctcaaaacagcacacattcattatttcacagttcctatagctcagtgtgagcctgggcatggcttagctgtgtctatggttcatgaatctcataaggctacacagccaaggtgtccccagggagctctggggccgaatccacctgcaagctccctcctgtgctggcagaattcatttccttgtgcctgaggtccttgccttcttgctggctgtgggcaggggtcaccctctgctcctcaaagccacccacagttccttgccacatgggctcccccaacatgccaacttcatcaagccaagaaggaaatccttcagggcaagtttgctatgaagatggggtcttacataaggaaatgtaatcacagaagtgacatccttcgcctctgctctggtcttattagaagcaagtcacaagtcccc

SEQ ID NO: 306 - DNA, 584 bp, Homo sapiens
  MAP TO CHR22_12.0; EXPRESSED IN BONE MARROW, SIGNAL = 3.5; EXPRESSED IN PLACENTA, SIGNAL = 4.1; EXPRESSED IN HELA, SIGNAL =  13; EXPRESSED IN HEART, SIGNAL = 3.2; EXPRESSED IN ADULT LIVER, SIGNAL = 3.9; EXPRESSED IN BRAIN, SIGNAL = 3.7; EXPRESSED IN FETAL LIVER, SIGNAL =   4; EXPRESSED IN LUNG, SIGNAL = 3.8; EST_HUMAN HIT: AA483975.1, EVALUE 2.10e-01; NT HIT: AJ310932.1, EVALUE 0.00e+00; SWISSPROT HIT: P12882, EVALUE 5.00e-01
aagcctgcctctaagctgtgagtgcaggccctagaatgttatcctcacctcttcctaggctccattaggtctgggaagccctagggcagcctctgttacccagattgtgcctagccctggcccttctagattgagtcttgtttcccctacactagagctggtagtacaggttcagcccagcaatcggtgctcagtgaaatgtatgtggtttatagttgggttgggcagggagtgggtggcaggaagctcacaggaagcccaccgggggctgaggccaggatggggactggcccaagcaggggccgtggaaaaggtggacctgtgtgaggtggcagtggcagcacctgggccatcagtgacatgtggccccatgctgcccccaacagtggagaagatccgagccaccttcactgtcctccgggccttcggctctgtgtccatggcccacagccgcagtgccacccggttctccatggtgatgtcgctggacttcaacgctacaggccgcatcacagctgctcagctccaggtgaggcctctcgggggatgtgcaagggggcccttggggctgctgtgtctctaac

SEQ ID NO: 307 - DNA, 543 bp, Homo sapiens
  MAP TO CHR22_214.0; EXPRESSED IN PLACENTA, SIGNAL = 1.8; EXPRESSED IN FETAL LIVER, SIGNAL = 2.3; EXPRESSED IN LUNG, SIGNAL =   2; EXPRESSED IN ADULT LIVER, SIGNAL =   2; EXPRESSED IN BONE MARROW, SIGNAL = 2.6; EXPRESSED IN BRAIN, SIGNAL = 2.2; EXPRESSED IN HELA, SIGNAL = 4.4; EXPRESSED IN HEART, SIGNAL = 2.2; SWISSPROT HIT: Q04569, EVALUE 3.90e+00; EST_HUMAN HIT: BE262310.1, EVALUE 3.00e-03
attgccttctgtgaaccacccactcccctccctcaggaggaattacttgaaaacaatgacgttggatgttgattggtggtccacaaagggtggttcctggttctgcaacagcagcattgcctggaaacttgttagaagtgcaaataccaggccccagcccagatctacggggtcagaagcactgagggtggggcccataagtctttttaacaagcacttcagggcattctgatgtacactcaagaatgagcacctctgccagaaatgaacaaatcaacttcattttggtttaattattttctgggcaccgtttgccagagctgggggagtagagataagccagatgaggctcttgacctcaaggactccgagtctggtggtgatagccagatcagcactccacatccagccagccatctcttagttgggggcatttgcaactagcatccatgttttcctggcaatgccaaactttcaaacttccagccattcatactcatatcctctgcctccactttctcatctgaaaggctcctcctcatg

SEQ ID NO: 308 - DNA, 596 bp, Homo sapiens
  MAP TO CHR22_47.0; EXPRESSED IN FETAL LIVER, SIGNAL = 1.9; EXPRESSED IN HEART, SIGNAL = 1.4; EXPRESSED IN ADULT LIVER, SIGNAL = 2.1; EXPRESSED IN BONE MARROW, SIGNAL = 1.7; EXPRESSED IN BRAIN, SIGNAL = 1.5; EXPRESSED IN HELA, SIGNAL = 1.4; EXPRESSED IN PLACENTA, SIGNAL = 1.6; EXPRESSED IN LUNG, SIGNAL = 1.9; SWISSPROT HIT: P20730, EVALUE 3.40e-02; EST_HUMAN HIT: BG209856.1, EVALUE 1.40e-02; NT HIT: X57025.1, EVALUE 4.00e-05
ctagcgacagcctggaaaactggcatggtgtgggcacagtaagcagagggcatggtgcagacgaaggcagggaaccaggaactcaatcctggatcacatttataggaaatatcaggaccctggagtgagcgatgtgaggctgggctctgcactggatcacctgtgcctcttttgctggtgctgagctcaatacctgacataaacaggggccctcgctctccaggcaactatccaaaggggggccccttaatcctcatcttcctggcagatgggcatagaaagcccattttgcagatgaggaaactgaggttttgacatggtgtccggacttgcccaaggttgtgcagggggcaggtggcaggtggcagagtcagaacgggaatcttggtccaacaagtgccaaagctcccacaatagtcctggaattgccctcgttgagaactcaaatgcccactgcctccttcctgaggttgttggtgtgcagggctgccggtgtgcggggctgctggtgtgcggggttgctggtatgtggggttgctggtgttggcttgctagtgagtgtggttgctgttctctggagttcatttgctggtggt

SEQ ID NO: 309 - DNA, 578 bp, Homo sapiens
  MAP TO AL096764.11; EXPRESSED IN BONE MARROW, SIGNAL = 3.5; EXPRESSED IN BRAIN, SIGNAL =   3; EXPRESSED IN HEART, SIGNAL = 2.9; EXPRESSED IN HELA, SIGNAL = 1.5; EXPRESSED IN PLACENTA, SIGNAL =   4; EXPRESSED IN LUNG, SIGNAL = 3.7; EXPRESSED IN ADULT LIVER, SIGNAL = 3.6; EXPRESSED IN FETAL LIVER, SIGNAL = 3.1; EST_HUMAN HIT: BF891624.1, EVALUE 2.00e-87
tggtacctatttgcacgcaggattatgactattttcacatagttaatataaatcttattttgacaattggaattttgaccattttttcttcagctgtattgtacgaaattctctataaagatgtgtttgttgtggatgaagaagagttgaagactgcgattaaattgtttcgaagtggttctaagaagaacagaaataatgctgtaactggaagcgaggatgcccatactgattacaagagttcaaatcagaataggtaataaagggaaaggggatatcatgataattatgtttcatacttctgtgcataatcatttgaaagtggaaggggcctggcaagcttatgagttaggttacatattcacacgtacacatatgttaggatatatatttttaatggggggagagttttaccaaagagatgtgtcgtgagatgcccagacttgggggttttgttcaggtccgttttgtattgctagaagaaacttcagaactatctaattacatgattctcaaactttagttgtataagaattatagtgcttgttagaaaggcaggttcctgggcctactgtcac

SEQ ID NO: 310 - DNA, 524 bp, Homo sapiens
  MAP TO AC020550.2; EXPRESSED IN BONE MARROW, SIGNAL = 0.5; EXPRESSED IN PLACENTA, SIGNAL = 0.64; EXPRESSED IN LUNG, SIGNAL = 0.57; EXPRESSED IN ADULT LIVER, SIGNAL = 0.48; EXPRESSED IN BRAIN, SIGNAL = 0.57; EXPRESSED IN FETAL LIVER, SIGNAL = 0.4; NT HIT: AJ229041.1, EVALUE 7.80e+00; SWISSPROT HIT: Q05360, EVALUE 3.70e+00; EST_HUMAN HIT: BF851839.1, EVALUE 1.90e-01
tgaggaacatgtggtgaagccttatgctagagactcctgaagtaaatatgacctttacctctatttatttggattctcagtatgttcttaaccatccccacttccatgatcaaaagaatttttacaaattccacgtcactgcctatgtttttctctgttttgtctctcttctccaaggcctagatagtgtgaacaattgttcctgaaattgctaacctaactttttttatttccactagctaatcttgattgcttgccttttttatgcaataacttcatttcttaattccccttatgagcagtatttccaatttaacatagtgacctaaggaacatgctagacatagaaagacatgaatacagtaggttcctttcccttaaggaattctcagtctaacagccaagacatataaacaaataactataatacaatctgataagcacactaatagaaggacatgcagcccagaggaaggaataattaactcaggctgggagaacagggaaggaaatgaaggcctggt

SEQ ID NO: 311 - DNA, 514 bp, Homo sapiens
  MAP TO CHR22_192.0; EXPRESSED IN BONE MARROW, SIGNAL = 0.4; EXPRESSED IN PLACENTA, SIGNAL = 0.72; EXPRESSED IN HELA, SIGNAL = 0.54; EXPRESSED IN BRAIN, SIGNAL = 0.48; EXPRESSED IN ADULT LIVER, SIGNAL = 0.65; EXPRESSED IN LUNG, SIGNAL = 0.52; NT HIT: gi14249285, EVALUE 6.00e-13; SWISSPROT HIT: P08547, EVALUE 2.20e-02; EST_HUMAN HIT: BI461499.1, EVALUE 3.00e-68
gtgctaccaaccagtacccctaatgcaggcaatgacaccctggatagcgtccccaacccaccccacactgtgaaaggtgcagccctggatagcccctgtcctaccactctggtcatgctgcagtctctgtcaccaccaccaccaaccacagtgaggcaagccagtgggccacaggctctagcacccagcagccaggcatggagcagctctcgccgatggccagctcctaccactctgaccacgctgctgtctccgtggccatcttctttgactataaaggaataaaactagatatcaataagaagagtaattttggaaacaatacaatcacatggaagttaaacactaccctcctgaataaatgactagcgggtcagtgaagatactaagacagaaattcaaaaatttcatgaaacaaatggtaatgaaaacacagtataccaaaacttgttatgcagaaagcagtacaaaggcagagatttacagctataagtgcctaccagccaaacaaaag

SEQ ID NO: 312 - DNA, 522 bp, Homo sapiens
  MAP TO CHR22_38.0; EXPRESSED IN FETAL LIVER, SIGNAL = 1.6; EXPRESSED IN BONE MARROW, SIGNAL = 1.6; EXPRESSED IN LUNG, SIGNAL = 1.6; EXPRESSED IN HEART, SIGNAL = 1.6; EXPRESSED IN HELA, SIGNAL = 1.5; EXPRESSED IN BRAIN, SIGNAL = 1.5; EXPRESSED IN PLACENTA, SIGNAL = 1.8; EXPRESSED IN ADULT LIVER, SIGNAL = 1.9; SWISSPROT HIT: P32303, EVALUE 2.80e+00
tcctttgtgtgggaggagtcagttgacagttccttgatgtctgggacagctgctggaagcctctattgtgtagacagagcagggtgtgggccccaggccgagtctctgagcacagagaatggatgccacttgtggctggtgtggactcagagctcgccagcaagaagagtgccacgctctgccgccaacatcatccctcctcaggggtgccttggatgcacgctgggggagcagctgtgtgtttgataatggaacacagtctgataaaaaaaccctagtgtaagtaactcagttactgtcttcctttgccctttcaatacttgactcattttatttttgtttttatgagttttatgctgtgcttttattttgagctccttaaaacctttatagaagttgaagaacatatatgtatatctatttctgcatgtattagtgtaacaaaaatatctgaatttacaaataaaaataggtttctttcatgacttatgaaaagcattatgcaagtcctgttgcatgtga

SEQ ID NO: 313 - DNA, 523 bp, Homo sapiens
  MAP TO CHR21_61.0; EXPRESSED IN BRAIN, SIGNAL = 1.1; EXPRESSED IN HELA, SIGNAL = 3.3; EXPRESSED IN FETAL LIVER, SIGNAL = 1.2; EXPRESSED IN BONE MARROW, SIGNAL = 1.2; EXPRESSED IN PLACENTA, SIGNAL = 0.67; EXPRESSED IN LUNG, SIGNAL = 0.85; EXPRESSED IN ADULT LIVER, SIGNAL = 0.83; NT HIT: AF135187.1, EVALUE 0.00e+00; SWISSPROT HIT: P20591, EVALUE 9.00e-35; EST_HUMAN HIT: H61837.1, EVALUE 6.00e-60
aacgtgctgtttcactcacgttgggtaacctggtatttacggacttcttacctactttcctgtgactcaggaatttgtgtcttgagggaaactgtatttatttattttttactgtagtccaaaattgaagacattagagcagaacaagagagagaaggtgagaagctgatccgcctccacttccagatggaacagattgtctactgccaggaccaggtatacaggggtgcattgcagaaggtcagagagaaggagctggaagaagaaaagaagaagaaatcctgggattttggggctttccaatccagctcggcaacagactcttccatggaggagatctttcagcacctgatggcctatcaccaggtacgtcttcgcgtggttcaggatgccagcttccattctttccttttcttctgaacgcctctctctttagtcttgctttctctgtaggtgacgttggtcagctctgtcgtttacctccttgttagcctcctgtattagtccattttcatgctgctga

SEQ ID NO: 314 - DNA, 539 bp, Homo sapiens
  MAP TO CHR22_231.0; EXPRESSED IN BONE MARROW, SIGNAL = 1.7; EXPRESSED IN BRAIN, SIGNAL = 1.3; EXPRESSED IN PLACENTA, SIGNAL = 0.81; EXPRESSED IN ADULT LIVER, SIGNAL =   1; EXPRESSED IN HELA, SIGNAL = 2.9; EXPRESSED IN FETAL LIVER, SIGNAL = 1.4; SWISSPROT HIT: P35659, EVALUE 3.40e-01; EST_HUMAN HIT: AW439912.1, EVALUE 1.90e-01; NT HIT: gi11418311, EVALUE 0.00e+00
gatggctgcaccagaagaactgactgacagaatgaacaaaaagatgcaaagagccattctattgacttgtcatagccgtaagtcagtccataaaatacaatgaagaatgaggatatgctagaagtagcaaaaaccaaaaaccatgcaacataaacacaccaccaaggtaggacgatccggggctttttcttaagctgctggagatccttttgggaagggtgctgttcggaatggacatcctgatcatcttctatgttgttattggaatttgtatttggcccgagggtctccggggtcttgatttgtgctttcctatgcctgtgcttgggtttggaggttgccttaggagaagcctttggaagcctgggctttcctttagatgcaggttttgcaacctccctggggtgcaccttagcagtttcgtaagcatgccactttctcaagtattcttcccagtgctcacttgcttctgacattagaggatgcttttgaggagatacctcctttagatccgcttgaggtttcctctgggaacaggt

SEQ ID NO: 315 - DNA, 586 bp, Homo sapiens
  MAP TO AC015855.4; EXPRESSED IN BONE MARROW, SIGNAL = 0.91; EXPRESSED IN PLACENTA, SIGNAL = 0.93; EXPRESSED IN LUNG, SIGNAL = 0.93; EXPRESSED IN BRAIN, SIGNAL = 0.94; SWISSPROT HIT: O42280, EVALUE 1.00e-16; NT HIT: AB063483.1, EVALUE 0.00e+00
aagggcagtaaatgaagcccctgaggaggccccttcccttcatttgcccctcaccaccatccccaaggctcacctgtctccctcctctcgctctctctagcctgaccgggcgggaagtcctgacgcccttcccaggattgggcactgcggcagccccggcacagggcggggcccacctgaagcagtgtgacctgctgaagctgtcccggcggcagaagcagctctgccggagggagcccggcctggctgagaccctgagggatgctgcgcacctcggcctgcttgagtgccagtttcagttccggcatgagcgctggaactgtagcctggagggcaggatgggcctgctcaagagaggtggggaggagggctaggggacggggagggctgggggaagaagccttcagggaggaggaggctgggagaggctgccctttcctttttcctggctcccgtgcccaggccacactgcccttcctgccctagcacggtcccaaatgagaagagtcacaagagttaatgaggggcagttgaaggccagctgtggcccagcctcaggtttgggggagcagaggagcaaggaaga

SEQ ID NO: 316 - DNA, 579 bp, Homo sapiens
  MAP TO AF235096.1; EXPRESSED IN PLACENTA, SIGNAL = 0.94; EXPRESSED IN LUNG, SIGNAL = 0.78; EXPRESSED IN ADULT LIVER, SIGNAL = 0.93; EXPRESSED IN BONE MARROW, SIGNAL = 0.64; EXPRESSED IN BRAIN, SIGNAL = 0.77; EXPRESSED IN HELA, SIGNAL = 0.57; EXPRESSED IN FETAL LIVER, SIGNAL = 0.67; SWISSPROT HIT: P56677, EVALUE 8.40e-01; EST_HUMAN HIT: AV763272.1, EVALUE 3.00e-03
tgattctctggctcacgttgggattcatcctcatctctgaacttgtcaccatagctggggtgggggcaggttgtgaggaccagatttcatgtcctcctctagagctgtgtgagaagtcaatcccacccaaaccatgtggactgagagtaggggaaagattgtcaccagagaaaattggggtgcccttaataaaagaagggtgaatgtaatggtaggctggccaaaaaagagatgtccccttcagaagagcaaaaagagaaagaaaggagacgagagagagagttcatgaggatgggagaagaaggtggaaatggtaccccaaaggctaagacctgacattagagacactaaaaggtgagtaaagtgcccttccctttggagcttccatgtccaggaacgccttctgtgaatcttcttgggctgacctgcaggtacccaacattcaatatctgctcgcgcactcatgcaatttccacttatgacttgctccaccctgtggactttgtcatcgtgagctttgctggttggtggagggcggcgggggttggggggtgctccactgttaatgcctctggggag

SEQ ID NO: 317 - DNA, 598 bp, Homo sapiens
  MAP TO CHR22_233.0; EXPRESSED IN HELA, SIGNAL = 4.2; EXPRESSED IN FETAL LIVER, SIGNAL = 2.3; EXPRESSED IN PLACENTA, SIGNAL = 1.4; EXPRESSED IN LUNG, SIGNAL = 1.5; EXPRESSED IN ADULT LIVER, SIGNAL = 1.7; EXPRESSED IN BONE MARROW, SIGNAL = 2.5; EXPRESSED IN BRAIN, SIGNAL = 2.2; SWISSPROT HIT: P11274, EVALUE 8.80e-01
ttaggagacgaaatgccgactggcctctgttgcctcactgagctccccccaaaacctggatctggggcctgaagcttcatcatgaaaaccaccccatcctagcacccgccaaggggaagatcatggggagaggaggcaggaaggagcttcatgtttcccaggcctgtggctggacaaaggcctcctcacacctgggcactggagttcttgggttcttgtctgggggctgctggcagcaggtgggtttgtccacaaggtcgctgtaccaggagatgggcttgagggatcccggtgatgcataaagcccccagcacgggggccgttgcctccctgtgacgccccgtggagcgcacttcaggtccacagcatggtcatgtggatttcgaatgcagatattacaagggggcatctgagtccaggctgtcctgatgggttcagagcccaggacagcccaggggaagggcaggaagggcaggtgcatgtccagggccacgtgtgatcaccagacccctgtgtcccgtggtgcacacccctcttgcctcttggccacggggtccactctgtgaccagcgaggatacttgggaccttcttgctttg

SEQ ID NO: 318 - DNA, 593 bp, Homo sapiens
  MAP TO AL137183.1; EXPRESSED IN BONE MARROW, SIGNAL = 3.1; EXPRESSED IN HELA, SIGNAL = 1.2; EXPRESSED IN BRAIN, SIGNAL = 2.9; EXPRESSED IN HEART, SIGNAL = 2.8; EXPRESSED IN PLACENTA, SIGNAL = 3.4; EXPRESSED IN LUNG, SIGNAL = 3.3; EXPRESSED IN FETAL LIVER, SIGNAL = 3.3; EXPRESSED IN ADULT LIVER, SIGNAL = 3.3; SWISSPROT HIT: Q00275, EVALUE 7.60e+00; EST_HUMAN HIT: BG432104.1, EVALUE 9.00e-10; NT HIT: AF217490.1, EVALUE 3.60e-02
tgcagataggcttaaggtgatgtagctcaaaaaattaaaaaatatatctgtatttgtcacaggttatacacttgagaaaaaagagacaagagagatggatgaaaaaattgaaaaaggaaaccatatgagacacatgagggagaggtgagagtaagatgtgaaatctcaaggataagaaaagtggatatagtgagaatagaactattaaataatataacacatctgtattgtagtatataaattgatttaaaccatttaactctaaaatctagatccttattgccaatatgagtgtttcatatatttctgccatttttaacacatcttgtttgtataagagctaatgatacaatatcttaaaataaatacaagctgatcttataatacagaagaaataagctctttttggtatttcatctgaggactcttcctatgtaataagtaatattacagtagatacagataatattcttctcttcctatcaatcactgtctcagtcaacttggggtactgtaacaaaatatcatggactaggtgacttaaatgacaaaattttatttttcatagttctagaggctgggaattccaaaat

SEQ ID NO: 319 - DNA, 509 bp, Homo sapiens
  MAP TO CHR22_14.0; EXPRESSED IN LUNG, SIGNAL = 0.97; EXPRESSED IN BONE MARROW, SIGNAL =   1; EXPRESSED IN PLACENTA, SIGNAL =   1; EXPRESSED IN HELA, SIGNAL = 0.55; EXPRESSED IN BRAIN, SIGNAL = 0.93; EXPRESSED IN FETAL LIVER, SIGNAL = 1.1; NT HIT: AJ303140.1, EVALUE 1.00e-13; SWISSPROT HIT: P39194, EVALUE 1.00e-05; EST_HUMAN HIT: AA258094.1, EVALUE 9.00e-19
ttcatgtgctgctccacttcttactaactgtttgaacttgggaaacagcatacctctgggaaggaacattgcccctccacctgcagccactgggcaacaggggcaagcctcagacgctggttcccacctcagacaaatcgtttgggcttctgtcttataggagggtcaggtttctgcaaaagattgtttttgcaaaagaagcaggtccagcagccactggtgccacagaggagagcaggattggaatccacaggctgtgtgagcttgagcaagtcactttacctctctgtttcctcccctgcaggatgggaatagggacatctgctgcatttggctgttggagaaacacaaggaaatcatggacaagtgccaggtgtggtgacactcgtctgtagtcctagcagctcaggaggctgagacgggaggatcccttgagtgcaggagtttgaggctgcagtgagctataatggtactactatactccagcctgcacaatgcaacaaaaccac

SEQ ID NO: 320 - DNA, 511 bp, Homo sapiens
  MAP TO AC011266.3; EXPRESSED IN HELA, SIGNAL = 0.57; EXPRESSED IN BRAIN, SIGNAL = 1.2; EXPRESSED IN HEART, SIGNAL = 1.2; EXPRESSED IN FETAL LIVER, SIGNAL = 1.2; EXPRESSED IN LUNG, SIGNAL = 1.4; EXPRESSED IN BONE MARROW, SIGNAL = 1.2; EXPRESSED IN ADULT LIVER, SIGNAL = 1.3; NT HIT: gi15612563, EVALUE 1.90e+00
tcagtcaggcatcacagctcttttcccctgggtttgtgcttttcctctcttcatgactatctatcactgcttgtaaaactcctccactaaaagatcttaaagttcacagtaaagcaatgcaattattctgagtcattccttcttaccttttaacctaatcttcagaggtgccggtactgaagaagtacggctcctgcccaaaatgagcctaatcttgtctctgaaaatagcacttccttgccaagaagaactttctccttttgaattgctgcaatgatgagaaaaagaagccaggattcattaatggccccgggcatggtgggtgctaagtcagagcgcccttcctctctacagagaatagcactgtctacttactgaaggtttttctttttttttttttttctttttatccttacaatgactgttggcagaaagctttgaaacagctcattactgacttctaattcaataagctaaaagggtgaggtgcagggcaatgcagattcagatt

SEQ ID NO: 321 - DNA, 537 bp, Homo sapiens
  MAP TO CHR22_196.0; EXPRESSED IN ADULT LIVER, SIGNAL = 1.4; EXPRESSED IN HELA, SIGNAL = 1.4; EXPRESSED IN PLACENTA, SIGNAL = 1.2; EXPRESSED IN LUNG, SIGNAL = 1.3; EXPRESSED IN BONE MARROW, SIGNAL = 0.96; EXPRESSED IN BRAIN, SIGNAL =   1; EXPRESSED IN FETAL LIVER, SIGNAL = 1.2; EXPRESSED IN HEART, SIGNAL = 1.2; NT HIT: Z71698.1, EVALUE 1.30e-01; SWISSPROT HIT: P31948, EVALUE 5.00e-09; EST_HUMAN HIT: BG311161.1, EVALUE 3.00e-80
ttaatgtgcaactggaggggacagacatccaaatcttagcagatggggaacccatctggattatctgaactttttctgataaagtttctttgtttgtagattcctctctttggtgctgacactattggccagagaagtcctgatggaccggtactgagcaaagctgaatttgttgagaaagttcgtcagagtaatcaggcctgtcatgatggagatttccacacagctattgttctgtataatgaagccctggctgttgaccctcagaactgcatcttatacagcaatagatctgcagcctacatgaaaatccagcagtatgacaaggcactggatgatgcaatcaaagctcgacttctcaatcccaagtggccaaaggtagaaatttttacctatgaagatttattttcatagaatcttttgtcctggcttcttactttaatgtaatattttgttgatttagtgtacttactaatattttaataatctgtacttcagcaaaatataaaatgacttccttgagctggtacactagcg

SEQ ID NO: 322 - DNA, 517 bp, Homo sapiens
  MAP TO AC024326.2; EXPRESSED IN BRAIN, SIGNAL = 0.53; EXPRESSED IN FETAL LIVER, SIGNAL = 0.58; EXPRESSED IN PLACENTA, SIGNAL = 0.46; EXPRESSED IN ADULT LIVER, SIGNAL = 0.53; NT HIT: gi13626872, EVALUE 1.00e-111; SWISSPROT HIT: P48960, EVALUE 3.00e-04; EST_HUMAN HIT: H00259.1, EVALUE 4.00e-92
tgaacattttgattaatgtttcaccaaaaaaggaagttcattatatgttgtagttcctttgacaacttagtgagttattcttttaactgctttattattattttcccttagggtattaaagattataatattcttacaaggatcactcaactaggaataattatttcactgatttgtcttgccatatgcatttttaccttctggttcttcagtgaaattcaaagcaccaggacaacaattcacaaaaatctttgctgtagcctatttcttgctgaacttgtttttcttgttgggatcaatacaaatactaataaggtatgtaggcatcctaatctctatttttgtcctatgatatgtgtactttcttaaatgtatatgtcctagaaacattatttgtaatttagggtttaatggggcagacgttctctataatttgttcttcagctatcctttctaagtttgataatgctaacacagctaagcaaactacttatcaagtccattcagcaaaaatggc

SEQ ID NO: 323 - DNA, 591 bp, Homo sapiens
  MAP TO AL137005.2; EXPRESSED IN BRAIN, SIGNAL = 1.1; EXPRESSED IN HEART, SIGNAL = 1.3; EXPRESSED IN LUNG, SIGNAL = 1.3; EXPRESSED IN ADULT LIVER, SIGNAL = 1.4; EXPRESSED IN FETAL LIVER, SIGNAL = 0.98; EXPRESSED IN BONE MARROW, SIGNAL = 1.1; SWISSPROT HIT: Q15654, EVALUE 6.60e-01; EST_HUMAN HIT: BF244797.1, EVALUE 1.30e-02; NT HIT: gi15304389, EVALUE 3.60e-02
atggtgtcccctagttgctgtaaaatattgggaagcaaacgagtgtggagaataatactgggactctgaaggcaaggatgagtgagaaatggttcagggaagattcgtggccaggcagggagggcaggacgttgcatgaggagagggggcctcgccagcactggtatctagtcctcttctgttccaagaaacttcgggagtggaacatccatcagctggagctggaaaccctgccctgtgagctgggtcccccatttggagtgacagtaatgtgtggccagcaaagggtcaccagctactgagaggcatctgggggatacatttttaaaagttagttctgtgggcggaagggtagatgatagggaagaatgagatgattttgtaaagtaagaggatctaggagtaagtagggtctcaagcattgcaatgaagagggtataaagacagctaccttacgaccttggtttattggagagagagaatgatgttttgtggtggccaaatgcattgctggtgaggggaatagatttcaggtcccatttgtcgctgctaacaattcatgtgaatgggacagtcactcaacctcccaca

SEQ ID NO: 324 - DNA, 536 bp, Homo sapiens
  MAP TO AC022528.3; EXPRESSED IN ADULT LIVER, SIGNAL = 0.29; EXPRESSED IN BONE MARROW, SIGNAL = 0.44; EXPRESSED IN BRAIN, SIGNAL = 0.46; EXPRESSED IN FETAL LIVER, SIGNAL = 0.45; SWISSPROT HIT: P70398, EVALUE 6.60e+00; EST_HUMAN HIT: BE742792.1, EVALUE 7.50e-01; NT HIT: AL163301.2, EVALUE 5.10e-01
gctgcctcagcctcagttacagtcatctcacacagctggtgtgaggctttcaaaatagtgtttaaatcatgctggtacgtggtaggagcactgtaaatcctagctagctttatagtactattcccctccttcctttcatttaattatttggaagctgctccatttaatggttctccagcaaacttgtctctttctttttagctgctggtagcctcgtgctttgccattgtgtctgggatcttgataatcacaatgcattttgtcattgcttttgccactgttgttcatgcagcagctccatggcaggacattcctctgtataaatcattatttatgggccaactgccaataaaaataaccacaggaaatatctaaaccctgattttgttttctaatacattttcccctttggaaaggacaccattattaagacatttttaaacaatttctggaaccagttacctctttactagagtctctagttggcaatgaaagaacgaacattaaatgctttcacaaaagtggctgagggaaaa

SEQ ID NO: 325 - DNA, 599 bp, Homo sapiens
  MAP TO AL138832.2; EXPRESSED IN BONE MARROW, SIGNAL = 0.45; EXPRESSED IN BRAIN, SIGNAL = 0.46; EXPRESSED IN ADULT LIVER, SIGNAL = 0.4; SWISSPROT HIT: P11533, EVALUE 3.00e-01; EST_HUMAN HIT: BF664230.1, EVALUE 4.00e-83; NT HIT: AB018339.1, EVALUE 4.00e-79
tcccaattttccatcatcaagataattccatttttagaacttatcttacctggtggcatagttcttcccactgcctttgcagaagctctacgcgttcattaagaatggagatatcatcagcactgatataggcagagagggtgtccttcagcaggctcaactgggtcaagtcatctgtccagctcccaactgcattttctaattcctaaataaaaaaacaaacttgaatacccacggacatctcctgccaatgatttctgaagtgtttttgaatcccctcttgatagaatttcctttgtatagccctcaatttaaatatctaacttgggatctagaggcacatcatggcaatattacagatttggttccagaccactgaaataaagtatatatcacaataaagtgagtcacaaattttttggtttctcagtgcatataaaagttatgtttacactatactattgtgtataaaatgtgcaatagcatatgtctaaaaaaaccaatgtacataccttaatttaaaaatactttattgtttaaaaatgctaatgatcatctgaggcctcagcaagtcataatcttcttgctggtggaaggtc

SEQ ID NO: 326 - DNA, 570 bp, Homo sapiens
  MAP TO CHR22_234.0; EXPRESSED IN BONE MARROW, SIGNAL = 3.7; EXPRESSED IN BRAIN, SIGNAL = 2.9; EXPRESSED IN HELA, SIGNAL = 5.1; EXPRESSED IN FETAL LIVER, SIGNAL = 3.2; EXPRESSED IN LUNG, SIGNAL = 2.4; EXPRESSED IN PLACENTA, SIGNAL = 2.2; EXPRESSED IN ADULT LIVER, SIGNAL = 2.3; SWISSPROT HIT: O43497, EVALUE 5.50e-02; EST_HUMAN HIT: BG118789.1, EVALUE 2.00e-01; NT HIT: M86360.1, EVALUE 2.10e+00
tctggaccccattgttatccccaccttacaggtgagaacactgacacacaggatggtcccgctgcttgcctgtggtcacagtatccggagcatggctgcagctgggaaccacctccaggcgacaaagcaacccagcacgggtgggtacggaggggccgttcgtctcgctcacagtctgggggtggcctcatggtgctgctcatcacagcgggcatgttggctggggctgactgtgagaacccagctctgccccagaggcctggccttggctggttctcacagggaggaagagagcccagagcagtaagcacagcccgtcagagagcgggcagagacgcactgcgcttcctgagaccgcggctcaccgctcccctgcattctgctcttcaaagacacatgcagaaccttcagggtgttgaaaggggccgcaaagatcacagctctcagcgggggcgcggtcagtcggccacagcggtggagatggcgttgaaagccggggatgatgactgctgcgctgggatgactgacggctgagccaggccctgctgctgtgcttgttgtgtaagccga

SEQ ID NO: 327 - DNA, 549 bp, Homo sapiens
  MAP TO CHR22_23.0; EXPRESSED IN BONE MARROW, SIGNAL = 1.4; EXPRESSED IN BRAIN, SIGNAL = 1.3; EXPRESSED IN HEART, SIGNAL = 1.4; EXPRESSED IN HELA, SIGNAL = 1.4; EXPRESSED IN ADULT LIVER, SIGNAL = 2.1; EXPRESSED IN FETAL LIVER, SIGNAL = 1.6; EXPRESSED IN LUNG, SIGNAL = 1.5; NT HIT: gi11417917, EVALUE 0.00e+00; SWISSPROT HIT: P81156, EVALUE 2.30e+00; EST_HUMAN HIT: AA937172.1, EVALUE 0.00e+00
ctctgcgataacacggaaggtgcaaagttgtgtttatttttcagatctctagcagagaatactctaatcccatgagttcttgttcctattttttgctctttaacttgggccatttcttgagtacaggctcctcgtggacacctggctgcttcctgccagggaaccggtccctctgagcaccttcagagatggcaccctgactgcaaagagcctcccagagcttttgtttaatggccttgcccagctccaggctgtacctcttgggggtccctgaaggattccacagcattggctccaccacagcgtggtacagagcctggtaaccctctgtggggagaccatggatggttagcgtgtcctccgacaactgctgtctcttttgggtttcaggaagcaacactcggcccttccaggctgctgtcccactgtcctggggtagcgcttgggtggcagccacatgttcagcatatctgtcctcaagatcttggcggactgttagttttttctcctttgaactttctttactctagccaggaagaaagcagagaa

SEQ ID NO: 328 - DNA, 582 bp, Homo sapiens
  MAP TO CHR22_26.0; EXPRESSED IN HELA, SIGNAL = 3.3; EXPRESSED IN BRAIN, SIGNAL = 3.4; EXPRESSED IN ADULT LIVER, SIGNAL = 4.3; EXPRESSED IN LUNG, SIGNAL = 3.8; EXPRESSED IN FETAL LIVER, SIGNAL = 3.7; EXPRESSED IN BONE MARROW, SIGNAL = 3.5; EXPRESSED IN HEART, SIGNAL = 2.8; NT HIT: AJ271735.1, EVALUE 1.40e-01; SWISSPROT HIT: Q15517, EVALUE 1.10e+00; EST_HUMAN HIT: BE967321.1, EVALUE 1.30e-02
aacctgtgctcaggagatggcacctgatggggctggtcctaccagaaagagcacccatgcaataggacaggtgtggaggggggaactgctttgagccatggcatatcagctggtctttcacctccaggaaggggatggggctggaggttgagttccacttccgggctgttgattcagtcagtcatgcccgtggaatggaaccccaatgaaaactctagacacggaagctctggtgaacatcctgatgggcagttccctgtgaatggtcacacacctatgtgccgggagggcaaccggtccctggggctgacggaagctcccaggccttgttgtaggtagctctctctgtagctggctattatttgtctctttatgctataataaaacagtcattataactatagcactttcctgagttttgtgaattgttttagtgatttattgaaactgaagaagttcctggggacccccgactttgtagccagctggtcagaagtgacagtgacctggggaccctgaatttgcagctggggtctgaggcgatgtctccttgaggaggacagtccccttacccaatggagt

SEQ ID NO: 329 - DNA, 594 bp, Homo sapiens
  MAP TO AL136450.1; EXPRESSED IN FETAL LIVER, SIGNAL = 4.8; EXPRESSED IN HEART, SIGNAL = 4.9; EXPRESSED IN PLACENTA, SIGNAL = 6.8; EXPRESSED IN BONE MARROW, SIGNAL = 5.1; EXPRESSED IN LUNG, SIGNAL = 6.5; EXPRESSED IN ADULT LIVER, SIGNAL = 6.3; EXPRESSED IN BRAIN, SIGNAL = 5.5; EST_HUMAN HIT: AU158712.1, EVALUE 0.00e+00; NT HIT: gi14761469, EVALUE 0.00e+00; SWISSPROT HIT: Q01012, EVALUE 6.70e-01
gagttctacaggcaggtggcctccagtcagctgctgacccctgccgagaggcctggaggcttggacgacagatcccccccaggctcctctgagactgtggagctggtgcggtacgagccagacctacttcggctcctagggtccgaggtggaattccagtcttgcaacagttgaccgggaaaacagcccctcctcttctttctccttccgagttcgcccttcccccacctccttgtctttccccgaccgagcaccagactgcagaatgaggcaataatacggaccaacaagaagccgccttatcaatgccagcattagcgactggactgtttttgtttttttggttacaattagttctcatctccctgtcgtcgtcattgttatcgtggttgctgatgggggtggaaagttgaactccatgtctgaggacaagaggtcccgggggtggtgggaggtggcgccggggtcccttggactggcctccttgttcatgaccaagaccaaacctgggccctggatggccttggcctgtcccgaggagaaatgagaaaatcccagatctctgagcgccccccaactccattcccctgtgtt

SEQ ID NO: 330 - DNA, 573 bp, Homo sapiens
  MAP TO AL121954.3; EXPRESSED IN BRAIN, SIGNAL = 0.46; EXPRESSED IN FETAL LIVER, SIGNAL = 0.39; SWISSPROT HIT: Q03933, EVALUE 3.00e-22; EST_HUMAN HIT: H24163.1, EVALUE 8.00e-78; NT HIT: M65217.1, EVALUE 6.00e-78
aaatttcttgagcgagcagcttaatcacaatattggtacttcatagtatagaagaccataaagattgaatgagaagtgcttaactccaaaataaaaattaaaaatcaattagttttcagtatacctcctttgagaggaagaggaggtgaggttttatctggttgaataatttagcttaattatcaagtttaataatccaaatgtgagaaagattattatttttcaaagaacaaagtagttttgaattttactctgtaataagaaaagtaatcaatattttcatacattttatctcacaaactccttacttggagggatcagatataacatcctcattagtttctggaataactgggatattttcttcatctgcattatcatcagtaacatcataaataatgatgtcatctgaaatcctctcccttggctttaaaccttcagtcctactgtgtggaacctaaaaattcagagagaaaaatatatctaaaaatcaaaatcattgactaccaaacaagatatcatctacaaaataactaggcaactactatttactgaatctcggggtatgcaaaa

SEQ ID NO: 331 - DNA, 595 bp, Homo sapiens
  MAP TO AL137118.3; EXPRESSED IN BRAIN, SIGNAL = 0.4; EXPRESSED IN FETAL LIVER, SIGNAL = 0.52; EXPRESSED IN PLACENTA, SIGNAL = 0.71; EXPRESSED IN ADULT LIVER, SIGNAL = 0.64; SWISSPROT HIT: P49652, EVALUE 2.00e-09; NT HIT: AF279611.1, EVALUE 0.00e+00
ggacacaaggatacaagaacaggtctcatctaagagctccttatactcttgtttcctttctcaaccacacactaacagggaaaacacactttgtctttgccttctgtggatggccttttctgagtgcagactttagtctgtccttaaaattctccccagcaaagtaatagagcagaggattgaagcaggcattggctgctgccaaggccagtgtgataaccaaagctttatgcagtctgtctttgcataaacccactttccatgtcgtcaagtggacggtcctcagtgtgtgatagggcaggaaacacaagaagaagatgatcaaggtgatgatgatggtggtcagtgccttcctgtgagaaacccgcagccccgattctgggacctccacttttaacagaacccgaatgatcagcagataacagatgctgagtgtgaaaaatggcagcaggcagcccaccaccaaggcaatatagttcatggtctgcagcttagcaattttatagagattcagctctaagcatgatgtgacactgccgttctgctcagagccactgtccaggagcattattgaggaagccatgataaggatcca

SEQ ID NO: 332 - DNA, 555 bp, Homo sapiens
  MAP TO AL136103.2; EXPRESSED IN HELA, SIGNAL =  10; EXPRESSED IN BRAIN, SIGNAL =  16; EXPRESSED IN FETAL LIVER, SIGNAL =  18; EXPRESSED IN HEART, SIGNAL =  13; EXPRESSED IN BONE MARROW, SIGNAL =  17; EXPRESSED IN PLACENTA, SIGNAL =  17; EXPRESSED IN LUNG, SIGNAL =  17; EXPRESSED IN ADULT LIVER, SIGNAL =  14; SWISSPROT HIT: P39188, EVALUE 4.00e-05; EST_HUMAN HIT: AL119357.1, EVALUE 2.00e-16; NT HIT: AY046055.1, EVALUE 2.00e-19
catgttgctcatggttggtctccaactcctgggctcaagtgatctgcctaccttggcctcccaaagtactaggattacaggtgtgagccatcgtgcccagtcacacaacattcttttaggttctatctgcaacattaacattttctccatcactttaagtttagcaaataagcacaccaatgaatcaagctctcacttgcagcatttgtcagtttctgctgcaaatacttccacagagggcaatgtcaaactacaaagtgccatcactgaagagttggaaagtgactgcacttcattatatagtatttttatcatacaaattcagtagactcaatttcaagagcataaattacagtgaaattttggaaaataattaagagtgaggagtcttgtaaataaggtaatttatcaagtttaagtgtatataattttaaataatacctgtgttaacaactgaccaaagttgctgaaacgttaataattacttcttgtaagccagtacaggttaacacttacacaccactggttatttgaacccaaaaggccaaagagatc

SEQ ID NO: 333 - DNA, 585 bp, Homo sapiens
  MAP TO AJ239319.2; EXPRESSED IN HELA, SIGNAL =   6; EXPRESSED IN FETAL LIVER, SIGNAL =  11; EXPRESSED IN HEART, SIGNAL =  10; EXPRESSED IN BONE MARROW, SIGNAL =  12; EXPRESSED IN LUNG, SIGNAL =  11; EXPRESSED IN ADULT LIVER, SIGNAL = 9.4; EXPRESSED IN BRAIN, SIGNAL =  11; SWISSPROT HIT: P56558, EVALUE 2.00e-38; EST_HUMAN HIT: AU134238.1, EVALUE 1.00e-79; NT HIT: gi14759193, EVALUE 9.00e-80
ccagcctagggaacagagtgagatcctgtctctaaaaaagagttagacctccttgtttatttacttatttaattttggcacctttaggttctttttttaaaaaccactttattgaggtacagttgacatacaaaaagttgtacatatttaatgtatgtgacttgatgaatttagaggtaagtgtactgataaaagttcttaatcagtttttgatctgatttttttaaggcaatgtggctgggataccctgggacgagtggtgcgcttttcatggattatattatcactgatcaggaaacttcgccagctgaagttgctgagcagtattccgagaaattggcttatatgccccacactttttttattggtgatcatgctaatatgttccctcacctgaaggtaggtatgaaacagtgctatggacgaatttcaaagaactgtagctttttatttccttgctattgtctatgtaaatcctaaaagacatgtctgaaactattttttccattagaaaaaagcagtcatcgattttaagtccaatgggcacatttatgacaatcggatagttctgaatggcatcgacct

SEQ ID NO: 334 - DNA, 544 bp, Homo sapiens
  MAP TO CHR22_208.0; EXPRESSED IN BRAIN, SIGNAL = 1.3; EXPRESSED IN HELA, SIGNAL = 2.5; EXPRESSED IN FETAL LIVER, SIGNAL = 1.3; EXPRESSED IN LUNG, SIGNAL = 0.84; EXPRESSED IN PLACENTA, SIGNAL = 0.85; EXPRESSED IN BONE MARROW, SIGNAL = 1.6; EXPRESSED IN ADULT LIVER, SIGNAL = 0.88; SWISSPROT HIT: Q9L6N1, EVALUE 3.90e+00
ggtgcctcttctctgctcacttttggctggacttctgctgatctgtgaaacacagagagactctcctctctggctgtctcccagttgcggggaaccttttgatttcttaactattcccctgggatccattcctctatttgctcattttctaatactccctcttcatcaccgtgttactgggccactgactcccactccaaaggccgaccaggcccggaaagctcataaagtgagtcagcctaagagaagggatccgagtccaggtcacttggagctgatgacggcagcgaacctggctaagccagcgtgtgcaagatgctggcgctgctggaaacatcgcctggaggagcggccctctcatcacccggaacagacaggggtgtctgcagaggtttcccaacctgtcatcattactctagggtcttcttagaaggacaacaaaccctgtacctgcatggcggagtgttaggatatctggtaccatgtcactcccctgagctcagccagactgcctgagggttgtgccccactccaccatttactg

SEQ ID NO: 335 - DNA, 531 bp, Homo sapiens
  MAP TO CHR21_28.0; EXPRESSED IN HEART, SIGNAL = 1.7; EXPRESSED IN FETAL LIVER, SIGNAL = 1.9; EXPRESSED IN PLACENTA, SIGNAL = 1.2; EXPRESSED IN ADULT LIVER, SIGNAL = 1.4; EXPRESSED IN BONE MARROW, SIGNAL = 1.9; EXPRESSED IN LUNG, SIGNAL = 1.3; EXPRESSED IN HELA, SIGNAL = 4.6; EXPRESSED IN BRAIN, SIGNAL = 1.8; SWISSPROT HIT: P52746, EVALUE 4.90e+00; EST_HUMAN HIT: AA034140.1, EVALUE 2.00e-04; NT HIT: AF095901.1, EVALUE 1.00e-04
caaagagggaaggaagggaggaaggaaggaaggaaaagaaggaaggaagaaaggaaggaaaaaaggaaggagggagggagggaaggaaagaaagaaaagcttaaactctaattcttcaacttatactgacttcaattaatcctactgatatgatctgagtttgtccccctacatttatgtgttggaaacttaatccccaaaggaacagtgttagaggatgggggctaatgggatgaacttaggttatgagggttctgacctcctgcatggattcatgctgctatgaacagggttggtgagagtgccttctctctcttttgcttttctgtcatgtggggactcagtacttgtcctcttttgtccttcgccttctgccacgtgaggacacagtaagaaggcccacaacagatgctggtgtcttgatcttgccagcctccagaactgcgagagaataaatcttaataaattacccagtatttaatattctgttatggcagcacaaacagactaaggaacctggcaagtgaagag

SEQ ID NO: 336 - DNA, 516 bp, Homo sapiens
  MAP TO AL139158.1; EXPRESSED IN HELA, SIGNAL = 0.74; EXPRESSED IN FETAL LIVER, SIGNAL = 0.79; EXPRESSED IN PLACENTA, SIGNAL =   1; EXPRESSED IN LUNG, SIGNAL = 0.9; EXPRESSED IN ADULT LIVER, SIGNAL = 0.99; EXPRESSED IN BRAIN, SIGNAL = 0.73; SWISSPROT HIT: O62732, EVALUE 2.00e-03; EST_HUMAN HIT: AI687521.1, EVALUE 1.80e-01
agtcagaggcaaggtcaagctgcttaaggctccaactgcctggagtcctgtggatgcctttctggccagtgaagaggttggcagggcagggcccaccgtggggcccgtgccaccccttgcctggaccctctccctccttccaggccaagaagtgcctgggctcctctctggcctgggggttcctgcctcttctccctttgctttccttacagcacaaggaggccagagccggatgccagcgcccttcctcccccatcccgcagcacctgggatgggcgtgtgctcgtcgctgtcgccgtgctctcgtctcccactcctggagcagccacagcaggtcccaggggcctggagacaacaaatggctccctgctgatgggctgcttgccgcctcctgtctgccagccagtcctgctgcacaccggcagataatcaagtagggcaggggaacctctcctgcccacggtggtgtgatttaaacctgaactttgctttctttcattccctggagaaacagga

SEQ ID NO: 337 - DNA, 507 bp, Homo sapiens
  MAP TO CHR22_99.0; EXPRESSED IN PLACENTA, SIGNAL = 1.6; EXPRESSED IN ADULT LIVER, SIGNAL = 0.83; EXPRESSED IN HELA, SIGNAL = 2.3; EXPRESSED IN FETAL LIVER, SIGNAL = 1.4; EXPRESSED IN LUNG, SIGNAL = 1.2; EXPRESSED IN HEART, SIGNAL = 1.4; EXPRESSED IN BONE MARROW, SIGNAL = 1.4; EXPRESSED IN BRAIN, SIGNAL = 1.6; EST_HUMAN HIT: AI924055.1, EVALUE 1.10e-02; SWISSPROT HIT: Q9NQ38, EVALUE 8.00e+00; NT HIT: X55055.1, EVALUE 7.50e+00
cccttcactctgctctcaggccactggaacctgtcttcaatcttcacttctgctgcttccccctgactcaggcctctacccttgctgtagcttctatgtggaatcaccatcttgaccaccaaaccttcccctggctcccgtcacctaaaaatctcctgtccacctgctgccttcagcatgtatcactgactccaggacatctcccttgaatctctgactgggtcagtctccctagtacaactgttcattatgtgatatgtagagcattttctgtggggatgtatttatgtgatgatgattattggcattgtgtctgtctcctccttcaggttgtaagcagtgtgaaggaagtgaccgtggatcatttgcttctcactcttcttctagagcctgacactctgcctggtgcacatgagaagtttaataagtatttactgaatgaataaataaatggcactcttgcttggggttttccaattactgtaacccattgtttggcatgaatga

SEQ ID NO: 338 - DNA, 534 bp, Homo sapiens
  MAP TO AL136099.2; EXPRESSED IN BRAIN, SIGNAL = 0.77; EXPRESSED IN LUNG, SIGNAL = 1.1; EXPRESSED IN ADULT LIVER, SIGNAL = 0.88; EXPRESSED IN FETAL LIVER, SIGNAL = 0.84; EXPRESSED IN BONE MARROW, SIGNAL = 0.68; EST_HUMAN HIT: AW385785.1, EVALUE 0.00e+00; SWISSPROT HIT: P16975, EVALUE 1.70e-02; NT HIT: gi14757823, EVALUE 0.00e+00
tgagacaccaggaccatgagaactacaagcaggggttatgggtttgagggaaggacagtggccaggaaggagcagcccaggggtttaagcatcctgacggcatctgtgttccttccaggctctcagaacccgaccccagccataccctagaggagcgggtggtgcactggtacttcaaactactggataaaaactccagtggagacatcggcaaaaaggaaatcaaacccttcaagaggttccttcgcaaaaaatcaaagcccaaaaaatgtgtgaagaagtttgttgaatactgtgacgtgaataatgacaaatccatctccgtacaagaactgatgggctgcctgggcgtggcgaaagaggacggcaaagcggacaccaagaaacgccacagtaagagctttcccacccccgaccctgggcagtggtcaggccctgaggcctgggaggtctgcttctcacaaacacaattacagattgtgtttatggcctgggagtgcaaaaaatcaaatatgctgtttaattgttgggcgt

SEQ ID NO: 339 - DNA, 535 bp, Homo sapiens
  MAP TO AC025176.1; EXPRESSED IN BONE MARROW, SIGNAL = 2.6; EXPRESSED IN BRAIN, SIGNAL = 2.2; EXPRESSED IN HELA, SIGNAL = 1.6; EXPRESSED IN LUNG, SIGNAL = 2.9; EXPRESSED IN PLACENTA, SIGNAL = 3.4; EXPRESSED IN ADULT LIVER, SIGNAL = 2.3; EXPRESSED IN FETAL LIVER, SIGNAL = 2.3; EST_HUMAN HIT: AW850837.1, EVALUE 1.00e-115; NT HIT: AL163246.2, EVALUE 1.00e-111; SWISSPROT HIT: P25059, EVALUE 3.00e-04
tgcatagcattgcctctgaccaaggcacatactttacagctaaagaagtgcagcagtatgttcatgctcttggaattcactggtcttctccttatcattttgaagcagctggattgatagaacggtggaatggccttttgaagtcacaattacaacatcaactaggtgacaatactttgcagggctggcgcagagttctccagaaggctgtgtatgctctgaatcagtgtccaatatatggtacagtttctcccatagccaggattcacgggtccaggaatcaaggggtggaagtggaagtggcaccactcaccatcacccctagtggcccattagaaaaatttttgcttcctgttcccgcaacattacgttctgctggcctaaaagtcttaggtccagagtggagagtgctgccaccaggacacacaacaatgattccattaaactggaagttaatattaccacctggacactttgagctcctcctacctttaagtcagcaggctaagaagggagttacagtgttgcctggggt

SEQ ID NO: 340 - DNA, 583 bp, Homo sapiens
  MAP TO CHR21_11.0; EXPRESSED IN BONE MARROW, SIGNAL = 1.4; EXPRESSED IN BRAIN, SIGNAL = 1.3; EXPRESSED IN HELA, SIGNAL =   3; EXPRESSED IN LUNG, SIGNAL = 0.74; EXPRESSED IN PLACENTA, SIGNAL = 0.69; EXPRESSED IN ADULT LIVER, SIGNAL = 0.73; EXPRESSED IN FETAL LIVER, SIGNAL = 1.4; EST_HUMAN HIT: BG195905.1, EVALUE 4.00e-09; NT HIT: AB034614.1, EVALUE 9.00e-03; SWISSPROT HIT: P95442, EVALUE 4.30e+00
tgggtagaaggggagaaaggaatttagaatgactacaagatttctgctttaggaaactaggtggatgatggcaccattaattgtcattataaatgcaagagtgggaggagcaggtgggatggggatggaggagtgggagaaatattagctcagttggaacatgttgagtttgaagtgtctctgtagaaatacttagtaggcaattagatataaaactcttaatcttgtgattaaggtgtgtattaatcagggtttgccagagaaacagaatcaataggagacatatatatgaggagatttttaatgggaattggtttaagtgattatgaaggccaaggagtcccgccatctgccatccgcaagctgggggaccaggaaagccagtggtgtaattcagacggagtccaaaggcattagagctaggggagcctacgatagaagtcttgatctgagtctgaagacctgagaacagtggggttgggggcaatggtgtaaggtcagtctgagtcccaaggcctgagaaccaggagcactgatgtccaagggcaggaaaagatggctatcctggctcaaacagaaggag

SEQ ID NO: 341 - DNA, 592 bp, Homo sapiens
  MAP TO CHR22_73.0; EXPRESSED IN BRAIN, SIGNAL = 0.73; EXPRESSED IN HELA, SIGNAL = 1.6; EXPRESSED IN LUNG, SIGNAL = 0.75; EXPRESSED IN PLACENTA, SIGNAL = 0.93; EXPRESSED IN ADULT LIVER, SIGNAL = 0.61; EXPRESSED IN FETAL LIVER, SIGNAL = 0.91; EST_HUMAN HIT: H55317.1, EVALUE 2.00e-94; SWISSPROT HIT: P09268, EVALUE 1.10e+00; NT HIT: gi11465393, EVALUE 8.80e+00
ctccccaccaccatacaaacatgacaaacagggcaatgtctgagtgtggctaaggacgctgcagtcatcatatcaggtaacattctccatccccactcaacaactgagttttctcctggctgggagcagaaggagaaattcacatcttttacatatagagtgagcctctctagggtgtcagggtcagtggtctctcagctaacagctttgctctggggcattcaagaaccttctggccctgcagagaaaaccccacccttgagctgtacaccctgtccctcccctcctttctaactattctctcttctctcctccaggcaatgtggagaggtggaaaagtcacaagctttgagtcagaaacacgtgggctgcagtccagactctgctacttacgctatcagcctggacaagtttcttgaccactctgagctgatctagagaactggggataatagcactgagttgtcatgagaagtaaacaaaattataggaactacttggtaagaacctagcaagtgggagagacatcatgactgctttcttcattctttttattcctatggcccaggccaagcaacagggcatgaagaga

SEQ ID NO: 342 - DNA, 579 bp, Homo sapiens
  MAP TO AL121830.11; EXPRESSED IN BONE MARROW, SIGNAL = 1.7; EXPRESSED IN BRAIN, SIGNAL = 1.7; EXPRESSED IN HELA, SIGNAL = 0.8; EXPRESSED IN HEART, SIGNAL = 1.6; EXPRESSED IN PLACENTA, SIGNAL = 1.8; EXPRESSED IN LUNG, SIGNAL = 1.8; EXPRESSED IN ADULT LIVER, SIGNAL = 1.6; EXPRESSED IN FETAL LIVER, SIGNAL = 1.4; EST_HUMAN HIT: BF844205.1, EVALUE 2.10e-01; SWISSPROT HIT: P38096, EVALUE 3.20e+00; NT HIT: AF039602.1, EVALUE 1.40e-01
tctggagggaggtctgagagttgcttttctaaccagctccccggcgatgctgataccactgtccccgtgtctttggggataaacagcaggaggcacacacttagctgtggggagattgtctgttcagtcctcacagaaatgactccagttctgcactcatcagtctgagatgacagaatgaatattgtgagccactttaattcttcctgcaaaactgtaaatatagccaaatttctctctatgataatgaattaaacaaatagcactcttaatcaaaatctacagataaccccaaacagtgtttttgccattagtttaacctcctccacctgaattcttatcaatatagccagaatgggctgagagcccatttcctcctgcccccttctccaggggaaaattagatgaccaaatgccaagaactgaaaaggagtagaacctcagggcttccaactctgaaaactagattagggagtgggtgagcataaatgagaaaaaaaaatacatctttattttcactaagcacttttatctagcatttggtcttattatacatgaagcaacaaccatagccacatg

SEQ ID NO: 343 - DNA, 597 bp, Homo sapiens
  MAP TO AL096771.11; EXPRESSED IN BONE MARROW, SIGNAL = 4.1; EXPRESSED IN BRAIN, SIGNAL = 5.2; EXPRESSED IN HEART, SIGNAL = 4.4; EXPRESSED IN FETAL LIVER, SIGNAL = 4.7; EXPRESSED IN PLACENTA, SIGNAL =   6; EXPRESSED IN LUNG, SIGNAL = 5.4; EXPRESSED IN ADULT LIVER, SIGNAL =   6; SWISSPROT HIT: Q99715, EVALUE 1.00e-18; NT HIT: gi14757164, EVALUE 1.00e-66; EST_HUMAN HIT: BF692670.1, EVALUE 5.40e-02
caacacaaaatctcccccaccacaataagagttcctattcttgtgtatttaacatgcaggatgttttttggggaaatatcatgagctttgcatgttatatttgagaatctttataacaaacataaacggagataactgaagctactaagggtcaaggatgaggtcacttttttggaaagggaatttctgaggacaaattttgtttaatgatatggtctgggtggatcttatggagaagcacagttggcttctgatgtgtctgggctcaacattttattataaatactattgtgatgactaactgaagacttggtaagcatttgagttgttgtcaggcagaatttggcatttcctctcctgcagatagtagtgccaggaaacacgcgcatggtgcatctggagcggctgattccggacacactctattccgtgaaccttgtggctctgtactcggatggagagggaaatcccagccctgcccagggccgaacgcgtgaggcagaaatcctttctccattccattcccttgtagctagattggcagggcttctctgattgaatgagtggtgggaggggggtggtgagagatgggtgctt

SEQ ID NO: 344 - DNA, 596 bp, Homo sapiens
  MAP TO AL049647.7; EXPRESSED IN FETAL LIVER, SIGNAL = 0.63; EXPRESSED IN BONE MARROW, SIGNAL = 0.69; EXPRESSED IN BRAIN, SIGNAL = 0.69; EXPRESSED IN PLACENTA, SIGNAL = 0.86; EXPRESSED IN LUNG, SIGNAL = 0.84; EXPRESSED IN ADULT LIVER, SIGNAL = 0.95; EST_HUMAN HIT: T78806.1, EVALUE 9.00e-07; SWISSPROT HIT: P25304, EVALUE 2.00e+00; NT HIT: AL163248.2, EVALUE 1.00e-05
tccacgtatagggcatttccatcatcacagaaagttctgttggtcagagcatctaaagcatattcggcctctccccctagccaccctgtttatctcttgcttgcattcctccttggtatttgtgctgctgccaccccagttccagcccccaatgcctaataacatcctgatagatcaatagagttgtgttttagcaggtctaacatcatgttgtatctctggcctctcaaatggcagagctactcctctgcttggtgcttaaggcctcatcagggccctgaccgcctgtgtcaccttacagtctccatcctccaggatatgccgaggagtgcatggagtgcacacacagactgcttgctgtttattgagtaagctttgtcagtctgtgctaggtctgtttcacaatccactctccatctgccctggtcaaactcttctccattgtgtatctgcttcttatatatcaccagagacaatttctccctcaggtaaacacctgaatacttcaggtttcccttccacgtgacacccagcatatcctgcttcatatgcaatttgtctgtctgcatcccccagccttgcttcttcctggagtg

SEQ ID NO: 345 - DNA, 535 bp, Homo sapiens
  MAP TO AC024066.3; EXPRESSED IN FETAL LIVER, SIGNAL = 1.5; EXPRESSED IN BRAIN, SIGNAL = 1.6; EXPRESSED IN HEART, SIGNAL = 1.4; EXPRESSED IN LUNG, SIGNAL = 1.5; EXPRESSED IN HELA, SIGNAL = 0.93; EXPRESSED IN PLACENTA, SIGNAL = 1.6; EXPRESSED IN ADULT LIVER, SIGNAL = 1.3; NT HIT: U00039.1, EVALUE 2.00e+00
ttgatttcaagggaggcaagggaatataattttttggattccattttgggaaaggtagcttttacaacttagtgaccaataaaaaagtagggaagatgtttaacacatggcagccatgaatgtttaaaagatggcagccacaaattatctctatgacttcgctattgtggacaccattttgggtatgtggcccactcacctctgtttcatgcttgtcatctgtaggaattattcccttattgtactaactggaagagaggtggggaatctgtctcatgttggatccatcagtgtcactttcccaggaattgcatatttagaacttagatattataaccttagtctgggtttgcttctagatgagattatataaactcttgaaatgaagaacattaatgtgttctaccgcataagctgagaagacgtccagaaaaataaaaaataaaaaatagaccaagagaactactggagttcctaataactttcaatttcctagttatagtccttttctgaagctgagatgtcttcctgccct

SEQ ID NO: 346 - DNA, 541 bp, Homo sapiens
  MAP TO AL023656.8; EXPRESSED IN FETAL LIVER, SIGNAL = 5.1; EXPRESSED IN BONE MARROW, SIGNAL = 4.8; EXPRESSED IN HEART, SIGNAL = 3.6; EXPRESSED IN BRAIN, SIGNAL = 4.6; EXPRESSED IN PLACENTA, SIGNAL = 5.5; EXPRESSED IN ADULT LIVER, SIGNAL = 3.9; EXPRESSED IN HELA, SIGNAL = 3.8
tgcattcgttcatgcttctccaacgttgaatttaacaaagccacagaacttaaattactggattagaattactgagtttatttgtgtgaaatatggttaatcataagagctagtttataatctgttgtgctgccatggttttattatcactttaaatatgtgaagtatttaatactgtatagcaaatttcttatcaactatagcaatctctcaaaatttacatcactaacacacaatgttgtattacataaaaatggtctgcatgtgatggctttatcatgaatttaaaaggataattatattggggaataccttcatctcttggaggcatattgccatcatataaattctgtacattgtctaaatatcagtttaccaggcaccttcacatgtctgatcgcattcagtcttccgtagaaccctatgacataggtattatcatacttgttttgctgagtatcagtatgttgataaaactgagtatcagcatgttggtttttcataaatgcacaaatatattaggttgcagaaatgggtcttt

SEQ ID NO: 347 - DNA, 556 bp, Homo sapiens
  MAP TO AL139150.1; EXPRESSED IN PLACENTA, SIGNAL = 2.8; EXPRESSED IN LUNG, SIGNAL = 2.5; EXPRESSED IN ADULT LIVER, SIGNAL = 2.5; EXPRESSED IN BONE MARROW, SIGNAL = 2.2; EXPRESSED IN HELA, SIGNAL = 1.1; EXPRESSED IN HEART, SIGNAL = 1.9; EXPRESSED IN FETAL LIVER, SIGNAL = 2.1; EXPRESSED IN BRAIN, SIGNAL =   2; EST_HUMAN HIT: BE778983.1, EVALUE 3.10e+00; SWISSPROT HIT: P22561, EVALUE 5.30e+00; NT HIT: gi13386141, EVALUE 7.00e-28
agatccacaaatgctgtccctgtcccatcgccacaaccccacagtttcctgagccaaagcccctctgcaggccagtgttggagtgtcagcccctaacaggttagctctcaccaaagcaaagtttttccatctgggttgctagcacatgagggcatttctgctcttaccagaagacgataaaggtacatcatgaaattatcactgcattaccgagctcaacgtcgttgtcaatattcagtgtctcattagaaggaaacatggtccctttcttgtaatgctgcttacagacttttaagccaattctattgtcttcattttctccataaccaagggtccccagggtaatgtcctttagctgatgatactattaaaaaatagtcaagtaaaaaccacatatgaccttttataactttgatcagaggttatagcatatagaatgtactttcagttactttgtattgtttacatcatggctctcaatagaacttcccaatttaaaatactacaaagaaatcttctcagtttgttcagcaagacactgcctcacagaactcga

SEQ ID NO: 348 - DNA, 501 bp, Homo sapiens
  MAP TO CHR21_16.0; EXPRESSED IN BRAIN, SIGNAL = 1.5; EXPRESSED IN PLACENTA, SIGNAL = 0.69; EXPRESSED IN LUNG, SIGNAL = 0.7; EXPRESSED IN HELA, SIGNAL = 2.7; EXPRESSED IN ADULT LIVER, SIGNAL = 0.85; EXPRESSED IN BONE MARROW, SIGNAL = 1.6; EST_HUMAN HIT: AW664031.1, EVALUE 7.00e-01
atgccaacgttatacgggacagtaggaaagacaacatgtgtggcacctgctgtgcatgtattaagcacaaacttcaacttttctcagtttaaataatatgattttaaagcaaataaaaaggtggacatattatcctggaggaaaagaaacagtacttgatgtgagctattttattgttgccatgttcttatttttttcttttgactcctaccaagtattttgatatgtttctactgcagatcacttttacctgtttgaaatgtcctgttactgctgtggttcattagtgagtttatattctacaataacttatacttattgtcttgtcctagattaattcaatagagtttgagtttattatggaatacaaccacatcatagcaccaagctttgtggactggattgtagctgatacaaaaggaatgtaagagtattttatttgatgtttagtagcatgtcttatattatttttctacatgttgggggttttcatggtttgtt

SEQ ID NO: 349 - DNA, 599 bp, Homo sapiens
  MAP TO CHR22_224.0; EXPRESSED IN ADULT LIVER, SIGNAL = 1.9; EXPRESSED IN LUNG, SIGNAL = 1.7; EXPRESSED IN HELA, SIGNAL = 4.1; EXPRESSED IN FETAL LIVER, SIGNAL = 2.3; EXPRESSED IN PLACENTA, SIGNAL = 1.9; EXPRESSED IN BONE MARROW, SIGNAL = 2.3; EXPRESSED IN BRAIN, SIGNAL = 2.1; EXPRESSED IN HEART, SIGNAL = 1.8; NT HIT: gi14779373, EVALUE 0.00e+00; EST_HUMAN HIT: AW172362.1, EVALUE 1.00e-115; SWISSPROT HIT: P53421, EVALUE 5.20e-01
tccctcattctggagacacctgaaatgaaacaggtgccaccacaactcgcatggacatgctcacgcatcaaagccaacagtcaccacctcagcgcctcgcgccccaaagaaaaaattcagctgtttactgaaaacatgagccggtggaagacgcacaaacccagatagaggtattttccattttcatctttttctgccagaggactcccttctttctccagctccttcctgtatcttttgatgttcttcaccatcaggtccttccgggtcagttcatagtggtttggaaaatggttgactatttggtcatctgagagccgatatccagcttcaacgctgaacacatttcggatggtttgcacactcatcctgaaagagatgagcaggagagacacttggcagtgatgtctgtgtggcagaagtcctttgttcccgtccccgcaaacaccctgaaccctcagcacccttcaccactactcccacatcccctggcacctgagccaggggttgcccggcccacagcagcagagaatgggtgcccagggacaggccgggacccaagtggtgtgagggccaggagctgtgctgattctgagctg

SEQ ID NO: 350 - DNA, 555 bp, Homo sapiens
  MAP TO CHR22_132.0; EXPRESSED IN HELA, SIGNAL = 1.5; EXPRESSED IN BRAIN, SIGNAL = 1.4; EXPRESSED IN FETAL LIVER, SIGNAL = 1.3; EXPRESSED IN BONE MARROW, SIGNAL = 1.4; EXPRESSED IN HEART, SIGNAL = 1.3; EXPRESSED IN ADULT LIVER, SIGNAL = 1.3; EST_HUMAN HIT: AI916539.1, EVALUE 3.00e-22; NT HIT: AF196779.1, EVALUE 1.00e-17; SWISSPROT HIT: Q9V7H4, EVALUE 2.30e+00
gttgcaaacaatggaaacccgctctgactgctgcaaataggaagaatttattgacatgatatttggtagctcataaattcatcaggaatactgcagattgagcctagaagctgggcttacacagggacatctggaatacagacagggccataaagccagtcagatgatggcatgaccaccataccaccatgccactgtcactccatgctggatgccacaggtcactttgccatcagtgctggtcctgaaacccaccttcccactgctgctgctacatctggtgaccaacaaaatggtctggctaccagcccagtaaggagccctcataagataagtaagcaacaaggaggaaagggccccaggtcagggagggctccaggtggggaagcacaatgaacaattgttgtgagaaatggctaatcacaaacaacctgagggcacaatgacttcagtgaacacaatgacctctgtctgcatgtagccccctccagcaggactctacaaaacttcccttcagcccctgcctctttgcagacagccccttctctgctgtac

SEQ ID NO: 351 - DNA, 584 bp, Homo sapiens
  MAP TO AC015938.3; EXPRESSED IN BRAIN, SIGNAL = 1.5; EXPRESSED IN HELA, SIGNAL = 0.93; EXPRESSED IN FETAL LIVER, SIGNAL = 1.7; EXPRESSED IN HEART, SIGNAL = 1.5; EXPRESSED IN LUNG, SIGNAL = 1.3; EXPRESSED IN BONE MARROW, SIGNAL = 1.4; EXPRESSED IN ADULT LIVER, SIGNAL = 1.5; SWISSPROT HIT: Q9PUB8, EVALUE 2.90e-01; NT HIT: M81834.1, EVALUE 2.20e+00; EST_HUMAN HIT: T02854.1, EVALUE 2.00e-17
tcaatcttccatggagaccctgaagagggccctgccctgccccattggccttgaggtggggccccctctgcttccctccccaggcctcctaaggcctccaagccagagctggtaggagagcggcaggggaggggggagtgggaggaggagagggagcccaaggaagctgggcaggggctggcggcccctgggacccctttctacaaggacagaggcggcaccagctgctccacagaagaaatattccccaaagtcagagtggtcgtctcgtattttaagtggcccttatttatcaccatcctcctgggctccctatcgctgcaaatgatgataaaagacagcggtgaggggggcgcgggggctgctcccggctggccctgccgcaccaggggaggcgcaggcacacagcaacacacgggcacagcgacatgcacgatgacatacacacacagatgcagacacagacacacagtaccatccatgacaacagctacacacacacacacacacagtgacatgcacacacagacttagctgcaacagtgacatgcccacaaatgctaaccacaaacatacatgctggg

SEQ ID NO: 352 - DNA, 527 bp, Homo sapiens
  MAP TO AL121994.3; EXPRESSED IN BRAIN, SIGNAL = 0.57; EXPRESSED IN PLACENTA, SIGNAL = 0.53; EXPRESSED IN LUNG, SIGNAL = 0.57; EXPRESSED IN FETAL LIVER, SIGNAL = 0.43; EXPRESSED IN BONE MARROW, SIGNAL = 0.54; SWISSPROT HIT: P48925, EVALUE 1.70e+00; EST_HUMAN HIT: BF941515.1, EVALUE 1.20e-02
ttggaaaacctccctcaatgaattaacattgactcctctcttcctccccatcactcaccaccttttgtaagaaaacaactttaccattacatttgaggtcctttgtgtgcctccttttcaatcttatcccctaaccttcccacctcagaggtattttaactgtatgactatatttctgagaataaatattgtctagtttttgcatttttgaagttcataagcatataatcttatattcttccacgacttgcttttaatagtcagcattttgtttctgagatacatccatgttgctgtacatagttgtaattcattatttattttctctgtcatattatctcacattctacatgtatttatttatgctccccatttgttttatgcattctctagttggttgactttctgattgtttccagtttttgctgttacaaacagtgctactatgagcattttgtctacattttctagtgcgtgtgtacagaatttctccagagtaggtacctaggaggggaagagaaggtaca

SEQ ID NO: 353 - DNA, 536 bp, Homo sapiens
  MAP TO AL136381.1; EXPRESSED IN FETAL LIVER, SIGNAL = 3.3; EXPRESSED IN BONE MARROW, SIGNAL = 3.1; EXPRESSED IN BRAIN, SIGNAL = 3.7; EXPRESSED IN HEART, SIGNAL =   3; EXPRESSED IN PLACENTA, SIGNAL = 3.8; EXPRESSED IN LUNG, SIGNAL = 3.6; EXPRESSED IN ADULT LIVER, SIGNAL = 3.4; NT HIT: gi5453973, EVALUE 1.00e-103; EST_HUMAN HIT: BE502469.1, EVALUE 1.00e-103; SWISSPROT HIT: Q16513, EVALUE 7.00e-23
cctatcaactcctgcccttctaaacagaatataaataagaccttaaccaaaagagaaaaagtctctctactttcagaaaagctaaaaactattcatgtccccaaacttactattttctaaaaagatacattttttttattaatataccatataaacatcaaataaagcactactatacctgtaatatcttctggatctgatacaacaatatgtgcatttaattcctgcagcttgtgatgtagttcttctaattttttatttgattttttcaaaatgttgtctacataagccaaactttttttatctgttgtgactttcctcagattttcagctccttctttgattttcagttctttccttatttctctcttaattcgatccttgatatcatccaatttctgctgcaccattgtatctgaaaagtctaatttttgaacagcactcacattctcagaaaacggaagacttcgggaatccccctacagaaaaaataaacatacaaatgtgggagtttaggagagttggctgctcagtaa

SEQ ID NO: 354 - DNA, 513 bp, Homo sapiens
  MAP TO AL136366.3; EXPRESSED IN FETAL LIVER, SIGNAL =   2; EXPRESSED IN BONE MARROW, SIGNAL = 1.3; EXPRESSED IN HEART, SIGNAL = 1.2; EXPRESSED IN BRAIN, SIGNAL = 1.5; EXPRESSED IN PLACENTA, SIGNAL = 2.1; EXPRESSED IN LUNG, SIGNAL = 1.6; EXPRESSED IN ADULT LIVER, SIGNAL = 1.6; SWISSPROT HIT: P98168, EVALUE 5.50e-01
ctcctccacttcgcctacacaggctaaagtctagtcaccctcccctgatggttcatgacccccaactaccaacatgctttccccatccccaatgacttaccttttcttgtgctgtttcctgcctccaggacccccatgcctcacatcctcgtctaacaaaacggtgctcatctttcaagctcatttcttgagtcatgagaaccttctttggattcttgtgaattctgaattgcctcctctgtactccaatagctctttttatgtatctgtgtggcattgtctactatctgtttcatatgaattaggtgcttagttttatgtttctgtttccactgctagattagattagaaactccttgagaacagggattacttcattggtcttcatatttctctaacctttagcatgctcctagacatgtagtaagcacaaaacaaatgttcactgaattagacatacccaaaattagaagtactaaagagatattgatggtgacggctttgggtttcaat

SEQ ID NO: 355 - DNA, 534 bp, Homo sapiens
  MAP TO CHR21_32.0; EXPRESSED IN PLACENTA, SIGNAL =   1; EXPRESSED IN FETAL LIVER, SIGNAL = 1.7; EXPRESSED IN LUNG, SIGNAL = 1.1; EXPRESSED IN ADULT LIVER, SIGNAL = 1.2; EXPRESSED IN BONE MARROW, SIGNAL = 1.7; EXPRESSED IN HELA, SIGNAL = 3.4; EXPRESSED IN BRAIN, SIGNAL = 1.4; NT HIT: AL163209.2, EVALUE 5.10e-01; EST_HUMAN HIT: AA045245.1, EVALUE 3.00e+00; SWISSPROT HIT: Q10109, EVALUE 2.20e+00
aggtatgcagagcaaccaccatcccaccatgggtagaggtaccaagcaggcagccatgtgtaagccaaggagacaggccagggacagattcatcccttgtaaggctctaagaggaaaccaactgtgctggcaccttgaccttgtgcttcttgtcagcagaagtgtaagaaaataagtttctggtgtttaagtcccaaatatatacacaacatacacacacgcacatatatatatatatgcacacacaatgtataaaatacagtaagataaagctaaagcagatgttaaattcaaaacaaaagtgcatttactaaataaatttaaatgtcaatactctaagactcttatctcaaaacctagagcaagtccagcaaatcatacgtaagaagagtaggaaataagaaactacaaataagagagcagaacaaataagataggattatgtatagtgaaaagtttgactcaaatggaaaaattgataatcccttatcaagattaatttttaaaagtaaacagaaaacaaaatcagcaggc

SEQ ID NO: 356 - DNA, 516 bp, Homo sapiens
  MAP TO AL133553.2; EXPRESSED IN FETAL LIVER, SIGNAL = 3.2; EXPRESSED IN BONE MARROW, SIGNAL = 3.3; EXPRESSED IN PLACENTA, SIGNAL = 3.8; EXPRESSED IN LUNG, SIGNAL = 3.4; EXPRESSED IN ADULT LIVER, SIGNAL = 2.9; EXPRESSED IN HELA, SIGNAL = 2.9; EXPRESSED IN BRAIN, SIGNAL = 3.2; NT HIT: U29185.1, EVALUE 5.00e-07; EST_HUMAN HIT: AA442430.1, EVALUE 8.00e-07; SWISSPROT HIT: P17334, EVALUE 9.40e-01
cacaacctgtaggtccctggcagaattgcaatagatcattagtaattctttgaattctgaaaatactagatggaggtttaacaacagcaaaaaattccagtgagctgagacctatttttaatttgcctcttactggaaattgaaagatataaaagacccctaaagacatatttaaaccaaaatggtttgggtaccctgtacctaggctggtggtccccaaaatagtccctggaccagcagcatcagcatcatctgagtacttgttagaaatgcaaattctgggccccatcacaaacctgctgaattggaaactacagagtggggtagaacagcaattcctctttaaacaagccttgcaagtgattctgatgcctgctaatgtttgagaactactggcctgtgcaaatgtcccaacatattacaagacacatttggaaaatattttacgtaacactccccattcagaaagtcatgctatacgttaactcatattaaaggctccgagtagatctgcag

SEQ ID NO: 357 - DNA, 555 bp, Homo sapiens
  MAP TO AL160058.2; EXPRESSED IN HELA, SIGNAL = 0.97; EXPRESSED IN FETAL LIVER, SIGNAL = 0.99; EXPRESSED IN LUNG, SIGNAL =   1; EXPRESSED IN ADULT LIVER, SIGNAL = 1.1; EXPRESSED IN BRAIN, SIGNAL =   1; EXPRESSED IN BONE MARROW, SIGNAL = 0.96; EXPRESSED IN PLACENTA, SIGNAL = 1.2; EXPRESSED IN HEART, SIGNAL = 1.1; NT HIT: AF226662.1, EVALUE 2.00e-84; EST_HUMAN HIT: BF745880.1, EVALUE 7.80e-01; SWISSPROT HIT: Q04650, EVALUE 1.00e-32
gtggatgtgaagggatcaggagcgggtcccggccaggtttggcatggtctacctgcccgggctgctcacccgccaacgtctgttgtggctacaggcagagcggtgagccccaagtctgtctgcgagggctgtcagcgggtcatcttggacaggtttctgctgcggctcaacgacagcttctggcatgagcagtgcgtgcagtgcgcctcctgcaaagagcccctggagaccacctgcttctaccgggacaagaagctgtactgcaagtatgactacgagaagtaagtggccgcacccccgcagcgctccccgcgcactggcatcagtgtgcgtcgaggactttgtcctcctttaccctagtccttttctggaaggcccaagagacacgcccagcgagcagaacttcccttcagcgcagtcgtgtacattgcccctcacgggaaggtggtagggcagagatccgcgcgggtgcgcgcagcagtggcccgagtcccgcagaagtgcgcgcaatggctgtcctccacggtctgctcgcctgctttctggtccttccag

SEQ ID NO: 358 - DNA, 590 bp, Homo sapiens
  MAP TO CHR22_102.0; EXPRESSED IN FETAL LIVER, SIGNAL = 0.92; EXPRESSED IN LUNG, SIGNAL = 1.1; EXPRESSED IN PLACENTA, SIGNAL = 0.98; EXPRESSED IN BONE MARROW, SIGNAL =   1; EXPRESSED IN BRAIN, SIGNAL =   1; EXPRESSED IN HELA, SIGNAL = 0.71; NT HIT: gi7656903, EVALUE 1.00e-42; EST_HUMAN HIT: BE772127.1, EVALUE 4.00e-46; SWISSPROT HIT: Q07960, EVALUE 2.00e-05
gctgtttcagggttattgggcgtggggtgtttctcggagcgcggcagcctgaagtcatcccccgtttccctcctcaggtacaagaagaacttgaaggccctctacgtggtgcaccccaccagcttcatcaaggtcctgtggaacatcttgaagcccctcatcaggtatgcgtcactctgggagaggacctcgctggggttggaggtttcacccctcagggtccatgggacggccttccctatccacgcatcatggagggcccgtctccagggtgcctgtgtatctggggctccctacccgccctggggtctgcggggggtcacaaggccagcccaggtcatggacaggagtgcagtgccggcctttggcacctgtggggtttgcacctggtgtttaaaagcccccctttgcctgagcccccacactgtgtgaccaccctcaggtgccgtgattttccagagggactcacagatgtcaggaaagctgttatcttcactgttgtggtctgttacagagacagggcacagatttaagtcagcaaaggtaaaaggcacacaaggctgagtccaggaggaccaagtgcaagttcc

SEQ ID NO: 359 - DNA, 500 bp, Homo sapiens
  MAP TO AC018715.3; EXPRESSED IN LUNG, SIGNAL =   2; EXPRESSED IN PLACENTA, SIGNAL = 2.2; EXPRESSED IN ADULT LIVER, SIGNAL = 2.1; EXPRESSED IN HELA, SIGNAL = 1.3; EXPRESSED IN FETAL LIVER, SIGNAL = 2.1; EXPRESSED IN HEART, SIGNAL = 1.8; EXPRESSED IN BONE MARROW, SIGNAL = 2.1; EXPRESSED IN BRAIN, SIGNAL =   2; EST_HUMAN HIT: AI700303.1, EVALUE 2.00e-07; NT HIT: AL163278.2, EVALUE 1.00e-16; SWISSPROT HIT: P33823, EVALUE 3.50e+00
caaactatggagggtggtggtttgttcacagtgccttctctgctaaaatttttgaatactgttatttggaaatgattactgctatgtccaaatgatacccccctgcaaattcatagttgaaacttaattagtaatatgatagtattaagaggtgaagccatttggaggtgattcaattatgagggcagaatcctcatgaatgggattaatgaccttaggaaagaagatccttggaagtgttagctccttcttccatgtcatgatgcagcaagagacaccgtctatgaagcagagaatgaggcttcaccagacactgaatctgctggtgttttaatcttgaaattcacagcctatacaactgtaagcaataaatttctgttgtttataaattacccagtctaagattttttttttaatatagtggcaggaatgaactaagatagaattcatgacctgaaactgtgaaactcctagaggaaaacacagggggaaagcttcat

SEQ ID NO: 360 - DNA, 579 bp, Homo sapiens
  MAP TO CHR21_4.0; EXPRESSED IN FETAL LIVER, SIGNAL = 1.9; EXPRESSED IN LUNG, SIGNAL = 1.3; EXPRESSED IN BONE MARROW, SIGNAL = 1.9; EXPRESSED IN HEART, SIGNAL = 1.5; EXPRESSED IN BRAIN, SIGNAL = 1.6; EXPRESSED IN HELA, SIGNAL = 4.3; EXPRESSED IN PLACENTA, SIGNAL = 1.1; EXPRESSED IN ADULT LIVER, SIGNAL = 1.5; EST_HUMAN HIT: BG720647.1, EVALUE 0.00e+00; NT HIT: AL163203.2, EVALUE 0.00e+00; SWISSPROT HIT: Q9JI71, EVALUE 6.40e-01
atggtggctgaggtttgttcaatgcccactgcctctactgtgaagaagccatttgatctcaggagcaagatgggcaagtggtgccaccaccgcttcccctgctgcagggggagcggcaagagcaacatgggcacttctggagaccacgacgactcctttatgaagatgctcaggagcaagatgggcaagtgttgccgccactgcttcccctgctgcagggggagcggcacgagcaacgtgggcacttctggagaccatgaaaactcctttatgaagatgctcaggagcaagatgggcaagtggtgctgtcactgcttcccctgctgcagggggagcggcaagagcaacgtgggcgcttggggagactacgaccacagcgccttcatggagccgaggtaccacatccgtcgagaagatctggacaagctccacagagctgcctggtggggtaaagtccccagaaaggatctcatcgtcatgctcagggacactgacatgaacaagagggacaaggaaaagaggtaaccgggcctgggatgggaggaggcaggacatggggggatgatggggacataccct

SEQ ID NO: 361 - DNA, 588 bp, Homo sapiens
  MAP TO CHR22_105.0; EXPRESSED IN BONE MARROW, SIGNAL = 6.1; EXPRESSED IN BRAIN, SIGNAL = 6.4; EXPRESSED IN LUNG, SIGNAL = 7.3; EXPRESSED IN HELA, SIGNAL = 3.8; EXPRESSED IN FETAL LIVER, SIGNAL = 6.3; EXPRESSED IN PLACENTA, SIGNAL = 7.6; EXPRESSED IN ADULT LIVER, SIGNAL =   7; EST_HUMAN HIT: BG470677.1, EVALUE 0.00e+00; NT HIT: AB003286.1, EVALUE 0.00e+00; SWISSPROT HIT: Q92523, EVALUE 2.00e-38
cacaaggacaccaacaccacaaagaggatgttgctcctgctcagtcccaggaccacaggcccaggtggggtgtgggcgggaaagctggcccagcactccagggagcttcaggggagcaagccaggaaaacaggccgtgctccatcatgagatggcccaagccctgcgtgtaggagggcagtgggacaaaggacacacccaacaacggtgctgacctcagcaaggaaaggagagctgactcctaggtacttggagaccaagtaaaggcagaagaggtgcctgtcgatccctgccccggtcatggccaggcggtacatattctggtgcttcttagcagccttctggaagagatctcgcaggtctgctttctgcggggcagaagtaaaggggtgaagagtagccctggccctccaggcagacaggaggcagagggggcacctcacccgacgactgtgacccccacatgggcagaggacacttactgtgtgggacccctccatcatggcctgcacaaaggctgtggactcgctggtacaggaacgcacagtctcagtccgtccctcccggaacattctggtcattgaggcct

SEQ ID NO: 362 - DNA, 528 bp, Homo sapiens
  MAP TO AL133543.2; EXPRESSED IN ADULT LIVER, SIGNAL = 1.1; EXPRESSED IN FETAL LIVER, SIGNAL = 0.73; EXPRESSED IN PLACENTA, SIGNAL = 0.91; EXPRESSED IN LUNG, SIGNAL = 0.88; EXPRESSED IN BONE MARROW, SIGNAL = 0.65; EXPRESSED IN BRAIN, SIGNAL = 0.67; EXPRESSED IN HELA, SIGNAL = 0.99; EST_HUMAN HIT: BE713297.1, EVALUE 1.00e-119; NT HIT: gi15300899, EVALUE 1.00e-127; SWISSPROT HIT: P15924, EVALUE 4.00e-33
ttttgaggcctagcaccttgatacctaggtattctctgatttttgtggccctaacttctttttacagtgaccacaactgaaatcactcatcatggaacctgccaagatgtcaaccataataaagtaattgaaaccaacagagaaaatgacaagcaagaaacatggatgctgatggagctgcagaagattcgcaggcagatagagcactgcgagggcaggatgactctcaaaaacctccctctagcagaccagggatcttctcaccacatcacagtgaaaattaacgagcttaaggtaggtatctgctagtattttgcctggttaccctgtatatttttatttacctgtaaatgaataaaaaaaatcctggtttaaatgtttgtaggcaaaaatattaactttcaagaaaacaggcttctggcaggatttccttatgtattatgtttccaaatttgtagacggttatcaggctgggggttaaactgttcgtttgtgtgttgttgaatcaggctaccgtccatctcaaaa

SEQ ID NO: 363 - DNA, 530 bp, Homo sapiens
  MAP TO AL139224.1; EXPRESSED IN BRAIN, SIGNAL = 0.76; EXPRESSED IN FETAL LIVER, SIGNAL = 1.1; EXPRESSED IN LUNG, SIGNAL =   1; EXPRESSED IN BONE MARROW, SIGNAL = 1.1; EXPRESSED IN ADULT LIVER, SIGNAL = 1.3; SWISSPROT HIT: O76743, EVALUE 1.70e+00; EST_HUMAN HIT: AJ346181.1, EVALUE 2.00e-32; NT HIT: gi13385435, EVALUE 2.00e-12
ctatggagagctgagcgaccaaggctgagagcgagatgccagtggttgtgggtccctagggacagtctcagccaggctgctttgactgcatggagataggctttgataatgggttgaacagtggccatggtggccacggtgctcctcagcaccctctgtctcaggattgggatgcaggatcaggaggtgatgggcggcattgggaaaaccatgatgcagagtagaggcatctttgatacattcatgacgatggggatgggctaacgatgctaaccatggttgcccacgacatctacatcttcccatcgatcccagtctatgtactgtaataaaacaaagtctttgagttaaaaaatggacacacaaacaaaaaatactgatgccatgaatgttcatgtacaagtttttgtgtgaacattaatttatacagaaattttcattagtgtactaatcaaggtattaatacagaagtagttgaatgtggtcagcatcatgcagtggatttttgttggttttgactgcccaacagt

SEQ ID NO: 364 - DNA, 534 bp, Homo sapiens
  MAP TO CHR22_81.0; EXPRESSED IN HELA, SIGNAL = 2.3; EXPRESSED IN BRAIN, SIGNAL = 1.3; EXPRESSED IN FETAL LIVER, SIGNAL = 1.1; EXPRESSED IN PLACENTA, SIGNAL = 1.1; EXPRESSED IN ADULT LIVER, SIGNAL =   1; SWISSPROT HIT: P52950, EVALUE 6.50e+00; EST_HUMAN HIT: AI351341.1, EVALUE 0.00e+00; NT HIT: AJ305226.1, EVALUE 0.00e+00
ttgaaaggttcccgaaagtgtgagggggctgatagcagatctgcagcttctccccccgtgcactaaagccaatcataattctttctacctggtttgtgtcatcctccattaggagaccccatcttcagaaccaatggaggaagaggaagatgacgacttggagctgtttggtggctatgatagtttccggagttataacagcagtgtgggcagtgagagcagctcctatctggaggagtcaagtgaagcagaaaatgaggatcgggaagcaggggaactgccgacctccccgctgcatttgctcagccctgggactcctcgctccttggatggcagtggttctgagccaggtgccttcagagtgtcccctgaggatggagaggagatagaagattatagaggaagaggggggtggatataggctatatgggcagagccatccagatgtaaaaggctattaactctgatttctaagggatcagatgtgtaaggacctgtaagggagacagaagcaccccaagtagccactgtgtt

SEQ ID NO: 365 - DNA, 589 bp, Homo sapiens
  MAP TO AL139144.1; EXPRESSED IN FETAL LIVER, SIGNAL = 1.1; EXPRESSED IN BONE MARROW, SIGNAL = 1.1; EXPRESSED IN BRAIN, SIGNAL = 1.2; EXPRESSED IN PLACENTA, SIGNAL = 1.3; EXPRESSED IN LUNG, SIGNAL = 1.3; EXPRESSED IN ADULT LIVER, SIGNAL = 1.3; SWISSPROT HIT: P08607, EVALUE 3.00e-06; EST_HUMAN HIT: AI655665.1, EVALUE 2.10e-01
tgagggagtgcacacttgagggttaggaggtcaggtgaggttgaaatacccctagaacacttgaggaccctgaaaaccctctgtgctgtccagacttgggtacccccctccctgctggggtgtagctttgccctttgagactggatgtcactggaagctccagcatcacctcccagccactgccccactctgtcagaccccttgctggccacctacctctgcaggaaggcagggggaagtcccacgtggcgctgttctcagagccagcgtggcaggtgagcacggcgtggccctccaggaagaagccaaggttgcagctgtagcggaccttgtcaccgaggttgaaggttgaaccctgctggatgccattgggcagcctccctgggttcccacatgtgtggctggggagaactgtgaggagaaacagagaaagagacgggtaccccgtgagctgggctggagccctgacaccgggcttcctagtagcaactccctaggccactcgggcttcctggaactcatttcttcttctgtgaacagcattgcccactgctgatctgcccgcttctcaaggctgtagattccctgg

SEQ ID NO: 366 - DNA, 517 bp, Homo sapiens
  MAP TO AC013718.3; EXPRESSED IN FETAL LIVER, SIGNAL = 1.3; EXPRESSED IN BONE MARROW, SIGNAL = 1.4; EXPRESSED IN BRAIN, SIGNAL = 1.2; EXPRESSED IN HEART, SIGNAL = 1.2; EXPRESSED IN LUNG, SIGNAL = 1.3; EXPRESSED IN HELA, SIGNAL = 0.66; EXPRESSED IN PLACENTA, SIGNAL = 1.6; EXPRESSED IN ADULT LIVER, SIGNAL = 1.4; NT HIT: AF312334.1, EVALUE 4.90e-01; EST_HUMAN HIT: AA939140.1, EVALUE 4.60e-02; SWISSPROT HIT: Q9NQT4, EVALUE 3.60e+00
ctgcctcttgctgtcctaccaagccagactctcagaattcggaagactgtgtgcttattataaacccttcagcgcttaatgatctgaaatgagctccacttcatgacctctgcaaggaggcctgtacagccctgcaaagaggcaatattcctgaaattagagaataaaaatgattgctgcagtggcaacgatctcaaatgacatttaggtgtgatttatacgcatcctcttttaaatatatgcagttacccagaagtacaacacgctgttgaatctggaaagaatcaacatgcctgggacatcttgccccacaaccaaagctgctggactggctaccgagggatctcccacaccctgtctagttcctgagcaatctgtgattctttcaggctcaactggcctgaaagaaaattaaggggcttatttacatggcccaaggaaacagagattcagtcttccccacatgttattatcacactgcacaaaggagccagaaaggcatgaacacagaagagca

SEQ ID NO: 367 - DNA, 579 bp, Homo sapiens
  MAP TO AC017072.4; EXPRESSED IN PLACENTA, SIGNAL =  19; EXPRESSED IN HELA, SIGNAL =  10; EXPRESSED IN FETAL LIVER, SIGNAL =  19; EXPRESSED IN LUNG, SIGNAL =  18; EXPRESSED IN HEART, SIGNAL =  14; EXPRESSED IN ADULT LIVER, SIGNAL =  18; EXPRESSED IN BONE MARROW, SIGNAL =  20; EXPRESSED IN BRAIN, SIGNAL =  17; EST_HUMAN HIT: AA737149.1, EVALUE 1.30e-02; NT HIT: AF129756.1, EVALUE 1.40e-01; SWISSPROT HIT: Q95120, EVALUE 1.10e+00
atggacggtaaccgaaacagacccagtcctctcacttcatggaactcggtctggtggaagagtcagacagtgaccaaatatatctcctcaaaaatggtaatcggtatatctagaaaacaaagacgagtaaagggacaggggggaggggggagatttcagttaggataatcaaggagagcctccctgggcaggtggcaattgatgacagacctggaaaaacagagagggagctgagaggctttcagaagaagagggcggtgagaaccgcaagtgcaggggccctgggaggggctttgcctgcagtattggaggaacagagaggggccagcgtggctggagcacagcgagccagcgggagagaggtgggaggagaggtcagagaggacggcagcggccagctcctgggagaccctgtagacgtttgaattttattctaagaatgatgaagatccgccacagggctggtttgcaggggatggattggttatctattttattggtttatctatttattggattggttatctattttaaaaagatcccctgaatgccagacacagtgggttgtgcctgtaatcc

SEQ ID NO: 368 - DNA, 571 bp, Homo sapiens
  MAP TO CHR22_192.0; EXPRESSED IN PLACENTA, SIGNAL = 1.6; EXPRESSED IN LUNG, SIGNAL = 1.4; EXPRESSED IN BONE MARROW, SIGNAL = 1.6; EXPRESSED IN ADULT LIVER, SIGNAL = 1.5; EXPRESSED IN BRAIN, SIGNAL = 1.3; EXPRESSED IN HELA, SIGNAL = 1.2; EXPRESSED IN FETAL LIVER, SIGNAL = 1.8; EST_HUMAN HIT: AI654903.1, EVALUE 9.00e-84; SWISSPROT HIT: Q01022, EVALUE 6.30e-01
ggaatagagggaaaggctgcaacctgtgctcagcccaacattttaaaccacgtctgtataaaattttagccagcactaaacaatgcatgaaaagttttatcaccattaaattgcattcactcaaatttgaaattcttctaaacaatgtttgttataaatttattataaactagttgtacttaaaaaacactacttgattaaaaagatgcttttaaattaattttcattctttctttcagttttgttctaggtgctgtctctcctgctgttgttgtcctttacacaatggtgtcgcaagaaaatggatatggtgttgaggaagacattccaaccttactaatggctgctagcagtatggatgacattctggctatcactggattcaatacatgcttgagcatagtcttctcctcgggtaaacaagaaaatataacaaccaccagatcattcatgaccttttttgttagttctttaaacagggtttctggctttgcttcttcatttaataaccaagactgttcaatttaacatctttttaatctccatagaaagctcattccagaccaaggaa

SEQ ID NO: 369 - DNA, 583 bp, Homo sapiens
  MAP TO CHR22_227.0; EXPRESSED IN LUNG, SIGNAL = 1.1; EXPRESSED IN BONE MARROW, SIGNAL =   2; EXPRESSED IN HELA, SIGNAL = 3.9; EXPRESSED IN BRAIN, SIGNAL = 1.9; EXPRESSED IN HEART, SIGNAL = 1.2; EXPRESSED IN FETAL LIVER, SIGNAL = 2.8; EXPRESSED IN PLACENTA, SIGNAL = 1.5; EXPRESSED IN ADULT LIVER, SIGNAL = 1.3; NT HIT: L43846.1, EVALUE 0.00e+00; EST_HUMAN HIT: AV763774.1, EVALUE 0.00e+00; SWISSPROT HIT: Q16974, EVALUE 2.50e+00
atcaatgcaaaagccattccctgtatttaacacgtaaatgaattagtctctttaactctcccaacgccctataaattatttgctccattttacatattaaacgctgtcacgaactgagctgctgtgtgaggccggggccggacttatctttctgaagcacagagaagcggttatacgcggaagtttgggagaactgggtaaggccgcacacatggaaattgccagtttcgtgggtcccaacgtcaatactgtgggcaaccttagaccggctcaaagcgcagctggggacggtgatgaagtgcagagcgtccacagccagcgacaagactgccaagcaactggcagcctgagtaacggagaaaacaacgaaaaaaacgcattcaccacctaccaacaagaaacaaaaaacacgaccaccccacagtcagtctactttttaggcgtgaataaggtcgggcagatcgcaactcccaggcatcccgcaaagtaggcgggtcaccttgagggcgacctttacccgctcaaaaattcgtctcacattagcagtgaggattcgggcgtcaccccgaatcgttattttcct

SEQ ID NO: 370 - DNA, 533 bp, Homo sapiens
  MAP TO CHR21_24.0; EXPRESSED IN FETAL LIVER, SIGNAL = 1.5; EXPRESSED IN HEART, SIGNAL = 1.3; EXPRESSED IN LUNG, SIGNAL = 0.87; EXPRESSED IN PLACENTA, SIGNAL = 0.74; EXPRESSED IN BONE MARROW, SIGNAL = 1.5; EXPRESSED IN ADULT LIVER, SIGNAL = 0.96; EXPRESSED IN HELA, SIGNAL = 3.6; EXPRESSED IN BRAIN, SIGNAL = 1.4; NT HIT: AL163227.2, EVALUE 0.00e+00; EST_HUMAN HIT: BG676900.1, EVALUE 1.00e-58; SWISSPROT HIT: P20758, EVALUE 2.90e+00
tgccctgaggttccatttaccgttggggcctaggaacaaaaaatgggtttgtgggccaggctcaggggccccctgctgtgtgcacactagggacttggtgccttgggtccaggcccataaaaccatttttggctactagacccctgggcaggtgatgggagggactcctgtgaaggtctctgacatgccctggagaaattttctccattgttttggtgattaacattcagcagtaccttacttatgcaaatttatacagctggcttgaatttctcttcagaaaatgggtttttctttctatcttaccatcaggttgcaaatgttctgaacttttatgctctgcttcctcttgaatgctttgccacttagagatttcttccgccagatacactaaatcatctatctcaagttcaaagttccacagatctctagggcagggacaaaatgccactagtctgtttgctaaagcataagaagaatgaccttcactcatctccatctgtgaccacctcagcctggacttcattgtccat

SEQ ID NO: 371 - DNA, 562 bp, Homo sapiens
  MAP TO AL109804.24; EXPRESSED IN BRAIN, SIGNAL = 0.85; EXPRESSED IN HELA, SIGNAL = 0.73; EXPRESSED IN BONE MARROW, SIGNAL = 0.75; EXPRESSED IN LUNG, SIGNAL = 0.46; SWISSPROT HIT: Q62230, EVALUE 8.00e-39; NT HIT: gi14771560, EVALUE 0.00e+00; EST_HUMAN HIT: AA417116.1, EVALUE 2.00e-01
aggtcacgggttgtatcagggtatccagggaatgcccttgtctgagggtgacaggcccacctctcgtctccacacagacccgcctctcactccagtcctgacagccttcctggagacccaggcgggacttgtgggcatccttcactgctctgtggtcagtgagcccctggccacactggtgctgtcacatgggggtcatatcctggcctccacctccggggacagtgatcacagcccacgcttcagtggtacctctggtcccaactccctgcgcctggagatccgagacctggaggaaactgacagtggggagtacaagtgctcagccaccaactcccttggaaatgcaacctccaccctggacttccatgccaatggtaagatgggcactggcagccagggagagtggagggagcctgaggaggagcctgctccagtctgttccttctagaagtctagtggactcaaccgcaggactgagctaactggctacgccacataaaagacaggggctgtgcagtgacccaacggcagagcttcctggaagtcaagggaaaaaggg

SEQ ID NO: 372 - DNA, 556 bp, Homo sapiens
  MAP TO CHR22_38.0; EXPRESSED IN PLACENTA, SIGNAL = 8.9; EXPRESSED IN ADULT LIVER, SIGNAL = 9.7; EXPRESSED IN FETAL LIVER, SIGNAL = 7.8; EXPRESSED IN LUNG, SIGNAL = 7.4; EXPRESSED IN BONE MARROW, SIGNAL = 7.3; EXPRESSED IN BRAIN, SIGNAL = 6.8; EXPRESSED IN HELA, SIGNAL = 5.6; EXPRESSED IN HEART, SIGNAL = 8.2; SWISSPROT HIT: P08547, EVALUE 6.00e-07; NT HIT: AJ271735.1, EVALUE 3.40e-02; EST_HUMAN HIT: AL597078.1, EVALUE 3.00e-03
ttgcttacagtccaagaatataccctgtatgattttaatcatttcaaatttattgaaacttataatctagtttgttcttgctttgtgtattttgaggttttgttagtagatccctacacctgtaggacttttatgttttcttgatgaattatcctcattatagttgtggcatacttccctttatccttgataatattccttgttctgaagcctattttgcctgatattaatgtagagtttcagctttcttatgatttgtgtttgcgtagtaggtatcttgttattccttttaacctttttgtcattgtagtgatagtaatttgtacacaacatatagttggaccttgctttttaatccagtctgatactggaccttttaagtagaatgttaggccatttatatttaatatagttataaaatggttgggttaaatctaccaatttttttatgtttactgtagagcttataagatgtatctgtaacttaccacagtctaccattaacccttttcttagaaaaaaaaaaaaaggtgcagctcactgccagcactcattt

SEQ ID NO: 373 - DNA, 588 bp, Homo sapiens
  MAP TO CHR22_230.0; EXPRESSED IN BONE MARROW, SIGNAL = 1.9; EXPRESSED IN HELA, SIGNAL = 3.7; EXPRESSED IN BRAIN, SIGNAL = 1.4; EXPRESSED IN HEART, SIGNAL = 1.3; EXPRESSED IN PLACENTA, SIGNAL = 0.99; EXPRESSED IN LUNG, SIGNAL = 0.98; EXPRESSED IN ADULT LIVER, SIGNAL = 1.1; EXPRESSED IN FETAL LIVER, SIGNAL = 1.6; SWISSPROT HIT: Q07869, EVALUE 5.00e-33; NT HIT: gi14779622, EVALUE 0.00e+00; EST_HUMAN HIT: BE019407.1, EVALUE 1.00e-110
ataaactcatcccgaagccccgttcacctccttcactcaaaggttgatgatgcacctgatagtggtgtgcaccctactaatgagacgaacgatggtgtcaccttcagcctgcacctgttaacgatggtgtcaccttcagcctgcacctgtttaaacatctacagtgtatggagtttgagtttttcatctctccatagtggaaagccgaatagtaatgaaggatgggtctgaactgcctgtgaattttcattcctggtttaaagtcctgggggagcccctcgtccagccctgtccgcgcagtcatgacctcactgctcatgcctgtgtttccccctccaaaccctagcgattcgttttggacgaatgccaagatctgagaaagcaaaactgaaagcagaaattcttacctgtgaacatgacatagaagattctgaaactgcagatctcaaatctctggccaagagaatctacgaggcctacttgaagaacttcaacatgaacaaggtcaaagcccgggtcatcctctcaggaaaggccagtaacaatccagtaggtgtttgcggctgttctgggttctcttggcaacat

SEQ ID NO: 374 - DNA, 593 bp, Homo sapiens
  MAP TO AL133268.4; EXPRESSED IN HELA, SIGNAL = 1.3; EXPRESSED IN BRAIN, SIGNAL = 1.8; EXPRESSED IN LUNG, SIGNAL = 2.1; EXPRESSED IN FETAL LIVER, SIGNAL = 1.5; EXPRESSED IN BONE MARROW, SIGNAL = 1.5; EXPRESSED IN ADULT LIVER, SIGNAL = 1.3; NT HIT: gi14747109, EVALUE 2.00e-59; EST_HUMAN HIT: AA369800.1, EVALUE 0.00e+00
ccttctttcgagtcctgctgcacttagcatctttccttttctcctcagcctgtgatatctgctcccagagactcttctccttggctctccgtgcctctgccatcatgggcagctgctcctcccagggacaggagggatccatactctgcttcctgggttgcccctgctagtggttccatgtctatttcagatccatagccgggtggatgtcatcagacacgtggtgaagaatggtctactctgggatgagttgtatataggattccaaacacggctccagcgggatcctgacatataccatcacctgtaagtctggaagcacctggcgcccccaggccattgctgaggacgctgtggatatgcataagcagtcagtgactgccgaagcccccagattctgactaatgtgtgagattccaccattagagcttcattcctttgttagtttgttaaaaagcaaatctggttaggaaggtataacattaaagagtcatttatacattcatgtgaatgtgttattgcacccttctggaagtgggttttggtataagaaagagaaatacattataagagggaaagggtatgtttgccaa

SEQ ID NO: 375 - DNA, 500 bp, Homo sapiens
  MAP TO CHR22_97.0; EXPRESSED IN FETAL LIVER, SIGNAL =   2; EXPRESSED IN HEART, SIGNAL = 1.9; EXPRESSED IN LUNG, SIGNAL = 2.2; EXPRESSED IN ADULT LIVER, SIGNAL = 2.2; EXPRESSED IN BONE MARROW, SIGNAL = 1.9; EXPRESSED IN BRAIN, SIGNAL = 1.8; EXPRESSED IN HELA, SIGNAL =   1; EST_HUMAN HIT: AW968232.1, EVALUE 1.00e-08; SWISSPROT HIT: P87000, EVALUE 4.60e+00; NT HIT: AF111168.2, EVALUE 8.00e-06
agtaacaaaacccggtgcagatagggccgagatattagaattattagactaggaatttaaaataactatgattaatatgtaagggctctaacagataatgtggacagcatgcagcatagatgggtgatgtaagcatgagacagaaattctaagaaggaatcaaaaagaaatgctagcgatcaaaaatattgtaacagaaatgaagaatgcctttggcaggctttctgggagactggacacagctgaggaaagaatctttgagctggaggacatctcaatagaaaccactaaaactgaaaagcaaagagaaaaaccgaatgacaacaacaataacaagaacagaatatccaagaactatgggacaactataaaaggtgtaacatatgtgtaatggaaattaacaaagaagagagacacagtaacaggagaaatatgtgaaacagtcactgataatttccccaaattagtgttatacactaaccacacatcaaggaagctca

SEQ ID NO: 376 - DNA, 505 bp, Homo sapiens
  MAP TO AL121993.2; EXPRESSED IN BRAIN, SIGNAL = 2.9; EXPRESSED IN LUNG, SIGNAL = 3.1; EXPRESSED IN ADULT LIVER, SIGNAL = 3.5; EXPRESSED IN BONE MARROW, SIGNAL = 2.6; EXPRESSED IN HEART, SIGNAL = 2.5; NT HIT: AJ310932.1, EVALUE 1.90e+00; EST_HUMAN HIT: BG219024.1, EVALUE 0.00e+00; SWISSPROT HIT: P22806, EVALUE 8.00e+00
tttcctctggtgacagggacttttttttttttaatcttgggaactcaaaatagaaccattttattaattttttcttaatgcaaaggtgcaagattctgttggaggaaaagtgaacacatcctctgttgcatctgctgccattaataatgcaaagtcatccctttttgggttccatcttctcccatcatcagtcaagtttggagtgcttaaggaaggacatacctatgccacagttgtaaagctcaagaatgttggagtggacttctgcaggtgaggccaagggaccaaaggtctgctcaggttacctttccctaccctgtgacttgtctttagtcacctccatcaataaatgtttattgaaccgaactgtaattactccttgaatcttcacattattcattcagtcatttacacactaactcattcattcattcatcaacaaatccgtgagtgtttatcgggttccaattatatggtagatacttccttgccctcctagtcatca

SEQ ID NO: 377 - DNA, 534 bp, Homo sapiens
  MAP TO AL136978.3; EXPRESSED IN BRAIN, SIGNAL = 0.88; EXPRESSED IN PLACENTA, SIGNAL = 1.3; EXPRESSED IN ADULT LIVER, SIGNAL = 1.5; EXPRESSED IN FETAL LIVER, SIGNAL =   1; EXPRESSED IN BONE MARROW, SIGNAL = 0.89; NT HIT: AL163249.2, EVALUE 1.00e-35; EST_HUMAN HIT: BE831174.1, EVALUE 4.00e-21; SWISSPROT HIT: P76655, EVALUE 9.90e-01
ggcttgtttactcagcctgcagctcttaacccctcacaagaggaggcacacgcaggtgagtggatgcaggggctgagatgagttcttctgggtgctggcaaaaatagaactccgtgcagtcccacagcagcatctggcgagggcgggggtgttatccatgacccctggaaccccagaggacatctgttacagtgtgcttttttagctttgccatccaaggatggcttaagtatttaatggctcagtgggacagccctctgtatcttgagctctggtttggcatccaggaggaataaggtcacaggaacgaattgaagatggtaaatgtggaggattttattgccgatgaaagtggctgtcattgggatggggagctggaaagggatggagtgggaagatggtctccccctggagtttgtccatccctggccaaactcttctccaaagtcccaccatcaagctgtccctttaaagccaagctgctcctctctaatgtccagctgctgcttctctccttctctcccactccagtgc

SEQ ID NO: 378 - DNA, 571 bp, Homo sapiens
  MAP TO CHR22_103.0; EXPRESSED IN HELA, SIGNAL = 1.3; EXPRESSED IN BONE MARROW, SIGNAL = 0.93; EXPRESSED IN PLACENTA, SIGNAL = 1.1; EXPRESSED IN BRAIN, SIGNAL = 0.79; EXPRESSED IN LUNG, SIGNAL = 1.1; EXPRESSED IN ADULT LIVER, SIGNAL = 1.2; NT HIT: gi15313304, EVALUE 3.50e-02; EST_HUMAN HIT: BF527119.1, EVALUE 5.10e-02; SWISSPROT HIT: Q92481, EVALUE 1.40e+00
ccatcaaaacacactgtgcctccacctccagggagccctcgtgggtgtgcctggtagagccaatctctcctctgggtcactgcatgccctgacatggctttgcactgacccctcccgcacttgctgcgtctgtctcccaagctcagcctcaagctccttacggacatgtctgtcgttccttgcataccacctggtccagcacaaagtaaggcatgaagcaggcgccccacagctgctaataaacacataagaaaacaggctcagggaggttaagcaactcctatccctgggttgcagttggggggagagatgagggttccagtgggctcaggacagggtcacccataccggctgcactgaatgctttagggtgggcaacactgtgtctgctcagacctgcaggccctcccctaatgaatgacagggctgggtcttgggggagccctcacagtagaaaacatgaatgagagataaaggcttggctttgaaattcaagttcctttgtattcttcatcaacttcttaccagagacatgactcagatgggctttcccagacctgatcgctttgat

SEQ ID NO: 379 - DNA, 561 bp, Homo sapiens
  MAP TO AL133499.1; EXPRESSED IN BRAIN, SIGNAL = 0.46; EXPRESSED IN FETAL LIVER, SIGNAL = 0.42; EXPRESSED IN BONE MARROW, SIGNAL = 0.44; EXPRESSED IN PLACENTA, SIGNAL = 0.46; EXPRESSED IN LUNG, SIGNAL = 0.45; EXPRESSED IN ADULT LIVER, SIGNAL = 0.53; NT HIT: AL163301.2, EVALUE 0.00e+00; SWISSPROT HIT: P32432, EVALUE 1.80e+00
tttgtgccagctttttaggcttacaaaatgttgtgtgtgtgtacataggaaaaatatggaagggtacgtacccactagtttgtgtcagcactggattctggcatatataatagatgaggagtttgctgttatgtatatgggaattctgagatacacaggagttttctgtgcacatctctctataacgcagctgtcccgtcacatcctgcatgtcagtacaggtagtgccgttctcttcgtaggactgtgacaccttatctttgatctttcacagttaaaaaaaaaaaagcttctttaaaattctgactttatataactaacgcaatgctcatgctacttcacttgttacaagaacatattattctgtcctatagatgtactgcagttatttaatggatcagctattgataagggggcccttttaatgtaactattttaaaaaatggaagtaataccagcacatggtaaaaaacacattgcagctcatgaatgggtataaattaagttggagatttcctctttctccctccccaccccatgccccgtttccagaggtaaaca

SEQ ID NO: 380 - DNA, 598 bp, Homo sapiens
  MAP TO AL135909.3; EXPRESSED IN BRAIN, SIGNAL =   1; EXPRESSED IN FETAL LIVER, SIGNAL = 0.92; EXPRESSED IN BONE MARROW, SIGNAL = 0.82; EXPRESSED IN PLACENTA, SIGNAL = 1.1; EXPRESSED IN LUNG, SIGNAL = 0.98; EXPRESSED IN ADULT LIVER, SIGNAL = 1.1; EST_HUMAN HIT: AW592650.1, EVALUE 5.40e-02; SWISSPROT HIT: P22987, EVALUE 2.60e+00
aatggttgccataggtctgctaatatatacctttaattagtcacaatctaccttgaaactattgtgtttcacatgtagtttaaggatctcaccctcacaactctatactcccaagtcctctttcccatcctttgtgctaaaattttcataagttttagaagtaaatattctaccagcatacactacatggctactacttttgctttagtcattccattatctttcagggcaattatcaacttaaaaatgtctttgatatttaccttccttttcagcatttctgtaatcttcatttctttgtgtacaactaagtttctaggatcttattcctcctgctaaagtacttatttaatttttcatcttgcacagatctgctgatgttaattctttcatctttcgtttgttcaaaacaatatttatttgactttattttaaaagatatagaattcttgctgattcaagcaatggataaaaaatatagaattctgagatgctagtttttttttctttcaatgctttaaagatgtcactcttgtcttctgggttgcataaattctaatgagacatctactataattcttatttgggttgccctcaa

SEQ ID NO: 381 - DNA, 503 bp, Homo sapiens
  MAP TO AC019287.3; EXPRESSED IN HEART, SIGNAL = 9.9; EXPRESSED IN HELA, SIGNAL = 4.7; EXPRESSED IN BRAIN, SIGNAL =  11; EXPRESSED IN PLACENTA, SIGNAL =  13; EXPRESSED IN ADULT LIVER, SIGNAL =  13; EXPRESSED IN FETAL LIVER, SIGNAL =  13; EXPRESSED IN BONE MARROW, SIGNAL =  14; EXPRESSED IN LUNG, SIGNAL =  13; NT HIT: U07561.1, EVALUE 8.00e-06; EST_HUMAN HIT: AA551030.1, EVALUE 3.00e-03
ccaaagtgctgtgattataggcatgaaccaccatgcctggtcaacagttttattttctacccagacttaatccatgttctgaggaagaataaagtccttgaaaatggccttgatatttactttcatttccttttgtctggtcagctcttctgggcagttcccatttgtttttctatccttctccactttccttgtgctcaagaggctaatctttatagacagcatgaaaggacccacttgtcctttagggtccatttggatatggctgttgagaagcacctacaagtatttggagaatgggtaagtgcaggatcatggtttttccttctctgaatttctccttgtcaggttgtcaaggcttagctccattgctctactgaaaatcatagctcctgacagacaattgcctcgttcttttttatagatacatattctgggttccagtaaccactccctcctcttgctcctttttgacaaagttttcctaatgttggtagccgtgg

SEQ ID NO: 382 - DNA, 582 bp, Homo sapiens
  MAP TO AC022619.3; EXPRESSED IN BRAIN, SIGNAL = 1.5; EXPRESSED IN HELA, SIGNAL = 0.79; EXPRESSED IN HEART, SIGNAL = 1.3; EXPRESSED IN PLACENTA, SIGNAL = 1.6; EXPRESSED IN ADULT LIVER, SIGNAL = 1.2; EXPRESSED IN FETAL LIVER, SIGNAL = 1.3; SWISSPROT HIT: Q9SAV1, EVALUE 1.50e+00; NT HIT: AB063285.1, EVALUE 4.00e-08; EST_HUMAN HIT: AW855724.1, EVALUE 9.00e-07
atgctaaggagtgcccacaggcccttgcagagccatcctcagccctctgggcctccctccctgagctcattggtgcccaaagtttcagaggggtctggggcagcaggcagctagtgtgtcagcactgcccttggcacatgcacacccagccaggtcatgacagtgcccaggcttgaccacaactttgctccacactggagtgggcaccaggaatgaggagaggccagggagtgggaacaggcacttccaagcctgccagggcaggagtcttcgcaggcccctgagagtgcaaggatgcctgggtctggaaccatggctgggtggctggagctgtgcatgggagtgtggggctcctgccccaccaactcagtagggtgcagggcttccacctgttcctggcccccactggcttcatggagtgcatggcccaggctgcagctcgcatcctcacagtggctgctccagatgggctgctgcagccatcaatgataaaaacagatcacagtgatatcagggcagtgatacacaaggtggggaatgtccagccactttgctaaatgtagcaatgtttgtggagggtct

SEQ ID NO: 383 - DNA, 562 bp, Homo sapiens
  MAP TO CHR22_180.0; EXPRESSED IN PLACENTA, SIGNAL = 0.75; EXPRESSED IN FETAL LIVER, SIGNAL = 0.57; EXPRESSED IN ADULT LIVER, SIGNAL = 0.96; EXPRESSED IN LUNG, SIGNAL = 0.63; EXPRESSED IN BONE MARROW, SIGNAL = 0.5; EXPRESSED IN BRAIN, SIGNAL = 0.57; EXPRESSED IN HELA, SIGNAL = 0.6; SWISSPROT HIT: P08548, EVALUE 1.00e-07; NT HIT: AF003528.1, EVALUE 9.00e-03; EST_HUMAN HIT: AI887808.1, EVALUE 3.00e-06
ttgttagcatggggcttacccaaggagggcaagcttggtttaacatctgaaaatcagtcaatgtaattcaccatcttaaaagactaaataaggaaaacattagatagaagaaataagacgtggtgtccaacagatgagtaggatgattatagttaatattaattgattatacgtttcaaaatagctagaagggagtaatgtgaatgttcctagtgtaaagataaatatccatccattgcaattgcaattaccctgatttgattatgtaaatatatcaaattatcacgtgtaccttgaaaatatgcacagctattatttatcaattaattaattagttaaaaatattttcaaagaacaataaaatcctctcaatagatacagaaaagacatttgaccaaatccaacatccattcctgattctgcttttttaaactcagcaaactagaaatagaagattactttctcaacctgaaaagcggcatctaaggaaaacccacggttaatatcatagtcaatgatgaaaagctaaatgcttcctccttcctccccaaatcaaaaatga

SEQ ID NO: 384 - DNA, 583 bp, Homo sapiens
  MAP TO AL133547.3; EXPRESSED IN BONE MARROW, SIGNAL = 5.3; EXPRESSED IN BRAIN, SIGNAL = 4.7; EXPRESSED IN HELA, SIGNAL = 1.6; EXPRESSED IN FETAL LIVER, SIGNAL = 5.3; EXPRESSED IN LUNG, SIGNAL =   6; EXPRESSED IN PLACENTA, SIGNAL = 5.6; EXPRESSED IN HEART, SIGNAL = 4.5; EXPRESSED IN ADULT LIVER, SIGNAL = 5.9; NT HIT: AF219927.1, EVALUE 4.00e-17; EST_HUMAN HIT: AI375641.1, EVALUE 1.00e-33; SWISSPROT HIT: P11260, EVALUE 3.00e-06
ttggggaaattttcatggacaatatcctcagatgtgttttccatcttggttgctctctttccctctctttcagagaaaccaaagagttgtagatttggtctttctatgtaatctcatatttctcagagcttctgtttattctttttaatttttaattttctttttctgactaagtctatttgaagaaccagtctttgagctctgagatttatttcctcagcttggtcaattcttctgttaatacttccaattatattatgaagttcttcttatagtgagtttttcagctctattagattagtttggttgtttcttaaaatggctattttatttttcagcttttgtttcattttattggattcttggtatttcttggattcgggtttcactttgtcctgaatcttgattatcttcactgctatccagacttttaattctatgtctataatttcaatcattttatcctggttaagaacaactgctgggtagctagtgtggtcatttggaggtaagaagacactgtggctttttgagttgccaaggttcttttgctgaccctttatcatctgtgtgggctgatgtt

SEQ ID NO: 385 - DNA, 596 bp, Homo sapiens
  MAP TO AL137855.1; EXPRESSED IN FETAL LIVER, SIGNAL = 0.48; EXPRESSED IN ADULT LIVER, SIGNAL = 0.52; EXPRESSED IN BONE MARROW, SIGNAL = 0.46; EXPRESSED IN BRAIN, SIGNAL = 0.44; NT HIT: AL116209.1, EVALUE 5.70e-01; EST_HUMAN HIT: AL043000.2, EVALUE 3.30e+00; SWISSPROT HIT: P15618, EVALUE 4.40e+00
tcgttcctgcatgatttcagaattgttaaacatagagataggaaaataggtatgtcatggttcatagtgttattattgttatcgctttcccaagttgagggaaactagcccatggctagtaaatgatgggtcgggaaccacacccgggtttgtattaggccacagcccttgtacttgaccactgtactatgctgtctctcctggcaccgagtttacatttctttgactgcacctagcactttctaccttgtatcagttacttggctaacttgtacttgggtagtcttacagtagtggatagcttgcttgcattcattcatctgtgtattgattccttcatcatttaatgagcagcacctatgtggcagacactgtgccacataggtggcactaaggagtgggggatagtcaccctccagaattccagggagatggggcagtaggagaattaagggaagcaggcaagcttggtagagctgctccccttcttctttcttgaccagcaggaggctgggctgcattctcagagaggtctgctcatggcagaagttcttaggatgggagctcagacaaagagaaagaataggcctcctggg

SEQ ID NO: 386 - DNA, 588 bp, Homo sapiens
  MAP TO AC013648.3; EXPRESSED IN FETAL LIVER, SIGNAL = 1.6; EXPRESSED IN LUNG, SIGNAL = 1.4; EXPRESSED IN PLACENTA, SIGNAL = 1.6; EXPRESSED IN ADULT LIVER, SIGNAL = 1.4; EXPRESSED IN HELA, SIGNAL = 1.2; EXPRESSED IN HEART, SIGNAL = 1.2; EXPRESSED IN BONE MARROW, SIGNAL = 1.7; EXPRESSED IN BRAIN, SIGNAL = 1.6; NT HIT: AF060568.1, EVALUE 3.60e-02; SWISSPROT HIT: P51780, EVALUE 1.90e+00
agctgtgggccaagtgacccagggaccctcctctgcccccagccctgctaggtagttgccccagctccacacctactggctgggtccccttgggtaagtggctcccctcccccagcctcagttttcacatatgttacccaccttggggattgagcggcagggtctgggcagagcaggaagggaaactgaggccagagagtggcttacctgccattgcccttggcttagcggtgggcaggctctggccagattcctgtccctttccttggcaccaccccgtcccacgaatttgttgtgggtctggtgtggctggagctccaggcagctccagaggggctggggtggccccagctggtggtccctcagggttgtggggtgcactggggagccctggcagggccacgtggagggagtgggagggggcaggtgggcaaggagtggagggtttggcagccatctgggaggcagagcggtggggctggccaagttctgtctgtgcaggttgggggtgcgtccaggtgggagcagcaggggccctgtcaggtggtggggcagtgtctgaatgcaaaggtgagtgagatgggccca

SEQ ID NO: 387 - DNA, 530 bp, Homo sapiens
  MAP TO AL121830.11; EXPRESSED IN HEART, SIGNAL = 1.4; EXPRESSED IN BRAIN, SIGNAL = 1.3; EXPRESSED IN PLACENTA, SIGNAL = 1.1; EXPRESSED IN ADULT LIVER, SIGNAL = 1.2; EXPRESSED IN HELA, SIGNAL = 0.59; EXPRESSED IN FETAL LIVER, SIGNAL = 1.1; EXPRESSED IN BONE MARROW, SIGNAL = 1.1; EXPRESSED IN LUNG, SIGNAL = 1.1; EST_HUMAN HIT: AA393627.1, EVALUE 1.00e-114; NT HIT: gi15304835, EVALUE 6.00e-90; SWISSPROT HIT: P47043, EVALUE 1.30e+00
catgtcaggtttcgttggtgatggaaagtcatttgaatgttttagaaaaagagcaatataataaggtttaattctggggaaagcagtacagacacttggcagagcaaagaaataaagctaactggggttctttgttattttttttttatttctttttggcctttttcatttttccagcgggtaaactggaaacagtgaaatgggcgttcacctggccgctgagtttcgtcttatacttcactgtacccaactgcaacaagccgcgctgggagaaatggttcatggtgacgtttgcttcctccacgctgtggatcgcagccttctcctacatgatggtgtggatggtgagtgcaatcgggaccccatggcactgttaaatctctttagagaataaagaagggaataagagtcagggtttcagccgataactgtactagtcagctattgctacaataagctgcacaacgaaccactcctaaacttagtagtttagaattgcaggcatcgattctcctgctcacacgtcttca

SEQ ID NO: 388 - DNA, 523 bp, Homo sapiens
  MAP TO CHR22_133.0; EXPRESSED IN BRAIN, SIGNAL = 0.4; EXPRESSED IN PLACENTA, SIGNAL = 0.56; EXPRESSED IN FETAL LIVER, SIGNAL = 0.41; EXPRESSED IN LUNG, SIGNAL = 0.46; EST_HUMAN HIT: BE162314.1, EVALUE 1.00e-116; SWISSPROT HIT: P75175, EVALUE 4.80e+00
cacacattcacctcctgacgtggactgttggctttcatctgcctagagagcattcccattgccattctcctagaaatagaccgggctcaccttggctgcagaaagtggttagttacgtggtccagggctgaccaatcacagcatccaatacctctgatgacagtgattggtccgtgaggcaagcacatgacccaagcagagccaatgagagccttatccgtgagatgggtatttgaacctggcagcacaaactctttttccattgaggtttgtagggagggtaccagacacattagagaaggtgtgtctggagtaggagacagttaaggccactgtgatgagttgaggaaagaacagataaagggagaaacatgaaaacttttcctttgaatgtttgaactattcggtatccaaactaatgttgaaaaccaattaatctctcctttccccattaagcgtgtttaccttgggtgtctgtcattccatccaagcaagtcccaactcactcgtcccgtacctgatt

SEQ ID NO: 389 - DNA, 523 bp, Homo sapiens
  MAP TO CHR22_105.0; EXPRESSED IN HELA, SIGNAL =  27; EXPRESSED IN FETAL LIVER, SIGNAL = 1.7; EXPRESSED IN HEART, SIGNAL = 1.8; EXPRESSED IN ADULT LIVER, SIGNAL = 2.6; EXPRESSED IN BONE MARROW, SIGNAL = 1.6; EXPRESSED IN LUNG, SIGNAL = 2.4; EXPRESSED IN BRAIN, SIGNAL = 1.3; SWISSPROT HIT: Q9Y259, EVALUE 3.00e-21; NT HIT: AB029885.1, EVALUE 0.00e+00; EST_HUMAN HIT: AW968362.1, EVALUE 1.00e-112
tcaagtggagggctggatagagcccccgacacatccgctggcatggaggttcagctcaggagtacaggagccctgaggaggctcctgactcaccgctccatggtcccaaacagccagtggggctccttggtgaaaggcatctccatgccatgaaattgcgccatcttcgtggcaatggctgctgacaacactggctctcgaagctcttgagttttcaatggccgactctgcacccaggaagctatcagggtggtgatggggctggggcaggagtgggaagggctggggcaatgaggggaagtcagggttttgggggaaattccctacttggggtgagggatgtggaggcagacattgggcactggggtagggttagggggtggaggtgccttggggaggagagggtaggactgggcccgtactgggatgtactgttccagccggccctctgggaagactccgtacagctggggccccagcgaccgctccgcaagtatggcgaacatcacgctttctagcacca

SEQ ID NO: 390 - DNA, 597 bp, Homo sapiens
  MAP TO AC018432.4; EXPRESSED IN BRAIN, SIGNAL = 0.37; EXPRESSED IN FETAL LIVER, SIGNAL = 0.46; EXPRESSED IN PLACENTA, SIGNAL = 0.39; SWISSPROT HIT: P06784, EVALUE 1.00e-01; NT HIT: AE005146.1, EVALUE 8.90e+00; EST_HUMAN HIT: AA429772.1, EVALUE 1.00e-115
ggccggttttgttttctttcagaatagaagttgatatcgtcatgatgaggttttgatgctgatttatgtttgctttggaaacaatccaatctttctgactcataatcatacactctcttctttctgtcacgtttccctttgctgtgtgtacaactgtaatcgtggtcccaatgactgctgttcttcctaaataaatcagatctggccttctttctttcttggctttctgggtgcctgtgagacttgccttggttttttgcaagatgtgatttaatatttgattcagttaagggagctgaagagtaacttgttctgctcttggtagtccatgaaatcttctcttcactgaatgatacactagatgacctagactgaatttccgcagtatttgatgaactatgacacaaccagtcaggagatttcattttggaagatgatctatatttcctgcttttgtgggacttacaggaaggtggtgtaataattaaggtttcctttctgcactctctagtacaatgggaacctgaatcttcactgtaaaatgatttcaaatcagtcgtgattttgtagacattttccaaaggaatgcctgtctgt

SEQ ID NO: 391 - DNA, 593 bp, Homo sapiens
  MAP TO CHR22_197.0; EXPRESSED IN BONE MARROW, SIGNAL = 2.7; EXPRESSED IN BRAIN, SIGNAL = 2.2; EXPRESSED IN HELA, SIGNAL = 2.7; EXPRESSED IN LUNG, SIGNAL = 2.9; EXPRESSED IN FETAL LIVER, SIGNAL = 2.5; EXPRESSED IN PLACENTA, SIGNAL = 3.9; EXPRESSED IN ADULT LIVER, SIGNAL = 2.9; NT HIT: L11910.1, EVALUE 4.00e-08; EST_HUMAN HIT: AW898793.1, EVALUE 9.00e-07
cttcctcctaccccaagctcctgaaaaccactgatctactttccatctctacaaatttgccagttgtgaacacttcatataaatcaagttatacaatgtgtggtcttttgtgtctagcttctttcacctagaacgctgtttacaaggttcacctaccttttagcatgtattaatcagatacattaatgtattaagatcacttgttttaacccttatgttcatatggctttatccactttgctaacaaaacagcaagggaaaaattcaaaggtgatgttgagtacatgtaataatctttcaaaaatatttttcttatacaaggatccataattacagcgagaaaattattacaaaatagtaacagtaaaaccagtctaatctaggtctactttatccttaacattcagattagtttaatcttttgaataacatacaatcttgctaggacatagctaattacattaaagactacgatatgcagaaagcttaacatttataatggacaattccgtatcacagcaatcccataattttcattagcagtaacaatttctatttattagcagtaacaatcttctgcgtgattcctgaca

SEQ ID NO: 392 - DNA, 521 bp, Homo sapiens
  MAP TO AC018735.5; EXPRESSED IN BONE MARROW, SIGNAL =   1; EXPRESSED IN BRAIN, SIGNAL = 0.95; EXPRESSED IN LUNG, SIGNAL = 0.83; EXPRESSED IN FETAL LIVER, SIGNAL = 0.93; EXPRESSED IN PLACENTA, SIGNAL = 0.9; EXPRESSED IN ADULT LIVER, SIGNAL = 0.85; SWISSPROT HIT: O05514, EVALUE 3.70e+00; NT HIT: AL163209.2, EVALUE 3.00e-08; EST_HUMAN HIT: AA035369.1, EVALUE 2.00e-13
tcatgctcactacctggctgaggggatcattcataccctaaacctcagcatcacgcatatgcccatgtaacaaacttgcacatgtatcccatgaacctaaaatgaaagttgaaataaataagtaaataaataaatacataagtaatctaaatcagcccacttcacacctgggggtgacagagtagtctttctgatgagggtttttttccccccaattatatctttgttgttggtttttcttctgacataactaaaagtcaagggataatgtttagccccgcattcctgaggagaagctttgcttgcagaatgataactgactttactcttcttggtggtgtttatcacacccttcttcaaaaaaccttccaggtattcatgccttactagtaaatcttgaggacaaagacaatgctcatcttgttcaggggtattgttactaacagttactaaagataaatttatgtcttagcatatagatggatacattgcaacaactacgtgacgaaagcaaggaggaa

SEQ ID NO: 393 - DNA, 574 bp, Homo sapiens
  MAP TO AC020588.4; EXPRESSED IN FETAL LIVER, SIGNAL = 0.45; EXPRESSED IN BRAIN, SIGNAL = 0.32; NT HIT: gi13194196, EVALUE 2.00e-46; EST_HUMAN HIT: AU185749.1, EVALUE 4.00e-46; SWISSPROT HIT: P33173, EVALUE 4.00e-06
ttgcaggggattcttagtcgtgtttatttattcaagcatgtattacagggagctgattttccctcatgtgctaactagaaataacctggaaggcataagcctttgggagcattcgtcaaatttaaaaatcttgtttggagataaataagcagattatacatttttgagatttttgtttttgttttgtgaattgttcatatgtagttttggcttaaaatatcttttctcttattctctctctctcaggtcaagatattgttttcaagtgccttggagagaatatcctgcagaatgcttttgatggctacaatgcatgtatctttgcctatggacagactggtaatgttaaataacatgaaatcacataaacaaccatcaatgaaagaaaatagaaccatgtttattttactgagtaacattgctgatttattccttgttgtttttgctttcagaaagtactgtagatgttgaaagtagtcagtaacattattttaaaatgagtgtaataaaattaggattgggatcttttatctttactgatttttctcacaaggcactggcagcattgtttttc

SEQ ID NO: 394 - DNA, 569 bp, Homo sapiens
  MAP TO CHR21_28.0; EXPRESSED IN LUNG, SIGNAL = 1.1; EXPRESSED IN FETAL LIVER, SIGNAL =   2; EXPRESSED IN PLACENTA, SIGNAL =   1; EXPRESSED IN ADULT LIVER, SIGNAL = 1.2; EXPRESSED IN BONE MARROW, SIGNAL = 2.1; EXPRESSED IN BRAIN, SIGNAL = 1.9; EXPRESSED IN HELA, SIGNAL = 4.4; EXPRESSED IN HEART, SIGNAL = 1.2; SWISSPROT HIT: P36096, EVALUE 4.20e+00
atgtcagaaatggccctgagctagattaccttcagaagagcttgtcaactcttggaactggctagggtacaattgagccatttgtgctgtctgtgttctatggattgctcttttctgcccagttaactcctctcaggttgagcttcctccctatggtaacagctccttgttaactttatttgtgatctgatttggttaaggcaccttcataaaggatcttacataccttctggaactataaaaggctttttgcctggcaaattctttctggaacaaagactttttgtctttctaatcttggcaagtactcttctggcttcagttttattctgagttgtgtatttacacttgtacctttggctgttgatggacctttcttctctgtttctggacattttctgtgattaataagaaaaacaatggaaccccaaaatttcaaagcatgcaaaaaaaatttctcttctggtaccccagcccagacattatagttctctctcatgaatgtttttaaatcaatgggagaagtacactacaactgatttagacattcaatggctgtcctggagatc

SEQ ID NO: 395 - DNA, 539 bp, Homo sapiens
  MAP TO AL139227.1; EXPRESSED IN HELA, SIGNAL = 3.9; EXPRESSED IN BRAIN, SIGNAL = 1.5; EXPRESSED IN FETAL LIVER, SIGNAL = 1.6; EXPRESSED IN LUNG, SIGNAL = 1.5; EXPRESSED IN PLACENTA, SIGNAL = 1.3; NT HIT: gi4758017, EVALUE 0.00e+00; EST_HUMAN HIT: BG823822.1, EVALUE 0.00e+00; SWISSPROT HIT: Q99439, EVALUE 2.00e-73
gaagcaggagcaaaacttcgactagaacaccatgaaggccggccagtgcgtcatcgggctgcagatgggcaccaacaaatgtgcaagccagtcgggtatgaccatgtacggcacaaggaggcatctctacagccccaagaaccatatcctgcccccgtggaccactcgaccatcagcctccagatgggtacaaacaagtgcgccagccacatgggcatgacggctccctggacccagctgcacatctatgacaccaagctgggcaccaacaagtatgacaactcctccgtgtccctgcagatgggctacctgcagggtgctaaccagagcagccaggtctttggcctgggccggcagatatacaattccaactactgcccacaaggcccagtggccaacagggctccctcgggcaccaacgactgcccaggcccagggaaggcccctgaatatcccccttactaccaggaggaggccagctactaaggctcccagcacgctctctccccacatcgtctccctgtctgggttttggtgtt

SEQ ID NO: 396 - DNA, 500 bp, Homo sapiens
  MAP TO AB017651.1; EXPRESSED IN FETAL LIVER, SIGNAL = 0.78; EXPRESSED IN BONE MARROW, SIGNAL = 0.86; EXPRESSED IN PLACENTA, SIGNAL = 1.1; EXPRESSED IN ADULT LIVER, SIGNAL = 0.88; EXPRESSED IN BRAIN, SIGNAL = 0.88; EXPRESSED IN LUNG, SIGNAL = 0.93; NT HIT: Z69345.1, EVALUE 1.20e-01; EST_HUMAN HIT: BI051144.1, EVALUE 7.00e-01; SWISSPROT HIT: Q05860, EVALUE 1.60e+00
ctggctcccttcatagatgcctggcctgtctgggcttcccttctctcaaactgggctcacttactaaagtgacctttctcttgactaggcagctactttgatgacctcctcaaatgcaatgcaaaagctggactctcctccgcccccaagcactcccaggctcctgggcagggccatcaactccactccagccatccctccagactggcgcctgaaaaatagaatttctgcttcaggtaatacagctgcttctctctgaataatgcatgccgtgcaccacaccggacaaaggacaagcggttgagaaattggggagctttcatttgatttcattattttgcttttagacccaagcatttgctgccgtcaggcatttcaaagaggacaagacaacaaggtgttctgagacaagcagagaagatcagtcatccttggggactgaggggattcagcagagaaggctgggctggacagcccttcccagggacacaaggacctaa

SEQ ID NO: 397 - DNA, 526 bp, Homo sapiens
  MAP TO CHR22_150.0; EXPRESSED IN PLACENTA, SIGNAL = 1.5; EXPRESSED IN HELA, SIGNAL = 1.5; EXPRESSED IN BRAIN, SIGNAL = 1.5; EXPRESSED IN LUNG, SIGNAL =   2; EXPRESSED IN FETAL LIVER, SIGNAL = 1.1; EXPRESSED IN ADULT LIVER, SIGNAL = 1.8; EXPRESSED IN BONE MARROW, SIGNAL = 1.4; SWISSPROT HIT: Q03640, EVALUE 6.40e+00; NT HIT: U60822.1, EVALUE 4.00e-51; EST_HUMAN HIT: BG111003.1, EVALUE 2.00e-97
acttgttgaatgcctttgcccaaaatgctgattgtggtatgaacaatgaagtccaggctgaagtgatctcaggtggagatgaagaacttgttgggaactcgggtaaaggtcattcttgctatgctttagcaaagggattggcagcattttgcccctgccctagagatctgtggaactttgaacttgagaaagatgatttggggtatctggcagaagaagcttctaagcggcaaagtgttcaagaggaagcagagcataaaagttcaggaaatttgcagcctgacaatgtgatagaaaagaaaaagccattttctggggagaaattcaagctgcctacagaaatttgcctaatgaagagctgaatgttaaccaccaagacaatggggaaaatgtctccagggcatgtgagagaccttcacggctgcccctctcatcacaggacctgaggcctaggagagaaaaatggtttcctgggctgggcccagggtcccactgctctatgccaccttgggacatagtgccctgt

SEQ ID NO: 398 - DNA, 547 bp, Homo sapiens
  MAP TO AL135926.3; EXPRESSED IN HEART, SIGNAL = 1.6; EXPRESSED IN BONE MARROW, SIGNAL = 1.7; EXPRESSED IN BRAIN, SIGNAL = 1.8; EXPRESSED IN HELA, SIGNAL = 1.1; EXPRESSED IN FETAL LIVER, SIGNAL = 1.6; EXPRESSED IN LUNG, SIGNAL = 1.2; SWISSPROT HIT: P21240, EVALUE 8.80e+00; NT HIT: AL163248.2, EVALUE 9.00e-12; EST_HUMAN HIT: AU152688.1, EVALUE 5.00e-08
ttgccttcaggctatgtgtgtaaggtaaatatgaaacaaatgaattttgtgtttagacttgatgtctccttacatatatgcaaatattccaaaatcgagaaaaatccaaaatcagaaacacttttggtctcaagcattttgggcaagggatattcaaactgtcctaatacaaaaagaagaaagaaggaggaggaagaaggaagaagaagaaagaaggaagaagaaagcagaagaagatataaaaaatgtgataaagtaagtgtagaaaaatgataatttgggaggattattatgctgttctctctacttctgcatatgtttgaaatctcttataataaacattttaaacaaaagtatagagcaagattaagttactgagaaagcccaataccagagaggaagaacagagagtagcattgggacacacatgaaagaacatatgaaaagactgtgtgttcagggatgcagtaagaaatctagaagaaatatggccttgtttggtgactataaaagttgcagcaaaggagggggtgaagttgtctcctga

SEQ ID NO: 399 - DNA, 501 bp, Homo sapiens
  MAP TO CHR22_208.0; EXPRESSED IN BONE MARROW, SIGNAL = 5.2; EXPRESSED IN BRAIN, SIGNAL = 3.7; EXPRESSED IN PLACENTA, SIGNAL = 3.5; EXPRESSED IN ADULT LIVER, SIGNAL = 3.4; EXPRESSED IN HELA, SIGNAL = 7.4; EXPRESSED IN LUNG, SIGNAL = 3.6; EXPRESSED IN FETAL LIVER, SIGNAL = 4.1; EXPRESSED IN HEART, SIGNAL = 3.2; SWISSPROT HIT: P26694, EVALUE 1.00e-27
cgcattgtacccaaacagtgctcctgggctgcacccaaacagtgctcccgcattgtacccaaacagtgctcccggactacacccaaacagtgctcccggactgcaccctaacagcgctcccggactgcaccctaacagtgctcccggattacacccaaacagtgctcccggattgtacccaaacagtgctcctggactgcacccaaacagtgctcctggactgcacccaaacagtgctcccggactgcacccaaacagtgctcccggactgcacccaaacagtgatctcagactgcacccaaacagtgctccctgactgtacacaaacagtgctcccggactgcacccagacagtgctcccggactgcacccaaacagtgctcctgggctgcacccaaacagtgctctcggactgcacccaaacagtgctctcggactgcacctaaacagtgctcctggaccacaactgcttatcactatgctgagttgctttgggtgaca

SEQ ID NO: 400 - DNA, 543 bp, Homo sapiens
  MAP TO AL139022.1; EXPRESSED IN BRAIN, SIGNAL = 2.5; EXPRESSED IN HELA, SIGNAL = 1.7; EXPRESSED IN LUNG, SIGNAL =   2; SWISSPROT HIT: P52164, EVALUE 5.00e-15; NT HIT: gi14752291, EVALUE 1.00e-54; EST_HUMAN HIT: BI825681.1, EVALUE 0.00e+00
agtcacactttgtccccctgaataacttttattttacttatgcatgagctggatgcatcgagctactttggatgttcctgtcgcaagcgttgctcacccctttctccccctttagcagagcctaattctggagactcctaactgcccacctcgagaaatccttcccagtccactcgccagggacagtgctgacagcgtgtacttccaggctgtaccccacccaccttgtaccaagcaaaaggagtgacattcctaatgtgttctttctcccattcttctaggctgacaaacgggctcatcataatgcactggaacgaaaacgtagggaccacatcaaagacagctttcacagtttgcgggactcagtcccatcactccaaggagagaaggtgagtttcctgagaaagctgagtagctggccactactagcttggaacttgttgcagagcttagcagagcactcacctattgggaaggaaatgtagtcagagatattcaggtagcatggttgccttatttttgactgtttggaggatcactgca

SEQ ID NO: 401 - DNA, 589 bp, Homo sapiens
  MAP TO AL137178.3; EXPRESSED IN LUNG, SIGNAL = 1.1; EXPRESSED IN HELA, SIGNAL = 0.61; EXPRESSED IN FETAL LIVER, SIGNAL = 0.87; EXPRESSED IN PLACENTA, SIGNAL = 1.3; EXPRESSED IN BONE MARROW, SIGNAL = 0.96; EXPRESSED IN BRAIN, SIGNAL = 0.81; EXPRESSED IN ADULT LIVER, SIGNAL = 1.1; NT HIT: gi13643569, EVALUE 1.00e-106; EST_HUMAN HIT: AL601116.1, EVALUE 1.00e-106; SWISSPROT HIT: P22003, EVALUE 6.00e-33
tggtgtcaggagtagggagcagctctggaatgtaggagaaaattttcagatcgattacggttacctttcaatatctctacctggctctaaatgttactacattgcccccaaaaaaataatttgtttgatagatcacatgagttatcaatggcttttactaaaattttacatatatttgccaggataataagttaaataaaaagattatacctatttgtgtattccttgatgatttgatatatgctaatcttaattgtttcattttcaaatcggttgttgctccggtccttgtatatccggaattcagctgctgtcactgcctctccatgaggaatttgggtaagatcaaatcgaaattctttgtaatgccttcgctggtgagaaaaatccttgtctctttcaactgaaaaaataaagggggttgagggggaaaaaagttagtcttttataaaatatggaaattaatgataaattctccagctttgaaagaaaacaaacaagcaggatagtataaaactggaaaaaccctaaaaccacaaactgaaacgtgtttccagttaaaggaaattccacaaaccaacagccttta

SEQ ID NO: 402 - DNA, 599 bp, Homo sapiens
  MAP TO AC012661.4; EXPRESSED IN HELA, SIGNAL = 0.82; EXPRESSED IN FETAL LIVER, SIGNAL = 1.2; EXPRESSED IN BRAIN, SIGNAL = 1.2; EXPRESSED IN ADULT LIVER, SIGNAL = 0.98; EXPRESSED IN BONE MARROW, SIGNAL =   1; EXPRESSED IN LUNG, SIGNAL =   1; EXPRESSED IN PLACENTA, SIGNAL = 1.1; EXPRESSED IN HEART, SIGNAL = 1.1; NT HIT: gi13937343, EVALUE 2.00e-03; EST_HUMAN HIT: AA077473.1, EVALUE 4.00e-18; SWISSPROT HIT: Q05793, EVALUE 3.00e-01
accccctgcggtattaggagtaataacattatgaattattaaacatcagtctcattaatgattatcaatggtaatattaattaatagtataacgttattagtcattaatgattattttaaatatatggttacgcatgattaaaattaattcttactattcatgtcatttttaataatatttgttattaatattaatgttaatcattgtcttattaccaacatcacttacaatggattaaataacactaattactgatatcgttattttattattaatagtgatattgctattaattattaattgtaatcattaatatttttaatccgcattaagttttactgtctccactgtagttattaatatcgatgattactattaattgttattctatttattaatattaataattaataaaactgttcccgatatccgtaggggagaggatatgactcccaatatcgcagaaaatgtacacccctctatgatgttactcctaatagccagggggtagaggatgacattatggaaaatatcgcagtgggtgtacatcccttcggtcatcttgttcctaatatcctgggtgggagcggatgttacg

SEQ ID NO: 403 - DNA, 582 bp, Homo sapiens
  MAP TO AL138478.1; EXPRESSED IN ADULT LIVER, SIGNAL = 3.5; EXPRESSED IN PLACENTA, SIGNAL = 2.5; EXPRESSED IN LUNG, SIGNAL = 3.1; EXPRESSED IN FETAL LIVER, SIGNAL = 2.5; EXPRESSED IN BONE MARROW, SIGNAL = 2.2; EXPRESSED IN BRAIN, SIGNAL = 2.4; EST_HUMAN HIT: AI085236.1, EVALUE 1.00e-104; SWISSPROT HIT: P28976, EVALUE 4.30e+00
acttggtgttgcttggaaggcatccatacctgcattttgcattcttcgtatgtaatcatattgccaaagacaaactatttcatcatttattgtaaataacacttttccccagacctaccataaagtttctgtgatgtattgtcttccagttgcaataaaaattactgagttgcatcaattgaagaaaaacaccacgtagtgttatgtgtgctgcgcctccctgtgcagatgctggtccacaacgtcatttctgttccttacctgcggtcaggcgtgtgtgcagtttttgcagtctggtttcggggttctcagctgcatttattgtgcccatcctcacacgtgcgtaggcttgggtgggcatcacacactgctctgcaaacacaaatgcacattcggaagctgggcttacccgggatctcaagagaattccagctttggtgtagctggtggctggccagcctcccatcatgagccttaagacttgtggtttagacagagcttccctttcatttggaagttgtcaaacaataaactgcaattgtactttagtactggagcctgccagcctatcccagatcctga

SEQ ID NO: 404 - DNA, 588 bp, Homo sapiens
  MAP TO AL133476.4; EXPRESSED IN BRAIN, SIGNAL = 1.2; EXPRESSED IN HELA, SIGNAL = 0.72; EXPRESSED IN LUNG, SIGNAL = 1.9; EXPRESSED IN FETAL LIVER, SIGNAL = 1.6; EXPRESSED IN PLACENTA, SIGNAL = 1.8; EXPRESSED IN ADULT LIVER, SIGNAL =   2; SWISSPROT HIT: P08547, EVALUE 6.00e-14; NT HIT: U01882.1, EVALUE 5.00e-32; EST_HUMAN HIT: BE855720.1, EVALUE 6.00e-51
atttttgctttggttgcctgtgtgctgggattataatgagctcaaataactctacaggaaaaaacctaatagtccaatttaacaacggacaaaagatctgaatagatacttctcaaaagaagacatacagatggcaaacaggtatatgacaaggtgctcaacatcactgatcatcagagaaatgcaaatcaaaactacaatgaagccaggtatggtggctgatttcttattgctcaacgtccttttctttctagtttaaggactctcttcagcatttttttgtaggacaagtgtgatgttaatgaaactgctcaacttttgtttgtctggaaaaatctttctttttccttcatgtttgaaagatatttttactagatatactagtctaggtaaagttttttccccttcagcattttaaatatgtcatgccactctctcctgttagatatgagttctaaatttcttttcagagaattaatatgtcagtatattcagttatttgccttctacttttaaacttaacttcctcataaagcaacctttttcgattacctactccaccctgactcattctgatcacctgctcca

SEQ ID NO: 405 - DNA, 599 bp, Homo sapiens
  MAP TO AL136140.2; EXPRESSED IN BRAIN, SIGNAL = 2.2; EXPRESSED IN ADULT LIVER, SIGNAL = 2.1; EXPRESSED IN PLACENTA, SIGNAL = 2.2; EXPRESSED IN LUNG, SIGNAL =   2; EXPRESSED IN FETAL LIVER, SIGNAL = 2.2; EXPRESSED IN BONE MARROW, SIGNAL =   2; NT HIT: AF219980.1, EVALUE 3.70e-02; EST_HUMAN HIT: BI758279.1, EVALUE 3.00e-03
gcctagaggacagagcgatgattgaggtcttctcggcacggggatgaagagcactctctggcccactgtgtgcatgctcagggctcctctggactgacagctgcctggcacatagtagatgctccggaaaagcttgtggaggtgagcagaatgaaactggatttcatagtcccagtaccatttcatttatttggctgcactgctcccgtcaaaccaggtccctctgcccactttcccttgtccagcctctgtcaattccaacttccatccctttgctgaggctgtacctgctatctagagtactttttcctttcctccatgcaggcaaatcacaggcacattgcaaagatgaatgtagtgcctacctcctccgtgcctctggagttacaaagctttttcctaggcacctggggttaacacattgtcctttactacctgttatctgcttattagaaccaattttctccccccagttgcacaacaaacactgatgaacaaccctagaaacaaatgttatacatcactacatgctccttattcctccccgaggtccatggttctgtttcacagaaaaagcatgaggtttgacttcaggcagg

SEQ ID NO: 406 - DNA, 568 bp, Homo sapiens
  MAP TO CHR21_14.0; EXPRESSED IN PLACENTA, SIGNAL = 0.99; EXPRESSED IN BONE MARROW, SIGNAL = 1.3; EXPRESSED IN ADULT LIVER, SIGNAL = 1.2; EXPRESSED IN BRAIN, SIGNAL = 1.3; EXPRESSED IN LUNG, SIGNAL =   1; EXPRESSED IN HELA, SIGNAL = 2.8; EXPRESSED IN FETAL LIVER, SIGNAL = 1.4; SWISSPROT HIT: P28380, EVALUE 9.30e+00; NT HIT: AL163218.2, EVALUE 0.00e+00; EST_HUMAN HIT: BI858348.1, EVALUE 2.00e-88
tccctctatcagtcagagtcaattcagaaaacaaaatcacatcagttactttaccaatagaatttaatgtaaacaattgttaaccatgtacaaatttgttaattagcttataagaaagtccagactaaaactatagggtatcatggaggcaacaattgaaataatctaccattgttccctatggctagaagaacaaaaggaagatgttagaattactgaaatttagaagcatggaggaggggcccgagaaaatgaaacacaaaccttggagaagagggtgctggtgtgagtggtgatgaggctggtaaggctggtatagtaaatgttggaaaaactgcaacctggatttagttgcaaccgcagggaggaactgctgctgccagggtgaagaaacactgctatagtggaagctgcgggagcgagagaatgtaagcaagcctagaggaagaaaacaggaaggaggaagtcacttcctcccccagcctcagtctctcagtaccactttatcctggcagagtagaaagtggtttttcagatgctagtcctagcatcacaaagcaaagatgaa

SEQ ID NO: 407 - DNA, 563 bp, Homo sapiens
  MAP TO CHR22_115.0; EXPRESSED IN BRAIN, SIGNAL = 0.96; EXPRESSED IN PLACENTA, SIGNAL = 1.1; EXPRESSED IN HELA, SIGNAL = 0.56; EXPRESSED IN LUNG, SIGNAL = 1.1; EXPRESSED IN ADULT LIVER, SIGNAL = 1.3; EXPRESSED IN FETAL LIVER, SIGNAL = 0.87; EXPRESSED IN BONE MARROW, SIGNAL = 0.84; SWISSPROT HIT: O35276, EVALUE 1.90e-02; NT HIT: AB041736.1, EVALUE 1.00e-106; EST_HUMAN HIT: BG819730.1, EVALUE 7.00e-63
accctcagcttggggttaagacacatagcctggagcctgacacatacacacttaacaaattttgtattgcctgaaaaagttaatcaagggtttattgaatgcccattctctatttcacatgactctccctcttctctgccctccaagcctgaatctgagcaacagtgacatcttgaccatctacgatggcgacgaggtcatgccccacatcttggggcagtaccttgggaacagtggcccccagaaactgtactcctccacgccagacttaaccatccagttccattcggaccctgctggcctcatctttggaaagggccagggatttatcatgaactacataggtaggtgtctcatctggtcaatttattttttctttgtgtttagatacaggttaaggtggtttcctctaggttatttggcagttttgtactacagcgatttttcattgtattgtattgaaatgtactcatttcatttttaaaagcctgggctctctagtcatgaggaccagggtttgagccctagcacggtcatcgatgtctgtgtggctttgggaaagt

SEQ ID NO: 408 - DNA, 568 bp, Homo sapiens
  MAP TO AL160313.1; EXPRESSED IN FETAL LIVER, SIGNAL = 0.61; EXPRESSED IN BONE MARROW, SIGNAL = 0.68; EXPRESSED IN HELA, SIGNAL = 0.63; EXPRESSED IN BRAIN, SIGNAL = 0.63; EXPRESSED IN LUNG, SIGNAL = 0.69; EXPRESSED IN ADULT LIVER, SIGNAL = 0.72; EST_HUMAN HIT: AA367975.1, EVALUE 3.00e-03; SWISSPROT HIT: P31249, EVALUE 2.40e-02; NT HIT: Y18877.1, EVALUE 2.10e+00
gcctcagactcccacaagaggaaaacaaatagcggtggcaccaccaggtgtgcacagaagcaggggctccaccctcagagggaagatggggggcccaggggcttcaacaaagagctgtcgctcagtcttgagagagcttctgcaggccagggcgccatccccaggagagggcacagcacccacagaggtggtggcggaagtggcaagggcatcaggatgggggtgagacgctcgtgggggacagtggccccaaccccctcaacaaacccgggccacacgttgaccacgcccacgccagggccccctgctttcactgccccggggacaacacaaaggagcactgaccgggacagatgcctctccaccttggtaccccgacaagggtgcagctgctcggggtgggacgctgaggggtcgactccaggggactggggcagaagagcccccaacctctgaggaaatgatgacatcatctgtccgtccgtccgtccttcctgcttcaggaggggaaactgaggccccgagaaggcccaagtcacaaaactaatgaatggcaaagccaagagtc

SEQ ID NO: 409 - DNA, 580 bp, Homo sapiens
  MAP TO AL138788.1; EXPRESSED IN ADULT LIVER, SIGNAL =   1; EXPRESSED IN FETAL LIVER, SIGNAL =   1; EXPRESSED IN PLACENTA, SIGNAL = 1.1; EXPRESSED IN LUNG, SIGNAL = 0.99; EXPRESSED IN BONE MARROW, SIGNAL =   1; EXPRESSED IN HELA, SIGNAL = 0.74; EXPRESSED IN BRAIN, SIGNAL =   1; EST_HUMAN HIT: AW103198.1, EVALUE 1.00e-113; SWISSPROT HIT: P19352, EVALUE 9.00e-03
tttgttggcttttaggggactatactcctttgaaagctgcttattctagttcacattcattccacacttatttgtattactcttacttattctctacctctagataaagattgaactaaagcatgcccaacagaagttattagacagcacaaagatgtgctcttcactcacggcagagtacaagcactgtcagcagaaaatcaaggaactggagttggaagtacttaaacacactcagagcattaaatcacagaacaacctacaggaaaagctggttcaggagaaatctaaagttgctgatgcagaggaaaaggtaattatcctcatgcttaataaacagcatacactgaataccactactgaaatcttatttccctgaggattttaagaaataaatatgatgcagacttgatagaattctaagattttttttctctcccatgttttcttctgttttgatttcacctgttcctacaattttaggaattcttgtgtatttgtaaaaacttcatgggcttaaaaaggtcagttttattaaagcgataacatgaacttaaagaactgactgatcccatgtggc

SEQ ID NO: 410 - DNA, 551 bp, Homo sapiens
  MAP TO AC018704.5; EXPRESSED IN BONE MARROW, SIGNAL = 0.47; EXPRESSED IN BRAIN, SIGNAL = 0.56; EXPRESSED IN FETAL LIVER, SIGNAL = 0.56; EXPRESSED IN LUNG, SIGNAL = 0.47; EST_HUMAN HIT: AW071840.1, EVALUE 2.00e-01
tagccccataaacacaaccctcatatttctatcactgaattcagtgaagtggtgtggggggagtggtggtagggtgagcacaaaatacttacacagcgaaaacatactcctttcaagagaaaattccaaaaccacaggaattagcagtggatttcagataacacaatccaaaatgaatacattaacatccacctaattctgaaaattatctacgcacagcgtgtgtatgcacacaataaggccatacgatgcaatgtggcacaaacaattaaaagttcttttcaaagtggaaatgcaaaatagaacgaatatctattttctataaatgaatctagccatctgcctcacaagagcagcagcaggagtacccaaaacagcagaaacagcagcctctggtgttaacaatctattctcaaatctcatgctccacatttccctggcaaacaaggctaaaaatacaagacatgcaacaaatagtctcgtgggatctgccgttccatggatggcgtattcaatcagagtcatattttctgccgaaattcaaaattgaa

SEQ ID NO: 411 - DNA, 552 bp, Homo sapiens
  MAP TO AL137800.2; EXPRESSED IN BONE MARROW, SIGNAL = 0.89; EXPRESSED IN BRAIN, SIGNAL = 0.64; EXPRESSED IN LUNG, SIGNAL = 0.98; EXPRESSED IN PLACENTA, SIGNAL = 0.94; EXPRESSED IN FETAL LIVER, SIGNAL = 0.79; EXPRESSED IN ADULT LIVER, SIGNAL = 1.1; NT HIT: gi6005925, EVALUE 5.30e-01; EST_HUMAN HIT: BF115963.1, EVALUE 2.00e-01; SWISSPROT HIT: P10269, EVALUE 4.00e+00
atcttgcagtcatggaagccactggaagttctcacagagattgctttttttaaatttttttttattttacaagatcactctggaatatgaatggaggggacaagagcagtggctggaaaatcagtttggaagtgactgcagtagtcctggtgaaaaatgagggtctcaaccaaggcagtgctagtggggatggagagaaataggtggatttaagaaatatttaagaggtcaacctgatgaggtttagggaaagagacattccctggatggatctcaggtacagattctgtgagaaatggaggccagccatatgggagagggtggccttgcccaggaatggatcctcaaggttcacatacggacttcatatctatagcccctgaattgtacataaacgaatgtgtgtgcttgaaagtgtatttctggaaacacattttgccatttaacaaccactgctgcagttgtaaaagggaaaagggtcaagaacagaacttcaaagggaataccaacacctagggaattgcgcaagagggcctgcttgaggttgagatt

SEQ ID NO: 412 - DNA, 501 bp, Homo sapiens
  MAP TO AC011731.4; EXPRESSED IN BONE MARROW, SIGNAL = 0.86; EXPRESSED IN BRAIN, SIGNAL = 0.8; EXPRESSED IN LUNG, SIGNAL = 1.1; EXPRESSED IN ADULT LIVER, SIGNAL = 0.91; NT HIT: X16046.1, EVALUE 4.80e-01; EST_HUMAN HIT: BF752860.1, EVALUE 0.00e+00; SWISSPROT HIT: P34710, EVALUE 3.50e+00
aaaccctgtgaccattccacctccttgcatcttgggcttgggtttggaaactgaccagcaagctggagctgccaccacagagaaacatcaaagcaaaagggttccaggaccagagattaggtaactagctacaggccagaggaatgcttccctctctagatcaacaagcccctcctttcactctgaaaaaaagtaagtacctgagggtccgtccttgcaaagcctccgctcttcatcgccatccctgaacaccgtgttccttcctccttgtgctccttttgccttttcatgcatccggtgtctgtcatcaggctgccaccggtatcgaagtcaggacagttcactgcgtaagaagtcaagcatcatgggatgttggctgtggcgtctggtcattgtgccagccacaccacagacatgtgaccactgtcccaaggagggccgtatggccactggtgctgattcgccatgtgttcatcttccaccatctccgtgagctctacc

SEQ ID NO: 413 - DNA, 577 bp, Homo sapiens
  MAP TO CHR22_52.0; EXPRESSED IN FETAL LIVER, SIGNAL = 1.4; EXPRESSED IN HEART, SIGNAL = 1.4; EXPRESSED IN HELA, SIGNAL = 1.3; EXPRESSED IN ADULT LIVER, SIGNAL = 2.1; EXPRESSED IN PLACENTA, SIGNAL = 1.8; EXPRESSED IN LUNG, SIGNAL = 1.9; EXPRESSED IN BONE MARROW, SIGNAL = 1.3; EXPRESSED IN BRAIN, SIGNAL = 1.3; SWISSPROT HIT: P11274, EVALUE 3.00e-19; NT HIT: U07000.1, EVALUE 0.00e+00; EST_HUMAN HIT: AL044101.1, EVALUE 0.00e+00
cacagctcttgggaggagtcagatgagctgctcaaagcccaggagggacccgcacagtggtcagcatggcagggacagtgctttagccaaggcagggatggtgggagactcactcgggatcctcaaggaggccgctgcatttccgtgctctttccagataacaaggacgtgtcggtgatgatgagcgagatggacgtgaacgccatcgcaggcacgctgaagctgtacttccgtgagctgcccgagcccctcttcactgacgagttctaccccaacttcgcagagggcatcggtgagcactggaggccttggcctcatgggagacgtctcctccacgtgcactgctgcccttggaggctgtgaaaagtgaggtgtgggaacccaagctgtgccccctctgccatggtcggcattttaacccaacctcaaaaagcaggggaccagaaccgagcctgtcctggaaggccttgcccatccctagagggctccctgtccctactcctcaaggagaccaagaggctgaaatagtcagcactgctgtgctgtggggtcctaaagtctgctgtcctccttcctg

SEQ ID NO: 414 - DNA, 570 bp, Homo sapiens
  MAP TO CHR22_174.0; EXPRESSED IN FETAL LIVER, SIGNAL = 0.85; EXPRESSED IN BONE MARROW, SIGNAL = 0.8; EXPRESSED IN BRAIN, SIGNAL = 0.72; EXPRESSED IN PLACENTA, SIGNAL = 0.99; EXPRESSED IN ADULT LIVER, SIGNAL = 1.4; EXPRESSED IN LUNG, SIGNAL = 0.93; SWISSPROT HIT: Q02282, EVALUE 1.90e+00; EST_HUMAN HIT: AI223017.1, EVALUE 6.00e-11
tgtcatccagcaggactcagttggtcataaactccagtgactggtcgctagggtccatgatccactaagacctggtggacgatggcaatcgaatatgatattcccttgatattccagccaacaaaaaaattgtatttgtcttctataatatacatggtcagatttttatatcttcatttcattaataaggcaagaggacccagaaaaaacatttctcttccagacaaagaaatgcatcttaccatctccggtgtcatgaggtcttcaagagagacagataggctttcactgagacctgatgtcatgaagtcttcaagagagacagataggctttcactgagatccgatgtcatgaagtcttcaagacagacagataggctttcactgagatcttcgaccaaatctaggagaacatagtgacagtcagtgcattggtgctgctgaggaatcccacaaggagccttgggggatgtggaccagggctggatcatgtgcaggtgggcggttgacaggcatggactgagctgctgctggaccattctccttggtgctgaaggaaggcaaaggaga

SEQ ID NO: 415 - DNA, 570 bp, Homo sapiens
  MAP TO AC018464.4; EXPRESSED IN BRAIN, SIGNAL = 0.74; EXPRESSED IN PLACENTA, SIGNAL = 0.77; EXPRESSED IN LUNG, SIGNAL = 0.63; EXPRESSED IN HELA, SIGNAL = 0.67; EXPRESSED IN FETAL LIVER, SIGNAL = 0.97; EXPRESSED IN ADULT LIVER, SIGNAL = 0.72; EXPRESSED IN BONE MARROW, SIGNAL = 0.85; EST_HUMAN HIT: AW084557.1, EVALUE 2.00e-01; SWISSPROT HIT: P00164, EVALUE 5.50e+00
gtgggtctgtttcttttggctattttttcttttggttatgggtcattttttcctgctttatgtgtgataattctgtttttatactggcattgtgtttagaagagattggcataaataccctttttctccagagagacatgctttttttgctctgaaaggcagctagaatgaaagactgaacactttgataccatcaggagttgagctgtattggagctggatgacctctttaggtggtttcaattcacttctggtctcaagtgctttgatagtgaatgaatcctgttctgtgagtattacaggtgcaactctcttgcaggacataagcctaatgtttttctgctttttagttccactcgcagccaccagtgctgttgctgccttcacatactcataaatagacctgtggagggaatcaggaggagaatggggagaattatctctacatttgagtttcttaaagatatcaatctgtcacacagccaagcagttgttaaaagctctgccatttccctttaatccagcagagtatttctaccctggaaggcttgattctctgcagcccaggta

SEQ ID NO: 416 - DNA, 535 bp, Homo sapiens
  MAP TO AL121962.4; EXPRESSED IN HELA, SIGNAL = 2.2; EXPRESSED IN BONE MARROW, SIGNAL = 3.2; EXPRESSED IN LUNG, SIGNAL = 3.4; EXPRESSED IN PLACENTA, SIGNAL = 3.8; EXPRESSED IN HEART, SIGNAL = 2.6; EXPRESSED IN BRAIN, SIGNAL = 2.9; EXPRESSED IN ADULT LIVER, SIGNAL = 3.8; EXPRESSED IN FETAL LIVER, SIGNAL = 3.2; EST_HUMAN HIT: BG910713.1, EVALUE 1.90e-01; SWISSPROT HIT: P40541, EVALUE 6.50e+00; NT HIT: AL161535.2, EVALUE 2.00e-03
aaatatattggcgcaccctgtgagttcattacagagtcccagtgccccttgggtaaaaagttggtaaccatgggattatgaagttgaaagacagacataacaataataataatgtcaactgccaactcactaaaaagaccaccaaaataaagaaaactgcatttattcttaacccagtaaggaagatcaatatcttgttgaaatcttagtaaatcttcttagggtagaggtgaaagccagggcatttatgaggttttggggtgctggtttaagacaggcaggtctttcaatgcagagaacttaactggattgactagagtttgtgacataatagtataaaattgatggacacagtgaggcaaggattttgaatgagtgtagaaaggtaagtcatctcttgataagcctggttgcatgatctgttatgagaaatgagatgatgaaagcatagttgaaagtttggatatatggatttggtggaatttcttgaaataaacaaaaaatacaattatttgccttttcatcttcttgggca

SEQ ID NO: 417 - DNA, 546 bp, Homo sapiens
  MAP TO AC013341.3; EXPRESSED IN LUNG, SIGNAL = 0.78; EXPRESSED IN FETAL LIVER, SIGNAL = 0.6; EXPRESSED IN BONE MARROW, SIGNAL = 0.61; EXPRESSED IN BRAIN, SIGNAL = 0.47; EST_HUMAN HIT: AW998611.1, EVALUE 1.00e-85; SWISSPROT HIT: P23074, EVALUE 2.00e-10; NT HIT: AL163209.2, EVALUE 0.00e+00
accacatccccattcaactcccccatttgccctgtgcagaagacagatggatcttggagaatgacactggactatcgtaagcttaaccaagtggtgactccaaatccagctgctgtaccagatgtggtttcattgcttgagcaaattaacacatcttctggtacctggtatgcagccattgacttggcaaatgccttttcctccattgctgtccataaggcccagcagaagcaatttgccttccactagcaaggccagcaatgtatctttattgtcctacctcaggggtatatcaactctccagctttgtgtcataatcttattcagagagaacttgatcgcttttcgcttccacaagatatcacactggtccattacactgatgacattatgctgattggatccagtgagcaagaagtagcaaaacacactgaacttattggtgagatatttgcgtgccacagaatgggaaataaatctggctaaaattcagggaccttctacttctgtaaaatttctgggggtccagtgttgtgggacctgttg

SEQ ID NO: 418 - DNA, 568 bp, Homo sapiens
  MAP TO CHR21_4.0; EXPRESSED IN FETAL LIVER, SIGNAL = 1.5; EXPRESSED IN BONE MARROW, SIGNAL = 1.9; EXPRESSED IN PLACENTA, SIGNAL = 0.88; EXPRESSED IN LUNG, SIGNAL = 0.9; EXPRESSED IN BRAIN, SIGNAL = 1.6; EXPRESSED IN HELA, SIGNAL = 3.9; EXPRESSED IN ADULT LIVER, SIGNAL =   1; EST_HUMAN HIT: BE815189.1, EVALUE 2.00e-23; SWISSPROT HIT: Q15149, EVALUE 5.00e-03; NT HIT: AL163203.2, EVALUE 0.00e+00
gagaaaggcttttccaattctgaaattcttaaaaatcctctagtgatttatttttcatggtctttagataaatatttcaactttttggaatttacactcttttagatttgaagttttgtccaacttttttccagttaaatatccactatgggaattatttcattatacaaatataaatgtcattctttaattttagaagaaatcatgatatgtcattctattgagtgctaactaaaagttccctttgtttacttagctttctcttagtcataagaaagaagaagatctcttgcgtgaaaacagcgtgttgcaggaagaaattgccatgctaagactggaactagatgaaacaaaacatcagaaccagctaagggaaaataaaattttggaggaaattgaaagtgtgaaagaaaagactgataaacttctaagggctatgcaattgaatgaagaagcattaacgaaaaccaatatttaagtacagtggacagcttaggattttgacaactgagaatgctcagttctgaactggagagtgtaagacacagctaggaaacactggaaatgg

SEQ ID NO: 419 - DNA, 581 bp, Homo sapiens
  MAP TO CHR22_91.0; EXPRESSED IN BONE MARROW, SIGNAL = 0.85; EXPRESSED IN PLACENTA, SIGNAL = 0.92; EXPRESSED IN BRAIN, SIGNAL =   1; EXPRESSED IN LUNG, SIGNAL = 1.1; EXPRESSED IN ADULT LIVER, SIGNAL = 1.3; EXPRESSED IN FETAL LIVER, SIGNAL = 0.8; EST_HUMAN HIT: BG177359.1, EVALUE 0.00e+00; SWISSPROT HIT: Q16795, EVALUE 4.00e-78; NT HIT: gi16185301, EVALUE 0.00e+00
ctaagctgggcaggtgagacaaggtcatgtctgtgatgtgaatacgctccactttatcccttgttgtccaggactcaaatgggcttatttcaaagtctcttgctacccactgataggcaaaaggtggcaaggggtacgggaggaagtacccctttgctgtgagccacagcaaagatgtacttcaccaggtcaaagaggagatatcgatttggcccaacgaaagcaaaggttttcccattggcatcaggatccttaactgcattaacaattcctttggatacatctacgacgtatactggttgtttaactgccttccagcccaaggaaacaaggggtatagcaccaaaccaacacatatttgcaaaataattaaggaatctatcctctcttccaaagatgtccaacagctttacgataatggcttctggaaatgtgtctctcactgctttctctccaacagccttctttctcaaatatctagaagagcttttaatattcacattcagatgtgcaacatgaatgaattttccaacttcagcttccttggacacctgagcaattgcttggggaatcttcacaaa

SEQ ID NO: 420 - DNA, 590 bp, Homo sapiens
  MAP TO AL138895.4; EXPRESSED IN BONE MARROW, SIGNAL = 0.88; EXPRESSED IN PLACENTA, SIGNAL = 0.91; EXPRESSED IN BRAIN, SIGNAL = 0.72; EXPRESSED IN ADULT LIVER, SIGNAL = 0.61; EXPRESSED IN FETAL LIVER, SIGNAL = 0.86; EST_HUMAN HIT: BF881461.1, EVALUE 5.30e-02; SWISSPROT HIT: Q18416, EVALUE 5.70e+00
gataaggtcgcttccactgctctgcctctttccagcccacaaatcagctccctgcaacttatttttgctatcataatagtctgctatttcccccaaagctgtataagagaaattggcatcagttccacctgtcttactataagatgtagtgagagcagactttggagaaacaactcatagcttggacacttagtttcctcatctgtacagtggtggtaataatagtattcttttcacaggattctggggattaagagaaacaatgcctataaagtgcttagccctctgcaatcactcaacacattttcctggaggaaaaggcctgggacaggcaccactggctaccggcagggctatgggcaagacagcaaccttctctggcccctgagcgtcccatatgtaatacaagaatgggagagggaggagtctaaggaaccattcagcaaatacttgctgaggatctactgtgggctcatccttgggctgaacactgggcacagagagataaaggagctgtggcttcgcccttgaggtgctcttgtgtggtaagagctttgagaagtgtgtcaagcattgtaggagcacctggt

SEQ ID NO: 421 - DNA, 570 bp, Homo sapiens
  MAP TO AL137798.1; EXPRESSED IN BONE MARROW, SIGNAL = 5.9; EXPRESSED IN LUNG, SIGNAL = 6.2; EXPRESSED IN HEART, SIGNAL =   4; EXPRESSED IN PLACENTA, SIGNAL = 5.9; EXPRESSED IN HELA, SIGNAL =   4; EXPRESSED IN BRAIN, SIGNAL = 5.1; EXPRESSED IN ADULT LIVER, SIGNAL =   6; EXPRESSED IN FETAL LIVER, SIGNAL = 5.4; SWISSPROT HIT: Q10812, EVALUE 3.20e-02; NT HIT: gi16161780, EVALUE 3.00e-61; EST_HUMAN HIT: AI431883.1, EVALUE 1.00e-108
taaaagatggattggccagctcagctcctgtctcagacagactgtctttaaatgtattttcaacatgtcttcagacagttatttttcctctgttcaattttgttcatcttcttacttaaccgttcaagtgctcctatttcctttttaaatgtagtattgagaagtgcaaacattattggaaaagagagtctcactagcataattgtgcattatcttcctcttatatcgccggcctccctgcacccccatgcccacctcctcctcgcgcctccatgccgcctcccactgctccagctccttgcagctgcgagtccagtcactggtcacctttcgtatctcctcactcagagcctggttggccaaacctgcctggtccagctgttctcagagcatggcattcacctgggccaggctggcactcctgaatggggcacaggggatcagtaggcgctcgcccagggggccatgctgccagccctggccctccctgctgctcctcctccagccagatgagggcactctccaggtcttggctgtgctctgcgtcctgggtggcacagaggttaaagc

SEQ ID NO: 422 - DNA, 546 bp, Homo sapiens
  MAP TO CHR22_16.0; EXPRESSED IN ADULT LIVER, SIGNAL = 1.3; EXPRESSED IN BONE MARROW, SIGNAL = 0.93; EXPRESSED IN LUNG, SIGNAL =   1; EXPRESSED IN BRAIN, SIGNAL =   1; EXPRESSED IN HELA, SIGNAL = 1.3; SWISSPROT HIT: Q9WVS8, EVALUE 2.30e+00; NT HIT: AL114755.1, EVALUE 1.30e-01; EST_HUMAN HIT: BE140335.1, EVALUE 4.90e-02
cgcatttgaagaagggagaggaggtggagaggggatcctggaaggaggctccagcctcggcaatggtgtgggggtgagaatgcagaaggagtttcaagaaggtcaaacagctgcaggggctggcgagtcactggaggcagggatggacacagatcagcccaggcctggtgcgtgtcctcctgcttatttctatacctccaggagagtatgacaccaggacatcaaggcgtccacccttgtcaggcctgggatggtgccgcactgttggggatgggtttgtgagttcccaagaagagccacccagtaagggcctcatcatgaaggggagtgagctgaggctcttgggaaaatggaggcctcagatctccccacaatcttgggagaaaggctcccataccccacacccaccttgaccaagggcccaaaaccagacgggcaacaatgcaggtccagagtcatcagcttggcctgactgtcccctgtctgcctccagcagaggtgagtaccttgggtccaaacccttctgccccatttactgtgtgaccc

SEQ ID NO: 423 - DNA, 503 bp, Homo sapiens
  MAP TO AL135786.2; EXPRESSED IN PLACENTA, SIGNAL = 0.86; EXPRESSED IN FETAL LIVER, SIGNAL = 0.7; EXPRESSED IN LUNG, SIGNAL = 0.85; EXPRESSED IN BONE MARROW, SIGNAL = 0.69; EXPRESSED IN BRAIN, SIGNAL = 0.7; EST_HUMAN HIT: BG190739.1, EVALUE 8.00e-47; NT HIT: gi8923931, EVALUE 5.00e-47
tgtgagctggtatgagctggctctaggacaccactgtgtgaaagggagcagaaatgttgctcattggaggttcaaagagagagtcttgtcagaatctttataagtcaaaggttcctaaggcagggatccttgaaatggaaaataaatcagcaaatagaaactctagtttaccaaagacttacctttcattctttctaaaagggttccatagcccaagtcatactggtaggtgaggataaagcttaatggaacaatcgggaccaggaaggctggcttcttttttttaatcgctctgtttcaagaattaaaagaagaaccaatatcaaaaaataacctgtaaatacatatctgtatacttaaagaaaaaaaaatacctgctttttggaagaatgccttttccttcagaagttacttaacacatttgataattctatggaaataggatttccttacccaatacccctaaccagattctgcagttctcaagggcaaggtctgtgact

SEQ ID NO: 424 - DNA, 583 bp, Homo sapiens
  MAP TO AL136113.1; EXPRESSED IN ADULT LIVER, SIGNAL =  30; EXPRESSED IN HELA, SIGNAL =  22; EXPRESSED IN PLACENTA, SIGNAL =  36; EXPRESSED IN LUNG, SIGNAL =  35; EXPRESSED IN BRAIN, SIGNAL =  32; EXPRESSED IN FETAL LIVER, SIGNAL =  33; EXPRESSED IN BONE MARROW, SIGNAL =  35; EST_HUMAN HIT: H83722.1, EVALUE 8.20e-01; SWISSPROT HIT: P53756, EVALUE 5.60e+00
aggctttaaggcattgttggtatctttctcttgctccttcttcagatgtagcttccagtaagtacttcggaaagttaaacaaggatcatttccagtttcactgcattatcctgggacactctgcacagaatatcttctttaatcaggacatattcaatcagcagatctaccactaaccactggctattgttctctctgataggagtatactgaagcatggaaaaacagaaatacagactttatttacctacttttgaaactccacagctcctgagttaactgtagcaatagaaaccacataggtgatgtaaaccattggatttttaagagcttccttggattttaattgaggatcatgagttatattcttgttcttcaactaagaccatgtgtgtggtgatacctgacatctctggcccttgatttttagactgaacagtccaagaagcatagatattggttggaactaacaaagagactgaaaagaggtgatcttaataatcgtgccatggcactttgctattagggtttgccaagtgctcccggaatgtccccaatccttgccagcctgtgcagacaaata

SEQ ID NO: 425 - DNA, 555 bp, Homo sapiens
  MAP TO AC025753.1; EXPRESSED IN PLACENTA, SIGNAL = 0.83; EXPRESSED IN LUNG, SIGNAL = 0.68; EXPRESSED IN HELA, SIGNAL = 1.3; EXPRESSED IN BRAIN, SIGNAL = 0.56; EXPRESSED IN ADULT LIVER, SIGNAL = 0.61; EXPRESSED IN FETAL LIVER, SIGNAL = 0.72; EXPRESSED IN BONE MARROW, SIGNAL = 0.62; EST_HUMAN HIT: H72903.1, EVALUE 2.00e-04; SWISSPROT HIT: O14335, EVALUE 9.00e+00; NT HIT: gi13357558, EVALUE 2.10e+00
tttagaatgcactttggcccaattagatgagatgactatgcaaaaaaaattttttttgaacaaatgtttttgttcaaaaaaaatttgttgaataaaatgttaatgaatggtaacataattattgtgccaattgctaagctaattgctcattaattaaactatgaacattcatggggaataaatatttggagaatagaggtgtggatggcatagatgaattaatcaaagccaatgagtacagtgggtaagagtttgggctacttcctagttgcatgatttcgggtgagttacttcatatctctgcctcatttccacatttgtaaaatgaaaataataatatctacctcataggactgctgttatgacaattaaaggagatgagtcatttaaagtccatgacacagtgctggcagtagacccagaaggaaccagccattgtacaaagtaaaataactgtggaatcagatttagaattcatgttttcttcccccttgtttgatgttatttaggaggtgatactaaagacattgtcataggcaaagtcagtaacccctg

SEQ ID NO: 426 - DNA, 534 bp, Homo sapiens
  MAP TO AL137793.1; EXPRESSED IN HELA, SIGNAL = 1.1; EXPRESSED IN BRAIN, SIGNAL = 1.7; EXPRESSED IN ADULT LIVER, SIGNAL = 1.7; EXPRESSED IN PLACENTA, SIGNAL = 1.8; EXPRESSED IN LUNG, SIGNAL = 1.6; EXPRESSED IN FETAL LIVER, SIGNAL = 1.5; EXPRESSED IN BONE MARROW, SIGNAL = 1.7; EST_HUMAN HIT: AV657279.1, EVALUE 7.50e-01; SWISSPROT HIT: P50562, EVALUE 9.90e-01
tgctctgaggttccatttcctccattacaaaacatagctaatagtatcatatctctctggcctaataccagaactttaattaggcttaaatgaaacataggagaaaacaactcaaccaggacctagcatgctccttcaggtttttgttaaggttggggccctgggggacaggaggccccatcctggagcaggaacaggaaagtgtgaccgactctccttgacaccctgagtggcagatccagagcgctgtcaccaggaacaaggggaagctcaccagcgggagcctcccagccctccgctgcagtgtcttccgggctgctaatgggtttcacgtgtgcagaggccaatgcctcagtcctggggatggggtctgggacagctcctgtggctgtctcctcagccgtgagcagccgcatccttttacaaataatgaatgccgttttccatagctgccacgatgcaagaaaaactgaaaaaacaacccgggtgagaggacagtctgtgctgctgggcagaggccaaaacctgaaaaca

SEQ ID NO: 427 - DNA, 554 bp, Homo sapiens
  MAP TO AL139158.1; EXPRESSED IN BRAIN, SIGNAL = 1.2; EXPRESSED IN HELA, SIGNAL = 1.1; EXPRESSED IN LUNG, SIGNAL = 1.3; EXPRESSED IN PLACENTA, SIGNAL = 1.5; EXPRESSED IN FETAL LIVER, SIGNAL = 1.2; EXPRESSED IN ADULT LIVER, SIGNAL = 1.5; EXPRESSED IN BONE MARROW, SIGNAL = 1.3; NT HIT: AF111167.2, EVALUE 2.10e+00; EST_HUMAN HIT: BE900961.1, EVALUE 1.30e-02
gggcagagatgcagaagaagcaggaattgagacttaaaggaatctatagacagacttagtcttatggtgtgtgactccacagggtctttgaccctgagttgaattttctgtgctggagttaaaggagagggcagggggctactggtggaagggtcccgcgaagggcaagaaagtaaatgagtggagtctaagggttcaggctgagtgactttggctctttgggattaggcccagagccaggacccccctgcaccttgcccccaggcaaacactcacttattcttcatgacccagcttgatggtaccaccctgcatgaggccttccctgaccctctgagtgctgtcttccagaacctaggacagaaccttagtccatagaaggggaccagtgcacatgactgaggtcatgggaatgctacaaagtggcagaagtagagaatagattgagaatctgtatctatcgctagttttctgggttatctcagttaaggccctcaatatcattgggcctcagtttcctcacctgtaggctggggatggggatcttgagcttt

SEQ ID NO: 428 - DNA, 550 bp, Homo sapiens
  MAP TO AL137008.1; EXPRESSED IN FETAL LIVER, SIGNAL = 0.46; EXPRESSED IN LUNG, SIGNAL = 0.88; EXPRESSED IN BRAIN, SIGNAL = 0.65; NT HIT: gi14759704, EVALUE 9.00e-83; SWISSPROT HIT: O94833, EVALUE 9.00e-25; EST_HUMAN HIT: BF843845.1, EVALUE 1.00e-82
gatggcccaatcatttgtatgtgatttccctgacagatgttactagatgtcattcttaaggtaaatttcatataatttattctttgactagcaattgacccatataaaattgccagtgttaaacattttcaacctaaaaaaacagcattttatatgattcacctaaatagtaattaaagataaattaagattatatataactcttcatttgctgtgatgtaaatcagttttttaaaaaaggattttaatatatttgatcactgatgatttaaccagctacactgagattgaaatgtgcaattgagaatgtcttgagaaagaactaacaagtcactacttaccattgttttcaaaattttagagtttccaaccagtcgcttggagatgagcgcagttgcagacatctttgacagagatggcgatggatatattgactactatgaatttgtagcagcccttcacccaaataaagatgcatataaacctatcacagatgccgacaaaatcgaagatgaggtactcattatcttcccattgcgtacaacactga

SEQ ID NO: 429 - DNA, 537 bp, Homo sapiens
  MAP TO AL133406.3; EXPRESSED IN PLACENTA, SIGNAL = 1.9; EXPRESSED IN LUNG, SIGNAL = 1.7; EXPRESSED IN ADULT LIVER, SIGNAL = 1.5; EXPRESSED IN HELA, SIGNAL = 1.2; EXPRESSED IN HEART, SIGNAL = 1.4; EXPRESSED IN BONE MARROW, SIGNAL = 1.3; EXPRESSED IN BRAIN, SIGNAL = 1.4; EXPRESSED IN FETAL LIVER, SIGNAL = 1.3; NT HIT: AB031010.1, EVALUE 6.00e-13; SWISSPROT HIT: P54577, EVALUE 3.80e+00; EST_HUMAN HIT: AI432158.1, EVALUE 6.00e-14
aacctcctgaaggacttgcctgagactgtcttacagggtagcctttttttgtttttaggagtatacttcaaaatgataaaaaactataatatagtgaacacgtaaactaggaacagctgttatgatcaagtattaggtactgtacatacttgtatgtgctagacttttatatgaccggcactgcagtaggtctgtttacaacagtatcaccacaaacacatgtgtgttgcactgcgacatgatggtggctatgatgtcattaggtgataggaatttttcagcttgttataatcttatgggactatcattatacatgcagtcatatgcagaaatgttatatgctgcatgactgtatcttggatgaattgcagcatttcacactccaaggcaagaccagagtagtgacagagcagggggtggccctggtgttcaggttcctgcatcttctggggcctgaggttgcaggcaacctggtcctctggaaaaatgccaatcacagcgccaacacctgaatgtcctggggaaataactcagtgc

SEQ ID NO: 430 - DNA, 579 bp, Homo sapiens
  MAP TO AL136099.2; EXPRESSED IN BONE MARROW, SIGNAL = 0.72; EXPRESSED IN LUNG, SIGNAL = 0.98; EXPRESSED IN ADULT LIVER, SIGNAL = 1.1; EXPRESSED IN BRAIN, SIGNAL = 0.8; EXPRESSED IN HELA, SIGNAL = 0.69; EXPRESSED IN PLACENTA, SIGNAL = 1.2; NT HIT: gi11421399, EVALUE 3.50e-02; SWISSPROT HIT: P31422, EVALUE 6.40e-01; EST_HUMAN HIT: H28536.1, EVALUE 5.20e-02
actgaacaagacgtgggtcccggggctgcccgttacctggagcgtttgaacatggactcctgggctccatcccccggctcagtgcagatactgggcttcttatgtaacaagccccttctctccccctccttccaggtggcatgcacacacacacacgaacatctcatactcacattccttgttcaattgcttccatgagaaaaagcttgcagctatcttgttcatctttaacgcccaggactgggtgcccagctcagtgcctgctacacagaagatgcttaatgtcaatttgctgattgaataaaggcatacgatgtggatccccacggctttcagcggcatttcctcaagcagaccctgaaaccaggacatgggtgcagatttctttgaggagtgactccactagcccccgcccgtgactgtgctgacaaagtgaaagcaggaaggcagagtgcagggagatgaggttgctctgagtaccagatgagggatttttcaatagtgcccctaaccaccctgatttgtatggagggcctgggcacccacctgtcctccctggcttcacctgggaactggaac

SEQ ID NO: 431 - DNA, 574 bp, Homo sapiens
  MAP TO AC013371.4; EXPRESSED IN ADULT LIVER, SIGNAL = 0.69; EXPRESSED IN FETAL LIVER, SIGNAL = 0.64; EXPRESSED IN BONE MARROW, SIGNAL = 0.49; EXPRESSED IN BRAIN, SIGNAL = 0.5; NT HIT: AF363689.1, EVALUE 2.20e+00; SWISSPROT HIT: P39168, EVALUE 4.20e+00
caaaaagcaatgaagagggctctgctgtaactactgtcgattgtatgcccataaaacttttcctggatgctattgtgctcaaggttcatgtgaagatttgcacattttatgtttcttggaacacagtttttcccttcttccttagatctgatatgttagcaatggctggtggtgcccccattcccaaatttatacacatggctttatttgcacaaacctttgacattaggcagggtgaaaccaggtacgtgcagagaagaataggccaagagggtaaggagtggacaaccaaggtcctggtgtgctctagcatgtgagccatctgaagggtagctcagtagattataactaagaacatagattttacctgggtacgcaagtctctgaatgtgggtggcctcagtaaacaccatagacagaatggcaaactccctgttacatttaagttgagtggaagcctcgttactccatgtctgccactgctggacagatatattaagctagttgcttcctaggcaggagaagcagaagtaccatctaaaatggtaagttttgcctattggaatgtggtgga

SEQ ID NO: 432 - DNA, 542 bp, Homo sapiens
  MAP TO CHR22_219.0; EXPRESSED IN FETAL LIVER, SIGNAL = 1.2; EXPRESSED IN BONE MARROW, SIGNAL = 1.3; EXPRESSED IN PLACENTA, SIGNAL = 0.72; EXPRESSED IN ADULT LIVER, SIGNAL = 0.85; EXPRESSED IN BRAIN, SIGNAL = 1.2; EXPRESSED IN HELA, SIGNAL = 2.3; EXPRESSED IN LUNG, SIGNAL = 0.7; NT HIT: AF267862.1, EVALUE 0.00e+00; EST_HUMAN HIT: BG771673.1, EVALUE 0.00e+00; SWISSPROT HIT: P13302, EVALUE 2.30e+00
tttttaactgctcttccgctgtcgccgtgggaatggaaatctgtccctcgtgctggaagccaaccagtggtgatgactctgtgtgccactccgcctcctacagcgcggatcctctgcgtgtgtcctcgcaagacaagctcgatgaaatggccgagtccagtcaagcaaactttgagggaaattttgagtcgctggaccttgtggaatttgctaagaaacagccatggtggtgtaagctgttcaggcaggaatctggaccttccccgaaaagtgaagggtggcaacccagccgttcattgggggtgtcactgaatggtgcacgggtttcatatcccagaaggttggaaagttggctgtaacagttgtgggaggtgttttgtttttttctccttcagcttgcaaatcatactgggtacatcaaagttgactggcaacgagtggagaaagatataaagaaagccaaagagctgctgaagatcccttaagagcaatcagatacctaccaaggtcaggagcaaagctgaggaggtggtgtcgtttgt

SEQ ID NO: 433 - DNA, 567 bp, Homo sapiens
  MAP TO AL160236.1; EXPRESSED IN FETAL LIVER, SIGNAL =   9; EXPRESSED IN BONE MARROW, SIGNAL = 8.9; EXPRESSED IN HEART, SIGNAL = 8.1; EXPRESSED IN PLACENTA, SIGNAL =  11; EXPRESSED IN LUNG, SIGNAL = 9.5; EXPRESSED IN ADULT LIVER, SIGNAL = 9.3; EXPRESSED IN HELA, SIGNAL = 7.9; EXPRESSED IN BRAIN, SIGNAL = 8.5; NT HIT: gi14726312, EVALUE 8.00e-28; EST_HUMAN HIT: BF871006.1, EVALUE 1.00e-79; SWISSPROT HIT: P19623, EVALUE 9.00e-47
acagtgctgtggatcacctgccatgaagcccagccccaatggccgcccccagcctctggccccactgccatttataggactgattctgcaagacatgcagtctgtggcccacccatgccttgtcactgcaggtggagcagctgcccccgaccagtgctcacagtactaggatacctttgtcatctgcagtaagacctatggcaacatgatggcgttggatggcatcatccagtatacagagaggaacaagttctcctaccaggagattatagtcaacctgcctctctgcagccaccccaacctacaaatggcggtgattattgaggacaggaacaagggcatcctgtgcaaggtgaggtagtacccctctgtgaagtctatggtccaatgtgagaatgataaggatgtcatccaagtctctcagaagttcctgccaggcaaagctgttggctacttttgctcaaagctgaacttacacatgggtgatgggtttgaattcatgaaacagaattaggatgccttcagtgttatcaatgactcctcagaccccactgccttgctaaaaac

SEQ ID NO: 434 - DNA, 570 bp, Homo sapiens
  MAP TO AL136094.1; EXPRESSED IN HELA, SIGNAL = 2.6; EXPRESSED IN BRAIN, SIGNAL = 5.5; EXPRESSED IN FETAL LIVER, SIGNAL = 5.9; EXPRESSED IN BONE MARROW, SIGNAL = 5.3; EXPRESSED IN PLACENTA, SIGNAL = 6.2; EXPRESSED IN ADULT LIVER, SIGNAL = 5.5; EXPRESSED IN LUNG, SIGNAL = 5.9; NT HIT: AL163284.2, EVALUE 7.00e-56; EST_HUMAN HIT: AW241958.1, EVALUE 8.00e-41; SWISSPROT HIT: P95111, EVALUE 1.10e+00
ggcatgactacaacacagccaagctctttgctaaggcataacacaggtgacctttgctccagttcccagtaagttccccatttccatctgagacctcatcagcctggagttcactgtccatatcactgtcagcattttggtcacatttaactagtctctgagaaattccaaactttccctcatcttcccgtcttatgctgagccctccaaattcttccagcttctgcctgttacccaattccaaaattgcttccacattttcaggtatttttatagcaatgccataatcctcagtaccaattttctgtgttaggcggttcttgcagtgctataaagaaatacctgagacagggtattttataaagaaaagaggtttagttggctcatggttctgcggactgtacaagcagaagcttggcttctgtagaggcctcagggagcttttacgcatggcagaaggcaagtggaaaaaggcacatcacattgtcagaggcgtctgaaccagagcaactccatcttgaagaggtggtgggtaaaataaggctgagacctactgggcttcattcccag

SEQ ID NO: 435 - DNA, 556 bp, Homo sapiens
  MAP TO AC023120.3; EXPRESSED IN HELA, SIGNAL = 5.1; EXPRESSED IN FETAL LIVER, SIGNAL =   8; EXPRESSED IN HEART, SIGNAL = 7.9; EXPRESSED IN LUNG, SIGNAL = 8.2; EXPRESSED IN BONE MARROW, SIGNAL = 8.4; EXPRESSED IN BRAIN, SIGNAL = 7.2; EXPRESSED IN ADULT LIVER, SIGNAL = 7.5; NT HIT: AJ276674.1, EVALUE 0.00e+00; EST_HUMAN HIT: BF970127.1, EVALUE 7.80e-01; SWISSPROT HIT: Q9Y5X4, EVALUE 3.00e-41
tctgggcgttcctaaatgtcccagctgcagctctggatggaacccagtgtctcagatggtaggcagctgagccggatggtgccaaatcccagagctctgagcctctggctgatgtcaggagagcattctcgggtcccaggacagcacttccattccttgggtgcctgagatggtggcagaggctccagactgagccagagaagctgtgtgtctgccataacaggcacccctgtctgagcacaggtgatcctgctggaagaggcgtggagtgaactctttctcctcggggccatccagtggtctctgcctctggacagctgtcctctgctggcaccgcccgaggcctctgctgccggtggtgcccagggccggctcacgctggccagcatggagacgcgtgtcctgcaggaaactatctctcggttccgggcattggcggtggaccccacggagtttgcctgcatgaaggccttggtcctcttcaagccaggtaactgagtctctgcccaaaccttgagtgggaattctggtgacttccatctgcctctcactctcc

SEQ ID NO: 436 - DNA, 518 bp, Homo sapiens
  MAP TO CHR22_155.0; EXPRESSED IN BRAIN, SIGNAL = 0.52; EXPRESSED IN BONE MARROW, SIGNAL = 5.6; EXPRESSED IN LUNG, SIGNAL = 1.2; EXPRESSED IN ADULT LIVER, SIGNAL = 0.53; NT HIT: X14616.1, EVALUE 0.00e+00; EST_HUMAN HIT: BE268403.1, EVALUE 0.00e+00; SWISSPROT HIT: P01705, EVALUE 1.00e-48
gcatcttcagagcaaggaggaagtctgaaggccctgggcaggttttggtctcagttccccatgaacttggaccactgtggaaagtgctactacctgcatatgagcagcagtaataatcagcctcgtcctcagcctggagcccagagattgtcagggaggccgtgttgccagacttggagccagagaagcgattagaaacccctgagggccgcttactgccctcataaatcatgagtttgggggctttgcctgggtgctgttggtaccaggagacaaggttataactcccaacatcactgctggttccagtgcaggagatggtgatcgactgtccaggagacccagacacggaggcaggctgagtcagggcagactgggcccaggaccctggaaagagggagaaacacatgccagtgagtcagtgctgggccccggtgagcctgaggagcaggagaccaaggatcagcccagaggtccccaagaccccttccctggaggcgtcacctgtgtcctgagtg

SEQ ID NO: 437 - DNA, 577 bp, Homo sapiens
  MAP TO AL080248.7; EXPRESSED IN HELA, SIGNAL = 2.6; EXPRESSED IN FETAL LIVER, SIGNAL = 2.2; EXPRESSED IN PLACENTA, SIGNAL = 1.8; EXPRESSED IN LUNG, SIGNAL = 2.3; EXPRESSED IN ADULT LIVER, SIGNAL = 2.7; EXPRESSED IN BONE MARROW, SIGNAL = 1.6; EXPRESSED IN BRAIN, SIGNAL = 1.2; NT HIT: AF223391.1, EVALUE 2.00e-07; EST_HUMAN HIT: AW792964.1, EVALUE 2.00e-14; SWISSPROT HIT: P22105, EVALUE 1.40e+00
gtttggggcatcaaaaacagaatatgtgctgcctgagttatacgccattttctgagttataattgcaagaaaagtcggaagtgaagccagctgttctatctatatgatttttactcctccactaccactattatggcctgaactgtgtccccaaattcatgtgttaaactctcaagctgcagtacttaagaaagtgacagtatttgaagataagattctaaaagaggtgattacgttaaaatgaggcctttagagtaaggccaacctgactggcatctttagaaggaaaggaaaagatgccaggagagctgtgcacagaggggtagataagcatgttgaggaggcagcaagagtccagccagccaaggagaaaggtgtggaagcagacccgtcccctggggtccccacaggaaatcacccttgctggaaccttgatcttggcgttccagcttccagaacggtgagaacatgcatttctgttacttaagtcactcagtctgttgtattttgctatggcagcccaagcaaacttatataaccccctacacagtctcttggaaccatccacctggaagaa

SEQ ID NO: 438 - DNA, 521 bp, Homo sapiens
  MAP TO AC022215.2; EXPRESSED IN FETAL LIVER, SIGNAL = 0.99; EXPRESSED IN BONE MARROW, SIGNAL = 0.86; EXPRESSED IN ADULT LIVER, SIGNAL = 1.2; EXPRESSED IN HELA, SIGNAL = 1.5; EXPRESSED IN BRAIN, SIGNAL = 0.99; EXPRESSED IN PLACENTA, SIGNAL = 1.3; EXPRESSED IN LUNG, SIGNAL = 1.1; NT HIT: L34219.1, EVALUE 7.70e+00; SWISSPROT HIT: Q81022, EVALUE 7.30e-01; EST_HUMAN HIT: BI830132.1, EVALUE 9.00e-87
gccatcttgctccttactgctgtgcaatgctgctggaataactagtccccaaaggggtatctgtcctggtggcacagtcaggcctaccttccatgctgcgctcggccacgctggggatgttgcagtacaaaagagcttcataaacggggtctgtcacagggggctccgtcacagggtcgggcatgattctctttcgactcttgctactcattccattcttaggagtcgacaccgggatcaggtggactgaaacgaagtaaggcaggttgtgacgcacagttcctggggcgccaggccagctgcaaggcccagcgcagggctggatttcactttgaggagctattcttacactgagaatcaaggtgcacttcagtggagcagaagtcagcttcccattcaagaagggcttctgagccccactgtgtcctgccccttcgtcactgccactaccctctccttatcatctattcaacaccaggggagcctcccaagcaaaggggcctctctcagggcagttggag

SEQ ID NO: 439 - DNA, 590 bp, Homo sapiens
  MAP TO AC022117.2; EXPRESSED IN HELA, SIGNAL = 0.52; EXPRESSED IN BRAIN, SIGNAL = 0.68; EXPRESSED IN FETAL LIVER, SIGNAL = 0.61; EXPRESSED IN BONE MARROW, SIGNAL = 0.55; EXPRESSED IN PLACENTA, SIGNAL = 0.58; EXPRESSED IN LUNG, SIGNAL = 0.46; EXPRESSED IN ADULT LIVER, SIGNAL = 0.52; SWISSPROT HIT: P18133, EVALUE 5.70e+00; EST_HUMAN HIT: AW444537.1, EVALUE 6.00e-08; NT HIT: AF324892.1, EVALUE 6.00e-04
caaagcctccaaaacaaaccagacttaccacaccctgatttaagaccaataacactgattccagacttctgacctccagaaatgtgagataataaatgtgttattttaagccactaattctgtgataacttgtaacagcagtaacaacaaactaatacatatctctttctttccatattcagagtggtggataatttagattgtgcttctttatgtagcctaagagtcaaactggtctaatattagtttaattttcccattcaaattttggaattcatgcatttcaggctagaaagagaaatgataaagccatccacagtgatcataatgaaaacatggagagcctacacgttccaggctttctcacacatgctacctggtataattctcactacaaccctgaaggataggtggcaatttcccaatattttgcagaaaaggaaataggtccagagattaagtagtttctttcctcaaaacacatctcctccaagaagcttttccctaacccctctcctccctgttattaggtcgggtggtatgactgggctccctcacaatctcactattcccatagcactccgagtcat

SEQ ID NO: 440 - DNA, 545 bp, Homo sapiens
  MAP TO CHR22_94.0; EXPRESSED IN PLACENTA, SIGNAL = 0.61; EXPRESSED IN LUNG, SIGNAL = 0.52; EXPRESSED IN ADULT LIVER, SIGNAL = 0.53; EXPRESSED IN BRAIN, SIGNAL = 0.39; EXPRESSED IN HELA, SIGNAL =   7; NT HIT: AL163201.2, EVALUE 2.00e+00; EST_HUMAN HIT: AA669618.1, EVALUE 4.90e-02; SWISSPROT HIT: P77468, EVALUE 3.00e+00
tgaaaggagtgaaaatgggcaagtgccaccaacagcgctccacactcatgtccactgttgttactaggggtggcaatgtggaggaaggcagggctgaaaagtgcatcatttacatccaaaatggaaagcagtaattcaacaaataggtactgaatgcttacaatgcaccaggcaaatggagatacagcagccaacagaacaaagtctttgacctccaggtgcctgcattttagtacagaaagacagacaccaaataaactaccaggggagcacattgtacagggccttgtagaccaaaataaggacttggaactggctacgggatgggaagccaaagaagtttgcacaaaagcacgtcacaatccgattgaacaggctgtcgagagaacaaacttcggcgatggagagctgtcggagaaaaggtggaggcaaggagaccagtttaggagataagacgaggccgggcaaggacgtgccagcttggagtgggtggtggtggtgaggtactcgctcactttggcctgtcacagtccaacacacaaggg

SEQ ID NO: 441 - DNA, 598 bp, Homo sapiens
  MAP TO AL138801.1; EXPRESSED IN FETAL LIVER, SIGNAL = 5.6; EXPRESSED IN LUNG, SIGNAL = 6.2; EXPRESSED IN HEART, SIGNAL = 5.4; EXPRESSED IN PLACENTA, SIGNAL =   6; EXPRESSED IN BONE MARROW, SIGNAL =   6; EXPRESSED IN ADULT LIVER, SIGNAL = 5.9; EXPRESSED IN HELA, SIGNAL =   4; EXPRESSED IN BRAIN, SIGNAL = 4.8; NT HIT: gi13937343, EVALUE 3.70e-02; EST_HUMAN HIT: AA886136.1, EVALUE 2.00e-13; SWISSPROT HIT: P08548, EVALUE 7.00e-06
ctctcaaggaggtggagcacaataaataagtggagcatataataaagtcttgaaatcagatagttctggcttgtcaactttgttctttttcaaagttgttttggctgttctaggctatttgtatttctatatgaactctagaatcagtttgtcatgttttacaaaacattctcctctgattcaaacagaatgcttagaaatacaattaatattttactttaatcttacatcctgcaaacttgccaaattcatttactagttctagtagcttatgtgtagatttcatcacattttccaaggtgatcatgtcatctatgaacaaaacaaatttcattttcttttcctaggttactttccactgcttttatttctttttctcacattattccacaggctacaactctctaattcaatgctgaatggaagagtagacacccttattttgtccattgttttaggggaaaatatagcattccatctttcatcataaagtatgaagttaactgtagatttttaccttttgtacagttgatgaagtcttccatccttagttttttgagaatatttaccaggcatgaatgctggattatgtccaatg

SEQ ID NO: 442 - DNA, 554 bp, Homo sapiens
  MAP TO AC023120.3; EXPRESSED IN FETAL LIVER, SIGNAL = 0.57; EXPRESSED IN BONE MARROW, SIGNAL = 0.45; EXPRESSED IN PLACENTA, SIGNAL = 0.6; EXPRESSED IN ADULT LIVER, SIGNAL = 0.53; EXPRESSED IN BRAIN, SIGNAL = 0.57; EST_HUMAN HIT: BF208954.1, EVALUE 2.00e-04; NT HIT: U01910.1, EVALUE 5.30e-01; SWISSPROT HIT: P40550, EVALUE 9.00e+00
acaggaaggatgtgggtgagacaacctgggatgtctgattattgcacccttaccaagcaaaagcttctaggaagggacaacaaaagttcaaacaccgcagtgtctgttcatctttgacccactgaggaactactccttaaaatgggtttaggtcgtacatcctccctttattcagcaaatatttattgagcacacactctgtgccaagcaatgtttggggcaatggaaatacataaatctcatggaacttacaaaatgctgtgcaacctaaaacacttgcagataaggagacctattgcatcaggcttctggagcgaacagcctatgaatggacaccatatttggctctccatttgctgagagctggaacgggtgatgctacagattttatttctaaccagatagctagggaacttacacttaccgcgcctccacatgatcgacctcaccttgtatactcacagccacctcaacagctgggtgctgcaggtctctctgctttacagcggggaaaacaaagcctcagccaggtgagggaacttgctcgtgatcat

SEQ ID NO: 443 - DNA, 508 bp, Homo sapiens
  MAP TO AC020699.2; EXPRESSED IN BRAIN, SIGNAL = 4.5; EXPRESSED IN HELA, SIGNAL =   2; EXPRESSED IN HEART, SIGNAL = 4.6; EXPRESSED IN FETAL LIVER, SIGNAL = 5.2; EXPRESSED IN PLACENTA, SIGNAL = 6.6; EXPRESSED IN LUNG, SIGNAL = 5.8; EXPRESSED IN ADULT LIVER, SIGNAL = 7.2; EXPRESSED IN BONE MARROW, SIGNAL = 5.5; SWISSPROT HIT: P33244, EVALUE 6.10e+00; NT HIT: AL161547.2, EVALUE 4.80e-01
gctctggagcccacactgaattagaaagacagacagagactgtgcatcaggaggagagggggagacctagcagcggctgagagtggataaaatcagacccacaaatgagaatcccatagtgatactgagaataggtctaaggaaatattgagcacagatataagaacagatgaaatagaaaagaaggtgtttgaaattatgtgagactaaatataacagtcttgggaagatatggtttctggggcaaattagaagtgtatggaaaattctttggtggctctgtggctaaaggaaaaataaaagaatgaaaaggttaaaattaaaggccctactgaaaaaaaaaagagagtcactatatcagaaaaccgtataatatcaaaatataaaaacacccccaattaaataagtttttttttcattaactacacaagacaatgttcatgaagaagaaatctataaaggcaataaaattttctctgaccttccaccggtggttgcttgtttagga

SEQ ID NO: 444 - DNA, 524 bp, Homo sapiens
  MAP TO CHR21_22.0; EXPRESSED IN BRAIN, SIGNAL = 2.1; EXPRESSED IN HELA, SIGNAL = 5.3; EXPRESSED IN PLACENTA, SIGNAL = 1.2; EXPRESSED IN FETAL LIVER, SIGNAL = 1.8; EXPRESSED IN ADULT LIVER, SIGNAL = 1.5; EXPRESSED IN LUNG, SIGNAL = 1.4; EXPRESSED IN BONE MARROW, SIGNAL =   2; SWISSPROT HIT: Q61532, EVALUE 2.20e+00; NT HIT: AF055066.1, EVALUE 3.00e-08; EST_HUMAN HIT: BI028723.1, EVALUE 5.00e-08
aatgactgattgaggctgggcaaaaaggactgaccatttcttcccaacacaagataactctggtgagccatttcggttccacagcttcctatgaggattgctgaacctgttgggccttcattttacatcacagttgaatttttctttcttctcaatccttgcttcctgccctcctttccacaggggttgattcttgagcactagatgtttcttggactctacttcacaaagaatccaaattgtgacataagatgtatggatctcatccacaaatgtatagtctaggccctagggtcacaagatcaaattctagaggagtgaagtgagtaatttgtggagtgagtgacttcaagtatcaagtagtgagtgtggtggtgatatggcaggggccagaaactggagagcacagacctctgaaaaatcaaatttaatcacaataaaatgttgtgattttattttgaggtgaactagtttggatctgtgtctccacccaaatctcatgcccgcttgttatccccagtgtt

SEQ ID NO: 445 - DNA, 564 bp, Homo sapiens
  MAP TO CHR22_5.0; EXPRESSED IN BONE MARROW, SIGNAL = 0.77; EXPRESSED IN PLACENTA, SIGNAL = 0.93; EXPRESSED IN HELA, SIGNAL = 0.53; EXPRESSED IN BRAIN, SIGNAL = 0.71; EXPRESSED IN ADULT LIVER, SIGNAL = 1.4; EXPRESSED IN LUNG, SIGNAL = 1.1; EXPRESSED IN FETAL LIVER, SIGNAL = 0.83; SWISSPROT HIT: O15165, EVALUE 4.70e-01; NT HIT: AJ298105.1, EVALUE 6.00e-47; EST_HUMAN HIT: AI278982.1, EVALUE 9.00e-47
ctgcatgtacaacagtgggcccgtaacattataatggcactgaaaacttcctattgcctagctacgtcatggcacaatgcatcattcacatttttgtggggatgcacatataaacaagcctacagcactgccagttgtataagagcatagcacataggattatgtacagtatataatatttgatgataacaaatggttatcttactggtttatgtatttactatttttatcactattttacagtgtactcattctaattacaaaataaataagttaactgtaaaacagcctcaggtaggtccttcagggggtattccagaagaaggcactgttatcacaggagatgacagctccatgcatgttatcgcctctgaagcccttccagtgggacaagatgtggaggtggaagacagtgatattgatgagcctgaccctgtggaggcctagactaatgtgtgtgtttctgttttagtctttaacaaaaaagtttagaaagttaaaaaatagaaaaaaaagcttatataataaggatttaaagaaaggatatttttgtacacctgcaca

SEQ ID NO: 446 - DNA, 540 bp, Homo sapiens
  MAP TO AL139112.1; EXPRESSED IN BONE MARROW, SIGNAL =   3; EXPRESSED IN HELA, SIGNAL = 2.7; EXPRESSED IN BRAIN, SIGNAL =   3; EXPRESSED IN HEART, SIGNAL = 3.4; EXPRESSED IN PLACENTA, SIGNAL = 3.7; EXPRESSED IN FETAL LIVER, SIGNAL = 3.6; EXPRESSED IN LUNG, SIGNAL = 4.1; EXPRESSED IN ADULT LIVER, SIGNAL = 4.6; EST_HUMAN HIT: BE062618.1, EVALUE 8.00e-07; SWISSPROT HIT: P08547, EVALUE 1.70e+00; NT HIT: AF224669.1, EVALUE 2.00e-06
catcccattacaaagtggggaaaggatatgaatagacatttctctagagaaggccatataagactattgaaaagagaagtagtctcacagagaactttgacttccttaagcttaacaatgagggtggttaagttttttctcccttaggcagccagtttgggggacataacagtactaggcattcgtaattgagagggttcatggtcctatacatggcccactagatggaccttactgctggaaattgaatcaaggtattggggcaaatggtaatggaattgcacattacacaatttatctataccaacaatgctcttaatagctggggccataacaatggaggtttatggggccagaagacactctcccacctgggcattgtcaaggatcccagtagtggtagccttagatcctaaatcagcatcagttgtttccactttattgttatgccaggggttgcaggaatcatagttacctgtgcataggtatccaaaagacccaagaggtgcaattttaccctccctccccattatcctgatt

SEQ ID NO: 447 - DNA, 559 bp, Homo sapiens
  MAP TO AL135932.1; EXPRESSED IN BRAIN, SIGNAL = 0.61; EXPRESSED IN FETAL LIVER, SIGNAL = 0.76; EXPRESSED IN ADULT LIVER, SIGNAL = 0.57; EXPRESSED IN BONE MARROW, SIGNAL = 0.58; EXPRESSED IN PLACENTA, SIGNAL = 0.66; EXPRESSED IN LUNG, SIGNAL = 0.7; EST_HUMAN HIT: BF957112.1, EVALUE 2.00e-19; NT HIT: U13194.1, EVALUE 3.40e-02; SWISSPROT HIT: P11052, EVALUE 6.10e-01
cccttcatcctgcagtcttcttccagcactctctactgagaaagcttaacatcacacttactgtaggggagaaattcttaaaggattcacattcattattacagagcatgcatggagctgagaggcaacacagtgctaagtggcacagagggagatctaatctggtcatgctactttgtaatgtggctaatcctgttttcccaaggacctttcaccttgtgagtaaccctgaccttgtgctggcagtgtctatgaccaagactagaaatgaagtttgtggctatccagttattgttcaggtaagatatgtatggctaaagattagtcatggccttttaattaaatttaagtaaagctttgtgcttccttgtagtggaggaaaaaaaaaaactgtcatagaatcctatttgaatgttgttaaaatatttacaatagtctgcctagattttaaattgaacatgttcatgtacctcttaatttagtttaatccaacagatggtgattgtgggcttgctgcatgtcaggcactatgctagttactgaaatcaaacccaatggc

SEQ ID NO: 448 - DNA, 579 bp, Homo sapiens
  MAP TO AC016672.4; EXPRESSED IN BONE MARROW, SIGNAL = 0.74; EXPRESSED IN BRAIN, SIGNAL = 0.66; EXPRESSED IN PLACENTA, SIGNAL = 0.73; EXPRESSED IN LUNG, SIGNAL = 0.63; EXPRESSED IN ADULT LIVER, SIGNAL = 0.71; EXPRESSED IN FETAL LIVER, SIGNAL = 0.75; EST_HUMAN HIT: H58766.1, EVALUE 8.10e-01; SWISSPROT HIT: O21807, EVALUE 2.50e+00; NT HIT: AE001889.1, EVALUE 1.40e-01
ctggcagaatccaggagaaggctaagaacaggagtgacctctccaagaggcatccactccaaacccagatgacggagttagggggcatgaactgatcaagaagcagaaactggacacacaggcaggggtacttacctttctggagaatcctagaggcctcaaagtgagtgacacacacaccaagtgagtgacacccacactaaggtgccggtgggattcccaccaagaggctgcttcaggtacgcacggccgtcctgcctgcgtctgagcaccagatcctgttgagcggaagtttctgccctgctccttcacggcgtgggcacggtcgttcatcaggcatgtgcagcatcctcaaacacttctaatgctcactggtaaaaccaatccacttaaaaacacactgcatttccaggatcaatgaggagctcttaatgaccccagatcgcacgtcctcctcggccaggcccatcaccaggctagcacttgggcccttcctgtgggcacatagagaacaatgtcgtcattggttgtcctcagaattccagctctgtcctctcaagtaagtcctgggcttgtcca

SEQ ID NO: 449 - DNA, 508 bp, Homo sapiens
  MAP TO CHR22_176.0; EXPRESSED IN BONE MARROW, SIGNAL = 1.6; EXPRESSED IN LUNG, SIGNAL = 1.7; EXPRESSED IN HELA, SIGNAL =   1; EXPRESSED IN BRAIN, SIGNAL = 1.4; EXPRESSED IN HEART, SIGNAL = 1.5; EXPRESSED IN FETAL LIVER, SIGNAL = 1.6; EXPRESSED IN PLACENTA, SIGNAL = 1.7; EXPRESSED IN ADULT LIVER, SIGNAL = 1.9; EST_HUMAN HIT: BF769004.1, EVALUE 4.00e-95; SWISSPROT HIT: P33900, EVALUE 1.60e+00; NT HIT: AF068624.1, EVALUE 3.10e-02
tgcacctctactaccccagctctcaacgtgggttctctgaccagcaggaacagcgcttaggaacctacacaaaatgcagattatcagggctcaaggagaccacgctgaatgggaactctggaagtggggtacagcaacctgtgttgaagaagccctccatccacggtgaggtcagcaacctccgaccctgcaaacctgaccacgctctgcgatcctcaggactgtgccatggggactatgcctggggaccccaaggtcctcagagaaggaagattttgcccagagtcccgcagtaggtagaggagagcaaaccaggcctcgaaccagaatctcccatctctcagaagtcggtgtctacacaacaaccgctgagggatgtcaaagcagccaccagctcaacacaggggtgcactgttcccagtttctgaggcatggaagacccagaccccattatttccaagctatttgcatgatccagaacaagttacctcaactctctgggcctcag

SEQ ID NO: 450 - DNA, 564 bp, Homo sapiens
  MAP TO AL139021.1; EXPRESSED IN LUNG, SIGNAL = 0.44; EXPRESSED IN PLACENTA, SIGNAL = 0.49; EXPRESSED IN BRAIN, SIGNAL = 0.4; EXPRESSED IN FETAL LIVER, SIGNAL = 0.49; EST_HUMAN HIT: AL042761.1, EVALUE 1.00e-85; NT HIT: gi7662189, EVALUE 1.00e-122; SWISSPROT HIT: Q05738, EVALUE 1.80e+00
tcttctgcctttcatttctgtgactctaaaaataaaggcattaaatcattagacatttagtgggtaaaggctcaaattagatcacttatcaatgccaattgatttaaataacatttctagtaattagacatatttttggtatcctataatgtgaatttttaaaaatgtttttattgttttaggtgcagagtgatttggaagcaaaagtcaattctgttacagaattacttagtaaattacaggagactgataaacacctgcaacgtgttacagagcagcaaacaagcattcagaggaaacaagagaaattacattgtcatgatcacgaaaagcaaatgaatgtgtttatggagcagcacataaggcatcttgaaaagttacaacaacaacaaatagatattcaggtatctgtaataaatccagtacagattccataatcttttatcacttggatctctcagccagtattcattgataattacagtagctcattagattgtaacagttttagttctgaaatcatgatttgcttatctttcttctcctgtaatgcgggtaactctg

SEQ ID NO: 451 - DNA, 598 bp, Homo sapiens
  MAP TO AC021635.3; EXPRESSED IN BRAIN, SIGNAL = 0.35; EXPRESSED IN PLACENTA, SIGNAL = 0.47; EXPRESSED IN LUNG, SIGNAL = 0.51; EXPRESSED IN ADULT LIVER, SIGNAL = 0.35; EXPRESSED IN FETAL LIVER, SIGNAL = 0.39; EXPRESSED IN BONE MARROW, SIGNAL = 0.41; SWISSPROT HIT: Q02357, EVALUE 5.00e-03; EST_HUMAN HIT: AW662914.1, EVALUE 0.00e+00; NT HIT: K00918.1, EVALUE 2.30e+00
aaacaggcacatcaaatatatctaaccttaaagatattacattgcatctttaggtagtcataagtaatactgatgagagaaaaaagacaaaatacctctggtggttttttcattcagattcacaccatattttgccaaagctctaatcacgtcactttgcccagccatgcaagctgcatacaacaaatttctcccaacgatgtcttcttctaagagaagctgcatggcctgttcatgatgaggattctcaggatcctcaaatatcttctgcaaaccctctacatcccctgtgagagcaggttgtaaaagggggttcttagggcctgtttcctctggttcttgggcttcttcttcttcattttcctcttcttgctgtgagaaaaattctgaactctctgactctggaggtccttctgactccattaactccaaaaatacctatgaccaaaaaaataaaaaagtgataaaaatctactcaaacacatcagtatttgtttatttatttgctcagtcaactgacaatatagatggtataaaaatacttaactatttgaaaataactataaagtaagatacttcagcaattccatcaataaag

SEQ ID NO: 452 - DNA, 536 bp, Homo sapiens
  MAP TO AC012360.2; EXPRESSED IN BONE MARROW, SIGNAL = 3.1; EXPRESSED IN BRAIN, SIGNAL =   3; EXPRESSED IN HELA, SIGNAL = 1.7; EXPRESSED IN FETAL LIVER, SIGNAL = 3.1; EXPRESSED IN PLACENTA, SIGNAL = 3.4; EXPRESSED IN LUNG, SIGNAL = 2.8; EXPRESSED IN ADULT LIVER, SIGNAL =   3; NT HIT: gi14743325, EVALUE 0.00e+00; SWISSPROT HIT: P46875, EVALUE 6.60e+00; EST_HUMAN HIT: AU118757.1, EVALUE 0.00e+00
gagcctcagtaagggtgcagggcgggaagccctgatcatatcaggaagggaacactcactttttgtgcttctctagccaggcagcactgtccgtcagaagacagaagttctcagtgaccaggaggtccagcaggctgtcgtggtcagcctctgcatacagtttgagcaaggctgtgtcgatgtcctccttgtagccatttgctacctctgtgctgcggacctcgttcaggtagctcatgaggaagcgtttgcacttggccatcttctcctggtccccctgggtcagctggttcaggtctgcgtactcatgaagaggagggtgggaccgggtgaaggaggaggaggtgggcaacaggaaggggtagagagagatcagctcccggacatcaagctggccgcttctgcaattacagtgtcaaactaaatgaagcaaaaagagagaagagtacacataggcacacaaaacagcactggaggggagcgcacggtggcacacgttcacagggggctggggagctggggacagggtaatcatg

SEQ ID NO: 453 - DNA, 526 bp, Homo sapiens
  MAP TO AL137795.2; EXPRESSED IN HELA, SIGNAL = 2.2; EXPRESSED IN LUNG, SIGNAL = 4.4; EXPRESSED IN ADULT LIVER, SIGNAL = 4.9; EXPRESSED IN BONE MARROW, SIGNAL = 3.7; EXPRESSED IN BRAIN, SIGNAL = 3.5; EXPRESSED IN FETAL LIVER, SIGNAL = 3.7; EXPRESSED IN PLACENTA, SIGNAL = 5.1; EXPRESSED IN HEART, SIGNAL = 3.6; NT HIT: M90488.1, EVALUE 8.00e-03; EST_HUMAN HIT: BF093808.1, EVALUE 1.90e-01
ttgaaaacagctcatgccagccctacacgctgtcctccttcatagaatggcagccctggtttcagaggagcctgggtctttgggaagaaaaggccattgtctccttggcaaaaaggtcaaaggagctgtctcctcctccttctcctcctttttcttctcctcttcttctcccttctcctcctcctctctcttctcttccttccctgcctcctcttcattttcccctctcctggtcctcttcctcctcctcatctccctactccttctcctcctcttcttcctcatgtttgtcctcctctatctcctcctctgccttctttttgcttgtttagtctgaagctgtgactacaaaccactttttttttggtcagtatctcaactcatcaggtctgttttcataagtaaacaggcatggggtgagtagttgcagtggttgtaggtgttggaggtgccagtcctccctcacacacagctctcacccagtgttttgggtggaacctgaaagtgaggatggagcccatttgta

SEQ ID NO: 454 - DNA, 577 bp, Homo sapiens
  MAP TO CHR22_35.0; EXPRESSED IN HELA, SIGNAL = 1.2; EXPRESSED IN PLACENTA, SIGNAL = 1.6; EXPRESSED IN ADULT LIVER, SIGNAL = 1.5; EXPRESSED IN LUNG, SIGNAL = 1.3; EXPRESSED IN BONE MARROW, SIGNAL = 1.2; EXPRESSED IN BRAIN, SIGNAL = 1.2; SWISSPROT HIT: Q36551, EVALUE 5.50e+00; NT HIT: AL163201.2, EVALUE 0.00e+00; EST_HUMAN HIT: BG724427.1, EVALUE 2.10e-01
acatccatcatgctgctttgtaagccaacagtttcactaataaaaacccatttgtgaccttcactgtagtaattaacaatgtttcaggtgttaattgagatgggaccactgaagcccttttggtggccatctctgtggagtggcttcctgagctgaacactagctcaccatccttgaacagagaatccaccattagggcaaccagctgcccctgtaggaaagattaaagtgaccagtatatgcatattatcacactgcctaaaatgtcatagaatgaggcttggtttgttttttaaattttttctatttctattatttttctatcgaattatttttctatttttatttgctgggtcacagacaacagcaaattccataccttcggagttataccagctcatctgcagtaggagtagaaatatcaaagctctcagtctaccaccttgtgctccagagatgtggcccaagcacatctttggacgtgaatcagggcaacccaaggcagagctggatttctgggagtttctccctgtaagccctggacctgcttacctatagaccagactgcttccagagc

SEQ ID NO: 455 - DNA, 538 bp, Homo sapiens
  MAP TO AC012348.4; EXPRESSED IN FETAL LIVER, SIGNAL = 2.3; EXPRESSED IN BONE MARROW, SIGNAL = 2.6; EXPRESSED IN HEART, SIGNAL =   2; EXPRESSED IN PLACENTA, SIGNAL = 2.6; EXPRESSED IN LUNG, SIGNAL = 2.4; EXPRESSED IN HELA, SIGNAL = 1.1; EXPRESSED IN BRAIN, SIGNAL = 2.2; EXPRESSED IN ADULT LIVER, SIGNAL = 2.6; EST_HUMAN HIT: AI807594.1, EVALUE 7.50e-01; SWISSPROT HIT: P26264, EVALUE 3.80e+00; NT HIT: M38686.1, EVALUE 2.00e+00
ttattgtgaggtgggggaagtgaccagttaattataaataacaacaaagctacccacttgtgctattcggaaacaagggtccatccctccatagaaataagactaagtatgtgttattaaggtagtggtctgcaatgctgatatcttggctttccaagtgatactcacagcatgaatatatggatacatggcagatttgcttcagggagtggctgtccaggccgtgtgcttttggaggtggtgagctcttgatgctgcaagagaagagagccatcagctgatgttacttaaggaaaagtagggaaacggggctgacagagacagctcagcaggctgtgccctgcaaaagagctctgctgaggaaccagtagtgacggaaacctaggcgctgtatccaactcgagggggatgtttctttaatcacaggtaagtcctgggtaggagaatggcgccctggatttaacaaaactagaatgaatggaaaagaatacttctgagactagtttcctggacaataccccaaacctactcatcccct

SEQ ID NO: 456 - DNA, 590 bp, Homo sapiens
  MAP TO CHR21_26.0; EXPRESSED IN PLACENTA, SIGNAL = 2.1; EXPRESSED IN ADULT LIVER, SIGNAL = 2.2; EXPRESSED IN LUNG, SIGNAL = 2.2; EXPRESSED IN BONE MARROW, SIGNAL = 2.8; EXPRESSED IN BRAIN, SIGNAL = 2.2; EXPRESSED IN HELA, SIGNAL = 4.2; EXPRESSED IN FETAL LIVER, SIGNAL = 2.4; EXPRESSED IN HEART, SIGNAL = 1.7; EST_HUMAN HIT: AI346114.1, EVALUE 2.00e-85; NT HIT: AJ271735.1, EVALUE 2.00e-84
aaccctttactcgtttgcccagagaatactccccggcagcacttgcactctagataactttgccacgatatatcttgcttttattgttactttggcatcgctgtagtttattgactttggaaacaaaagacatcattctatttatagcattctgtttttagtagtggtatttcaatttacaaaatacagtaattctcaattgctgaaaatgtcaactcctagaaaacgtagctccttctcgtgctgttaacatcgttctcgaacagctgttcgcggaagattcatttgatgaatctgatttttccaaaatagatgattctcatgattcagatgattctgatgttagttctgattacgaataactccaagaacagtttttatattctatttcctcattgaaaatcagttagatttggtttagcttcaaagagcatgtttacgtaaaattaaatgagtactggcagtgagctgcacttttttatttctaaacaagaaaagggttaaatcttatataattcaagtttattggtagtatcaacagtactgatagtagtaattgtaatcataggatggtggcactaattacaaaa

SEQ ID NO: 457 - DNA, 580 bp, Homo sapiens
  MAP TO AL138784.1; EXPRESSED IN FETAL LIVER, SIGNAL = 8.1; EXPRESSED IN LUNG, SIGNAL =  10; EXPRESSED IN PLACENTA, SIGNAL = 9.3; EXPRESSED IN ADULT LIVER, SIGNAL =  10; EXPRESSED IN BONE MARROW, SIGNAL = 9.5; EXPRESSED IN HELA, SIGNAL =   6; EXPRESSED IN BRAIN, SIGNAL = 7.2; EXPRESSED IN HEART, SIGNAL = 5.9; EST_HUMAN HIT: BI085622.1, EVALUE 1.00e-82; SWISSPROT HIT: Q36424, EVALUE 1.90e+00; NT HIT: gi13632653, EVALUE 4.00e-82
caaaaacaacccactcctggcacagaagtaggaataaaatagtgaaatgtcttctaggtcagatttttatagttatgtttcatttcttattgaagtcttgccaatgcttaaaatatcagatactcccacaataaattacaagctcaaaaacacattccaaagccaatgacaaagacttttggattattcaaaccattgtgttctgctaactacagcatattctaacaggtcaaacaactatataataaacctatttcaaatggtaattctaaaaattaaatccaaatagcaaatacctagcataaaccaatgttataacactttaaaacaatctaatctaaagtccttttacacattcttcaaatataaatagcaagaagacataactccttactcctttttggtttcctcagaagacttattttcttccttctcttcattctcaggttccccctttggctgctctgcctcactcgaagtagcaggtggagtttcattctcttgttcttctacagtggagacagattcctctgaacttatgtctggttctaaaaaatcaggtgagcagaattgcataagc

SEQ ID NO: 458 - DNA, 575 bp, Homo sapiens
  MAP TO AC016683.4; EXPRESSED IN BONE MARROW, SIGNAL = 3.5; EXPRESSED IN BRAIN, SIGNAL = 3.8; EXPRESSED IN HELA, SIGNAL =   2; EXPRESSED IN PLACENTA, SIGNAL = 4.2; EXPRESSED IN LUNG, SIGNAL =   4; EXPRESSED IN FETAL LIVER, SIGNAL = 4.1; EXPRESSED IN ADULT LIVER, SIGNAL = 3.4; EST_HUMAN HIT: BF908525.1, EVALUE 5.20e-02; SWISSPROT HIT: Q9Z1S5, EVALUE 3.40e-01
tggatcaacctgagggagaggtcacatggccttttctagagataagtcagaaagaatggcagttgcaggggatggggagtagtagttgaggctggtgacacttcccttccagtaaaagaaacagagtgagaggctaattgggtcttagtctttgcattttgtatatgtatatgtatgtgcatgcatgtgggttgttctttccatttaccatcttggaagtcttcaaagaattagtgtccaggaccactggtcaaacattataccttttgttggttgctttccccctggttggtattttcttttatggaaagggagctacagaggagggatcacagaactggagagagggccagcaaacattctgagtctctgaggactaaggctagtccacgagaagctggcctgggtttgtgaaggaggtctcaggtctcagctcttaagattttcttctgggattccaagacagtgtcctctgctgcttctttccgctggctggactctgcctgtaattcaggcaggagccaccaggtggagaaatgtgtagatgacatcctggggacacacacacacacaca

SEQ ID NO: 459 - DNA, 578 bp, Homo sapiens
  MAP TO AC024066.3; EXPRESSED IN BONE MARROW, SIGNAL = 1.2; EXPRESSED IN HEART, SIGNAL = 1.2; EXPRESSED IN PLACENTA, SIGNAL = 1.3; EXPRESSED IN LUNG, SIGNAL = 1.3; EXPRESSED IN ADULT LIVER, SIGNAL = 1.3; EXPRESSED IN HELA, SIGNAL = 0.95; EXPRESSED IN BRAIN, SIGNAL = 1.3; EXPRESSED IN FETAL LIVER, SIGNAL = 1.3; EST_HUMAN HIT: AI792758.1, EVALUE 1.00e-122; SWISSPROT HIT: P45052, EVALUE 8.40e-01; NT HIT: gi14784786, EVALUE 1.00e-122
agatggaaaagatggaccccttgccctctggtagcctttagcctctttgagtcttagttttctcatctgtaaaactgggcgggtgagaggatgaaaggaaatgtatttgtaaagcacctcttaagtgccctataactgatatctattatttgtaacatgggattcataaacttgtagagggttaagatgctccaatgagctagaagaagcaaaagtcctttttaaaggacaagtccatatgtgagggaaaattctctcgcatttatttcttggcagcatgaattcgatgacttcagcagttccggtggccaattctgtgttggtggtggcaccccacaatggttatcctgtgaccccaggaattatgtctcacgtgcccctgtatccaaacagccagccgcaagtccacctagttcctgggaacccacctagtttggtgtcgaatgtgaatgggcagcctgtgcagaaagctctgaaagaaggcaaaaccttgggggtaagtgagatttccctttgcaggccacagactgcacagctggagtgatggcagggggaagggaaggcctgggaaatacaca

SEQ ID NO: 460 - DNA, 566 bp, Homo sapiens
  MAP TO AL137009.2; EXPRESSED IN FETAL LIVER, SIGNAL = 3.8; EXPRESSED IN BONE MARROW, SIGNAL = 3.7; EXPRESSED IN HEART, SIGNAL = 2.9; EXPRESSED IN BRAIN, SIGNAL = 2.8; EXPRESSED IN LUNG, SIGNAL = 3.9; EXPRESSED IN ADULT LIVER, SIGNAL = 4.7; SWISSPROT HIT: P33908, EVALUE 2.00e-18; NT HIT: gi14757431, EVALUE 3.00e-89; EST_HUMAN HIT: BE777662.1, EVALUE 2.00e-84
cagcagagtttcttcctggcagagacattgaagtaggtgaaaattattctaaaaccatgtggctaaggtacctgaacagatctttgtagatgtctttatcatgaacacattcaagtaatatcaagtatgcctgattcagaatatcaggcatggctataattgcaggtatattctcaataactaggttcagtgacttggtactgctaacaccaaagcactgagtagctgctttaccccatgttaatgagtataacccctcagggttttgatatatttgactcttgtccatgtttcttggtaagatgaatgcagacattgatgtggtttttgctgtgtgtttgtggtttcactgcctgcctagtgtcttgggcctcatatacttatgtttctctcaccagatatttgtacctaatattttctgacgacgatcttcttccactggagcattggatcttcaatagcgaggcacatcttctccctatcctccctaaagataaaaaggaagttgaaatcagagaggaataaaaagacattttatattttattctgctccattcccttcactg

SEQ ID NO: 461 - DNA, 539 bp, Homo sapiens
  MAP TO CHR22_216.0; EXPRESSED IN LUNG, SIGNAL = 1.3; EXPRESSED IN BONE MARROW, SIGNAL =   2; EXPRESSED IN BRAIN, SIGNAL = 1.7; EXPRESSED IN PLACENTA, SIGNAL = 0.99; EXPRESSED IN ADULT LIVER, SIGNAL = 1.3; EXPRESSED IN HELA, SIGNAL = 3.9; NT HIT: AJ251973.1, EVALUE 8.00e+00; EST_HUMAN HIT: F06353.1, EVALUE 4.80e-02
gaagaagcacccagttgagcccagttcagattacagaatttagagagatgataaaataattgttgtttgaagctactatgttttgttgtagtttgttgtaaagcaatagataaatgaagcactggctcatacattatgaagttgttgttaggactaagatagtgcatgcaaattgcttagcacggtgactggcacaaagaaagtgctcattaagtatcaatgattcttcttgttgttgataataatgattacaatgattcttcttcttcttgttaatatgattcttcttcttcttcttcttcttcttcttcttcttcttcttcttcttcttcttcttctcttcttcttcttcctcttcttcttcttcttcttcttcttcttcttcttcttcttgttgatatgattacaacatgtttgttgcctaaattaggtcatgaactcactgagggtgacaagtgtgtcatatgcatcgctgtactcccaggatccagcacaggacatgcatattgtaggtagtaggtcattgctggtttcaacga

SEQ ID NO: 462 - DNA, 552 bp, Homo sapiens
  MAP TO AC018715.3; EXPRESSED IN BONE MARROW, SIGNAL = 0.69; EXPRESSED IN BRAIN, SIGNAL = 0.85; EXPRESSED IN FETAL LIVER, SIGNAL = 0.71; EXPRESSED IN PLACENTA, SIGNAL = 0.88; EXPRESSED IN LUNG, SIGNAL = 0.75; EXPRESSED IN ADULT LIVER, SIGNAL = 0.67; EST_HUMAN HIT: AI806312.1, EVALUE 4.00e-15; SWISSPROT HIT: P97353, EVALUE 4.00e+00; NT HIT: M29041.1, EVALUE 1.30e-01
aatcccttccctggaaacacagaataaattcctatagaaagttataaagcagaaaaacaaggtatcttttgtggagtaaagaatgattatggaggaaaaacaccattaactgtcacagaaataattgtgtcattcagcagaatggtagctctaaggaagacagcagcaatactcaaggtacagccattcttctggaacaagtcccaccaatctgaagctggagtcaatggtggtgacagtggtgacattgcagaaaagtaagaaagttgagggagggattcaggagaaacatggctgttggaattagacactcaagatctaaactaaatgggattagtaatgataaaaggataaatggttgatttctcccatcaccactttgcctggaaatattgaaaagcaggaacccagtggtatggttgacttctctagagctactgacaataaaatgggctgcaacaaccaccacacacacacaaaaaaaaaaatcccagtgggattcttgttaatagggacatttaggaaagggtgggatgctcactcacccaggtt

SEQ ID NO: 463 - DNA, 506 bp, Homo sapiens
  MAP TO AC022263.3; EXPRESSED IN PLACENTA, SIGNAL = 1.4; EXPRESSED IN BONE MARROW, SIGNAL = 1.3; EXPRESSED IN HEART, SIGNAL = 1.4; EXPRESSED IN ADULT LIVER, SIGNAL = 1.5; EXPRESSED IN BRAIN, SIGNAL = 1.5; EXPRESSED IN HELA, SIGNAL = 0.62; EXPRESSED IN FETAL LIVER, SIGNAL = 1.1; EST_HUMAN HIT: AL521707.1, EVALUE 1.00e-61; SWISSPROT HIT: Q58618, EVALUE 6.10e+00; NT HIT: AL163303.2, EVALUE 4.00e-20
cccactgttgagacctacagctcagaaaaaagattcatttcaaatacttcagctttttgacaatgtacctggtgactaaagagctctaatggagatgtacagggaaacgcatgctggtttcatgcctgccaacacaacatctattctgtagtcaatggattgaggcatcattttgactttcaagtcttattatttgagaaatatattttataaggctgttactgccataggtcatgattcctttgatggatctgggcaaagtcaattggaaaccttctggaaaggattcactatggtagatgccactaagaacatttatgattcaccagaggaggtaaaaatagcagcattaataggagtttgtaagaagttgattctgaccctcataaatgactttgaggggttcaagaccttagcagaggaagtaaccacagttgtggtgaagatagcaagagaactagaattacaagtggagcctgaagatgtgagtgaactgctgcaatctt

SEQ ID NO: 464 - DNA, 599 bp, Homo sapiens
  MAP TO AC011225.5; EXPRESSED IN BONE MARROW, SIGNAL = 0.42; EXPRESSED IN BRAIN, SIGNAL = 0.49; EXPRESSED IN PLACENTA, SIGNAL = 0.63; EXPRESSED IN LUNG, SIGNAL = 0.71; EXPRESSED IN ADULT LIVER, SIGNAL = 0.67; EXPRESSED IN FETAL LIVER, SIGNAL = 0.5; EST_HUMAN HIT: BG188809.1, EVALUE 8.40e-01; NT HIT: AF036967.1, EVALUE 3.70e-02
cttcccttctcacaggcaaccacaaatttgatttctatccccataaagagttttgcttgttcctcacacttactagggaatccttttttttttttttaagtactatttgttttattgtggaatatgatttgaaaaatgctgggttatcactttataactttcaatgaattttcatattaattatctgatttaattcaaaataataagaaaagaatgctttaagtgccaaatgagtgatttatacagtggtttccataggaatttagatgaaaacatgtcacacaaggttagtttgaattggaaaagcttcccagtggttgccaaccaaacatcaacttgacctttgggatgggtcaagtgggaagaaaaggagagggagttccaatatgtaggaaaggggtgggctaagatttaatgatggtgatgtgtattatatatcagaagagcaacatcgagaatgagagcactgagaatgaagctacatttcagactccacaggtcctgctccccagtcttgagtgcatcacagtatgcctggagaggcactgctttcctgacctctggtgagatatttttcctgcacagtctgggaagttgtg

SEQ ID NO: 465 - DNA, 593 bp, Homo sapiens
  MAP TO AC018678.5; EXPRESSED IN BONE MARROW, SIGNAL = 0.84; EXPRESSED IN LUNG, SIGNAL = 0.88; EXPRESSED IN BRAIN, SIGNAL = 0.93; EXPRESSED IN ADULT LIVER, SIGNAL = 7.7; EXPRESSED IN FETAL LIVER, SIGNAL =   7; EST_HUMAN HIT: AV684166.1, EVALUE 2.10e-01
agaaaggaagtgctgcaaggataagttgaggcaggagctgcttgacaccatcaagtagaaaggcctgcctgagaaaatgtcatcatagaggaaagcatatagaagaacaggctgagttctgatgacattgattgaggccttggatttagtggtttctgaagcttttaacctgggacttggcagttttgttagctaatatatttttcttttcttcttaacttgcaaatagcaagtctaaagaaaacaaagttgaaagcaaactttaaattaaatttgcacaagcagttatcatcactgccctcagaagaaccattattaaactggtaagtgttgaaaggattagtgatatgcactttaattccataaatatttatttaggtgaggggactgagacctgggagattcatgctctttatattatgcattaggtagaacaaaactaatcttgttaagaattggtggggacgggggatagtgagtatcttggcaatcactaacaaaatggccaccatccttagaaaggaaaaactaaaaaataaataaataaaataaaaacaaaaaaacaaaaaaaaccactttgtttccccctgcta

SEQ ID NO: 466 - DNA, 583 bp, Homo sapiens
  MAP TO AL138691.2; EXPRESSED IN BONE MARROW, SIGNAL = 0.48; EXPRESSED IN BRAIN, SIGNAL = 0.88; EXPRESSED IN FETAL LIVER, SIGNAL = 0.43; EXPRESSED IN ADULT LIVER, SIGNAL = 0.65; EXPRESSED IN PLACENTA, SIGNAL = 0.6; SWISSPROT HIT: P21917, EVALUE 5.60e+00; EST_HUMAN HIT: N74930.1, EVALUE 2.10e-01; NT HIT: gi14861871, EVALUE 9.00e-03
gccttgtagcaccttccttgcacaattgtcccgtgtagaaatttcagttatctcagtttagttaaataacaccagtttcccaaatttcacttaccatggtatatgagctacaaataattgcatggaatacaaacttcagtgctagctcctcagtcataagtcacagctgtgtctgtgactgagctcctgcacagacagcaaagcatgcagttgtaccacctcctcatctcccagggacacccctacggcattgtgcagagatgcattctcaacagaggggattggctggcaaaggcagagtgcaccaaagaactggaaactggtaacaaggaaaaggaaattcaaactgaacagaaacaaggtttaagaataaagcacaactgtgatacgagggacactgcccttgggcagctcggaggaatcgtgtcagtgtgatgagggcagtggctgtcacaggatggaggcatcccagggaaatgaggctggcaagacacttcacacaaaaggaacactcgtgtttcctggccctaagggtgcaaagagcaaaatactgagaaaggaatccgaattctccaaggcatag

SEQ ID NO: 467 - DNA, 593 bp, Homo sapiens
  MAP TO AL133418.2; EXPRESSED IN PLACENTA, SIGNAL =  25; EXPRESSED IN LUNG, SIGNAL =  25; EXPRESSED IN HELA, SIGNAL =  12; EXPRESSED IN FETAL LIVER, SIGNAL =  21; EXPRESSED IN ADULT LIVER, SIGNAL =  23; EXPRESSED IN HEART, SIGNAL =  17; EXPRESSED IN BONE MARROW, SIGNAL =  23; EXPRESSED IN BRAIN, SIGNAL =  19; SWISSPROT HIT: P29374, EVALUE 9.00e-05; EST_HUMAN HIT: BF058966.1, EVALUE 0.00e+00; NT HIT: AB030181.1, EVALUE 0.00e+00
ggggaaaccctaaaataagtcaacatacacattttccttctcacctttttcaggatgttctggttctggctgattactactgcttgagctcacactggcatcaaaacctgctggcgagctattcccttcagactggaggtcttggagctccccagcaacactatccacctcaattgtgctatcagtttcactcttgatacttcgaacctcttcttggtttggagccagtggttctgatactgttacagaagactgctgccggctgccttctgttacagtgactgatgaaggcgattcaggtgtagtaggaggggtatttagcactgaattactgccactacttggaaattctgcttttctgtcattgacctctactgttttttcttcaatgggtttactatcgacattgactggaggtggtttttctagttctacactgggtgaacaactctcctcttcagccacagtctgcagtgactcctctgccaccccctcctctggggcaggatgcggtggggaagctgcagcctcagtatcagagtctgaaaaaagctctttcagcgtttttttaggccactgtccctgaatacttg

SEQ ID NO: 468 - DNA, 510 bp, Homo sapiens
  MAP TO AC022579.3; EXPRESSED IN FETAL LIVER, SIGNAL = 3.6; EXPRESSED IN HEART, SIGNAL = 3.1; EXPRESSED IN PLACENTA, SIGNAL = 3.7; EXPRESSED IN LUNG, SIGNAL = 3.5; EXPRESSED IN BONE MARROW, SIGNAL = 3.6; EXPRESSED IN HELA, SIGNAL = 1.9; EXPRESSED IN BRAIN, SIGNAL = 3.2; EXPRESSED IN ADULT LIVER, SIGNAL = 3.7; SWISSPROT HIT: Q91684, EVALUE 1.20e+00; EST_HUMAN HIT: BF923605.1, EVALUE 1.00e-88; NT HIT: AB011128.2, EVALUE 9.00e-89
ttctcagcagtcacacctccccttaacaagcctgacacagccaggctagtgccaggcagtggggacgtacttggggccgagggggtgggggccccactgtgatgcctcctgtgcccactgagccgcccccctgccgctccgtccccattgctgcaggttaattgatggcaccaacatcaccatggaggatgagcatatgtggctgatccccttctcgccggggctggaccatgtggtcacgatccgcctggacagggccgaaagcatcgcaggcctgcgcttctggaactacaataaatctcccgaggacacctatcgcggggtaagctggggagcagtggccgtgctcagtccagcatcagggaagcagcaccttgatgaatggctggcgtggcagccagagaggagcataaatcctccagaattttccaaacggagctgggggcgttatgtccagggagagagagagctgctgtttccttctgcaaatggcaaatgcaggctaaagag

SEQ ID NO: 469 - DNA, 515 bp, Homo sapiens
  MAP TO AL137185.3; EXPRESSED IN HEART, SIGNAL = 3.8; EXPRESSED IN LUNG, SIGNAL = 5.9; EXPRESSED IN PLACENTA, SIGNAL =   5; EXPRESSED IN ADULT LIVER, SIGNAL = 5.6; EXPRESSED IN FETAL LIVER, SIGNAL = 4.3; EXPRESSED IN BONE MARROW, SIGNAL = 4.6; EXPRESSED IN HELA, SIGNAL = 3.5; EXPRESSED IN BRAIN, SIGNAL = 4.4; NT HIT: AL163247.2, EVALUE 7.60e+00; SWISSPROT HIT: Q04182, EVALUE 2.10e+00; EST_HUMAN HIT: AI694627.1, EVALUE 1.80e-01
gaaaggccagtacctgcaacatgattaattcatattataattatgtttttaattaagttacactcagtttctattctgattcttaaatatgtattaaatatgtcatgctttataggcccagtgatcaacattgataaccttctggtttggaaaaggttgaattcgaccattgccattaattccttagttcagaggaactctctgatgggtaatagcagcagaattttacagttgcttttaaattttctaattctcttacaagtggctcatactgtgtagcttgttgctaaatcttatcgcccagtttccatttttctttataagtgacatcctggataccagaaaacaaaaaatgaggatcataaaactggggtgattgtgtggtataggaaggagaatgcctccatgtttttatataccaacttccttttttctctcctttaaccttcattacccatatacttaagttgtgagcaggtggacattatctgtgagcagcagaaggctgaacacag

SEQ ID NO: 470 - DNA, 578 bp, Homo sapiens
  MAP TO AL137855.1; EXPRESSED IN PLACENTA, SIGNAL = 2.2; EXPRESSED IN LUNG, SIGNAL = 2.9; EXPRESSED IN HELA, SIGNAL = 1.6; EXPRESSED IN BRAIN, SIGNAL = 1.9; EXPRESSED IN ADULT LIVER, SIGNAL = 2.2; EXPRESSED IN FETAL LIVER, SIGNAL =   2; EXPRESSED IN HEART, SIGNAL = 1.8; EXPRESSED IN BONE MARROW, SIGNAL = 2.1; EST_HUMAN HIT: BG958652.1, EVALUE 8.10e-01; NT HIT: Z46771.1, EVALUE 8.60e+00; SWISSPROT HIT: P53967, EVALUE 4.30e+00
tcaacaaagaccagttccccacctcctgcatatccaacagcaagacagctcattgtgtgcctgagacccgggctccccacactcaccttgtcctccccactgacagtccagagatgctgagatgttatgcaatttggaatgtgccttttcagacacaccagttaatcaccccaggcttgaccaccctctcaatctccgagcacacttacttcttaatcaacttcttcttgtctggattcacctttatttcttccaagtgccgctctctctcctctagaagggaatttatgctctcttctagcattcatttcccaacctcttctgttaacagtcactaaggcaaagacttaattttttaaaggaatgccttttccttgtctataaattacactgagtgagtctctgaggccctgacaacccttccactgaggacttgttgaatgtggacttgaaaaacagcttatttatctctctccttactgttgtctcccttgctattctcatcttgacatccccttaccaatttggttttgtctcttaaaatcactctaatcttaccagggttttggatagcttgg

SEQ ID NO: 471 - DNA, 513 bp, Homo sapiens
  MAP TO CHR22_179.0; EXPRESSED IN BRAIN, SIGNAL = 0.84; EXPRESSED IN PLACENTA, SIGNAL = 1.1; EXPRESSED IN ADULT LIVER, SIGNAL = 1.2; EXPRESSED IN LUNG, SIGNAL = 1.1; EXPRESSED IN FETAL LIVER, SIGNAL = 0.91; EXPRESSED IN BONE MARROW, SIGNAL = 0.94; SWISSPROT HIT: P34391, EVALUE 2.20e-02; EST_HUMAN HIT: BE391170.1, EVALUE 1.00e-112; NT HIT: AB002059.1, EVALUE 0.00e+00
cgcgcaatgagatatttgtggaaggaatgaagagttccgtgtggctggagtggaagaggagtggggcaaggtggggtgtggggagcaggaaccagagcacatgctccctggcgatgtgcagcgcggtcctgccaacccccacccatccctgccccaggaagctgagctttcatggccatggtgccctgcgcaggcgttacctgcttggtcattcagctggttgtagctcaggtccagggacttcaggtctgtgtgggccagcaggagttcggcaaggtgctgggccgcctgctcctccaggccattccctgacagctgcatcttccgcatggcctggttcactgtgagggcggcacagagggcctgggctcctgccactcccagctggttctccgacaggtccacatctgggggacagaaccactcctcggccagtgggatgcaaagccaggcactcccctacttctgccatcccccaaacctccaggtctgaggctgaggaaggggacttac

SEQ ID NO: 472 - DNA, 597 bp, Homo sapiens
  MAP TO AL138843.2; EXPRESSED IN HEART, SIGNAL = 5.2; EXPRESSED IN PLACENTA, SIGNAL = 6.8; EXPRESSED IN BONE MARROW, SIGNAL = 6.1; EXPRESSED IN LUNG, SIGNAL = 6.8; EXPRESSED IN BRAIN, SIGNAL = 5.4; EXPRESSED IN HELA, SIGNAL = 3.7; EXPRESSED IN ADULT LIVER, SIGNAL = 7.2; EXPRESSED IN FETAL LIVER, SIGNAL =   6; SWISSPROT HIT: Q9UL18, EVALUE 4.00e-13; EST_HUMAN HIT: AW589952.1, EVALUE 1.00e-121; NT HIT: gi13376274, EVALUE 1.00e-121
ggtttctgtatggctggaggtgtccttactcaattgacttcactggaaacatacgttgtatgtcaattcatctttcagtacttcctctcagagaatatacttggactatttaagcgaagtacattgtgcgtaaggtatcttggtgaatctgtacagccttggcaagagcttgtggatctcgcccattgctttgtcctgaaacgtgacttccttcagcactgtaagagaagtggcaatgaacacaaaaacaaactttctattctgatgtaataattccgaaaaatactatttgttgtagaaaatttcaaaattattaacaaataagagactggtgtaacaatctatgtgtccatcactcagcttcaatcactattaactcaaggccaattttgttttacttctctcacctccccagaattaattagaagcaaacctagatatcgtatcattttgtctatctgtctgaatgtatcactttattaccaataatctctcctttgaattaatgtagtaaaacaactaagttactacatgattctattactaatgagcctagacaatatatttcaataggaaaccttgggcagtcagttctgt

SEQ ID NO: 473 - DNA, 518 bp, Homo sapiens
  MAP TO AC019277.4; EXPRESSED IN BONE MARROW, SIGNAL = 0.49; EXPRESSED IN PLACENTA, SIGNAL = 0.64; EXPRESSED IN LUNG, SIGNAL = 0.47; EXPRESSED IN BRAIN, SIGNAL = 0.56; EXPRESSED IN ADULT LIVER, SIGNAL = 0.53; SWISSPROT HIT: P38775, EVALUE 3.70e+00; EST_HUMAN HIT: AL521707.1, EVALUE 1.00e-64; NT HIT: AF288742.1, EVALUE 4.00e-29
gtggtgttgggctaaggttgggatggctgtggcaaagtcttaaaataagacagcactaaaatttgccacgtgaatggactcttgctttcacaaaagacttacgtgtagcatgagaggctgatagcattttacacacagtagaatttctttcaaaattggagtcaatcctttcaaaccccgccatagctttaaaaactaagtttatgcaatattccaaatctgttatgtcatcaatgttcacaacattttcaccagaagtagatatcatctcaagaaaccactttgtttgctcatacataaaaagaaatctctcatccattaaatttttatcataaaattgcagcaattcagttatatcttcaggcactacttctagttctcttgctatttacacataggcagttacttcctccactgaagtctttaacctctcaaagtcatccatgagggttggaatcaacttcttccaaactccagttaatgtcaacattttgaattcttcccatgaatcacaaacg

SEQ ID NO: 474 - DNA, 565 bp, Homo sapiens
  MAP TO AL138996.1; EXPRESSED IN HELA, SIGNAL = 1.4; EXPRESSED IN PLACENTA, SIGNAL = 2.5; EXPRESSED IN BRAIN, SIGNAL =   2; EXPRESSED IN ADULT LIVER, SIGNAL = 2.3; EXPRESSED IN LUNG, SIGNAL = 2.2; EXPRESSED IN HEART, SIGNAL = 1.6; EXPRESSED IN FETAL LIVER, SIGNAL = 1.9; EXPRESSED IN BONE MARROW, SIGNAL =   2; SWISSPROT HIT: Q9JMJ2, EVALUE 1.80e+00; EST_HUMAN HIT: AA376857.1, EVALUE 3.00e-03; NT HIT: L78810.1, EVALUE 3.40e-02
atggatgaggaaactgtggctcaaagcatcaggtcatctggcttcagagtctgtgctcttaaccatgttattttgtgtgctgcctcccgtggctttttgtgaggattaaatgaaatggtatatatcagctgcttggttcagtgcctggcacatcctatgggcttagttactgtggtctttgttaatgagaatgagaatactcctaatgttaccatcattatcatcacccatagaatatatttgggagaggcaaagatggaagtggtgggcctgaagggcatattgtggcagcaactctgcccacctgtggactccaggggtgatatggacacagggacaagggcaggtcccctgggacaggcagctgcggtagactcatctgtgcacttccacagtgtatctgtgtccgtttacttcagcatctgaacatctttatgtgagagagaataaggtgggaactcttcaggccaaggcttaatcacacgtacagatgaggatttattgccactgaggacttaggaaattgccatggaggtagatggaatgggaatggtttttacccacc

SEQ ID NO: 475 - DNA, 575 bp, Homo sapiens
  MAP TO AL137846.1; EXPRESSED IN BRAIN, SIGNAL = 0.45; EXPRESSED IN ADULT LIVER, SIGNAL = 0.56; EXPRESSED IN FETAL LIVER, SIGNAL = 0.53; EXPRESSED IN PLACENTA, SIGNAL = 0.62; EXPRESSED IN LUNG, SIGNAL = 0.5; EXPRESSED IN BONE MARROW, SIGNAL = 0.44; SWISSPROT HIT: O67287, EVALUE 1.40e+00; NT HIT: gi13637558, EVALUE 8.60e+00
gttggggtcaaatgttctggactttttcaaggatcgtgaactattctggcaaagagctttccagaagctcctattataccattttgccttcccactagcaacccttaaaggtgctcatctcaccagatcatccctaacactgagtattatcattacagaaaaggtctttgtcagacctgatggccccatggacacagttctgtcctcctcttgcttgctggagtctgtggtgctggactcaggtgctctccctgcatctccgggcactctgatcttggcggctgtgatgtcactcccctctagttccccttcactccactctttgcccactcggtctttgcttgcctgacacatgggaccatccctagctctcttctctcccttgcccactctcctgtgttgtcttcacatttgggacttccacagccttctcgctgctgttggagaactcctgcaactctctccccagcccagacccttctctcgagctccagggacccacggggacctccaatgcaacgtgtccccaaggcacccacgtggaccttcctgctaccaaagtcagataacccgga

SEQ ID NO: 476 - DNA, 512 bp, Homo sapiens
  MAP TO CHR22_128.0; EXPRESSED IN BRAIN, SIGNAL = 1.1; EXPRESSED IN HEART, SIGNAL = 1.2; EXPRESSED IN HELA, SIGNAL = 1.1; EXPRESSED IN LUNG, SIGNAL = 1.4; EXPRESSED IN ADULT LIVER, SIGNAL = 1.4; EXPRESSED IN FETAL LIVER, SIGNAL = 1.1; EXPRESSED IN BONE MARROW, SIGNAL = 1.2; NT HIT: AL163227.2, EVALUE 3.10e-02; SWISSPROT HIT: P04352, EVALUE 3.70e-02; EST_HUMAN HIT: BF769284.1, EVALUE 7.20e-01
tgaaaagaaactggctggagcagcgctacatgcaaaatatgaccgagtagctgttgatcgtgatcatctacatcagccttaattaactgaattatgaaaaacaaaacttcaactgctcagtggcaacagtggggacaaagacaggagaggttacctgctcccctgatctacctcagcttgtctggaattgagggattctaagtatgtacaacatacagcacctgagccaacacgtcctgaaactgttctcgtgtgagcggcatcaggaagtctgtgatgattcttctcagttcactttttgacacagtcaagttctgaccagtatccagcagctgaaaggctttttgcaactcatcccctctgtcggtaattttttgaaataaaatccgtttaacatctaaggaggacagtgttggatttgcaacagctgtggctataaaagagatacagctatttattaaacatgtttaaagccaagatactaaacagaaactcttgcactgttgaacgga

SEQ ID NO: 477 - DNA, 523 bp, Homo sapiens
  MAP TO AC021609.3; EXPRESSED IN PLACENTA, SIGNAL = 0.48; EXPRESSED IN LUNG, SIGNAL = 0.67; EXPRESSED IN BONE MARROW, SIGNAL = 0.45; EXPRESSED IN BRAIN, SIGNAL = 0.68; NT HIT: gi16159207, EVALUE 3.00e-61; SWISSPROT HIT: Q08462, EVALUE 2.00e-17; EST_HUMAN HIT: R15999.1, EVALUE 4.00e-61
tgtttgcagtgccttgtagcattagaatttgccagcattcctttctgcctaaagctcaggtttgggacaaaggggaacagtttccagctgtgatgctctaacttccatctgcctgtgtgtgtttgttctcaggagcccgagcggcagtacatgcacattggcaccatggtggagtttgcttttgccctggtagggaagctggatgccatcaacaagcactccttcaacgacttcaaattgcgagtgggtacgttctgcaaaagaggtctcggtttcagttgtggcaaagatgtggaataaggagtaagtcataggagatattgatgatcctttcagtgttggagtagaacaattacaaatgcatcccgttgcaagactggatgacagaaggaaggacacttttgaacaaattagaaaaaaaaaaaccctttggttggacctaggctacctgcactcagtcaaggtcgcgtctacaaacacggcacgcacagccttgagccatcctgcgttgctgattcactgt

SEQ ID NO: 478 - DNA, 593 bp, Homo sapiens
  MAP TO AL136134.1; EXPRESSED IN HEART, SIGNAL = 1.5; EXPRESSED IN PLACENTA, SIGNAL = 2.1; EXPRESSED IN BONE MARROW, SIGNAL = 2.2; EXPRESSED IN BRAIN, SIGNAL = 1.7; EXPRESSED IN LUNG, SIGNAL = 2.4; EXPRESSED IN ADULT LIVER, SIGNAL = 2.4; EXPRESSED IN HELA, SIGNAL = 1.4; EXPRESSED IN FETAL LIVER, SIGNAL =   2; EST_HUMAN HIT: AA057198.1, EVALUE 5.30e-02
tgcagtgacttttcccagtgaccatcctggaaacagttctaaaatgctgatcatgacctgggttctgggtgggaagatcatccctgaaatgtgccagggaaagaaggtcccgagtcccatcagcctaggaaatggccctgtcagtgtgaagagggccaaggtcatgactaggaaggcaaacaagctaggagggtaagaatagaacagaaataattagaaatgagctcaacaataagatccctaatagatttgccaaaaacatgtaacatcagctgcattttgtatttgcatttgtttccatactataattttcatcaaggtaggaagaaaagaaaccttatgagctctttgtaatagctgttctcctgtaccacctctactcagatgataacatttctgcccaggctcacttctcctggcaaacaaatttctcaaaataaaactcagttcaaaatttcaagatgatggcacaaacaaatgtataagaatttagagactcacatatcatcttagctcgttattgttgttgtacaaagtcgaatgaactgtgtatgttgttgttatcaacttaattcatcttggctgctgctttc

SEQ ID NO: 479 - DNA, 549 bp, Homo sapiens
  MAP TO AC018709.5; EXPRESSED IN BRAIN, SIGNAL = 1.1; EXPRESSED IN PLACENTA, SIGNAL = 1.2; EXPRESSED IN LUNG, SIGNAL = 1.4; EXPRESSED IN FETAL LIVER, SIGNAL = 1.1; EXPRESSED IN BONE MARROW, SIGNAL = 1.1; EXPRESSED IN ADULT LIVER, SIGNAL = 1.2; SWISSPROT HIT: Q03164, EVALUE 1.80e+00; EST_HUMAN HIT: BE707458.1, EVALUE 1.20e-02; NT HIT: AY051664.1, EVALUE 2.00e-03
tatagggccttgccacaaacgcttgagctttgtgcttgggacagtgacaacccaggagatgtttcaaactgccagtcatgacgtttctcccagaacagcttcgctgctctcttttccgcactctgattaaaagcctcagggcaaggcaggcctggacaaataacccacaccactagcctgcttcaagcacacaggcccttctcgggcaaatcacagcatcgctgcacattccggacgatcctcctattgcccttggaggccagtacctgctcttgctgacctgctctccatgccgcagctgcagctgtgttgtccgggtcacttccaagatgctgctgctgctgctgctgctgcaggacagggctgcagaggctcccctttcttctgcagcctcttctgagttcgggccctgagcccattgctttgatcccgccacaaaggccacacttctgctaggctcatttccaagcttgcatgctgccagcatggcggggttgagtccagttcctcaacagccacgatcgctgctgtctgaagtctggcgactcc

SEQ ID NO: 480 - DNA, 541 bp, Homo sapiens
  MAP TO CHR22_205.0; EXPRESSED IN BONE MARROW, SIGNAL = 1.7; EXPRESSED IN BRAIN, SIGNAL = 1.7; EXPRESSED IN HELA, SIGNAL =   2; EXPRESSED IN FETAL LIVER, SIGNAL = 1.7; EXPRESSED IN HEART, SIGNAL = 2.1; EXPRESSED IN ADULT LIVER, SIGNAL = 3.2; SWISSPROT HIT: P17317, EVALUE 1.00e-31; EST_HUMAN HIT: AV714842.1, EVALUE 4.00e-95; NT HIT: gi4504254, EVALUE 6.00e-93
aattagccaggtgtcatggggcatgcctgtattcccctggaatcaccaacactgttagagctgttagattaattagagacctgagataataagaaatacaggcatcctttacatagtcttctgttgttctttcttcccaatcagagacttgcgaatgtgtggaatgacaccatcaccagcaattgtagccttgatgagagagtccaattcttcttcttcactaatagcaggttgcaaatgatgaggggtaatagctttacctttaaatcttttggtgcctttgatgtcacttcaagtatctctgcagtgaggtatccaaggatggctgcactgttcacagtggcagtcacgcccctacacatccatgactggtcgtcctacatttgaggtgtctgtctatgaatatggcccacccggaactgtaaggaggctctctgtgagcgggaaacaaccacctttgttctggcctttccagtgtcctgctcagccttaacgccacccttgcaaattctgtcaaagctcaaacaaggcagagaaaggg

SEQ ID NO: 481 - DNA, 502 bp, Homo sapiens
  MAP TO AL138893.2; EXPRESSED IN BRAIN, SIGNAL = 6.3; EXPRESSED IN HEART, SIGNAL =   5; EXPRESSED IN PLACENTA, SIGNAL = 7.9; EXPRESSED IN LUNG, SIGNAL = 7.8; EXPRESSED IN ADULT LIVER, SIGNAL = 7.1; EXPRESSED IN FETAL LIVER, SIGNAL =   6; EXPRESSED IN BONE MARROW, SIGNAL = 6.5; SWISSPROT HIT: P56163, EVALUE 1.20e+00; EST_HUMAN HIT: BE350127.1, EVALUE 8.00e-44; NT HIT: AF020503.1, EVALUE 5.00e-41
catttgatcaacaatggaccacatgtatgaagacattgccataacattatagtggagctgaaaattttctattgcctagtgacatcatagtcattctaaatgcattactgaactgtttgtggtaatgcaggtataagcaaatctacttcactaccagtcatataaaagtataacacatgtaagtacatacagtacataatacttgatagtgataataaatgactgttactggtttttgtatttactatacttttaatcattattttagagtgtactctttctacttattaaaaagaagttaattgtaaaacagcctcaggctggtccttcaggatgtgctccagaagaaggcattgttatcacagtagatgacagctccatgcgtgctgttgcccttcaagaccttccggtgggacaagctgtggaggtggaagacagtgatattgattatgttggccccgtgtaggcctagggtaatacgtgtgtttgtgtcttagctttt

SEQ ID NO: 482 - DNA, 589 bp, Homo sapiens
  MAP TO AL137800.2; EXPRESSED IN FETAL LIVER, SIGNAL =   2; EXPRESSED IN PLACENTA, SIGNAL = 3.1; EXPRESSED IN LUNG, SIGNAL = 2.4; EXPRESSED IN ADULT LIVER, SIGNAL = 2.3; EXPRESSED IN BONE MARROW, SIGNAL = 2.2; EXPRESSED IN BRAIN, SIGNAL =   2; SWISSPROT HIT: Q49158, EVALUE 5.70e+00; EST_HUMAN HIT: AW968563.1, EVALUE 6.00e-88
aaactttagcatgccccatcccgatcttggccaaaatcaaatgtttcaggaagtttctaattttattagtattcacagagtatgaataatacacatctccaaaaggaataaaaacatgtagaaatcccttgtaattttcatcctacctaatattacttgatttcagatgctcctctgatttcaagttttcggtcctcatctgggacttaaatgaaacgttttctcccacaatgactatctgcaagaacatccaatttctcataaggtagaatggtttaagacattctagatagaggagaggaggaaaatatgagttaacccacaataacagagaacccctatgaagaaaattattttatctttatttgaaatgacttcatgtgaaaggtaaaggaaaaatgtcaaagcctttttctttttttgtttaatgtttcttagaacaaacatttaaaaattctgtctcatatatttctaacagattctagttatagaccaaaatgttattctaatgttcctcactgtctgaaaactgagtgatcactacaggacaaacagataccggttaccaagcagggctcttttaagacca

SEQ ID NO: 483 - DNA, 567 bp, Homo sapiens
  MAP TO AL138752.2; EXPRESSED IN BONE MARROW, SIGNAL = 2.4; EXPRESSED IN ADULT LIVER, SIGNAL = 3.4; EXPRESSED IN HELA, SIGNAL = 2.4; EXPRESSED IN BRAIN, SIGNAL = 2.3; EXPRESSED IN FETAL LIVER, SIGNAL = 2.7; EXPRESSED IN PLACENTA, SIGNAL = 3.2; EXPRESSED IN LUNG, SIGNAL = 3.7; SWISSPROT HIT: P38621, EVALUE 7.10e+00; EST_HUMAN HIT: AI675364.1, EVALUE 0.00e+00; NT HIT: gi14736780, EVALUE 0.00e+00
gacagctgaggagacccttggcctcagcctgagtgtcaggggggtagttctgataactctgtgttttgttcacaggagcaaccagggttttatgcacatgaaactggccaaaaccaaagagaaatacgttctgggtcagaacagccctccgttcgacagtgtcccggaagtcatccactactacaccaccagaaagctacccatcaaaggggctgagcacttgtccctcctctatcccgtggctgtgaggaccctgtgagcggaccagacctgccctgctctgtgacagagcctgagacttggaggtgccagaggccccccaccaaccagcccagccactgttgctggctgtgtcgtttgtgttgtgtgtatggtactagcacaccactgcatgtctctagaatgctgttgccacttacgggggctggagaaggcctggataaagacagaagggcggcaacacaccaccccagcccccacccccaccctctccttgagtttctgtgaattaaaatatttgcaaatccaaagagatgccttccaggatgaacaaaggcagaccagctc

SEQ ID NO: 484 - DNA, 582 bp, Homo sapiens
  MAP TO AC015833.3; EXPRESSED IN HELA, SIGNAL = 1.1; EXPRESSED IN BRAIN, SIGNAL = 1.4; EXPRESSED IN FETAL LIVER, SIGNAL = 1.5; EXPRESSED IN HEART, SIGNAL = 1.2; EXPRESSED IN LUNG, SIGNAL = 1.3; EXPRESSED IN BONE MARROW, SIGNAL = 1.4; EXPRESSED IN PLACENTA, SIGNAL = 1.7; SWISSPROT HIT: P28972, EVALUE 2.50e+00; EST_HUMAN HIT: BF943771.1, EVALUE 8.20e-01; NT HIT: AF036170.1, EVALUE 2.00e-03
gcaggcaatttcattccaacaacaggatatacagttctgctgacaggaattgataggaactctgaagccagagactgtgctcttctatattttcctggggatcatgatagtgttgtaagtgactcttctaaaaaaaaaaaaaatctaaggaggcatttggataaggagacctgatttgttcttcagagtagaaaaggtacctaagggaaggcaggagcagccctaaaaattactagtatgacaagaggctggagaacaaaactgaacccatgggatttacctcacgtgaaaactcttcagctaaatcttcctggcacaaatagcaatgaacattatcccactcacccaaaatgaaaactagtcttgtttcagcccagcagggctgactccagagtcaacaatggctatgttctacattcccaaactgaccctgaaacaaacttgggctttgtgttgctgttgttggtaatggtggtggtaatggtggaagttcacatgtgtgtgtattttaaaagagaagagatgacctaaagtcaaacacagaaacactgtggctattccaccctggcatggggtagatct

SEQ ID NO: 485 - DNA, 504 bp, Homo sapiens
  MAP TO AL135786.2; EXPRESSED IN BONE MARROW, SIGNAL = 1.3; EXPRESSED IN PLACENTA, SIGNAL = 1.3; EXPRESSED IN LUNG, SIGNAL = 1.3; EXPRESSED IN ADULT LIVER, SIGNAL = 1.9; EXPRESSED IN BRAIN, SIGNAL = 0.99; EXPRESSED IN HELA, SIGNAL = 1.7; EXPRESSED IN FETAL LIVER, SIGNAL = 1.5; SWISSPROT HIT: Q13049, EVALUE 6.00e-06; EST_HUMAN HIT: BG990514.1, EVALUE 0.00e+00
ttatggagcacgatgctgaggaggaagaccaagacgcaagccaccaagatgacagtgcacaccctcaaccacatggagcttttcaccatgccccgcctgtcctgctcctcctccgccaccccctggggagccctgccttgcagaggctgctgtccagcagggatggtcaccacagtgacggacttctgccggttcctgggcagcaggtggcggctcatatctccgggcagcagcgcgtgctccttggagatgggcaggggcagcatgtagcacccactgccgggaagtctgatgaagaccggcatgtgctccgaagcgtgtggaatggtgatgacagccaggacctcggggtcgtcgaggagctgcgacacggagaagtcagggggcagcttggtgacaccgctgcaccaggggcatcgcacatccttctggctggtcctcgtctgctggaggcaaactgaacagcaggtgtgcttgcaatccagcaacttggccttcactagg

SEQ ID NO: 486 - DNA, 595 bp, Homo sapiens
  MAP TO AL137798.1; EXPRESSED IN BRAIN, SIGNAL = 0.77; EXPRESSED IN PLACENTA, SIGNAL = 0.67; EXPRESSED IN ADULT LIVER, SIGNAL = 1.4; EXPRESSED IN FETAL LIVER, SIGNAL = 0.56; EXPRESSED IN BONE MARROW, SIGNAL = 0.7; NT HIT: gi16161785, EVALUE 3.00e-89; EST_HUMAN HIT: BF156010.1, EVALUE 1.00e-129; SWISSPROT HIT: P02674, EVALUE 7.60e+00
tgaaggaaaaatgcctttggtttctgtgaccactccattctgtctcccatcagatcatctgggaggttttgttgtctaatgtctgttggttaaatcttctatcatccctgtcctgcctggctcatcaggaatctgcaggagtctgaagaggaggaagtcccccaggagtcctgggatgaaggttattcgactctctcaattcctcctgaaatgttggcctcgtacaagtcttacagcggcacatttcactcattagaggaacagcaagtctgcatggctgttgacataggcggtgagtactccattgtgaaggtgataaagctccagttcatggcccaggtagaccccataatctttgggccttgtgccccttgttgggctgagatttgccatcactgtgggctgaacctatatatcaatgtagatttcaatcactctggagtcgagtctgaagcacaggcatggggtgggtgagtgagctttgctctcttcctagtctcaggccatgcccgtgccaacctggactgactgtcacgacattgaactcaaggcaggtgtggcaagctcacaccaaactatgcagcacatgaccagg

SEQ ID NO: 487 - DNA, 540 bp, Homo sapiens
  MAP TO AC015822.3; EXPRESSED IN FETAL LIVER, SIGNAL = 2.5; EXPRESSED IN LUNG, SIGNAL =   3; EXPRESSED IN BONE MARROW, SIGNAL = 2.6; EXPRESSED IN ADULT LIVER, SIGNAL = 3.9; EXPRESSED IN HELA, SIGNAL = 1.7; EXPRESSED IN BRAIN, SIGNAL = 2.8; NT HIT: L78810.1, EVALUE 4.00e-48; EST_HUMAN HIT: AW070189.1, EVALUE 1.00e-30; SWISSPROT HIT: P08547, EVALUE 2.00e-26
tgacaacaaaggcacagtccataaaagaaagaactgataaactggatttcatcaaaattaaatatttctgctgtgtgaaagagaatgaaaagacaaactacagactgggaaaaatatttgcataagacatatctgacaaagtactgttatccaaattatataaagaactctaaaaacgcaacaaaaagcaacacgattaaaaagtgggccaaagattttgaaaactcaccgaagaagatacacagatggcaaataagcaagcatatgaaaagatgctgtacgtaatatgtcatcagggaaatgcaaattagaacaaccatgagatactgccacaaacctattagaatggccaaaattcagaaaactgacaacaaaaaatgctggcaaggatgtggagcaacaggaactatcattcattgctggtggtactgtgtccggaattggtgggttcttggtctcactgacttcaagaatgaagccgcggaccctcgcagtgagtgttacagctcttaaggtggtgcgtctggagtctgtcccttc

SEQ ID NO: 488 - DNA, 599 bp, Homo sapiens
  MAP TO AL132765.16; EXPRESSED IN BONE MARROW, SIGNAL = 1.5; EXPRESSED IN LUNG, SIGNAL = 2.3; EXPRESSED IN HELA, SIGNAL = 3.4; EXPRESSED IN PLACENTA, SIGNAL =   2; EXPRESSED IN HEART, SIGNAL = 2.3; EXPRESSED IN ADULT LIVER, SIGNAL = 2.3; EXPRESSED IN BRAIN, SIGNAL = 1.7; EXPRESSED IN FETAL LIVER, SIGNAL = 2.1; SWISSPROT HIT: Q01955, EVALUE 6.70e-01; NT HIT: AJ400879.1, EVALUE 1.40e-01; EST_HUMAN HIT: AI149814.1, EVALUE 8.40e-01
aggcgtatctgggaaaaaccagatccatccctaggactagatggacaagggttgcctgtggtgggagtgagaggcatccccccaggctcaagtcttctgctaaatcatgcagccctccagcagcacgagaaagcccatcccacagtccagcctccaggctggggctctcagatgggaacaggtcatttcaacacaaagtcagcagtctgggagcccccagccgggggagttaccccaccctgaggggagcagaggctgacagcagaggtgtgaagaagtgggaggtagccaggccaaaaagggcacactggcgaggaatagcatgggcaaagtaaggcatgatgttagccaggtgtggtggtgtgcccatgcagctccagctagccccaggactgcttgagcccaagagttccaggttggaagaaagaagaagaagaagaagaaggagaaggagaaggagaaggggaaggggaaggggaaggggaagaagaagaagacagagaaagagaaggaggagagggggaggtggagggagaggatgatctgagatcacatcatctcagtttatctgttgaacaactcagttgttggcaaagcct

SEQ ID NO: 489 - DNA, 535 bp, Homo sapiens
  MAP TO AL035464.20; EXPRESSED IN FETAL LIVER, SIGNAL = 0.47; EXPRESSED IN LUNG, SIGNAL = 0.67; EXPRESSED IN BONE MARROW, SIGNAL = 0.46; EXPRESSED IN BRAIN, SIGNAL = 0.41; SWISSPROT HIT: P77882, EVALUE 3.80e+00; NT HIT: AL161586.2, EVALUE 1.30e-01; EST_HUMAN HIT: BE223014.1, EVALUE 3.00e-65
ctctgcctctttgccatttgtaggtgattaaacgcctacaaaaggaaatccaggaactgaaggatgaactggccatggtcactggggagcagaggacagaggcactcacagaagcagagctccttcagtaagtctgcagacttttttttctttttctttaacagtgaaagtttgtgttaacttctttgttggccctaatgttatgaattcacctcaaagcatgaaggtctcctgggacagtctgaaattgcatttaggcgccagttaagagtggcggctttccatgaaaagctggataaggctggcagtgtttttgccgcctcagctttgaggaagtaaagaacagagcaaagagaggatgggaatatccttctcatgccagctgaagaaaaggaattgtataatagtcatgcaattttaaaacacacacaccaaacactcttgagctgtgggtctcagatctgaaaggaattcaagagacatcctttgtattaaacagcatcttgccacaagcaccaatttatcccatgccaaa

SEQ ID NO: 490 - DNA, 597 bp, Homo sapiens
  MAP TO CHR22_82.0; EXPRESSED IN BONE MARROW, SIGNAL = 2.6; EXPRESSED IN ADULT LIVER, SIGNAL = 2.3; EXPRESSED IN HELA, SIGNAL = 5.5; EXPRESSED IN PLACENTA, SIGNAL = 2.2; EXPRESSED IN LUNG, SIGNAL = 2.3; EXPRESSED IN BRAIN, SIGNAL = 2.2; EXPRESSED IN FETAL LIVER, SIGNAL = 2.4; EXPRESSED IN HEART, SIGNAL = 1.9; SWISSPROT HIT: P10643, EVALUE 1.50e+00
cctctaatttgccataggcgtagaggaggatttgcaaacttcgacgcctacagaggccgggaaacggccacgcacggtggagcggagcagccatgtaagccacgtaagacactcgggagcagtggggactcagggggaagtgcgaggcacctgccgcacggaagagacatctgctgcccagctcttgctgatggctgccaagcagggatagggcccagggttacaaaaatctttttttttccccccaaggaaccaaaaatgtggatttttatgggaaagttttcaatttgtagaacatttgagggccaagcacaactcgcttgccaatcaccctttgcaactgctagcgtcataaataataaacacaccactggtaatgacagcacccgacatttgtcaagtgctcactgtgtgccggcacctcggtaagcactctacgtggagcatcccaccaaaatttcacaagcaattcaggagggagacaaaatgattatccccattttacacgtgaaaaatagacttaggctatatttcttgtccaagggaacatagctcataagtgacaggggtgggatttgaacccaggctgtcagatgt

SEQ ID NO: 491 - DNA, 521 bp, Homo sapiens
  MAP TO AL139177.1; EXPRESSED IN PLACENTA, SIGNAL = 1.9; EXPRESSED IN BONE MARROW, SIGNAL = 1.2; EXPRESSED IN LUNG, SIGNAL = 1.6; EXPRESSED IN BRAIN, SIGNAL = 1.1; EXPRESSED IN HELA, SIGNAL =   1; EXPRESSED IN FETAL LIVER, SIGNAL = 1.3; SWISSPROT HIT: Q9ZM11, EVALUE 4.80e+00; NT HIT: AF164517.1, EVALUE 5.00e-01; EST_HUMAN HIT: BF853254.1, EVALUE 0.00e+00
gagcccacttggatcacatcatcatcaaaaacattaaaccaaaggtgaatgaacatcttgcaaacaatgaccaccctgtggttctcacactgctacgatgcatacactaccttcagctcatggatcagacttctggtttggtataggctgaagcgctcctggcccttcactgcagatagcaggtggctggtgtcagtgaggaagcgaaacaagttctccacagaagtagtgaaatcttgccactgcctcaccagcccatcaacgtcacccttcctctgccgaacaccctggacagcattctgccaccgatccgtcagctttgagaattctgtaataaattctggtctggggaaaaacaaatggttatagaatccagacatcgacatgtagaaaaaataactatcagtgggtaatagcagctcagattcagtttttataagtacaatttacatgaaaaaaatcccaacttctaaacacctgagtgctattcaatttaaacatgattaaggctttgggaaggg

SEQ ID NO: 492 - DNA, 597 bp, Homo sapiens
  MAP TO AC015855.4; EXPRESSED IN FETAL LIVER, SIGNAL = 0.92; EXPRESSED IN ADULT LIVER, SIGNAL = 1.3; EXPRESSED IN BONE MARROW, SIGNAL = 0.89; EXPRESSED IN HELA, SIGNAL = 0.5; EXPRESSED IN BRAIN, SIGNAL = 0.87; EXPRESSED IN PLACENTA, SIGNAL = 1.2; EST_HUMAN HIT: BG257767.1, EVALUE 7.00e-54; SWISSPROT HIT: O14653, EVALUE 1.00e-12; NT HIT: gi14774731, EVALUE 1.00e-51
attctatcacctcccccagggagaaaagcctgtcttgatgggcctggagtatcagagccatgtcagaggtcagcacttacagtttggcattttgccttttgttagggggctccttgctggacaaaatctccagacgttctagacggctgaatatctggtctatgcttgcttggatttcgttttctactactgtacaaaaaagaaaaaagaataattgctggaaaagagatagtgaacttaaattacaatgataaatcacagatttttttttcaatatccaataaactagaactacatatttcaaaaggagaaaaatgtatacactaatgaataacagaaaaaattcaagttaggccgtaaatgttgttttgaaaaaagtacatgtatatagctgttaatgacataacaatgccaattttttaaaaaagctgaaggtaaatctgtagaaataaatttcctacctttagaaaataaacatgcaaaggttgtccaaataaatactttaagctaaattttctgatataggtctcttttcctttgggattctcagacgtggattataaatacctagaaaaaggctgccaattgaattcccta

SEQ ID NO: 493 - DNA, 502 bp, Homo sapiens
  MAP TO AC022263.3; EXPRESSED IN HELA, SIGNAL = 0.54; EXPRESSED IN BRAIN, SIGNAL = 1.2; EXPRESSED IN ADULT LIVER, SIGNAL = 5.1; NT HIT: gi14760633, EVALUE 1.00e-10; EST_HUMAN HIT: BG569905.1, EVALUE 8.00e-13; SWISSPROT HIT: P09451, EVALUE 5.00e-13
ggtgatcatccaccctcttgacgagtttcactcccccatctaggaaaggcctctctaggaagtcccagaggtgacgtctgtgtcagcagaacccaggttcaggctcctctccagggccagggctacccccacggcgtccagggttttatcccattcatctcatctgcaggtcctgcaaaagagcaggctgccacgctggctttgcatcttccagagatgcttggccagttcaccttccagagccatgtcatcgtggccaaagtagaagtccagagagatgccggttgacggggcagttggtggctgcctctgcctgggtggaatcattctaacacatctaggagctcatgcttggggacaagaagaagatatccacaaaaacggtgttggctgggcccagaagcaggaggttgccaagaagatggtctgggaggctcaagtgaaaaggagatgggaggcgatcacaggctggaagagggatccccctggtctgttcgttcta

SEQ ID NO: 494 - DNA, 592 bp, Homo sapiens
  MAP TO CHR22_104.0; EXPRESSED IN BRAIN, SIGNAL = 2.2; EXPRESSED IN PLACENTA, SIGNAL = 3.1; EXPRESSED IN HELA, SIGNAL =   2; EXPRESSED IN ADULT LIVER, SIGNAL = 3.3; EXPRESSED IN LUNG, SIGNAL = 2.9; EXPRESSED IN FETAL LIVER, SIGNAL = 2.4; EXPRESSED IN BONE MARROW, SIGNAL = 2.4; EXPRESSED IN HEART, SIGNAL = 2.4; SWISSPROT HIT: Q09472, EVALUE 2.00e-02; EST_HUMAN HIT: BE928344.1, EVALUE 3.00e-03
gaggaagaaggtttccccagcagagccaccaaacaccctccacatcaagaaccacaacacagctagtcaggtgacaccagattcctggacagttgcctgctgccctcaaccccgtcagggccctgggctgtccagatgctccaccaaccacattcacagcagtgtccagcaaccagcacccctgtgcaatcctctccagccatgttgcatcactcaccacaaagggcccactcctcctgtctttgcagaagctgtggcttctccagggaaccgaggccacaggggacacctgctggagcggtcgctccttctcctggggggcatcctccttctccaggtcccgtggcagcacctgaaacacagagcacaagaaaaggactttactgggagccttctcatttacaggaaaaaatatattatgccaagagtccattctgtaccaaaaagggcaaagaagaaaattaaacccccagaaatcccccactttaatgatcagaggtaacatgtagggcggtagctctgggttccagtggcccagcctcagccatttaataactgtgtgacctcaggtgggtgcctcaacctctctgag

SEQ ID NO: 495 - DNA, 572 bp, Homo sapiens
  MAP TO AL034373.13; EXPRESSED IN FETAL LIVER, SIGNAL = 1.5; EXPRESSED IN BONE MARROW, SIGNAL = 1.5; EXPRESSED IN HEART, SIGNAL = 1.6; EXPRESSED IN LUNG, SIGNAL = 1.9; EXPRESSED IN ADULT LIVER, SIGNAL = 1.8; EXPRESSED IN BRAIN, SIGNAL = 1.4; EXPRESSED IN PLACENTA, SIGNAL = 1.7; SWISSPROT HIT: Q01668, EVALUE 1.90e+00; NT HIT: X87344.1, EVALUE 6.00e-10; EST_HUMAN HIT: AL602192.1, EVALUE 4.00e-21
ggtcaggctgtgaattttccaaatcttttcattctacttccttttaagttataaattctgtctttaagtcatttctttcctctcacatctcactgtatgcagttaaaagaagccacccagcagcctgaatgctgaatgttttgctgtttaggtatttcttctatcagatatcctaatttatctctcttaaattatgcactccataaattcctaggatgtggacacagttatgccaaattctttgcaactatataacaaagatggcctttactccagtttccaatatcttgttccttagtaccatctgcgatgtcataagaatggcctttgctttccatacttctatcaacattctgatcactcaagtaatctttaagaagttctagacttttcctacagctctcctctcctaagctctaaccaggatcaatcttcatgctctactcctggcaatacaggcttttggtagcccacttctccagtttcttccaatctgtacacatgaccctgttccaaagctgcttccacattttcagatatttgttatagcaacaagccctcttccagtacca

SEQ ID NO: 496 - DNA, 500 bp, Homo sapiens
  MAP TO CHR22_212.0; EXPRESSED IN BRAIN, SIGNAL = 1.3; EXPRESSED IN HELA, SIGNAL = 3.4; EXPRESSED IN FETAL LIVER, SIGNAL = 1.5; EXPRESSED IN PLACENTA, SIGNAL = 0.95; EXPRESSED IN ADULT LIVER, SIGNAL =   1; EXPRESSED IN BONE MARROW, SIGNAL = 1.6; EXPRESSED IN LUNG, SIGNAL = 0.91; SWISSPROT HIT: Q9Y493, EVALUE 3.50e+00; EST_HUMAN HIT: BF433017.1, EVALUE 6.00e-20
aggcaacatgaaatggaagctctctttgagaagatggaataggaacggaaattcgaattaagtaagggaataaacagtgcaactaggaggcagaaaagagcaaatacaaagaccctgagatgagaacattttggcaggtgcaggaaatgggaagaagtccagtggggctggagtacagacagccacggagagaacggcaggagaggagggcagagagattaagcaaaaggcaggtagctccttgcagagcaatgtgtggactttgcatttggatttaattgccaggatgatagaagtcctgcggaggggttgtgagtaaaggtgtaacttgatctgacttgtgctttaaagggctctctcaaactgttgtgtgcagaacagactgcagggggcaacgtggagcaggcagataactgggagcaaggcggtgatccacgggagacggctagcctggaccaagcagttggcaatggataaggtgagacatagggctgcttgct

SEQ ID NO: 497 - DNA, 534 bp, Homo sapiens
  MAP TO AL138781.2; EXPRESSED IN BRAIN, SIGNAL = 0.98; EXPRESSED IN FETAL LIVER, SIGNAL = 0.94; EXPRESSED IN BONE MARROW, SIGNAL = 0.95; EXPRESSED IN HEART, SIGNAL = 1.1; EXPRESSED IN LUNG, SIGNAL = 1.4; EXPRESSED IN ADULT LIVER, SIGNAL = 1.3; EXPRESSED IN PLACENTA, SIGNAL = 1.6; NT HIT: gi16162890, EVALUE 5.10e-01; SWISSPROT HIT: P02674, EVALUE 1.50e-01; EST_HUMAN HIT: BE670048.1, EVALUE 1.90e-01
ctcaggtcctccaagctgacctcagccgtctttattataatttcaatatgtgaaaatcagaatgcaggtgaacatccccgggcctgtggccttcggtaatgataaaatcaaaacagctttggctaaaattcagaacactgcattccaactaaccgttcatttcagtgacaagaaggctccttcctccgtcaaccgtgtcattgccgcacccaagaagtccatgcccgtcgcgctgtccagcgtccagcccaccctcattgccacctgggagctgtaggaaccctgggtaccgggcctcaaacctggggttcttggcacctgggagctgtaggaaccccaggtaccaggtctcaaacctggggctcttgggggagggtccccaccgccacgcgatttgtttctagcccctcaagtggttctaaacgcacaggcagggtcagctccaaaacacaaaattttaaagattctggcaaagcacgcaggatgcgctgagaacgatggccccttcgctgcagcgtgagaaactcaacgtca

SEQ ID NO: 498 - DNA, 555 bp, Homo sapiens
  MAP TO AC011799.5; EXPRESSED IN FETAL LIVER, SIGNAL = 1.5; EXPRESSED IN HEART, SIGNAL = 1.4; EXPRESSED IN PLACENTA, SIGNAL = 1.8; EXPRESSED IN LUNG, SIGNAL = 1.9; EXPRESSED IN BONE MARROW, SIGNAL = 1.8; EXPRESSED IN ADULT LIVER, SIGNAL = 1.5; EXPRESSED IN HELA, SIGNAL = 0.99; EXPRESSED IN BRAIN, SIGNAL = 1.6; NT HIT: AF167303.1, EVALUE 0.00e+00; SWISSPROT HIT: Q9Y6H5, EVALUE 1.00e-71; EST_HUMAN HIT: AI460041.1, EVALUE 3.00e-09
caaaaggtcacatctcccaactaaagccacaagtaaagattaagtaaaaaccaaaacaaatgcagcatcgttctgttactaacgaatgcagtttattaaaaaggagtctccagtctattgacatgtatactgaactagattatacttaccaggagagagatctgtccttctttaacaatgttcaagatgcttttcacttttttcagatactcactcctttcttctgggccttgggagctggtccggtttaggccactgacctgctcttctggtttggattctgctgctgaggattgtaggtggaaggccctgagctggcagtctggtgttgtcttctcaacttttcgaccatgaggatcactaaatgtcttgtttaggaagtctttactctggttttcaggctcatatgcagagccacatttaaccagaggaggtgagatctcggtttcttcagtggacagcttgtgctggtcgtggatgacagctgatgcttttctcaagtgagggcttttcacgggagaaagaacacaaaatggtgccatgttggatgatgag

SEQ ID NO: 499 - DNA, 502 bp, Homo sapiens
  MAP TO AL133402.2; EXPRESSED IN BONE MARROW, SIGNAL = 2.4; EXPRESSED IN HEART, SIGNAL = 2.2; EXPRESSED IN ADULT LIVER, SIGNAL =   2; EXPRESSED IN HELA, SIGNAL = 1.6; EXPRESSED IN FETAL LIVER, SIGNAL = 2.4; EXPRESSED IN LUNG, SIGNAL = 2.9; EXPRESSED IN PLACENTA, SIGNAL = 2.8; EXPRESSED IN BRAIN, SIGNAL = 2.6; SWISSPROT HIT: P22467, EVALUE 6.00e+00
ctgcatcctcttaggcaaccactttggcttataaaccacatgtacaatattcctgctacttcaaacatgacttttttaatgagccaaaaaaaaaaaaaatctaagtttgtaaataaaccgaattcattgccataatgtttctagtctgtaaagaaaatagctactcttcaatggagcatgtatggttgttttcatcactaaagcatgtcatttcattagaccactctgtaacacaccaccgctggatgtttcacacttgatattgattatttaactaatcatgtttactaaactggtctctacctttcccctcttcttctggttggatttcatgctgtctgggaggacacaaaacccccttgcacatttgtctttaatgaaggagaagttaaggaagatcattgtgtaagggtagagataaatgacgatggcaaaactcaaaaagaatagaacgaaagtcaccggcaagattacttgtcggtctgcacaagcctgaaaacaa

SEQ ID NO: 500 - DNA, 506 bp, Homo sapiens
  MAP TO AL133408.3; EXPRESSED IN BONE MARROW, SIGNAL = 2.4; EXPRESSED IN LUNG, SIGNAL = 0.97; EXPRESSED IN PLACENTA, SIGNAL = 1.3; EXPRESSED IN BRAIN, SIGNAL =   3; EXPRESSED IN HELA, SIGNAL =   2; EXPRESSED IN FETAL LIVER, SIGNAL = 2.5; EXPRESSED IN HEART, SIGNAL = 2.4; EST_HUMAN HIT: AA577904.1, EVALUE 5.00e-42; NT HIT: AF196779.1, EVALUE 6.00e-56; SWISSPROT HIT: P03333, EVALUE 2.00e-04
tacacaaaggcacccctaccatatgcccctcctcatttaccccagtataccgttgctctcttaggggcatttgtgtcccagttttaggttgcaagcaagctgccaagggaggggtttctcccaagcttcatatcctcttttgtctattttaggtggccttggggtgtgcacaccttgcagaggctcaggggctgtgggcttcgatgtggggagcctctcttcttggtaaggaggggcaccattggtgccatttctgccatgcatcctctgatgtggggtcggacagaaccgtaggagctgacttccctcggcgggtggagcaagacttttccttggctatctgtccctttgctactagtactgctgcagcctgtcctcttagccactgtgaggggtctaaaactagctgcaaccaagtatctatgtatggtaactggtctgggtgtcctgatttatcagttactttgtgccatacctttgaaactagggacctgtctaggcttcct

SEQ ID NO: 501 - DNA, 578 bp, Homo sapiens
  MAP TO CHR22_134.0; EXPRESSED IN FETAL LIVER, SIGNAL = 0.92; EXPRESSED IN LUNG, SIGNAL =   1; EXPRESSED IN BONE MARROW, SIGNAL = 0.9; EXPRESSED IN PLACENTA, SIGNAL = 1.1; EXPRESSED IN ADULT LIVER, SIGNAL = 1.1; EXPRESSED IN HELA, SIGNAL = 1.2; EXPRESSED IN BRAIN, SIGNAL = 0.82; EST_HUMAN HIT: AI128445.1, EVALUE 3.00e-28; NT HIT: gi14764248, EVALUE 6.00e-41; SWISSPROT HIT: Q05315, EVALUE 2.00e-18
gtctagggcaaaaacatggctttagaagtaaccatggagaagactggtcacaattcataggagctgcccagagggagacaacagtatcactgttgcccatgccccacacatggcctgtgtctttgtctactggttcttgcatgagagagggacaccaatcctccctttcatcaacaacccacagctgcaggtgcatttccacagggggacgatgagcactcagacatcgccttccatttctgagtgtactttggccattgggtgatcatgaacagccatgagtgtgggcctggaagtgtgaggagagatccaacaatatgcccgctgaggatggcagagtatttgagctccacatcatcgtgctggacaatgaataccaggcaatggtaaacggccatcactgttacacagctttgcccatcgactgctgccagggtctgtgaagatggtccaagtgtggagagatgtctccctgaactcaaggtgtgtctgcaattgagggagatgaccacactccccattgtggaggaatccctttttctacatgaccatgagattcccagagcctgctaacagag

SEQ ID NO: 502 - DNA, 599 bp, Homo sapiens
  MAP TO AL160314.1; EXPRESSED IN BRAIN, SIGNAL = 0.89; EXPRESSED IN HELA, SIGNAL = 2.3; EXPRESSED IN FETAL LIVER, SIGNAL = 0.95; EXPRESSED IN HEART, SIGNAL = 1.1; EXPRESSED IN PLACENTA, SIGNAL = 0.96; EXPRESSED IN LUNG, SIGNAL =   1; EXPRESSED IN ADULT LIVER, SIGNAL = 1.1; SWISSPROT HIT: P03344, EVALUE 1.00e-03; EST_HUMAN HIT: BE008018.1, EVALUE 6.00e-42; NT HIT: AJ271736.1, EVALUE 2.00e-71
ggaggaagaacaatgccatcgccaagctaattatgtggtaacacagcattgacacgttctttttcgttagttaataaccccaaggcatgtccctataatactaacagaatgggggcctgtcatcactgcagaaatccaggatattggcgtagagaacattccaaacctccaggttacaaagctgcccccaggatcctgtcctcattgtaaacaagagggtcattggaacagcgagtgtccttctctccctcatgaggaggggccacctcctccttctgggccgtcgcagccacaacctcaccaacctacccaacaagggggtcctgcagaaagaggacaagggcaagggcaagcacaagcacctctaactctattcctggattatgatcgagcctctgaaagtcatcccctagatgactgatggggccttgaggccatccaggcccttaccttttccaactctatggaggagcctcagtcaatccagctgtggctgaacaagaaataatgttcctcatagatacagggttcagcttcaaatgttgaccaaatgtgccagtcctccatattcctcacgggcattgacgaaaaaccccaat

SEQ ID NO: 503 - DNA, 592 bp, Homo sapiens
  MAP TO AL138788.1; EXPRESSED IN PLACENTA, SIGNAL = 0.97; EXPRESSED IN LUNG, SIGNAL = 0.89; EXPRESSED IN BRAIN, SIGNAL =   1; EXPRESSED IN HELA, SIGNAL = 0.82; EXPRESSED IN FETAL LIVER, SIGNAL = 0.72; SWISSPROT HIT: O35099, EVALUE 6.60e-01; EST_HUMAN HIT: AW896500.1, EVALUE 2.00e-48; NT HIT: AL163246.2, EVALUE 1.00e-35
gtgcccaccagattaagaggggatctgccttccccagcccacgactcaaatgttaatctcctttggcaacaccctcacggacacacccaggataatactttgtatccctccatgcaatcaagttgacactcagtattaaacaacacacttgttcttggaatatggtgggaattattctgtcaaacttgcttctaaaatctggacagtagtctaagatccggggccagtgggaagtgggatgtagttttgggtttttagtaatgatacagaaatctctaatcatgccactgatttatgccattcttagggtactttacatggataaagaaaataagcaattacaggaaaatagtcttcgtctcacacagcagattggcttcttagagcgaattataaggagcatccatattcgcagaggagaggtaagatgtgtgcttcctattgggcctgcctttaatgtgaagttcgggttgctacggctgctgtgctgtctcttgccttcatctttatatagctgtagctgggctcttggcctcatggtaggctgtggcaaagaggctcttggctgcacaccaggatagcagaccctgag

SEQ ID NO: 504 - DNA, 579 bp, Homo sapiens
  MAP TO AC018735.5; EXPRESSED IN HEART, SIGNAL = 5.6; EXPRESSED IN ADULT LIVER, SIGNAL = 6.1; EXPRESSED IN BONE MARROW, SIGNAL = 7.3; EXPRESSED IN HELA, SIGNAL = 3.9; EXPRESSED IN LUNG, SIGNAL = 6.8; EXPRESSED IN PLACENTA, SIGNAL = 7.1; EXPRESSED IN FETAL LIVER, SIGNAL = 6.2; EXPRESSED IN BRAIN, SIGNAL = 6.1; SWISSPROT HIT: Q03570, EVALUE 8.40e-01
ttcggaaaagcacattttggcattctttactaattttattgcaatgttttcagagaacatgttttgtgtgttaccaactcttagagactttctttgtggccaagtacatgaacaatttaaaaatatatcctatggatggacttcaggtgccagccaagatgaagtaagcctgctagaatctttctctttcactcattacaattaaaaattcaggacaaaatactaaaacacttacctgaggatgattccgaaacaaaataatagcaaggaggttgaggagcgacatcaaaactcaaaaaatgaccagtatgccaatagtgagtttcctaggatattttccttcaagatcatctggtcttggcttaaggatgggccaaatcagggaacaatgtgatgggaacagacagcaaaaactttgagaaaaccctggttttctgtcagagtactaagaaactgggaccctgagaggtggaaagtggaggttgaaggtgaaatcccaatgtgtttttctctccctctgccccaaggccagcttcattgaccagcttcagtgcatgtagaggcagcagcatgaatgta

SEQ ID NO: 505 - DNA, 568 bp, Homo sapiens
  MAP TO CHR22_215.0; EXPRESSED IN HELA, SIGNAL = 3.1; EXPRESSED IN FETAL LIVER, SIGNAL = 1.5; EXPRESSED IN PLACENTA, SIGNAL = 0.97; EXPRESSED IN ADULT LIVER, SIGNAL = 1.1; EXPRESSED IN LUNG, SIGNAL =   1; EXPRESSED IN BONE MARROW, SIGNAL = 1.7; EXPRESSED IN BRAIN, SIGNAL = 1.4; NT HIT: gi14778584, EVALUE 1.00e-119; SWISSPROT HIT: P35579, EVALUE 2.00e-32; EST_HUMAN HIT: BF873962.1, EVALUE 1.00e-116
gcccctcctagccatctatcccatagcccaggctcaaatacgccctgtgagagcttctgtagcctttcagctttaaagcccagccttgcctcacccccaactttgagccaggtccttcaacagactttctactctgtagagagaaaccgctgaggaaccagcagcttccatgcctgctggtgcctaagagggccacggtgtgtgtgtgtgtgtgtgtgcagaggcccggggtccatgtctccaagccaaggcccccctggctgccctccccatcccgagggacttggtcccagggcacacctgagctcctgctgggcagctgtggaatccagcgtgtcctccaactctgttttcagagcctctagctcttccccaaggtcccgtttctgcttctcagctttattcctggaagcacgctcagactccaggtcttcctggagttcagagatctgagattccagctcccggatcttcttgagggccatgttcttctgggcagcttcctcttccactctgccaaagcgaccagcaacatcagtataaggagagtttcacctccaaggagcag

SEQ ID NO: 506 - DNA, 599 bp, Homo sapiens
  MAP TO AL137840.3; EXPRESSED IN BRAIN, SIGNAL = 4.9; EXPRESSED IN PLACENTA, SIGNAL =   6; EXPRESSED IN LUNG, SIGNAL = 6.4; EXPRESSED IN HELA, SIGNAL =   3; EXPRESSED IN FETAL LIVER, SIGNAL = 5.2; EXPRESSED IN ADULT LIVER, SIGNAL = 6.2; EXPRESSED IN BONE MARROW, SIGNAL = 6.1; EXPRESSED IN HEART, SIGNAL = 4.6; NT HIT: AE006703.1, EVALUE 8.90e+00; SWISSPROT HIT: P03340, EVALUE 1.00e-04; EST_HUMAN HIT: BI012226.1, EVALUE 6.00e-14
tgtctttgggaggtttgagggccatcctccagtttttttaagtttcttttggatgtcgggggctgactgggagataaagtgtaaatgaaggtggattttgcccttattggtatcagggcttttgaaaggcagtagaggaaaagagcatgggcagctttatttatgccagctagaaggcatgatatcgtatggccttgtttttgtctgtctgcagaagttgcctgataattccaattggtgtaagtcctggggacagctagggtccctattgggttatgggcagcatgttgttggtggagggtgtttgcattggcatagacagccatccagatgcattccctgtcttctggggagagggtggaggagagcatgacatacgtgtcttgccaggtaaggtcgtaagattgagtggcatacaaaaattccttgtggaaagagatgggatccttggataaaggagccaagtctcttttaaaatgggagaggctggctagagagatgggaacatgatctcagattatgcttttgtccctcatgatctcctgcaagggaagggctttggaaggcctttgggtgtgtgcctggttttcagcactagg

SEQ ID NO: 507 - DNA, 578 bp, Homo sapiens
  MAP TO AL138735.2; EXPRESSED IN HEART, SIGNAL = 2.9; EXPRESSED IN PLACENTA, SIGNAL = 3.8; EXPRESSED IN FETAL LIVER, SIGNAL = 3.7; EXPRESSED IN BONE MARROW, SIGNAL = 3.4; EXPRESSED IN BRAIN, SIGNAL = 3.4; EXPRESSED IN HELA, SIGNAL =   3; EXPRESSED IN ADULT LIVER, SIGNAL =   4; EXPRESSED IN LUNG, SIGNAL = 3.8; NT HIT: gi14861871, EVALUE 1.40e-01; SWISSPROT HIT: P09483, EVALUE 2.50e+00; EST_HUMAN HIT: BI909969.1, EVALUE 0.00e+00
cctgcctttctctcaccatcttttcctgcttcagcagaaacaatcaggcctgcttcccagtctggaaatgagcagagggcactgccccagggtcgaggctgcaagctatgggtagatgaggggaatctgtaggccccaaaaggctggtggctctagtctgaaggcaagaaaactatttgggcaaccaggcactgaaggagaaggaacattggtagaacctatttcgtgtctgtctcccactctgcccttgtgttcctggagagtgggggctgcctctgactgttcttccaaacaccacacccggcactaagacccagtgcatgtgtgtggagtcgatgaattaatgaaagggaagcccctttccatgggtaaagccaaattacctggatgtgagtacagcacaaatccatatgcccgtggaggatggagcatctgtatctgctcccgaaggtgcagatgcccagacctcggcacacccagcgccagcattgtctgctttgacccatcataaccactctgagaggccaaggaggttgtttccattttacagaggggaatgccgaggatcagagagattg

SEQ ID NO: 508 - DNA, 597 bp, Homo sapiens
  MAP TO AL137796.1; EXPRESSED IN HEART, SIGNAL = 2.4; EXPRESSED IN BONE MARROW, SIGNAL = 2.5; EXPRESSED IN PLACENTA, SIGNAL = 2.8; EXPRESSED IN LUNG, SIGNAL =   3; EXPRESSED IN BRAIN, SIGNAL = 2.1; EXPRESSED IN HELA, SIGNAL = 2.1; EXPRESSED IN ADULT LIVER, SIGNAL = 2.5; EXPRESSED IN FETAL LIVER, SIGNAL = 2.1; NT HIT: gi13357558, EVALUE 8.90e+00; SWISSPROT HIT: Q02099, EVALUE 8.80e-01; EST_HUMAN HIT: AW270072.1, EVALUE 9.00e-84
tgacagaggtctccaaaccccgaggactgttgggttgatttgaattaaatgagatgccccctttctgcagaaaatggaaactaacatggctatctctgtccattacacaagacttttgtaaaacagtcatggtttctttcttaaaatctgttttaaacagttggaagtccatatttccttcactaatagtcctcctataagttgtggtcataaaccattttttcaagactcagagagctcttctcacttggaaagccatcacacatattcatcaatttggaatctgcagcaaaactgagccttttcagcctcttacctatagataaaaaggctgagatccatgtttctacttacaattcctaattttgagaatccctgagcaatacattttgatcttgtgagattttaactgatccctttcaattttcttttcaccatacttaagaatctaaggcttacagataccttgattcccaactctcaaagctttttatatgtactttcttatttgttctctcaaaccttacgaaaagaggcattagttctttcccagaaggtaaaatgcataaagtatgtggacctggcatcagatgagct

SEQ ID NO: 509 - DNA, 515 bp, Homo sapiens
  MAP TO CHR22_96.0; EXPRESSED IN BONE MARROW, SIGNAL = 1.5; EXPRESSED IN BRAIN, SIGNAL = 1.2; EXPRESSED IN HELA, SIGNAL = 1.4; EXPRESSED IN PLACENTA, SIGNAL = 1.2; EXPRESSED IN ADULT LIVER, SIGNAL = 1.6; EXPRESSED IN LUNG, SIGNAL = 1.8; EXPRESSED IN FETAL LIVER, SIGNAL = 1.4; SWISSPROT HIT: P05359, EVALUE 1.60e+00
aaataaattatacagctgctgactgcataccatgtgctggggaggcagctgctgcataccagagctctgcatttcgcacgtgctgccccggataggcctgtccaaggagctctctatgtacctatccatcctcttgtcctcactcccactctgctcccagctctctgggatgaaggggaccacctccctgttaggaaactgcatctgcttctcccgctgctcaggttcaggcagtgaccaggatgccccatggtcctcagaaggggtgactgggggcacagcacaccacggcctcacttgcattttaccccaaattcggagatcccgactgaccacgcctcttcaccctccacaaatatttgttggctgcctaacgtgcctagcacaaggctgaccctggggacagtaatgggagctggaacaggacagccttggggagctcacattccactaaaggagccagtccaggcgctgctggacaaagggtggtggctggaatcacagccaagtgcaca

SEQ ID NO: 510 - DNA, 597 bp, Homo sapiens
  MAP TO AC025758.1; EXPRESSED IN FETAL LIVER, SIGNAL = 0.72; EXPRESSED IN PLACENTA, SIGNAL = 0.83; EXPRESSED IN ADULT LIVER, SIGNAL = 0.8; EXPRESSED IN BONE MARROW, SIGNAL = 0.85; EXPRESSED IN BRAIN, SIGNAL = 0.91; EXPRESSED IN HELA, SIGNAL = 0.7; SWISSPROT HIT: P43527, EVALUE 2.30e-01; EST_HUMAN HIT: BE737100.1, EVALUE 0.00e+00; NT HIT: gi14723321, EVALUE 0.00e+00
tttttcagaaagtctgcccccttcctctcaccccaaaaagtatacaaagtcaacttaccatgccttaagccgcaaatggcagctgactgtggaaaagtactaaataaacacttgagaaaatgctgacaggtcgcctctccctttttctgtaccaaaattaacagcttccgacttttcttcaggagatctgtaacattctccagagtctcatactcttcctcagaaatcagcctccgagaagttaacgtgtctaagatagaatcaggatcatgttgaaggatttcaagcaacttttttctttctctttctatgatctctgagggagtactctcggtagccattgttcctgtttcctctaaaccaggaaatatattatgaaatcatcctaatgaataagtaaaagttaataaatagaatgacaaagaactattctatttggctaagcttttaacatgtcaatgatgcctagtgttggagagtgcagatacaagcacagtggggcaacccagctcggagcactctctgatccggggtccttgtggattatttatctgctcttttgaagtcttgataaattctcaccatgactcagaccca

SEQ ID NO: 511 - DNA, 503 bp, Homo sapiens
  MAP TO AL133349.2; EXPRESSED IN BONE MARROW, SIGNAL = 0.68; EXPRESSED IN BRAIN, SIGNAL = 0.86; EXPRESSED IN HELA, SIGNAL = 0.56; EXPRESSED IN FETAL LIVER, SIGNAL = 0.7; EXPRESSED IN LUNG, SIGNAL = 0.56; EXPRESSED IN ADULT LIVER, SIGNAL = 0.57; NT HIT: AE001172.1, EVALUE 1.20e-01; SWISSPROT HIT: P50613, EVALUE 9.20e-01; EST_HUMAN HIT: AL039717.1, EVALUE 2.00e-56
tccaaagagccatgacagtggacttctgaggggaaggatattaaattagtcaagaactgcacattcgatgataaagaacacaaagaggtggttcctgaacctgagatgatgtctagaacttatgaagaatcttcacgtgcaccacttgagcaataaacaaatgtgtaagcatctcttctctatccattaatcactatacctcacacagacctgtaagttttggaatgaattctaaaattgtgttgtttacataggcaagtaccctacaaaaactatctttgcagggcactgcacaccctaggagtggccctggagattttttaaaaaaacatatttttagtgccaatatttctgaagagctaacgcttcctgcctataggagtgttccttgaagaacttggagaagtggatgaaaatcagaaggaaaaacaggacaagaatttacgaaaacagcaatgagaattaggaaggatatgacttaatggtggcagaaacacatgaaa

SEQ ID NO: 512 - DNA, 584 bp, Homo sapiens
  MAP TO AL137118.3; EXPRESSED IN LUNG, SIGNAL = 0.64; EXPRESSED IN BRAIN, SIGNAL = 0.61; EXPRESSED IN PLACENTA, SIGNAL = 0.73; EXPRESSED IN FETAL LIVER, SIGNAL = 0.61; EXPRESSED IN BONE MARROW, SIGNAL = 0.6; NT HIT: AF214657.1, EVALUE 1.40e-01; SWISSPROT HIT: P40556, EVALUE 1.10e+00
agcacataagtgagcccgagccaaatcctgagttctggctacatgcagaagcccgggctaagtgaggtagcaaatacatgcagtgtatatatggcatgcaccctgcctgcaggagtgccacacacaatgacgtaacgccctgaaatggagacagtaaacctggtcagtgtttgcaacgtggcaaatgagaggtcagtcagcatatgtgcagtctgtggaaggtttctcagagctgagaatgaagtgaggggtgttcaagaatctatagggattaagaaatcagggtaacatggagaagcattcttggcgaaagaaacagctcgagcaaagacagaggtggaaattggcctggcatctttaaggcactgaaaggctaccagcctacttggtctgtttattttaggagaatagtaggagtcaagtttgtaaagacaactggagaggttgacttctaagctaaagagcttgatcttactcctttaggtagtgaagtcactgaaagtttttgagaagacaaatggcacgctgaaagtggtgtttcagaaaaattttatcagcagtggtgtttggagggggtgacatta

SEQ ID NO: 513 - DNA, 541 bp, Homo sapiens
  MAP TO AL160237.1; EXPRESSED IN HELA, SIGNAL = 1.1; EXPRESSED IN BRAIN, SIGNAL = 0.65; EXPRESSED IN LUNG, SIGNAL = 0.52; EXPRESSED IN FETAL LIVER, SIGNAL = 0.52; EXPRESSED IN BONE MARROW, SIGNAL = 0.46; NT HIT: AF244132.1, EVALUE 4.00e-23; EST_HUMAN HIT: BI252376.1, EVALUE 4.00e-21; SWISSPROT HIT: Q13268, EVALUE 5.00e-11
gccttgaggaactgagaacgagttttcatagtagggattctagtgggaggggaggccaagaagatctgatgtggacataggaggttcaatgcatctgtggactgacctatttcctctttatctcttctggtcctctgaccatccatagtacagcatgaggttagctgctctgagttagtggagagaattcatttggtgcctcagggctagaaatgcagcaagaaaagtctcagtcctagtctaaattgtcacctcctcctcatctctgcccccaggttcggcttcgccattgcccagcgtctggcccacgatagggcccacgtagtcatcagcagcgggaagcagcagaacgtggactgggctgtggccacgctctagggggaggggctgagcatgtgccagacaccctgtgccacacggggaaggctgaggactgggagtggctggtggtcatggtgagaggcatagaaggaggtgcagacaggctcagggattctgatactatgacccacagtagggcagagggataaaggcaccatca

SEQ ID NO: 514 - DNA, 597 bp, Homo sapiens
  MAP TO CHR22_172.0; EXPRESSED IN HELA, SIGNAL = 0.62; EXPRESSED IN BRAIN, SIGNAL = 0.78; EXPRESSED IN LUNG, SIGNAL = 0.68; NT HIT: gi14778276, EVALUE 3.00e-55; EST_HUMAN HIT: BI054083.1, EVALUE 4.00e-55; SWISSPROT HIT: Q14149, EVALUE 1.30e-01
aattagggggaatgtgctccaatcctgcaaccccaaagagtctagcattgcaaataacctacgaaaaccgcctgggcagactcaggaaatgaggactggtgatgcagaccacgatgatgggacctacttcatcaatgccttcttcctcatgaaacgtgcgagacaggaagaggcaggtcatggtgtcttccttcttggtgaacaggataaaatccttcccaatgcgcattgagcccctgaaaaggaaacagaaatgggtgttattctcccaggagtcaaaagctcatctgcaaaagaaatcaatccactctggacatgattgaaagtgccactggagggctctcctaaaggcccccccaggtcccaggactgtgtgctgagttccacagccctcgttccctctccatcccccaacactccttcctctgcttttccacaggcctgtaactccttagtctttacttacaacgttctcaaccacaccatacagggttctctcaccacccttctagggcgggctcacggcagaccaccagccccaggttagtctcactccccccacaacgctgaagagtaaccctgctgtctttgagctct

SEQ ID NO: 515 - DNA, 575 bp, Homo sapiens
  MAP TO AC025179.2; EXPRESSED IN FETAL LIVER, SIGNAL = 0.54; EXPRESSED IN BONE MARROW, SIGNAL = 0.49; EXPRESSED IN BRAIN, SIGNAL = 0.83; EXPRESSED IN HELA, SIGNAL = 2.7; EXPRESSED IN PLACENTA, SIGNAL = 0.7; EXPRESSED IN ADULT LIVER, SIGNAL = 0.66; NT HIT: gi14730417, EVALUE 0.00e+00; EST_HUMAN HIT: BG681262.1, EVALUE 0.00e+00; SWISSPROT HIT: Q9NYY3, EVALUE 5.00e-43
aaacaggaacgaaagggagagaagaggaaaaaaaaatagaagcagttaatcattgtttttagatttctttagtgcaagactagagaactgacaggatttcattaattgatacacttactttttgtctggaaggaggctcatgtgagcaccattgttgaaaaggacaccgacggtgtggtctgagagctggtacccaaagccatatttgttagagtaatcaacccatttggtgacccactgaaatgatgtgctcagctgctctttgggaatgcaatcagcttccggcatgttttccagacatccccgaagaacccttgccactgtgtctgcaacacttcccatggtactgtcttcaaggcctgaaaagtcagacagaaatgtttcaagttatacaatattttagcaataaaacctcaggctttggtagatgctaagtttcactccattaattcgaaagacatagaactcaagattattttccaattcctgtaatcttactacttctatgttaaattaagctacaaagtaaattgacttaaattattatgtatttagcactggcatttcgagtttca

SEQ ID NO: 516 - DNA, 575 bp, Homo sapiens
  MAP TO AC023120.3; EXPRESSED IN FETAL LIVER, SIGNAL = 0.75; EXPRESSED IN PLACENTA, SIGNAL = 0.45; EXPRESSED IN LUNG, SIGNAL = 0.48; EXPRESSED IN ADULT LIVER, SIGNAL = 0.91; EXPRESSED IN BONE MARROW, SIGNAL = 0.5; EXPRESSED IN BRAIN, SIGNAL = 0.88; NT HIT: gi5902011, EVALUE 2.00e-65; SWISSPROT HIT: Q9QY06, EVALUE 3.00e-04; EST_HUMAN HIT: AW594598.1, EVALUE 3.00e-65
tccacctcctatgttttccgaattaaccttttatcatatcttaaattaacatgcacgtcttggtttcaccctgtttaaaagaaagagaaaagattaatagaatgataattagtttaaggtcttgtttacatacactgttttctgattttacaatatttttaaattatttttcaggattttgtgagccacttccatgtacttcttccccgaaatattattccatccaaatttaacattcaggatttcttcaggaaaataaatcttaatccagataattatcaagttggaaaaaccatggtaaatataatctgtatagctctggtcaaaattgagtgcatttatttaaaaaataataatttttgcctatgagattgtttattaaaaagatagtgaatcagatatcagaagacaattggttaggcccaggtttttatttaattatgtagtcaatattaatcacagagctctggccagtgctctagttctgactataattttaactgcctaaaaatcatctctccatagatactctactgtaatctccaagccagcttgcccaaggtgaccatatccag

SEQ ID NO: 517 - DNA, 597 bp, Homo sapiens
  MAP TO CHR22_0.0; EXPRESSED IN FETAL LIVER, SIGNAL =  11; EXPRESSED IN HEART, SIGNAL = 9.7; EXPRESSED IN PLACENTA, SIGNAL =  15; EXPRESSED IN ADULT LIVER, SIGNAL =  15; EXPRESSED IN BONE MARROW, SIGNAL =  12; EXPRESSED IN BRAIN, SIGNAL = 9.8; SWISSPROT HIT: Q00587, EVALUE 1.00e-31; EST_HUMAN HIT: BF763991.1, EVALUE 0.00e+00; NT HIT: gi14778719, EVALUE 0.00e+00
ctcctgaattcctggtgagggaccccagctctgagcccactgcccatttctcttctaggcctggactctgggttctgcaccatctcccgcctgccccgctcggaaaagccgcatgaccgagaccgggatggttccttcccctctgagcccgggcttcgccgctctgactctctcttgtccttccgcctggacctcgaccttgggccctcactcctcagcgagctgctaggggtcatgagcctcccagaagcccctgcagctgagactccagcccccgctgcaaaccccccagcccctactgcaaaccccacgggtcctgctgcaaaccccccagccactactgcaaaccccccagcgcctgctgcaaacccctcagcacctgccgcaacccccacgggtcctgctgcaaatcccccagcccctgccgcaagctccacaccccatggacactgtcccaatggggtaacagctgggttgggcccagtggctgaggtgaagtccagcccagtgggagggggtccccgaggacctgctggccctgccctcggcaggcactggggagcaggctgggatggcggccaccactacccagagatg

SEQ ID NO: 518 - DNA, 584 bp, Homo sapiens
  MAP TO AL139135.2; EXPRESSED IN HELA, SIGNAL = 1.3; EXPRESSED IN BRAIN, SIGNAL = 1.3; EXPRESSED IN FETAL LIVER, SIGNAL = 1.9; EXPRESSED IN BONE MARROW, SIGNAL = 2.2; EXPRESSED IN ADULT LIVER, SIGNAL = 2.3; EST_HUMAN HIT: BE222256.1, EVALUE 9.00e-44; SWISSPROT HIT: P70213, EVALUE 1.00e-18; NT HIT: AL163209.2, EVALUE 2.00e-83
ttgggaggaacctgatgaagctggacttgtaaactctgatgaacattttgccagaaaaaatagctttcccatctccaatagtggcaacattccctccttgacccatgctgctgtccccctttccacatttgtctgagaagataaaccctacgctgcctgaggcaacagtgatggcctccctgaggcaattgccaggcaagataatgttgatgctcctcagaagccatccccaacatccctgttcacgtctagagctataactaaagtcccagtgggcccatagagatgaggttgagagtgtgacccatgatgaggtgtgctacacttgaaaagaactgcttgaattttctaatttatataagcagaaatctagagaacaagcctgggaatggatattaatggtgtgggaagatggtggaagaaacatagagtcagatcaggctgaattaattgatttggacccactaagtagggattctgcatttaatgttgcagctcagggagttaaaaaaggtgctaattgtttatttgcttggttagctgaaatattagttaaaagatggcccactgtgagtgagctggaa

SEQ ID NO: 519 - DNA, 544 bp, Homo sapiens
  MAP TO CHR22_28.0; EXPRESSED IN PLACENTA, SIGNAL = 4.4; EXPRESSED IN ADULT LIVER, SIGNAL = 4.4; EXPRESSED IN HEART, SIGNAL = 3.2; EXPRESSED IN BRAIN, SIGNAL = 3.2; EXPRESSED IN HELA, SIGNAL = 2.7; EXPRESSED IN LUNG, SIGNAL = 4.2; EXPRESSED IN FETAL LIVER, SIGNAL = 3.4; EXPRESSED IN BONE MARROW, SIGNAL = 3.8; EST_HUMAN HIT: AW673166.1, EVALUE 0.00e+00; SWISSPROT HIT: P95333, EVALUE 3.00e+00; NT HIT: AJ312942.2, EVALUE 5.20e-01
tttgaggatcttggctcctggaaccccccagcttcaggcccagctactcctttagagttgaaggggctgttttctccagcgacccagacttcagttccctctgtgcctctcctcctccagggggccctccttccagaaacaccctgcctgcttctggtggtataatagaggacactcagcatggcaccctctcactttatgcctggtgatgggcctgatctgtcgggtcagtgcctttccccagaaggaacgtggtggcatttgttgattcatccgtttgtgtcatggagataatgaccgtacctacaataaagggcgaggtgagcattaaatgcatgaatgtatgcagagctcttagactagtgcctgttacattctctatgggtttctattattattgatacttttagttcattcagctaaatttaccaagcattcacaggtttccgggacactgggaatacagagaacaaagcatgtttcttcctgcttgggggagaaagatccagaaagaacgtcagcgccagcatgaagagccttgtga

SEQ ID NO: 520 - DNA, 538 bp, Homo sapiens
  MAP TO AL136361.2; EXPRESSED IN HEART, SIGNAL = 3.6; EXPRESSED IN ADULT LIVER, SIGNAL = 4.5; EXPRESSED IN PLACENTA, SIGNAL = 4.5; EXPRESSED IN BONE MARROW, SIGNAL = 3.3; EXPRESSED IN BRAIN, SIGNAL = 3.2; EXPRESSED IN LUNG, SIGNAL = 4.2; EXPRESSED IN HELA, SIGNAL = 1.8; EXPRESSED IN FETAL LIVER, SIGNAL = 3.8; NT HIT: AL163285.2, EVALUE 2.00e-09; EST_HUMAN HIT: T05554.1, EVALUE 2.00e-16; SWISSPROT HIT: Q9R171, EVALUE 6.60e+00
tctcccacccttttgtgttccaggaaatgacttactgcaaagaaccactcttccccacgagacttcgagaagacccgctgtcacggactgagttgtgtcctcttaaaattcagatgttggagtccaaacccccagtaactcagagtgtgaacgtatttgaagaggtctttaaagaggtgatgaaggtaaaatgaagtcactagggtgggccctaatccaacctgacaggtgtcctcataagtagaggagatgaggacacagacacatggaggaaagaccatgtggggacacagggagaagatggctgaggggagaggccagaggagaaaccagccctgtccatgtgttgacctgggacttccagcctccagcatggtgagactggttaagccccatctgtgcagtactttgttatggcagccctactagcacaccagtaggtccattcataaatgccgtatactcgttcttgtgatttccgtaacagtcatgggtgactgccttgtttcctgtgataaggacacagagaccctccaaa

SEQ ID NO: 521 - DNA, 554 bp, Homo sapiens
  MAP TO AL137071.3; EXPRESSED IN HELA, SIGNAL = 3.9; EXPRESSED IN BRAIN, SIGNAL = 3.6; EXPRESSED IN FETAL LIVER, SIGNAL =   3; EXPRESSED IN HEART, SIGNAL =   3; EXPRESSED IN LUNG, SIGNAL =   1; EXPRESSED IN BONE MARROW, SIGNAL =   4; NT HIT: Y19213.1, EVALUE 2.00e-16; EST_HUMAN HIT: AA516403.1, EVALUE 6.00e-17; SWISSPROT HIT: P22510, EVALUE 5.30e+00
caaagttggctagacctgggaattcagattgccctagagctgtgctgtcaggtacaatagccatgagtggctatttaaatttgaattaattaaaattcaataaaatttaaaagtcagttcttcagtcacactagccgcatttcaaagatgtaataaccacatgtagctactgtattggacagcacagataaagagcattttcatcatcatggaaagttctcttggacagcatggccctagagggtatccttctattatcatatttactcatgtaattcctttctcctctaaccttccccactccctttctagtttggaaacgaaatccaaagctttatggggctgctttatcatcattagcaaaagggaccgtgaactctttaacctgtcatcacagagacactagtgactccgtgactaaaagaaaaagaaaaagccttctaagaatgaatgaatgtgaagaaactcatgcatgatattagaggcaaaaacagaagataaatgtataaaacgtttcagttttgtgggtatatagctggccatttctgaatcat

SEQ ID NO: 522 - DNA, 542 bp, Homo sapiens
  MAP TO CHR22_235.0; EXPRESSED IN LUNG, SIGNAL = 0.87; EXPRESSED IN BONE MARROW, SIGNAL = 1.6; EXPRESSED IN PLACENTA, SIGNAL = 0.81; EXPRESSED IN ADULT LIVER, SIGNAL = 0.96; EXPRESSED IN HELA, SIGNAL = 3.5; EXPRESSED IN BRAIN, SIGNAL = 1.6; SWISSPROT HIT: O70247, EVALUE 1.70e+00; NT HIT: Z99116.1, EVALUE 5.20e-01; EST_HUMAN HIT: AA703767.1, EVALUE 0.00e+00
atacatctctgcctgctcggaatgcgacgctatcctgccccggcaatctatgatacagtcgcgtcagaaataggtgtcagctctcattacattcccgaggataaatcccacttatcagggcctgcagagtcccaggcctcctgacatcccatttcagacagcagcctcccacccccgcccctcctctccctaagagatgccgtcggagttttcaatcgctgaacttctgctggatgggaggagacgggcaggcatcgctgagctcctgctggatgggagaagacgggcaggcatcgctgagctcctgctggatgggagaagatggagaggcagcctgagattttcggggcatggtggacaggacgccctgtgttatcaaagacaccttgggtgatcaagcccccgggcctgtctgctcccttgctggaaagttttctattgtcaaaaagaaagactctgttgctcagaggcatgggtcttcggtcatagtctcagctacccagaagggcgtcctccctaatcccaggggcaatgaactaaga

SEQ ID NO: 523 - DNA, 515 bp, Homo sapiens
  MAP TO AL137790.1; EXPRESSED IN FETAL LIVER, SIGNAL = 0.79; EXPRESSED IN PLACENTA, SIGNAL = 1.2; EXPRESSED IN LUNG, SIGNAL = 1.1; EXPRESSED IN ADULT LIVER, SIGNAL = 1.1; EXPRESSED IN BRAIN, SIGNAL = 0.78; SWISSPROT HIT: P20267, EVALUE 2.80e+00; EST_HUMAN HIT: AA182705.1, EVALUE 4.60e-02; NT HIT: AF287967.1, EVALUE 4.90e-01
gaggaaacgtcttggctgaggcaaccttgttcctcaggctgtggagggcccccttcccgggagcggcaggagcaggtgggggcaagatggcttctgtccccacacttcccctcagctgcccctgcgcaaggtgtacccctgctcacccagtgactcacaaacctgttgtgctcctgggctcgttaggtaaatgaatacacttaattatagaaattagatgagtctccggttctggcaggaatacagagcgcagaggctgggtgggaatggcaggtgactcagaggcagggctgggagtttgagggagagggagagggaagaagaactgtcgcagaagcagaggaagcagcgtggagagcgatgctgcagctcggggcgcagaagggacaccaggtgccgccagtgggagtcaccactgaatctgggcagaggcttcctgagggaagggcctccctcgcctaggcagcccgcccacggcctgcaccaagcctgaagctacaacgctagggacccct

SEQ ID NO: 524 - DNA, 572 bp, Homo sapiens
  MAP TO AL160233.1; EXPRESSED IN HELA, SIGNAL = 1.6; EXPRESSED IN BRAIN, SIGNAL = 1.3; EXPRESSED IN PLACENTA, SIGNAL = 1.5; EXPRESSED IN LUNG, SIGNAL = 1.3; EXPRESSED IN ADULT LIVER, SIGNAL = 1.1; EXPRESSED IN FETAL LIVER, SIGNAL =   1; EXPRESSED IN BONE MARROW, SIGNAL = 1.1; EXPRESSED IN HEART, SIGNAL = 1.4
tgccaactaaaaccaccagtctgcaattatttaaacattttaaattgggattacaagtctgaactgttatttaaataggccaaatattcttaaatggtaagtgtatataaaccaatatgcaaacaaatattaatactacactcttagttctcttaaagatttccatattaatattaaaatcttcctgggacctaaaaccattcacccatttaggaaacaactatgttttcccaagcaatttagaaagattaccttccaactggttgaaatggtataacaacaagacattttggctaagacaaactgggttcttgttatagacactgatgggatatatttctttgatttatagtcaataatagagatgtcaaaataaaccagcttccttctgcacttaggcttttgaatctgaagagtcaatttttccacattggtagaagcattcacaaaatcctccatgtttatcatatattaatggtatttcacaaactaggttttcattgaaaactcatgttaatagtattctattaaaaattctttttaaaacactttgggcaacgttgttttctctg

SEQ ID NO: 525 - DNA, 528 bp, Homo sapiens
  MAP TO AL139253.1; EXPRESSED IN BRAIN, SIGNAL = 1.5; EXPRESSED IN FETAL LIVER, SIGNAL = 1.8; EXPRESSED IN HEART, SIGNAL = 1.3; EXPRESSED IN LUNG, SIGNAL = 1.9; EXPRESSED IN ADULT LIVER, SIGNAL = 2.8; EXPRESSED IN BONE MARROW, SIGNAL = 1.3; EXPRESSED IN PLACENTA, SIGNAL = 2.3; SWISSPROT HIT: P23852, EVALUE 4.90e+00; EST_HUMAN HIT: BE563820.1, EVALUE 1.90e-01; NT HIT: AY046056.1, EVALUE 7.80e+00
ttcaacaacagggaaggagggttttcttgtctcctgttcctattggagagacaggcaaactgaaacccaagaagagaaaatgattcagaccctgggtgagttggcagcagtgagcaagtcccaagaggtcacctggattcaggatgctccggaaaaacaggccagagccctctccgtttgtcacatttttccccaagcttttgggcctggcacaggtgcgtgtgtagtggtggtggaggcgtggggggtggggaagcagctttttctagcattgcccgagaaggggatgacttccgcctggattgagaatcatggaggacttcttggaggaagggatggcaggtgttcttcatgagggaggaggaggaggcaagcaggaatttgggggcgggaccctgggaaagtttggggaagctgggtgtcttgacttgggtgaagggagggaggcagcctccaggagcagagggcagcttgaagggggtcgtgggggtgggtttcccagtgaaatgcttgtggtgtgtctgcagt

SEQ ID NO: 526 - DNA, 551 bp, Homo sapiens
  MAP TO CHR22_174.0; EXPRESSED IN FETAL LIVER, SIGNAL = 0.62; EXPRESSED IN BONE MARROW, SIGNAL = 0.76; EXPRESSED IN HELA, SIGNAL = 0.69; EXPRESSED IN BRAIN, SIGNAL = 0.76; SWISSPROT HIT: P03186, EVALUE 5.00e-06; NT HIT: AL163203.2, EVALUE 1.00e-04
gtcactgacgtgtccaccacccaccactggcagtgcagcccctgataatgccccataactcatccccatctaggatactgcagcacccgatggtgcccacaacctgccccctgccattggcagtgcagcccaggttaatgcccccaaactgctccctgatgttggcagtgcagccacggaaagtgcccccaaccagcctcccgccatgggaagtgactcccgggatagcgcccccaagcagaccctagccttgggcagtgacgcccgggtaggtcgcccaaccgccacccaccccgttgccgagagtgcagcaccagatagcgaccctaacatgccccccatcactggcggtgtagcccaggatagcgccgccaacccctcacttgacgcgacagtgtagcccctgatagtgcacccaatctgccacccactgccggcactgcaaccccggatagtgcacccgacacactccctgctgggcagtgcagccccccaatagcacccaacccgtccctccacccctgccactggcagtccactcccgataatgc

SEQ ID NO: 527 - DNA, 590 bp, Homo sapiens
  MAP TO AL138889.2; EXPRESSED IN HELA, SIGNAL = 1.3; EXPRESSED IN FETAL LIVER, SIGNAL = 1.9; EXPRESSED IN LUNG, SIGNAL =   2; EXPRESSED IN PLACENTA, SIGNAL = 2.2; EXPRESSED IN HEART, SIGNAL = 1.9; EXPRESSED IN BRAIN, SIGNAL = 2.3; EXPRESSED IN ADULT LIVER, SIGNAL = 1.8; EXPRESSED IN BONE MARROW, SIGNAL = 1.9; NT HIT: X13415.1, EVALUE 1.40e-01; EST_HUMAN HIT: BE276449.1, EVALUE 5.30e-02; SWISSPROT HIT: Q9LT02, EVALUE 2.60e+00
cctcccacttttcctccttcagcagctctgccaccttcaaatcccagccagacactatcaagcaggaaaagagctaccagagaccacctctgaggaggagtcaagctcagcatccaggggcagccgtgccccgctccccacttcctgacggcagcaggtccacaaggaggcccccaccactgcagtgaagcggggagggcttggtgagccccagcctcaccagcagctccccggcaggatcatgctgccattctcgttgcccctgtgccccaccatggcctccatagaaggtgtgtggacattgtctgcctttttggaacttggatctgagtggacctgggttccactcctgcgatgtgacagtaggtaggtcactcgcattctctgagccaaataaaaggactgagttagatcccttaagatgccattccaggttccacctgcctgcctggctctccctctcattcatgctttgctactttcacaaatgaagcctggaagggccaggtggaggcaggaacgtccctaacctccagaggtcattgcaggcagcaccctgcctaggttccaggatctctgtctgagcccag

SEQ ID NO: 528 - DNA, 501 bp, Homo sapiens
  MAP TO AL137855.1; EXPRESSED IN FETAL LIVER, SIGNAL = 0.76; EXPRESSED IN BONE MARROW, SIGNAL = 0.93; EXPRESSED IN BRAIN, SIGNAL = 1.1; EXPRESSED IN PLACENTA, SIGNAL = 0.92; NT HIT: AB055898.1, EVALUE 1.20e-01; EST_HUMAN HIT: AI918755.1, EVALUE 7.00e-01
gcggcctagaacattcagagagctccaagtgatagaaaaagggaataatacttaagagtctggattctggagtcacagtgccttagttcaaacccagatatgtgacaaaatatagagaggcttagcagagtgcctatagcagagtaaacactaggtaaatatccactggtggtaacagtggggggaaatgatggtggcagtagtatggagatagttgctgatactggggattggggtgatggaagtgataatgatattaaggatggaagcagtggaggtggtgggggatggagttgggagcggaaatggtggagatggtggtagtaatggtggtgggggcggaggtagtggtggagatgggggtggaggtgggggtggtgaaggtggtggaggtggtagggatggtggtgataacagataagactgctcaagtattaaatgcaagaaagatgaatcaagcatgtgtgtatgggggaaatcacagcaagagatgaagccaga

SEQ ID NO: 529 - DNA, 555 bp, Homo sapiens
  MAP TO AL135783.6; EXPRESSED IN LUNG, SIGNAL = 1.1; EXPRESSED IN ADULT LIVER, SIGNAL = 1.1; EXPRESSED IN FETAL LIVER, SIGNAL = 1.1; EXPRESSED IN BONE MARROW, SIGNAL = 0.94; EXPRESSED IN HELA, SIGNAL = 1.2; EXPRESSED IN BRAIN, SIGNAL = 0.85; NT HIT: gi14765033, EVALUE 3.00e-64; EST_HUMAN HIT: BF791926.1, EVALUE 4.00e-64; SWISSPROT HIT: O00087, EVALUE 6.90e+00
gcacttcaggaggagactgggaacactcaggcagtgcacatagatcctgtagatattcagtacatatttgcagatggacaatgggaaatggaaaattaagaaatcaaacaaatcactgagtctggcaattcaagactgactcacataataccatctatcttaaattctagcacattcccacagaactatttgtaataagctacgaaattaacttgtcagaagcattttataccataggtagcaaaattacctctttataacctagtgctgctgatggtctaagtggaggtgcaggtcgtagacaacttaaactccacggttttataatttgaggaggctccaagggtcctcggggctgtccggtagagctaaaagactgggaaaatgtctgatgagatgttggcaatctgccatctgaacccgaccttgtgccacacagtgagagaacaacaatagcttcattggattagcaaagacagccatagaaagggatagatggaaaaacaaaagtctctagtttgagaactggttctttccagtccagattatcgggtc

SEQ ID NO: 530 - DNA, 588 bp, Homo sapiens
  MAP TO CHR22_117.0; EXPRESSED IN LUNG, SIGNAL = 1.6; EXPRESSED IN BRAIN, SIGNAL = 1.3; EXPRESSED IN PLACENTA, SIGNAL = 1.4; EXPRESSED IN ADULT LIVER, SIGNAL = 1.7; EXPRESSED IN HELA, SIGNAL = 1.6; EXPRESSED IN FETAL LIVER, SIGNAL = 1.6; SWISSPROT HIT: P80748, EVALUE 8.00e-42; NT HIT: X71966.1, EVALUE 0.00e+00; EST_HUMAN HIT: AW404446.1, EVALUE 1.00e-116
gctctatccataggcctcccggggctggagcaagagggtgaccgaggctgggagggtgtttttgtctcacttccccatctgcctgtgtcaccgtgggatgatcactactactgtcccacacctgacagtaatagtcagcctcatccccagcctcgatcctgctgatggttagggtggcggtgttccctgggttggagccagagaatcgctcagggatccctgagggccggttgctatcgctatagatgaccagcacagggtcctggcctggcttttgctggtaccagtgcacagctttacttccaatgttgtttcccccacaggtgatcctggccatctgtgctgtggccactgacactgagtgtggctgagtcagctcataggaggtcgcagagcctgcaaagattaaaaaaaaaaaaaaaggagaggatggcttttaggtaaaagatccgtatgaaatcccctgccctgctgtcctggaaaagcttcagagagtctgtgaaccctcagggtatcccctgcaatcagccctagccccagtggcccatggactttccctctgcatggagcctttgaactgaaaaccca

SEQ ID NO: 531 - DNA, 528 bp, Homo sapiens
  MAP TO CHR22_22.0; EXPRESSED IN PLACENTA, SIGNAL = 3.4; EXPRESSED IN ADULT LIVER, SIGNAL = 3.6; EXPRESSED IN BONE MARROW, SIGNAL = 2.7; EXPRESSED IN LUNG, SIGNAL =   3; EXPRESSED IN BRAIN, SIGNAL = 2.8; EXPRESSED IN FETAL LIVER, SIGNAL = 3.5; EST_HUMAN HIT: BI056477.1, EVALUE 9.00e-93; SWISSPROT HIT: Q12772, EVALUE 5.00e-28; NT HIT: gi11418194, EVALUE 1.00e-91
tggtgaagcctgtgtctctgacttccagcattgaatgaaggtgctaaagggtggggcgctaaccctagctcagggctggcatttcagatctggagctggtggcatggtgccatagtggcagcattggagtcaacagatgcacatgtcatatcagtgtggggcgtggcagtcactggcttgggcccctctgcctgtcacgcaggtgacacatagtgacctgcctctcgactccctgtcactgctgcaggagccccctggtgaaggccatcttccatgcctgcagagccatgcatgcctcactccctgggaaagcagatgggcagcagagttccttctgccattgcgagagggccagtggccacctatggagcagcctcaacgtcagtggggccacctctgaccctgccctcaaccacgtgagtgggagctgagttggcccctgggggaggtgctctgcactggtttacgagaacactcccactcacctcatgctgaccctgcgggtggggccatccgaaagacagagaa

SEQ ID NO: 532 - DNA, 548 bp, Homo sapiens
  MAP TO CHR22_222.0; EXPRESSED IN FETAL LIVER, SIGNAL = 1.3; EXPRESSED IN PLACENTA, SIGNAL = 0.94; EXPRESSED IN HELA, SIGNAL = 2.4; EXPRESSED IN LUNG, SIGNAL = 0.95; EXPRESSED IN ADULT LIVER, SIGNAL =   1; EXPRESSED IN BONE MARROW, SIGNAL = 1.5; EXPRESSED IN HEART, SIGNAL = 1.2; EXPRESSED IN BRAIN, SIGNAL = 1.2; SWISSPROT HIT: Q24742, EVALUE 1.00e-03; EST_HUMAN HIT: BG285551.1, EVALUE 1.00e-45; NT HIT: gi14779279, EVALUE 9.00e-46
atagtggttgccagggactggagggaagggaagggagatgagtgctgctaatgggtgggaagtttttttatgaagtgacaaaaaaaaaaaaaaaaaaaagaaaagaaaagaaaaaaaacaacgacaacagagagaatcaaactgtatgtcctaatcctttggatgctctggacaagggtctgtggtctcctcttacctgcatcaatggcacacgggtaatggtatcggaaggagcagcctttgttgtagcagcccaaggtggcgcctgcctcctggcagtgggaacatttctgaaaggaagggaaaagtcaggcatgtcagtatcccagatttggccctctcctccaggccttccctggtccccatctgttagacctcagcacgtgtctctgtggttagaggagtccgtggtggcaggatgagctggtcaatttctaaatgccattcactgaccacaccatgggaagggatccagcaataatgttttagaccaagcctcacaaatgttctcaaatcaacaatacagcagggtgagatgagcaatccat

SEQ ID NO: 533 - DNA, 555 bp, Homo sapiens
  MAP TO CHR22_93.0; EXPRESSED IN BRAIN, SIGNAL = 0.48; EXPRESSED IN FETAL LIVER, SIGNAL = 0.73; EXPRESSED IN BONE MARROW, SIGNAL = 0.64; EXPRESSED IN PLACENTA, SIGNAL = 0.81; EXPRESSED IN ADULT LIVER, SIGNAL = 0.92; EXPRESSED IN LUNG, SIGNAL = 0.81; SWISSPROT HIT: P90838, EVALUE 1.40e-02; EST_HUMAN HIT: BG716771.1, EVALUE 0.00e+00; NT HIT: gi14778442, EVALUE 6.00e-90
aattccagtcccagcaaatgaacctggggctggctgttccaccctggaaaagatcactgaagtttctgtgaacgtaaaacagctcacgatacgtttatgagactgatctgtgaaaacgctttggaaaccccaatttcgtatttatttagattcccatatccaccgcacttagcttgtcctcgtggttcggggacctctcctggcgggaggtggtgccggaacaggttgggcggccccagaaccgtgaggggagaaggacgggatgagggaaactctgcaaggggccggggcggacccagtggtcaggggaggtccagagggcgcagtggacgccggccgggccggggacggagcacggaaggccccgccatttgctctcctgccttacctgcatgttgggcacgaagcccttcttgatcctccagcagtttttattgatcttctccaagaactgcagctcatcattatagctgcgactcatggtggcgaaaactgtagcaaaaactcccggctccgctttgaagagccgctgccgcgtagtccggcttctcagag

SEQ ID NO: 534 - DNA, 599 bp, Homo sapiens
  MAP TO CHR22_174.0; EXPRESSED IN LUNG, SIGNAL = 0.46; EXPRESSED IN FETAL LIVER, SIGNAL = 0.79; EXPRESSED IN PLACENTA, SIGNAL = 0.58; EXPRESSED IN BRAIN, SIGNAL = 0.74; EXPRESSED IN HELA, SIGNAL = 1.4; NT HIT: gi9558724, EVALUE 0.00e+00; EST_HUMAN HIT: AI014316.1, EVALUE 0.00e+00; SWISSPROT HIT: Q10570, EVALUE 8.00e-65
gttcctgagttcttgcctgggcaactctctcctcctcaagtacaccgagaagcttcaggagcccccggccagtgctatctgtgaggctgctgacaaggaagagcctccctcacagaagaagcgagtggacacatggccagctggtcagccagggacaaatccgtgtcacaggacgacatggacgagattgaagtgtacggcagcgacgcccagtcgggcacacagctggccacctacctttgaggtgtgtgacagcatccttaacattggaccctgcaccaatgctgccatgggtgagcctgccttcctgtctgaagagtttcagaacaaccctgagccggacctggagattgtggtttgctccagccacaggaagaatggggctctgtcggtgctgcagaagagcatccagccccaggtggtgacaacctttgagcttcccggctgctacgacatgtggacagtcatcgccctggtgcctaaggaggagaaagagaatcccaagggggagggcacggagcaggaacccagcacccccgaagcggacaatgaccaccgcagacagtgattcctgattctgagccaggaagactcaacca

SEQ ID NO: 535 - DNA, 549 bp, Homo sapiens
  MAP TO AL133402.2; EXPRESSED IN FETAL LIVER, SIGNAL = 5.6; EXPRESSED IN BONE MARROW, SIGNAL = 5.8; EXPRESSED IN HEART, SIGNAL = 4.9; EXPRESSED IN HELA, SIGNAL = 5.8; EXPRESSED IN BRAIN, SIGNAL = 6.1; EXPRESSED IN LUNG, SIGNAL = 5.8; EXPRESSED IN ADULT LIVER, SIGNAL = 5.7; EXPRESSED IN PLACENTA, SIGNAL = 5.5; NT HIT: AL163285.2, EVALUE 1.00e-10; EST_HUMAN HIT: BE071702.1, EVALUE 7.00e-26; SWISSPROT HIT: P53775, EVALUE 6.80e+00
tttgcttggttcagggaatcccaggtgggacaagccaccccttctgaacgtatctccccatctcatcaaaccatggaatgcaaaatcacttttataagaaatgctcagtttgttaatagctttctaggagttttcttccccctctgacttttctcatggtttcgtaattcattcattgtgtcatgaggtgaattgcgtccctcaaaattcctgtgttgaagtcttaacgtcctgtacttcagaatgtgaatacctttcaagaggtaattaagttaaaatgaggtcattggggtggaccctgataccgtatgcctggtgtcctcatcagaagaggagatgaggacacagacacgcacagagggaagaccgggcaaggacacagggagaagatgctgtccacaagccaaggagagaggcctcaggagaaaccaaccctgcccacacctgggtctcagatatctatcttccagaatggtgagaaaataaattcccattgttcaagccactcagactatggtatttgttagagcagccccagcaaactaatct

SEQ ID NO: 536 - DNA, 594 bp, Homo sapiens
  MAP TO AL137017.4; EXPRESSED IN PLACENTA, SIGNAL = 0.62; EXPRESSED IN FETAL LIVER, SIGNAL = 0.45; EXPRESSED IN LUNG, SIGNAL = 0.7; EXPRESSED IN ADULT LIVER, SIGNAL = 0.72; EXPRESSED IN BONE MARROW, SIGNAL = 0.42; EXPRESSED IN BRAIN, SIGNAL = 0.51; EXPRESSED IN HELA, SIGNAL = 0.52; NT HIT: AJ303140.1, EVALUE 1.40e-01; EST_HUMAN HIT: BF333715.1, EVALUE 8.40e-01; SWISSPROT HIT: P22822, EVALUE 5.80e+00
aactttcaacaacgggcttgcatttttgcattgcactggtccctcacaaactgtgtggccagtgctagctgacaactagtacacgttttaaataatgtgcatattaagattatggggtcccaaacaaaatatgcctgaggctggggcagcgtgagacactagtacgcactttttgtcactaactggattaaaacttcccattctctggtagtcactaggagggaacttatggatcccagaggttttcttgaagtgggaaaaagaaaggcacagatactccccaggatgttatttcccaagattccacatgagctagtgtggctcggaccaagattttcttttcccagggatggatactgaggatttcacaataagaatatcttgagaaaaggccccacacgaggaactagtgtttggggttgagggctaagtttagccctgcatgtggctgatgctggtgggctttgggaagctggagctgaatatgctacccagaatggtcagcaaggccctgaggggcagtgcagccccgtgtaaaaacagcaccgagacagagcaagaaacaacagtgagagcaggactgatttcgtctcc

SEQ ID NO: 537 - DNA, 525 bp, Homo sapiens
  MAP TO AL135783.6; EXPRESSED IN HELA, SIGNAL = 0.51; EXPRESSED IN FETAL LIVER, SIGNAL = 0.62; EXPRESSED IN LUNG, SIGNAL = 0.68; EXPRESSED IN PLACENTA, SIGNAL = 0.91; EXPRESSED IN ADULT LIVER, SIGNAL = 0.81; EXPRESSED IN BRAIN, SIGNAL = 0.75; SWISSPROT HIT: P36269, EVALUE 2.80e+00; NT HIT: AF005496.1, EVALUE 5.00e-01
cccactgatcctcagtttcctgtaaaataaacatgatcctaacattttctatttcacagagctactgtgcagataaaaagagacaatcctggtgaaaaagagacaatcctggtgaaattccttgaacacagcaagtgctttataaagagaaaccatttttacccttcatttgacttcctggtgtgctcagatgaggggccttcccctcagtgttcagtaaaaggggcggttctgatgtgttgaagactggtgtcttttaaataggggagctcattagtcatctcaggctttttatactcttctcaatgcttgacagtgcacaaccaagtataaagtgatcgctaaaaaggccagcacgcacctggagaaccactgctaccacaaaccgggcacaaacttgtcccagatgggaatgggtaacatttgctccctcaaacacaaaaacagctcctctaggtttttgcttcacatcgtccaaatttttgaatgtttgaaacctgacttagatttgtgagaagccccaaa

SEQ ID NO: 538 - DNA, 555 bp, Homo sapiens
  MAP TO CHR21_19.0; EXPRESSED IN BONE MARROW, SIGNAL = 1.7; EXPRESSED IN BRAIN, SIGNAL = 1.3; EXPRESSED IN HELA, SIGNAL = 3.7; EXPRESSED IN FETAL LIVER, SIGNAL = 1.4; EXPRESSED IN LUNG, SIGNAL = 1.1; EXPRESSED IN ADULT LIVER, SIGNAL = 0.79; SWISSPROT HIT: Q05490, EVALUE 7.00e-02; NT HIT: gi14731590, EVALUE 3.00e-36; EST_HUMAN HIT: AW842143.1, EVALUE 6.00e-11
gctagccgaaaacctctgtggtcagtggcgcctttgcccgagttttgctcaggcccactgggctcattcagcccactcagcctggcaggctgcattcggctttcactcttggcccagatcccatgcctgccaagggcaagccaggcgtggagcagcaagtggtgtgtgagtgagtgtgcgcagggaccagccactgtgcacagccaggcacgccagctatggcggggcaggcaactccaggtgctggcatcggtgctggctccttgctgcggctggaccagacataccacaagcaccttgcactgcaggcattgggcaacactgttggaccctgaagcttggatatatcaggaactgcagaaccccaaagagggtgtcacagccctggcttcgggagctcctaagtctggctccccgaaggaatgcagctcttctcaccttctctcttctgatcgcctgcaacatggcaagaggtggggagagggacgtgtttcagccctctgtgttacaactcttcctgtctcaccatttggggggtctcgccttcttgttctg

SEQ ID NO: 539 - DNA, 600 bp, Homo sapiens
  MAP TO AL137145.3; EXPRESSED IN FETAL LIVER, SIGNAL = 9.1; EXPRESSED IN BONE MARROW, SIGNAL = 9.7; EXPRESSED IN HEART, SIGNAL = 7.2; EXPRESSED IN HELA, SIGNAL = 8.1; EXPRESSED IN ADULT LIVER, SIGNAL = 9.7; EXPRESSED IN LUNG, SIGNAL =  10; EXPRESSED IN PLACENTA, SIGNAL =  11; EXPRESSED IN BRAIN, SIGNAL = 9.3; EST_HUMAN HIT: AI075190.1, EVALUE 0.00e+00; SWISSPROT HIT: Q04759, EVALUE 8.00e-34; NT HIT: gi13627293, EVALUE 1.00e-103
ttcaatcctcctgcctcaacctcccaagtagctagaagattgatttttaagccacacactgtgcttgtttaatgaaccaactacatctccaggtgagcgtattcaaggtcatggaactggttcctgggccgttatgttataactgatgcacatgagggtttctcttacactcattttgacatttaatgctcataatattggtgcctctattaaaacacagacggtgcacatcccatttaaacccagttcaataataatcattgtttgccacatgcaagttggaaactaagaggaacagaaaactgaccagaagacctaatgctcgtcttatgaagacgctcttggcttcgcttcttaccttcaccagaaggtcctttgcttccttctccagccaccgtgggtaaaagggattgtccatgcggatggagtggaagagctcctcctcatcctgcccgtggaaaggcgactgaccaatcagcatttcataaaggagaaccccgaaggaccaccagtccacagagtggttgtatttctgacccagcaagatctgcacaaccaaaaggcagacaggaaattaacaggaatgaggctgaggagtga

SEQ ID NO: 540 - DNA, 563 bp, Homo sapiens
  MAP TO AL137846.1; EXPRESSED IN BONE MARROW, SIGNAL = 2.9; EXPRESSED IN HEART, SIGNAL = 2.8; EXPRESSED IN PLACENTA, SIGNAL = 3.5; EXPRESSED IN BRAIN, SIGNAL = 2.7; EXPRESSED IN ADULT LIVER, SIGNAL = 1.9; EXPRESSED IN HELA, SIGNAL =   3; EXPRESSED IN FETAL LIVER, SIGNAL = 2.4; NT HIT: AF283525.1, EVALUE 3.40e-02; EST_HUMAN HIT: BE882948.1, EVALUE 2.00e-01; SWISSPROT HIT: P35464, EVALUE 8.00e-05
gcctcacccactgagacttctttgggttggcaaggccgggctgggcatgggccggcggggctggcctgcacctgcgtctgacctcggacctgggtggggatcctgaccctcccacaggtggcatgtgtggctgtcacagtcgcaatgcacttcctctttctggtggcattctcctggatgctggtggaggggctgctgctgtggaggaaggtggtagctgtgagcatgcacccgggcccaggcatgcggctctaccacgccacaggctggggtgaggcctgctctgcacccacactctcttctcctcagctgtaccttgcacggccgaccctgccatctaacatggccccacacccagcactcagcacccagcaccactcagcatccggcatttagcgtcacccagaacccagcaccacccagccagtcccatctctgacatgacctcaatttcctcagttctattaacctccaatttacccatccccattcctcataatccttctccactttacagcctcccctctccatccgcagtgctatctccccaaatctgtagccag

SEQ ID NO: 541 - DNA, 583 bp, Homo sapiens
  MAP TO CHR21_61.0; EXPRESSED IN HELA, SIGNAL = 2.6; EXPRESSED IN HEART, SIGNAL = 1.2; EXPRESSED IN LUNG, SIGNAL =   1; EXPRESSED IN BRAIN, SIGNAL = 1.6; EXPRESSED IN PLACENTA, SIGNAL = 0.81; EXPRESSED IN ADULT LIVER, SIGNAL = 0.95; EXPRESSED IN FETAL LIVER, SIGNAL = 1.7; EXPRESSED IN BONE MARROW, SIGNAL = 1.8; NT HIT: AL163285.2, EVALUE 0.00e+00; EST_HUMAN HIT: AW384111.1, EVALUE 1.00e-109; SWISSPROT HIT: P20591, EVALUE 5.00e-33
ctcggaagcaggtcaaactcaggaggcacatggtactcattaagaatgcatttgagatgggatgtccataactcaagggataaacaaaacgtggcgtgttctacagtggacccgggtgaaggagcttggggagagccacatgctgttctgggaggcatccctgccttcacgcggcttgtcgtggagttcttttctggagcggggctccactgcccccatggttctgcaggggctatggcctgtcctcaagcaaggatgggaggaaaccctgggaggccgggggcgtgagcagttgttcgttcacctctgcctcgtgactgagcacgttctctccccaaatacatctggctcgcaggaatcttgacgaagcctgatctggtggacaaaggaactgaagacaaggttgtggacgtggtgcggaacctcgtgttccacctgaagaagggttacatgattgtcaagtgccggggccagcaggagatccaggaccagctgagcctgtccgaagccctgcagagagagaagatcttctttgagaaccacccatatttcaggtgcgcttgcctgggtttcatcatggatc

SEQ ID NO: 542 - DNA, 571 bp, Homo sapiens
  MAP TO AC011585.3; EXPRESSED IN FETAL LIVER, SIGNAL = 0.55; EXPRESSED IN BONE MARROW, SIGNAL = 0.55; EXPRESSED IN PLACENTA, SIGNAL = 0.58; EXPRESSED IN LUNG, SIGNAL = 0.54; EXPRESSED IN BRAIN, SIGNAL = 0.57; NT HIT: AL163249.2, EVALUE 4.00e-17; EST_HUMAN HIT: AL521708.1, EVALUE 2.00e-17; SWISSPROT HIT: P15101, EVALUE 2.40e+00
gtggcaccccaaaacaatacaatgacaattgcaacatcaaagatcactcaccccagatcacagtaacagatatgacgataatgaaaaagtctgaaatagtgtgagaatgatcaaaacgtgacacagagacacaaagtgagcacatgctgttgggaaaaatggacttgcttgacacagcattgccacagaacttcattctgcagagaatgcagtacctgcaaagcacaatcaaatgatgcacaataagacaagctatgcctctatcttaaaattgtgaaaaataaaaatagtttttaggtaagatataggggccacagctgcattcgatgaatggtatggacaaattatttctttccatcccctggatgtcatgcttcagggtagcaagaaagaatgttttcttgaagactcgtatattccagatggaggattctaagggaataagcttgagacttatgcttagtcaattttctgtcatcacagagctacatgattctttggacagagctcaactggccatcactctttttctctgtggattgcctgatgcagccacaggaagcttcacatt

SEQ ID NO: 543 - DNA, 560 bp, Homo sapiens
  MAP TO CHR22_176.0; EXPRESSED IN BONE MARROW, SIGNAL = 0.68; EXPRESSED IN BRAIN, SIGNAL = 0.71; EXPRESSED IN HELA, SIGNAL = 0.64; EXPRESSED IN PLACENTA, SIGNAL = 0.89; EXPRESSED IN LUNG, SIGNAL = 0.95; NT HIT: gi4507666, EVALUE 2.00e-96; EST_HUMAN HIT: AV752433.1, EVALUE 0.00e+00; SWISSPROT HIT: O60704, EVALUE 1.00e-35
gctaccagttggctttgagcttccctgcagcccaagcaaaatggaaatacaagcaatcatgtagttcactgtgtccatcagacaggaacaaatcagatgaccaggaattgagagactgaacatttcctcaggtggctggagtttccacatctgcagaagccccatatccccaagagtacacttccacaagtacaggtgcacactcacccgctgtgtgttgttgatgacgaaggggtcagggttgccatagttgggggggtttgcataagggtcatagccgagctgagccagcatgggggcgatctgggccatgtcccgcaccacatccccagggatgtggccagtccacttggagagcgcttccaggttaacaggcttgatgacctggtccgtggaccgctcgatcctggggagagaggagacgctggagagggtagggcagacccagatggcgcctgagcggattccctgctcagccactctggggcagcaggaaagactggagaaacctggcctccacccagctctgccccatcaactgtgagatggcaggtgagtca

SEQ ID NO: 544 - DNA, 574 bp, Homo sapiens
  MAP TO AC016683.4; EXPRESSED IN BRAIN, SIGNAL = 0.53; EXPRESSED IN FETAL LIVER, SIGNAL = 0.51; EXPRESSED IN BONE MARROW, SIGNAL = 0.55; EXPRESSED IN PLACENTA, SIGNAL = 0.52; EXPRESSED IN LUNG, SIGNAL = 0.51; EXPRESSED IN ADULT LIVER, SIGNAL = 0.61; SWISSPROT HIT: P79295, EVALUE 8.30e-01; NT HIT: AF094481.1, EVALUE 8.50e+00; EST_HUMAN HIT: BI058091.1, EVALUE 1.00e-08
ggaatatttgaatgctggggacagacaggaaggtattggttaggtaaatatttaggaggtaaaacgtggtcttgtgagtattccatatgcagagaatggaaaaagataaaggctattagttgattcatgtgacatgtttactgaacacctaatataatttaataatgatcaaaacgaaagaagtcttcccctcatggagctttctatctggtgatagaagacagttatgattcatacatatatagttatgcaaaaaatgtaaaattaaaatttggacctaaagatgcaattaaatttatctatgatacctccccagtccccccaaaattcctcccttgactatgagactttttcttcccctcactttcaaccagattccaaacagcagttatatttgatgctacctttctatgacagccattcaagaaaggtaaagcatgttattagaacacccaaacagaagcctgaacctactctgcaggataaagcaaagccaccgaggaagtgactcagtgctgaaatataaaggatgagcaggagttaactagatacgacagggagacaagagctccag

SEQ ID NO: 545 - DNA, 577 bp, Homo sapiens
  MAP TO CHR22_229.0; EXPRESSED IN BONE MARROW, SIGNAL = 1.8; EXPRESSED IN ADULT LIVER, SIGNAL =   1; EXPRESSED IN LUNG, SIGNAL = 1.1; EXPRESSED IN BRAIN, SIGNAL = 1.6; EXPRESSED IN HELA, SIGNAL = 3.6; EXPRESSED IN FETAL LIVER, SIGNAL = 1.6; EXPRESSED IN HEART, SIGNAL = 1.2; SWISSPROT HIT: P13983, EVALUE 2.60e-02; EST_HUMAN HIT: AL531541.1, EVALUE 2.10e-01
atcctaggaggtggtgaggggccgggacaaatgcccagagccagggggaggtggcgggggcacgctgaggatccagcaggtactggacccagaggtctggggaccccagtgtgtgtgacagacccgaggttctcagtcgaagtttggggtcagcaggggaggaaagagatgctgaattaggttggcagggtgagggcggcaaagggctcagtgctgggtgttgctgaggcagtggctcaggcccccttggtgtccagaaggcatcctctgggtgtccatcagggacagtaccagtcctccgctgtaactgtgtgcaccttaatgggagccatctccccagtttcttgctaacagaacacagatttggttaggcggcaatgtgcctaggcccagagggaccccaggatgagcaccctggatgaggggtagaccacacgtgtggggacatgcgtgttacctgggcccccacctgcggtccagcagaccttggtgaggttggtgcttgggactcctcagctgcagagctgagtcccagttcagccgcttcctggtggggtgaactcagcccttgctcaac

SEQ ID NO: 546 - DNA, 526 bp, Homo sapiens
  MAP TO CHR22_190.0; EXPRESSED IN BONE MARROW, SIGNAL = 0.69; EXPRESSED IN BRAIN, SIGNAL = 0.58; EXPRESSED IN LUNG, SIGNAL = 0.61; EXPRESSED IN PLACENTA, SIGNAL = 0.66; EXPRESSED IN FETAL LIVER, SIGNAL = 0.63; SWISSPROT HIT: P08640, EVALUE 9.60e-01; NT HIT: gi8923624, EVALUE 0.00e+00; EST_HUMAN HIT: BF930319.1, EVALUE 0.00e+00
tgtgaagcaaatcaacaggcctcctattctgtgactcaagagttattcatacaaagaactgcttctaagctcgcaggagtttcacgacagaccccgaggtacagtgcaagcccgcaagtccactttacagaggtcgcagagggataatgtcctaccttccaggtttggcttctgggcctcctcagagcctgagtgttcctgtttctgctgctgcctcgctgtgtgaatggcctgaagtacatccagtcgccgctcctcaccaaaggctgcagagcccaccactagctcctcagcctccgataagcagcccagaggcagcagcacccgctgcacgtgaaattctgccaaggctccatattctggaaggttttgattggctgggtcttggagccaggcacccaccacatccagcacagctccaggctcttgcattttgctgtataaaagaatgctgcagtccccaaaaaacccaatcccaacaaaagaagagtcagtgctcaatgattggttcatttcccatgaccac

SEQ ID NO: 547 - DNA, 580 bp, Homo sapiens
  MAP TO AC020582.3; EXPRESSED IN BRAIN, SIGNAL = 1.1; EXPRESSED IN PLACENTA, SIGNAL = 1.1; EXPRESSED IN LUNG, SIGNAL = 1.2; EXPRESSED IN FETAL LIVER, SIGNAL = 1.3; EXPRESSED IN BONE MARROW, SIGNAL = 1.4; EST_HUMAN HIT: R63301.1, EVALUE 3.00e-22; SWISSPROT HIT: P39194, EVALUE 2.00e-05; NT HIT: gi14769392, EVALUE 3.00e-89
ttggcaattaacaagggtcccatttgggatattattgtgggtaagccccaaccaggctcaagaccctgcctgccttgcttcagttctaactcctttcatttctttctcaggaaagcctgctggtcaacagtcagattatgctgtctcagagccggtttggataactatggcaaagcagaagcagaagagtttcaaggcccacatttctgtgaaagagctgaaaactaagagcaatgctggagccgatgctgagactaaggagcctaaatatgaggtaggacctggggtagccaataaaacactccaaaaaggttgctggaatcactgattaggtttctattgggaactttgccaacatgcagctccccctctctttgggaacattaatcaaggcaggaggactcttcagggaaaaagacttgctttgtatttatacaaacgtgccctgcttttatgctcttaaagggtttgtgcaggccaggtgcggtggctcttgtttataatcccagcactctaggaggccaaggcaggtggattgcttgagctcaggagttcaagaccaacttaggcgacatgctga

SEQ ID NO: 548 - DNA, 531 bp, Homo sapiens
  MAP TO CHR21_22.0; EXPRESSED IN BRAIN, SIGNAL = 1.1; EXPRESSED IN LUNG, SIGNAL = 0.63; EXPRESSED IN PLACENTA, SIGNAL = 0.73; EXPRESSED IN ADULT LIVER, SIGNAL = 0.75; EXPRESSED IN HELA, SIGNAL = 2.9; EXPRESSED IN FETAL LIVER, SIGNAL = 1.2; EXPRESSED IN BONE MARROW, SIGNAL = 1.3; NT HIT: M97169.1, EVALUE 5.00e-01; SWISSPROT HIT: P96351, EVALUE 6.50e+00
gagttcaggctgtagcccagatttattcagtgtaaatcacatgtgctttaccccactgcagtagggcagatggtgaagaggggtctaatggcaagcagtctaggaaaccttgccaactccattcatgtgaaggaactgccaggttgtaaagggcttattccaggtaaattaaataacagaaaccaaggctctgtttttttttttattaataacataatctgagtttggacaaaaggctgcatacttctgagttccatgttgaccagggtctgcatagagaacattttggttttgatcgataaaatttgatggtgagtgttcaaaaactgtcattatttggttagcttctacactaattgatagtacaagtaggaagaaaaaatattgctcattataaaaattggctctagctagaaatatattttgaaagcttgcagactaataatcaagtaaaaattcagaaaatattaaaataatggatctcagaataagaatgtggaaagtaaatcattcattcagtcagccattaca

SEQ ID NO: 549 - DNA, 556 bp, Homo sapiens
  MAP TO CHR21_74.0; EXPRESSED IN PLACENTA, SIGNAL = 0.75; EXPRESSED IN BRAIN, SIGNAL = 1.2; EXPRESSED IN LUNG, SIGNAL = 0.76; EXPRESSED IN HELA, SIGNAL = 2.8; EXPRESSED IN FETAL LIVER, SIGNAL = 1.1; EXPRESSED IN BONE MARROW, SIGNAL = 1.1; NT HIT: AJ009610.1, EVALUE 0.00e+00; EST_HUMAN HIT: BI040873.1, EVALUE 5.00e-02; SWISSPROT HIT: O43918, EVALUE 9.00e-30
tagaagttggtccccttcccccagccgtccccacacctcacccccaagccaagggaatggcctccaggttcccccagccccaccctcaacacccctacaccaccacctgactccaccacaagccgaggagatgggcgtggagctgtccaggtcgccagcgcctctgcctgggagctccaccctctagtcatgatggagatgggcaggccgcagggtgtgggggaccatggcagggaccctcatgccaccccactgcaggagacgcttcatctgaaggaaaaggagggctgcccccaggccttccacgccctcctgtcctggctgctgacccaggactccacagccatcctggacttctggagggtgctgttcaaggactacaacctggagcgctatggccggctgcagcccatcctggacagcttccccaaaggtgggtcctggtggactcagccatgctgggggcctggggcagctgctgtcacctgctcagcccagctggactggaaccggagtggtgtttgaggagcccgtgggtgatgttccaggaccgtct

SEQ ID NO: 550 - DNA, 513 bp, Homo sapiens
  MAP TO AC017050.4; EXPRESSED IN PLACENTA, SIGNAL = 1.4; EXPRESSED IN BRAIN, SIGNAL = 1.1; EXPRESSED IN ADULT LIVER, SIGNAL = 1.2; EXPRESSED IN FETAL LIVER, SIGNAL = 0.84; NT HIT: gi14723944, EVALUE 0.00e+00; EST_HUMAN HIT: BG505203.1, EVALUE 0.00e+00
gcttatgccaagcaggaatctgcctgccacctgtggtctcacattaattcaaaataggtgctgaattcaggattctgaaactaagtttctattacttgagctctagcaaaatgtaaggttcggtagcctcaactagtgtaatgtcttccctgtccaaatccagaatgattatactgataacctccatgctggaaatgctgttcaaattgacccccttggtgataattctggctccctcttcctccccagcctcctccctggcctgcacgaccacctcggcctccacgaccacctcgcccaccacgaccaccaccacgatcaccatggtgcccgccatcttggtatctattgtcctgctggtagccaccaccctggtatccacttcctgtatatgaagaagatgtttggaagccaccataacctccgccttgatagccaccactgctgtggccaccatgatagccacctggctggaaacctgaatctcgataaccaccatcttggtagccacct

SEQ ID NO: 551 - DNA, 591 bp, Homo sapiens
  MAP TO CHR22_13.0; EXPRESSED IN HELA, SIGNAL = 0.83; EXPRESSED IN BRAIN, SIGNAL = 0.9; EXPRESSED IN FETAL LIVER, SIGNAL = 1.1; EXPRESSED IN PLACENTA, SIGNAL = 0.81; EXPRESSED IN ADULT LIVER, SIGNAL = 1.5; NT HIT: gi16167673, EVALUE 1.00e-115; EST_HUMAN HIT: AA632626.1, EVALUE 1.00e-108; SWISSPROT HIT: P19440, EVALUE 4.00e-29
ctgggagagctgaagtcgtccatttcattattgaacaggatcccgctgaccggggagcggaccttggagccaaagctaccgcccagccaggtcagacagtgcccgaccttgcctggcccagcctggtccctatccacccactgaggctcaaacatactcactgagaggcccaggataagctaccaaggttgggcctcagtttcccaccaggaaaagaggtgacggagccaccttactggataagtgggcagtccctgggccacccgcccctggccctttcccacccaggcggcccagcagcccctactagaggttgatggtgctggtggcggacacagcactgccgtcctctgcgacgacagacaggtgagcagtgcccccgtcatccggcgtgtagaactcgggcttgtagtaggagatcgggtgagtggtgtcgtcagagatctgggcccggagctgggcagcgaagaactcggaggtcatgttgcggaccacctgccgagaccccagagctggcctgaggaggtggggagggagggtggggagggggcacaggtctcagaaggcccttgactgtgactctgaccgcaa

SEQ ID NO: 552 - DNA, 556 bp, Homo sapiens
  MAP TO AL137800.2; EXPRESSED IN BONE MARROW, SIGNAL = 2.4; EXPRESSED IN PLACENTA, SIGNAL = 2.1; EXPRESSED IN HELA, SIGNAL = 1.6; EXPRESSED IN BRAIN, SIGNAL = 2.1; EXPRESSED IN FETAL LIVER, SIGNAL = 1.7; EXPRESSED IN HEART, SIGNAL = 1.6; NT HIT: U00787.1, EVALUE 0.00e+00; EST_HUMAN HIT: BI004008.1, EVALUE 9.00e-90; SWISSPROT HIT: P19878, EVALUE 7.00e-28
gtgctcaactttgctccctccagctagatgctaggaagggggttgaaaacactggctaaagttttgtttgtagattattgatattttcttctctctgcccttgaccttgtttctgctaacatgtaaatttgtttctatagtcttggagtagcacttaccctttgataacaccaggattatatccccttcctgaaactccaggtcctctggttgggtagcctcataactgaagagtgcctccacttggctgcctttcttaagctgaggttctgttgtctggttattagcatcagctttttcactttccttgggttcatctggaaagccttggtcaccctgaaataataaagggcctgttaattttcccaatttcctgccaagtgaacactgaacatcactaaaggaaacagcgaaatgtcaaagtagaacctgggatataaactcataaagtttgtgatcagtgccttgtgtagagcttatatgctctttatgaatactggatggttgggtaaatcagtccccaacctttttggcacgagggaccagtttcatggaa

SEQ ID NO: 553 - DNA, 504 bp, Homo sapiens
  MAP TO AL139100.1; EXPRESSED IN FETAL LIVER, SIGNAL = 0.72; EXPRESSED IN BONE MARROW, SIGNAL = 0.77; EXPRESSED IN BRAIN, SIGNAL = 0.73; EXPRESSED IN PLACENTA, SIGNAL = 0.86; EXPRESSED IN LUNG, SIGNAL =   1; EXPRESSED IN ADULT LIVER, SIGNAL = 0.83; SWISSPROT HIT: P97953, EVALUE 6.10e+00; NT HIT: AY051034.1, EVALUE 3.00e-05; EST_HUMAN HIT: BF841652.1, EVALUE 5.00e-11
aggccaacagttgtgagagggaaggaacatcttgctaaactgtggttttcttcaggctggaccaaagcttaaagaaagcctacaaaggatcttttcagggtctggacttcctgtttctctctctgtcacatgtagatcactccaccagcccccagtgcccagcagtcctgggcccaggcatttggtggcagccagggcaacagcaacagcagcagcagccgcctcagccagtactttgagaaatttgatgtgaaagagtcctcctaccatctgctcatctcccgcctggacctgcacatttgtgatgatagccagtcccgagagccaggtaccccatgaggcctgagcctgggctgggtggtccacgtcactgtctagctctgggcagagcctggggatgaaggctcttttcagaagacattgtggagtactttggttggcttcccttaatcacaggcattccttgggcctcagccctcctgtggtagccctgttgtttgaggc

SEQ ID NO: 554 - DNA, 516 bp, Homo sapiens
  MAP TO CHR22_123.0; EXPRESSED IN HELA, SIGNAL = 1.2; EXPRESSED IN BRAIN, SIGNAL = 0.66; EXPRESSED IN ADULT LIVER, SIGNAL = 0.51; EXPRESSED IN FETAL LIVER, SIGNAL = 0.61; EXPRESSED IN BONE MARROW, SIGNAL = 0.63; EXPRESSED IN LUNG, SIGNAL = 0.59; SWISSPROT HIT: P29168, EVALUE 1.60e-02; EST_HUMAN HIT: R31219.1, EVALUE 3.00e-43
ctgaggctcaaggaatttcgaagtggaacaatacaccaaagccttaaacctgaaatgactatccttttctggggggtgggggggaaagaaaaagaaaaaaaagtttctggggctctcagggtggcccagatgccagggtcccagaagtggccttttctagctcctgtaactaaacctggcggaaaactccccgcctgctcaccccatccgcccaagaatgcgccttcccgtcttcggtggccctacccagaatcccaaaatgtggattccaacccaggccctgaacgtcttctcaaatccccgggacttacgttgcggcgcgcgccccgctgtcgggtcttgcccctcgggcggtaccgcccaggcagccctaaatccagcctcccaggcccccagcagcgccctccgcccctccaccatcccgtccggctcgcagtcggggccaaatcgagagacaagagggctgtgcctgaaactgagcggtttcaccacttggcacctcctggcagaaacttc

SEQ ID NO: 555 - DNA, 566 bp, Homo sapiens
  MAP TO AC011636.3; EXPRESSED IN BONE MARROW, SIGNAL = 0.41; EXPRESSED IN PLACENTA, SIGNAL = 0.46; EXPRESSED IN ADULT LIVER, SIGNAL = 0.43; EXPRESSED IN BRAIN, SIGNAL = 0.4; EST_HUMAN HIT: BF913586.1, EVALUE 7.90e-01; SWISSPROT HIT: P20908, EVALUE 1.60e-01; NT HIT: AB055857.1, EVALUE 5.40e-01
ccaagctgaattgcctcttcagagggtctgtagagctcctagatggaaccagtcccagactgggattcaagttgacttttaactggatgcacgagggactttgcaggcagatgggggtctgaacagaagtccaaccttcctgttctgtccggcatccctctatagggttctacgtgaacaagagcatggtgggttcagaaagaagcatcctggagacagtgtgtgagtgggaggcaggctcacacctgcaccatctgcccttcaccctgctgcagggtgaggcacagaggaagcaggacataaggaggcagaagacaaggggtctgtggactccccaagcccactagactggctgcctctgcagggaagcagcgggccctgctggggctcctgccttgcgcaggtatgctaggtgcccccacgcctccctcccttaattctcaccatcaccccagaggcagctttagggggggctcgcccagtgtgctgaagatggtccctgggggagtggaacctcacagtcctttcctctgacccgggccttgtgaacccttccccattcaatt

SEQ ID NO: 556 - DNA, 512 bp, Homo sapiens
  MAP TO AL138726.2; EXPRESSED IN ADULT LIVER, SIGNAL = 1.3; EXPRESSED IN BRAIN, SIGNAL = 0.46; NT HIT: U91328.1, EVALUE 0.00e+00; SWISSPROT HIT: O00624, EVALUE 4.00e-53
ttttcctatttttcccccaggcctctgtgtatcaatggagcccagaaactcagggtatcatctttagctccatcaactatgggataatactgactctgatcccaagtggatatttagcagggatatttggagcaaaaaaaatgcttggtgctggtttgctgatctcttcccttctcaccctctttacaccactggctgctgacttcggagtgattttggtcatcatggttcggacagtccagggcatggcccaggtatccagatactttctcattcttggtgggatccagatttctgaattctacaaaatatcaaaggtcttaatgattttcatttcagggaatggcatggacaggtcagtttactatttgggcaaagtgggctcctccacttgaacgaagcaagctcaccaccattgcaggatcaggtaagtgtgcacagatgggtcatagctttgtcatctgttccatcccactgtgtcttatcttctatgaatcaaatggtttggggaa

SEQ ID NO: 557 - DNA, 533 bp, Homo sapiens
  MAP TO AC024066.3; EXPRESSED IN HEART, SIGNAL = 1.3; EXPRESSED IN HELA, SIGNAL = 0.92; EXPRESSED IN BRAIN, SIGNAL = 1.6; EXPRESSED IN FETAL LIVER, SIGNAL = 1.2; EXPRESSED IN LUNG, SIGNAL = 1.3; EXPRESSED IN BONE MARROW, SIGNAL = 1.5; NT HIT: L01574.1, EVALUE 7.90e+00; EST_HUMAN HIT: T80698.1, EVALUE 3.00e-03; SWISSPROT HIT: P97471, EVALUE 1.30e+00
tctttggggtcagctactgggagactgtgttattttggtagtatgtctacttagttgttcatgttctttactgccttatgttgatttctgtgcatttgtagagcagtcacctatactagaatttacagactagtttttgttgtataaacaccttttcctatgggtaaaaaggaggtgcaagagtgtttgctaggtgggatgcaacagcagttctggcatcactgagtgcacagctgtgcagtctctttgcagctctgtcagctgggtttggtactgacaaagattacatggatcctcagcatgcaacagtggggatgtttgttgcagtagtgtgagttgttggggtttatggtggtagtagctgctaaggtcttcttgatcctgatgttgtagtgatggaagttctcttgacactggatcctacttgcaagcccaaatggcattggcactgatgtctgctgagtggtacctgtggagtggccatagaaatgaagcctgaaatgttgggattcactcaggatggtggcagaaat

SEQ ID NO: 558 - DNA, 554 bp, Homo sapiens
  MAP TO CHR22_177.0; EXPRESSED IN HEART, SIGNAL = 2.1; EXPRESSED IN LUNG, SIGNAL = 1.6; EXPRESSED IN BRAIN, SIGNAL = 1.7; EXPRESSED IN ADULT LIVER, SIGNAL =   1; EXPRESSED IN HELA, SIGNAL =   4; NT HIT: gi14737999, EVALUE 0.00e+00; EST_HUMAN HIT: BE551063.1, EVALUE 0.00e+00; SWISSPROT HIT: P30629, EVALUE 1.00e-09
ctgcgcgaaagaacaagaccatgtctcaaaaaaaaaaaagactaaaattcccaattccttataaaaaatacattattgccctcagccccgatggccactggcaaagacttttatttcccaatggatgagagagcctccttcaccttctcggtcatagttgggagcaggtgcatgtggtcatccacacacttggtcacaccaccttccagcttctgcttcaactgaagctccttactcccagcatctattgaatctttggctttgtcgttgcaatgcgtggtgcaccggaccaggtggtcctggaacttctccagctcactggtgatcaaagcctgggcttaagccagaggcacatggtggcactcgatgcactggtgcacctgctccgtggaggcctgactgtcctcacaacagctggtgctgcaccagaacatgagacaatgcatcttccagatgttctctctctccagactcttcaccatggagtccaccacctcctgcacccgcagctgctgcagctccccagtggcaaccctgtgctgccccagttattt

SEQ ID NO: 559 - DNA, 512 bp, Homo sapiens
  MAP TO CHR22_232.0; EXPRESSED IN BONE MARROW, SIGNAL = 2.4; EXPRESSED IN LUNG, SIGNAL = 1.2; EXPRESSED IN BRAIN, SIGNAL = 2.1; EXPRESSED IN HELA, SIGNAL = 4.5; EXPRESSED IN HEART, SIGNAL = 1.6; EXPRESSED IN PLACENTA, SIGNAL = 1.2; EXPRESSED IN FETAL LIVER, SIGNAL = 1.9; EXPRESSED IN ADULT LIVER, SIGNAL = 1.4; NT HIT: gi8924035, EVALUE 1.00e-04; EST_HUMAN HIT: AW801912.1, EVALUE 3.00e-06; SWISSPROT HIT: Q13823, EVALUE 6.20e+00
ccagatggattcaatgagcagatcagaaacagcagaagaaagaatcagtgaacctgaagatagatccataaaaattgtccaatctgagaaacagacagaaactgattgagaagacatttaaaagcttcggcgaccttgagaacaatatcggggagtccaacatgggtgaaataaaagccccagaaagagaaaagagaaaatacagtagacaatttaaaaaaaattgaggaaataaggccaacacttcccaaaccggtgagaatatttatagaactattcacatcaacaaaccaaagtaggataaacataagaaaccacaactagattatatgatagtcaaatctctgaaacacaaagtgaggagaggagaaattcttgaaagcagcaagagaaaaatggtccatttcatagagaggaacaatgacatgattaatggctgacttttcatccaaaacagtggaggccagagatgttgaggagacatgaaagtgtggaggaagggaaatatccgt

SEQ ID NO: 560 - DNA, 598 bp, Homo sapiens
  MAP TO CHR22_118.0; EXPRESSED IN BONE MARROW, SIGNAL = 0.53; EXPRESSED IN BRAIN, SIGNAL = 0.55; SWISSPROT HIT: O43808, EVALUE 1.00e-16; NT HIT: gi14779121, EVALUE 5.00e-60; EST_HUMAN HIT: BI762761.1, EVALUE 7.00e-60
cccttaaataggaattcagcaaagagatacttaccaatgatacctttgtagtttgttggtacaatgtcttcattcctaaattttgctccttgaagcttcagtctggtgtttaccacccagagtggagttgttagcaacacattaaccactcctttaacaagaaagatggagagaaaaagggaaggcaaaatgtcagcttttaagctttgctgctttaaagctacataccaatattccatttatatctctgtcactgacctcttaggagacctaaggtaaggtgtctctttgtgccagggtacaacacaagccactactgttagaagcgatttggaagctttgctgatagcaaaatggctggcggcagcagctctccagatgaagagcaataagttccctcatttgtacaacaggcaatctatttgtcaatttatataccattcaaagtagcaattttgatatagctttaaatataattttaacgtaacagctttagagatgagagtggcttacagctaacatgctaagtccatgacaatatcagataaaacacacaatttacaactcttacttaagtagctcacacggtttgaagtga

SEQ ID NO: 561 - DNA, 566 bp, Homo sapiens
  MAP TO AC023123.3; EXPRESSED IN PLACENTA, SIGNAL = 0.53; EXPRESSED IN BONE MARROW, SIGNAL = 0.6; EXPRESSED IN BRAIN, SIGNAL = 0.53; EXPRESSED IN FETAL LIVER, SIGNAL = 0.48; NT HIT: AE007544.1, EVALUE 2.10e+00; EST_HUMAN HIT: AW891974.1, EVALUE 9.00e-84
aggatggattgacaaggacgagatagctggtgggttttgtagccctggatggaagatcagtccaggaggcactttagagttcttcaggccttgacacatagatgtgtagagagaggaatgcattacatatgcctccctaagaatggtagcactttcagtaacaatggggaggtcaagattataagggaaattaatgacatctgttttcagttatcagcacctcaagaggttaaacatgagaattaaacaaaatgagagccaaaagggttatgaaaaagttgggcaatatgatttgtgagtagtagagaggtgtgtcctaggtatgcattaataaatagtcttgcacacagttcgtgcttttctattctgctcacccacgggcgtgtttggaagtttgtattgaaacatgcgtatcacaggactggggatgttaagaccaggaactctggtctcttctgttaggtcctcctttcctctttcctcaagaccctgtgtcttccctttgactaaagacccttaatggtggagacatgggggtgagagactggtagtcatggtgggcaagt

SEQ ID NO: 562 - DNA, 529 bp, Homo sapiens
  MAP TO CHR21_65.0; EXPRESSED IN FETAL LIVER, SIGNAL = 1.7; EXPRESSED IN LUNG, SIGNAL = 0.9; EXPRESSED IN ADULT LIVER, SIGNAL = 0.96; EXPRESSED IN BONE MARROW, SIGNAL = 1.8; EXPRESSED IN PLACENTA, SIGNAL = 0.91; EXPRESSED IN HELA, SIGNAL = 3.9; EXPRESSED IN BRAIN, SIGNAL = 1.9; NT HIT: AB038162.1, EVALUE 0.00e+00; EST_HUMAN HIT: R28797.1, EVALUE 1.90e-01; SWISSPROT HIT: Q15427, EVALUE 1.70e-02
cacaggacagcatgaagtggtgctgcacagcccagccaggtgcctgggacacacactgaccacctgccgggtgtgctggatcaaccatgatggcagaggagaggattcctggtcccggctctggtaggagcaaaggctgtggcaagggggccagagctgggtcctgtcaggtggagacgcacaggcttctcagagaagggggatttgggctgcacctctggagaggtcaatggggaggcccgtgtgtgtcccctctctctgttctaggagccccctccccaggagccctgggctctgtacaggaacagaggatggcatgggagagcccaacctgccttccagagcctgcattcccacagccttccccagccaccctattcccctgggggagttccagttccagagaaaaagcagagctgttgtcagagctgtaggccgtgcggtagtgggcatcgggcccaacccagacaggtggctcccctgggcaacccaagacctgggggtgagcaggactggctctaaaggagcc

SEQ ID NO: 563 - DNA, 568 bp, Homo sapiens
  MAP TO AL137799.2; EXPRESSED IN BONE MARROW, SIGNAL = 1.6; EXPRESSED IN BRAIN, SIGNAL = 1.4; EXPRESSED IN FETAL LIVER, SIGNAL = 1.1; EXPRESSED IN ADULT LIVER, SIGNAL = 0.32; NT HIT: AL163280.2, EVALUE 0.00e+00; EST_HUMAN HIT: AU121943.1, EVALUE 0.00e+00; SWISSPROT HIT: P26808, EVALUE 5.00e-41
ttgggatgaggataagccagtatgggctggatacattccttactgagggccctggtgcctttggataattttagccctaagcatttaacctgttgtgagcagagctgagccttttgtttggaaaccttgtagccacaggtggcgaggaaattcaagagcgcttgggtagcttgatggcacaaggtttctgaatgggtggctaaaagcaaatcatccacatactgaaggacaagagtgtcaaggtatgagaactggctcaagtcttgggttaacgcctggccaaatagatgggagctatcccggaacccttggggtaaaacagtccaggtgagttgagacgttgggttcgaaggatcttcaaaggcaaacaagaattgagagttaggttgtacagagatgcagaaaaaggcatccttaaggtccaggactgtaaaccactctgcttcctctggtatttgggaaagcagagtataagggttaggtacagctgagtatagagggacaatacctcatttataatcctgagatcttgcactagcctccactgcccgttgggtttctgtactcc

SEQ ID NO: 564 - DNA, 600 bp, Homo sapiens
  MAP TO AC013613.3; EXPRESSED IN HELA, SIGNAL = 1.5; EXPRESSED IN HEART, SIGNAL = 1.7; EXPRESSED IN PLACENTA, SIGNAL = 2.4; EXPRESSED IN ADULT LIVER, SIGNAL = 2.3; EXPRESSED IN BONE MARROW, SIGNAL = 2.4; EXPRESSED IN BRAIN, SIGNAL =   2; EXPRESSED IN FETAL LIVER, SIGNAL = 2.5; EXPRESSED IN LUNG, SIGNAL = 2.4; NT HIT: gi16162732, EVALUE 8.00e-99; EST_HUMAN HIT: BG403053.1, EVALUE 2.00e-94; SWISSPROT HIT: P42685, EVALUE 8.00e-27
aggcaaacagaggtgactggtactaactgaaaaatagatcattaattcaactataaacttaagtacatactttccaatctggttggtcattgttttctttattttgtttctccttgattaagaaataggaaggtgcaggtagtttgtaaggctttggactactgaagtagtttatggactacagaacttggagaaacattgttttaaagaataacagtatatctattggtctactaactgttagacttttgacctattacaaaaactaattaaaacaaaactaaatccaccttaaaaactctggcaagtccaaaatctgctactttgtagatattatgttcaccaacgaggacatttctggcagccagatctctgtgaatgtagttccgagactccagataggccattccagaggcaacctgtgccgccatgtctacctgttgagtcagatggatttttgatccagtgtcatctaagtaataagagaaaagtaagaaagttaccttagagaacatttgaactatgaaagtgaattctgagaattttgaatgtatgagctatcagtgagattaagtacaatggcactgatctgttgagcaa

SEQ ID NO: 565 - DNA, 527 bp, Homo sapiens
  MAP TO AL139022.1; EXPRESSED IN FETAL LIVER, SIGNAL = 6.2; EXPRESSED IN PLACENTA, SIGNAL = 8.1; EXPRESSED IN LUNG, SIGNAL = 7.2; EXPRESSED IN ADULT LIVER, SIGNAL = 6.8; EXPRESSED IN BONE MARROW, SIGNAL =   7; EXPRESSED IN BRAIN, SIGNAL = 6.5; EXPRESSED IN HEART, SIGNAL =   5; NT HIT: gi10835058, EVALUE 9.00e-83; EST_HUMAN HIT: BG722526.1, EVALUE 0.00e+00; SWISSPROT HIT: P49356, EVALUE 1.00e-22
aaaagtgcactatgcaccccagaacctcccgaagtactggcagaacagagtgggctgtccgacccgcacgggctgcctctgtcctccaggcatagaacacgattcttctcgttctttagggcagaggggactcggctactgccctctcctccaagcccaaccttgaaacgacccttccccaagctggccgcgcaaacgctccacgacgaagcccaagcctgggcgcccggagcttcccagaggaaaggcaccgcggtgcgctgtgggagtcgtagttccccggtgagttccgcacccgggcggccctacgaacgggactcgcgctcccagaacacatcgcgcgggcgcctcgcccagtcctgccacctcacctgttctatggacgtgactgtttccaccgagtcgtcctgcaaccgctctcgcgcgtgctcgggcctcagactgtacagcggctctgaccagacgggggaggaagatggagggcaatagtaggtgaaagaactcggagaagccatgatcaggagagc

SEQ ID NO: 566 - DNA, 550 bp, Homo sapiens
  MAP TO AC018715.3; EXPRESSED IN PLACENTA, SIGNAL = 8.9; EXPRESSED IN HELA, SIGNAL = 6.6; EXPRESSED IN BRAIN, SIGNAL = 8.2; EXPRESSED IN LUNG, SIGNAL = 7.9; EXPRESSED IN ADULT LIVER, SIGNAL = 6.8; EXPRESSED IN FETAL LIVER, SIGNAL = 7.1; EXPRESSED IN BONE MARROW, SIGNAL =   8; EXPRESSED IN HEART, SIGNAL = 7.2; NT HIT: AB040899.1, EVALUE 2.00e-06; EST_HUMAN HIT: T59593.1, EVALUE 1.30e-02; SWISSPROT HIT: P21414, EVALUE 4.00e-37
gcttagtttggctcactgcctagctatcattccccttgactcacttcgaagcctaaatactggactcttttggaacagatttgagcttctttctgaacaccttatatctggctttccacaggaggtggaggaggtcttggattccttggaggcagtcctcttgggttgggtctgctggaagcaggtcatctatatattccagcaaggcacaattgtcatttggctaggccttgaggtctgaagccagtgcttcttcaaagattgtgagagagtttttgaatgcttgtgggagtcttgtccaggtgaactgcaattcgctccattgaaatgcaaagatgggctaattggtgccagacgaagacagaagaatgcatctttcaggtctagggaagcaaaccagacagcacttgctgaaataagtcccgttaaagaatatggattaggtaccactgggtggatggtcactatagcctcattcacagcacataagtcctgcaccagcctctattcaccagatggtttctgtaccggcaggagaggagtgttccag

SEQ ID NO: 567 - DNA, 538 bp, Homo sapiens
  MAP TO AL138837.1; EXPRESSED IN LUNG, SIGNAL = 3.4; EXPRESSED IN FETAL LIVER, SIGNAL = 0.98; EXPRESSED IN PLACENTA, SIGNAL = 1.7; EXPRESSED IN ADULT LIVER, SIGNAL = 1.1; EXPRESSED IN BONE MARROW, SIGNAL = 1.7; EXPRESSED IN BRAIN, SIGNAL = 1.1; SWISSPROT HIT: Q40739, EVALUE 2.90e+00; NT HIT: AB069605.1, EVALUE 1.30e-01; EST_HUMAN HIT: BE740974.1, EVALUE 4.80e-02
tgccaatttctggtcatctgctcattcattttagctgttctatcaaaagttgatagcgtgcagtctgtgccaggctctgctttaggaactgggggtagaggaatgagtcagacctggtcttttgcttccaggaattcataatctgttggaggagagagacgaggatatggataatggtaagcctgagatacatatcttaattacaaaacagagtgatcagaactataaagaagatgtagaagatgctgtatcagactaggaggaagtggctttctcgggctggatgtgatgctaaccagtgagggaagacacagggagaacagcaggtagagggatgaagatgatgagttcaggctgggaactggggaacataagggaggaggtgcctggcaggccagtggatagctgaggctgaggctggaagaaggtgtaggttcaggatgtggattgggagtcatttgcaaatagatggtcactgaagtcacaatagcacaggagattgtgattttccttccgtacattatccccagatgttggg

SEQ ID NO: 568 - DNA, 595 bp, Homo sapiens
  MAP TO CHR21_67.0; EXPRESSED IN HEART, SIGNAL = 1.7; EXPRESSED IN PLACENTA, SIGNAL = 1.4; EXPRESSED IN LUNG, SIGNAL = 1.5; EXPRESSED IN ADULT LIVER, SIGNAL = 1.4; EXPRESSED IN FETAL LIVER, SIGNAL = 2.3; EXPRESSED IN BONE MARROW, SIGNAL = 2.6; EXPRESSED IN HELA, SIGNAL = 4.1; EXPRESSED IN BRAIN, SIGNAL = 2.2; SWISSPROT HIT: P11032, EVALUE 8.70e-01; NT HIT: AL163280.2, EVALUE 4.00e-11; EST_HUMAN HIT: BI762071.1, EVALUE 0.00e+00
ttgggatatccagcttgtccagttctctctgggcttccttagggcatagaatacatggtttattagcacataacactgaggcaaagccaaggtccactgttattcatcctatgtgaaggcaggctctttcggatgctctttcctcgtaggaatagaaaagaatgcacttgccatctcagtggggcagagcacacacctgaggctgtgttgatccaccttgaccgagatcccgcgcctggcagggcagctgccgctgtggattctccttggtgcagcttgctgaagtccactgtcttcctccaggagtctcctatttctgcagaggccagcctggtaaattaaatagagatacattgaagaccaccacccctatccttcagctccttaagagtaaaactgagtcacaacagcttgcataaatcctgtttaaacatttcaacttacataatcctatcaacttttcatttgtatgctgtggtcctattaggggtggaaaatatctgagtctcatggtaccacatatgttaccagtggaggtatccgagttattggcagtgaatccttatgggtctgcagcaacctcaattcttgcctc

SEQ ID NO: 569 - DNA, 576 bp, Homo sapiens
  MAP TO AC004846.2; EXPRESSED IN FETAL LIVER, SIGNAL = 2.4; EXPRESSED IN PLACENTA, SIGNAL = 2.4; EXPRESSED IN LUNG, SIGNAL = 2.7; EXPRESSED IN BONE MARROW, SIGNAL = 2.8; EXPRESSED IN HELA, SIGNAL = 2.6; EXPRESSED IN HEART, SIGNAL = 2.6; EXPRESSED IN ADULT LIVER, SIGNAL = 2.3; EXPRESSED IN BRAIN, SIGNAL = 2.6; SWISSPROT HIT: P12111, EVALUE 4.00e-11; NT HIT: gi14749657, EVALUE 0.00e+00; EST_HUMAN HIT: BI192904.1, EVALUE 3.20e+00
caggggtttagctccaactggcatgctccttgtctgggcgtcctaaccccctcacctggggaaggtgggcctcacctgtaggaggagctgtggaagggtggcgctggtgatccggcatctccacccagtccaggggccctggacccaagctcctgcccccatggccattctccaaaggcctgggtgtggggggcctcccctggcccaggctgttggtcttgccgccagagaccaccagaaggccagggctttctctgcaccgcggcccctgtcctgtgctggctgggttcctgctcgcctgcaggactgctgccgccaccatccgtgtgggtgctccttccagaagccccaggctggggacgacggggcccatggagagatccctggcagctgctcatgcactcttgctccgaggcaaagttattggcattgccatggcagccgccataccagaagcggttacattggcccacagaggcaacgaagtaccagcgggcagcccagtctgcgcaagagccatgggcactgggcagcaggcaccgcacggggtaggctgcagggcatgggtgtgatata

SEQ ID NO: 570 - DNA, 523 bp, Homo sapiens
  MAP TO CHR22_145.0; EXPRESSED IN BRAIN, SIGNAL = 0.63; EXPRESSED IN PLACENTA, SIGNAL = 1.1; EXPRESSED IN ADULT LIVER, SIGNAL = 1.1; EXPRESSED IN LUNG, SIGNAL = 0.85; EXPRESSED IN FETAL LIVER, SIGNAL = 0.75; EXPRESSED IN BONE MARROW, SIGNAL = 0.59; NT HIT: AB011114.2, EVALUE 4.00e-97; EST_HUMAN HIT: BE720080.1, EVALUE 0.00e+00; SWISSPROT HIT: P38692, EVALUE 2.50e-01
atggtaaatggctgtccctgaggagatgtgtggaggggcaggatctgattcaagccattgcactcacggcctcccctcctcaggaagttgctcggacctcactggagggcccctgcctgtgactgttgaggcagggcaggctctggggcatctgtcctttctcagtggagcctacagacagcttctgggctggaccacgtcctgacatccattccttttgccttagtcattatttgtggcctgtaaattctttcctggcttctgtgcctctctcctacttgatttattctgttctctccttcctgtcctgcctcaggccatccttcacgcagagcgacagcttctgtataggtcttggttcatgtggcaccagcaggcagcagcacgtcaccaggagcaggagtggcaaacagtggcctgtgcccaccaccgccacgggcggctcaagaaagctttctgcctctggagggaaagtgcccaagggctcagaacagagtgagtggccagttctgccttacaagcc

SEQ ID NO: 571 - DNA, 574 bp, Homo sapiens
  MAP TO CHR22_83.0; EXPRESSED IN FETAL LIVER, SIGNAL = 0.46; EXPRESSED IN BONE MARROW, SIGNAL = 0.45; EXPRESSED IN BRAIN, SIGNAL = 0.44; EXPRESSED IN ADULT LIVER, SIGNAL = 0.75; NT HIT: gi9558728, EVALUE 0.00e+00; EST_HUMAN HIT: BG912407.1, EVALUE 0.00e+00; SWISSPROT HIT: Q9UJY5, EVALUE 9.00e-34
ctggttcctcagagcaggacaagcagccagggctagctgtgcccatcctgccatctgcccacaggttatgaaggtgaagctgcagccaccctcgggcacggagctgccagcttttaaccccatcgtccacccctcagcaatcacccaggtcctgctgcttgccaacccccagaaggtaaggggcccccaggcagtgctgcagggtggggacggccacttctcctcctctgacccctctgcctttgccatctcttccccaggagaaggttcgcctccgctacaagctcaccttcaccatgggtgaccagacctacaacgagatgggggatgtggaccagttccccccacctgaaacctggggtagcctctagaacagaggggctggggagaggaaggggcagagggaccggtcactgtccagcctggagggaggcattggtggccaaggacaccctttgttgcccatggccattcacccccaggcctggtgcttctccccacacccctgtaggcctcaagtgactcttccccctcctgctccggccccgcccctgctgagccaaacccagtagga

SEQ ID NO: 572 - DNA, 568 bp, Homo sapiens
  MAP TO CHR22_147.0; EXPRESSED IN BRAIN, SIGNAL = 0.28; EXPRESSED IN HELA, SIGNAL = 1.1; EXPRESSED IN ADULT LIVER, SIGNAL = 0.56; EXPRESSED IN BONE MARROW, SIGNAL = 0.43; SWISSPROT HIT: O83570, EVALUE 6.20e-01
aatcaaccatcccacctttggcagagcctgggaggaagctgtggccaccctaggatgggatggggagaaatccgccaaaggctgcatgtggcctgcaggatccctgcagaactgctgggcactccagatgcagatggcgcctgcgctcagtcataagctcttccctgcctgggtgccagcaagaagggcagggctgaggggagtcacctcgatggtgcagcccagtgatggacagctggagaggacgagcacaaaatgcagtcgcctccccaggcctctgcgcacgagaatcaagagtgcccttcccattctcaagacaaggtaagaaaccactgactggggaaaggggaggaacggaggccatctgccattggctgaggggcaggaaaattcctcggcccagaattccacaaggcaaagatgtgatcccccttcctggaggagagaaagaaaactttctccttcctaagacctgtcacagataccaggtagagttagcctgccacaggggaggggccagagggccagaatacgtcaagggcctcaccccaagctctctccagtggtc

SEQ ID NO: 573 - DNA, 586 bp, Homo sapiens
  MAP TO AL137799.2; EXPRESSED IN PLACENTA, SIGNAL =   2; EXPRESSED IN LUNG, SIGNAL =   2; EXPRESSED IN FETAL LIVER, SIGNAL = 1.6; EXPRESSED IN BONE MARROW, SIGNAL = 1.8; EXPRESSED IN BRAIN, SIGNAL = 1.5; EXPRESSED IN HELA, SIGNAL = 1.2; NT HIT: gi16159294, EVALUE 7.00e-87; EST_HUMAN HIT: C18650.1, EVALUE 2.00e-87; SWISSPROT HIT: P40168, EVALUE 7.40e+00
acatgctcaaacataggggctggatcctaacccctcaggccctagaaccaggatggggaggccgcattaagctggatgcatgtcctaaatcaagaatcactcacccggtcataggtgtccccctccagttctccccatttcctgccatcccatgaggtaactcgaacttgatttccatccctgatctcttcaggcacatagctgtgaaggatcttctgtagtctggctattcgggacggggagagatcattggcagcaagattgcctatggaaataaagatacttcagaggccatgacccaatgaaacattccaccagcaatggcgctgatggagtcagaccaattctcaggtagtcccagccaatgcaaaccccagcatcaggaacatttattatgtgcatggcacagcatcagtcattctgagtgggggtacaatggcaaacacctaaatgggccagaaagtatcaaagttatttaagtcaatgaataaagcagaccaagtaagactcctttcctttctcctttcctgtcctctctcccctttctcccctttctttcccctttccccttttcctttccccatta

SEQ ID NO: 574 - DNA, 599 bp, Homo sapiens
  MAP TO AL138839.1; EXPRESSED IN BRAIN, SIGNAL = 0.63; EXPRESSED IN FETAL LIVER, SIGNAL = 0.77; EXPRESSED IN PLACENTA, SIGNAL = 0.83; EXPRESSED IN LUNG, SIGNAL = 0.78; EXPRESSED IN BONE MARROW, SIGNAL = 0.7; NT HIT: AF181897.1, EVALUE 1.00e-05; EST_HUMAN HIT: BF431886.1, EVALUE 4.00e-06
ttccaggttttattgcccacacaatgaagagtgcctactctcattctaaatgctgcatacttaattatatctgttagattttatttttatgaaaactcaaaagcatccaaccatgaacttaaatgcttttgcccatctgatgctaaacatagaaccatttaccattctttaaaacagtgcactcttcttcacagatatttttcttaggatgacagatgctacttttcaaaaatataggttttagagttagcacttataaccttgctaatgaaagagaagaaaactatgatgcaaatatgtgtatgcatgatcttatttaacccttaaaataacctccaatgtagataatatcttacctttttacagattaaggaattgaggttcaaagacatcagtaacttgttcaaggtcacagagccaaaatgtgcatccaaccctaaaacccaagctctttcctctaaaccagggtgcctcatagtactaataatgacagtaataggtaagatatattgagcatttactatgtgccaggcactgttttaagatgtttacttgcattaactcatttaattatcacaacaatcctttgagataggggc

SEQ ID NO: 575 - DNA, 595 bp, Homo sapiens
  MAP TO AL138722.2; EXPRESSED IN BONE MARROW, SIGNAL = 0.6; EXPRESSED IN ADULT LIVER, SIGNAL = 0.71; EXPRESSED IN BRAIN, SIGNAL = 1.5; EXPRESSED IN FETAL LIVER, SIGNAL = 0.58; EXPRESSED IN PLACENTA, SIGNAL = 0.75; EXPRESSED IN LUNG, SIGNAL = 0.72; NT HIT: gi14781635, EVALUE 9.00e-03; EST_HUMAN HIT: BI546339.1, EVALUE 0.00e+00; SWISSPROT HIT: Q09749, EVALUE 5.00e-06
tcctttcttttctgcaggttgcataccctgtcctgagggcgcggcacggagtgcatgcgggccgcggccatgacgaccgccatcttggagcgcctgagcaccctgtcggtcagcgggcagcagctgcgccgcctgcccaagatcctggaggatgggcttcccaagatgccttgcactgtcccagaaacggatgtgccccagctcttccgggagccttacatccgcaccggctaccgccccacggggcacgagtggcgctactacttcttcagcctctttcagaaacacaacgaggtggtcaacgtctggacccatttactggcagccctggccgtcctcttgcgattctgggcctttgccgaggctgaggccttgccatgggcgtctacccactccctgcctctgctcctcttcatcctgtcgtcaatcacttacctcacctgcagccttctggcccacctgctgcagtccaagtcagagctctcccactacaccttctactttgtggactatgttggcgtgagcgtttaccaatatggcagtgctttggctcatttcttctacagctctgaccaggcctggtatgaccggttct

SEQ ID NO: 576 - DNA, 541 bp, Homo sapiens
  MAP TO AC021009.3; EXPRESSED IN FETAL LIVER, SIGNAL = 6.1; EXPRESSED IN BONE MARROW, SIGNAL =   7; EXPRESSED IN BRAIN, SIGNAL = 5.4; EXPRESSED IN HEART, SIGNAL = 4.8; EXPRESSED IN PLACENTA, SIGNAL = 6.7; EXPRESSED IN HELA, SIGNAL = 3.7; EXPRESSED IN LUNG, SIGNAL = 6.1; EXPRESSED IN ADULT LIVER, SIGNAL = 6.1; SWISSPROT HIT: P11369, EVALUE 3.00e-33; NT HIT: X87344.1, EVALUE 8.00e-34; EST_HUMAN HIT: AI439424.1, EVALUE 2.00e-29
ttaactatccccacctcccctccagccccacactacccttctcagcctctagtaattatccttctactctctatgtccatgtgttcaattgttttgatttttagatccaataaataagggagaacatgcagtgagtctttctgtctttgcttagttcactgaacataatgatctccacttccatccatgctgctggtaataacaagatctcattcttttttatggcagaatagtactcttccgtgtgtgtgtaacacattgtctttatccattcatctgttgatggatatttacatttcttccaaatcttagctattttaaacagtaccacaacaaacatgagaatgcagatatctctctgatatactgatttcctttctttgggatatactgatttccttccactggggtgtatacccaggactggaattgctggatcatgtggtagctctatttttatttttttgagtaaccaccaaactattctctgtggtggttgtactaatttacattcccaccaacaggagagttccccctttct

SEQ ID NO: 577 - DNA, 547 bp, Homo sapiens
  MAP TO AL138801.1; EXPRESSED IN FETAL LIVER, SIGNAL = 0.64; EXPRESSED IN BONE MARROW, SIGNAL = 0.7; EXPRESSED IN LUNG, SIGNAL = 0.89; EXPRESSED IN HELA, SIGNAL = 0.56; EXPRESSED IN BRAIN, SIGNAL = 0.83; EXPRESSED IN PLACENTA, SIGNAL = 0.97; EXPRESSED IN ADULT LIVER, SIGNAL = 0.64; NT HIT: AF111167.2, EVALUE 1.00e-17; EST_HUMAN HIT: AA083687.1, EVALUE 3.00e-09; SWISSPROT HIT: P08548, EVALUE 4.00e-23
gttgctttcagtttggggagattgtaaataaagtttttataaacttttatgtagacataattgttttaattaattaagtaaataccttggagtgtgattgctggattatgtggttagaatgtgttgttttttaaaaaacagccaaattgtctttgaagtggctgtatcattttccattcctaccaacaatgaatgaaagttactgttgtgcttcattcttaccattaactagcattgctattttcatttctagtttaattccattgtggtctgagaaagtaagttgtatgatttcaattcttttaaatttgggaaagtgtgttttaggatacagaatgttgtctatcttagtgaatgtttcatatgagcttgagaaaaatgtataatctattgttgttggaaagagttgtctataaataccaatcagatcaaattgatcaatagtactcttcaggtcaaagccacccttactgattttctgcatgcttgacctatcaattacttatagagtagtgttaaggtctccagcaataacaattaatttggc

SEQ ID NO: 578 - DNA, 558 bp, Homo sapiens
  MAP TO CHR21_63.0; EXPRESSED IN BRAIN, SIGNAL = 1.5; EXPRESSED IN FETAL LIVER, SIGNAL = 1.5; EXPRESSED IN BONE MARROW, SIGNAL = 1.5; EXPRESSED IN LUNG, SIGNAL = 0.82; EXPRESSED IN HELA, SIGNAL = 3.3; EXPRESSED IN PLACENTA, SIGNAL = 0.69; NT HIT: gi14780528, EVALUE 0.00e+00; EST_HUMAN HIT: AW978385.1, EVALUE 0.00e+00; SWISSPROT HIT: Q09602, EVALUE 4.00e+00
catccctctgcagttcttgccccgagtctcccggaacgcagctcagtagctgtacatctgctgctgctgctgctccgcctgcacctggggctgggccgcctgctgtgggggtgcctgcggctgcgagggtggcaagacgtcagtctggggcactgcccgccacgtgagcgggtgctggtcactaagctggctccccaggggcgtgatggagttgaccagggtcgtcaggttgatgaaatgggccacagactgtgggttcgaggcttccggctgggggtggatctggacgtcattttggcggttgtgcaacatggcagagccgctgacggtatcaaaggtcacggtcaggattgagttgtccagctgtaactggcgttcaggggtggtaaggtgccccacggccaccggctggagattggtaaactgagtcgcggccgcagtggtgatgggggtcacggtgatgttggttaagccgactgagctcgatggtgtggtcacatttgggtcacccagggtcaccactacctggaagattcacacacaacaaaaatccgttca

SEQ ID NO: 579 - DNA, 598 bp, Homo sapiens
  MAP TO AC012482.3; EXPRESSED IN PLACENTA, SIGNAL = 1.9; EXPRESSED IN FETAL LIVER, SIGNAL = 1.8; EXPRESSED IN LUNG, SIGNAL = 2.7; EXPRESSED IN ADULT LIVER, SIGNAL = 2.6; EXPRESSED IN BONE MARROW, SIGNAL = 2.3; EXPRESSED IN BRAIN, SIGNAL = 2.5; NT HIT: AF071491.1, EVALUE 0.00e+00; EST_HUMAN HIT: BF352136.1, EVALUE 0.00e+00; SWISSPROT HIT: O43525, EVALUE 1.00e-101
ggagacctctccagctcctcgtggttgaccgacatcagggacagaggtgtgtcactgtctcgcgtgatgctacgtctctgccggggggagattcggtccgagtaggggccctgcaggtcagcctgggagtggcagctcactcgggagtcgagaagagtcaagataggcaggaccgtgggcctctccacatacgttgttgctgaggaaggaggagttgcctgaacctttccagaactgggtccccctcggggcaggttcacagggtcatgtgcaaaaaacccataggggctgactttgtcaatggtcacctggtggaagctgtagggtggttccggggggcctgtctcagaatagttgcagatgatggttttcaaatcggaatacctgttgtcctccttcttctctgcttcagctggcgaggaggtgcccttggttgggtaatactccgtgacctgcacctgcaaccgttccatgtgttgcatgtgcatatccacgaggaagtccagcttcttccccatgtcctgaacctggaaaatcaaaggagctgtgaattaccactttctctgagggtggggatcgttgctattggttgggagga

SEQ ID NO: 580 - DNA, 587 bp, Homo sapiens
  MAP TO AL137795.2; EXPRESSED IN BRAIN, SIGNAL = 0.86; EXPRESSED IN PLACENTA, SIGNAL = 0.59; EXPRESSED IN FETAL LIVER, SIGNAL = 0.46; EXPRESSED IN BONE MARROW, SIGNAL = 0.48; NT HIT: AL163201.2, EVALUE 3.60e-02; EST_HUMAN HIT: AI051539.1, EVALUE 5.30e-02
tctagggtggctgtagggtgaaaagcaaatggaagggagggttgcctgagttgttcccatgtcagcaatcatgaagtcgagagagagctgcagtcgtccgctagtgtctgccatgctgcaattgtctgttaatgtctgccagaggtgcacctggaaggtgagggtgctggtgttggtggaggtgctaacctactcaaagtgaatccacaccttccctcgaatcagtagaatccgcaggacacagccaggtactccagaacataccccacatctcacttcttgttaagctcatgaggacaggaataatgtatgtctgttgtgttcactgctactaggttggtgcagaagtaaattcggttttgtcattacttttaatggggaaatgttaaaatatttccccagcacctagaacagtgcctggtaggttctcaataaatatttatttgaatgttgtgagtaggtgaaccaagaaagacgttgactccagctggatgcctggagagatgcagagttgttctttagttctccacgaggccctgtggcccagcctaagaggcactggtactggagtgatgatgcagcccttt

SEQ ID NO: 581 - DNA, 549 bp, Homo sapiens
  MAP TO AL137017.4; EXPRESSED IN BONE MARROW, SIGNAL = 0.53; EXPRESSED IN PLACENTA, SIGNAL = 0.56; EXPRESSED IN LUNG, SIGNAL = 0.52; EXPRESSED IN BRAIN, SIGNAL = 0.56; EXPRESSED IN ADULT LIVER, SIGNAL = 0.55; EST_HUMAN HIT: BI258194.1, EVALUE 7.70e-01; SWISSPROT HIT: P74360, EVALUE 3.00e+00
ccatgagtgtttccgttgtgcatggctgcagacagttcttagactagctactgtagccactatttcccagtatttctcccctaaccaggaagctcatcacactccctgtgatttggaacttccagacacccaaatttcctctgaagtttatgccgcggctcctctgtacaccaatgatctgcatcctgagctggtccaagctgtttctcctcatgtgatgttgttctcgagtgtatctcaaggtggttttgtcctattttgtccatcgtattcaaagaagagttatatccactttcctttcagctgcagctaagtgttctgctagtctttgttttcactggttgtccacgctacccagtaggacagttggaatcactccagagctatttgttggtaaacttttctgatcaggcttgtattggctcagaccaaatgtgagattcacacaaacccttgtctgtttcagtcatattacaactcttggagaattaagacatttgggaagagttccatagcttctcctgaccttccaaggaggcatgaaggtag

SEQ ID NO: 582 - DNA, 542 bp, Homo sapiens
  MAP TO AL137013.2; EXPRESSED IN PLACENTA, SIGNAL = 7.2; EXPRESSED IN FETAL LIVER, SIGNAL = 7.4; EXPRESSED IN LUNG, SIGNAL = 8.7; EXPRESSED IN ADULT LIVER, SIGNAL = 6.9; EXPRESSED IN BONE MARROW, SIGNAL =   8; EXPRESSED IN BRAIN, SIGNAL = 7.1; EXPRESSED IN HELA, SIGNAL = 5.9; EXPRESSED IN HEART, SIGNAL = 6.3; NT HIT: AF007949.1, EVALUE 5.20e-01; EST_HUMAN HIT: AW956032.1, EVALUE 9.00e-87; SWISSPROT HIT: O13867, EVALUE 1.00e-14
gggagctgctcaacaaaatgctttatttcctataatcacggaagcatgacagctctaaaacttgtaagctagcaataaaactagcttattctagtttcattaaccagcccttaacctggtttcattaacctccactaagtatgaaatatgagcatatcagaaataaaagctgtcagcttcaaaataattattttcatcttccttcctttttgtattaataacagtgacaaactatactttggcctgttcttggactttctctctctttcccctaatcttttttctttcttttttcttcttcaaggtgaggcaatggaacaaggtttacgagactgctgtcgatccatacgaattggaaagatcctgattcagagtgatgaggagacacaaagagccaaagtatattatgccaaattccccccagacatttaccggagaaaagtccttctgatgtatccaattctcagtgagtggcttccatttgtttgtaacctttggttagggtttaaattcaacttagtgcctgcctcctaggtaccctt

SEQ ID NO: 583 - DNA, 555 bp, Homo sapiens
  MAP TO AL139112.1; EXPRESSED IN BONE MARROW, SIGNAL = 0.62; EXPRESSED IN PLACENTA, SIGNAL = 0.58; EXPRESSED IN LUNG, SIGNAL = 0.61; EXPRESSED IN BRAIN, SIGNAL = 0.51; EXPRESSED IN ADULT LIVER, SIGNAL = 0.63; NT HIT: AL163210.2, EVALUE 4.00e-17; SWISSPROT HIT: P08547, EVALUE 5.00e-11; EST_HUMAN HIT: AA016302.1, EVALUE 9.00e-13
aaatcgaaaccatgaggaggtataacttcatatctgttagaatggctattattttttaaaaagagcattggtgaagatgtgaagaaaagagaacgcttttacaccttgggtggtatataaattggtgcagtcactctgggaaacagtatggagattcctctaaaaattaaaaatgccacatggtctagcaatcccacttctgggtatatatccaaagaaatggaaatcaatatgtcaaagaggtatctgctctcccatgctcgttccagcagtattcacaaatggccaagttgtggaagcaacgtaagtacccatcgatggatgaactgataaagaacatttggtctatacatacagtagaatattatttccactccgaaaaggaaatcctgtcatttgcaacaacataaatgaattggaagacatgatgctaagtgaaataaatcagaaagacaagtactacatgatatcacttaaatgaggattctaacagtcatagtcataggaacagagagtaggatgatggttgttaatggctgacaaaaggggaaaaca

SEQ ID NO: 584 - DNA, 503 bp, Homo sapiens
  MAP TO AC011676.4; EXPRESSED IN PLACENTA, SIGNAL = 1.4; EXPRESSED IN LUNG, SIGNAL = 1.3; EXPRESSED IN HELA, SIGNAL = 1.1; EXPRESSED IN BRAIN, SIGNAL = 1.3; EXPRESSED IN ADULT LIVER, SIGNAL = 1.3; EXPRESSED IN FETAL LIVER, SIGNAL = 1.3; EXPRESSED IN BONE MARROW, SIGNAL = 1.4; SWISSPROT HIT: P08248, EVALUE 2.10e+00; EST_HUMAN HIT: AI908844.1, EVALUE 7.00e-01
tggctcttgttactgaccccacaggcgtgggcagttgcattgcagggaccaaggacacactggctcccctccgctggggacttcctggtcgtgagctatgcccagaggagtcaaaaaggcacaaggggagacaggcctggctccagcccttggggtgcccaaggcactgggtgcccacagcccctcctcgggaaggtgaggtatgggcttgtgacaccccttccttccctcgggagctgaggagaatgggcggtggtggtttactgcatgttcagaaaaggcctccaccctcaccaccctgcgtgagacatgggatctgtgccctcaggaaactcagtccgagaggtggcctcacatgcgcggttgttacaagcagagccaggtaagcgcagaagcctgccaatgtatcttcctggtccctttcggggcaccctttacccacacgccctacttaaaccacttgaaaccctttccagatgagggcaggtgcaaatcgaggaatt

SEQ ID NO: 585 - DNA, 531 bp, Homo sapiens
  MAP TO AC021607.4; EXPRESSED IN BONE MARROW, SIGNAL = 1.3; EXPRESSED IN PLACENTA, SIGNAL = 1.2; EXPRESSED IN LUNG, SIGNAL = 1.1; EXPRESSED IN BRAIN, SIGNAL = 1.3; EXPRESSED IN ADULT LIVER, SIGNAL = 1.1; EXPRESSED IN HELA, SIGNAL = 0.82; EXPRESSED IN FETAL LIVER, SIGNAL =   1; EST_HUMAN HIT: BG771578.1, EVALUE 2.00e-84; SWISSPROT HIT: Q62120, EVALUE 1.30e+00; NT HIT: gi15718529, EVALUE 3.20e-02
ttccagtccaaggtttgagcacaaggtgtcttttatataatttcagatttgcttgttcttattattaagacttatgaaagtttttaaagtagaatatatataaaataaagaaaaaatataaagaacattcttaaaaagagcctataaagaactactccgcgtggtcagaagagggagcttttagattgcaaaaaaagtaaaattttaagcactctattatcagaagtaatattatttcaagtcctcatattgaatactaataaaaaagtagccatggaaacattcctttataataacttaaaaaactttttgtttcatgaaatattgaacttacctttattcttcattgagagcatgtagaatctcactctaaccactgtcttctgacgctttgcacatttgacctttgtaagtgtggctgataaaccagaaggctgctgaccagtttccatctcctgctttcccttttcatctttgcaggtcgcagagatggctactgagataagggacaggagagtggagagcaaggtg

SEQ ID NO: 586 - DNA, 572 bp, Homo sapiens
  MAP TO AL137005.2; EXPRESSED IN BONE MARROW, SIGNAL = 0.73; EXPRESSED IN BRAIN, SIGNAL = 0.72; EXPRESSED IN FETAL LIVER, SIGNAL = 0.6; EXPRESSED IN PLACENTA, SIGNAL = 0.81; EXPRESSED IN LUNG, SIGNAL = 0.68; EXPRESSED IN ADULT LIVER, SIGNAL = 0.74; SWISSPROT HIT: Q9UPZ3, EVALUE 8.30e-01; NT HIT: Z92772.1, EVALUE 5.50e-01
cattcggcttctcttcaaccaggacttctcgtgggctaactgcctggagtccagattcccctgttcaactgcttgccaagacttcgcgccaagccattcgtgctgggtgctctggagaatgaatgagggaaggaaccgagcaggcctgctttgttgtgttgtagttgggtcgcttgacagcgccgtgtgtgaggcaggagggcatgtgggcaagctgggacatcatcacagcctccctcccacggcctggcaccccttcatcccacagaggccagagtccccactcgcaaatgcctggcccagcacatgctgcgaagaggccgtgggtagtttcctctggaagcaattcattctcattgctgtctggggtttcctccctctgaatgttctgctgatttttcgccgcaccacaagcctcaacgcggcatgcgccaggtgccccaggcttcccccggctgcgccttccttgctgtgagtgccacagcagccggtgctcctccaggccatggctgcaaaaagggaaagggagaaaaaagattcgagtttgtcacagtggaacccaaagcttggta

SEQ ID NO: 587 - DNA, 545 bp, Homo sapiens
  MAP TO AC020759.3; EXPRESSED IN FETAL LIVER, SIGNAL = 0.88; EXPRESSED IN ADULT LIVER, SIGNAL = 0.87; EXPRESSED IN BONE MARROW, SIGNAL = 1.6; EXPRESSED IN PLACENTA, SIGNAL = 0.98; EXPRESSED IN HELA, SIGNAL = 1.3; EXPRESSED IN BRAIN, SIGNAL = 1.3; NT HIT: AJ278581.1, EVALUE 0.00e+00; EST_HUMAN HIT: AA279334.1, EVALUE 0.00e+00; SWISSPROT HIT: P27680, EVALUE 2.00e-01
ctgcaaggggaatgctagacctctataaagtccaccttaaggtgaacattaaccaagatggtgttttacatggattaactggattactttaaactgcaggctattataagacatactagacaatatttaattgtacacagcacaaaatcacaaataccaataaacagctatcctcagtaagagctagcctgactgaccacacttaccgttttccacatagggatgaaaggggaggacaagggcaaggatgaccctgcctctagttggctccaagacacttctgatatcttttaacaaagtcaggggctgatcacagcggtccagcaagttcaggcagctgatgacatcatactggaaccccgtattctgccattcatttataccaaggactctagaaaaatcagaaataactgtattaacataaagtccctctaaagacatctttaaaaataactgagatgacaataaaggctttaactttgtcttctaaattaagttcaaaatcttctgttataatttatgtttgcaataatgacatggccaag

SEQ ID NO: 588 - DNA, 544 bp, Homo sapiens
  MAP TO AL137070.3; EXPRESSED IN HELA, SIGNAL = 1.5; EXPRESSED IN BRAIN, SIGNAL = 1.6; EXPRESSED IN HEART, SIGNAL = 1.6; EXPRESSED IN PLACENTA, SIGNAL = 1.6; EXPRESSED IN LUNG, SIGNAL = 1.6; EXPRESSED IN FETAL LIVER, SIGNAL = 1.6; EXPRESSED IN ADULT LIVER, SIGNAL = 1.5; EXPRESSED IN BONE MARROW, SIGNAL = 1.7; SWISSPROT HIT: P56947, EVALUE 1.70e+00
actgtagcaacggcagcagccaagaaaaagtagcaaaatatttttaaaaacagaagcaaacagcaaggctttcacaatccattgtttaaattcatctttcatatcttgttttgttacgtttttctctcttactttatgtgtataatgaaataccattatcactgtcatcatcgccagattaaagcttcgagaaagaaagcctatcctagaattgatttttaggccattttacttgagatgatcgacaacaagaggattttcatttgctttgtcagtgtaagctggctgctgtgcatctgcagtgaaggcagcacaggtctctgtttgcattctgcggtttgttagcatcaatgacctgtcacagaaaggctctgcagcacaatatttacacagatcattagcagagcagaccctgcttgccagatcgctaatcagttttgtgactgccccagtttcatcaagactataaataaaataagccatcggaaaaagccccaaaatgggcattgtcggagctggtgacacttctggcagctctaggcat

SEQ ID NO: 589 - DNA, 500 bp, Homo sapiens
  MAP TO AL137793.1; EXPRESSED IN BRAIN, SIGNAL = 2.7; EXPRESSED IN HELA, SIGNAL = 1.4; EXPRESSED IN FETAL LIVER, SIGNAL = 2.1; EXPRESSED IN HEART, SIGNAL = 2.4; EXPRESSED IN BONE MARROW, SIGNAL = 2.4; NT HIT: AJ246004.1, EVALUE 1.20e-01; EST_HUMAN HIT: AL120612.1, EVALUE 0.00e+00; SWISSPROT HIT: P06401, EVALUE 3.50e+00
ccctcctatcctaacagccctgtctgtctagtttaagcgaggggtgaatttcttgcattattctagggaatttgaagaatctccaggagggccagagagtagacttggatgccacccagccagcaatagagaagttgggaccacccagccagggacaaggccacacctcagccatcaccacccacaagcaacgcagcatgtatgagctgggacaggacaccagaaactacctcatgattgctccggaagaagcagctgcaggtgctcagccatctttatttcctgccacccccaaactatgaagacagcaaagcagcctgtggagaggctgctcacagaggcaaccccacccttacttggtgatggcacgtggaactccacctcccaggtggaaaatggaaaaattgtttccttctctgatctactgcctgagctgtcatcaggattttgaggactgacttaatgaataaaatataaaggcttagcgtgagcctgggata

SEQ ID NO: 590 - DNA, 505 bp, Homo sapiens
  MAP TO AL136099.2; EXPRESSED IN BRAIN, SIGNAL = 0.58; EXPRESSED IN PLACENTA, SIGNAL = 0.5; EXPRESSED IN LUNG, SIGNAL = 0.5; EXPRESSED IN ADULT LIVER, SIGNAL = 0.55; EXPRESSED IN FETAL LIVER, SIGNAL = 0.49; EXPRESSED IN BONE MARROW, SIGNAL = 0.51; SWISSPROT HIT: O28426, EVALUE 8.00e+00
cccaggagagaagcttgttgccagcactggcctcacctgcagggatattgcccggcgagggttcagaggctgcagctttaggtactgatctcagtatcacctgacgagacctgtgaattctctcaccatacctccaccattcattatcatcatcaatcatgaatgaaaattgatattagttatatcaattctgcatattatcacaatttgatagaattatgaaattctatcaattatagaaatttgataaaatttttgttaccaaattaacagcagttaagacattgattttcattcaataggacgttgtttatacttttttattttccttagtatttatatttctccttcctaaacataaaatttcatgctaggagattctcctttagggaagcacagattaccgccactgagacagacttacataactttctgactcacgtgttcacctgggaaggtttacatgtcttaaggcatcattctatcgacagcttgaacctatgca

SEQ ID NO: 591 - DNA, 586 bp, Homo sapiens
  MAP TO CHR22_181.0; EXPRESSED IN BRAIN, SIGNAL = 0.57; EXPRESSED IN PLACENTA, SIGNAL = 0.62; EXPRESSED IN ADULT LIVER, SIGNAL = 0.6; NT HIT: gi14721486, EVALUE 5.60e-01; EST_HUMAN HIT: BF829613.1, EVALUE 2.10e-01
cagattcccaaaagaaagcgtgtatcttcagggagtatctgacagaaagctacaccaagaacacgcttccttgtagctcctggtgagcacactccctagacagtgtctgctaaaacttggattaggaaggccctaatccaagcctcacatcgtgcactttggcaaacagacccagagagggagaccatcctgcccaagctcatatcacaagtcagcggcagccactggcttgagcttgcacctgaccttcagtctagagctagtcctccccgcaccccacggctccttcccaccaggcccactccctcttccaaaaccttgggctcacctcctggttctaaggattctgccaggttgaacaatgctcagaagcaggtggcagtttagcaattcattcagagggacctggggctgtgcccgtccccggtggcaaggagagactgcagtaagagactgcagtgtggaactttgaaatctcttctctaaagaatcctcctcctcctcctcttctttctcctcctcctcctccttctcctcctccgtagtactacggacacatgtgctctgtttgggaggaggaaaggag

SEQ ID NO: 592 - DNA, 585 bp, Homo sapiens
  MAP TO AC012580.3; EXPRESSED IN BRAIN, SIGNAL = 5.9; EXPRESSED IN HELA, SIGNAL = 5.6; EXPRESSED IN PLACENTA, SIGNAL = 5.1; EXPRESSED IN ADULT LIVER, SIGNAL = 8.6; EXPRESSED IN FETAL LIVER, SIGNAL = 5.4; EXPRESSED IN LUNG, SIGNAL =   7; EST_HUMAN HIT: BI759099.1, EVALUE 1.00e-86; SWISSPROT HIT: P05092, EVALUE 8.00e-25; NT HIT: gi13646800, EVALUE 2.00e-84
acatttctccctccactccccaccatcttccctctcattggatttttttacatcattagcattttgagtgctatgtgatattttattttgggaagataaccatttgttcttgttatttattttttatttcataattataaacttaactctgtaatccagctagacttagagaataaggaaaatatggaacccaaagaattgcaacaagagcacaaagataatggacattgcaagcagatgggatggagggatactctcttgagctacagaaagaacagtgtggtggctaagataaaacacaagccaaatttattagagttgtccacagttagcaatggcgatcttcttgttggtcttgccatttctggacccaaagcactctgtgccttccaagatattccttctgtctttaccttgccaaaaaaccacatgcttgccatccaaccactcaggcccagctgtgcagatgatagactggaactgttgatgttgggttcagaatttgccatggacaagatgccaggacctgtatgtgtcaggatgaagttctcatcctcaaatttctccccgtagatggacttgtgt

SEQ ID NO: 593 - DNA, 595 bp, Homo sapiens
  MAP TO CHR22_153.0; EXPRESSED IN ADULT LIVER, SIGNAL = 0.66; EXPRESSED IN FETAL LIVER, SIGNAL = 0.39; EXPRESSED IN LUNG, SIGNAL = 0.46; EXPRESSED IN BONE MARROW, SIGNAL = 0.53; EXPRESSED IN BRAIN, SIGNAL = 0.49; EST_HUMAN HIT: AA663747.1, EVALUE 1.00e-114; SWISSPROT HIT: Q61670, EVALUE 2.30e-01; NT HIT: gi14776874, EVALUE 6.00e-75
ctgctctcaggtggaaaaggagttggcctcacttagggtgtgcacccacttctgccccttccctctgccagatcagcactggtctgacagcccgtcggatgctgacagagagctgcgtttgccgtgcccagctgagggggaagcagagctggagctgagggtgtcggaagatgaggagaagctgcccgcctcaccgaagcaccaagagagaggtgagcctgtctttgatgggagaaacaactttcagaattcctacgagggccatatgcacacaagagtggctcaggggccaggcgcttcagagcagagccatggtgcacaccagcctccgaggtgtgggcagctccttgccttttcctcctctgtccaccctccctgtgccacaggctgctgcagttgctttggccaaaggccctttccttgcatagtttgggtctgggagaaggtagaaggtttgtcctgaagctctgtgtgcagagtctgcacatggaggaagcccacggcctgacctggtgttgacaggagcacctgcagagagtgccgggcagccccgggaagacggttccaggaccctggcctctgagagaacctgtgc

SEQ ID NO: 594 - DNA, 552 bp, Homo sapiens
  MAP TO AC015833.3; EXPRESSED IN BONE MARROW, SIGNAL = 0.59; EXPRESSED IN PLACENTA, SIGNAL = 0.89; EXPRESSED IN BRAIN, SIGNAL = 0.71; EXPRESSED IN LUNG, SIGNAL = 0.67; EXPRESSED IN ADULT LIVER, SIGNAL = 0.64; NT HIT: gi7662445, EVALUE 2.00e-16; EST_HUMAN HIT: AW069289.1, EVALUE 2.00e-16; SWISSPROT HIT: P13267, EVALUE 5.20e+00
acagaaggcaccttccagagataggaacactatttccatcacactcttgttagtgataggcactctctcaaaaccattcttctacagagatgaaaaccagagtgagttaaatgttcaacattgcctttaaaaagataactgttatctttttaaagttagttataacaatgtctgaattgttctttacttgctcttcagatgacatgacaaaagctatccctttctcaataaggttcagagtcttaaaattggtgatggcattaataataacagagccttttaaatcaccattgtgaagattcatttttaatggttaaaaaatatatataaaaagataaaaacataaccaataaagtgggcgctaaacaattggtacacatgaacataaagatgacaataagagatactggggactctaaaaggagagagggtgggaaggggataagtgttgaaaaattacctattgggtacaatgttcactatttgggtaatgggtaccctagaagcccaaaccccaccattatgtaatttagccataaagcaaacctgcat

SEQ ID NO: 595 - DNA, 581 bp, Homo sapiens
  MAP TO CHR21_73.0; EXPRESSED IN BONE MARROW, SIGNAL = 1.3; EXPRESSED IN HELA, SIGNAL =   2; EXPRESSED IN BRAIN, SIGNAL = 1.2; EXPRESSED IN LUNG, SIGNAL = 0.68; EXPRESSED IN FETAL LIVER, SIGNAL = 1.2; EXPRESSED IN ADULT LIVER, SIGNAL = 0.6; EXPRESSED IN PLACENTA, SIGNAL = 0.65; NT HIT: gi14780689, EVALUE 7.00e-93; EST_HUMAN HIT: BG336665.1, EVALUE 1.00e-106; SWISSPROT HIT: Q9Y5P3, EVALUE 4.30e+00
cttgctcctgaggactggactttgagacgtgccagccaccctctcccggcccctctcccatctgctaccagggcctcgttcctaggcttggaagcaacaaaactgccaaagcagtttacccaaagccaccatcgagtggaagccactatcggagaggaacccaggaaagagtgtttgctcccgaggctgcagccgtggtgcccgtcggcgcgcctgcattctgcagcgggaaccgagggaaggccgtaagtcagggcctgctgctgccgggtgctgcccctccacgggctccttaccgactctcggtcgtagaaggccttgagctggctgcgccacttcctccgacgctgcagcagcccgcttcgggaggacggcaggcacaggtagcacacccagttgctcatggcgtgcaccttccccgaggtcccggggccgaccaggctatccacacactcgaagcagtagcatctaaggccagacagaaaaccacagcagcggacatgacagcccacctctcctgaggatggcagaggtgggcctgattgagccttgttttggagggaaaagtcacgctggagctc

SEQ ID NO: 596 - DNA, 506 bp, Homo sapiens
  MAP TO AC018681.5; EXPRESSED IN BRAIN, SIGNAL = 0.52; EXPRESSED IN FETAL LIVER, SIGNAL = 0.42; EXPRESSED IN BONE MARROW, SIGNAL = 0.5; EXPRESSED IN PLACENTA, SIGNAL = 0.46; EXPRESSED IN LUNG, SIGNAL = 0.54; SWISSPROT HIT: P57890, EVALUE 2.70e+00; NT HIT: AJ006345.1, EVALUE 9.00e-12; EST_HUMAN HIT: AA555098.1, EVALUE 2.00e-41
agcgggtacctctgtgagtctgtaacagccatagtgttactaggcttgaggtgccctctaatgcagatacagctgcaatgaccaaagctttagatcacagcacttaattttcttcagatacttggaaagccttaccaagaagggcagttacaaaaaagcccagactgcaaagactacaataaatacctaattattccatgcccagacattcacttacatccataagcataaagactatccagaaaaacatgacctcaccaaacaaattaaataaggcagcagtgaccaatcccagagtgacagagatatgtgacctttaagaaagaaaattcaaaatagctgttttgtggaagttaaacaaaatacaaaatacagagaaggaattcagaatcctatcagataaatttaacaaagttattaaagtaatttttgaaatttcatcagaaattctggagctgaaaaattcaattgacatactgaagaatgcatcagagcctctaaacagc

SEQ ID NO: 597 - DNA, 546 bp, Homo sapiens
  MAP TO CHR22_164.0; EXPRESSED IN LUNG, SIGNAL = 1.2; EXPRESSED IN PLACENTA, SIGNAL = 1.1; EXPRESSED IN ADULT LIVER, SIGNAL = 1.6; EXPRESSED IN FETAL LIVER, SIGNAL = 1.1; EXPRESSED IN BONE MARROW, SIGNAL = 0.82; EXPRESSED IN BRAIN, SIGNAL = 0.95; SWISSPROT HIT: Q9L9K3, EVALUE 1.70e+00; NT HIT: AF139495.1, EVALUE 3.00e-92; EST_HUMAN HIT: BG683098.1, EVALUE 0.00e+00
gcaggaagtcctaggtgcaggaggtggtgctgctagtggggtgccaggcagagcaaggccgggcagggaagcctgcaggacagatgtacctctttcagcttcttggcccagggcttctgtgccttccgaaagccgtcctcagcttccttggtctccttgaagccgcccatcatctgcttgtgaaaggcttccttctgccagttcttgatcttctcgaagtcatcgttcatcagtgaggccttcacctcgaggtgcagctcgctcaccctctctgcctcggacatgaaggccatccaggccttctccacggtcccgtactggggccctgtgcaggggagagaagctgcgggtcactcagcgccggccatggtggggtctgctctgctcacacctcggctgttcaatgtggccatttagaccacagagggtttcctttcagggtttcagatatttttctctcagggactctgtgcctttttcagttcccaaagctgaatttgctctgcccctcgtgttaggaaaattgggggattacatgcctttcct

SEQ ID NO: 598 - DNA, 548 bp, Homo sapiens
  MAP TO AL137157.2; EXPRESSED IN BRAIN, SIGNAL = 0.85; EXPRESSED IN FETAL LIVER, SIGNAL = 0.59; EXPRESSED IN BONE MARROW, SIGNAL = 0.82; EXPRESSED IN PLACENTA, SIGNAL = 0.78; EXPRESSED IN ADULT LIVER, SIGNAL = 0.77; SWISSPROT HIT: Q58600, EVALUE 8.90e+00; EST_HUMAN HIT: H58051.1, EVALUE 3.00e+00
ccctggatgatcaaagttgtgagatcaagaagttatagaaatattcagctctctttctagtttcacttatacttttaagattgtgcatatttcctaccagatctgcacactccctgtggtggaaaaggtcagcgtcgaccctgtgaacactgttcacactccttcgttaagttatttagttagccaaaacttagatattttcacaaaagtcccagtaaatattgaactctaatccacttatattacttaaaattctgcatgatcacagttgtatatttttttacatacataaactatctgatgttattcttttttaatataggattattcatacaaatatttccatgttctggtattatctaaagatttataattttgaaaaaaagagtattattcaataaaccataatggccaatcctattccaaatttattaaaaatgagtttagattcaaacccactcccctatatgcattatttgtcccactcaaaagtttatcctggaagagcaatattatcctttatattaccctttcccagaagagaaaaa

SEQ ID NO: 599 - DNA, 565 bp, Homo sapiens
  MAP TO CHR22_179.0; EXPRESSED IN BONE MARROW, SIGNAL = 0.74; EXPRESSED IN BRAIN, SIGNAL = 0.71; EXPRESSED IN FETAL LIVER, SIGNAL = 0.73; EXPRESSED IN PLACENTA, SIGNAL = 0.6; EST_HUMAN HIT: AW747909.1, EVALUE 0.00e+00; SWISSPROT HIT: P46109, EVALUE 2.00e-90; NT HIT: gi11417808, EVALUE 0.00e+00
tgtcaaaggacccaaaaagctaatctgaacagattttacctctaatgccaaggcagtcttgtcataagcacagggtactcttttctggattgctttcgcaaagacaggtccattctgtgtggatggcaaaggggtgattgctgccccaggagaaccggaaactgcaggtagaggagttgtggtctgaggttgagcgtatgcatgagcaggttctgggatcccataactgttggaattcctatttccatgctttccgtgtggtgaggatctcacaagcttttcgacataagggacaggaatcatcccaacccggccatccttgttccgggcactccaccactgttcttcaggcttctctattatcactaggatctcaccctttttaaagggcaggtcttcggcatcattcccaggaaaatcatacagagtccgtacatattccaggttatcttctgctgtaggcaggttgggtgctgagacagatcccattggtgggcttggataccttaagagagaaagaaaattactctaagagaaaaatcttactctaagccagtgcctgtca

SEQ ID NO: 600 - DNA, 591 bp, Homo sapiens
  MAP TO AL137071.3; EXPRESSED IN BRAIN, SIGNAL = 0.65; EXPRESSED IN FETAL LIVER, SIGNAL = 0.57; EXPRESSED IN PLACENTA, SIGNAL = 0.61; EXPRESSED IN LUNG, SIGNAL = 0.58; EXPRESSED IN ADULT LIVER, SIGNAL = 0.69; EXPRESSED IN BONE MARROW, SIGNAL = 0.62; EST_HUMAN HIT: H81721.1, EVALUE 9.00e-04; SWISSPROT HIT: P08548, EVALUE 4.00e-22; NT HIT: AE008683.1, EVALUE 3.60e-02
aagttggctcaacattaggaaatctatttatacaatacgctatattgataaatctaaggaaaatttatatgtctatttctatagatcctgagaatgcctttgacaaaattcattacccattcataataaaaaccctcaaggaaataggaattgagggctacttccttaacattataaagtatgtatatctcagtcctaaagttagtattttgtttcatgaggaaacactagaggtattttcattgtaatcagcaacatgcaggatttaaacattgtactgaatgtgttggccaatgcacttagatgagagatcaattagagggataagaatgggggaagaagtagtaaaactgcttgtatttgtaggtgatataacagtatactttgaaaaacccagagaatcaataataaaaccaactcaataaagtaattcagtgaagtagcaggttataaaattaacataccaaatcagtagacttcatataaaaaacaacacttagaagacataaaagtaaggaatgcccatttgtattagtagcaaaggagattaagtgcttaggaatacatttaaccagaaatgggcaaaaccta

SEQ ID NO: 601 - DNA, 596 bp, Homo sapiens
  MAP TO AC013648.3; EXPRESSED IN ADULT LIVER, SIGNAL = 0.41; EXPRESSED IN BRAIN, SIGNAL = 0.46; EST_HUMAN HIT: BI063109.1, EVALUE 1.00e-108; SWISSPROT HIT: P46593, EVALUE 2.60e-02
acaggtttcggcttgttcagagccatccatgcagatgcctaaggtgggttttgctgggtttccatcatcccggcttgatctcactggtcctcactttgaatcttctattctctctccctgtgaggatgttacacttacaaaataccaggtgactgttcccagagctgccttggcccctgagcttgctctggaaattccttctgggtctcaggctgatattcctcttcccaagacagagtgctccactgacctgcagcctccagagggagttccaacatctcaagctgagagtcactctggcccactgaattccatgattcctgtttctcttggtcaggtatcttttcctaaattctataaaccaaagtttgtgttttcagtcccccaaatggcagttcctgagggagacctacatgcagcagtgggtgccccagtcatgtctcctcttagccctggagaaagagtgcagtgccccttgccaagcacccagctgccatccccaggcacctgtgtgtctcagggcccagaagagcttgtggcctccttgcagacatcagtagtggcccctggagaagccccttctgaagatgctgacc

SEQ ID NO: 602 - DNA, 591 bp, Homo sapiens
  MAP TO CHR22_166.0; EXPRESSED IN FETAL LIVER, SIGNAL = 0.85; EXPRESSED IN BONE MARROW, SIGNAL = 0.63; EXPRESSED IN LUNG, SIGNAL = 0.79; EXPRESSED IN BRAIN, SIGNAL = 0.69; EXPRESSED IN PLACENTA, SIGNAL =   1; EXPRESSED IN ADULT LIVER, SIGNAL = 0.73; EST_HUMAN HIT: R23014.1, EVALUE 2.00e-26; SWISSPROT HIT: P32927, EVALUE 9.00e-35; NT HIT: gi11418060, EVALUE 1.00e-103
ctctccactgcacacgctacacactttgttccatgcgggtccccttctcccaggatggcagctccgtgggcaggatttttgtgtgttttatcactgctggcccctgattctgaacagagccaggcatgtggtgagcactcgaggaacctttcgtgagtcagtgatacccatacaccctgggctaagccgtgtcctctcccaacagggacctcctggagccagtgtcctgtgacctcagtgatgacatgccctggtcagcctgcccccatccccgctgcgtgcccaggagatgtgtcattccctgccagagttttgtcgtcactgacgttgactacttctcattccaaccagacaggcctctgggcacccggctcaccgtcactctgacccagcatggtgaggggctgggggccctgcccggggcttggtttcctgtgtggacagcgggggcaccaggggtggtccagggagtcttcaaggcagaaggctgtggcttggggttgggtgagggtttcttgagggatgagggtatggtctggttacatggagacttcagagcagaggggcccctgacaaaggcttctcctgtgc

SEQ ID NO: 603 - DNA, 598 bp, Homo sapiens
  MAP TO CHR22_108.0; EXPRESSED IN PLACENTA, SIGNAL = 0.75; EXPRESSED IN HELA, SIGNAL = 1.6; EXPRESSED IN BRAIN, SIGNAL = 1.3; EXPRESSED IN FETAL LIVER, SIGNAL = 1.1; EXPRESSED IN HEART, SIGNAL = 1.1; SWISSPROT HIT: Q04832, EVALUE 5.90e-02; NT HIT: AF195953.1, EVALUE 8.90e+00; EST_HUMAN HIT: AA909674.1, EVALUE 2.00e-04
ctcacttcctggcctttgtccaagctcttcctcactcctgccaaccaccagcaccctctcaaagacatttctctctccttagcatgcacgactcttacacatcatctttcagaccagagcaggtgcctcctcctccaggaagctctctctgactccctcctgcctccccaggatttagtgggcaggtccctccgtgctccccctggctgcctgttcttcctccatcttgcccttctcacactgctgagcctccatcaccatagcaactccaaaactggcccaaggcctggctcaaggtaggtatttgctgaaggaaggagggatggggtggaactctgtttcggagcctcatatcctcgagcctcctgaaatgaattaggtccctgatcttaatttaagagttaaataataccacacatatattacaaaagttaggtaaatttccccttccctcctgtcattacctagaaagctgccaacttctagattgtaattatgtacatgaataatgaaattagcatatctatcagctcactccctgctcattatgtacagggaagagcctgtgtgtttccatcccaaatcaccctcttctgga

SEQ ID NO: 604 - DNA, 565 bp, Homo sapiens
  MAP TO AL096764.11; EXPRESSED IN FETAL LIVER, SIGNAL = 7.9; EXPRESSED IN BRAIN, SIGNAL = 4.2; EXPRESSED IN PLACENTA, SIGNAL = 3.4; EST_HUMAN HIT: BG756764.1, EVALUE 0.00e+00; SWISSPROT HIT: P11249, EVALUE 7.00e-66; NT HIT: gi16177374, EVALUE 0.00e+00
acccatttgcctgtgttctcttgacatatatatatattcaggtcctttccccatttttatttatttatttatttttattttttggcctttccgattttatttggggcacacctgggcgagggccctgcatctagaagaaggtgttgggcctcttggtggtgaagcgtggcttgtgctgacggcgcaggacctggtggggcagcgggaacttgaccttagagtcgtggaactgcttgacggacggccggcggcacttgccggctgcgatctcctccaccttcatgatctggatggagtgggcctgggcgcagtgccgagagtccatgactcggtagcactgggtgaccgcccgccgtggtcaggtcctggtattcccgatacaggttgtgggtgccgctcagggagtcacagcgcagccagatgcggaagttcttcacccgcagaggggacttctcaaacacccacccagagtaggcaatctcccctgaaaacttcttcatcttctttaactgagatacgaaataccagaagctggacttggcgacgacatgattaggcgcaaaca

SEQ ID NO: 605 - DNA, 507 bp, Homo sapiens
  MAP TO CHR22_7.0; EXPRESSED IN BRAIN, SIGNAL = 5.1; EXPRESSED IN HELA, SIGNAL =  11; EXPRESSED IN FETAL LIVER, SIGNAL = 4.3; EXPRESSED IN BONE MARROW, SIGNAL = 4.4; EXPRESSED IN HEART, SIGNAL = 3.2; EST_HUMAN HIT: BF821098.1, EVALUE 1.00e-05; SWISSPROT HIT: Q34049, EVALUE 4.70e+00; NT HIT: AF195953.1, EVALUE 2.00e-03
cccttctcccctttgagaacataatcagaaatgccacagtctggttcagtgtagaaaaaagcaagagctcagaatcagccacacctgggttcaaaatctgatgcttactggctgtgtgatctgggtgaagccccttgttgtctctgagccttgatttcttcatctgaaaagcaaggatcataatgctgattgtgtttgtgtctgtatgagagagagagaggagggggtgtttaaaaccaagaatgaaatgaaagatatataaaaggcacatgaagcagggtagatacctaaggaacatgagctccctccctgtctttctcctctaaatagggccaaggaagtttcctactcagagctcaagttagctgcagagtacacaactctgggataggctgtgctcctggtctcaagtgcaagccctagttcaaatgctgattctgtagcctgccagctgtgtgaccttgggcaagccacttcaccttcctgagcctcagttcccacaattgt

SEQ ID NO: 606 - DNA, 594 bp, Homo sapiens
  MAP TO AC016729.5; EXPRESSED IN FETAL LIVER, SIGNAL = 0.56; EXPRESSED IN PLACENTA, SIGNAL = 0.75; EXPRESSED IN ADULT LIVER, SIGNAL = 0.66; EXPRESSED IN LUNG, SIGNAL = 0.62; EXPRESSED IN BONE MARROW, SIGNAL = 0.58; EXPRESSED IN BRAIN, SIGNAL = 0.69; NT HIT: AJ271736.1, EVALUE 2.20e+00; SWISSPROT HIT: Q91437, EVALUE 1.50e+00
ctgcgacgttgtatgtggagacaagtctatggactggggtgatgagatcatgtctctgattacgaatacttacggtatttccctttgtaaaggcaatgagagtaatgaaagaagtgagacaagttacatgctttttcaacttcttaccacaatgtcccagtaattatcttttcttagattaaaaatttcatgattaacatcagtttaagcaaacaagaccttttgaactttctatcttcttctgttaatattaataaagagcatcctttcaaaaaaagtgaaggtcaaatgtcatcctctattctatcaaatgacgtagcattctatgatacattacttcattggtccttacaaactaacagctcctaaaatatgatgagataggcagcttcagctagggctacatacattttcccacctgaaacaaacaaaataaacacagacaaaatatatgaaataaaagttttgaacacattaggcaacaaaggtcagtgatctctgaaagatggaaaacaaacatgggaatccctacaagtgacccagatgactgccttaagaagttcgaggcttcaatgcagggagtagcctgacaag

SEQ ID NO: 607 - DNA, 559 bp, Homo sapiens
  MAP TO AL133261.4; EXPRESSED IN BRAIN, SIGNAL = 0.99; EXPRESSED IN PLACENTA, SIGNAL = 1.2; EXPRESSED IN HELA, SIGNAL = 0.67; EXPRESSED IN LUNG, SIGNAL = 1.5; EXPRESSED IN ADULT LIVER, SIGNAL = 1.2; EXPRESSED IN FETAL LIVER, SIGNAL = 1.1; EXPRESSED IN BONE MARROW, SIGNAL = 0.96; SWISSPROT HIT: P11638, EVALUE 3.10e+00; EST_HUMAN HIT: BG219567.1, EVALUE 3.00e-03; NT HIT: AF139595.1, EVALUE 2.10e+00
ctggctgagctgttcaaaggcatacttcatctttcatctgtagtagtttgtgtgtgcatacatgtttgtgtttgtgtttataattctagcatttctcttttactctgtattatagtttctaactctttgttgaaatttcacactccatctttttcattttaaatcctttgacattaatcacagttattttaaaatctctgatactgccaacattttgatcatctctgagtctggttctgttgactggtttgtctgtcgacaagtgattgttctctgccttggcttctgtgaatcttataactttcattaaacattgtgtgtaacagagacattatgtgtaataattggaacattagtgtaaggatttgagtcaaactagtcaacagttgagctgtatttgggttgtgaggctgctatgattattggttttgcaccataggcttcaaattcttctagtggtggactgccattgccttgagcttagaatcaatgttgggttgtaaaaggctttctttgcatttatcttctacctacgctttcatcatccctccacacattg

SEQ ID NO: 608 - DNA, 541 bp, Homo sapiens
  MAP TO AC017112.5; EXPRESSED IN PLACENTA, SIGNAL = 0.55; EXPRESSED IN BRAIN, SIGNAL = 0.57; EXPRESSED IN LUNG, SIGNAL = 0.6; EXPRESSED IN FETAL LIVER, SIGNAL = 0.49; EXPRESSED IN BONE MARROW, SIGNAL = 0.48; SWISSPROT HIT: P42201, EVALUE 5.10e+00; NT HIT: M21635.1, EVALUE 5.10e-01
aaatggaacccagatgttcgcatatattcacttgcacacaattcataggcaaatcaccaaatgaaaatgtgcaaagatattcacagtagttacttgaagggtatgcggctaccttgttgtctctacctcaactcttagttttgttttgttttatggcacttaagcaaagaacaggagaaaaaaaaggcatagatgtacaactcagaattattctgtgtttcaccgccataagaatgtcaaccccacaactccacaacagactctgtctgttgttcatggttgtatccctgatgcccagaacacagcctggaacacagtaagtatccaatgaatcgttgtttatttaataaacacatattttatatatgccaggtgattcacaagcaacatacattagtgttacagtaaagaaaacacattatttaaaagtatgtatcaatcaattaaaaaaagaatgtcttagctaataaacattcattgactacctactatgcgttcacattactgtttttctttgccttcaggagaccttgcacagtca

SEQ ID NO: 609 - DNA, 594 bp, Homo sapiens
  MAP TO CHR22_164.0; EXPRESSED IN LUNG, SIGNAL = 0.73; EXPRESSED IN BONE MARROW, SIGNAL = 0.69; EXPRESSED IN ADULT LIVER, SIGNAL = 0.76; EXPRESSED IN BRAIN, SIGNAL = 0.64; EXPRESSED IN FETAL LIVER, SIGNAL = 0.53; NT HIT: AJ303140.1, EVALUE 2.00e-06; SWISSPROT HIT: Q9Z6L2, EVALUE 7.60e+00; EST_HUMAN HIT: AL603420.1, EVALUE 0.00e+00
tctgtgtagcatgcaccctccgcccttctctcctgatctttggtacagtcacggtttccagaaggccatctttctcttctgatttcaacacaaatgaaaacctctcaagagccttacaaaagtctacggaaaaccgatctcttcactggcctcctggcttccagtctcctcccctcttcctggcctgggtatcactaccgaactcattctcccgagacgccccttcatgacagcactgctgaaggagctgtttctcttgggtaagtggacaaccacagcctgactttaaggtgctccacattatcgttccaactcctccacttcaggcaggcccccgacacacacgatcattccaccttcttcattctctgaaactcttccttctccctctccaagatccaggctcagaacctctggagacacgaccagagccatagtcttccatcatgtatttagaatttagtcacagagtccaacagggcttcagattataaatacttttttcattatgcagatataattcacataccgtaaaactcaccctgttaaagtgcatgattcagtggtttcagcacattcacaaagctgtgccat

SEQ ID NO: 610 - DNA, 545 bp, Homo sapiens
  MAP TO CHR22_167.0; EXPRESSED IN BONE MARROW, SIGNAL = 0.61; EXPRESSED IN LUNG, SIGNAL = 0.62; EXPRESSED IN PLACENTA, SIGNAL = 0.57; EXPRESSED IN ADULT LIVER, SIGNAL = 0.65; EXPRESSED IN BRAIN, SIGNAL = 0.64; NT HIT: gi14779412, EVALUE 1.00e-108; SWISSPROT HIT: Q14166, EVALUE 3.00e-53; EST_HUMAN HIT: AW732354.1, EVALUE 1.00e-107
atgccgtgtctgggacttaccacctttcccgctgctggaagtagctgacaaactggggcagctcagtgcgcaggttgaaggttcggggcagccagggtgggccctcggggccacctgcccggcgcgcgatggaggccaggcagtccttgacagtcagcaggttctcgcaggggaactggttcagcagcacgcctggcctctcctggctgagtttcctgcagggcggaggcaggtgcgccagctcaaggggaggccggcagtgcctagaagccctgactgggagggcccctgcggccagaggtgccctcacctgtagtccttgaagtgtgagaagttgaagaggatgtcggcgtccgcctcactctgggtgagggtgaagcgcgggtgggtgaggctgctggccacctgctgcacgtccgtgtagaccctgtggggagagcccgagctgggtgatcccggctcccaagtgtccaagcgggactccagcactagccctggctcagggactcccttccctgttttgaagctaatgaggcagaggcaag

SEQ ID NO: 611 - DNA, 594 bp, Homo sapiens
  MAP TO CHR21_70.0; EXPRESSED IN FETAL LIVER, SIGNAL = 1.8; EXPRESSED IN BONE MARROW, SIGNAL = 2.1; EXPRESSED IN LUNG, SIGNAL = 0.98; EXPRESSED IN HEART, SIGNAL = 1.5; EXPRESSED IN HELA, SIGNAL = 4.1; EXPRESSED IN PLACENTA, SIGNAL = 0.99; EXPRESSED IN BRAIN, SIGNAL = 1.8; NT HIT: AJ278474.1, EVALUE 1.40e-01; SWISSPROT HIT: Q13796, EVALUE 7.70e-02; EST_HUMAN HIT: BG613467.1, EVALUE 5.40e-02
tgacccttctctggaactggctgatttgatcacctgggccacctgaaggagtggggggactgatgtgtgccccgtgcatttagaagcaaggaggaggggacgggaactgctgtttcctagaatggttctgtgatgctggtctgcctgctgcagtggggaaagaggacgttcttgcggaccttgacctccatgccggcagccggaccccggaggtgagagtgactctgctgcaccctggacgcacctcccccctcctcatttctcaggcctcctccaccctttgtgctgtggggagggaaataactagagacatcgtcacattgcatgtgacgggaaggtgacattctggtctcagagcctgaggctgatggcctgtggggaaatttcaggggagcacagagaggaagaaaggagaacggaaacccgtccaggggccccagccggccctttgcaaacagaggcagggtcaggcgaaaccgagggccaggtcgcagatgaaggctggagtctgaggtctggggcctgggatcagcctgttttagctgctgctcgggtgctttctgcggagggggctcatcacactctccacccatg

SEQ ID NO: 612 - DNA, 507 bp, Homo sapiens
  MAP TO AL136457.1; EXPRESSED IN HELA, SIGNAL = 0.77; EXPRESSED IN FETAL LIVER, SIGNAL = 1.3; EXPRESSED IN ADULT LIVER, SIGNAL = 1.4; EXPRESSED IN BONE MARROW, SIGNAL = 1.3; EXPRESSED IN LUNG, SIGNAL = 1.3; EXPRESSED IN BRAIN, SIGNAL = 1.2; NT HIT: AF338230.1, EVALUE 8.00e-06; SWISSPROT HIT: P08547, EVALUE 5.00e-07; EST_HUMAN HIT: AW070189.1, EVALUE 7.10e-01
tcctggccattaacttttggttagttaaaaataaattctgagagcctactctctacaaaacatgctgttagatattatggttacttcaaggatgtacaaaagtgatcccttccttgcagaagcttatcagcaagttagggaaatcagaccaggcatgacaagtaaggtaacagtgaactcagtaacacttgagcactaactggtatacgggccacatgagccacagggagtgctgggatggccaggataaattccaaagaaaaggtggccttggccctaataagaaaacaaacaactcaatttttaaaaaaatagtacatgatctgaataaacacttcatcaaagatgtacagataaaaaatgagcaaatggagaaatgttcaaggtcatatgtcattagagaaatgcagattgaaacaacgagatacctctacacacaggttagaatgatcaaattcataacattaacaacaccaaatgctggtgaggatgcagaacagcaggact

SEQ ID NO: 613 - DNA, 599 bp, Homo sapiens
  MAP TO CHR22_168.0; EXPRESSED IN PLACENTA, SIGNAL = 1.3; EXPRESSED IN BRAIN, SIGNAL = 1.5; EXPRESSED IN LUNG, SIGNAL = 1.4; EXPRESSED IN HELA, SIGNAL =   1; EXPRESSED IN ADULT LIVER, SIGNAL = 1.1; EXPRESSED IN FETAL LIVER, SIGNAL =   1; EXPRESSED IN BONE MARROW, SIGNAL = 1.3; EXPRESSED IN HEART, SIGNAL = 2.1; NT HIT: gi14777617, EVALUE 0.00e+00; EST_HUMAN HIT: AA129773.1, EVALUE 0.00e+00
tactgttggtgccttcttggtattgtaccccaaaattctgcatagattatttagtataatggtaagttaaaaaatgttaaaggaagattttattaagaatctgaatgtttattcattatattgttacaatttaacattaacatttatttgtggtatttgtgatttggttaatctgtataaaaattgtaagtagaaaggtttatatttcatcttaattcttttgatgttgtaaacgtactttttaaaagatggattatttgaatgtttatggcacctgacttgtaaaaaaaaaaaactacaaaaaaatccttagaatcattaaattgtgtccctgtattaccaaaataacacagcaccgtgcatgtatagtttaattgcagtttcatctgtgaaaacgtgaaattgtctagtccttcgttatgttccccagatgtcttccagatttgctctgcatgtggtaacttgtgttagggctgtgagctgttcctcgagttgaatggggatgtcagtgctcctagggttctccaggtggttcttcagaccttcacctgtgggggggggggtaggcggtgcccacgcccatctcctcatcctcctga

SEQ ID NO: 614 - DNA, 511 bp, Homo sapiens
  MAP TO AC018432.4; EXPRESSED IN HELA, SIGNAL = 1.9; EXPRESSED IN FETAL LIVER, SIGNAL = 3.2; EXPRESSED IN PLACENTA, SIGNAL = 3.8; EXPRESSED IN LUNG, SIGNAL = 3.5; EXPRESSED IN ADULT LIVER, SIGNAL = 3.5; EXPRESSED IN BONE MARROW, SIGNAL = 3.2; EXPRESSED IN BRAIN, SIGNAL = 3.2; SWISSPROT HIT: P08926, EVALUE 2.80e+00; NT HIT: AL161534.2, EVALUE 7.60e+00; EST_HUMAN HIT: BG979467.1, EVALUE 4.60e-02
agtttttgagccactgctgccagggatattgagtgtatgtggaagtgataattgctctgcctcaaaaattgtgccttcaggttgcattatataatccacacttactgtttttcctctatctacttctttctgtggcttgtattcttgtactgtttttacatcatttgagctatccaccccaaaagactttgtatgtgctattttccctgcatcaaatgatttctgctgccttagttgcaaagtagcagattttattattccttgtaagtcttcctctccttcttttcttgtgttcaattcataacaagttagagaagactcacaacgcaaatgtaggaagagaactgtttcctgtttactcttgtgtccatcccttttctcttgctctgtgcctactccatctgcttgctgttgctcttcagtttctccatccctgttcccttgctcctcaccttctccgtcctctttcccttgctcctggccttctccatcccttttccctggctcttta

SEQ ID NO: 615 - DNA, 567 bp, Homo sapiens
  MAP TO CHR22_203.0; EXPRESSED IN HELA, SIGNAL = 2.3; EXPRESSED IN FETAL LIVER, SIGNAL = 2.1; EXPRESSED IN HEART, SIGNAL = 2.1; EXPRESSED IN PLACENTA, SIGNAL = 1.1; EXPRESSED IN LUNG, SIGNAL = 0.84; EXPRESSED IN ADULT LIVER, SIGNAL = 0.72; EXPRESSED IN BRAIN, SIGNAL = 1.8; EST_HUMAN HIT: BG180123.1, EVALUE 0.00e+00; SWISSPROT HIT: O95985, EVALUE 6.00e-75; NT HIT: gi14777637, EVALUE 0.00e+00
tttacagggctcccttctcccgccaggcatgggctgcaacgagtgtacgcacccctcctgccagcactcgctgagcatgctgggcatcggccagtgcgtggaatgtgagagcggggtgctggtgctggaccccacctcgggccccaagtggaaggtggcctgcaacaagtgcaacgtggtagcgcactgcttcgagaacgcccaccgcgtgcgggtgtccgccgacacctgcagtgtctgtgaggccgccttgcttgatgtggacttcaacaaggccaagtccccactcccgggcgatgaggcgcagcacatgggctgcgtcttttgtgaccccgtcttccaggagctggtggagctgaagcatgcggcctcctgccaccccatgcaccgcggtggaccagggagaaggcagggtcgagggcggggccgggccaggaggccccctgggaagcccaaccccagacggcccaaggacaagatgtcagccctggccgcctactttgtatgatgaccctgtcctccctcacccaggctgcagtgccatgcagacacctcatggcacttcaa

SEQ ID NO: 616 - DNA, 544 bp, Homo sapiens
  MAP TO CHR22_116.0; EXPRESSED IN HELA, SIGNAL = 3.9; EXPRESSED IN BRAIN, SIGNAL = 7.6; EXPRESSED IN FETAL LIVER, SIGNAL = 7.8; EXPRESSED IN HEART, SIGNAL = 6.3; EXPRESSED IN ADULT LIVER, SIGNAL = 7.4; EXPRESSED IN BONE MARROW, SIGNAL = 8.7; EXPRESSED IN PLACENTA, SIGNAL = 7.7; EXPRESSED IN LUNG, SIGNAL = 7.3; EST_HUMAN HIT: AW206785.1, EVALUE 7.60e-01; SWISSPROT HIT: Q9HZJ5, EVALUE 3.90e+00; NT HIT: gi16156234, EVALUE 2.00e+00
ccatgatggagggttttcaccttccctgaagcatttatcacagtttgattttggtccttgaagatgagaaactcttgtctctccttgtttaatctctccatctgctcagcatctcgggcagggccatacacagagttggcagtgggttatttactgttgcaagaataaatccttccccacctatggaacccccatgtgctctcagagtcgggattttagctgtatggcactaccgttctggatgccaagtgtgagtaacaggatttagactaagagatggttatgatgaaaaccctgaccagctactcagagaagaacctactgatgtctcagctgaagtgccaggttggccacgtttttacagctggggagatcctttcctagtttggagtctgagaagggccttaattttcccattaggagaagcttggtgtcaatgtagctttgctagagagcagacagcatgtgcagggccagagaggcagggcacagagggagtggaaggatgacaaatggaggaacaggtcccagcaacctgagagag

SEQ ID NO: 617 - DNA, 547 bp, Homo sapiens
  MAP TO AC018704.5; EXPRESSED IN BRAIN, SIGNAL = 0.46; EXPRESSED IN PLACENTA, SIGNAL = 0.45; EXPRESSED IN ADULT LIVER, SIGNAL = 0.41; SWISSPROT HIT: P23493, EVALUE 3.90e+00; EST_HUMAN HIT: BE789673.1, EVALUE 1.20e-02
agcatgctgattggatagggtgtgttgacccttgttccatataggacaatgtgtcgtctctgtgtagtttattccattttgatcaacatcaacaatggctgtggtgcctcagtgatctaggctgcaggaattggtggcagtgacagtggctggacttattactggagaaaaggcttcggggatcttcttgttcttgtcttcccaatagtaggagttttagataagaagatctttcttggtgtcagcccacaagcagccatggcagaactggggtctagggaacaggttctgaaagcagctgtggagccaagttcctgggctctggattatacaactactgtagtacctaaggtgcgtgttaactttccaagacatgagtagatgcagttctttcataaagctagtgtctgtttctccgagggacattccaacagctacagccctgaaggctggggtgtagttgtgattcagaccactgggagcagggtgctttgccatggcactggggaagaaggagtgctttggaggctttgtacctggggaacaa

SEQ ID NO: 618 - DNA, 599 bp, Homo sapiens
  MAP TO CHR22_174.0; EXPRESSED IN BONE MARROW, SIGNAL =  28; EXPRESSED IN BRAIN, SIGNAL = 1.2; EXPRESSED IN HEART, SIGNAL = 1.2; EXPRESSED IN FETAL LIVER, SIGNAL = 1.5; EXPRESSED IN LUNG, SIGNAL =  20; EXPRESSED IN HELA, SIGNAL = 0.99; EXPRESSED IN ADULT LIVER, SIGNAL = 7.7; EXPRESSED IN PLACENTA, SIGNAL = 1.4; SWISSPROT HIT: P15814, EVALUE 3.00e-34; EST_HUMAN HIT: AW574906.1, EVALUE 5.00e-73; NT HIT: X51755.1, EVALUE 4.00e-76
acaacaggatgctgacctcctgccgctcgcccactcacaggccagcccaaggccaccccctcggtcactctgttcccgtcctcctctgaggagctccaagccaaaaggccacactgctgtgtctcatgagtggcttctacccgggagctgtgacggtggcctggaaggcaaacagcacccctgtcacccagggtatggaagtcaccaaggcctccaaacagagcaacaagtacacagccagaagcgacctgagcctgacaccccatcaatggaggtcccgcagcagctacagctgccgggtcacacacaaagagagcgctgtggagaagacagtggcccctgaagaatgttcttaggcccctgaccctcgccccacccatgggggcctggagctgcaggatcccagaacagggatcccctcccaccccaaatcatccagcccttctccctgcacccaggaaacccttaataaatatcctcactgtcaaccagaaatcctgctccctctcttcatttcttagctaacatataatttgacactcaccctgggttctcagtgtgtgtaaggggggattcctggcacccagtgggatagtagc

SEQ ID NO: 619 - DNA, 565 bp, Homo sapiens
  MAP TO AL136317.2; EXPRESSED IN BONE MARROW, SIGNAL = 1.6; EXPRESSED IN PLACENTA, SIGNAL = 1.9; EXPRESSED IN LUNG, SIGNAL = 1.7; EXPRESSED IN ADULT LIVER, SIGNAL =   2; EXPRESSED IN BRAIN, SIGNAL = 1.5; EXPRESSED IN HELA, SIGNAL = 0.82; EXPRESSED IN FETAL LIVER, SIGNAL = 1.6; NT HIT: AL163204.2, EVALUE 0.00e+00; EST_HUMAN HIT: BG478950.1, EVALUE 9.00e-81
tagtcgctgtgctaggcatccatagtgtggaaaagctggagtaaactctggagttatgttgacaaacatgacttgaatgagaaggaagtatttcaagaataatatgacaactgtgtgactacaatgaggagatatacttatgacatggcttaaaatatacaagttaaacattacatgggcgatcaagatctgttggatatcctgttttttcataatccagaaagcctttttgtctttccgtgtcaatggaagtgtcgtccagatcactgtctatatggaagcagttgccaagaagcagaagaaggaatctttatttttcacgggaacagaggtgtttaccatgatgataagcaaccagcatttagagctgtttatgaagcactgagaaattgttcttttaagatgacaatgttcattcattaataaaacctttagaattggaactacaaaaaatagtgcatacatatcgtggaaaaatttactaaatatttatcaaacaattagcaaaaacataagagatcgctatgtcagatcaccaaaggaaaggtgattcttgttgcctgct

SEQ ID NO: 620 - DNA, 551 bp, Homo sapiens
  MAP TO AL133492.1; EXPRESSED IN HELA, SIGNAL = 2.7; EXPRESSED IN BRAIN, SIGNAL = 3.3; EXPRESSED IN FETAL LIVER, SIGNAL = 3.6; EXPRESSED IN HEART, SIGNAL = 3.3; EXPRESSED IN BONE MARROW, SIGNAL = 3.5; EXPRESSED IN PLACENTA, SIGNAL = 4.7; EXPRESSED IN LUNG, SIGNAL = 4.1; EXPRESSED IN ADULT LIVER, SIGNAL = 4.4; NT HIT: AL163303.2, EVALUE 0.00e+00; SWISSPROT HIT: P08547, EVALUE 1.00e-06; EST_HUMAN HIT: BE149693.1, EVALUE 1.30e-02
tattttcagggctggtgagggttgagggagtctcccatggccagaattgcatgatttcttggtggggatgtgggccactggaagtttctcactcagcctttccttgtgttgggaagtcactcttggctcctgaccaatcccagccaggcaggctccccctcttccttttccttaactcgcttttggtatttcctgttacttctctgttgaattcacattctctcttgggtaatgtattcagaaagtgaccgtacattcttttggttcttcaaagtggaggaggtgggcataaattgcatctcgtcatccatcttgaagctcctctccatgaaaaaaatattatttttaataacattagaaatctaaattggacaagagatgttcaacacttgaacacgtaaaactacaaaatattgccaacagaaattgttgaagataaatacattgagagatataccatgttcgttgttaagatgactcaatattgttaagatgttaattctccccatgttgatctatagaatcaatgaactcccaatcaaagtcccaga

SEQ ID NO: 621 - DNA, 511 bp, Homo sapiens
  MAP TO AC021009.3; EXPRESSED IN PLACENTA, SIGNAL = 1.7; EXPRESSED IN BONE MARROW, SIGNAL = 1.5; EXPRESSED IN ADULT LIVER, SIGNAL = 1.4; EXPRESSED IN LUNG, SIGNAL = 1.6; EXPRESSED IN BRAIN, SIGNAL =   2; EXPRESSED IN FETAL LIVER, SIGNAL = 1.5; EXPRESSED IN HEART, SIGNAL = 1.7; SWISSPROT HIT: P48614, EVALUE 4.20e-01
ccatctctacctcagaggcggctccttacgcccctccctccgggctggaatccttcttcaacaactgcaagtcacttccggaatctctgctggacatggcccctgaggcctgtaaccactgtggctcaggtggaggctctggaacccctggaaaatagcctcctggacaacagccacagcctgtctaccctccgccaggtggagccgatgccctgggcagacgccttcgccggctccgaggacgacctggacctggggtccttctcactgccggagcttcccttgcagactaaagatgtcccagatgttgaaacagaacccacagaagaaagtcttgctccttcagaaaagatccctccaggggcccctgtggtcgtaagggtggggatgtttccgctttagtggctaaggagcagccgtcactgcctcctgaccaggcctccacccagctccccacagagctcgagcctgagccctcagaggagccaaagctggacgtggctctagaagc

SEQ ID NO: 622 - DNA, 588 bp, Homo sapiens
  MAP TO CHR22_231.0; EXPRESSED IN HELA, SIGNAL = 3.1; EXPRESSED IN BRAIN, SIGNAL = 1.5; EXPRESSED IN FETAL LIVER, SIGNAL = 1.6; EXPRESSED IN HEART, SIGNAL = 1.3; EXPRESSED IN LUNG, SIGNAL =   1; EXPRESSED IN BONE MARROW, SIGNAL = 1.8; EXPRESSED IN ADULT LIVER, SIGNAL = 0.93; EXPRESSED IN PLACENTA, SIGNAL = 1.1; SWISSPROT HIT: Q09690, EVALUE 4.30e+00; EST_HUMAN HIT: BF911073.1, EVALUE 0.00e+00
ttgagggcagagaggatgtcttatttatttctgccccgctagccgtgtaaactgagtaggtacttgtaaatgttcattgaataagtacctgattaatagaatttaattcaagaagaatgtattgatgggcctgtgtggtcaccacagtactgagatgtaggtgggagctggctgaagggggaggcacctaaacaggagcgcagacagcggcacctacggatgatggcccgctccatcccaccgcagcgaaattgtcccagacctctgcagctccccccacacctagactgagagagagctcttcttccttctgtagggagcaggtgtttcctccagatgtccaatatgtacctcccattacagcggtgttaggaaggtgagggctgccgctgaaagggtccccttcataatcatcactagatttggggtatattatggattaaatagaatttttataagatgacctggggatctatttaaataaaatcctctttctttctgcaagatcatggatttaaattcaacacaactgacttcatagggaaggggtatggtgaaagggaagtgaggtgggcagcactgatattt

SEQ ID NO: 623 - DNA, 598 bp, Homo sapiens
  MAP TO CHR21_72.0; EXPRESSED IN BONE MARROW, SIGNAL = 1.6; EXPRESSED IN LUNG, SIGNAL = 0.83; EXPRESSED IN PLACENTA, SIGNAL = 0.77; EXPRESSED IN HELA, SIGNAL =   3; EXPRESSED IN BRAIN, SIGNAL = 1.6; EXPRESSED IN FETAL LIVER, SIGNAL = 1.4; SWISSPROT HIT: P09017, EVALUE 2.30e-01
ctgcaggaaaagcaggtttcctataaggaaagacaagaggaagctcattctccacacccagaccactgggcgtggtgtttggggagccctttggggagctgtaacggggcgtggagaccttctccattgcgcccccgaccagggccgggcctggctgtgactccggggcgggcagtgatgccatctgtcttctgcagaggagaacgctgggaccccctggagcacctttcaagaacgactccaaagccggatatttgcagtgggaggagaggaagggagtgcccggctgtgtcttcttcatccccctgaacacaggagggggcagcctggctgaaggcctgacccctggggggaaagcgcacctggtgaaaaactgttctctgactgatgtgatgatgaaaacgaatggcaggtccttctcataccgcaacgtggaaagaaggccctggaagcgccactgcttggctccagcgccccagctcattcggagcaagctgtggcccacagggagcccctggaggatctgctggcttccttaacgaagcaatgctctgagcgccagggtggggacggggtctccctcagcatcttcaggaag

SEQ ID NO: 624 - DNA, 593 bp, Homo sapiens
  MAP TO AL136444.1; EXPRESSED IN ADULT LIVER, SIGNAL =  11; EXPRESSED IN FETAL LIVER, SIGNAL =  11; EXPRESSED IN PLACENTA, SIGNAL =  11; EXPRESSED IN LUNG, SIGNAL =  11; EXPRESSED IN BONE MARROW, SIGNAL =  11; EXPRESSED IN HELA, SIGNAL = 8.1; EXPRESSED IN BRAIN, SIGNAL = 9.7; EXPRESSED IN HEART, SIGNAL = 8.3; SWISSPROT HIT: P35372, EVALUE 6.00e-53; EST_HUMAN HIT: AV719759.1, EVALUE 8.30e-01; NT HIT: gi14753887, EVALUE 0.00e+00
aatcactgtccgtggtctcctccagagtccccccagtttacctcccctctttcatcctcccgcccaacattgagccttgggagttaggtgtctctttgtacccccttaagccgctgaaccctccgctcggagccctggcgctttccttacctgacaatcacatacatgaccaggaagtttccgaagagccccaccacgcacacgatggagtagagggccatgatcgtgatggccgtgatcatggagggactgccggtcggagggcacaggctgtctctcccgcccaggtcggtgcggttcggaccgcatgggtcggacaggttgccatctaagtgggacaagttgacccaggaaccggggctgggtgctggggagcaacttgagtacgccaaggcatcagtgcaattgctggcgttcgtgggggcagcgctgctgtccatggtactgacggccgggcgggcaccgctgtgcgaggtagccaggagcaccgagacttttcgggttccaagcgcctcagccgcttcctttcgccgctgccacagctcctgctgtttcttacagaaaccagtcctggctgagacagagaggagcgt

SEQ ID NO: 625 - DNA, 549 bp, Homo sapiens
  MAP TO CHR22_170.0; EXPRESSED IN BRAIN, SIGNAL = 2.1; EXPRESSED IN FETAL LIVER, SIGNAL = 1.8; EXPRESSED IN BONE MARROW, SIGNAL =   2; EXPRESSED IN ADULT LIVER, SIGNAL = 1.4; EXPRESSED IN HELA, SIGNAL = 1.1; EXPRESSED IN HEART, SIGNAL = 1.9; EXPRESSED IN LUNG, SIGNAL = 1.6; EXPRESSED IN PLACENTA, SIGNAL =   2; SWISSPROT HIT: P39188, EVALUE 2.00e-08; EST_HUMAN HIT: AL589315.1, EVALUE 2.00e-20; NT HIT: AF288742.1, EVALUE 2.00e-13
tttcaaagacggagctttggttttttatcaagccaacttttaatttatttttacaactttagtgaaatacaattgatgtacaataaactgctgtatttaaattatatagtttgaggaattttgacatatgcataaacctgtgtgcccgtcaccaccatcaagaagtcaacatccaccaggcactgtggctcatgcgtgtaatcccagaactttgggaggccaaggcaggaggatcacttgtgctcaggagttccaggctacactgagccgtaatagcaccactgcactttgacctggatagcagagtgagaccctgtctcgaagaagaagagaaaaagaagaagaagaagaagaagaagaagaagaagaagaagaagaagaagaagaagaagaagaagaagaagaagaagaggaagaagaagaagaagaaggaggaggaggaggaggaggaggaggaggaggaggagaagggaataagatgagaggaagaaggaagaagaacaagaggaagaagaagaaggaggaaaaggaggaagaggaggaggagga

SEQ ID NO: 626 - DNA, 592 bp, Homo sapiens
  MAP TO AL136312.1; EXPRESSED IN BRAIN, SIGNAL = 0.65; EXPRESSED IN HELA, SIGNAL = 0.61; EXPRESSED IN PLACENTA, SIGNAL = 0.65; EXPRESSED IN ADULT LIVER, SIGNAL = 0.65; EXPRESSED IN FETAL LIVER, SIGNAL = 0.62; EXPRESSED IN BONE MARROW, SIGNAL = 0.57; SWISSPROT HIT: P49002, EVALUE 2.60e+00; EST_HUMAN HIT: BF356492.1, EVALUE 2.10e-01
cgtctccctattctgcttggcaaaatgttgtggaacccaatggatctggacttaccaaggaaaagggatgaaccctctaaatcaaagggattattaaggggtgagcagatattcctcctcaagagaaaaacttgagaagtctatggacttctcaaggaaagtggcatgattacaaatggaattacaaattccttcattatcccataataaaacttgagtggaaaataccttctcacttaaaaaaaaattaattggcattccacagatcttatttcttgtgtaaagaagtgaccatttgggaggaagccagcccactactgaaacaatctgcaaaagcacgtcctcttaatcgtcttttgtcgaagaaaaaggagagacagaatggatacttgaaggggtggggaatgacctgaaagtcgctgttgcgtttcctccaggcagcttgctgaagagcccggcggctgtgctgtccgtgcttccgcctggtggacagagttggtaattctgactgcttggggactgtgaggaaaggaaaacttcctgcttcccaattttaaaaaaagaaaaagaaacagcaaacatgagccagaaa

SEQ ID NO: 627 - DNA, 596 bp, Homo sapiens
  MAP TO AC011981.3; EXPRESSED IN FETAL LIVER, SIGNAL = 0.51; EXPRESSED IN BONE MARROW, SIGNAL = 0.61; EXPRESSED IN PLACENTA, SIGNAL = 0.59; EXPRESSED IN BRAIN, SIGNAL = 0.53; NT HIT: Z93039.1, EVALUE 4.00e-05; EST_HUMAN HIT: BF746169.1, EVALUE 4.00e-09
cagccaatgtgtgaggtgacaacacagtcacatggatcccaggaggtgtagttcatttggggccaccaatgtaacagtctacacacaaatgtaagcagtaattgacattcccatttcatttctattactttgctataccacatattttggcatttgttttgcctccatagtcttcttcattggttcacgtgtgtactccttgtttcaagatgataaattttctagtggcaaggactctgttctaacatcatgttaccttgattctaacatcaaagctaatatttaatgatatattggaatatgtaggctttgatggttttgtagaagccgaatccttcccatatctgccacttaacagccattgtggccctgagcaagtatttgacctctttgagcctcagttttcccatttgcaaaatgaggataataatggtttcttccttcacatgattgttataaaaattaaattagttaataatatgagaaaagaatagtgcaggtccagaataaattttaaatgttagtgttatattttactgatataaagatagcctgatgtacttgtttaatttgtatctgatctctcatccatgggc

SEQ ID NO: 628 - DNA, 514 bp, Homo sapiens
  MAP TO CHR22_121.0; EXPRESSED IN FETAL LIVER, SIGNAL = 1.7; EXPRESSED IN BONE MARROW, SIGNAL = 1.5; EXPRESSED IN HEART, SIGNAL = 1.6; EXPRESSED IN LUNG, SIGNAL = 1.5; EXPRESSED IN BRAIN, SIGNAL = 1.6; EXPRESSED IN ADULT LIVER, SIGNAL = 1.5; EXPRESSED IN HELA, SIGNAL = 0.97; EXPRESSED IN PLACENTA, SIGNAL = 1.8; NT HIT: gi14779289, EVALUE 3.00e-79; SWISSPROT HIT: P07383, EVALUE 6.30e-02; EST_HUMAN HIT: BG701407.1, EVALUE 5.00e-79
gagataaggggctcagggagcaccagcttcatgggtgaatgaatgaaggaatgaaagacccggctgtgtctttcaggtctgatctcagagctgaagctggctgtgccctggggccacatcgcagccaaagcctggggctccctgcagggccctccagttctctgcctgcacggctggctggacaatgccagctccttcgacagactcatccctcttctcccgcaaggtgtgaggctggggctgaagggaaggccagggggaaagtgggcaggaaggtgaggggggaggtctgcaggggaatgaggagggcggggagacagctggcatagacacctcttcctaccctccaacccgcttctctctgtttcagacttttattacgttgccatggatttcggaggtcatgggctctcgtcccattacagcccaggtgtcccatattacctccagacttttgtgagtgagatccgaagagttgtggcaggtaagaaacagagtgtgtattttcggcggt

SEQ ID NO: 629 - DNA, 567 bp, Homo sapiens
  MAP TO AC016672.4; EXPRESSED IN BONE MARROW, SIGNAL = 5.5; EXPRESSED IN PLACENTA, SIGNAL = 5.5; EXPRESSED IN LUNG, SIGNAL =   5; EXPRESSED IN BRAIN, SIGNAL = 5.2; EXPRESSED IN HELA, SIGNAL = 2.4; EXPRESSED IN FETAL LIVER, SIGNAL = 5.2; NT HIT: AF384819.2, EVALUE 9.00e-03; SWISSPROT HIT: Q9LY32, EVALUE 1.40e+00; EST_HUMAN HIT: AW471133.1, EVALUE 8.00e-01
gagaaacgaaccaggctcagagtggacaggcatccccatttccactcttccttccatctccaggaccatcaccaccgcgggcaaaaggagtgctgcttttgcgagaggattgtcttaaacctgactacgtcttatgccaagcaacatgcctggcacacacagtctcagaaaccccggcttcctcactgtctcacacaaaaggtgcatcagtagcatcttctgcagtagaatgcgtttgtgtctgggcttaatttcggtgtttgccttctaaatagttccctgtgccaaagcggctgcgtttgggcgtttaattaataatttttactataagagagtaggtcaaagcattcttaatgaaggagggggagaaagaaaccgttctgttctcctcaatcccacagcgattctctttgggctcacaaaggcagcagctctagggccaaatttgggcatcccacaatgataggttcaaagagggattttcacatttaattacccccccaggtagcgcctatatctttatcaagtaaatgtgtaattgggagttcctgcttggagactggagtc

SEQ ID NO: 630 - DNA, 555 bp, Homo sapiens
  MAP TO AC011676.4; EXPRESSED IN HEART, SIGNAL = 2.9; EXPRESSED IN LUNG, SIGNAL = 3.1; EXPRESSED IN ADULT LIVER, SIGNAL = 2.7; EXPRESSED IN HELA, SIGNAL = 2.9; EXPRESSED IN FETAL LIVER, SIGNAL = 1.9; EXPRESSED IN PLACENTA, SIGNAL = 3.1; EXPRESSED IN BONE MARROW, SIGNAL = 2.9; EXPRESSED IN BRAIN, SIGNAL = 2.9; NT HIT: gi6679688, EVALUE 1.30e-01; SWISSPROT HIT: P32017, EVALUE 2.10e-01; EST_HUMAN HIT: AL544320.1, EVALUE 0.00e+00
tgggaatagaccactctgggtggccggcagcaggaggcgcccagtggtgcccacctcctagacatacctgggaagcacagctgcggcagggtgaggaggtccacgccgcccgggacggcgacatcctcaggctctggcgctctggggggccccgggaggccctcccactgctctggtctgggcttctctctcttctttctcaaggagcgcatccgggttttaccgagagtgccgcagttggcaccggccgtttgactgtcctctttactgataaaaggaggcacgaaaatggacaggacctctggatcaagaagagcagaaagatgtttgactccctttttataagcaacctaaaaaagggaaaaataagagttactgccacagcctcagctcttgttcgagggtatcctttctgtctgagcttcactgcttgtttttctcctcccctcggtgcccataaacactggcgcctcaggctcctaacagtaaagggctcctgggaagcttcttttaggaacctgccaggccctatgttcagggaagccacgtagactc

SEQ ID NO: 631 - DNA, 558 bp, Homo sapiens
  MAP TO CHR22_183_1.0; EXPRESSED IN LUNG, SIGNAL = 0.83; EXPRESSED IN ADULT LIVER, SIGNAL = 0.83; EXPRESSED IN BRAIN, SIGNAL = 0.82; NT HIT: gi7657529, EVALUE 1.00e-128; SWISSPROT HIT: Q47146, EVALUE 6.10e-01; EST_HUMAN HIT: BI769448.1, EVALUE 1.00e-126
agccttggtagaaacccagcctaggccaggcctcacctgacattaaggagcgcacgggcggccttgctgcggatgttctggttggcgctgaggagcttctgcttcaggacaagcaccacattgctgcccagggcctcggtggcatcctcctgcaggcagaggaccagtgtgtccaggatgaactcctggaactcctcctcctccacctccacctgcagcttccataccagtgaggaaatcagacctttgctgatgatctcttgggcccctacaaggcaggaaagggcactgagggcgggctggccacacacccacccacccatgccagttggcctgcagggctcaaggagggtcttgcagaaccagtgggtgggtttgacaaaaggacttgcaagtgccacccccacacacacgtcccgcctggccaggggcctgagcgaccagcaggcagctgcagtgacagccatgtcaggggctaagggcggaggctcagagaacccaggaaggaccagtcttttgtcgcctgtgtctcagggggcatctaccatagcaagcgca

SEQ ID NO: 632 - DNA, 516 bp, Homo sapiens
  MAP TO AC018691.5; EXPRESSED IN FETAL LIVER, SIGNAL = 2.8; EXPRESSED IN HEART, SIGNAL = 2.9; EXPRESSED IN PLACENTA, SIGNAL = 4.1; EXPRESSED IN ADULT LIVER, SIGNAL = 3.2; EXPRESSED IN BONE MARROW, SIGNAL =   3; EXPRESSED IN LUNG, SIGNAL =   4; EXPRESSED IN BRAIN, SIGNAL = 3.2; SWISSPROT HIT: P31020, EVALUE 4.80e+00; EST_HUMAN HIT: AA580723.1, EVALUE 1.20e-02; NT HIT: AJ246003.1, EVALUE 7.70e+00
acaatactggagggccacacaaatgcttttcctttaagtgttgtgctgccatagaataatttttgaactggaaagttcttgggagatttagtagagaggaagctgaaaccccaagagattaacagacttttccaaggtcagacaacacatcctcagcaaggctatgattaggccctaggtctcctgatgtccaccccaggcccctttccaaggcacggctgttcagaagagggctccaagaaggtggattattcaggcccaggtgattggatggccatgccttccctaaaacagaggctgggagctttactttttcttttgcaggccactggcacatggaatatatcaactgtgggccaggcacagttgaaaaacaagaagagaagtttagagacaagattcaacatcagtctccactccacccccagcaaccccaccaaaaccagcattaccatatactccacctccatcacgtttgtgtaggtacagaagatgacagaggatgtgctaaagggc

SEQ ID NO: 633 - DNA, 525 bp, Homo sapiens
  MAP TO AC021609.3; EXPRESSED IN BONE MARROW, SIGNAL = 0.48; EXPRESSED IN BRAIN, SIGNAL = 0.58; EXPRESSED IN FETAL LIVER, SIGNAL = 0.52; EXPRESSED IN ADULT LIVER, SIGNAL = 0.57; EXPRESSED IN LUNG, SIGNAL = 0.79; SWISSPROT HIT: P37039, EVALUE 1.00e-06; EST_HUMAN HIT: BF346446.1, EVALUE 1.00e-98; NT HIT: AF121212.1, EVALUE 0.00e+00
cactgatggccctctcctacccgacttaggcacgataatgactcacccacacacataaatatggccgttctcctggaggaggattctcgccacctgctggccatgaagctggatgttgtcttgtacatactttgctggggcttcctcctccccaacaggagcatctcttgagaaggaaacctttagatgagttaagatcccatgcttaaggaaatgtctgagctcttttctgaaatataatatataatggatcactaaaaggttgtcaagctgaaaaagtctgagaattagaattgtacactcagtggttgagtacaatactggaattgtacaatacctgaatagataatccctatccttatgcctgcagccaaaaaacaaccacattgctccaaaatttccatctgggtgttgttcttggagtttctctctaagtggaaaaaaaaaaagtttaggtgtgtgatataaagaatatgtaaaaccaatctctttcattaggaactaccaccaacaaactcagacgga

SEQ ID NO: 634 - DNA, 521 bp, Homo sapiens
  MAP TO AL138895.4; EXPRESSED IN PLACENTA, SIGNAL = 0.64; EXPRESSED IN BRAIN, SIGNAL = 0.62; EXPRESSED IN LUNG, SIGNAL = 1.2; EXPRESSED IN BONE MARROW, SIGNAL = 0.82; SWISSPROT HIT: P26442, EVALUE 3.20e-01; EST_HUMAN HIT: BF350435.1, EVALUE 1.00e-36; NT HIT: gi14735275, EVALUE 8.00e-37
catctgcgacatgggttatgtatcaaggtaaaccagccagaggccctcagtctagacccgttgtcatgggggtagaagagttgtcccactgccctctcatgctccagaacttgaacgtggtgggtctgtgttgcacacaagcctgaagattgctcagctcggatcccaccattgaatgctttcctctcaggaacccagaagcccttatggaagggggtttgctatcagggtctcccagcaaggaggggttcattgtgtgcctgcgcatgtgaccgtgttgctcccgctttctgcaggaagactaccacaggctcctcaccaagtacgctgaggccgagaacaccattgaccagctacgcctcggggccaaggtaccaggccgggatggggtggaggcatgggcccaagtccccgaggaggtgacacttttccatagtcctagagaaaggccactgcctcctccatctactgaggccctggagatagtggaacgccagttttcttctaccccaaggtccctc

SEQ ID NO: 635 - DNA, 574 bp, Homo sapiens
  MAP TO AC010498.4; EXPRESSED IN FETAL LIVER, SIGNAL = 0.52; EXPRESSED IN HEART, SIGNAL = 1.3; EXPRESSED IN PLACENTA, SIGNAL = 0.71; EXPRESSED IN LUNG, SIGNAL = 0.72; EXPRESSED IN ADULT LIVER, SIGNAL = 0.61; EXPRESSED IN BONE MARROW, SIGNAL = 0.57; EXPRESSED IN BRAIN, SIGNAL = 0.71; NT HIT: AF003528.1, EVALUE 3.00e-15; SWISSPROT HIT: P08547, EVALUE 6.00e-44; EST_HUMAN HIT: BF436026.1, EVALUE 3.00e-19
ctccagggatgcaatgatgattcaacataaacaaatcaacaaatgtgtttcaacacataaacagaacaaaaaacaaaagttataatatcatctcaataggtgcagaaaatgcattctaaaattctaacatccattaatgattgaaagccttaagaaactacgattcaaaggaacatacctcgaaataatgaaagtcatatatagaaaacccacaaccaacattatactcaatgaggaaaagttgaaagcattccccctaagacctggtacaagacaaggatgccgattttcaccactcctactcaacatagtactgtatgtcctagcgagataaattaggaaagaaaaagaaataaaaggcatccaaattggataaaaagaaagtcaagttatctctgtttactgatgacatgatcttatgcctagaagaccctaaagactcctccaaagcattccaagatttgtaaaatgtcttcagtaaggtttcaggatagaaaatcaacgtacaaaaatcagtagcatttctacacaccaataaagttcaaaccgagaaccaaatcaagaatgcaatccg

SEQ ID NO: 636 - DNA, 596 bp, Homo sapiens
  MAP TO AL137145.3; EXPRESSED IN LUNG, SIGNAL =  12; EXPRESSED IN HEART, SIGNAL = 2.5; EXPRESSED IN ADULT LIVER, SIGNAL = 9.1; EXPRESSED IN BONE MARROW, SIGNAL = 5.1; EXPRESSED IN BRAIN, SIGNAL = 3.7; NT HIT: AL163227.2, EVALUE 1.00e-128; SWISSPROT HIT: Q9ZPN9, EVALUE 2.60e+00; EST_HUMAN HIT: BG289875.1, EVALUE 3.00e-65
tggtaccagtagagtggggcactgctgaaaagatacacaaaaatgtggaactgggtaacaggcagaggttggaacagtttggaggactcagaggaagacagaaaaatgtgggacagtttggaacttcctagagacttgctgaatggcttttaccaaaatgctgataatgatatggacagtgaaatccaggctgaggtggtctcagatggagatgaggaacttgttgggaattggaacaaaggtaactcttgttacgttttagcaaagagactgacagcattttgccccagccctagagatttgtggaactttgaacttgagagagatgatttagggtatctggtggaagatttctatttctaggcagcaaagcattcaagaggtgacttggatgctgttaaaggcattcaattttaaaagggaaacagatcattaaagtttgtaaaattttcaggctgacaatgtgatagaaacaaaaatcccattctctgaggagaaattaaagctggctgcagaaatttgcattagtaatgaagatctgaatgttaatcaccaggacaatggggaaaatgtctccagggcatgtcagagacctt

SEQ ID NO: 637 - DNA, 549 bp, Homo sapiens
  MAP TO AC021010.3; EXPRESSED IN BRAIN, SIGNAL = 0.6; EXPRESSED IN FETAL LIVER, SIGNAL = 0.45; EXPRESSED IN PLACENTA, SIGNAL = 0.67; EXPRESSED IN ADULT LIVER, SIGNAL = 0.46; EXPRESSED IN LUNG, SIGNAL = 0.54; SWISSPROT HIT: P53293, EVALUE 3.00e+00
aaaccaacttcatccatcgcaacatttgataatcttatccctacttcaatccattacatcaccctaaaatctggcatccaatgctaataagtgggtagctgtggaatatttaccagaaaaaatattggtatgtgcaggttgccaaagcaattttgtttatactttattgcaattgtatttctttatgtttttctttctttttcagccttgcaagcctttggcattttctgtgatatagtacatatgaccattggacagttctccattacctccaaaccaagggagtttcttgatattctccatgtgtaacatgaacacaataataaatattaaaattatatgggacctatatattatctaggagaaaagattcattcattcagtctatactcactgttctagaaatggtggatacatcaatcaaatatgaaataaacaaatccctgccctcttgaagcttacatttctcagggggagagatgggttattaatacaaaaagtaattggcatgaaaattctttgtaattaggggacatgtgagaaccgttc

SEQ ID NO: 638 - DNA, 501 bp, Homo sapiens
  MAP TO AC018586.3; EXPRESSED IN HELA, SIGNAL = 0.77; EXPRESSED IN FETAL LIVER, SIGNAL = 1.3; EXPRESSED IN PLACENTA, SIGNAL = 1.9; EXPRESSED IN ADULT LIVER, SIGNAL = 1.6; EXPRESSED IN LUNG, SIGNAL =   2; EXPRESSED IN BONE MARROW, SIGNAL = 1.8; EXPRESSED IN BRAIN, SIGNAL = 1.7; EXPRESSED IN HEART, SIGNAL = 1.8; NT HIT: AL163284.2, EVALUE 1.00e-47; EST_HUMAN HIT: AW937752.1, EVALUE 2.00e-22; SWISSPROT HIT: P11024, EVALUE 5.30e-01
tgttgtcacctcccctaacctcaggctgcacagttcagggctccaaaagcgacctcttctttttgcttgaggagaggagcgagaatactggggaggactttgtctcgagtcttggataccagctcagctacagctggatagggcaccagttagagttgcgaggcctgtgttccaaggccttgctcttgggtgacatttgtagacacaccctaggccagaagggaacatgctgtcttgaaggaaaggacccagtcatggcaacattcatcacctgcttgctaaagaatccttgtgccctgaataacaagcatcaatacccaggtactacatcaagggccttgggtgagcctctgagacttgctggcttcaggtgagactcagcacattaccagctatggtggctatggggcaaaactcctgctttggaaaagcagagggaaaagtgaaagggactttgtcttgcatcttagataccatcatgggcacagggagtagctcttg

SEQ ID NO: 639 - DNA, 577 bp, Homo sapiens
  MAP TO AC022057.2; EXPRESSED IN BRAIN, SIGNAL = 1.8; EXPRESSED IN HEART, SIGNAL = 1.8; EXPRESSED IN ADULT LIVER, SIGNAL =   2; EXPRESSED IN BONE MARROW, SIGNAL = 1.8; EXPRESSED IN HELA, SIGNAL = 1.2; EXPRESSED IN LUNG, SIGNAL = 2.2; EXPRESSED IN PLACENTA, SIGNAL = 1.8; EXPRESSED IN FETAL LIVER, SIGNAL = 1.8; NT HIT: gi14249285, EVALUE 3.00e-30; EST_HUMAN HIT: AI698173.1, EVALUE 1.00e-21; SWISSPROT HIT: P08548, EVALUE 5.00e-32
agctggagatttcaacaccctactttcaatattgaacttatctccaagactgaaaatcaacagagaaatgacagactcagtgtgttctataagtcaaatgaatctaatagatatttgcagaacatttcatccaatagcttcagaatacacattgttctcctcacatatgaatcattctcaaggataggcaatgtgttaggtcaaaaacaacaagtcttaaaacagtaaaaaaaaaaaaaataaaataatatcaagcatctcatctgaccatgacagaataaaacaagaaatcaaaaacaagaggaattttggaaactatacaaacacatggagattaaacaatatgctcctgaatgatctgtggacaaatgaagaaattaagaaggaatttgaaaaagttcttgaaagaaatgacaatgataatggacacaaaataccaaaacctgtgagatacagtgaaagcagtactaagaggggaatttataagtgaccacatcagaaaagaagaaaaactttggataaataacccaatgatgcattttaaaaaactagaaaaggaagaacaaatcaaacccaa

SEQ ID NO: 640 - DNA, 586 bp, Homo sapiens
  MAP TO AF235096.1; EXPRESSED IN BONE MARROW, SIGNAL = 0.54; EXPRESSED IN BRAIN, SIGNAL = 0.63; EXPRESSED IN PLACENTA, SIGNAL = 0.63; EXPRESSED IN LUNG, SIGNAL = 0.56; EXPRESSED IN ADULT LIVER, SIGNAL = 0.56; NT HIT: AJ303140.1, EVALUE 3.60e-02; EST_HUMAN HIT: T19839.1, EVALUE 9.00e-47; SWISSPROT HIT: O14682, EVALUE 2.00e-10
catgtgcatgtgtgtgcaagcaggtgtgggtgtgtccatgcacacatactcatgcagttacgtgatgggaagaaccggccatttacctggataaggcgcacagggttctgcatgatgtcctctcctccaaagagatagagtctttggtctttcacagcgactgcggggtggagcacccccacgggcatgctggccatactctcccagacattgcagatgctgtcatacctttccatggagcccatgagctcctgcccttctccaatccccccgatggagaagatgaagttcttatgggcagtgcttctgtgggagtagcgggccaccagcatgggctcccccagcctccactgattgagtttcagggagaagatgtagacattgtgactgaccagactcttccctgagctgacagccatgccccccagcacatagacgctgcggtgcaaggtgatggcagaggccttgtacagccgtgtcgggagtttggcaaggctctgccattggccggtctgtttgctgtacagtaggacgtccctggtggtctgctggctgtccttccttccgcccaagaggatgaggaaat

SEQ ID NO: 641 - DNA, 576 bp, Homo sapiens
  MAP TO AL121993.2; EXPRESSED IN ADULT LIVER, SIGNAL = 1.4; EXPRESSED IN BRAIN, SIGNAL = 1.3; EXPRESSED IN LUNG, SIGNAL = 1.3; EXPRESSED IN HELA, SIGNAL = 1.2; EXPRESSED IN FETAL LIVER, SIGNAL = 1.3; EXPRESSED IN BONE MARROW, SIGNAL = 1.3; EXPRESSED IN HEART, SIGNAL = 1.4; SWISSPROT HIT: Q9UNX4, EVALUE 7.00e-22; NT HIT: gi14748724, EVALUE 5.00e-72; EST_HUMAN HIT: AL528207.1, EVALUE 8.00e-72
taaccacatgccttctgtgcttgcttggtacttaagaaatacttttaagaatatttacattacccactaagtagtggtcaatgaatgaggtattctttattttttttttctcctccagggtcatcaccaggaaatatggtgtttggctgtaagccccagtggagactatgttgtatcatcgtcccatgacaaatctctgagactttgggagagaacaagggagcctcttattcttgaggaagaaagggagatggtaagaactttaggcttggttacaaatatgccagtaggtatctgacaggctgtcctagttgaagttttctgtctagtgcagttacacctgatgcattgccaagtccaagaaccttcaggagatcttttcaagaccattgtcacccatttcagaagctaggcagagataaagatgccattagggtattatgttgtcaaaggagcagcttctcgcttcctcatttctcttcatatagagaccatgtttttttctctcaaattaatgtatatctatctcatggcaggaaagagaagcagaatatgaggagagtgtggccaaagaag

SEQ ID NO: 642 - DNA, 581 bp, Homo sapiens
  MAP TO AC011636.3; EXPRESSED IN BRAIN, SIGNAL =   9; EXPRESSED IN HEART, SIGNAL = 8.8; EXPRESSED IN HELA, SIGNAL = 3.1; EXPRESSED IN PLACENTA, SIGNAL =  11; EXPRESSED IN FETAL LIVER, SIGNAL = 9.8; EXPRESSED IN LUNG, SIGNAL = 8.8; EXPRESSED IN ADULT LIVER, SIGNAL = 9.4; SWISSPROT HIT: Q15427, EVALUE 3.30e+00; NT HIT: Y18021.1, EVALUE 2.20e+00
  unsure 285
gtgcactcacatgcacacacatacacatatgtacacacatgcacacagattcaaacgtgcatgcaatgcacatacatacacataggcacagagattcaaacatgtacatgcaatgcacatacacacacacatgcacactgactcaaacatgtgcacacatatacacatacacacactaacacatgcacacacacatatgacacacatacgcgcacatttgtcacacatacacacacatgccctaccacaaactcactctctgcgggcgtgagaatgccacttganttttctagttttctagtatttcctaatttatgcatctgcttcctgcctcaccttccatccagggtgccttcagggtctccaaagggcatgttgagcagcctccatggctgaaagcccccgattgcccacaatttccagatgatgccctggagtctcaggcttaaagcttctctactgagagaaaggacctaggacaaagccaggggaggcctccccactcctagcttgggccatgcccaggtctgagtggagggttgggccctggatggacaaggcctggtatgggatgagaggga

SEQ ID NO: 643 - DNA, 580 bp, Homo sapiens
  MAP TO AL136381.1; EXPRESSED IN BONE MARROW, SIGNAL =   8; EXPRESSED IN ADULT LIVER, SIGNAL = 7.1; EXPRESSED IN PLACENTA, SIGNAL = 7.2; EXPRESSED IN LUNG, SIGNAL = 7.3; EXPRESSED IN BRAIN, SIGNAL = 7.2; EXPRESSED IN HELA, SIGNAL = 4.4; EXPRESSED IN FETAL LIVER, SIGNAL = 7.4; EST_HUMAN HIT: AW274282.1, EVALUE 4.00e-83; SWISSPROT HIT: Q16513, EVALUE 5.00e-22; NT HIT: gi5453973, EVALUE 1.00e-85
gtgttggagaaaccacggacaatcatctaactgagtttcagacttaatataatcacttttatattttaagtggaatctaccctgggaagtagtcttgcaactcagatacgtgttttttttttttttgcatgaattggttgaattcatggattatctataagtataaggagatttcatttaggctcatctcaaagtttgaaaaatgctgtttatttgaaaaatattaacttccaattttaagcagcaattcattctaataagtaattttaacaatattttatttacagattgcccaaggactccagatactccaaataatgaccctcgttgttctactagcaacaatagattgaaggccttacaaaaacaattggatatagaacttaaagtaaaacaaggtgcagagaatatgatacagatgtattcaaatggatcttcaaaggtaagtgtagttaataaatgtaactatatagtcagtcattatttgcagattccatagttataaatttacctattcaataaaatttattagtaactccaacatcagtactggtggcatggcactttggcagtcatttgt

SEQ ID NO: 644 - DNA, 578 bp, Homo sapiens
  MAP TO CHR21_63.0; EXPRESSED IN BONE MARROW, SIGNAL = 1.8; EXPRESSED IN HEART, SIGNAL = 1.3; EXPRESSED IN PLACENTA, SIGNAL = 0.79; EXPRESSED IN BRAIN, SIGNAL = 1.4; EXPRESSED IN HELA, SIGNAL = 4.7; EXPRESSED IN FETAL LIVER, SIGNAL = 1.2; NT HIT: AL163300.2, EVALUE 1.00e-11; EST_HUMAN HIT: AW992502.1, EVALUE 2.00e-14; SWISSPROT HIT: P56821, EVALUE 4.30e+00
cattcatgaaggatccaccccagtgatccaaccacctccaaccgggccccacccccagcactggggataacaactgaacatgagatttggtggggacacaggtccccacctcaccacatcacacaatttctctcctttctttccaggtaaccagtttgcaagggcttgccgtatcctccatagatggtgtaattggaaacgcatttgtgggcgtggcggtgtggtctgggggaggagccctagcccccctctctcctccaaaactctcactggtcacagattcacgtgtgtttataattcctcattttaagaaaatatcatgattcccattttacctgccattttcccctcagatggctgagggaagagtctgggatgatgattggctcctgtgctctgagtgtgcaaatgctccaagggtgcagccatgctctgggcactcaagtcagtcttagtcagtgctccttcctcttctgccagctcctcccgttccagtgaccattcctcttgctgaaccggctggagaaggcgcgcgcggtcccaggccgctgtctgaagggctttccatttgtctctgc

SEQ ID NO: 645 - DNA, 590 bp, Homo sapiens
  MAP TO AL035367.1; EXPRESSED IN BRAIN, SIGNAL = 4.5; EXPRESSED IN HELA, SIGNAL = 2.8; EXPRESSED IN LUNG, SIGNAL = 7.5; EXPRESSED IN HEART, SIGNAL = 4.2; EXPRESSED IN ADULT LIVER, SIGNAL = 6.1; EXPRESSED IN FETAL LIVER, SIGNAL = 3.7; EXPRESSED IN PLACENTA, SIGNAL = 5.8; NT HIT: gi14775759, EVALUE 1.00e-82; EST_HUMAN HIT: BF685121.1, EVALUE 6.00e-79; SWISSPROT HIT: P08111, EVALUE 6.00e-04
acctcctggaaggtgcagtcccaccacctcccttgccaccacccatctcccaggtggccaattgaggccagcccccccaacccttgccctgtccctgcccctgcccctgccttaccatctcgaaggaatgtgtcggcaaagtataggcaacgcacgacacccgacaaggagtcatcggcagagcggggctcaatgcggcgctgcacgggcgtcatctccacgtcgtgggggcaggcctgctcagccagctgtgcattggcttcctgcaactgccgggcgggggctcctgaacactgtctccctagcaccccagtggcttgcatcctgctttgcaccctacgttctgttaccattcctctaccacccagcttagttcacccatccctctggagggcccaggggctgccgagggaggagcactgagctaagcaggccccaggggtcccaggccagagccaggccaaggcacaggacacaggcacagctcctgtgcagcccaccccagctcaccttgctgctggcattagcagcccgcttcttgccagagacacgactcttgcgaatgcgccggaaagactggcgcagtgact

SEQ ID NO: 646 - DNA, 517 bp, Homo sapiens
  MAP TO CHR22_179.0; EXPRESSED IN HELA, SIGNAL = 0.86; EXPRESSED IN FETAL LIVER, SIGNAL = 1.5; EXPRESSED IN LUNG, SIGNAL = 1.4; EXPRESSED IN PLACENTA, SIGNAL = 1.5; EXPRESSED IN BONE MARROW, SIGNAL = 1.7; EXPRESSED IN BRAIN, SIGNAL = 1.6; EXPRESSED IN ADULT LIVER, SIGNAL = 1.3; EXPRESSED IN HEART, SIGNAL = 1.2; NT HIT: AB002059.1, EVALUE 0.00e+00; EST_HUMAN HIT: BI753477.1, EVALUE 8.00e-81; SWISSPROT HIT: O15547, EVALUE 6.00e-20
tggcatcacatgcttctctctcgcacacactggctgcatggcgggtgttcaggctgtcagtggggaaaggacttgcgcccccgtcagcaacatcagggcccccacctgaggtggcttcacgaagtcggccacatcccacagccggtttccaagctccttgatctgagtgacggaaacccctttgagtttggtgatgatggaaaactggggttccaggtcccgctcctggtagccttttttggcgaggagagcccacctggggaggagaagtcgggcagtgtggtgtgtccccagcgtgtagtgacaggggcggagctgagccctacatgctcagttctccccccacaccctacaggctcccggcccaacatcgaaggccccacctcctctctggccccacttcccactccagaccccctgaatgagacagaagctccagccatgcatcagagagccaatgccctcagacaatcaccttcactagccagcacccacccccagcctgactagatccagc

SEQ ID NO: 647 - DNA, 561 bp, Homo sapiens
  MAP TO AL035457.13; EXPRESSED IN FETAL LIVER, SIGNAL = 0.53; EXPRESSED IN BRAIN, SIGNAL = 0.5; EXPRESSED IN PLACENTA, SIGNAL = 0.67; EXPRESSED IN LUNG, SIGNAL = 0.49; NT HIT: AF206618.1, EVALUE 1.40e-01; EST_HUMAN HIT: BE777872.1, EVALUE 7.90e-01; SWISSPROT HIT: P15179, EVALUE 4.10e+00
ttcctaatctgcaaaacgggaggtaaccatgctccctaactctggtaaaatgagattgcgaatgcggaacactagaatctggcactgggaagcgtttcataaacattaggtgctgcttccgccgatattattgtgaccatgaagtgacagtacgcaccaccggtgcagcccagtgatggacacaggagaggcttctggtgtcagctcaggggaatctggtaccatttttgtctctaagggtagacagtgggcttatgtaacctacttgctttggagcaagctgactccacccccttgcttccatggtaggccctgattggtttacaggcatccacgcagttcatttttctgcccagtcactggttcatgagcaagcatgtgaccttgaaggtctaatcagggtgcatctagtttgggcccccgtttcccgggatgtagatggggaaaggtgtcgcccctgggatgcagctggccctgctgaggaggctgctggcatggctgtgctgagagatggtcacagttggcgttaaaatcacagatggcattgttaagccattgggt

SEQ ID NO: 648 - DNA, 548 bp, Homo sapiens
  MAP TO AJ239319.2; EXPRESSED IN FETAL LIVER, SIGNAL = 0.73; EXPRESSED IN ADULT LIVER, SIGNAL = 0.65; EXPRESSED IN BRAIN, SIGNAL = 1.1; SWISSPROT HIT: P56558, EVALUE 8.00e-47; NT HIT: gi14759202, EVALUE 0.00e+00; EST_HUMAN HIT: AV707387.1, EVALUE 0.00e+00
cagcaggcttctatctggatggaaagaatagagtgtggtagaattattagagacctctgggagtctttgttgaaaaaggcagatctgctattaataattattcttattttccctattttagattctgaagcgtgttcccaatagtgtactctggctgttgcgttttccagcagtaggagaacctaatattcaacagtatgcacaaaacatgggcctgccccagaaccgtatcattttttcacctgttgctcctaaagaggaacacgtcaggagaggccagctggctgatgtctgcttggacactccactctgtaatgggcacaccacagggatggatgtcctctgggcagggacccccatggtgactatgccaggtaagttgctgataaatcactggaatcttccttgttcctttgaaaatctccgtttgggggagaaacttccaggtgaaattatatgtactaggagcaacattaaaggaaaggtgatagaaagtgagacttgttctcacttcattctcttcatctgcgttgtgtggaggcttaaca

SEQ ID NO: 649 - DNA, 572 bp, Homo sapiens
  MAP TO AC015845.4; EXPRESSED IN BRAIN, SIGNAL = 1.1; EXPRESSED IN FETAL LIVER, SIGNAL = 3.7; EXPRESSED IN LUNG, SIGNAL =   3; EXPRESSED IN ADULT LIVER, SIGNAL =   3; EXPRESSED IN BONE MARROW, SIGNAL =   2; SWISSPROT HIT: P38329, EVALUE 2.40e+00; NT HIT: AF052051.1, EVALUE 4.00e-45; EST_HUMAN HIT: AV742802.1, EVALUE 6.00e-45
ttctgcccccactcaatatccctcctgtttggagatgaaagctcaggaagcatgggcattttcagggagcaaagatgtgttaatatacttccagtggcataacctgagagcttgtttggaggttctagcaagggagcacagctactcatatgcccttgaccgaagatcggtcctcctctgtcggggatggtcatcctcttcagcctccggagggacgcacatggagtgctgagggaggaagtggacacccacctagccagccagatcagccgaatcaaccctgacgatcaatggggtgacagacgttgcagccagatcgccctcacatccagaacttccaagccaatagacttttcagtggaatgaaataaattctggaaaaatgacttccatgaaaaacttttcattttgaggttagatcaaaaactcttgatggattttctaatttgaagacccatacttattttccattttaaaagtaaaacacctcatcaaagaactcttgaaaaatacaaaagaaggggaaaataaaaaaaaaatctagtcatagttctatcaccgaaacacgagca

SEQ ID NO: 650 - DNA, 587 bp, Homo sapiens
  MAP TO AL139149.1; EXPRESSED IN BRAIN, SIGNAL = 0.59; EXPRESSED IN LUNG, SIGNAL = 0.75; EXPRESSED IN FETAL LIVER, SIGNAL = 0.7; EXPRESSED IN BONE MARROW, SIGNAL = 0.62; EST_HUMAN HIT: AU138590.1, EVALUE 8.00e-38; SWISSPROT HIT: P08547, EVALUE 3.00e-36; NT HIT: AF044083.1, EVALUE 4.00e-48
cagcttggtcactgttggtgtatagcagagctactgacttatatacattgcttttttttatcctgaaacgttgatgaattcattgatcagttctaggagcttttcagaggtgtctttagggttttctaggtatatgatcatatcatcagcaaacagcgagagtttggcttcctctttaccgaggagttccagcactccgttgaatagaagtggtgagagtgggcatccttgtcttgtttcagttctcaggggagatgctttcaactttttcccattcaatattatgttggttgtgggtttgtcagagatggcttttattacattaagttatgttccttctatactgattttgctgagggttttgtcataaagggatgtcggattttgtcaaatgctttttctgtgtctattggaataatcatgtcatttttgcaaggtttagaggctttattattgttggtgttataatatactatacagaataattacaaacccaatgttcttttttgatgagaatagtttggaagaaaatttattttctaagagtgaccccaaaatatcaaaaatcaagttcgagtggccagttt

SEQ ID NO: 651 - DNA, 502 bp, Homo sapiens
  MAP TO AC018876.4; EXPRESSED IN ADULT LIVER, SIGNAL = 0.37; EXPRESSED IN BRAIN, SIGNAL = 0.44; EST_HUMAN HIT: AA553661.1, EVALUE 1.80e-01; SWISSPROT HIT: Q9Z0D9, EVALUE 2.70e+00; NT HIT: Y09781.1, EVALUE 3.10e-02
caagtaaccaccaaaacgggcaaaggaaaaaggcagataataccgagtgtcagcaagaatgtagagtaaactgaactccatccaccacaagtagaagtggaaattgacaaaaaccacttttgaaacatgcttggcaacatctttctcaagaagaatacatgaaaagcttgtagccagtaggtccacttctgggtgtttccctagcagaaacgtatacctatgttcactcaccaaaagacgtagaagagtgatcagtgcagctctacccaaatgaccatcaacaatagagtggacaatacattctggtatgcacatctagtagaaagcaatgagactgaaaaatctgaaactgcaataatagtgactcaaaatcataatattgagcaaaggagccaggtacaaaaaaattacagtatatgattccttttatataaaataacaacataggcaaaaataatattagttgtaggtgtcaggataatgattacctcccgtagtgggg

SEQ ID NO: 652 - DNA, 556 bp, Homo sapiens
  MAP TO AL138726.2; EXPRESSED IN BONE MARROW, SIGNAL = 4.1; EXPRESSED IN PLACENTA, SIGNAL = 2.9; EXPRESSED IN LUNG, SIGNAL = 2.7; EXPRESSED IN ADULT LIVER, SIGNAL = 4.1; EXPRESSED IN BRAIN, SIGNAL = 2.7; NT HIT: gi14752142, EVALUE 0.00e+00; EST_HUMAN HIT: BF795913.1, EVALUE 6.00e-85; SWISSPROT HIT: P02261, EVALUE 2.00e-34
tggctggcttttggttttactttttctttcccctcgaaaagtaggtcatctgctctgctgggctttattatctggggacgttacttgcccttggccttgtggtggctcttggtcttctggggcagaagcacgccctgaatgttgggcaggacaccgccctgcgcgatggtgacttcgcccagcagcttgttaagctcctcgccgttgcgaatggccagctacaggtggcgcaggatgatgcgggtcttcttgtcgcgggccgggttgccagccagctccaggatctcggcggtcaggtgctccagcacggccgccaggtacacctgcgctctggccccgacacgctcggcatagatgcctttgcggagcagacggcgctggagcccggccagggaagaccaagtctgggacttcagcgccagcctcgccaccctgcttcccacaaccagatgtctcctgcgaagtagccccctctaatgccaaaccaaaagcagaggtcataaggactatatcccttacacacacacacacacacacacacacaccctaacggcta

SEQ ID NO: 653 - DNA, 519 bp, Homo sapiens
  MAP TO AL049647.7; EXPRESSED IN BONE MARROW, SIGNAL = 0.53; EXPRESSED IN ADULT LIVER, SIGNAL = 0.49; EXPRESSED IN BRAIN, SIGNAL = 0.4; EST_HUMAN HIT: BE904308.1, EVALUE 1.80e-01; SWISSPROT HIT: Q28007, EVALUE 3.70e+00
ggctgcttcctgtgtctttctctggccccttcttctttcctccccttggttctgaggacgcagccccaggcaccacgctcctctctccccagagccttccccaagaactgaatccccatgtggaaaatcagccacccaccttgattcagatgactatgatcttcattcatctcctgagcatgattccagtattccccacgaccactggaggtttccacctgaatgttcttacactcgttactcagagtggctgaaatgtagataatcaaatatcttccagtgaaatatagctcccttttaaacgtattctgtcatccaattgtttgacaattaccaagcattgtcaattcttttttctcaatctctctcctatctgacctttcctctcattccattgtcaagccataatccaggcctttatcccttcatcaaggggtcatcctaatagcttctgcattcatcttaattcaatgagcattcctttagtgccttatgagtagataccgtgaaccaggtgct

SEQ ID NO: 654 - DNA, 546 bp, Homo sapiens
  MAP TO AL137844.2; EXPRESSED IN HELA, SIGNAL = 0.95; EXPRESSED IN BRAIN, SIGNAL = 2.1; EXPRESSED IN FETAL LIVER, SIGNAL = 1.9; EXPRESSED IN BONE MARROW, SIGNAL = 1.7; EXPRESSED IN HEART, SIGNAL = 1.9; EXPRESSED IN LUNG, SIGNAL = 1.7; EXPRESSED IN PLACENTA, SIGNAL = 1.9; EXPRESSED IN ADULT LIVER, SIGNAL = 1.9; NT HIT: AP003132.2, EVALUE 2.10e+00; SWISSPROT HIT: P57415, EVALUE 3.00e+00
ggctcctgactcatggtctcttgttctttctggtttacaatggactcacaataacaacaataatataatacagtgtatcacataatgagtgtctactcactgccaggcactctcctaagcacattccactttctgtaccttacttttaattctcagaacaacccttcaaggtaggcacattcaaccccaaacttagaaatgcagaagcctaggctcagtgaattttaaaaacttacctaaggtccacagtgagcaagtggtaaaactggaatttaaacctacgctggtctggctccaaagcctaaaccctgtggtctcacttcctgcaaacacaatgttgaatttgcgctcacagcaggtggagatgaccctggtcccactgctttgattaagactaaactggagtgaaaaaatcatttttgttcttactaattttcttaaaaagatttgttcacagttccttacttagatggaactgattttttcgggctgtctcatattagatgtgatacaaatggacatgttaggagagctgatgtgaaaggc

SEQ ID NO: 655 - DNA, 536 bp, Homo sapiens
  MAP TO AL121830.11; EXPRESSED IN BRAIN, SIGNAL =   1; EXPRESSED IN LUNG, SIGNAL =   1; EXPRESSED IN PLACENTA, SIGNAL = 0.99; EXPRESSED IN HEART, SIGNAL = 1.3; EXPRESSED IN BONE MARROW, SIGNAL = 0.93; EXPRESSED IN ADULT LIVER, SIGNAL = 0.88; EXPRESSED IN HELA, SIGNAL = 0.8; EXPRESSED IN FETAL LIVER, SIGNAL = 0.94; NT HIT: L32592.1, EVALUE 8.00e+00; EST_HUMAN HIT: BF511467.1, EVALUE 3.00e-03
agcacataggcacctaaccgaagagcactcaccactattcccctgcctcttccctgctaagagaaccccacccactaggttgaggcagcaaatggagcccttctgatctcaaagagggtgcgcctgaccccaggccctgagcatgaatcatgattggtctaaagtggtcattctaatctccctggctgctcagtggtcaaggcagacccttctgcgaccaaagagatgcaaggtggaagtgtgccaaaaagaacaacagtgccccttcttcctccttcctttcttcaatatgaacttggtggctggggctgcagcagccatcttgggaccattaggcaaaggccaggggaaatgcagagccacagcaccacctacatccggggcactgatagtaagaaaaatacaccagtatgtattcaatacgctgtagctggttcttctagtacctgctactaaaatcaatcctgactaactgtcaaccaccatttttttgactgaatgtgacttcctgcagaatgctgcttcaggaatggtga

SEQ ID NO: 656 - DNA, 568 bp, Homo sapiens
  MAP TO AC021311.4; EXPRESSED IN BONE MARROW, SIGNAL = 0.56; EXPRESSED IN BRAIN, SIGNAL = 0.6; EXPRESSED IN FETAL LIVER, SIGNAL = 0.56; EXPRESSED IN PLACENTA, SIGNAL = 0.66; EXPRESSED IN LUNG, SIGNAL = 0.56; SWISSPROT HIT: P78575, EVALUE 9.30e+00; EST_HUMAN HIT: AI791571.1, EVALUE 5.10e-02
agatgcaacattccagctcccaaaagtccctagaatggtttattgctgttccccaccccaaccccattgggaattacattattcctcttccccaaggagtctcattctgacatctaagaaataaccacagctgggctgcttttcagcctctcacagacattttctatgtttcgactagatgttaaagaaaaaattgaaagcaaagaaaataatttattcagtatacataaatcatacttgtttaaagaagaaaattgtaaatataccacactgaatatgtcaaaaatcaagattaacagaactactttgaaaatgtaaatttatttaacaatcagttgctttatatgtttcatctaagcttattaataagttgcctcatattatttattcttcagagattatagacaccagctgatgaaagcttcatcctatgttctgttgtagggtatgctttctttcctccttgcctttccccttctcctcgtccccctcttcttcctcttcctcctgcctcttcttcttctcttgtttttcctcatcctcctgtcccaatcaacattttgtgaca

SEQ ID NO: 657 - DNA, 590 bp, Homo sapiens
  MAP TO CHR22_181.0; EXPRESSED IN LUNG, SIGNAL =   2; EXPRESSED IN BRAIN, SIGNAL = 1.9; EXPRESSED IN ADULT LIVER, SIGNAL = 1.8; EXPRESSED IN HELA, SIGNAL = 0.73; EXPRESSED IN FETAL LIVER, SIGNAL = 1.4; EXPRESSED IN BONE MARROW, SIGNAL = 1.5; NT HIT: AJ308102.1, EVALUE 1.40e-01; EST_HUMAN HIT: BE145813.1, EVALUE 0.00e+00; SWISSPROT HIT: P01353, EVALUE 2.60e+00
aacaatggtgggaaagcaaggactcaagtgacccttgcttttgggtctagagcatcatgtaggaagccagcacagcccatccctttcctaggcgccaccttctggctcctggtgggacttgtaagtcccgtggtcagttacctgattgctcttacggacctgacgctggaaatcctctctctccaaggtccctgcaggagatgggacctgccacagagaatgccgcaagggatgtttctgttgggagctgtgagtggggtggatgtcctctgcctctcttaaatagatgagctagatttgaacctggggctggccaaagggagtctcctctcagaaaccaggatgcagtgggccgtctgtgtcccagccccaaagcagccagggtccagtggattagcacagagccgaccaggcctggagggtggtggtctgggattgggtgagcagccaccagcaggaatagcaattggagggaaggagaagcattgccaagagcaacttagggggccgtgagtgcaggtctctggacagacagcatggtaactggctgaggcaggaagaagcttggtgggctcccatggtgctaataa

SEQ ID NO: 658 - DNA, 565 bp, Homo sapiens
  MAP TO CHR22_164.0; EXPRESSED IN FETAL LIVER, SIGNAL = 0.82; EXPRESSED IN LUNG, SIGNAL = 0.72; EXPRESSED IN BRAIN, SIGNAL = 0.78; EXPRESSED IN ADULT LIVER, SIGNAL = 0.71; EXPRESSED IN HELA, SIGNAL = 0.55; NT HIT: gi14749934, EVALUE 1.40e-01; SWISSPROT HIT: P04597, EVALUE 8.10e-01; EST_HUMAN HIT: BF693424.1, EVALUE 2.00e-01
acactcctcacctcggacactcacttccatactgcctgtccaggcccagccgcaggaccccctctgctggtggctctgccttctctgctcccctccggttctctgttcccctagtagtcctgaagtaagttgtccctcccccaagctgccagtcccactcccgtccccctctttcctcaccaacagattctgattttgttcaaggcagcaatgggacctgctgaaaacacaccccgttgccactcccttgcaactaggggggcctgggacgcagttctggctggggagaaaaaggcacaagtccctcgctgggagtcagccctttctcctctccttgttcttgcgcagaggcctggaagggaggatgccatctgtgacaagcaggaggggagggctggtgtggcaaggacagtgcggttaagggcaagccagctcaagtcctgccagcttggatggtacacctgggacttcctacctgcgacaataacccgtctgctccggcccccacagggaccagcctctgcatacactcttcagtggtccgcctgtgaagccaatttgctga

SEQ ID NO: 659 - DNA, 567 bp, Homo sapiens
  MAP TO CHR21_68.0; EXPRESSED IN BRAIN, SIGNAL = 1.6; EXPRESSED IN HELA, SIGNAL = 5.5; EXPRESSED IN HEART, SIGNAL = 1.3; EXPRESSED IN PLACENTA, SIGNAL = 0.89; EXPRESSED IN LUNG, SIGNAL = 0.97; EXPRESSED IN ADULT LIVER, SIGNAL = 0.91; NT HIT: AB039887.1, EVALUE 0.00e+00; SWISSPROT HIT: P57081, EVALUE 2.00e-22; EST_HUMAN HIT: AW025931.1, EVALUE 2.00e-84
tcctcccacaccttcacttccaacctggggccacctactgaccacctcctgtctcacttgccttcttcattctccctgctgtctgctccaccttcctaaatcctgttcccaccactcccctgctcccaaatctgcagagggctgtccctgctacgggggagccccattctccccaccaaacgctggggcacagaccgggcagacgttgattcagcctgtaccccacataccatgtcccccacgtactgcgtctaacagcatggacaggtgcctgagccttgacagggtagacattgactcagcgtatgccccacgtgccacgtcccccatgtaccgtgtcccacacctgccatgtcccccacctaccacgtcccccacctaccacatctaacagcatagacaggtgccccagctctagacggccacacccgtgtggctccagcaccgaaaaggagtagacgtctccagacttgtcggccaccaagaccttctcctccgaggctatgaaagtcagggctgtacacctccttgccacggtcctagaaggccagaaagacacccccatta

SEQ ID NO: 660 - DNA, 587 bp, Homo sapiens
  MAP TO AL139141.1; EXPRESSED IN BRAIN, SIGNAL = 0.65; EXPRESSED IN FETAL LIVER, SIGNAL = 0.58; EXPRESSED IN ADULT LIVER, SIGNAL = 0.61; EXPRESSED IN LUNG, SIGNAL = 0.61; NT HIT: AB055704.1, EVALUE 1.00e-100; SWISSPROT HIT: P53776, EVALUE 6.00e-31; EST_HUMAN HIT: BI113679.1, EVALUE 4.00e-92
tatatgcaacagctctgcggtttgggccatgtctgtttccaccatcagcagagtgggaaggcacccgccagggcctggcctggttagcagggctgtgtggaaggctcacagtgcctctctctcctcttcctcacagagattccccagtgcgctggctgcaaccagcacatcctggacaagttcatcctgaaggtcctggacagacactggcacagctcctgcctcaagtgtgcagactgccagatgcagctggcggacaggtgcttctccagggctgggagcgtctactgcaaggaggacttcttcaagtaagtcagaacggtccgtctcgtggccctggcctgtctctgcctctccccaagcagtgagggggaagtttgcagcagggtaggccagggagggtggagagtccactctgggaggggcaggtaaatcctggagctgagaggatgccccttgttgaggtcccccttctgatcactggcccatcactgccagaggttcagcctctagacctcatttgatctctgcatggggcaggggtgaggagccagaggccttgggctagatttctccagggtggttga

SEQ ID NO: 661 - DNA, 529 bp, Homo sapiens
  MAP TO AC015930.3; EXPRESSED IN PLACENTA, SIGNAL = 0.75; EXPRESSED IN BRAIN, SIGNAL = 0.69; EXPRESSED IN ADULT LIVER, SIGNAL = 0.81; EXPRESSED IN FETAL LIVER, SIGNAL = 0.54; EXPRESSED IN BONE MARROW, SIGNAL = 0.7; NT HIT: Z54223.1, EVALUE 5.00e-01; SWISSPROT HIT: P14835, EVALUE 2.90e+00; EST_HUMAN HIT: BF684244.1, EVALUE 7.40e-01
aatgttgcagtgctttgtgcaacattacgtcatgttgacacaaactatttttttagagtaacactaacaattgtcttcttaagtaactaatcttttcatcatcaatttccattttttgggaacaagtatttcacatgccaatgtaagtggaaacatgggaaggaggcaccggaagagggaggaatgggagaaggacttcacaattaatgaagacgtgaaaagtgatatgatgactgtcataaaaaataaaaagaaataatgaaaagagccatctgtcttagaaataaccttacctgggtagagcacttgagtcaactaactcttgatgctttttctcatctatgttttttttttttaaactgttccagaattggagagaatgtgcttttcttgtgagcccttatactgctcttgtatagattctgagacaagtggctctggttgcttctgttcccagaggtggcctcttctgtaccacgtgaccacctcagatgactggatggaaggtaggtgtcctggcatgaagact

SEQ ID NO: 662 - DNA, 576 bp, Homo sapiens
  MAP TO AL137062.3; EXPRESSED IN BONE MARROW, SIGNAL =   1; EXPRESSED IN LUNG, SIGNAL = 1.1; EXPRESSED IN HELA, SIGNAL = 0.54; EXPRESSED IN BRAIN, SIGNAL = 0.99; EXPRESSED IN PLACENTA, SIGNAL = 1.2; EXPRESSED IN FETAL LIVER, SIGNAL = 0.96; SWISSPROT HIT: P42664, EVALUE 5.50e+00; EST_HUMAN HIT: BI462217.1, EVALUE 1.00e-112
acttcccaaatttgcctgtggtttcaaaaatattaaatgaatttgtatatttccttgctgtgtgtaaatttagtgcaacatcattaaggttcactggatgacataactctctcaatactcttaggtggtacatgtgatcaacttagaccaggataacatatgccatctgactggtcagcaggactaagtctgattacctgaagtatgaatgattagctcttggcacagtttgatggccatttgttcctgcctcttcagtagactggagatctgtgacttgagaaattcctcctccatggacaagttgttggagttgcccagttgctgggataagttatcctgctgctgttggatggttttctgaagttgactcaatttctctgaatctgagttaatgtcattagatatctgcaaaactccaagacatgacaggagacaagttcatatattcttctattcttataactgtagataattctcgtgacagaaacatttcttaattgttcaagatttattagtagctcttagtatttgaggtatcatgaaagaaacaaaccagatgcctttctattccaa

SEQ ID NO: 663 - DNA, 545 bp, Homo sapiens
  MAP TO AL118512.8; EXPRESSED IN BONE MARROW, SIGNAL = 1.1; EXPRESSED IN PLACENTA, SIGNAL = 1.1; EXPRESSED IN LUNG, SIGNAL = 1.1; EXPRESSED IN HELA, SIGNAL = 0.59; EXPRESSED IN ADULT LIVER, SIGNAL =   1; EXPRESSED IN BRAIN, SIGNAL = 1.1; EXPRESSED IN FETAL LIVER, SIGNAL = 0.86; SWISSPROT HIT: Q10656, EVALUE 2.30e-02; EST_HUMAN HIT: AW614107.1, EVALUE 7.60e-01; NT HIT: AF156100.1, EVALUE 5.00e-32
tcattacgagatgctggctgtggaagacaaagggcacattactactcaggcagatgaggagaatccttcaacatctaagttacaagaaagttcatctagagttactctcgaagtagttatatgaactgatacccaggacagttcagcaccatgtaaatgtactaattgttgttcatctacctattataatcagttttagttacatggatgaatgtcattttaagtgacacaaaaaaccacagctgcattatttgctttcaagagctgattacacttaccccaaatgttgacattgtagtttttttcagtttttccagcaacatttgttgcttcacaagtgtaacgaccagtgtcttgaacctgagcatcttcaatctgaaaacaaaatcatcctttgaaatcacactttctatttcacttggggttttttaattaatactatttgtgatctatttcttatttttattctgaagattcacatacatataaaaaatagacaaaatagcaatataaatggctatatacccatcacccagtttcaacac

SEQ ID NO: 664 - DNA, 575 bp, Homo sapiens
  MAP TO CHR22_209.0; EXPRESSED IN HELA, SIGNAL = 2.7; EXPRESSED IN FETAL LIVER, SIGNAL = 1.8; EXPRESSED IN HEART, SIGNAL = 1.3; EXPRESSED IN PLACENTA, SIGNAL = 0.8; EXPRESSED IN ADULT LIVER, SIGNAL = 0.97; EXPRESSED IN BONE MARROW, SIGNAL = 1.8; EXPRESSED IN BRAIN, SIGNAL = 1.8; SWISSPROT HIT: P44087, EVALUE 8.40e-01; EST_HUMAN HIT: BE877601.1, EVALUE 2.00e-01; NT HIT: X93494.1, EVALUE 5.50e-01
gggattgggtgttgtaatggtcacagccttacagaaaaggtggaaatgaatttgactctagaatggaagtccagtcaatggagtgaagcagaacattggacaggagaatccaggcacctgcggcccagtccagtctagcacaaactcactgtgggctctcagatgtcccttttcctttctgaatctctcctgtctattcccacttctctccaaatgtgtgatgtcagatcacacagaacgccccagccacatccaggcaaggtccctcaacaattagtccaggcaggacaacaaactctaaccacatatctgtccccacagcttcactgaaagtactcttactaagatcatccttgtcgttgaaagaccttcctcctcctcctcctccttcatcctcctcctccttcctcctcctctcctcctccttcttctccttcttctccttctttcttcctcttcttcctcttcctctttttctccttctccttctccatctcctcttcttcctcctcctcctcctctttcttctttcatcagaagcatttgactaaggagccatcctctcctttgcaaaa

SEQ ID NO: 665 - DNA, 545 bp, Homo sapiens
  MAP TO AC020698.2; EXPRESSED IN FETAL LIVER, SIGNAL = 0.64; EXPRESSED IN BONE MARROW, SIGNAL = 0.59; EXPRESSED IN BRAIN, SIGNAL = 0.67; EXPRESSED IN PLACENTA, SIGNAL = 0.63; EXPRESSED IN LUNG, SIGNAL = 0.6; EXPRESSED IN ADULT LIVER, SIGNAL = 0.65; SWISSPROT HIT: Q9Y493, EVALUE 5.90e-01; EST_HUMAN HIT: BF858834.1, EVALUE 7.60e-01; NT HIT: AE006738.1, EVALUE 5.20e-01
gggccataaaacctggaaaggacaagtgcagacaactgaaacttctcttccagagctaatttttgctcattatcttatgttttatggtcagcaattccgactgggccttgacaaacacttgctcatagccagttggctgtgtcagctgaaggagaggttgcctgagagatttctcatcggttgtgctttgaatcaacgtggccaatgttggaatgccaggagggtgtgcagctgtgagcagggccagcttcacaggtgcatccagaagactccaaagcttgttttcctgacaaggcctgggtataattttcctagtttgacaaaagctgactgtcagagcaatctgttcatttgacacatttgttctcagcagaatatgaagagcaggtaacagagcaagggaatggacagtttcagcatgttcagcaagaagagatcctgtgttaaaacgtgcagcattctggggaaaggatttgtgttttatgcgtggccagagaacctggtgttaaatgtgaattctcagttcccactgattcacgtgtctg

SEQ ID NO: 666 - DNA, 502 bp, Homo sapiens
  MAP TO AL136147.2; EXPRESSED IN HELA, SIGNAL = 0.51; EXPRESSED IN FETAL LIVER, SIGNAL = 0.82; EXPRESSED IN BONE MARROW, SIGNAL = 0.94; EXPRESSED IN LUNG, SIGNAL = 0.89; EXPRESSED IN PLACENTA, SIGNAL = 1.2; EXPRESSED IN BRAIN, SIGNAL = 0.92; NT HIT: AF418272.1, EVALUE 2.00e-09; SWISSPROT HIT: P08548, EVALUE 6.00e-32; EST_HUMAN HIT: AV720963.1, EVALUE 8.00e-10
ctctgaggccagcattatcctgataccaaagccaaagacactgaaaggaaatgaaactacagactaatatccttgatgaatatagatacaaaaataatactcaacaaaacattagcaaactgacttcaacagcacattaaaaggatcatacaccacgatcaacggggatttatccctgggatataaggatgatttaacacatgaaaatttgacacaccacactgagagaatgaagatattaaaaatcacatgatcatctcaatccatgcagaaaaagcatttgacaaaattcaaactcttgtgataaaaacactaagcaaactgggaatagaaagaaaatatctcaccataataaaggtcatatatgaaaagtcgacagctaacatcatatttaatggtaaaaaaactgaatacttttcctctaggaccaggaacaaaacaaagatgaccactcttgccacttctatttagcataatactagaagccctaggcagaaaaatt

SEQ ID NO: 667 - DNA, 583 bp, Homo sapiens
  MAP TO AL135920.4; EXPRESSED IN HELA, SIGNAL = 0.58; EXPRESSED IN FETAL LIVER, SIGNAL =   1; EXPRESSED IN LUNG, SIGNAL = 1.1; EXPRESSED IN ADULT LIVER, SIGNAL = 0.98; EXPRESSED IN PLACENTA, SIGNAL = 1.1; EXPRESSED IN BONE MARROW, SIGNAL = 1.1; EXPRESSED IN BRAIN, SIGNAL = 0.98; NT HIT: U45983.1, EVALUE 7.00e-16; SWISSPROT HIT: Q62210, EVALUE 5.60e+00; EST_HUMAN HIT: BG741873.1, EVALUE 1.00e-24
gccattttggctatttcaccattagtcaactaatgaactactggaacctctttagtgatattaaaaatttctttgatagtcacttcttccatattactgatggactctgagggtatattttttgcatatgtaaggaggtcagacattattttgttctcactttacatacataattattcagtcacttccttgtttaccatcatcactgaaaacagttgcaggccagaggctgtgccaggtatgcacaactgtatctttagtcactgtgttccaagtgttagcaaaaacatataggacaaccttcacgccaaactccttctgaaaaccttccacacccatgcctctgttcactgctgctagcatactgttcaaaaagtgtcttatatttactcttcattgatgcaaggataccctggtaacagggctgaagtaagaagtcacatttggggaaaagtacattgcacaaacagtatttttgatgacaattttagctggaggatgagtaaaacagttataaagaaacaacacaatcttgcagtcattttccaatcagcttccctgtagtgagcatcagctgctggta

SEQ ID NO: 668 - DNA, 524 bp, Homo sapiens
  MAP TO AL139141.1; EXPRESSED IN FETAL LIVER, SIGNAL = 1.9; EXPRESSED IN BONE MARROW, SIGNAL = 2.5; EXPRESSED IN HEART, SIGNAL = 2.1; EXPRESSED IN BRAIN, SIGNAL = 2.5; EXPRESSED IN PLACENTA, SIGNAL = 2.6; EXPRESSED IN HELA, SIGNAL = 1.3; EXPRESSED IN ADULT LIVER, SIGNAL = 1.5; SWISSPROT HIT: P53776, EVALUE 1.00e-36; EST_HUMAN HIT: BI113679.1, EVALUE 2.00e-96; NT HIT: AB055704.1, EVALUE 1.00e-111
gcatgagtagggctctgagggatgggcaggtgggacgccatgagaagggcacctcaggcagagggcgtggcccaaacaaaggcctggagaggggaccatgcggggccatgctgcttaccgttctgcttggctgtctcgtagtcttccttgcacaccagccgcccgtcctccatgaggtagaattcgtcccccgtggccagctgccggttgcagatgatgcaagcaaagcagtgcaggtggtagacaaagtcctgggccttgcggaccacctgggttggggggataccctgctggcaggccgtgcattttgtgccgaagcgcctgtcagggcagcaggaaaggattagggcacacagggagcaagggatctggcttcccccaacttcctggagcagcctccctcctaccccaccactccgggactccatgagcctcaccccccagtcacccagagcttaccgtctggtcctctctgcctccatctagcttcattgctttgtgcctgggactcttcaaccaccaaa

SEQ ID NO: 669 - DNA, 572 bp, Homo sapiens
  MAP TO AL133553.2; EXPRESSED IN BONE MARROW, SIGNAL = 1.5; EXPRESSED IN BRAIN, SIGNAL = 1.5; EXPRESSED IN ADULT LIVER, SIGNAL = 2.1; EXPRESSED IN LUNG, SIGNAL = 2.1; EXPRESSED IN PLACENTA, SIGNAL = 1.7; EXPRESSED IN HELA, SIGNAL = 1.4; EXPRESSED IN FETAL LIVER, SIGNAL = 1.7; EXPRESSED IN HEART, SIGNAL = 1.6; SWISSPROT HIT: P23142, EVALUE 4.80e-01; EST_HUMAN HIT: BF694934.1, EVALUE 0.00e+00; NT HIT: gi14730471, EVALUE 0.00e+00
acagtaatctggaagggggcttgattgccatgattaatgcggtttaaatatgtggaataggctttggagagttccttagtatggataggcggacacagctatataaactatgaatgtggtctgatattcaatggtcccattggcactgtaggatgaggctcggaccctcatgcggtaggtctctgcttctcgtagtggtcgtgttgtatacaccactcctttcaggttttcatccctcaaggcaaaaggaacagtctgttcctcatctaccatgaggaaagttgtcctgggatgcatcactccatcctgtgtgtatgcaaccagccggattaaatcttgattggtggctattccaaatgggagggagacgagtttgtattccaaggcatatgggctcaaggcacattccaaatcattgggtggacagttcttgaggcagaacctaaggacaacaaacatatcaaatacacatagttatctggaagtaggaggaggcatgatataggtgatcatgatccatgacaacttttaggcactgcatgcagtaggcagcctggctgtaaaagcggtaa

SEQ ID NO: 670 - DNA, 557 bp, Homo sapiens
  MAP TO CHR21_69.0; EXPRESSED IN HEART, SIGNAL = 1.5; EXPRESSED IN PLACENTA, SIGNAL = 1.1; EXPRESSED IN BRAIN, SIGNAL = 1.8; EXPRESSED IN LUNG, SIGNAL = 0.94; EXPRESSED IN HELA, SIGNAL = 5.3; EXPRESSED IN ADULT LIVER, SIGNAL = 0.69; EXPRESSED IN BONE MARROW, SIGNAL = 1.8; SWISSPROT HIT: P37304, EVALUE 1.40e+00; EST_HUMAN HIT: H63771.1, EVALUE 2.00e-35; NT HIT: AL163300.2, EVALUE 2.00e-50
ttttaaccccatcaagcagccattttcatctggtttcccacattcatcaactcacctgcgatttacctaatttccaacgcaactatcaactctgattaggtagaagtcagagagacagggcctattttacttacctcctccacaagatgagccccagactgtggggcaggaccatgggatcctcttagctcggctagagctgaatgctgagctctagtgtttgggcggatttgcgtgttagaattgcatttctcttggcaacagagcatcttcctacctgggaaagatgagcaaactggaaacctgtattagaaacagtagggcctcagaggtttaaaccaaaaagtatcttgagacagggctcaatcaatttagaagtttattttgccaaggttaaggacaatgcctgggaggaaaaaaaacacggtatcacagaaacagtctgtggtctgtgcctttctccaaagatgactttgagggcttcagtatttaaaggggaaaagtgggctggaggggaaagcggaacagtgtggtaatccacacgttgcaagagaaaa

SEQ ID NO: 671 - DNA, 532 bp, Homo sapiens
  MAP TO AL137855.1; EXPRESSED IN BONE MARROW, SIGNAL =   3; EXPRESSED IN PLACENTA, SIGNAL = 2.9; EXPRESSED IN LUNG, SIGNAL = 2.6; EXPRESSED IN ADULT LIVER, SIGNAL =   4; EXPRESSED IN BRAIN, SIGNAL = 2.6; EXPRESSED IN FETAL LIVER, SIGNAL = 2.6; EST_HUMAN HIT: BF976886.1, EVALUE 1.90e-01; NT HIT: AY051712.1, EVALUE 2.00e+00
ggcaaactgaagagctgaggaaatgatgagagttcagtgaaactgaggcatctagaagtagcagaacataatttcaaagaagaaattggtgtacagacaataagctccagaaatatgcatatgattacccttaagatgcatatgatcatatcatatgtgtatatcatgatatgcctatcatatcatatgcatatgataacctatgaatgcatacggcagaagcccacttagctgattaaagaacaactagagaattctaagccaagcaattccagagtgtataaaggagcttgaattctgagcagcaagaggagggatatttcaatgaagactccatgattgggttaaacaagcccaagagtaaaggctattctagacctgtcatagcaaacttcaaaaacaagcctttaaatgttcaaggtgatctgaaagaaactgccaaaatgaacttcaacactgtataaaggaagacaacataatctagaattcagtaactaaatatttacagtggtcaacatcctgtcccacaaaa

SEQ ID NO: 672 - DNA, 535 bp, Homo sapiens
  MAP TO CHR22_183_1.0; EXPRESSED IN FETAL LIVER, SIGNAL = 0.43; EXPRESSED IN LUNG, SIGNAL = 0.53; EXPRESSED IN ADULT LIVER, SIGNAL = 0.48; EXPRESSED IN BONE MARROW, SIGNAL = 0.53; EXPRESSED IN PLACENTA, SIGNAL = 0.51; EXPRESSED IN BRAIN, SIGNAL = 0.44; EST_HUMAN HIT: BE044430.1, EVALUE 2.00e-10
aggaaaggcaaatgggagtcaaaagactcttctaagatgagtggttattaagaaatgaaataaaatgaaaattgatggggttaaaacaaacgtctttacaacactatcaaaggttataatagctttgatagtggctattatatatagcttggctataatagtcctctaaagacaaaccaggttacaattcccttcctgatgtttttagttgatgccctaatggaataggtttctttttctgttctgacacacaagttctcttctgattgtcaaattattggctaaagggagcccctgctggtccccaacattataaagcccgacaccagtttttagttttctgctttctgcatttgctccagattggagaaatttaagaaaaatcaaaagacacggagttaaaatgagagagctgacattgcctggggcaatgttgaggcaaattacgataatgattgacaaaagggcctgaggcccttcacccagcccccctgctggaaacccagattcactctcaccagggaagataaaacgg

SEQ ID NO: 673 - DNA, 512 bp, Homo sapiens
  MAP TO CHR22_152.0; EXPRESSED IN PLACENTA, SIGNAL = 0.41; EXPRESSED IN BRAIN, SIGNAL = 0.44; EXPRESSED IN LUNG, SIGNAL = 0.5; EXPRESSED IN HELA, SIGNAL = 1.2; EXPRESSED IN FETAL LIVER, SIGNAL = 0.4; EXPRESSED IN BONE MARROW, SIGNAL = 0.4; NT HIT: AF253417.1, EVALUE 5.00e-07; SWISSPROT HIT: P11369, EVALUE 2.00e-03; EST_HUMAN HIT: AI989613.1, EVALUE 8.00e-07
tgaagtgcatacatcttttacgtgtatagcttaaggaatgtttatatttgtatagacctatgtactcacctcccagatattggacatttccagcatccaaaagagtctcccatgcctttccctgccagtgcacagccctctagaggcatcctgactcctgtcacccttttgcttcctcttgaacttcccataaatggaattatgtagtgtgtgttcttcagtatctggcttcttttgttcaatattatgtgtgtgagattcctccatggtattgggtataggaggagtccattgatttttattgtggtgtagtattcccttgcagggataaaccacaatttatttacacagagctgctatgggtttctttgtccatgtcttttggtgactaccccctccccccagtttctgttgggtatatattcaggagcggaattgcagtgtaggccaaaaagtctaccaatttacaacactctatgagaattttctttacatcctcaccaacactggtg

SEQ ID NO: 674 - DNA, 580 bp, Homo sapiens
  MAP TO AC015896.4; EXPRESSED IN HELA, SIGNAL = 0.56; EXPRESSED IN BRAIN, SIGNAL = 0.76; EXPRESSED IN FETAL LIVER, SIGNAL = 0.74; EXPRESSED IN BONE MARROW, SIGNAL = 0.74; EXPRESSED IN PLACENTA, SIGNAL = 0.88; EXPRESSED IN LUNG, SIGNAL = 0.87; EXPRESSED IN ADULT LIVER, SIGNAL = 0.77; NT HIT: AF189251.1, EVALUE 0.00e+00; SWISSPROT HIT: P40085, EVALUE 4.30e-02; EST_HUMAN HIT: BI561033.1, EVALUE 4.00e-89
gctggaaagcaccctatcagtagatacctgccctctgtgttcatttgttaagattgccaacatctaatagtaattcttacttaaaatctttatattctatacttggacagaaaattttacactgtcgagtagtcatttagtttaacctcccttgtttgaagtttttaaaagatcaacataattcttatttttacctttgtatgccagtgtatatcgagtaaagattattgtttttgtgagaacatacagagtaaaaattatatttttattacttcttgtatgtttcagggacagacgtttgcttcagcctgcccaggtgtgtgacattttgaagggtgtcattttggtaatctgctattttatgatgcactatgttgactactccatgatgtaccacctgataagggggcagtccgtcatcaagctctacatcatctacaacatgctggaggtaagggccttgcttaccccgcacaggcctggccagggcactcagcttcaagtcttcagttctgaaggtacctgagagtcaagaatgctctaccgactctagttatggtgcttctggcctttactgtgc

SEQ ID NO: 675 - DNA, 588 bp, Homo sapiens
  MAP TO CHR22_110.0; EXPRESSED IN BRAIN, SIGNAL = 0.72; EXPRESSED IN PLACENTA, SIGNAL = 0.74; EXPRESSED IN LUNG, SIGNAL = 0.74; EXPRESSED IN ADULT LIVER, SIGNAL = 0.68; EST_HUMAN HIT: AA809258.1, EVALUE 2.00e-07; NT HIT: AF111167.2, EVALUE 6.00e-04; SWISSPROT HIT: P12978, EVALUE 5.00e-01
tcccaagataactaacccgcatccataactaacccactgtcatgataactaacccactctcataactaacccactccaaagataactaacccactcccaagataactaacccacacccatgataactaacctactctcatgataactaacccactcccaagatagctaacccacacccatgataactaggcctctctcatgataactaaccctctctcataactaacccactcccaagataactaacccatgcccatgataactaacccactcccatgataacccactctcatgataactaacccactcctccgtcccagtgctgtgctgtcacctgctgccaaaaggtggcataaccagttaccctcagaagccagaaccccaagttccacgctgcaatccccatcccaagctggcggcaggagcatgccctctgccacttccctggggcctggcaaagccctgcgaactgcagggacaacccccctggagagtcacagcaggagaagtcctccacttcttccattacctccatgctccctcctcaccaccccgacactgatgtgggcctgggatgctgatgcaact

SEQ ID NO: 676 - DNA, 545 bp, Homo sapiens
  MAP TO AL137851.1; EXPRESSED IN LUNG, SIGNAL = 0.71; EXPRESSED IN ADULT LIVER, SIGNAL = 0.82; EXPRESSED IN FETAL LIVER, SIGNAL = 0.73; EXPRESSED IN PLACENTA, SIGNAL = 0.72; EXPRESSED IN BONE MARROW, SIGNAL = 0.63; EXPRESSED IN BRAIN, SIGNAL = 0.67; EST_HUMAN HIT: AA612745.1, EVALUE 1.00e-05; NT HIT: AF172642.1, EVALUE 8.00e-03
ttgttaagggcacagaaaacctgttatcattgtactccatcgtttctttaagttttccctgagaataccccgtagaataagcttcagacaactagttaatggtgaacatttaaaatgtgattactcacagaaataaagctaagtaatggttaaaagtcagagactacagtatgcagtgtctatatgcactgactgcctacctgtctgtttctgtctgtctttctctctgtctctcggtctctttctttctctctttctctttgtttcttcctcctttctccctttttctttctctctctgtctctctctctctgtctctctgtgtcactctctgtgtctctttgtctctttctttgtctctttctctctctctttctttctctttcttcctacctgccaatgtatatttaaatatatttcagaggttgagaagctcttaaatctttattttgaaaactagtaaataaaattaaaatcaagcatttattctgtctttcctatatgaactctaccactgagaagaaacaaaatggcagataggggaa

SEQ ID NO: 677 - DNA, 520 bp, Homo sapiens
  MAP TO AL136987.1; EXPRESSED IN BRAIN, SIGNAL = 0.89; EXPRESSED IN HELA, SIGNAL = 0.64; EXPRESSED IN LUNG, SIGNAL =   1; EXPRESSED IN ADULT LIVER, SIGNAL = 1.3; EXPRESSED IN FETAL LIVER, SIGNAL = 0.89; EXPRESSED IN PLACENTA, SIGNAL = 1.1; EXPRESSED IN BONE MARROW, SIGNAL = 0.82
gaaacaaaagcaggcagagcctgatcatgggtgaggaaaattctctgttctctattaaccaccatatatttgctatgcgatcttaagtaagtttctttatccctttgagcctccatttccttatctaagatatgagtaattgtgcatacctcataagattgctctaaaaatgaagttttatcgtcttcctagtcagactgctcaatatgatccattttctctggatctggtaggggtgtataagaaaaaagtgaattgtaatagccagacacatgtgacttgggtccttagcatgtggatggaaaggtaagctcaacatgacactcaggctgactttgcttgccttcttttttacatttgttctatttcagcatgactgtattgtttccacattttttaaaaaacactgcaagtaatatgaaaacagtaagcagtgctttttcaaaataacagtacaatagtaaaggcactattgcctgtcagagctacaacagagcgctgcctgcatatccttcttcca

SEQ ID NO: 678 - DNA, 514 bp, Homo sapiens
  MAP TO AL121836.9; EXPRESSED IN FETAL LIVER, SIGNAL =   1; EXPRESSED IN BONE MARROW, SIGNAL = 0.93; EXPRESSED IN BRAIN, SIGNAL =   1; EXPRESSED IN PLACENTA, SIGNAL = 0.97; EXPRESSED IN LUNG, SIGNAL =   1; EXPRESSED IN HELA, SIGNAL = 1.3; SWISSPROT HIT: O51042, EVALUE 2.10e+00; EST_HUMAN HIT: AI821149.1, EVALUE 7.20e-01; NT HIT: U32775.1, EVALUE 4.90e-01
acaaagctacccacccagtgagcatatcatgcctggggtttactgaatgaagcaatgaagatatcatatccttccattccctgatcgagtgatcttgataaaatatgggaaagtcatgagtttgaaaagggcattttacaatcataactctaaaactcagaattttattatatatgacatggattcatatttccacaagctttcatgatcagtaattactctagtttaaaccatttggattcattcacatcaaggtggatgaggaaattattggaattctaacatactcttattgttggcagtacagacttactttttatcttcataggcttgtaattatcaatacactggaacagggtcaaaacagaaattatccttaccgtgatcatgaccctactaaaatcctcatttttaccttaatcacttgctgcatcaaccattacaatttccttattttgtatgattttcctgagtccttttacatctagtagtaagtgaatgttgaaggcagctg

SEQ ID NO: 679 - DNA, 597 bp, Homo sapiens
  MAP TO AL133543.2; EXPRESSED IN BRAIN, SIGNAL = 1.8; EXPRESSED IN HELA, SIGNAL = 2.7; EXPRESSED IN FETAL LIVER, SIGNAL = 1.9; EXPRESSED IN PLACENTA, SIGNAL = 2.2; EXPRESSED IN LUNG, SIGNAL = 2.4; EXPRESSED IN BONE MARROW, SIGNAL =   2; EXPRESSED IN ADULT LIVER, SIGNAL =   2; SWISSPROT HIT: P35658, EVALUE 2.60e+00
gtgacgtgaaccaaatgcagaaagacagagtgaggaggcagaggtttgacggaagggtggtaactgtagttttgcagtgtggagtcagaagtatgtggacagcactaggagaagctgtgctattttacgcatagacacggcgcttggaggagaggtctgggctgaagtcatggaattggttgtcggcatagttaaaactaagagtgggtcacagctgctgggcagagcatgcagaatgagagagaacaccgatctgagaatccaaaccagtcacaggagccagagtagaaaggatgagctcacatctgtaatgaatcacagtaacagtgggcattcagtacctgcgacatgtcagacactgcatgggccaaatcacattatgcttgacaatcttctgagggcatacagtatggagaaggtatggagggactaagagtctgcccagggttacacagcctgtattgtacctgactcatcttactgccctctttgatcagttattctgtcagtatgtgaagaatttattacgttaaagtattggttttttaattgtgtcggcattaccaaataaagcccaggctcctgcttcatctctgt

SEQ ID NO: 680 - DNA, 596 bp, Homo sapiens
  MAP TO CHR22_167.0; EXPRESSED IN BONE MARROW, SIGNAL = 0.55; EXPRESSED IN BRAIN, SIGNAL = 0.62; EXPRESSED IN LUNG, SIGNAL = 0.63; EXPRESSED IN FETAL LIVER, SIGNAL = 0.59; EXPRESSED IN PLACENTA, SIGNAL = 0.67; EXPRESSED IN ADULT LIVER, SIGNAL = 0.69; SWISSPROT HIT: P38898, EVALUE 3.90e-01; NT HIT: AF288742.1, EVALUE 8.90e+00
tgccagagttccaattcctccacatcctggacaatacctgttatcttctattttttgatagcagttattctaacgggtgtgacatcctccctgccttgtaaatatgggaactgaagcttgaaggtggtgagtaacttgcccaaggccaggcagcaatcactacagcagtcatcgtcactgggcagatgtctcaacacatcagccccactcacactgccaccaggaggccagctcgccgctgtcacagtgccagccaatagcacacacaagtacttcaccttcgctccagtctgatgctccctgaggccaacaggagccctcaggcacgccccatgccactgcagccccctggccagccagctggacccgaacctgcctagacctggccatgctcctccccatgctgccccaccctcagcctctagcagccttgcccccttctcccccacttcccaccacaggccctgacttcccagggtctctgtcccctcctccctcccccttgcagcatggaggtgggaaggctgcctcttctccaggtgaaagaaccaggtgctctcgggatctctccttatcctccttgcccatttacctga

SEQ ID NO: 681 - DNA, 585 bp, Homo sapiens
  MAP TO CHR21_71.0; EXPRESSED IN BRAIN, SIGNAL = 1.6; EXPRESSED IN HELA, SIGNAL = 6.1; EXPRESSED IN FETAL LIVER, SIGNAL = 2.1; EXPRESSED IN HEART, SIGNAL = 2.1; EXPRESSED IN BONE MARROW, SIGNAL = 1.6; EXPRESSED IN PLACENTA, SIGNAL = 1.2; EXPRESSED IN ADULT LIVER, SIGNAL = 1.6; SWISSPROT HIT: P04080, EVALUE 3.00e-19; EST_HUMAN HIT: BG036950.1, EVALUE 0.00e+00; NT HIT: AF208234.1, EVALUE 0.00e+00
ttaggatcacaagtgcacgctctggtagacggaggatgactttgtcagtcttctggctgaagggccttgtccaaagtcaggatcagaaataggtcagctcatcatgcttggctttgttggtctggtagttagataaggtcaagggcttgttttcatgagggagagattggaacactcgcaggtgtacgaagtcctcgtcgccgacgtgcacctgggaagagagcggagtgagcgaagcctctgatcccaagtcaccttgctgcgcccctccaggtcattagcagccagctgaagacaatcttgtcttctcctgcatgtgcaggggatgcctcacatcccacacttgtttccttggggttcttagctccccagaagccctagtcctcctgaaaggccgatggacacacacagtaggatgcttatctcagggggcagccacagggcgccccagcacctaagaccacacagcccgggcctgcacaggcggtttcctaccagcacccgttcggggcaggccctcctgaggcccacactctaccttgatgaagtagtttgtccccgcgaccacctggctcttgaatgaca

SEQ ID NO: 682 - DNA, 583 bp, Homo sapiens
  MAP TO CHR21_26.0; EXPRESSED IN PLACENTA, SIGNAL = 0.84; EXPRESSED IN BONE MARROW, SIGNAL = 0.9; EXPRESSED IN LUNG, SIGNAL = 0.67; EXPRESSED IN BRAIN, SIGNAL = 0.99; EXPRESSED IN HELA, SIGNAL = 2.7; EXPRESSED IN FETAL LIVER, SIGNAL = 0.87; NT HIT: AL163278.2, EVALUE 1.00e-14; SWISSPROT HIT: P11260, EVALUE 1.00e-03; EST_HUMAN HIT: BG950320.1, EVALUE 1.00e-21
aatgtgccataaagaagacccttttaaattgtatctttttcagaatctctgaacttcctgtatctgtatgtctaaatctctttctagacttgagaagtcatatattattttgttgaataggttttctatacctttcatttttgtcttcaccttctggaacattgaaaattcaagtatttggtcactttttattgtctcacatgtcaaataagcattgattattctttttatctgtttctttcctttattattttctgtctgggttatttcaaaacactctcttcaaggtcagaagaatgtatcttctgctatatctagtcttctgttgaagtttttaatgtattttttattttattcaataatttcttcagttccagatctttgattcttttttacagtatctatctgtgtttgtccattctcatgatgctataaagaaaggacaaagactggataatttatacaagaaaaaggtttaattgactcacagttccaaactgcccgggaggccttaggaaacttacaatcatggcagaaggcaaaggagaagcaggaaccttcttcataagggggcaagacaatg

SEQ ID NO: 683 - DNA, 569 bp, Homo sapiens
  MAP TO AL137846.1; EXPRESSED IN PLACENTA, SIGNAL = 6.7; EXPRESSED IN LUNG, SIGNAL = 6.5; EXPRESSED IN BONE MARROW, SIGNAL = 5.8; EXPRESSED IN ADULT LIVER, SIGNAL = 5.9; EXPRESSED IN HELA, SIGNAL =   3; EXPRESSED IN BRAIN, SIGNAL = 5.6; EXPRESSED IN FETAL LIVER, SIGNAL = 4.6; EXPRESSED IN HEART, SIGNAL = 4.7; NT HIT: X84705.1, EVALUE 1.40e-01; SWISSPROT HIT: Q57862, EVALUE 2.40e+00; EST_HUMAN HIT: AA219159.1, EVALUE 2.00e-01
gcaggcagaagaatttccagcaacacacggctatgaagtccatatatacgtgccctctgaggtttttatgaagtaaacatgctgctaaatttgcacccaatttaacagttgaaaatgaatatagacgaaacatttgccatcttaaagtgcactaatttgatcctgtgcaggacaactttcaaaatcaagtcatgtggaggtatcaaaatatctatacaaaggttgtacttgagtataaaaatacagaaaaggttgtactttagcataaaaatacagaaaaggttgtactttagtgtaaaaatacagaaaaggctgtactttagcgtaacgatggcaaatctgaactccctatccatgttcctaagttctcacttaattgtaagattcttctgcccacaaggtgagacatccagcatgcttactactctgtcccacatctttctcactgctcagaggccctgtaaactgggacttagtaggtgcattccagtaattaggaaactgtataaccagtttatctggagagagaattctacctggatggccctggcagtgaccccaagtctttc

SEQ ID NO: 684 - DNA, 582 bp, Homo sapiens
  MAP TO AC016687.2; EXPRESSED IN PLACENTA, SIGNAL = 0.36; EXPRESSED IN BONE MARROW, SIGNAL = 0.42; EXPRESSED IN BRAIN, SIGNAL = 0.47; NT HIT: U52109.1, EVALUE 3.60e-02; SWISSPROT HIT: O34996, EVALUE 7.40e+00; EST_HUMAN HIT: BI830850.1, EVALUE 5.00e-33
gacacatggaatttggggacacattcaaaccacagccaggcttgagtacttggatgcatattagttttattttgttatcaacaattataatgaagatggtctcacctttgactctttcaataataaaactgttggttatacaattccaggtcctgtttctgctgggaggacaatttgagctaactggaaaggggattgtgagaaccattactgggagtacagaaagaaaaggtcatgtagcaaataacttttgattcctagtaaaatataattcttaaagtagtcaaaataaacctactggaaataagacagcaagaccatctaaaatgtaatatgttctctagattacctctttatctgaattcaatacgaagctcagttactcttgaaaacttaaatttcaaggccttgtgagaaccacagtcaagtcttccccgggtgctgtctccacgtgggaagcatgactccagctgagctgtttctcttttgttttggttttggtttttgttttattttgttttaatctctgatagccaaacgagtgatcagtagcacttgaaagacttcttcccaacatggtga

SEQ ID NO: 685 - DNA, 584 bp, Homo sapiens
  MAP TO AC013341.3; EXPRESSED IN FETAL LIVER, SIGNAL = 0.54; EXPRESSED IN PLACENTA, SIGNAL = 0.57; EXPRESSED IN BONE MARROW, SIGNAL = 0.46; EXPRESSED IN BRAIN, SIGNAL = 0.56; EST_HUMAN HIT: AI337284.1, EVALUE 3.20e+00; SWISSPROT HIT: Q9X170, EVALUE 3.30e+00
atgcctccactctcacaaccccttagaattgtggaactgagaacctggctttctgacagtgacaaagcttaggtattaatgaaggcattattttggctcattgttccaagatgcttaccagtaaagggtattgctattgttattttcattaggctggggaaaaatttctgcaagataggaattgtatatgttaccttatttatctctttcttcctgccaacagccacccccaaactgccagattctcacaggagtggattgtcacctgtcatagaattggtggcaagaactggaatttccctcttcatatcttccttctccttctttgtgaaaattatagttaggcatttctatgtctaagcacctgatgctagcggcactcagtgaaaagcaattgtcacttccacaaaagaggagcccaatactccccctatggttgtaaaaaaatgtgttatattggatagatagactgctctgtgaggctacaggccaaagaacagttgagcccttttaaatagtcaggattcctaaaatctacagatagggaacacagtgcttgcttatcagccactgacgacttcaaa

SEQ ID NO: 686 - DNA, 518 bp, Homo sapiens
  MAP TO AL137843.1; EXPRESSED IN BONE MARROW, SIGNAL = 0.88; EXPRESSED IN BRAIN, SIGNAL = 1.2; EXPRESSED IN HELA, SIGNAL = 0.93; EXPRESSED IN HEART, SIGNAL = 1.3; EXPRESSED IN FETAL LIVER, SIGNAL = 0.83; EXPRESSED IN PLACENTA, SIGNAL = 1.2; EXPRESSED IN LUNG, SIGNAL = 0.83; SWISSPROT HIT: P53923, EVALUE 8.20e+00; NT HIT: AL163284.2, EVALUE 8.00e-03
gagcatgcacaagagagacggtgtaaatagtcttttatgattcattccttgactctgaggaaaaaaagaatattgcatttgttaattctaaagtttagaaatgaatctggaagcagatgttggcaagatggccaaaaaggacattcgatctcttgtctccccacaaaaccatcagtgtaaacaaccacacatatgcaaaaataacttccgaagagctaaggaaaccaggtgagagattacagcatctgggaacagcaaagaaataagaaaaacatattcaagataataggaacaacagttttcattatcattataacctcttccccaaccccaggcagcacatcatggctagagacaccctcctcttgaaagaaggaagtgagcattggactttgcctcagattctaacacaagactcaccacagtaaaacccagtgccaggacctcatggccccagactctagtccagtatccatgagctgaacttctaggcctgccccactaccaggccaacctta

SEQ ID NO: 687 - DNA, 572 bp, Homo sapiens
  MAP TO AL137178.3; EXPRESSED IN BONE MARROW, SIGNAL = 0.43; EXPRESSED IN BRAIN, SIGNAL = 0.44; EXPRESSED IN FETAL LIVER, SIGNAL = 0.42; EXPRESSED IN PLACENTA, SIGNAL = 0.47; EST_HUMAN HIT: BE064410.1, EVALUE 2.00e-04; NT HIT: AL163248.2, EVALUE 1.40e-01
cgttctctctggaaagggtgctctggatatgaatctgtcttctttgtccatgatgcttctccccaaaattaccacacatgaacttccagaatgccttattcacttatccatagaattccatactgcatcgcttctgataaaaaatgggctcatgcttacggaagtcaccggtcttcccatgcttcccatcaaaaggatggccttttgaagactcagttatgccacaagttgggtaccaatattttacaagaatgaactgatatccttcaaggaagctttatatgatctaaatcagtaaccaatatagcaaggatgactgtttctctcatagccagatgtctcatggtctggaaatcaaggggtggaaatggaagtggttcctctcaactcactatctatgattcaactagcaaaatctgtgcttctgactcccaagacattgggctatgttggtccagagctcttagttcccaatggtacaatgctaactctagtgtccatggcaatagttctattaaattggaagttgaaacagctacccggccacttcgactcctcatgccagtgaatca

SEQ ID NO: 688 - DNA, 513 bp, Homo sapiens
  MAP TO CHR22_113.0; EXPRESSED IN BRAIN, SIGNAL = 0.36; EXPRESSED IN LUNG, SIGNAL = 0.49; SWISSPROT HIT: Q91175, EVALUE 6.20e+00; EST_HUMAN HIT: BG119850.1, EVALUE 2.80e+00; NT HIT: AE000022.2, EVALUE 4.90e-01
gaagctgggctttgaatctgaccagttaaaagtgtggcattcccaagatccatacttgatccctccagaggacttgtgttattaaaccagagagcagagcaggttctggctggcaaggacccagggattaacgtccagggcgttaacatcataattgggccagccttgaaggcagcaacatctgctgtgtgaggctctggtgccagagcccatgttgcacctcctggctggctagggcctttgtcttgggaagtggcctgggtggccttaagactgcatttacttagcacatgctcaatagctactgtcaggtggtgaaaagctctcattagggccaagaaattgacttgtgtcctgggcttctcagaaaaacaatggggacccatgggagaggctttgtgcctgaaggtgcccagggactggtaattgagttactgttcaagtgatgagagactgtggccactgacgagtattagtggaacaaggttggcaggctgttgcaagccttcctag

SEQ ID NO: 689 - DNA, 583 bp, Homo sapiens
  MAP TO AL138842.2; EXPRESSED IN BONE MARROW, SIGNAL =  18; EXPRESSED IN HELA, SIGNAL =  11; EXPRESSED IN BRAIN, SIGNAL =  13; EXPRESSED IN PLACENTA, SIGNAL =  15; EXPRESSED IN ADULT LIVER, SIGNAL =  20; EXPRESSED IN FETAL LIVER, SIGNAL =  15; NT HIT: AB051901.1, EVALUE 0.00e+00; SWISSPROT HIT: P33379, EVALUE 1.10e+00; EST_HUMAN HIT: BG675282.1, EVALUE 0.00e+00
tggatccaagaaggtcatccttgacctgcccctggtaattggcagcagatcaggtctaagcagcagaacatccagcatggccagccgaaccagctctgagatgagttgggtagatctgaacatccctgataccccagaaggtgagccagacctaatgtcttttctttgtttctggtctacctgggtttgtaaaattgtgatggtccagcatttcttgggcaggattcttatgtggccatattttcttttctagctcctccctgctatatggatgtcattcctgaagatcaccgattggagagcccaaccactcctctgctagatgacatggatggctctcaagacagccctatctttatgtatgcccctgagttcaagttcatgccaccaccgacttatactgaggtgaggattgtcatctttactgttaaatttgtcctaagctttctataagaagttgacttagacggattgctaaactggtttgttctttttgttcttacctgaactgaaatagtctgtttctttctttaggtggatccctgcatcctcaacaacaatgtgcagtgagcatgtggaagaa

SEQ ID NO: 690 - DNA, 519 bp, Homo sapiens
  MAP TO AC024195.2; EXPRESSED IN BONE MARROW, SIGNAL = 0.48; EXPRESSED IN BRAIN, SIGNAL = 0.42; EXPRESSED IN PLACENTA, SIGNAL = 0.87; EXPRESSED IN LUNG, SIGNAL = 0.89; EXPRESSED IN ADULT LIVER, SIGNAL = 0.8; NT HIT: gi16161129, EVALUE 0.00e+00; SWISSPROT HIT: Q03167, EVALUE 3.00e-54; EST_HUMAN HIT: AU139970.1, EVALUE 0.00e+00
cagttgggcagttccaaaacaaaaaacctcaacctgcaagaccttgggattaaacttttctgcctcacctaaaaatgccaaaataaccatccgaatggatgaaggcccacaaaccttaggcaacttctgggggtgcttctccatcttcgtacacagcgtcagctcacactgtagaaagagcagtgaggtgttgaagacaggcttgaagacaaagctgaatcgcttcttatccatgtcagcttgcgggataggaaagtgcactctcttgggactgtagaatttcacagattcatctttaggacaaatattctcaataatggtgtaatgagacatcctatcagggttcgaatatggagagataaagcacgtttggatggcaaatcccagttcttgttcagccttagtaacagatacctatgaaagaacagaaagatgaattaggaaatgagttagcatctcactttcactttaggcacaaggaccatatgccaagacagcccttcagatgacacgctgctt

SEQ ID NO: 691 - DNA, 509 bp, Homo sapiens
  MAP TO AL137846.1; EXPRESSED IN FETAL LIVER, SIGNAL = 5.7; EXPRESSED IN BONE MARROW, SIGNAL = 6.4; EXPRESSED IN HELA, SIGNAL = 3.1; EXPRESSED IN LUNG, SIGNAL =   7; EXPRESSED IN BRAIN, SIGNAL = 5.4; EXPRESSED IN PLACENTA, SIGNAL = 6.2; EXPRESSED IN ADULT LIVER, SIGNAL = 6.5; SWISSPROT HIT: P16554, EVALUE 2.40e-01; EST_HUMAN HIT: AV700530.1, EVALUE 2.00e-04
tggatctccagtccaactccagacctgggggccacaatctccaggggtggaacctggaccctgtatctcttacaagagatgttactgttagttcccgtctaaaaggagctgccaaaaggcctcactcacccacctcactctttcagacgctcggtgagcatctgtgcaacggaaaggtaaagaaagtgaaggaactagtgaagccttaactgagagaggcttggcccatcctgagcctggcagcacagggtcctcaggtccctgcctcccggcaggttccccaaccccctgacccaggggaggggctgctcccccttctatcttaaagtcagggtgctgtgtctcactggggggcagggtgtcctggactgcagctagggctgtgggaagctacaggagcagatacagcacctcttcctgtgatggcaacttgtctgggaataagtcacgtaaagcctggtgtctacgctgacaatagccactcagacactacagagcacaatgcccaa

SEQ ID NO: 692 - DNA, 562 bp, Homo sapiens
  MAP TO AL139100.1; EXPRESSED IN BONE MARROW, SIGNAL =  32; EXPRESSED IN BRAIN, SIGNAL =  26; EXPRESSED IN HEART, SIGNAL =  21; EXPRESSED IN HELA, SIGNAL =  16; EXPRESSED IN FETAL LIVER, SIGNAL =  24; EXPRESSED IN LUNG, SIGNAL =  17; SWISSPROT HIT: P39188, EVALUE 8.00e-03; EST_HUMAN HIT: BG621217.1, EVALUE 3.00e-77; NT HIT: D87675.1, EVALUE 6.00e-04
agtttcgctatgttgcccagggctggtgtccaactcctgggctcacgtgatcctcccgtctcagcgtcgggagtacctgacattccaggcgcgagccacggcgccggctcctgttggttttagtatctgtcttgttccactagaatctcaaccccacaaggacaagaatttttatctgttttgttcactgctgttttttcagcatttatagcagctccaggcgcgtagcagagaatcattaaatatttatagaaagattaaatacgctcttccggaagcaccgacaaacaagattaaatgagcttggattgaacctcgtagcggcccgtagtactcctccttcccgccatcctatagatgaaaggaagaaaaggaaaagccccgcccctcgctcggctgctggaggcgagggcttcggaagtcttcatgctagtctcgtggggttccgcggtgtcgtcgctggctgtgcgcgtcatttccgggcgtcacgtaacggagtggccaacggcctgcagagcaacatgcccaagtgagtggggccccgaaatctgagggtgatcgt

SEQ ID NO: 693 - DNA, 587 bp, Homo sapiens
  MAP TO CHR21_67.0; EXPRESSED IN FETAL LIVER, SIGNAL = 1.1; EXPRESSED IN LUNG, SIGNAL = 0.66; EXPRESSED IN HELA, SIGNAL = 3.8; EXPRESSED IN BRAIN, SIGNAL = 1.2; EXPRESSED IN PLACENTA, SIGNAL = 0.62; EXPRESSED IN ADULT LIVER, SIGNAL = 0.69; SWISSPROT HIT: P49753, EVALUE 1.90e+00; EST_HUMAN HIT: BG995637.1, EVALUE 3.00e-03; NT HIT: AL163227.2, EVALUE 2.00e-07
aggctcacttatggggtgtgtcacagggccacaggatccaaccgaaggagctcccaatggccaatgctggaacactgggagcaacatttagtaaagttgtatggaattgtagcccacagtatgagtccatacagaataaacaaaaatggtggaagagacaaatacgtgggggagaagaaacaaatgtcccatgccagattccaaatgacgtgggcagacgccccctcgaggaggtgctgtggaccccccaccctaagcgtgggctgtgcacagtgactcccttccagagcacacggcctggagatagggagagagagggtgaccttacagtggggaagcctgactcacagcacctcagccaggtggccaaggtcaacgtcaacaggaaggactcctttggaagtgtgtgcctttgacatgatttggccacaatcgccctgctcctttgtggtcttccccctcaaacacccttaaccccagtctaatcaggagaaaaacatcaggaagatactaactaagggacagtctacaaggtacctgactaggcttcctcaacactgtcaagatcatcaaaagcaaggaaaggc

SEQ ID NO: 694 - DNA, 585 bp, Homo sapiens
  MAP TO CHR22_215.0; EXPRESSED IN FETAL LIVER, SIGNAL =   2; EXPRESSED IN PLACENTA, SIGNAL = 1.4; EXPRESSED IN ADULT LIVER, SIGNAL = 1.4; EXPRESSED IN BONE MARROW, SIGNAL = 2.3; EXPRESSED IN BRAIN, SIGNAL = 1.8; EXPRESSED IN HELA, SIGNAL =   3; EXPRESSED IN HEART, SIGNAL = 1.5; EXPRESSED IN LUNG, SIGNAL = 1.3; SWISSPROT HIT: P35579, EVALUE 4.00e-23; EST_HUMAN HIT: BG951419.1, EVALUE 1.00e-82; NT HIT: M69180.1, EVALUE 1.00e-82
actcagatcgatgcaggaccatgagaagcagggttcttaaccaaggataaggcaaccaacaggccaaggaggcagcagggtgggtaatgaagggcaaggctcacatcaaagatctcgaagccggcaatgtccaggatcccgatgaaggaggcgccctgcctcttggtcttgtccagagccttgttgatgcgcagcaccagccagcggaacatccgctcataggtcgccttggccaaggcctcgatggcaaagtcagcctgcggggcacacccggggagcgtggtgtcagatacaaaggatctgaaaaccctcataccctatgccccagtaatttcacttttagagtcctccccctagaggaacagccctaagtatgtgggggaaaaaaaaaaatcttcgtacacaaatatgttcactgtggtgttatttaaaatgatgaaaagtagaaacaacctaatatctaacaatatggggacaataaacttagatcttttgaaataaaatgaggacacactaaaggatttacagaaaaagtgatgcttcaaaataaggcagtggtctacggccgtaccaccctaaatgcac

SEQ ID NO: 695 - DNA, 580 bp, Homo sapiens
  MAP TO CHR21_42.0; EXPRESSED IN BRAIN, SIGNAL = 1.9; EXPRESSED IN LUNG, SIGNAL = 1.5; EXPRESSED IN HEART, SIGNAL = 1.4; EXPRESSED IN ADULT LIVER, SIGNAL = 1.3; EXPRESSED IN HELA, SIGNAL = 3.4; EXPRESSED IN FETAL LIVER, SIGNAL = 1.9; EXPRESSED IN BONE MARROW, SIGNAL = 2.2; SWISSPROT HIT: P25322, EVALUE 8.40e-01; EST_HUMAN HIT: AW590706.1, EVALUE 6.00e-08; NT HIT: AB058702.1, EVALUE 2.00e-10
tggaagtctggaggaaccacaccattgaagatttcattgttgttatagaaaaagctgtgaaagccatgaagcttaaaacaatacattccttctgaagaaaactgtgtccagatgttgtatgtgaattcacaggagccaatcaaagaaattatgacagatattgtagatatggcaaataaggtgagagtgaaaggttttcagatatagatattgaagatattcaagagctaatagacatcacaccagaggaattaacagaagatgatttgatggagataagtgtttccaaatcagtgccagatgatgaggaagaagacatagaagatgcaatgccagaaaacaaattgacattagaaaagatggcaattggattctgattatttaagactacttctgacgtcttcaatagcatgaacccttctatgatacaggcattggagctaaagcaaatgatagaaggattggaactgtatagaatcatttttaaagaaatgaaaactcaaaacgtcagagagaaatcacaacatacttccgtaaagtcacaccgactgtgcctgcctctcctgccttcccttctacc

SEQ ID NO: 696 - DNA, 590 bp, Homo sapiens
  MAP TO CHR21_5.0; EXPRESSED IN BRAIN, SIGNAL = 1.1; EXPRESSED IN PLACENTA, SIGNAL = 0.77; EXPRESSED IN HELA, SIGNAL = 2.8; EXPRESSED IN ADULT LIVER, SIGNAL = 0.75; EXPRESSED IN FETAL LIVER, SIGNAL =   1; EXPRESSED IN BONE MARROW, SIGNAL = 1.1; NT HIT: AE000990.1, EVALUE 3.60e-02; SWISSPROT HIT: Q04912, EVALUE 7.50e+00; EST_HUMAN HIT: BF884860.1, EVALUE 1.00e-36
tctgccctgtttttatcagtttacctttatgactgactgaggaagtcctgaagttgcagctgctccacttctgagtgatcctggtttttttatttcttgttgtcccacagcagacagttattaaaatattgaaataatgagaatcctcaacaactctagtcacctttggcacctgcaaaatagaagttttgctatagtggtctagggtgagaggtaccccaaagaggtatattgaatcagttttaaaagcagtcagcttgttaggatttcatgtacaaataacagaaatctctgctacagtggcttcagtagaagcatactcacttgtcttatactataagaagcctgatattaggccacagagctaatacagaggctcaaggatgtcctcaaaatgaaaggtttcagtgttcactggcagagtttcctctggcaagcctggaggggatgggcagaggctggagtggaattcagattactcagaattaatcaggtcagaattaatcctggttattactttataccatggttcagttacttttataggtgaagatgtattttgtgcctaatcctacaaaaacatccacccc

SEQ ID NO: 697 - DNA, 582 bp, Homo sapiens
  MAP TO AL138752.2; EXPRESSED IN LUNG, SIGNAL = 8.1; EXPRESSED IN ADULT LIVER, SIGNAL = 8.2; EXPRESSED IN HELA, SIGNAL = 4.5; EXPRESSED IN BRAIN, SIGNAL = 7.6; EXPRESSED IN PLACENTA, SIGNAL = 8.2; EXPRESSED IN FETAL LIVER, SIGNAL = 7.5; EXPRESSED IN BONE MARROW, SIGNAL = 8.2; EST_HUMAN HIT: BI227382.1, EVALUE 0.00e+00; NT HIT: AF281132.1, EVALUE 0.00e+00; SWISSPROT HIT: Q9NQT5, EVALUE 1.00e-45
caggctgtcagataggtggccggccacaatcactgccaccttggacagggacccgtgagctgacggccatcaagcttcataaactggtccgaatccaacggaccgctactgccggaaacggaaagtcctcaagggcgggtgttggaagcggagcggaagcggaaggcgggtaccggaaacggtgtttggtggagcccgcgatggccgaacctgcgtctgtcgcggctgaatctctcgcgggcagcagggcgcgcgctgcacgcacagtactaggtcaggtggtgctcccgggtgaggagctgctcctgccggaacaggaggacgcggaaggccctgggggtgcagtggagcgaccgttgagcctgaatgctagagcgtgctcgcgggtgcgcgttgtatgcggtccgggccttcggcgctgtggggaccgcctgctggtcaccaagtgcggccgcctccgtcacaaggagcccggcagtggcagcggcggcggtgtttactgggtggactctcagcagaagcgggtgagctgggactccggaggggtggtgcggcagtgagagtggtagccctgctttgaga

SEQ ID NO: 698 - DNA, 565 bp, Homo sapiens
  MAP TO AL135932.1; EXPRESSED IN HEART, SIGNAL = 2.8; EXPRESSED IN FETAL LIVER, SIGNAL = 3.1; EXPRESSED IN LUNG, SIGNAL = 3.9; EXPRESSED IN ADULT LIVER, SIGNAL = 3.8; EXPRESSED IN BONE MARROW, SIGNAL = 3.1; EXPRESSED IN BRAIN, SIGNAL =   3; EXPRESSED IN HELA, SIGNAL = 2.5; EXPRESSED IN PLACENTA, SIGNAL = 3.7; EST_HUMAN HIT: R08818.1, EVALUE 2.00e-01; NT HIT: AL161500.2, EVALUE 3.40e-02
taagcactctccaagctcccagcaagttcattagttacctgaaaatatctacctcatctgtcatcagcactcaaatggcctgagggatttttcatttccactccattttccaaactctttctagcatttacctcccacatctggaatcaatcctgaccagcagcaaaatgctgaacagccgggctcctcccagggcagactttctttctcccaaggagagacaagaatacatcgcatatgaattagccattctcttctagggaaaactggcagcagaggcagcttctgcattctaatttgctcatctaaccccttcatctttacttgtttaagcaaaatatttagtttaacattttcagtcattagagctgaaaaaacacacatatttttaaactagattttatttgtgttgcaaattgtgagtatccttcaaaaatatcccagctcgttatccctttactcccttggtagaaaagatttttagacaacagtcttaggaaacatcactgacttccaagcctcagtaccattgccccaccactgttgccgtcaccacttcctagag

SEQ ID NO: 699 - DNA, 600 bp, Homo sapiens
  MAP TO AL137800.2; EXPRESSED IN HEART, SIGNAL =  11; EXPRESSED IN BONE MARROW, SIGNAL =  15; EXPRESSED IN LUNG, SIGNAL =  16; EXPRESSED IN ADULT LIVER, SIGNAL =  15; EXPRESSED IN PLACENTA, SIGNAL =  15; EXPRESSED IN HELA, SIGNAL = 7.3; EXPRESSED IN BRAIN, SIGNAL =  13; EXPRESSED IN FETAL LIVER, SIGNAL =  13; SWISSPROT HIT: P19878, EVALUE 3.00e-28; EST_HUMAN HIT: AU121467.1, EVALUE 0.00e+00; NT HIT: U00776.1, EVALUE 0.00e+00
atgcaatggggttgagaatcataataacaaatgcacagaggaggcccggaaagaggcacctccactcaccttctctgcttcagtcatgttcttcaggatagtgtacatgcagccaatgttgaagcaaatccgggagtgggggtcctggacggcactgaaggcatccagggctcccttccagtccttcttgtccgctgccagcaccccttcattccagaggctgatggcctccaccagggacatgattaggtagaaactaggaggccaagagagctgccaggagacagagagaagacaggttggagcgtctcccctagcagggctgccttagtggcccccaaggtgttcactttctgggccagatgagtagaatggggcccagcctcccttaagataacttctcagtgttgcaaatgcatcaggaaatgtccccaccttttggcaactgactcataaccctaccatgagagagaaaaggaaagaagcagagagagagagggcgagtaggggtggagtgtggaggagagaggaagtacatcagctgctgcctgaaggatcagttccccaaaatgcttctgctctgtcacccagctcctcttc

SEQ ID NO: 700 - DNA, 518 bp, Homo sapiens
  MAP TO AL135786.2; EXPRESSED IN HEART, SIGNAL = 1.7; EXPRESSED IN BRAIN, SIGNAL = 1.8; EXPRESSED IN LUNG, SIGNAL = 0.86; EXPRESSED IN HELA, SIGNAL = 1.8; EXPRESSED IN FETAL LIVER, SIGNAL = 1.4; EXPRESSED IN BONE MARROW, SIGNAL = 1.5; SWISSPROT HIT: P08548, EVALUE 2.00e-17; EST_HUMAN HIT: AW972254.1, EVALUE 8.00e-50; NT HIT: gi14861872, EVALUE 3.00e-39
tcagacaaagacgcagcaagaaaagagacctacaggccaatatttctgaggaacattgatggaaacattcccaataaaatattagcaaaccgaattcaacaacacattgaaagattatatgtcattatcaggtgggaatgtatccctggcatgaacagctggtttaacatacacaaatcagtcaatgtgctatatcacatgaacagactaaaagattaaccacatatggaactagccccaatgcccatcagtcaacaagtggataaagaaaatgtgatatatatataccatggaataaaacgcagccataaaaatgaacaaaataatggtattcacagcaacctggtgggaattggagacaattatctaagtaaagtaactcaggaatgaaaactcaaacatcatatgttcatactcataagtgggagctaagctatgagggtgcaaaggcctaagaataatacagtggactttggggactcgggggggaaagggtgagaagggggtgagggataaaa

SEQ ID NO: 701 - DNA, 564 bp, Homo sapiens
  MAP TO AL136163.3; EXPRESSED IN FETAL LIVER, SIGNAL = 0.69; EXPRESSED IN BONE MARROW, SIGNAL = 0.66; EXPRESSED IN LUNG, SIGNAL = 0.71; EXPRESSED IN ADULT LIVER, SIGNAL = 0.6; EXPRESSED IN BRAIN, SIGNAL = 0.76; NT HIT: gi15208635, EVALUE 1.40e-01; SWISSPROT HIT: P49191, EVALUE 2.40e+00
tgagcagaggagtcaaaggctctagagctgcaaagattaagttgtcatcagccaacattggaagtctgtgcataaaagagatttctaggaaaaaaaaaaatcagcagttcaatctatcggacacctgaatggaaatatcaagcatgtagttggattgtgacttgaagaaaagcatgaagagttacaagtgtaggccatgggcctatagatatttagagcagtgagactggataaaatcaagggagcaattgtagatagagaagaagaccaagaactgagccttggaccattccaacactaagagtttagaggggagatacaaagggaagggaaagaacttaagaggaaaaaaggaaaacaagagaatgcagtgacctggaaacatatgaagaaggtgtattaaggagacagggattattaaaatgtgccaaatgctgctaatcagataagaaaaggactgagaattgccattgaatttggcaatgtggaggtcacccaagagcagtgtgtgtggagagaaaagcttgaaagaagagaaggtttacaagagaacgggaggaaaga

SEQ ID NO: 702 - DNA, 562 bp, Homo sapiens
  MAP TO CHR21_70.0; EXPRESSED IN LUNG, SIGNAL = 0.68; EXPRESSED IN PLACENTA, SIGNAL = 0.61; EXPRESSED IN BONE MARROW, SIGNAL = 1.3; EXPRESSED IN BRAIN, SIGNAL = 1.3; EXPRESSED IN HELA, SIGNAL = 3.4; EXPRESSED IN FETAL LIVER, SIGNAL = 1.2; NT HIT: Z21523.1, EVALUE 5.40e-01; SWISSPROT HIT: P30349, EVALUE 8.10e-01; EST_HUMAN HIT: AI089508.1, EVALUE 2.00e-01
aatgggacctggggtctaacctgacccacaggatggctgctctgtccaccccagccctgtggacatctcttgcccacccagccatggcaaaaatgaggagcccccgaccatggtgaccctgtctgccagccccaaatttgggactcagagttggacaggccagagtgcggaggaacaccagccccctggaagccccctggaatacgaagccgtcaccgctgagatcatccctaagtgcctgctgatcacccctccctcctccagacggaaggaaatcctacaaaggaaacacacgtatcagactttctacacctcccagctagactctctttcaccatgggctaacaccacagaatgaccttacaggttctagaaacatggacatccgccccagggctttgattggggaacggagcccctgcttttctagagtgaattttttgagcagcttgcaacctctgtcagtaatttgtctcttattctggagggtgccaggcaggaggagacggtgggcttcctgctgatccaggcccaccctttgcggataagatgaggccttccc

SEQ ID NO: 703 - DNA, 568 bp, Homo sapiens
  MAP TO AL133338.2; EXPRESSED IN PLACENTA, SIGNAL = 1.1; EXPRESSED IN LUNG, SIGNAL = 1.1; EXPRESSED IN ADULT LIVER, SIGNAL = 1.1; EXPRESSED IN BONE MARROW, SIGNAL = 1.1; EXPRESSED IN BRAIN, SIGNAL =   1; EXPRESSED IN HELA, SIGNAL = 0.77; EXPRESSED IN FETAL LIVER, SIGNAL = 0.91; NT HIT: AL139078.2, EVALUE 2.10e+00
catggctgtgtaggacatgctgagagacagcatgttatgccaacttgatgtccttttaagggattctcaaaggtaatcttagctattcacagtttccacctaacaagttcactttagatgctaactcattcttaagcaagaagcaattgctcctgaatagttctcaatcaagttaggaaacacatctgaagcatgcagaacagagaaagcatgacaaaaataataaaacacataaacacttttcacacaatacaaaatatataatggttaaaaacaaccaaatttctatggggctcttattctctaacttatcctctaactaggtttcccattcaaaggtgggggaaaaaaatcctggacaggctcataactataaagcagattagtctttatattcagaatattcccccccaaagttgtgttaattttacttttagcacagggtaaggaaggcttttcctttaaatgtccttgggaaaacaaataaaaaaaaattttttaacaccagataaggacaagcatagtcagaaagaaaattccagaatatcccacaaagatgaaacgagca

SEQ ID NO: 704 - DNA, 569 bp, Homo sapiens
  MAP TO CHR22_222.0; EXPRESSED IN HEART, SIGNAL = 1.3; EXPRESSED IN LUNG, SIGNAL = 1.6; EXPRESSED IN BONE MARROW, SIGNAL = 1.7; EXPRESSED IN PLACENTA, SIGNAL = 2.5; EXPRESSED IN BRAIN, SIGNAL = 1.3; EXPRESSED IN HELA, SIGNAL = 2.4; NT HIT: AF003528.1, EVALUE 3.00e-55; SWISSPROT HIT: P47033, EVALUE 8.20e-01; EST_HUMAN HIT: AL521707.1, EVALUE 1.00e-118
tcatctgagccttcagggagtcctaatctttttgctgacggagggtcttgcctccatgttgatggctgctgactaattagggtggtggttgctgaaggctgaggtggctgtggcaaatttcttcaaataacacacccatgaagtctgacgcatcgactggctcttccttttctaagagatttttctatagcatgccaaactgtttgatagcattttacccacagtggaacttctttcaaaactgcagtcagttctcttcaaccccgccactgcttaatcaactacgtttatgtaatattctaaatctttcattggcatttcaacaatgttcacagcatcttcatcaggagtagattccatctcaataaatcactttctttgctcatccataagcagcaactcctcatctgttcaagttttatcatgagattacagcaatccagtcacatctccaggctccacttttaattcgagttctcttgctatttctaccacatctgcagttcctgcctccactgaagtcctgaacccctcaaagtcatccatgagggctggaatcatcttccaaa

SEQ ID NO: 705 - DNA, 587 bp, Homo sapiens
  MAP TO CHR22_113.0; EXPRESSED IN BONE MARROW, SIGNAL = 0.43; EXPRESSED IN BRAIN, SIGNAL = 0.51; EXPRESSED IN LUNG, SIGNAL = 0.5; NT HIT: AE004638.1, EVALUE 5.60e-01; SWISSPROT HIT: P29336, EVALUE 7.50e+00
tgagctctttaatgggcaaaagatgcaggatgcagcaactcggtacacgtgtgagatgagagaggcgaggacaagggagctcctgttccctgggttctggaagttcacagatggtgttttcatccactgcaatgcagtggaggaaggtgaagaaggcgagttcagttatggactcagatgtaggagatgtggtgtgtcacttccctggggtgcatgtgacccttcctcccttctcacaggacactgatcttgtgaaacaactgcctctcagcccccacctctgtgtcagcagtgtccttcaggggaagctggccccaccctagccccaggatggtcttcctgtccaggcaggtaacctatccctgagcaataattagcatgaagtggtcctgtgacccacttgggccaaagagacaggaggaaaggttttctggggccttctgagaaagtatcttccttgtttttatctaaaagcatccagagtgactctctctggtcctctgtggatgtgtggccccaaggcactgtcctgtctcactctcagcctcaggatagcaagagaaacaggcaaactagctggaactgcc

SEQ ID NO: 706 - DNA, 535 bp, Homo sapiens
  MAP TO CHR21_72.0; EXPRESSED IN BRAIN, SIGNAL = 1.3; EXPRESSED IN HELA, SIGNAL = 2.7; EXPRESSED IN LUNG, SIGNAL = 0.77; EXPRESSED IN FETAL LIVER, SIGNAL = 1.2; EXPRESSED IN BONE MARROW, SIGNAL = 1.3; EXPRESSED IN ADULT LIVER, SIGNAL = 0.66; EST_HUMAN HIT: BE971331.1, EVALUE 1.90e-01; SWISSPROT HIT: P26662, EVALUE 7.50e-01; NT HIT: AF217490.1, EVALUE 1.30e-01
cctaaacagggaaggggaagatcagaatgtgtgtttgagaagagcctgatttcctggattcctttggaggaggggtgtccttaacttgcccaatcacatttaccctgttcatcaatcttcagccccgcttaggctctcacattgcagaccccacggcagagcccctagtgcttggcactgaagagccagtgcaggcccgttgtcaccatcaaaacccacctctggtaaattcaatggcttctgcttccacgctttgccccccctctctggccttgtcaaaaactcttgtgatgtccctgttataaggtatcgccggtggactggtgtttctagatcgcagcgtgggacgtgattggctacatttgactgtttcctttttaatgacttgtttaatgtgagatctttagctgctccatctcattgcaagatttttgttacagtaaagttggactgagttttctaaagacagttgctcagaaatttcatgggaatttacttttggttaaccgaagagtgtttggggttttaaacgggt

SEQ ID NO: 707 - DNA, 593 bp, Homo sapiens
  MAP TO CHR21_48.0; EXPRESSED IN HELA, SIGNAL = 0.85; EXPRESSED IN FETAL LIVER, SIGNAL = 0.46; EXPRESSED IN ADULT LIVER, SIGNAL = 0.29; EXPRESSED IN BRAIN, SIGNAL = 0.39; EST_HUMAN HIT: BE077638.1, EVALUE 5.30e-02; NT HIT: AL163252.2, EVALUE 1.00e-115
cctagatgtttcaggctggcacggttctatgataaactatggttggatggagggaatgacccactgcttgactgtaacttaaaggttctcatctagactctagaaggcagcagttctaagtctgtgtgtttccattcccttgtccaacaaatcctgtagttttatccaatatctttcttcctatatgcgatcagaacaagactctcggattaaaagaaaaacaaaacaaaaagaaatcagtctgttctgccttgaaatcacctttctagtgtacctaagcctgaaacaagaagaataacaatgtcatcatcaacaaacacctgtactctccctgacaaaaacatatattaattaaagaagactaaaacaaaacaaaatacaaaagaaaaacagagaccttctccattatagcatagaaaaatcttagggtggaatagggtcttccttttcttaaattcaaatagcttctgcttaggctcactgaagctcaccttgcttacctaaagtagctcactttaactctgatttctctcatactgtttatacactgaatgtataaacttagtcttcttagtccggtttccttgattttg

SEQ ID NO: 708 - DNA, 590 bp, Homo sapiens
  MAP TO AL138886.1; EXPRESSED IN BONE MARROW, SIGNAL = 1.6; EXPRESSED IN HELA, SIGNAL = 0.96; EXPRESSED IN BRAIN, SIGNAL = 1.7; EXPRESSED IN PLACENTA, SIGNAL =   2; EXPRESSED IN FETAL LIVER, SIGNAL = 1.8; EXPRESSED IN HEART, SIGNAL = 1.6; EXPRESSED IN LUNG, SIGNAL =   3; EXPRESSED IN ADULT LIVER, SIGNAL = 2.4; NT HIT: L22584.1, EVALUE 5.60e-01; EST_HUMAN HIT: AA634550.1, EVALUE 8.30e-01
ggactaacacagccatgcagatagactctggcaaaatcccccctcaaccattcaatctcatgttatcctagattatgacatcacttaaaactgctccattaaaaaaaactcttttaattcatacatcccaccatatagccttaactttaaaagcttccaataacctattaaattatggctactactcctacgctacttcagctaaacctcaagcaattcaatcagtccattttctctctaaccactactcacctgcctttttcctactgccttatattcatcttggactgcatggtctatacattcaataaattctgccaatactttaaaatccatgcctttctctctgtgttacctggctaccaaaccttaactaaaaccaactaactgccttctccatgcttgtacctaaagtgccgaacactgttggaaaaagcatcatacgtttataaggattgaggctaccataaattcatggctaccagcctagacactgtccagaacctctaccatgtttctgtactcaaccctttagaatgacaattttaaaatgtacacgttcacatcaaacatctctcctcttcccctga

SEQ ID NO: 709 - DNA, 521 bp, Homo sapiens
  MAP TO AL138837.1; EXPRESSED IN BRAIN, SIGNAL = 1.8; EXPRESSED IN FETAL LIVER, SIGNAL = 1.9; EXPRESSED IN LUNG, SIGNAL = 1.8; EXPRESSED IN PLACENTA, SIGNAL = 1.9; EXPRESSED IN BONE MARROW, SIGNAL = 1.9; EXPRESSED IN HELA, SIGNAL = 1.1; NT HIT: M25804.1, EVALUE 1.30e-01; SWISSPROT HIT: O08742, EVALUE 2.00e-09; EST_HUMAN HIT: BI520005.1, EVALUE 7.30e-01
agctgtgcagactttctgggccccggaagccccaggttgggctcagcaccatgtgagtacctaccaggttttgggtggtcagtgtaggcagaggagccagccagccctcacccagggttaccagtggattattgcccaagttcaaggtctgtagcctctgtaggccctggaatacctggtctttcaagcaaaccagttggttcccttgaagtagcagctcccgcaggtggggcaaacaggagaagatgactggggacagggtacacagcctattcttggacagatccagggcccacaatcctgacacaaaccctgtctcattcatacacaacatggcgctcctcagttggttgttggccaggttcagtctctgaagcctgggcatggcagccaggaaacctcgtggtaactcaatcaggccattgctccgaagacccgagctcttcaggctgtgacaggaagccaggccttccagggctatgtgccttgtccgattaatccccaaattcagctcctgaagc

SEQ ID NO: 710 - DNA, 588 bp, Homo sapiens
  MAP TO AF239614.1; EXPRESSED IN LUNG, SIGNAL = 2.4; EXPRESSED IN FETAL LIVER, SIGNAL = 2.3; EXPRESSED IN PLACENTA, SIGNAL = 2.4; EXPRESSED IN ADULT LIVER, SIGNAL = 2.7; EXPRESSED IN BONE MARROW, SIGNAL = 2.4; EXPRESSED IN BRAIN, SIGNAL = 2.4; NT HIT: gi4505314, EVALUE 4.00e-85; SWISSPROT HIT: Q02173, EVALUE 2.00e-27; EST_HUMAN HIT: AL596786.1, EVALUE 1.00e-67
tcgtgactcctgcaactgaggctgcttctcggctcctgcaggtaccagtccctggtggccgcctatggtgaggccaagcgacagcgcttcctcagcgagctggcccacttggaggaggatgtccacctggcacgctcccaggcccgcgacaagctggacaaatacgccattcagcagatggtaggagggtctcagggtgactgggtgtctgggaagcgtggactagatcttagcttgtctgcatggtgctcgaggggccgagggtggagcttggctcgctgcctgggaacctgaccatccttgcttctcggggcagatggaggacaagctggcctgggagagacacacatttgaagagcggataagcagggctcctgagatcctggtgcggctgcgatcccacaccgtctgggagaggatgtctgtgaaactctgcttcaccgtgcaaggatttcccacgcccgtggtgcagtggtgaggggctctgttcccagggggtgaagaagtccattctgcgttttctttcagaaagaccccagttaaggagacaaacgccattgaacctgtgctggaggccacttaccttga

SEQ ID NO: 711 - DNA, 553 bp, Homo sapiens
  MAP TO CHR22_226.0; EXPRESSED IN LUNG, SIGNAL = 0.92; EXPRESSED IN PLACENTA, SIGNAL = 0.84; EXPRESSED IN ADULT LIVER, SIGNAL = 1.2; EXPRESSED IN BONE MARROW, SIGNAL = 1.9; EXPRESSED IN BRAIN, SIGNAL = 1.7; EXPRESSED IN HELA, SIGNAL = 3.3; EXPRESSED IN FETAL LIVER, SIGNAL = 1.5; EXPRESSED IN HEART, SIGNAL = 1.2; NT HIT: gi6755741, EVALUE 1.30e-01; SWISSPROT HIT: O19025, EVALUE 4.00e+00; EST_HUMAN HIT: BF891981.1, EVALUE 7.80e-01
acccaaaatccaggagaagggtgcagaggaaggagtgcggggagagcagggaggggtgagaccagatcctgtaggagaacttggacttagcaatgggatgccataggggaccttgaggagagggtccccatgggggctaggatgatggtgataagaaggggagacatcccccgaaaaacgaggcatctccctatgcctctgagtctccagcactcgggagcgatcctccattatgttgagaataatgactccagtgtccatcgggggcagaggtttccttggctagaagagaccactgtctgaaatgtgttgggaaatggctgtgctgtgttcccagggccacctagcaaagccaaggtcatccacatttgacagatggaaaatgaggggaagcagctcatccaaggggcacatccatggcagagctgggaccaggatcaggaccttggtgtccagcctctcttcctggccctgaccacatcccaactgctacttccagtgaatgtcatggccatagtgggggagactggttagacttcctctcctcaggcct

SEQ ID NO: 712 - DNA, 523 bp, Homo sapiens
  MAP TO AL133285.3; EXPRESSED IN PLACENTA, SIGNAL = 3.8; EXPRESSED IN LUNG, SIGNAL = 3.4; EXPRESSED IN ADULT LIVER, SIGNAL = 3.6; EXPRESSED IN BONE MARROW, SIGNAL = 3.5; EXPRESSED IN BRAIN, SIGNAL = 3.1; EXPRESSED IN HELA, SIGNAL = 1.5; EXPRESSED IN HEART, SIGNAL = 2.7; NT HIT: AL163280.2, EVALUE 1.00e-17; SWISSPROT HIT: P08547, EVALUE 7.00e-24; EST_HUMAN HIT: AA421082.1, EVALUE 2.00e-23
gctgtaatggacataggagtgcagatataccttcaacgtaatatttcagttcctttgaatgtatgtccaaaagtgagataactggattatagggtacttcagttttcacttttttgacgagtcttcataccattttccataatgactgtatccacgtatattctgaccaacaatatataagagttttcctcatatcctctccaatatgtgttatctttcatctttttgatgacagccattctaacaggtatgaagttatatcttgtggttttaattttcatttccctaatgattactgatgcagagtacttttttatgtaactatttgccaattttatgtcttcttttgagaaatgtctattcagtttttttgcccacttttcaattatttttttttcttgctattgaagtgtttgagttcctgtgataggctgttcttgtgttgctataaagaaataactgaatctgggtaatttataaagaaaagaggtttaattgctcatggttctgcaggctgtacagg

SEQ ID NO: 713 - DNA, 528 bp, Homo sapiens
  MAP TO AC018608.4; EXPRESSED IN BRAIN, SIGNAL = 0.8; EXPRESSED IN LUNG, SIGNAL = 0.66; EXPRESSED IN FETAL LIVER, SIGNAL = 0.79; EXPRESSED IN BONE MARROW, SIGNAL = 0.71; NT HIT: AJ006345.1, EVALUE 2.00e-03; SWISSPROT HIT: P16356, EVALUE 2.90e+00
ccaggtgggtcagtccttaggtattagtggtggcagcagtggtgtgccagaccttgggccctcaagtagtgtatgtggactccagtggtaaagaatctgggtgggctgatctttgggcctccaggtaacttgcttaggtgccagcaggggcaattgtggactggatgggcaggcaggttcttaggcctctgggaagcaggcatggcattggtgatggcagtagaagtagtgggtacatcttgggaccttcctgtggcatacatgggcacagtagtggcagcagtggacttggaaggccagttcccaggcctccaggtggcacatgaaggtgagtactggcggcagtggtggtgacaggctcagtggcctctcctcagctcacaggaggcattagtgggctctgatggcagcaggtgaggcagaacaatccccagtccccttggacaatatacccaggcattgggagggatgctgccaacagggtgggtcttttctcaggcccactgatgatgtgtgtgggcataggtg

SEQ ID NO: 714 - DNA, 579 bp, Homo sapiens
  MAP TO CHR21_73.0; EXPRESSED IN BRAIN, SIGNAL = 1.3; EXPRESSED IN HEART, SIGNAL = 1.2; EXPRESSED IN HELA, SIGNAL = 2.6; EXPRESSED IN LUNG, SIGNAL = 0.77; EXPRESSED IN ADULT LIVER, SIGNAL = 0.76; EXPRESSED IN FETAL LIVER, SIGNAL = 1.4; EXPRESSED IN BONE MARROW, SIGNAL = 1.2; NT HIT: gi14780689, EVALUE 3.00e-58; SWISSPROT HIT: Q64355, EVALUE 1.10e+00; EST_HUMAN HIT: BE902884.1, EVALUE 4.00e-58
gcgagggagtaacgactgaggggtgagcataccccttgtcaccccggtcatgactggcagcctggggtgtggggtttccatcgctcccctgcacagcgatgtggcaatatcaacaccgaaaagaaaaatcacaatcgccaaccgtagacacccgcctcccatagctcagggctctatgccaaatgacgcattggagacagaaatcagaagctctcagggaaatcatccatttgggaagaaaatccacccacactccagaatgagtagctgaaaggatgggtgtgtcctcagccccttcacccccctgggcaggcccctcgcctcaccgggtgcaatcagggtttccgcagatgagcagcgtctctccggagcagcagatggagcagtaggattggtacccgtcatcgtcgtacaggaagagggcatccaggaacttgtccttggaaggagcaaagcaaggctggcttgtgtcatccctgctctgaggccatgagggagtcacccccagcctccctgcctaccttacatggggcgcagatccctccctcaaacagagggtgctgtgtgtgaacctggaga

SEQ ID NO: 715 - DNA, 593 bp, Homo sapiens
  MAP TO AL121876.23; EXPRESSED IN BONE MARROW, SIGNAL =   2; EXPRESSED IN HEART, SIGNAL = 1.9; EXPRESSED IN PLACENTA, SIGNAL = 2.1; EXPRESSED IN LUNG, SIGNAL =   2; EXPRESSED IN ADULT LIVER, SIGNAL = 1.7; EXPRESSED IN HELA, SIGNAL = 0.9; EXPRESSED IN BRAIN, SIGNAL = 2.1; EXPRESSED IN FETAL LIVER, SIGNAL = 1.9; NT HIT: AJ290436.1, EVALUE 4.00e-82; SWISSPROT HIT: Q90610, EVALUE 1.50e-02
caggcctttgaagtggtttgtagtgcagtagttgtgatattagaattggatacaataggacacatttgtgatttttcttggtcattgacttaactccttagttacatattttgaaaacgaaagagaataatacaaaaaagtaaaagtactaacttgctggtactgagatgtagtctgtgaaattctattttttgcttacttgcaaatattttatctgcaggaatgcaagccaaaaatgtggagaagcataataatacagaaaggaaatgctcttctgatccaagaagttcaagaagaagatggaggaaattacacatgtgaacttaaatatgaaggaaaacttgtaagacgaacaactgaattgaaagttacaggtaggaatcagttctacaaaattacggcaaatgagattttaagtataatttggtttgggaagcaagagttttgttcaaagagtcaactttctgtgaatttagaattgcctgcaaatcaaatagttgagaaacttgctattaataagttgtactgagtaaaagcaatatatggaatatgaaaaaagagtttagagaacaagggcctagttgctgtgtgtc

SEQ ID NO: 716 - DNA, 593 bp, Homo sapiens
  MAP TO AC011585.3; EXPRESSED IN BRAIN, SIGNAL = 0.35; EXPRESSED IN PLACENTA, SIGNAL = 0.43; NT HIT: AB063285.1, EVALUE 9.00e-03; EST_HUMAN HIT: BF680078.1, EVALUE 4.00e-06; SWISSPROT HIT: P08547, EVALUE 4.40e+00
ttccctgatgaatcccaaagtcctggaactgtgcctgacacattgctgatgctccaaagtgtttcttaaacaaagaaagaaatctcacttataaagttagatgtcaggaatcttatgaagatattagcaatctgaatccagaaattatttcaaaatactaataaagcagcaacatgactaggtaagtatttaacctcaggaatgcaaggatggtttaacatgagaaatgtgctgatgtaactgtggtgggctgaacaatggcccttcaacatgtctgtgaatatgttgccttatacagcaaaagggactttgccaatgtgattgttacatatgttgacatctggatgttattctggattatcaagatgggcccataaaatcacaaagatccttataagaggagagaagaaggtcagagtcagagaaggagatgtaaggctagaaatagaggtgaggaagttagaaggaaagggaagaggaggaagagggagggagagaaagagattcaaagataaagcaaaactgttggctttgaaaatggaggaagagaccatgaattaaggaataccagtggcacgtagaggctggaaaag

SEQ ID NO: 717 - DNA, 541 bp, Homo sapiens
  MAP TO AL135909.3; EXPRESSED IN BONE MARROW, SIGNAL =   1; EXPRESSED IN BRAIN, SIGNAL = 0.98; EXPRESSED IN HELA, SIGNAL = 0.69; EXPRESSED IN PLACENTA, SIGNAL =   1; EXPRESSED IN LUNG, SIGNAL = 0.95; EXPRESSED IN ADULT LIVER, SIGNAL =   1; NT HIT: AJ298878.1, EVALUE 8.00e-03; SWISSPROT HIT: P53909, EVALUE 1.30e+00
ctcccaaaccataggtgctcactgtttgttaaattgaattttctaagttgtgtttcaacagatgattaatactttgcttttcctttcagagatgtggtactggatcttcctctgggctctcttctcttctctgtttgtccatggtgctgcaggagtgttgatgtttgtgatgctgcagaggcataggcagggaagagtcatctctgtcattgcagtcagcattggatttctggcttctgtaactggagcgatgattaccagtaagttgattttcttttgtctgaggatgtaagtttgtatacacttaccattttggtagctgtgttcttattatacatgtaacattagtgagatcttttatgtagattatttttcaacacttaacacactccatctagaagataaagatgagctgatttattcattgaacagacaagtcgttgtaattctgctgtgtgaagagtccttttacaaggttttgagggaaatagaaaaattcataaaaattggcaagaggcaaggcaggtcaatgggaaaattc

SEQ ID NO: 718 - DNA, 549 bp, Homo sapiens
  MAP TO AL136304.2; EXPRESSED IN BONE MARROW, SIGNAL = 1.3; EXPRESSED IN HEART, SIGNAL = 1.5; EXPRESSED IN PLACENTA, SIGNAL = 1.7; EXPRESSED IN LUNG, SIGNAL = 1.6; EXPRESSED IN ADULT LIVER, SIGNAL = 2.1; EXPRESSED IN BRAIN, SIGNAL = 1.5; EXPRESSED IN FETAL LIVER, SIGNAL = 1.4; NT HIT: gi15300082, EVALUE 1.00e-60; EST_HUMAN HIT: BI520435.1, EVALUE 2.00e-60; SWISSPROT HIT: P27575, EVALUE 6.80e+00
tttccaatgtggagcttgtgaaaaaacagttgaagaagcacctttcaggagaggagcatgagaaactgcagcaactgcttcagcgaatggtgagtgggtaataattgtggtgggtaatgaaagcaattaaaggtgggagatattcacagatctgaacagatccctcccgttcacccatctcatctttgctcctcaggagcagcaagaaatggcacagcaggaacgaaagcaacagcaggagctgcacctggccctgaagcaagaacgtcgggctcaggcccagcagggccatcggccatacttcctgaaaaaatgtgagttgggcacaactgttgctaacagggacaggggtgcaggggccatggtggtagagtcttgtgttggggtgtccctgatcccctttaaggaaggcatgaaggctggatcccatggtaacttggaggaaagtagaaatagtagggagttgtttgtaaccagtcttgtatccctaattagatcatggcaggcattgtcacctttatttcttggtctacactccccacttcccaa

SEQ ID NO: 719 - DNA, 597 bp, Homo sapiens
  MAP TO CHR22_182.0; EXPRESSED IN BRAIN, SIGNAL = 0.8; EXPRESSED IN LUNG, SIGNAL = 0.66; EXPRESSED IN ADULT LIVER, SIGNAL = 0.79; EXPRESSED IN FETAL LIVER, SIGNAL = 0.73; EXPRESSED IN BONE MARROW, SIGNAL = 0.73; NT HIT: Y17124.1, EVALUE 0.00e+00; EST_HUMAN HIT: BE268241.1, EVALUE 1.00e-104; SWISSPROT HIT: Q9Z0H3, EVALUE 1.00e-31
gaagggcagaaaggaaggtccccaccagcacagggcacaggggagatgggatgaaggtaaggtgggactcaggtgcccccggggtcacttcagggcctcccgagggtgactgtgctgggccctgagccagagcccctcatggcagacagggttgtggggtcagccttgttttggggatggggaactggaaggacaaggaccacctgcagttctcagctggtggaccctggtgggcagggcccaccccaggcctggcagggccccgctcctcgcggcctccctgggctgcaaaagctctaacttgtgtcctttggttgttgcctcagctgaacatccatgtgggaaacatttccctggtggaccagtttgagtgggacatgtcagagaaggagaactcaccagagaagtttgccctgaagctgtgctcggagctggggttgggcggggagtttgtcaccaccatcgcatacagcatccggggacagctgagctggcatcagaagacctacgccttcaggtaggatcatgcatgagtctctccctccctcatctccctgcaaaactgttttgagaaagacttctctgtgtgagcggtga

SEQ ID NO: 720 - DNA, 529 bp, Homo sapiens
  MAP TO U82695.2; EXPRESSED IN FETAL LIVER, SIGNAL = 0.44; EXPRESSED IN ADULT LIVER, SIGNAL = 0.63; EXPRESSED IN PLACENTA, SIGNAL = 0.6; EXPRESSED IN LUNG, SIGNAL = 0.45; EXPRESSED IN BRAIN, SIGNAL = 0.42; NT HIT: U82695.2, EVALUE 0.00e+00; EST_HUMAN HIT: BF036577.1, EVALUE 1.20e-02; SWISSPROT HIT: Q62396, EVALUE 6.00e-15
ctgcccttagcatcgttttcctttcctgaggcgcacaatctgggcttcctgcctctgtcggctgtgctgcctgtttttctgtcttacaactcgtgcaacccgagtctttccacctgctgagccttccagggctccccccgccccccacattttgtttctgtcagctcctccaggggcccagggggttgaattcccctgtggccacaagaatgccttattttaggtgccagtatcttttgaggatgtgtccgtgtacttcacaaagacagaatggaagcttctggacctcagacaaaaggtcctctacaagcgggtgatgctggagaactatagccatttggtgtcactgggtaagtgatccctccacgacatacacacacccagtcccacctactctgtctctgggctcagtttatttccgagattcctgtttgtcggttgctatgagcccaagaataaatgcatttctccatcagaccagtaatgccagtaatccattgcaggccagccgccatctcagtaggatggt

SEQ ID NO: 721 - DNA, 545 bp, Homo sapiens
  MAP TO CHR22_146.0; EXPRESSED IN BONE MARROW, SIGNAL = 0.45; EXPRESSED IN LUNG, SIGNAL = 0.52; EXPRESSED IN BRAIN, SIGNAL = 0.52; EXPRESSED IN FETAL LIVER, SIGNAL = 0.49; NT HIT: gi14778686, EVALUE 1.00e-81; EST_HUMAN HIT: BI051783.1, EVALUE 0.00e+00; SWISSPROT HIT: Q9UIA0, EVALUE 1.00e-25
aaggtcaatgtgggtccaaggacgtggttgtcccctgttgtcccacacagcccgactggctggatggccccgagtaagctccactccattcagaacctcagtgagcccacatgtcacgtggggactttagggaggatggtggattcaggagcctgccacagagagagtgctcagtgtgggagcagcagctcctgccccttcgcctgtcgtagggctgtcacgctgatcagggacactagcgtctgggcttctctgagcctcctggagggcccacccagcctccctctcttcccacccttgcctggccacctccccacagttctgcctggagctctacaaccctagctgccgaggccagaaaatcaaggcctgcaagaccgatggcgacggcagggtggtggagggcaagcacgaatcgtaccgcatctcagccaccagtgccgaggaacgtgaccagtggatcgagtccatccggtaaggggtgcccaggtctggggacggcttcccgtcaccttccagaaggccctgcttcttttgggtcttgc

SEQ ID NO: 722 - DNA, 560 bp, Homo sapiens
  MAP TO AJ239319.2; EXPRESSED IN BONE MARROW, SIGNAL = 2.2; EXPRESSED IN BRAIN, SIGNAL = 2.1; EXPRESSED IN PLACENTA, SIGNAL = 2.9; EXPRESSED IN HEART, SIGNAL =   2; EXPRESSED IN LUNG, SIGNAL = 2.8; EXPRESSED IN ADULT LIVER, SIGNAL =   3; EXPRESSED IN FETAL LIVER, SIGNAL = 2.2; EST_HUMAN HIT: AU125768.1, EVALUE 6.00e-94; NT HIT: gi14759120, EVALUE 4.00e-94; SWISSPROT HIT: Q14202, EVALUE 5.00e-22
atactcagtgggcatggctccaatcttactcactcttagggaagtctgcctccaagtcttgcccaggctcatccaagacattggccatcttgactgccatggccaggacatcatctcgagcaggcccaaacaggtcacagtcttccaggagtccctctgcactctggttgctcacaagatctgggaagcagagaagttggctcagtggttacaagctcctgctagcaccctcacaagctttcagggactgatcccaactatcctcccattctactaggcaccaagatcaccaataccaccccctcgggcagagacatgctggtagcaccctgtctccctcgtcgccaccatctatggcataccacaaaggtcagatgaggccttgtctaactcctcagcctctgcaatcatttctgccatagccaggatgtcggcctccaaggggttggaagggatcttcaccttcagctcctcaatggtctctacaatcttgtctgtgctctccaaggtagtgggcaagaacatgggcacaggcacctggaggcacgaatcccaactaa

SEQ ID NO: 723 - DNA, 518 bp, Homo sapiens
  MAP TO AL138801.1; EXPRESSED IN PLACENTA, SIGNAL = 0.52; EXPRESSED IN LUNG, SIGNAL = 0.57; EXPRESSED IN FETAL LIVER, SIGNAL = 0.45; EXPRESSED IN BONE MARROW, SIGNAL = 0.47; EXPRESSED IN HELA, SIGNAL = 0.93; EXPRESSED IN BRAIN, SIGNAL = 0.55; SWISSPROT HIT: P37714, EVALUE 2.10e+00; EST_HUMAN HIT: BG171210.1, EVALUE 4.60e-02; NT HIT: AJ251973.1, EVALUE 4.90e-01
tggaagggagggttacaatgggggttggctggggatctaccattgtaaaaaggtcttaccctttacaccttctctattttttttacggtcttgatttcacaccactctgactcataattttttattgtgcttttcaccatcaggtcagcatatttgtttataaagttatttaatctgcattgtatctccctgctaccatatctatagatatatttctcacacacctgtagaataaactagacatagtaaggctacaatgacaaggccactagggatgtgctggtgatgatgatgatgatgatgaagatgatgatgatttttagagggttcatcttctttgtgccaggcattattttaagtactttacatgcagaccctggacatacgattgcacagagtgatccctgcaacaggatggccaggaaagggtcacgtgagctgagatctagcggaagctttgcttgccatgttctgtctcctagagaagggaggtgtgcaccctgagaggcatctttgtc

SEQ ID NO: 724 - DNA, 585 bp, Homo sapiens
  MAP TO AC015523.3; EXPRESSED IN BRAIN, SIGNAL = 0.59; EXPRESSED IN PLACENTA, SIGNAL = 0.61; EXPRESSED IN LUNG, SIGNAL = 0.54; NT HIT: gi4557600, EVALUE 1.00e-122; SWISSPROT HIT: P47869, EVALUE 4.00e-39; EST_HUMAN HIT: BG699503.1, EVALUE 1.00e-113
gacagctagattggctggttgtttaatacatgaaaatttctcagtatataaatacatcacatcaaacctaaaaacatacctcatggtatacagcagagtcccatcatcctgaattcgaagcaacttatttggcattgtcatattatgagctactgatttcttcccattgtgaaaaaaggtatctggagtccagattttgctagccattaaattgtttagtcgaaggatattcataggacctttaaattttaaacgttcatctttccatttttgtcgaaagaaaacatcaattgtatattcctgaaataaaaaatagaatttttttgaaaatagtaaatgttgtagacacaagacacggtaaaattccaaaataatattctaattaatttaaacagagagagctatattgaaaggaaaacatttttaatcagaaagattactcctttggcttatcaatacatgttgccacatacaatgggataaagtacgtctgtgtatactattagctatatattcttctgaaaagaagaagtaaattcactttggcctcttttagttgaacaaggtctcagtcaaactgctcca

SEQ ID NO: 725 - DNA, 514 bp, Homo sapiens
  MAP TO AL137795.2; EXPRESSED IN BONE MARROW, SIGNAL = 2.5; EXPRESSED IN HELA, SIGNAL = 0.61; EXPRESSED IN BRAIN, SIGNAL =   1; EXPRESSED IN PLACENTA, SIGNAL = 1.1; EXPRESSED IN LUNG, SIGNAL = 1.8; EXPRESSED IN ADULT LIVER, SIGNAL = 1.4; EXPRESSED IN FETAL LIVER, SIGNAL = 1.1; NT HIT: U20365.1, EVALUE 1.00e-04; SWISSPROT HIT: P50191, EVALUE 4.80e+00
aatgacttgtgccccttctgagccccggccttgagaggtcttcatgcttgcatttgccactgcagtgagaagagctttccgtagataactgctgcccccacagtctgtgccccaggatgaacacacacaaggtggactggatcccagtacagctaagagtcaaggccaaggaaatgaccccagagctcagcctagctgacttagaaatgtgagaggaaccagtgctcattgttgtatacctttggattttgtgagtgcttgttactcagtaatagctgactaatacagtctcccttccattctactactcttgagtcttcacccctaagtcattacctaagtaatattctttcttccactctttcccagttattattaacatcatcatgtcccaaatggatctggtcacatcccataccatgagaccacctgagtaactgcacaacttatattccttacccaattagaaccagcccaggtgctccaacctgacactcagaactccaccacagca

SEQ ID NO: 726 - DNA, 594 bp, Homo sapiens
  MAP TO AC018709.5; EXPRESSED IN HELA, SIGNAL = 0.54; EXPRESSED IN BRAIN, SIGNAL = 0.69; EXPRESSED IN PLACENTA, SIGNAL = 0.83; EXPRESSED IN LUNG, SIGNAL = 0.73; EXPRESSED IN ADULT LIVER, SIGNAL = 0.67; EST_HUMAN HIT: D20343.1, EVALUE 3.30e+00; NT HIT: AF293359.1, EVALUE 2.20e+00; SWISSPROT HIT: Q95085, EVALUE 6.70e-01
ctgcctgatcctgtcattccctaaatctgtttttgggatttggactcagttataggtgaatttgtactccctctactggtggatgaaagcaaaacagtaataaataaggtgaatttacttcatgatacaatgtattaatttggagaaccattgcaattttggattctagaaagtgagttcaactaattgttatcatcataaggagagtctttggaatgatgattaaggcaggatccagcacttctggaactagtggttccttcatgaaccctctcatctgctggttcctcagcctgagaagaaagagaagcactaataataccactccactgatgtaatgcagtaatatattagacactacggaaagtactccatacttgttagccattattgctgatattttgctggggtaatataaattgaagagtttctgtagaactcagcatctgttttatcatacagagtatgttttatttcataagaattataatgctgtaatagtgcataatacatttactaatgctataacagtgcataagaaatgaaataaaattcaataatttcaggcacaactctgaccaagcctcacgactt

SEQ ID NO: 727 - DNA, 600 bp, Homo sapiens
  MAP TO AL136231.3; EXPRESSED IN FETAL LIVER, SIGNAL = 0.52; EXPRESSED IN BONE MARROW, SIGNAL = 0.52; EXPRESSED IN LUNG, SIGNAL = 0.59; EXPRESSED IN BRAIN, SIGNAL = 0.57; EXPRESSED IN PLACENTA, SIGNAL = 0.62; EXPRESSED IN ADULT LIVER, SIGNAL = 0.75; EST_HUMAN HIT: BI826180.1, EVALUE 3.00e-65; NT HIT: gi11429150, EVALUE 3.00e-64; SWISSPROT HIT: P34414, EVALUE 1.50e+00
tgagttgggcatcaaaacagagctactaaacagaacagcaggggtactaaccaagataaagatcaaaccctgtcaggaataaaacgttcaggtcccaagagtttctctcctaatagaagcccagatgagcatgaatcacttactggaaaacccagagccgtcttcatgagcacctccctacacctcctagggtgcgaaggtgtcagcttgggctctgggaaaagaaaatctcgtgtgttttcttcgtagtaggccaactcatcccacactagaaagaaaatagaaaaagcataaatatctgtatttacacctccaggcttaacaaaataaaagttcaggcagatgatggcagagatggcactcaggtaaaaatagacatattgatcctagcacatgttattcaagaggagactaatttctactactttttatctcgtggataattttttaaagccttccaaagtcataacagagaaaaaaagactaaagagatgttctacaaaatagaacaaaaaggaaaaactatctttccatatatccatccaatttttcctgcaacaaatttttactaatgataaaccttaacccaggcactgagga

SEQ ID NO: 728 - DNA, 565 bp, Homo sapiens
  MAP TO AF235095.1; EXPRESSED IN FETAL LIVER, SIGNAL = 1.7; EXPRESSED IN BONE MARROW, SIGNAL = 1.4; EXPRESSED IN BRAIN, SIGNAL = 1.5; EXPRESSED IN HEART, SIGNAL =   3; EXPRESSED IN PLACENTA, SIGNAL = 1.2; EXPRESSED IN ADULT LIVER, SIGNAL = 1.6; EST_HUMAN HIT: BG197149.1, EVALUE 0.00e+00; NT HIT: gi14743602, EVALUE 0.00e+00; SWISSPROT HIT: Q9NV58, EVALUE 1.00e-103
actcaagaaaaatcaaacattatcttcttacccacagtctggagctggacaccacctacaatcaggatctgcaacaagccaccgtctaagcataaattcttcgtatgtttccatcaagacatcatcacttaatatcaagcgaatatcatggggattaaaccgttcagtacattctgggcaactaatattaactctgctttcagagatttctatccttaaatattgtcgtaagcaatccacacaagatctgtgatgacaagtcattatatcaggaaatctgtctttagaatgccgcaaaaggcacaaagggcactctatgaagtctccaatttgtttgctgatggaagttaatccattgtcagaagaggtatttgtagagaaaatggagttcttatcagtacacatttcagaatgtatactttcaatacttgcaattccatccaccccgccatttagctcccttgatttacgtttgttatcttttttcctccgaaacagggagcctattgaaattcttctttttttgggtgcctttttgactgaaggcaagctcacagatgaagca

SEQ ID NO: 729 - DNA, 577 bp, Homo sapiens
  MAP TO AL137251.2; EXPRESSED IN HELA, SIGNAL = 0.54; EXPRESSED IN LUNG, SIGNAL = 0.59; EXPRESSED IN PLACENTA, SIGNAL = 0.66; EXPRESSED IN BRAIN, SIGNAL = 0.59; EXPRESSED IN FETAL LIVER, SIGNAL = 0.58; EXPRESSED IN BONE MARROW, SIGNAL = 0.55; SWISSPROT HIT: Q98867, EVALUE 7.30e+00; EST_HUMAN HIT: BF508546.1, EVALUE 3.00e-06; NT HIT: M30539.1, EVALUE 2.00e-06
ccttgcctgagagagtcaccttagccttcattcctgaagagtctgggccattagcagtcctgcctaaattaggttgatacagtttttttgattgacttagtccagaacataggaaaaatgaagaaaagccctatgaggtctcctgccttccagacatgttcctccttacctcattaagtaacagccccatttcctcttgataatcaggatcgatcttcccagccaccactgtagctcccttctttgcctgaaaattggctggcatgagttgtacaaagaggcaggtggcagcttcaactttcagttttgtgaacccactgctgtgtctcctggtggaagcattcctcacttggaatgtaatatatctaagatcatcagagtcataagtcctgagtacaagaagcaaaaatttcactagttgattgctaatgagaagcgctactccatttctagccctttgattcctaggtgtgtgaattctagctataggagaaatagccactacttattggtccctgatataaagcatataccatattctggaggacattactccagcccttgtgttgctatccat

SEQ ID NO: 730 - DNA, 591 bp, Homo sapiens
  MAP TO AL133553.2; EXPRESSED IN BONE MARROW, SIGNAL = 1.5; EXPRESSED IN BRAIN, SIGNAL = 1.5; EXPRESSED IN HEART, SIGNAL = 1.6; EXPRESSED IN HELA, SIGNAL = 1.4; EXPRESSED IN PLACENTA, SIGNAL = 1.8; EXPRESSED IN LUNG, SIGNAL = 1.8; EXPRESSED IN FETAL LIVER, SIGNAL = 1.5; EXPRESSED IN ADULT LIVER, SIGNAL = 1.8; NT HIT: gi14730471, EVALUE 6.00e-81; SWISSPROT HIT: O42370, EVALUE 9.80e+00; EST_HUMAN HIT: AA332746.1, EVALUE 2.00e-51
tgaagactgcattggtgagggtaaagccattgactgcttctcctatttcctttgctgttgtccaataaatgggatttagaatagaaactatctttctcattgctgaacctaaagaaaaaaaaggataaataaggtgatagcaaaatttttagtctattttattgtcttcatagcatattattcacaaggatgaattctaaataatgttgaataccagaaacaaataccagtacctcatgtatgtttgtttaaaagcttaccatacttatgagttagtagtagcattctctagaactttaatggaagtaataagatgaagaataatatataagtttttaaaaagaggcttgaggcaaagacttaccaagactacgaggtacattggtaattttggcacgtattattctagtatcagagttagggctatcagttattgtggcattaaggaaagcaattccaaattcaacatcattaatatttccaataacacttcctctggctcgctggggcccacctattgggggaaaaaaaaacattcctggataaggatgcaatttcatcaacattacatgggagaaaagagggccagta

SEQ ID NO: 731 - DNA, 546 bp, Homo sapiens
  MAP TO AL133543.2; EXPRESSED IN BRAIN, SIGNAL =   4; EXPRESSED IN PLACENTA, SIGNAL = 7.4; EXPRESSED IN LUNG, SIGNAL = 6.1; EXPRESSED IN FETAL LIVER, SIGNAL = 5.1; EXPRESSED IN BONE MARROW, SIGNAL = 5.1; EXPRESSED IN HEART, SIGNAL = 4.2; EST_HUMAN HIT: BI767941.1, EVALUE 0.00e+00; NT HIT: AB044547.1, EVALUE 0.00e+00; SWISSPROT HIT: P14866, EVALUE 1.00e-65
tggcctgaactccattcttccggaaaatggcaattctctggacagggccacaaggattaccgatagtgtaaagaacatccgtggtgatcgaatagatggggttcaggatggtaaagagaagcacactgttcacgctccggatcatccgagttcccggggcgggagatcttctggctggtagagtagttgacaaaagctgggtgaccggcaatatgtatttggttgtcggctgtgtagttcactgcgttgcaagcctctagcacatcttcaaactccaccagtgcttgtctctttttagacattaccatcacatagctgatgagtccaaactcctgcaaggcctccacaatgtcagcttccaccacaccatcaattaggcccctgatgtggacaactggggaggcagaggttttgtgtgggtcatcacagttctccttagagattaggcttccatcagatggaattccccactctagaggacaaggcctctgcccacccgtttctgctccctcaaccgcccacgaggcagggcaggagacacatttt

SEQ ID NO: 732 - DNA, 583 bp, Homo sapiens
  MAP TO CHR22_86.0; EXPRESSED IN HELA, SIGNAL = 2.7; EXPRESSED IN BRAIN, SIGNAL = 0.61; EXPRESSED IN PLACENTA, SIGNAL = 0.53; EXPRESSED IN LUNG, SIGNAL = 0.56; EXPRESSED IN BONE MARROW, SIGNAL = 0.63; EST_HUMAN HIT: AL120054.1, EVALUE 5.30e-02; NT HIT: AL049866.2, EVALUE 1.40e-01; SWISSPROT HIT: Q59943, EVALUE 1.10e+00
ggccaattttagggaagaggaaattgaggctgaaagtcaaaaaacaaaggaactgcctgaggtctctcaactgagaagtgagtgggccagggttcacattcagcccccactccattctcaggccgggcaggaaggtactttgccctcaggagggcaccttcgacccaaagcaccctgaccaagaggctgtgcaccgtggcaaccctaagactgaggcccaggtcctggagttccaccaaggtaggtacaaccagccaggccgtcagtgacaggaggatttactggggcttctagggaccccgtgaaagggcaaaaagacggcacagaagcctgtggatatcagatatagatagtgagggctagggctttatggggagggtggatgggccctgtgggcgggggatgtttaggagatcttccaaacagagcattccagcctgggggaacaacccattatagaccccacccagcaccgaagacagggacaggtggggctgagcctggaggccggcaggacctgtgcggccggctgcggtgtcagcaatgccaccgtgtgtggaaccctctgtgcctaggttcctgg

SEQ ID NO: 733 - DNA, 535 bp, Homo sapiens
  MAP TO AL133406.3; EXPRESSED IN HEART, SIGNAL = 2.5; EXPRESSED IN HELA, SIGNAL = 3.6; EXPRESSED IN PLACENTA, SIGNAL = 3.3; EXPRESSED IN ADULT LIVER, SIGNAL = 4.1; EXPRESSED IN LUNG, SIGNAL = 3.3; EXPRESSED IN FETAL LIVER, SIGNAL = 2.8; EXPRESSED IN BONE MARROW, SIGNAL = 2.4; EXPRESSED IN BRAIN, SIGNAL = 2.5; EST_HUMAN HIT: AA053497.1, EVALUE 0.00e+00; NT HIT: AL161571.2, EVALUE 3.30e-02; SWISSPROT HIT: P03135, EVALUE 5.00e+00
atagacggcattcaggatggtggatggggaatactgatgattatgaagcactggggtgcatacacaaaggctggcaacaaagtctgtatgtggagtgcaagaacgttcattcagcgcatttccagtaatatttctactacctggtaattagcacacatgtcctgggctgtaaggaaccccttcattcatgagaagcagagttaggcttcctgacccctcacatggtcaatccactgctacctgacattgactggcccctctcatagtcaaatgctcacagccaatcccagcactgcccagtctatatcccctgtgacttctctgcaataccacaccatcctccttgaaactcttctcctctggcttctgtgatgccagcttttgtggctcctcctcctcctgtgtccctaaaatgtgagactgtggtcctcttctcccaccatacacactgttggagttttcggctgtgcccatgggctcctccaccaccaccaccatccccgcccccaccacccccttcacaactttccctgga

SEQ ID NO: 734 - DNA, 549 bp, Homo sapiens
  MAP TO AL138784.1; EXPRESSED IN FETAL LIVER, SIGNAL =   4; EXPRESSED IN BONE MARROW, SIGNAL = 4.5; EXPRESSED IN PLACENTA, SIGNAL = 4.9; EXPRESSED IN HELA, SIGNAL = 3.4; EXPRESSED IN BRAIN, SIGNAL = 4.5; EXPRESSED IN LUNG, SIGNAL = 4.7; EST_HUMAN HIT: BF790210.1, EVALUE 2.00e-10; NT HIT: AJ229041.1, EVALUE 1.00e-07; SWISSPROT HIT: Q01642, EVALUE 1.40e-01
taagatttgggtggggacacagccaaaccataacagtgtgtatacacacatacgtacatatttccttatacaaaaaaaatttaaaaataaaataaaataaacagcatcctaggtacctgaggatgaaaacatccatctaagcctgaatctctccaacaagacctccaaaaaaacatgcagaagaaccaggagagaaaaataaagccacccttaaccagcctacagcatgacctgaagacagagaacgctggaacctttgaattacatggaagtacagagataaacccccaagtgcagcagacagccccggagccaccccatggggaggtaagcagagagcatccaggacagcatggggcgaggaggaatgaggtgatggaaggcagggtgcagtccctccacaaggagcaagacaatcctaaaaacggatctgaaacctgaaaatgagaaactgatggaagagaccagtacgtgtgcaggaccagaggagttagtctccggaaggtgctgcatttagaagtgggaagcgcccttgaggtggaaactgaa

SEQ ID NO: 735 - DNA, 590 bp, Homo sapiens
  MAP TO Z98044.13; EXPRESSED IN BRAIN, SIGNAL = 0.5; EXPRESSED IN FETAL LIVER, SIGNAL = 0.74; EXPRESSED IN PLACENTA, SIGNAL = 0.89; EXPRESSED IN BONE MARROW, SIGNAL = 0.62; EXPRESSED IN LUNG, SIGNAL = 0.76; SWISSPROT HIT: O95479, EVALUE 7.00e-43; EST_HUMAN HIT: AW503925.1, EVALUE 0.00e+00; NT HIT: gi4758497, EVALUE 0.00e+00
tgccactttaggctggtaggaggccagggagacaggggaatgccatccttgcctccgagcaccctgggggaaatcccacctcaagtcccctccactccacccaagggcgtctgcatttggaaagctgctcccggcgaagtgggcagcccagtgccccatgcccagccccagggcccacctgcgaaggtcggcgtcaggctgtggaagctgtctggcttctgcagctctctgcgcacctgctcactgtaagactggtactggcccacgacggcactgcccctctgcaggccccgcagcgcctggaagacctgaagcttgtgccgcagcacagcctccgcactgctgacattgtggggcagctccatggccacgagggtgaggacctccgtcagatggttctggaggacgtcgcgaatgacaccgtactcctcatagaagctggtgcggcctggtggagggaggtggagaagtggggaggatctaaagagaggccagaacatcagatctccccgaggtgcaccaaaaccccagcccgcacattcatcctgcatcctcttcccccagtccacagggcctataaaaatggtgca

SEQ ID NO: 736 - DNA, 551 bp, Homo sapiens
  MAP TO CHR21_14.0; EXPRESSED IN BONE MARROW, SIGNAL = 1.5; EXPRESSED IN BRAIN, SIGNAL = 1.4; EXPRESSED IN HELA, SIGNAL = 3.1; EXPRESSED IN FETAL LIVER, SIGNAL = 1.4; EXPRESSED IN PLACENTA, SIGNAL = 0.77; EXPRESSED IN ADULT LIVER, SIGNAL = 0.8; EST_HUMAN HIT: BI197582.1, EVALUE 2.00e-01; NT HIT: AL163218.2, EVALUE 0.00e+00; SWISSPROT HIT: P22073, EVALUE 3.00e+00
aacgatgctggttaatgatgccaactttttgatagtttacagccttatgttactgggttgcactctcaactttgtctcaacagtttttagcttaataacttgagtgaggatattgatagcacgttcatcgaaatcaaacataacaacaaatgggaggttagtagaatttttattttttttaaaaaaatagcatactgaacagtatattaaaatttgagataattataaaccctttaattataacaaaaaaatccccaagacaaatacaagataggaatagatgaatctaaatagcagaatatgtaaaatagtattgatcattttgaataaaattaagctcacttacttcagcaatatgataaaactattagaaatgctcaagcagtgttcagcactattgataaatgtattgtgcccaggataatgtcatagttagaagataaatgaaaagagtctttaagtaatagcctaatatagtggaatatatgttgagaataatcatctggtttatgaatttgtagtaaatattgcatgtttagaaccaaccattg

SEQ ID NO: 737 - DNA, 546 bp, Homo sapiens
  MAP TO CHR22_151.0; EXPRESSED IN BONE MARROW, SIGNAL = 0.46; EXPRESSED IN BRAIN, SIGNAL = 0.37; EXPRESSED IN PLACENTA, SIGNAL = 0.68; EXPRESSED IN FETAL LIVER, SIGNAL = 0.44; EXPRESSED IN LUNG, SIGNAL = 0.64; EXPRESSED IN ADULT LIVER, SIGNAL = 0.8; SWISSPROT HIT: P07522, EVALUE 2.00e-16; EST_HUMAN HIT: BG107572.1, EVALUE 0.00e+00; NT HIT: gi15318146, EVALUE 0.00e+00
cttcctccaggttctgatgcaagacagtgttccagaatgactggtccaggtcaagctccctctgcttggcctggccctggctccaggccccacccgtcttaccccatctcgggatgcagtgcaatggcacggggctcgtccatgtcctctgacaccaggatcttgtgggaggtgctgttgaggcacgtcacctcgatgtgttcagtgcctgtgtgggtccaatagaggcttcgggccacccagttgactgcgatgtcatcggggtcgttgatcttggtgttgatcagcgtctgcgccccagacccatccaggtatgccctgcggatggcccacacctcgtcatccgtccagtagacgtggccctccattgggtcatagttgatggcgatggcatgctggatgtcgtccagctgcagcacgatgtcggtgaagtccggtgtgtccagcgagaccctccattggtccgtctaccgggccagcagcaggacctccttggctcctgtggggacaggtgcagtgggccaggcaagggaaaaactcagccag

SEQ ID NO: 738 - DNA, 597 bp, Homo sapiens
  MAP TO AL137790.1; EXPRESSED IN LUNG, SIGNAL = 0.54; EXPRESSED IN ADULT LIVER, SIGNAL = 0.62; EXPRESSED IN BRAIN, SIGNAL = 0.61; EXPRESSED IN FETAL LIVER, SIGNAL = 0.7; EXPRESSED IN BONE MARROW, SIGNAL = 0.63; NT HIT: AF417842.2, EVALUE 6.00e-04; SWISSPROT HIT: Q04652, EVALUE 2.60e+00; EST_HUMAN HIT: BG013742.1, EVALUE 1.00e-08
tccctccttatgaaccatgcaatcttgcacaagtttttggatctctctgagcctcagtttcttcatctataagatggggataataaaagcacctcttttttagggttgttgataatgaagtgaagtcatgggcacacaatgtgccaggcatagagttggccctcaaaagtttgttgttattgatcattactattataagtcttatgatgtttcttgtgtatctttccccaatcaagcatccaacccttctactcagacccccagagtctttgctggagaaaagcaagtagggaatgggaccaggggagacagctaattcagaggggatgggttcatggcataagaatggctcagcctgcttggcaaatgcctttgcacatgcatccagacatgaggtgcagttgaaaactcagcctgtaactctttggccttcctctatcaggttgcccaaacaagaggatggcctgccctccagctttctcaccctcatcctgggctgcctgatgccatgttgagactgactggctttcagttagataaaaacagaggaaaagggggagtgtacagtatgtctagacttgacactgtatgccccaa

SEQ ID NO: 739 - DNA, 600 bp, Homo sapiens
  MAP TO AL133349.2; EXPRESSED IN ADULT LIVER, SIGNAL = 1.4; EXPRESSED IN FETAL LIVER, SIGNAL = 1.1; EXPRESSED IN HEART, SIGNAL = 1.3; EXPRESSED IN PLACENTA, SIGNAL = 1.4; EXPRESSED IN HELA, SIGNAL = 0.64; EXPRESSED IN BRAIN, SIGNAL = 0.98; EXPRESSED IN LUNG, SIGNAL = 1.2; NT HIT: AY056101.1, EVALUE 5.70e-01; SWISSPROT HIT: O93233, EVALUE 8.80e-01
tcaccatcagccaatgacagtttatagctcactgaaatcatggctccttgatataaatacctacaaaaacattttcttcacctccatatatttctagcttctcatagtctttaacttttccctccattctttttaaatttttgactttgacccatggaagcttcctccttgaccaatatctccgaccctttcctctttgccttccaacaggcatatagctcttattcctgaaaaaaaaaaaaaaaaaaaaaaaaaacttttggtcctattgactactctttattttcacataacccattttactgccaaacctttcagtgtttccatttcaaccctacatctacaatcacttttccacccatactctcaggcatcactaatatatccattatcagtctagtcaatagcttttgtcctcttcttcttctccttgatgtttctatagttatgaatacagattctcattcaattctttttgaaactctctctgtaattagcttgatgacaccacacaatagttgggtccttttacagtcctgcaaaggttacttcctggttggtttgtttgctacttccctttcctcctaaatgtggattgcc

SEQ ID NO: 740 - DNA, 548 bp, Homo sapiens
  MAP TO AL139135.2; EXPRESSED IN FETAL LIVER, SIGNAL = 0.67; EXPRESSED IN BONE MARROW, SIGNAL = 0.52; EXPRESSED IN BRAIN, SIGNAL = 0.63; NT HIT: AL163209.2, EVALUE 3.00e-67; SWISSPROT HIT: P70213, EVALUE 9.00e-16; EST_HUMAN HIT: BE222256.1, EVALUE 1.00e-39
gctcttatcattcaagcggctgacctgaaatgaaaggtgcatgcacagcctcaccaggtgtctactgttaaagtgagggcactgattggaaaaggatggaaccccgaaacttagaatggggacatttgggaggaacctgatgaagctggacttgtaaactctgatgaacattttgccagaaaaaatagctttcccatctccaatagtggcaacattccctccttgacccatgctgctgtccccctttccacatttgtctgagaagataaaccctacgctgcctgaggcaacagtgatggcctccctgaggcaattgccaggcaagataatgttgatgctcctcagaagccatccccaacatccctgttcacgtctagagctataactaaagtcccagtgggcccatagagatgaggttgagagtgtgacccatgatgaggtgtgctacacttgaaaagaactgcttgaattttctaatttatataagcagaaatctagagaacaagcctgggaatggatattaatggtgtgggaagatggtggaagaa

SEQ ID NO: 741 - DNA, 539 bp, Homo sapiens
  MAP TO AC015478.3; EXPRESSED IN BONE MARROW, SIGNAL = 0.42; EXPRESSED IN LUNG, SIGNAL = 0.5; EXPRESSED IN BRAIN, SIGNAL = 0.49; EXPRESSED IN ADULT LIVER, SIGNAL = 0.29; EST_HUMAN HIT: AW241724.1, EVALUE 1.90e-01; SWISSPROT HIT: Q09455, EVALUE 1.20e-01
cctcctgaggatagggaaggacccagcacccagcaccctgtcctatgacaccatctgcagctgtgtctctagctgtccctggggagacacacaaatatgtttcacggagaaagagctagaacaaaagaaaaggggcggatgtgagtgaggtgccagccaaccgtagagaaggactttgtggaaccccccagtgctctggctctccagcctaatcttcctgtcttggcattccaggtcccacaagatcaggccccacctctccagccctttgccccctgactgcagacaccgacctgcagctgcccctcacctgcactcatcttcctgcttctgtcccaactgtccacccaacagagtggcctttcctttcttgtccccacaggccagctctttacggttctccaggaaccagctcagagagcccctcctgcccaggtccaccacctcagtccctggaagggctccacaagtgttcattgttattatttttaatcagttagtctgaggctcgaatggaggctttgccacttcctggtcat

SEQ ID NO: 742 - DNA, 571 bp, Homo sapiens
  MAP TO AC012482.3; EXPRESSED IN HELA, SIGNAL = 5.3; EXPRESSED IN PLACENTA, SIGNAL = 3.4; EXPRESSED IN LUNG, SIGNAL = 4.5; EXPRESSED IN ADULT LIVER, SIGNAL =   4; EXPRESSED IN BRAIN, SIGNAL = 4.6; EST_HUMAN HIT: BG473668.1, EVALUE 5.10e-02; NT HIT: gi9845300, EVALUE 3.50e-02; SWISSPROT HIT: Q04779, EVALUE 4.20e+00
aaataatttggggcagagggagagaaaagagggaggaacttggaagatgacctaacaagatttatgaaaagatcactcaggctgattggtggtgaatgggtcatggagagacaagaggagaagctggtttggaaagctgtctcatggtctgggaaagggaaaataatgttttggacaaaggtggtaacagtgaaggtgaagagaattcttttgcatagatgggacttaaatgcaaaaagtcaagggaacaacagaagtagggaagttattcttgccattttgaacaaattcatttggattctgggcagaaatgttggctgctgaggttctctaaagcacagtgaatactccaacttattatacagaacagacacttgcagaactccagctagacccacctgtgttccaaagggacaagacacatgccaggcccatgcacagcttcattgaaggaccacgtgacaggaagcccagcatgcttgtgatactctggcccacctggaatgaagcaagcaaacacttaggaaactaagcacatggatgcagaccttcctttgagaacagtgcgtga

SEQ ID NO: 743 - DNA, 577 bp, Homo sapiens
  MAP TO AL078585.18; EXPRESSED IN FETAL LIVER, SIGNAL = 1.7; EXPRESSED IN BONE MARROW, SIGNAL = 1.7; EXPRESSED IN HEART, SIGNAL = 1.3; EXPRESSED IN PLACENTA, SIGNAL = 2.2; EXPRESSED IN LUNG, SIGNAL = 1.8; EXPRESSED IN HELA, SIGNAL =   1; EXPRESSED IN BRAIN, SIGNAL = 1.5; EXPRESSED IN ADULT LIVER, SIGNAL = 2.1; EST_HUMAN HIT: AV707049.1, EVALUE 8.10e-01; SWISSPROT HIT: P16343, EVALUE 2.50e+00
atgtaaggctctgtggggtgaacagtctggaaagaagaaagcagtgattcccagcaatggtcagaatccaaaagctgagaggccctaagaggaagaacagcggtgattttgcaccagcgatcatatgtctctgcgggaagggcagcatttaagagtctgtggaaagagggttttaacatctcctttccccaggagggatgtcccagtctcagaactgggatccttctggcatcaggatgaccagaattggggtgcccttaacggccagccctggtgcagcctcctctgcggagctggacgtgcccccagggttgctcagccaaacagaaggatcgagaggcaacatgataggtgcctaggatgtggctataaaaggttcttgtgggcactgtgtgatccttcattggccagtgccactgcaggaatgatgaggaaaatggccagcagttgagatatttaggctggacattagctaaggggctgtcttggcagctccaggagatgggctgatagttcatcttaaagattacagacccttcctccttgcggcatagaatcctatgtgaggcagctttcc

SEQ ID NO: 744 - DNA, 519 bp, Homo sapiens
  MAP TO AL133520.2; EXPRESSED IN BRAIN, SIGNAL = 0.91; EXPRESSED IN FETAL LIVER, SIGNAL = 1.1; EXPRESSED IN LUNG, SIGNAL = 1.4; EXPRESSED IN PLACENTA, SIGNAL = 1.4; EXPRESSED IN BONE MARROW, SIGNAL = 1.1; EST_HUMAN HIT: AA579641.1, EVALUE 0.00e+00; NT HIT: gi15303869, EVALUE 0.00e+00; SWISSPROT HIT: P53323, EVALUE 2.00e-19
gagcttcactgtgtgtggttgtcatacacattcttctacccaaccatggacctctttcttcctctcaggcgcacttcatctaatttttttagcactggcctggcctttttggaggaggtggagtagctcttcagaaaggcttcaaacacagtttcagtgttgggatgggtactgaggaaggccttctccaggacatagaggtctactcccttatcctctggaagtgctgaaatgaaactcagcccaaagtctatgagcacaatgttcagctgttccagggggggtttcaggagcatgttggaggtggtgagatcaccatgaatgaggtcttcatcgtgcattcgagccaaaacctgcccaattgtcttggctaagttggagagaccctggggagttttttcagtctccatagtggactgaatataatctcgaacagtcactgagccttcaatttcttccatatataagcagttggaagcatagtccacaaaaaagacaactggggcagatattcctgaa

SEQ ID NO: 745 - DNA, 589 bp, Homo sapiens
  MAP TO AL136443.5; EXPRESSED IN BRAIN, SIGNAL = 0.67; EXPRESSED IN FETAL LIVER, SIGNAL = 0.66; EXPRESSED IN PLACENTA, SIGNAL = 0.51; EXPRESSED IN LUNG, SIGNAL = 0.63; EXPRESSED IN BONE MARROW, SIGNAL = 0.5; SWISSPROT HIT: O13688, EVALUE 8.60e-01; NT HIT: AF319968.1, EVALUE 1.40e-01
agtcaaggaaacagccttggggaggctgcttagccagctcctataattgtgtttcaaatgaattatatatacatatccatcttcttctctgcttggacccggaatgatacactcattgtgtgccccttccccagtttatgtcagggtactggtacaccttgggcttcacagagaacacacacagtgccaaccctctgctccgctgctttacctcagacttggacatcaacaacaggaaggtgaaactgcattttgaggacaagttcacattcacagcccacctggcactgaaggaagatggaattactatcctctgctcagataacaaccgaggaaagaggccctacccaccctatcccataagtgaggagggagaggaacatgattttaccaaactccacaacaaagatggcagacagcatagctttagatgcgcccatagtagacatcaccagtaaactgcaacattttctgcagagtccagacatggctccacttaaatttgctccttaaatcaggggctagaaacagcataattttttttttgttttttaatgtttaattttggtgggtttgttgtttttgtggg

SEQ ID NO: 746 - DNA, 581 bp, Homo sapiens
  MAP TO AL139144.1; EXPRESSED IN HELA, SIGNAL = 4.7; EXPRESSED IN HEART, SIGNAL =   7; EXPRESSED IN PLACENTA, SIGNAL = 9.9; EXPRESSED IN LUNG, SIGNAL = 9.4; EXPRESSED IN BONE MARROW, SIGNAL = 8.5; EXPRESSED IN BRAIN, SIGNAL = 7.3; EXPRESSED IN ADULT LIVER, SIGNAL =  11; EXPRESSED IN FETAL LIVER, SIGNAL = 8.7; SWISSPROT HIT: O77220, EVALUE 1.10e+00; EST_HUMAN HIT: BG215976.1, EVALUE 2.10e-01
aatcactctgacacccagcctctctgcagggctcagacctaggcaccaaaggggctatgaagaaacgagagtcggtttccctgctcatcgatgccttggaagctgcctgggcaggctgggcccaacaggaaggacttggagagctgcagaggctgggatcatgtggcagatttggccccagtggaatggctcagtgagagaagccaggtcatgactcggtgtccaaatatgattctcagtccaggtatgtctcctgcgggtccctgcgggtgcctgcgtgtccttagtaacggcattattattctcctctttctgcatctggtctgattaatctaatttgcacatgtgaatgagaagctgctctgatccatttaatatgttgggaccgcatcccagctcatttgcatggtgggcctggccaacagaggtagctcctgttccctgtcttcctcccctctctcagtcccaccctcccaccaggcaaattcttgctgagcaggcaaacggtgacccatgctgttgcttttaggtcttaaaacccattaggagtatattaacaaacgtgctgagagctcatttga

SEQ ID NO: 747 - DNA, 548 bp, Homo sapiens
  MAP TO AJ132411.1; EXPRESSED IN FETAL LIVER, SIGNAL = 0.96; EXPRESSED IN BONE MARROW, SIGNAL = 0.92; EXPRESSED IN BRAIN, SIGNAL = 0.92; EXPRESSED IN ADULT LIVER, SIGNAL =   1; EXPRESSED IN PLACENTA, SIGNAL = 1.1; EXPRESSED IN LUNG, SIGNAL = 0.95; SWISSPROT HIT: P03547, EVALUE 1.80e+00; NT HIT: AJ312685.1, EVALUE 0.00e+00; EST_HUMAN HIT: AI686054.1, EVALUE 1.00e-05
tagcgttggcttgagaaacctttctttccctataccatactggatatagccttctagcatggtacttttttttttcaacattttagatgtcattccattgactcctggatttcattgtttcagatgaaaattaaccatcattctttttgttgttgtattaaagataatgttttctttcctttggctacttataagattttctcttttaactctaaagattttatctatagtttgactaggatatgcctagttgtagtttttttctttgtatttatccctcttggggtttttaagattaggaatctgtgggttgatatctttcatcaattttggaaaattgtcagccattacatcttcaaatatttcttccccaatttcacctctcttctttttctggtgtatcacttaaatttacatttgatcatttgatattgtctcacagtcctctgacagcctgttctgtacttttttttaattttaaaaagaaatcatacagttgtgagaaattattaatagatatcctttggaccctttacctagtttccccc

SEQ ID NO: 748 - DNA, 564 bp, Homo sapiens
  MAP TO AC012661.4; EXPRESSED IN LUNG, SIGNAL = 2.2; EXPRESSED IN BONE MARROW, SIGNAL = 1.1; EXPRESSED IN ADULT LIVER, SIGNAL = 5.2; EXPRESSED IN BRAIN, SIGNAL = 1.1; EXPRESSED IN FETAL LIVER, SIGNAL = 1.7; SWISSPROT HIT: Q99969, EVALUE 7.00e-19; NT HIT: AY028079.1, EVALUE 0.00e+00; EST_HUMAN HIT: BI837533.1, EVALUE 9.00e-81
tggggtcttccactggttacccccgccagggctccagggggcgccatgcgattcagtgctgggctccgctgggggccgggccttggagaaggcgaactgtgcagggaagcagcagctgtggggtcctcaccgcccgccccgcccggctgcacccggcctcctggtgctcctcaggctcccgccgagtctgcgcctctggagggcagcgaccatcctgcccagaaccttatcctcacattccagtttgacgcaggtcaggcatttctgcttcctcctctcgggctggactttgcacttgggtttcttccagtctttcctccggccgcttctctgtctgccggagcttaaattccagcctcacaaatgttccagctgggaagggcgtgtccagggcgctgtccacactggtctcccggaaggcccgctgcacgggcgggtgcttgaagattcctccagggccacctgcaggccccggcgctggcccggtgagctcggcccctcccgcgtcccccgcgcccacccactgggccagcgagatccgcagccatctcaggcttcccctgt

SEQ ID NO: 749 - DNA, 505 bp, Homo sapiens
  MAP TO CHR22_79.0; EXPRESSED IN BRAIN, SIGNAL = 0.43; EXPRESSED IN PLACENTA, SIGNAL = 0.57; EXPRESSED IN FETAL LIVER, SIGNAL = 0.4; EXPRESSED IN LUNG, SIGNAL = 0.56; EXPRESSED IN ADULT LIVER, SIGNAL = 0.55; EST_HUMAN HIT: BF445973.1, EVALUE 5.00e-05; NT HIT: K02212.1, EVALUE 1.00e-07
ccactcatctctgccatgtgactttggacaacttacttaacctctctgaacctcacttccttgtcactaatacaaggtggttatgataataaaatctaactgtaaggttgttgggataactggatgagatcatatataaaaaagcacatagatatgcctcagaaatgttaaccgttattaattctttttctttatcctttcacctccatctctgtacactccttttttctataccctccttctcctgtcttcattctatcctcccatcttatacctctttctctgctacctacttcttgtccccctcctcctccttctcctcctcctggtaaatatccagatagattttatcctaccaggactaagaacacaaatgccctcaaaccatctccaagtggtcaaaccaagaatatattctgcccagatgagcaaaaccagaaagtttgtctgagtgacgctgcagatcagcctcctggtggtaggttcacagagggctcttcactcc

SEQ ID NO: 750 - DNA, 599 bp, Homo sapiens
  MAP TO AL133418.2; EXPRESSED IN FETAL LIVER, SIGNAL = 0.67; EXPRESSED IN BONE MARROW, SIGNAL = 0.74; EXPRESSED IN PLACENTA, SIGNAL = 0.59; EXPRESSED IN LUNG, SIGNAL = 0.82; EXPRESSED IN BRAIN, SIGNAL = 0.63; EST_HUMAN HIT: AW242991.1, EVALUE 8.00e-38; NT HIT: gi14043027, EVALUE 6.00e-38; SWISSPROT HIT: P29374, EVALUE 2.00e-12
cctcggttttctagacattagggatatcttctaagtagtgaaaacattaattgtaagtcactaagtgaggtatttacatgctaaaaactattttttataaggtactatgacctcaattagaatactaataaatctgtaatccattacttaagtttttaaatagaaaagtattttataattgtttttaggtaataatcactagctaaaactcaagttacctcacattccatccgcagtaatgcaccaagtaaaggacctctccaccttcgacatcagaatctttaatactagcttcatacattttttgatttttccctcgtccataccgcacttggactttcatgcctggtggatagcactcaaactcctcttcctcattgttgtcatcatcatcttcatcctcttcttcttcttcctcctcctcctcctcttctgcttcttcatcatcttcatcttcttctttattcgtttcatctcttgaaaggtttaaaaaattgcagagttaataaaagacacttcataagtttttcagttccaaaccacatatattgataaaagttgtggctgtgattgttccaggaaaagcaggttccacgtgt

SEQ ID NO: 751 - DNA, 582 bp, Homo sapiens
  MAP TO CHR22_144.0; EXPRESSED IN FETAL LIVER, SIGNAL = 0.6; EXPRESSED IN PLACENTA, SIGNAL = 0.75; EXPRESSED IN HELA, SIGNAL = 1.5; EXPRESSED IN BRAIN, SIGNAL = 0.55; EXPRESSED IN LUNG, SIGNAL = 0.59; EXPRESSED IN ADULT LIVER, SIGNAL = 0.77; EST_HUMAN HIT: AA609066.1, EVALUE 4.00e-95; SWISSPROT HIT: P23441, EVALUE 3.80e-01
aaaatagcgtacccagcgtggaattcaatgcagctatgtctttcacactggcttctgataaaaggaaatgaacaaacaaataaacaagaacaaaaaaaaaaaaaaagaaaagaaaatacaatgaaaataaaattagaggagacccttggagccagccttgtctgagatttaccctaaatgcccccatcccacccttctttcctggctccttgaatgcaatggcactgctacctcacctggggggctctcctggggggcccaccctgacagcaccccaggcctggcaggcagcctccccgggccacaccacagcttgtttcccccaacctcatgaggccaaccccacgtttccactcgcagtactgacccaggatcactaggccctcggggtccacttcgtactcggccctgtaggggacggcagccgagctgttgactgtggacagcagctcctccaccagcagtgcctgcaccacctcggggctcagcatcagccggcggtgctcggggatttggagaatgaaccagaagaagcaggtgaggggtccctccctaaggcaggcagaagtgagagaggccagg

SEQ ID NO: 752 - DNA, 550 bp, Homo sapiens
  MAP TO AL138843.2; EXPRESSED IN PLACENTA, SIGNAL = 2.9; EXPRESSED IN LUNG, SIGNAL = 2.6; EXPRESSED IN BONE MARROW, SIGNAL = 2.6; EXPRESSED IN HELA, SIGNAL = 1.4; EXPRESSED IN BRAIN, SIGNAL = 2.6; EXPRESSED IN FETAL LIVER, SIGNAL = 2.7; EXPRESSED IN HEART, SIGNAL = 1.9; NT HIT: gi14733037, EVALUE 1.00e-94; EST_HUMAN HIT: BI518883.1, EVALUE 1.00e-95; SWISSPROT HIT: Q9UL18, EVALUE 2.00e-18
tccagaggcatacggttttctgtgtttatttttaatgaagagaggaaatctggggtgacagaagttgaagtgttagaaatgatgtcatcttgcagaactaggttttagccattatcagctgtacttataattctaatatactctggttgacaaggctttggaatacagcttgtaactgtgactctttttttttccctttcccctggcaggacccgctggggcccagcccctactcatggtgcccagaagacctggctatggcaccatgggcaaacccattaaactgctggctaactgttttcaagttgaaatcccaaagattgatgtctacctctatgaggtagatattaaaccagacaagtgtcctaggagagtgaacaggtaagaatcatgaaactgcaaagatcttttgctatttttttccttagtaattatccatgtttattttgtatatctgaataacaattacaatgtgtaacagtttgaccaaaaacatctggtaatttgttttaaaactgattgtacttcaggggtgtgatagtggggaaaa

SEQ ID NO: 753 - DNA, 584 bp, Homo sapiens
  MAP TO AL133472.2; EXPRESSED IN BRAIN, SIGNAL = 0.67; EXPRESSED IN ADULT LIVER, SIGNAL = 0.7; EXPRESSED IN PLACENTA, SIGNAL = 0.69; EXPRESSED IN LUNG, SIGNAL = 0.64; EXPRESSED IN FETAL LIVER, SIGNAL = 0.6; SWISSPROT HIT: P08547, EVALUE 5.00e-11; NT HIT: AJ310932.1, EVALUE 8.00e-25; EST_HUMAN HIT: BG719542.1, EVALUE 2.00e-66
tgtcatgtgcagtgttttggtaagttaatttcatcataatataaaagcaaatttaaatatagtctgggttccttctcaattataacatataacatagtattgcggtatatatgtaccacatcttctttatctagtctaccactgatgggcatttaggttgattccatgtctttgctgttgtgagtagtgttgcgatgagcatatgtgtgcatgtgtgcaagagatagttatgaatttataaccaatattatggcagattttaagtcatataataaaagcttatcagacactcaaaaaatgagcacaatatgtggtttttatttttatatggtaacttagaaaattgtgattttaaaaataaaaaaaattataccaaataataagagataacttactggtttcccaaatacaacaaagcaaacaggtttggacaacaaaaaattcctttcagtttcatcttcatcaaatatatctgcaaaaggatactcttctgtcttctcttgagaagtcatgacacaaaatactacaataaaaaagggtaagattgttaacttgtctaatttggttggatgaggtgactagga

SEQ ID NO: 754 - DNA, 508 bp, Homo sapiens
  MAP TO AC015956.3; EXPRESSED IN BRAIN, SIGNAL = 0.8; EXPRESSED IN FETAL LIVER, SIGNAL = 0.83; EXPRESSED IN LUNG, SIGNAL = 0.75; EXPRESSED IN BONE MARROW, SIGNAL = 0.72; EXPRESSED IN ADULT LIVER, SIGNAL = 0.64; SWISSPROT HIT: P53974, EVALUE 4.70e+00; NT HIT: AF179689.1, EVALUE 1.00e-10; EST_HUMAN HIT: AV754644.1, EVALUE 8.00e-47
tagctccccagtggtcaaacaatgtgtcctaatgcaaacatgttgttcttcctttcttactaaaccgtcatgcactcagactctcactccttcatgtctgcctttagtggctccacttatcttcagctctagatgaattaacttgtcttagtctgtttagacttctataacaaaataccataacatgggtagcttataaacaacagaaatttattgcttttcattgcagactggaatgtccaagatcaagatgctgacagatttagtgtctgctgagggcccactttctggttcatagacctggccttcttgctgtgttctcatgtggtgggtggaggtggtgaattcataagaggaggagggagtgtcctcataagaggacactaatcccattaatgagaactccaccctcacgacctagtcacctcccaaaggccccccctcctaataccatcaccttggggattaagtttcaatatatgaattttgaggggacacattcagtcca

SEQ ID NO: 755 - DNA, 539 bp, Homo sapiens
  MAP TO AL133408.3; EXPRESSED IN FETAL LIVER, SIGNAL = 2.2; EXPRESSED IN HEART, SIGNAL = 1.9; EXPRESSED IN ADULT LIVER, SIGNAL = 2.2; EXPRESSED IN HELA, SIGNAL = 1.4; EXPRESSED IN LUNG, SIGNAL = 2.3; EXPRESSED IN PLACENTA, SIGNAL = 2.5; EXPRESSED IN BONE MARROW, SIGNAL = 2.5; EXPRESSED IN BRAIN, SIGNAL = 2.2; SWISSPROT HIT: Q07071, EVALUE 5.80e-01; NT HIT: gi15616630, EVALUE 2.00e+00; EST_HUMAN HIT: AL134692.1, EVALUE 1.90e-01
attgtggcctggaaattgagcagccatggtgctgcattttagacttcacatttataataagctgtaataaagtaaacattttaaatggatataagaatagacattacttgcaatcacaaatgtatgttcaattgaagtgcttttgaagctcaatttaacaaagcaaacaaatttcctggcattattaacataattgttctcattgttgggttttgatttctaaaaaaatatttaagcaaaaaaacaagttactaaaaaacaaaattcacagaaggaaatgtaactaagaatgagttactttgcctttatcatgtcggattaaagttaaaaaaaaaaaaagtctcagatgttcattctgtcaccccctccccaccgacttgctgaactattgcttggcctgtttaactcagagctgtttaactcagagctcatatatcaggattaatttaaggttaaattcagctatttgctctgccatcagtaagctttgcagtgggcctactcaacatttatctactagtgaaactccaggctgtgtg

SEQ ID NO: 756 - DNA, 588 bp, Homo sapiens
  MAP TO AL136379.2; EXPRESSED IN PLACENTA, SIGNAL = 1.9; EXPRESSED IN FETAL LIVER, SIGNAL = 1.4; EXPRESSED IN BONE MARROW, SIGNAL = 1.3; EXPRESSED IN ADULT LIVER, SIGNAL = 1.7; EXPRESSED IN BRAIN, SIGNAL = 1.2; EXPRESSED IN HELA, SIGNAL = 0.81; EST_HUMAN HIT: AI472003.1, EVALUE 8.00e-32; SWISSPROT HIT: P27467, EVALUE 2.00e-46; NT HIT: gi14916474, EVALUE 0.00e+00
gcctcatcactccttcttggctaccccagtccacaggtgggctcgccatccccaggagcgcactggatgctgtggtgtagctggatggtgctaagcttcgcacaccccaggcaggggtcgagaagaccctcagcctggccaccatcctgcctcaccgggccatatgccccaaggaaccagggcacacaccctgctgaggaggctcctttttcccaagcacccttgcgggcggcgaacctacctggcgcccagcctcgttgttgtggcggttcatggctgagcgggcatctggccggttctcccgggcgtcggcgaactcccgagacaccatcccaccaaactcgatgtcctcgctacagccaccccacttccagcccttgcctggtgagccctggtggcggctgctgcagccacagatggcggccgtgccttctgcacatgagcgtgtcactgcaaaggccacaccggctgaggcaatggcgtggacaaaggccgactccctggtagctgtagagagaggagagatgcagggttaacagggctcagctcaaaggaccgccttgggcaggtcaggggtcttagcccatt

SEQ ID NO: 757 - DNA, 536 bp, Homo sapiens
  MAP TO AL133402.2; EXPRESSED IN LUNG, SIGNAL = 3.7; EXPRESSED IN FETAL LIVER, SIGNAL =   3; EXPRESSED IN PLACENTA, SIGNAL = 3.6; EXPRESSED IN ADULT LIVER, SIGNAL = 4.5; EXPRESSED IN BONE MARROW, SIGNAL = 3.3; EXPRESSED IN BRAIN, SIGNAL = 2.9; EXPRESSED IN HELA, SIGNAL = 2.2; EXPRESSED IN HEART, SIGNAL = 2.9; NT HIT: gi6755864, EVALUE 3.30e-02; EST_HUMAN HIT: BI596372.1, EVALUE 1.90e-01; SWISSPROT HIT: Q03132, EVALUE 7.60e-01
catcctccctgcagtctctccagccagcgggtgccctgtgtcctggggatctagagtggccccttcaacccctcagctccacagtggccgcttgccctcaggagcctcatggaatctcacctgtgcaaagcacagcacagccatgagctgaggacacacggctgaagtccgcagaccccggggccctcccgttcctcatctccggtgcctgccccggtgtcccaggcgttgagcagtgctcccgtcacctcttcagtgcagcaggagcgctgagctgtgtttgtgctcatctccctgagcgacccagaaagtacctccagggagatggccagggtgaaagtgtggcttaactcattttccctgctcttcagggccatggtcctgcactgcctgctgtccaggggcgcatagattttgttcagttttattgtttctcaccacacgtgtggctggtagcaatgactcagccaagactggaagcactggacctgggtttaacccccaggccccaggatggctccatcctctgactgctt

SEQ ID NO: 758 - DNA, 570 bp, Homo sapiens
  MAP TO AC018608.4; EXPRESSED IN BRAIN, SIGNAL = 0.75; EXPRESSED IN LUNG, SIGNAL = 0.65; EXPRESSED IN ADULT LIVER, SIGNAL = 0.61; EXPRESSED IN FETAL LIVER, SIGNAL = 0.66; EXPRESSED IN BONE MARROW, SIGNAL = 0.67; NT HIT: U32807.1, EVALUE 1.40e-01; EST_HUMAN HIT: BG992901.1, EVALUE 6.00e-08; SWISSPROT HIT: Q9UKF5, EVALUE 1.40e-02
tttggatccctcaaaccttgtttttctttttaggcctcagtctgaagcttagaattgagtttgggactgcaaaggtattttagaggctgtttatatccgcctaaagtgtctcaaataagccctgacgaatttgcagttatcagccagcagggcttgttcttccgttaactttgccatcagaaacagagtgctgggagttgggggagccctctcactatgaaaagaaaacaagatagagagaaacagtttaaggtgcaaaaaggtgaaattctgggggaacaaccccttactcagtgcaagtggatccctctaatccttatatctttcctctggttcagaaattccttgaccaggggagaaacattccattggcaaggcaggcgagaagcgcccatccattggcctgtggggccgcagctgtggcggggttttctcccgccccctcgtcctaggcagcacaggcggctgcagctgcggcattgctctccccgcggcctcgtggctgttgggttgggcctttgcctgctgcgggcacacccaggcacctgagctgggaggggaaaggataag

SEQ ID NO: 759 - DNA, 598 bp, Homo sapiens
  MAP TO AL008639.15; EXPRESSED IN BONE MARROW, SIGNAL = 4.9; EXPRESSED IN PLACENTA, SIGNAL = 3.8; EXPRESSED IN LUNG, SIGNAL = 4.7; EXPRESSED IN HELA, SIGNAL = 4.4; EXPRESSED IN FETAL LIVER, SIGNAL = 3.7; EXPRESSED IN HEART, SIGNAL = 3.9; EXPRESSED IN ADULT LIVER, SIGNAL = 4.2; EXPRESSED IN BRAIN, SIGNAL = 4.1; NT HIT: gi14765608, EVALUE 4.00e-54; EST_HUMAN HIT: BE867826.1, EVALUE 2.00e-54; SWISSPROT HIT: Q99439, EVALUE 6.00e-23
aagaaccgtatcctgccctctggaccactcgaccatcagcctccagatgggtgcaaacaaacgctccagccagggggcatgacggctcccgggaccccgcagcacatctacaacaccaaactgggagcccacaagtgtgacaactcctccatgtccctgcatatgggtgacacgcagagtgccaaccacagcgtccagggctttggcctgggccagcagatatactatcccaagtactgccctcaaggcctgcagccagtggggctcccttggatgccggcaactgcccaggaccaggggaggcccccgaggatcccccctgctcccaggaggaggccactactgaggcccccgaacatgctggctccctacatcatcgccctgtctgggtttgggggattttcctgtattttcgtctttcttttttttttttaacctgttcagtgctgccaaccgagggtctgtgagtagctgcgtggggtcaagcagcagggttatttttgtttgtttgttttaatttttttttccctcctgccttaattccttcacaggactgagacaccgggcttgggaggaaggggtcaaggctgtatctgga

SEQ ID NO: 760 - DNA, 536 bp, Homo sapiens
  MAP TO AC016763.5; EXPRESSED IN BONE MARROW, SIGNAL = 1.1; EXPRESSED IN PLACENTA, SIGNAL = 1.3; EXPRESSED IN BRAIN, SIGNAL =   1; EXPRESSED IN HEART, SIGNAL = 1.3; EXPRESSED IN LUNG, SIGNAL = 1.2; SWISSPROT HIT: P38739, EVALUE 2.00e-01; NT HIT: gi14726794, EVALUE 0.00e+00; EST_HUMAN HIT: BE958538.1, EVALUE 0.00e+00
tccctttggagagaccagtgtgtgaaaagttaacttggcattcaattcaaatacaaatgttcgtatttattttattaagcttctaaaaatagttgtattgatgtctcatgatactagttgaatgacttctttctttttcaggaacctctaaaacattatactccaccaatatggctttatcatccagcccagggatttcagctgtacagcttgtaaggacagttggccacaccactacaaaccacttaatcccagcattgtgcacaagcagtcctcagacacttcccatgaacaattcctgcctgacaaatgcagtgcacctcaataatgtcagtgttgtttctccagtcaatgtgcatatcaatacacggacttcagcaccatcgccaacagccttaaaacttgccacagttgctgccagtatggacagagtgccaaaggttactcccagcagtgccatcagcagcatagcaaggtgtgtgtgtgtgtttcagtgatttttctccctttgtgctggctgtcctgtgggaagaaaa

SEQ ID NO: 761 - DNA, 559 bp, Homo sapiens
  MAP TO AL035457.13; EXPRESSED IN BONE MARROW, SIGNAL =   2; EXPRESSED IN PLACENTA, SIGNAL = 2.7; EXPRESSED IN LUNG, SIGNAL = 2.4; EXPRESSED IN ADULT LIVER, SIGNAL = 3.4; EXPRESSED IN HELA, SIGNAL = 0.96; EXPRESSED IN FETAL LIVER, SIGNAL = 2.4; EXPRESSED IN HEART, SIGNAL = 2.1; EXPRESSED IN BRAIN, SIGNAL = 2.4; SWISSPROT HIT: P45460, EVALUE 4.00e+00; NT HIT: gi13643433, EVALUE 6.00e-16; EST_HUMAN HIT: BG120535.1, EVALUE 2.00e-13
tgcagcaggttgacagattcaaagtgaaaggtgctataagtgggttccaggatacagaccttcctaaaggcaccctggagaatcttcccaaggtgaagctttaaatgtacagtgtgtggtaagaggagtggcgaggaaagtttgttgtcttgcaagtatgctctgaccctgtataccccatgcccttgtctcccaccccacccccctccaccatgaaccagctgcactgagctctttctctgcctacaccctcaggcctctgctcttgctgttttctgtaacctagaagaatcttcccagagacctccaggaggctgggccattcttgtcattcaattgcaatgtcacctcctgagaaaggccctttctgactatatagtttggtagggggccacagagtggcttaagtaacagaaatgtattgcccacattctggaggctggaagtccaagttcaaggtgctggcagggttggtttcttctgaggtctcattcaacagagagaggtgccgtcttctctctgtgtcttcgtgtggtctcgcctctgtgcatgtctgtgt

SEQ ID NO: 762 - DNA, 524 bp, Homo sapiens
  MAP TO AL138809.6; EXPRESSED IN BRAIN, SIGNAL = 0.47; EXPRESSED IN LUNG, SIGNAL = 0.48; EXPRESSED IN FETAL LIVER, SIGNAL = 0.49; EXPRESSED IN BONE MARROW, SIGNAL = 0.49; SWISSPROT HIT: P41849, EVALUE 4.90e+00; NT HIT: AL163280.2, EVALUE 7.80e+00; EST_HUMAN HIT: BF196639.1, EVALUE 2.90e+00
ggcaattttgcttgggtaactagaagttttttcattctccagtctgaatattctctccggcccactctccaactgatgactagaatagacagacagggacgtcaatgatcacaatgaagagagactggatagagatttgtcttctcttcccaaaccttcccttttggcaaagaatgtgcagttttctaagatgaagcatgatgaatgtggtcataagtatggaccaggcctggagggtgaaaggaagggtaccctatggctacctgtgcacatctggcagcaagatgtgaaagtaaagaagccagaatgaaaatctgcccatgttttcagccaggatctaagatcttgtttcagatttcattgatgttgagtaatcttgatggattcagggataaaatattccaacactcacgttccatgaaacgaattctctgttgacacatgtaatgtgtcatgagagagtgttgctttgggaaaacaaacaaacaaaactagaaaagaggaggcagaaatgtgggatcatt

SEQ ID NO: 763 - DNA, 585 bp, Homo sapiens
  MAP TO AL133553.2; EXPRESSED IN BONE MARROW, SIGNAL = 1.4; EXPRESSED IN LUNG, SIGNAL = 1.9; EXPRESSED IN BRAIN, SIGNAL = 1.4; EXPRESSED IN HEART, SIGNAL = 1.3; EXPRESSED IN PLACENTA, SIGNAL = 2.3; EXPRESSED IN ADULT LIVER, SIGNAL = 2.4; EXPRESSED IN FETAL LIVER, SIGNAL = 1.6; NT HIT: U66061.1, EVALUE 2.00e-16; EST_HUMAN HIT: AW851023.1, EVALUE 1.00e-18
tggggcacagaggttaagagccccggctaacctggttctacatccaggctctgccatttactatccatattatgtttgtgcagattacctcactttttatgcctctatttatttattggggataaattacagtatctacatcaaggggttttcaagcatgcggtaactaatttgggtaatatatgtaagtcgtgtagaattgtgtctggctcaataagagttagctaatattattatgattcaggttttcgcttggctgccacattccccagggccttttagtcccggagtagtgcccctgaacatgccctacttgctggttcttttccgtattatattacttatcacacagtatcgtagtgtgggaaagaaggctatgctgaggtgagctagagcggtcctgtttgtaggtatgtaatactgccaccacagagtaattatacttcatcttttttaccctctcctatattgagtattccagtcacttagacaatgccccttaatcctgtttagaaaaaaaaaaatgcagcttgctgccagcactcatttaattttacataaacatgctctttgaggctgaaggaa

SEQ ID NO: 764 - DNA, 520 bp, Homo sapiens
  MAP TO AL138886.1; EXPRESSED IN PLACENTA, SIGNAL = 0.91; EXPRESSED IN LUNG, SIGNAL = 0.98; EXPRESSED IN ADULT LIVER, SIGNAL = 0.84; EXPRESSED IN BONE MARROW, SIGNAL = 1.1; EXPRESSED IN BRAIN, SIGNAL = 1.1; SWISSPROT HIT: Q06180, EVALUE 6.30e+00; NT HIT: AE008686.1, EVALUE 4.90e-01
tcccaagtgcctggtaagagctcctatcaataaaggatattttattctaagtgtgcaatctaggggaaaaattttttttcttgcaactttgctttataaaatcctaactctcgccttcaggactttgcctcccacaggagtccacgttcattgagccggcttgccagatccatctcccctggtggatttcactccttaggcctccaagctctgccatcttctctatcttcctcctttcaaaatttccttgttctatctatacaactcacaaggaagaaatgcaaatgatcaacacaggagaaagtgttgatcaaagaaaagcaaactgaaaatgccatatactgcttcatcacttatgaaattcacaaagaatcaacagactccattcattatatgacacatgggagtataaatggtttctggaaagttatccctcaaaatgtactatctgttggccaatttatttcccctcttaagaatttaagagaaaatcccacttaccagggtgtgtgcaataaaa

SEQ ID NO: 765 - DNA, 567 bp, Homo sapiens
  MAP TO AL139152.1; EXPRESSED IN BRAIN, SIGNAL = 0.43; EXPRESSED IN LUNG, SIGNAL = 0.98; EXPRESSED IN ADULT LIVER, SIGNAL = 0.76; EXPRESSED IN FETAL LIVER, SIGNAL = 1.1; EXPRESSED IN BONE MARROW, SIGNAL = 0.89; NT HIT: gi14723708, EVALUE 0.00e+00; EST_HUMAN HIT: AA159913.1, EVALUE 0.00e+00; SWISSPROT HIT: P57722, EVALUE 2.00e-09
tcttgctgcttcacctgttgtacagtttccctgatcttgtgctatgcagttggggtagcaaagaagtgtccaataattctgacgatcacttcctcattttcatctggcctttggtcacgaggcacgatgacttctgcactggttaagttctgcagttcattcaaggtattgacacctttgccaatcacccggccagctgtggaagagggcactctgatacgggcttccagcttcacttcttctttggggttaaagaagttttcttctttcagtttcccaaagatccgtccctgggccttgaactgggcttccggtggccgggtgatgatggccatcctttcgttgacgtctgggccttccgcaagggcgatcttgatggaggctgtggcgaatctcgccagctgtttgatgtgtgctcccctcttcctgataatggcgcccacagcctgggttgggatgaagagattcacaacctcctgctctggataagagtgatgatgcgggaacgggccaacctggtgatgggggtacaagctggagaagtatccggagtgcgtattaacagcc

SEQ ID NO: 766 - DNA, 520 bp, Homo sapiens
  MAP TO AL133338.2; EXPRESSED IN BRAIN, SIGNAL = 0.47; EXPRESSED IN FETAL LIVER, SIGNAL = 0.51; EXPRESSED IN PLACENTA, SIGNAL = 0.46; EXPRESSED IN LUNG, SIGNAL = 0.48; NT HIT: gi14747359, EVALUE 8.00e-43; EST_HUMAN HIT: BG718109.1, EVALUE 3.00e-68; SWISSPROT HIT: P37308, EVALUE 1.60e+00
tgatgcctgtacttgggaatctacagaacccaattttgaggaaatgtttgtttctttttcctttctccaaccatagctaatgctttttaaaaacaaaaaaacttcatggatagaaaatatgtcaggagaatttttcaacgttgataacaattgctttttaaccaattttttccttttttctcttggacaagctaatttgttgagtttgattacctctgccacctcttccgaacagataaatatcatcttgttttgtttcagtttcaggtttcttgctgtatggatcactgattgaataatagatggctttacctcgtctcacaggagccttgcgttccttttcaaatgtcaccaagcaagataattataatgaagaagtggctgacttaaaggtagatttgttaaaggtagaaatgttgaacattattataaacacagactatggacaactatttgacattctttttctccattctatgtggttaacatggaagttttatcttgtttggtgtgaggcaaa

SEQ ID NO: 767 - DNA, 527 bp, Homo sapiens
  MAP TO AF235096.1; EXPRESSED IN FETAL LIVER, SIGNAL = 0.59; EXPRESSED IN BONE MARROW, SIGNAL = 0.61; EXPRESSED IN PLACENTA, SIGNAL = 0.75; EXPRESSED IN LUNG, SIGNAL = 0.82; EXPRESSED IN BRAIN, SIGNAL = 0.68; EST_HUMAN HIT: BI823043.1, EVALUE 2.00e-41; NT HIT: gi16161420, EVALUE 2.00e-53; SWISSPROT HIT: O79670, EVALUE 2.90e+00
gagcattcagttgggctctcttgtaaggtagtagaatacaagtcaataaagctctgttttgtacctttttggggggcatgctggtagttccatgcttgttttctcatttggcaagaattattctctactaatctgtcctattattcattttacttctatactctaaaatctatttcatgtgatatatttctttgttccaacttagaaaatttaatttgttctcttgaaataaacaaacttttcttaaaaaaaactgttggtttgtaaagtgttcatagttaatatataactataagaaacctgaaaaaaactggagaatttccttcttttgtgcagttaaacacgtcaagaaagatgaacgcagatactatgaggaactgctaaagtacagccgagatcatctcatgctgtaccctaaccatcaatcggatattatggtgaaaggcttgaggataacaccattttcatattatactgggattatggaggtgagtttacagtgtgggtgagccagtggaaatggaatg

SEQ ID NO: 768 - DNA, 547 bp, Homo sapiens
  MAP TO AL136304.2; EXPRESSED IN PLACENTA, SIGNAL = 4.4; EXPRESSED IN LUNG, SIGNAL = 3.8; EXPRESSED IN FETAL LIVER, SIGNAL = 3.4; EXPRESSED IN ADULT LIVER, SIGNAL = 4.4; EXPRESSED IN BONE MARROW, SIGNAL = 3.5; EXPRESSED IN HELA, SIGNAL = 3.6; EXPRESSED IN BRAIN, SIGNAL = 3.1; EXPRESSED IN HEART, SIGNAL =   3; SWISSPROT HIT: Q14999, EVALUE 2.00e-27; EST_HUMAN HIT: BG032837.1, EVALUE 2.00e-63; NT HIT: gi14781548, EVALUE 1.00e-84
acatcaagcctcccaacatcagggtctgcccccaaccccaggtcctttcctagcagcccaccctctccccagtccccagtccctctgcctggctgctcactcttgttgtagaagttggagtatctgttcaaagtgcccctcaggtaggagggcaggcaggttctggggttcagtgtgtggcagattgaggcaacaggccaggagtgtcgggacaggacaagcacagacacttctggcattgccccttcatagtagaggtcctcattctcctcctcttcctcctctccctccgccacatccaccactgctgctgccccagcttcctcttccttctcgctcttgtgctccttgccactggccccaaggcccacctgaaggagcacagggttcccagatgccatggcctcctccagtctgctccacgcccctcttccccctaccctcttatttgcttatcccttccaaggcactcacctgtattttcttctctgtatcctccagcttcaggagttcctgatccagctgctggagctggtagacgtggaac

SEQ ID NO: 769 - DNA, 557 bp, Homo sapiens
  MAP TO AL133552.2; EXPRESSED IN HELA, SIGNAL = 1.8; EXPRESSED IN FETAL LIVER, SIGNAL = 2.4; EXPRESSED IN HEART, SIGNAL = 1.7; EXPRESSED IN LUNG, SIGNAL = 2.2; EXPRESSED IN BRAIN, SIGNAL = 2.1; EXPRESSED IN PLACENTA, SIGNAL = 2.5; EXPRESSED IN BONE MARROW, SIGNAL = 2.2; EXPRESSED IN ADULT LIVER, SIGNAL = 2.5; SWISSPROT HIT: P40490, EVALUE 6.10e-01; EST_HUMAN HIT: AA779269.1, EVALUE 2.00e-17; NT HIT: AL163209.2, EVALUE 2.00e-22
gggggactgctttcactttgttctacagttttagataggaagagtattcttcttcatgactttttacaaagttgtaatttttcttttgattatatctttgaattgagtcatttatttgggaatgtatttcttagttcccaagagattttacttttcagcccctttatattattatatcagtttatgttcacagaataagctcaacaaaatttttatttaaaaaatgtacttatgtattttcattgtatatatttaaggtgcacaacataatgttttcatatatatatacacacacatatatatgtgtgtgtatatatgtatacatatgaaaacaagtgattactacagtgaagtattctatgtattatctttggtagttaccttgcgtgtgtgtctacgtagtgagagtgaaacgagaaaggttcccttgtgccctttgcagggcgtgtgcccggaggtgtgactcgcttcttcaggcccccgctgctcagacttctaggggagcatacagatggggcaggctgtggggctccgagcccagggcagtgtctaggtgt

SEQ ID NO: 770 - DNA, 514 bp, Homo sapiens
  MAP TO AC022528.3; EXPRESSED IN BONE MARROW, SIGNAL = 0.67; EXPRESSED IN PLACENTA, SIGNAL = 0.72; EXPRESSED IN LUNG, SIGNAL = 0.83; EXPRESSED IN BRAIN, SIGNAL = 0.53; SWISSPROT HIT: P10955, EVALUE 4.80e+00; NT HIT: M63194.1, EVALUE 1.90e+00
atatggcaacaccttccctgacacaggactttacgtcttggtaagggcccaagaactgtacctgataccctgctggggtggttctcaaagactggaaaaagtaatggtcatgttaaatgcagtagagtttccagaattttaggcacagagtatggagagaagaatcaaaaggctcagagaagtaagcatgcaaaactgggtatgaccagaatccatcatcatctgcctttgctcctttagagggccgaaggaacaacttgttttttcagggttctggtgttagtgacagcagcattgttgaaaagttcatttgtgtctatcctctgcaaatcaggactgacaatgggcaatgctgttataaaactggcctttctgccagcaatgtgggtgatgatggtccagagtggcagaagccaggtggcatcactcaatcaccaggaagaagatgggcacaactaccttactggcatccaggttgaaattgctgccacatggccttaaaccatggggattt

SEQ ID NO: 771 - DNA, 563 bp, Homo sapiens
  MAP TO CHR21_30.0; EXPRESSED IN FETAL LIVER, SIGNAL = 1.6; EXPRESSED IN HEART, SIGNAL = 1.2; EXPRESSED IN LUNG, SIGNAL = 0.9; EXPRESSED IN PLACENTA, SIGNAL = 0.84; EXPRESSED IN ADULT LIVER, SIGNAL = 0.91; EXPRESSED IN BONE MARROW, SIGNAL = 1.8; EXPRESSED IN HELA, SIGNAL = 3.7; EXPRESSED IN BRAIN, SIGNAL = 1.6; NT HIT: AL163207.2, EVALUE 9.00e-09; SWISSPROT HIT: P08547, EVALUE 1.00e-05; EST_HUMAN HIT: N49039.1, EVALUE 9.00e-13
ttggcatttccttctatgtggtgtatcttatatcttgctgcttttcagattttttctttgtctttgattgttggtagtttgactattagatacattaatatactccacttagtgctgaatttgattggaaactctttgcttcttacaactgagtgttcgcatttatcctcagatgaggaaacattttagccattatttctttaaacatactttgtacctctttttacctttcttctaattgtggaactctcattatgtaagttatccttttcctttttaaaatttttttttgctcatctgaatggataatttcaaacattttgtcttctggcccactcattctttcttctacttgaccaagtctgctgctgaaggtttctgttggcttttttagttcagtcattgtatcatttatctctagaatttctatctgaaaaaggagacgttttatctgttgttacataaatacaaaagctaataagagaaaatttgaacatttatatgccaataaattaaataatctagaagaaatggataagttcctggaaacatacaacctacca

SEQ ID NO: 772 - DNA, 550 bp, Homo sapiens
  MAP TO AL049860.8; EXPRESSED IN BONE MARROW, SIGNAL = 1.6; EXPRESSED IN BRAIN, SIGNAL = 1.9; EXPRESSED IN HELA, SIGNAL = 0.74; EXPRESSED IN HEART, SIGNAL = 2.1; EXPRESSED IN FETAL LIVER, SIGNAL = 1.4; EXPRESSED IN LUNG, SIGNAL = 2.2; EXPRESSED IN ADULT LIVER, SIGNAL = 2.1; NT HIT: AL163210.2, EVALUE 2.00e-22; EST_HUMAN HIT: BI916691.1, EVALUE 3.00e-25; SWISSPROT HIT: Q9UPE1, EVALUE 1.80e+00
ggatgtatggaaatgcctggatgtccaggcagtttgctgcaggttcatggagaacctctgctaggtcggtgtggaaaggaaatgtgggaccggagctcccacacagagttgctacttgggcaccacctagtagagcttttagaagaggacgaccatcctccagaccccagaatggtagatctactgacaacttgcactgtgcacctggaaaagccagtcactcagtgccagcctgtactggagggtggctgtactccaaaaagccacaggtgtctataggttttgaaacatgcactatggtttaaatcattatactatcatatgaaattgtctcatgaccctaaaaatatgccatctttgacctgttcaacacaatccacttctcatgaattacaagaatagtttatattttttactgactctatagttttgctttatttagaatgtcatataattgtaataatacagtatggacccttttcagaatgtctcctttcacttataaatatgcacttaagtttcattcatatgctcttgtggattgattgca

SEQ ID NO: 773 - DNA, 513 bp, Homo sapiens
  MAP TO CHR22_202.0; EXPRESSED IN BONE MARROW, SIGNAL = 1.8; EXPRESSED IN BRAIN, SIGNAL = 1.7; EXPRESSED IN HELA, SIGNAL =   2; EXPRESSED IN FETAL LIVER, SIGNAL = 1.8; EXPRESSED IN HEART, SIGNAL = 1.9; EXPRESSED IN LUNG, SIGNAL = 2.2; EXPRESSED IN ADULT LIVER, SIGNAL = 1.9; NT HIT: AL163246.2, EVALUE 0.00e+00; EST_HUMAN HIT: AV730071.1, EVALUE 6.00e-60; SWISSPROT HIT: P07566, EVALUE 8.30e-02
agtcccccttcattctgtcctgtagtaactgtcacagggactaggaagaagtatgattggaaaattgatgacaaagaaatttggggaaaagatatgtggatggacctctctgagtggtcaaaaactgtgaaagtatttgtatcccatgtgagcgctcaccaacgggtgacctcagcagaggaggattttaataatcaagaggagagtatgaccagttctgtgaacaccacgcatcctctttccccagacacccctgtcatcgcccaatgggcccatgagggaagtggccatgctggcaggaatggaggttacacacgggctcatcaacatggacttccactcaccaaggctgacctagctacagccactgctgagtgcccaatttgccagcagcagagaccaacactgagcccttgatgtggcaccattccttggggttatcagccagctacctggtggcaggttgattatattggacctctgttgggattcactcaggatggtggcagaaat

SEQ ID NO: 774 - DNA, 597 bp, Homo sapiens
  MAP TO CHR21_1.0; EXPRESSED IN FETAL LIVER, SIGNAL = 1.3; EXPRESSED IN PLACENTA, SIGNAL = 0.77; EXPRESSED IN ADULT LIVER, SIGNAL = 0.88; EXPRESSED IN BONE MARROW, SIGNAL = 1.5; EXPRESSED IN HELA, SIGNAL = 2.6; EXPRESSED IN BRAIN, SIGNAL = 1.3; EXPRESSED IN LUNG, SIGNAL = 0.77; NT HIT: AL163201.2, EVALUE 0.00e+00; EST_HUMAN HIT: BF971139.1, EVALUE 1.00e-39; SWISSPROT HIT: P56180, EVALUE 5.00e-08
tgaagcacagaggggaattgttttcaatataaatttttttgatatagcagatattaaactgataagaatattatacttgatcttagccaaaaggccaaaaaatgatacaaatgggaatttgacgagaacttcaaaatgtagagaagttaaagttagtacaagagtaaaagtccttctttggggtactgcatcttctttattccattaatggtacttagcctgtatactcttcaccggtccctaaatatcacaatcttttagtttcaaagtatgtgggaatttacctaaacatttcattttaaagcaatgtatttggtatagaatgagaacatttgaagttgaaaagattatatagaataaaaggcacagaaaatgctaaaattaatgaaaaactttaagagaggtaagtcttatgtttcatacctgggaatattcctaagcaacttaatgtcaaaaaaaatgtaaacgacatcaaccagcagaagaatcacaataatggcagtatctaaaatgttaaataagtcagaaaaatactgctgtctcctgtaatataaaacaaaaaaaataagttcattcccccctgcaagaagagatagg

SEQ ID NO: 775 - DNA, 593 bp, Homo sapiens
  MAP TO AL133520.2; EXPRESSED IN PLACENTA, SIGNAL = 2.7; EXPRESSED IN BRAIN, SIGNAL = 1.5; EXPRESSED IN ADULT LIVER, SIGNAL = 3.1; EXPRESSED IN LUNG, SIGNAL = 2.5; EXPRESSED IN FETAL LIVER, SIGNAL = 1.9; EXPRESSED IN BONE MARROW, SIGNAL = 1.7; EXPRESSED IN HEART, SIGNAL = 1.7; SWISSPROT HIT: P27546, EVALUE 3.00e-01; EST_HUMAN HIT: BI824797.1, EVALUE 0.00e+00; NT HIT: gi14786183, EVALUE 0.00e+00
gaagtccccaaacttccccctaggaggggtagaagtctccagagtcacctgcaagaaaactccacttacctggcccaaacccaaaggagaaggcactgacaaagaccatcaggcacagcagtgcggtccagcgcagcagtgcatgcccccgagcgggcagagggggcccagggagggcagagctcagggccagccgaggaggggctgaggggtctccagatctgggatggggcttggttttcttagcagtggacaagattggctccctttggtcctcattggtccttggaatgggaggtagagaggagtcctgcagcaggccagagtctccagggaggcctgtctgcccggtggcattgggcacagccagacagcttgggcctgagtccatgggcacggcaaagctgacgaggcctatgccactgacggacagggccatgagggcacagccagctagcaacagagccctgcggcctgcacggtccaccagccccatggcggtcagggtagctgccaccttcactgcgccaagccccacagaggccagcacggctgaggatcccccatggaaaccaacggagctgaagatggtg

SEQ ID NO: 776 - DNA, 502 bp, Homo sapiens
  MAP TO CHR22_170.0; EXPRESSED IN BRAIN, SIGNAL = 0.65; EXPRESSED IN PLACENTA, SIGNAL = 0.79; EXPRESSED IN ADULT LIVER, SIGNAL = 0.74; EXPRESSED IN FETAL LIVER, SIGNAL = 0.57; EXPRESSED IN BONE MARROW, SIGNAL = 0.74; SWISSPROT HIT: P03186, EVALUE 9.10e-01; EST_HUMAN HIT: BF916417.1, EVALUE 2.00e-07; NT HIT: U62631.1, EVALUE 1.00e-04
atctgaagcccacattcacctggggaccctctgttcatatttgttaaccctgatgaccgtagcccaggaggcaaaggcagtggctgcctgagtgcagcaggtcccagggcccccatgcctaatgctggccgccacctcgtggggcgtggcctgagcacctggcgtgtcatgctgggccccaaaagcgacgccaggggcgtgtttctggtgtttccgaactgggggctttattgaggtaactgcagattcacacgcacctagagggaccacgcagggagtgctgcttccctctgtccactcggacgatgcctcgcagggccgcagcccccgccacccggatgctggcctggtgaggtggtccccaggactcacactcactggtgcagatcaatgctgagccatatcagcgcatgtgtgcgttcgttgactaccttgatgcagggcagatgagcccccaaattggggtttagtcagggagggttcttggcttcacccagaaaag

SEQ ID NO: 777 - DNA, 570 bp, Homo sapiens
  MAP TO AL133285.3; EXPRESSED IN BRAIN, SIGNAL = 1.2; EXPRESSED IN LUNG, SIGNAL = 1.4; EXPRESSED IN ADULT LIVER, SIGNAL = 1.5; EXPRESSED IN FETAL LIVER, SIGNAL = 1.2; EXPRESSED IN PLACENTA, SIGNAL = 1.6; EXPRESSED IN BONE MARROW, SIGNAL = 1.1; SWISSPROT HIT: P45972, EVALUE 7.10e+00; EST_HUMAN HIT: BG675333.1, EVALUE 8.00e-04; NT HIT: AF338354.1, EVALUE 1.00e-04
atttccactcccatcagcaccatgacagttgagaattgtcataacaatgactagaagaaaccattgaaggacttaaaggaaggtgccactaccagttcagaggagttcaccactcatttccagaaaagacttgaataattcctcccctcacttttaaagtccaatcccttcattagagaaaccctatattttaactgcctcacttctcactagttaagaagtggatttccaagccacgctcccacttctccatcccctgctcatggaacaaaacttgctctgcttgatgctcactttcagtttcatgtattggctctgcagcactgaagagggaaagatgctatttgggggggccaccaagtttaatggtaacaaaaacaccccacaccttctctatatgctcataacttctgcgtcgtgttttgtatttggcaagttctagatgggacaattttttgtctattttcatcacaaatggcaaaaccctagtattgttttggttttaactgtaaggtttactccatttaccctttaaagattcttcaaatgcattaacttcctcaaaagcaa

SEQ ID NO: 778 - DNA, 563 bp, Homo sapiens
  MAP TO AL137062.3; EXPRESSED IN PLACENTA, SIGNAL = 0.59; EXPRESSED IN LUNG, SIGNAL = 0.7; EXPRESSED IN BONE MARROW, SIGNAL = 0.61; EXPRESSED IN ADULT LIVER, SIGNAL = 0.62; EXPRESSED IN BRAIN, SIGNAL = 0.64; EXPRESSED IN FETAL LIVER, SIGNAL = 0.63; SWISSPROT HIT: P41594, EVALUE 2.40e+00; EST_HUMAN HIT: BF843643.1, EVALUE 0.00e+00
agggaagaatccaatccctcacaaaatgattacaatgtttgctatagtatcaacagcataaacttccaggactgtgttgttaggcactgaagtcacatagtgtccttttcttcctgccatcagggtcctgaggtaaaatttggagaaagataggaggagagcaacagcttgtttcacttcctctactccttccacactgcacgtgttttagaaaccgggctaatgaaatttacgttctattttcgaggctgtgctcagttatttctcaggaggtccagtaaataaagaattaatctatttgttttgtctttagtcaagttatgaaactagcgaattatttacattaagtggatttgttgttgctgtcgttgctgaaactagtgaaaggatcgagttttgtgctatgagtcatgggagcaaaacgtgagtatttagaagtggagaggaccacgaagaaggaagccctggtgacttgaagaaatcatggagagttctccggattcccacaaacctatggggtttagattccagctaatacttacacgggtctcagaaggacagag

SEQ ID NO: 779 - DNA, 504 bp, Homo sapiens
  MAP TO AJ239319.2; EXPRESSED IN FETAL LIVER, SIGNAL = 0.42; EXPRESSED IN BONE MARROW, SIGNAL = 0.42; EXPRESSED IN LUNG, SIGNAL = 0.45; EXPRESSED IN BRAIN, SIGNAL = 0.52; NT HIT: gi14759179, EVALUE 9.00e-89; EST_HUMAN HIT: BE162649.1, EVALUE 1.00e-88; SWISSPROT HIT: P21675, EVALUE 1.40e-01
agatgggaatggcatgtagccccttttatcttagcctggatggattactttagtcctgagatgttagctatcacgatagtcttcttggttaaggtttgcttatggtcctgtgatttttcttcctctgctgctcacactgttcagtcgaaaatttgccctttttgatgaacaacatcgggaagagatgcgaaaagaacggcggaggattcaagagcaactgaggcggcttaagaggaaccaggaaaaggagaagcttaagggtcctcctgagaagaagcccaagaaaatgaaggagcgtcctgacctaaaagtaagtataatgtggtgtgattacagctaacggagcaaaggaagaatgtataccttttcctttagcttttgatatcctcctttactgggaatgagggaagtatattgtggaaagctggtttgaattgatgtgactacttgggggtgttctcaatactaatgtgagtggtattgacaattccacaccaaatctgg

SEQ ID NO: 780 - DNA, 564 bp, Homo sapiens
  MAP TO CHR21_6.0; EXPRESSED IN FETAL LIVER, SIGNAL = 1.3; EXPRESSED IN PLACENTA, SIGNAL = 0.84; EXPRESSED IN ADULT LIVER, SIGNAL = 1.1; EXPRESSED IN BONE MARROW, SIGNAL = 1.3; EXPRESSED IN HELA, SIGNAL = 2.9; EXPRESSED IN BRAIN, SIGNAL = 1.3; EXPRESSED IN HEART, SIGNAL = 1.1; EXPRESSED IN LUNG, SIGNAL = 0.93; NT HIT: AJ400879.1, EVALUE 9.00e-03; EST_HUMAN HIT: AA209247.1, EVALUE 0.00e+00; SWISSPROT HIT: P42189, EVALUE 2.40e+00
aacggtcatcgtaacagttggataaagacatataaataatttaagctaacacgaaattcataaagtctgaagaaaaaattcttgaggctaaaaggaaaaccttttggcccactgcacaggttgggcacaaaagtgcttgctaagctatctatttcacacatgcaacgacagaaggttcgatattcattcgatcgatgagtgaaaaggcacaatggcaaaatcagacagacttcttttcaaatacagatctccaatgtccccctccagtctgcagatgcacggctggtggtgtggctcagacggagcaagggttacatcaaggctattctctggaccgtgcaaacagtctagaccaatgacctgcagcatcatgtcctttgaagaagaggcaagttcggtcatgatgaagaaaaatcaaggcgtaccccttttaacaatagggagcagctcgaggctgcaaagaggtaagcagggtgagaagaaaacggcatctgcttccatggttacaggccaactatgagaaccttgcttttcaaaggagtctgttctcaggctccctcacag

SEQ ID NO: 781 - DNA, 563 bp, Homo sapiens
  MAP TO AL133543.2; EXPRESSED IN FETAL LIVER, SIGNAL =   8; EXPRESSED IN LUNG, SIGNAL =  10; EXPRESSED IN HEART, SIGNAL = 7.5; EXPRESSED IN BONE MARROW, SIGNAL = 9.1; EXPRESSED IN PLACENTA, SIGNAL =  10; EXPRESSED IN ADULT LIVER, SIGNAL = 9.1; EXPRESSED IN HELA, SIGNAL = 6.6; EXPRESSED IN BRAIN, SIGNAL = 8.5; NT HIT: gi13385873, EVALUE 1.00e-44; EST_HUMAN HIT: AW504398.1, EVALUE 4.00e-61; SWISSPROT HIT: Q06343, EVALUE 1.20e-01
tctaactcaaagtggcccaagaattaaatcatcttaataacactcatagaataaaatgataatgaagaaatgtaaagccatgatgtgcatctcaaaccttgattgattttggcagccaagtctacaaagagatcgctgtcattttcaataatttgagaatcagagcgctttttctttgtctcctcaactacgaaatcatagagggcaagacgatcagcttgagttagatcacaaacaaaccgtttgtgattcaaaggaacttcaacaggcaatgaagaataaattcctaaagtaaaaataaaatcacaagaataaacaatacatgaagcattgtgaacttaaaatctaataattatctttaaacatgtgctttaataatgcaatattaacacaaacttttttcataatccctaagtatacaaaatatcaatctaagcaataaatgacaaacaattctatcctgaatgttatatccacaaaaaaaaaaaaaatgtattatggatgtttgctattctctccaacaatataaagacagatcccatggaggcaggcaggaataatca

SEQ ID NO: 782 - DNA, 594 bp, Homo sapiens
  MAP TO AL139141.1; EXPRESSED IN HEART, SIGNAL =   6; EXPRESSED IN FETAL LIVER, SIGNAL = 5.3; EXPRESSED IN LUNG, SIGNAL = 6.2; EXPRESSED IN ADULT LIVER, SIGNAL = 5.6; EXPRESSED IN BONE MARROW, SIGNAL = 5.6; EXPRESSED IN BRAIN, SIGNAL = 5.6; EXPRESSED IN HELA, SIGNAL = 3.3; NT HIT: gi14150168, EVALUE 0.00e+00; EST_HUMAN HIT: AA085012.1, EVALUE 0.00e+00; SWISSPROT HIT: Q05823, EVALUE 3.00e-01
tctcattaccaggcctgaccatccttcagtcactgtaacattgctcattgttcagtattccttattgctcagcactttcctttcctgctgaagtagaggagtttctctgtctcttggtaaacttgttttcatatttgtcaattttcctttcagcctctgcctgtgagtttctggatattgtagagctgctgctccagtctggtgctgaccccactctccgagaccaggatggctgcctgccagaggaggtgacaggctgcaaaacagtttctttggtgctgcagcggcacacaactggcaaggcttaatcaaaagactggaaaactgcagtctgtaatagcataaggcttccattatgaaagaaaactacaaaaataatacttcttttccacccgtctttggtatgtattggctaataaaatcagttctgtggaactgggattttgaagtctcagcaattcattcttcttgcatacattctaggcagtacagttttggtgatgaacatgtgtactgtgcataatataatccaattctgctgagcatgctctgaaatttatcactgctttagagggtgggcagaagaggagacag

SEQ ID NO: 783 - DNA, 593 bp, Homo sapiens
  MAP TO AC021635.3; EXPRESSED IN FETAL LIVER, SIGNAL = 0.71; EXPRESSED IN PLACENTA, SIGNAL = 0.63; EXPRESSED IN ADULT LIVER, SIGNAL = 0.63; EXPRESSED IN BRAIN, SIGNAL = 0.58; SWISSPROT HIT: P08547, EVALUE 2.00e-36; NT HIT: AL163213.2, EVALUE 2.00e-22; EST_HUMAN HIT: BF670627.1, EVALUE 2.00e-50
aaacaaaaatgacaaacctttacctagactaagagaaaaagagagaaaatccaaataaatagaatcagagatgaaaagtgagacattatgattgataccacagaaattcaaaggatcattactggttaccataagcaactatatgccaataaattggaaaacctagaagaaatggacaaattcctagacacataccacctaccctacctaaatcatgaagagatccaaaacctgaacagaccaataacaagtaatgagatcaaaactgtaataaaaagtcccccagcaaagataagccctgacctgatggcttctaccatgctgaattctaccaaacatttaaagaagaataatacccattatactcaaattattctgaaaaatagaggaggaggaaatacttccaaacttgttctaagaagtcagtattaccctgataccaacaccagacaaagacacatcaaaaaaagaaaacttcaggtcaatatctctcatgaatattgatgtaaaaatcctcaacaaaatgtaagcaaacataattcaacaatgcattaaaaagatcattcatcatgatcatccctgggacttatccc

SEQ ID NO: 784 - DNA, 590 bp, Homo sapiens
  MAP TO CHR21_59.0; EXPRESSED IN BONE MARROW, SIGNAL = 1.9; EXPRESSED IN BRAIN, SIGNAL = 1.7; EXPRESSED IN HELA, SIGNAL = 3.2; EXPRESSED IN HEART, SIGNAL = 1.5; EXPRESSED IN ADULT LIVER, SIGNAL = 1.4; EXPRESSED IN FETAL LIVER, SIGNAL = 1.8; SWISSPROT HIT: Q92538, EVALUE 5.00e-01; EST_HUMAN HIT: BE973840.1, EVALUE 2.00e-20; NT HIT: AJ133804.1, EVALUE 5.60e-01
agacctgacctggtccacacccatggcctggcaagctagatggggtgaattttcacctgccacagtcgcaagtcaaagccaccggcttctctcttctccctcccattgctcctgacagccagggttaatattttgcctcatgtaaacagggaggcatccacccgagaatctcccctcagcccacataagctctgcagagagggctgtgttgctccagttcccacctggacatgagcactttgaagggcagcttccctcccggggtctggctgagctcagggtaggcgtcagtctgcatggattggatggaggaaggctgtgcgtggcaggagatgacactgcccttgggctgtgtggtttctctctgttccgagccctgttcctccaccttagcggaatagcgcctctccatccagttctcatctttgagaacgattcttgggatgaaagccacgacgttggatatgaacaacctggttgccaagttgtttgcatttttgcctcctctcctttctgaagggaaaagctgtccttgtgtggggccacttcagaccccagtgagcaaaaggagtgatgtttaggggaaggca

SEQ ID NO: 785 - DNA, 594 bp, Homo sapiens
  MAP TO CHR22_206.0; EXPRESSED IN BONE MARROW, SIGNAL = 1.6; EXPRESSED IN BRAIN, SIGNAL = 1.6; EXPRESSED IN HELA, SIGNAL = 2.2; EXPRESSED IN HEART, SIGNAL = 1.6; EXPRESSED IN LUNG, SIGNAL = 1.8; EXPRESSED IN FETAL LIVER, SIGNAL = 1.8; EXPRESSED IN ADULT LIVER, SIGNAL = 1.6; NT HIT: gi13648116, EVALUE 1.00e-112; SWISSPROT HIT: P14772, EVALUE 5.80e+00; EST_HUMAN HIT: AW500592.1, EVALUE 1.00e-113
tcttcaggcagtgtccttcccatcagatttggttgtgacttcattttgccagtaatttagaaccaaaactcccttctcccaagtatttaaaagcaaacaaatgcaaacatatttcatttctttatagtttgacagttttgctcatttctctcactccctgacatttataatgcccaagattcttgtcagccttggtttatcattctacctagctctggtttcactgtggttctgtggtttttctttgtgactcaactccatgataactggcagatgtcctggagaacatgatggagccaccacagcgagactccagtgcaccagggaggtttcacgttggcagtgcagaatccatgctgcatgttcgacctggtggatacacgccccagagagcactgattaaccccttcgctccctctcggatgcccatgaagcttacgtccaacagaaggcgctggatgcacacttttcctgtgggtaagttggttgcttaagagagagccttggactaggagctcctagccctggtcctcagtgtcggtcacccatgtgtccttggtcaggtgcctctgttgctccacctgtaagatggga

SEQ ID NO: 786 - DNA, 521 bp, Homo sapiens
  MAP TO CHR22_154.0; EXPRESSED IN BRAIN, SIGNAL = 0.31; EXPRESSED IN HELA, SIGNAL = 0.83; EXPRESSED IN ADULT LIVER, SIGNAL = 0.38; NT HIT: L04546.1, EVALUE 0.00e+00; SWISSPROT HIT: Q09472, EVALUE 6.40e-02
tgtgcactttgtcgttctccccattttataggtgatgagatgaggctcatccagatgcattggcttccccaaggttaaccggccagaaagcggcagggtcaggatttgagcccgtgtttgttggattctgattccgggctctggagggcctcagtgtcctgctggtctttgcccaggtggtaggtgtagggagggtatttcaggcagtgggcacagcctgggtaaaggcacagagatgtggaatggtcgacctgatgctttgggggactctaagtggtcacttatgggttgatggcaagatgggagtgggtgctggggcacagctgagtggaaaccagggtagagagaggtgtagaggggcgtcctgaggagtttggacctgaactggtagacaaaagggggaactaatgaatgattttagcttggagacaggggaggctctatgcacgatataatctggccctccagactgatctccatccttcaccatccagccctgagcccaggaaactgatatgcgt

SEQ ID NO: 787 - DNA, 518 bp, Homo sapiens
  MAP TO AL138995.1; EXPRESSED IN HELA, SIGNAL = 4.5; EXPRESSED IN BRAIN, SIGNAL = 1.9; EXPRESSED IN HEART, SIGNAL = 1.9; EXPRESSED IN PLACENTA, SIGNAL = 1.3; EXPRESSED IN FETAL LIVER, SIGNAL = 1.8; EXPRESSED IN BONE MARROW, SIGNAL = 1.4; NT HIT: AF234171.2, EVALUE 1.90e+00; SWISSPROT HIT: P98089, EVALUE 9.50e-01
tatcttgcctgctggacctctcaccctgatgtcccataggcaactccaattcaaacaagtggaatgggctcatcatctcatctactcctccactcccaatctccgtggctgctccacccaagcccgtagcctgggctggctacgaggctgcattctccctcactcccacagccactcccctccttggcttccctcctgtaagtctcttcaccctccactgctattgccttggcttagtctcaactggctggaccttgcaatggcctgccatctggtcagcctcagccccctgcccctccaatctctcctctgcatcgctgggggagggattgttccaaaacagcaatagtttacagttttaacatgattaaaaccttctgtgactgcagggcagagcccagtctttttaatgtggtgtagaaggccttctgaaatcttgcccctaccatgtttgtgtcccggtcacttgatgccctcaccaacactccagattccaaccgtcaagaccacgacacact

SEQ ID NO: 788 - DNA, 578 bp, Homo sapiens
  MAP TO CHR21_60.0; EXPRESSED IN HELA, SIGNAL = 7.9; EXPRESSED IN BRAIN, SIGNAL =   2; EXPRESSED IN PLACENTA, SIGNAL = 1.2; EXPRESSED IN ADULT LIVER, SIGNAL = 5.9; EXPRESSED IN FETAL LIVER, SIGNAL = 2.7; EXPRESSED IN BONE MARROW, SIGNAL = 2.3; SWISSPROT HIT: P15036, EVALUE 1.00e-37; EST_HUMAN HIT: BE719550.1, EVALUE 0.00e+00; NT HIT: AL163278.2, EVALUE 0.00e+00
tcccaggaggtttcactgagctggggccagggagcagggacctcattccccagtggttctgccccttggggacacagtgcccctaccataggtactcaaaggtactcagaggtactcaaaaggtcctcctgcggaccttgtgtaggtgtcaagttctctctagagtgaacatgcctcagaatcataatcagggaggaatgtcattcactttttcttcattgacaaattgagtttaactcttttccatccatgttcaccaaaggtggcccgccggtggggaaagaggaaaaataagcccaagatgaactacgagaagctgagccggggcttacgctactattacgacaagaacatcatccacaagacgtcggggaagcgctacgtgtaccgcttcgtgtgcgacctccagaacttgctggggttcacgcccgaggaactgcacgccatcctgggcgtccagcccgacacggaggactgaggtcgccgggaccaccctgagccggccccaggctcgtggactgagtgggaagcccatcctgaccagctgctccgaggacccaggaaaggcaggattgaaa

SEQ ID NO: 789 - DNA, 550 bp, Homo sapiens
  MAP TO AL133406.3; EXPRESSED IN FETAL LIVER, SIGNAL = 2.6; EXPRESSED IN HEART, SIGNAL = 2.3; EXPRESSED IN ADULT LIVER, SIGNAL = 4.6; EXPRESSED IN LUNG, SIGNAL = 2.9; EXPRESSED IN BONE MARROW, SIGNAL = 2.1; EXPRESSED IN BRAIN, SIGNAL = 1.3; SWISSPROT HIT: P12970, EVALUE 2.00e-29; EST_HUMAN HIT: BG480114.1, EVALUE 6.00e-57; NT HIT: gi13654754, EVALUE 1.00e-47
aagtgccttcatgagcaaccagttcgtccaggccttgggcagcaaaacagcactcagctgcctaggctggctcacaggtactgaccagagacagtgcaagagaagaactgatggctgctggcccgggctgagaagaaagctgccagcaaaggggaggtccccactggagaccacctgtccttggtgcaggggttgacactgttgctaccttgtgggagaacaaggtggctcaactggtggtgactgcgcacgacatggatcctttccagcaggctgtcttcccatctgccctgtatcatgaaagggggttccctactacatcatcaaaggaacggccagactgggacatctagtccacagggagacctgcaccagtgttgcctgcacacaggttaacttggaagacaaatgagctctggctaagctggaggaagctaccaggaccagttacaataatgggtatgctaagatcactgtcaccggggaggcaatgtctggggtcataaatctgaggcttgcattgccaagtggcaaaaggcagaggtcaaag

SEQ ID NO: 790 - DNA, 528 bp, Homo sapiens
  MAP TO AC015930.3; EXPRESSED IN BONE MARROW, SIGNAL = 0.53; EXPRESSED IN LUNG, SIGNAL = 0.5; EXPRESSED IN BRAIN, SIGNAL = 0.53; SWISSPROT HIT: Q04832, EVALUE 8.40e+00; EST_HUMAN HIT: BF675424.1, EVALUE 1.20e-02; NT HIT: M80463.1, EVALUE 8.00e-03
catctgtgcatgaccctttgtttcaagatggtgtgtgctaagctgtattctgtcagcgaaatgagcccccactccaaaaggcagtcagggttgtctttggaacagagagtttctcctcagctaaaaaaggatgtgtctatcaagtgctaaagccacgggatatgttttctggccactactagatttagacagagataacaacaacaagaacaacaagaacaacaacaacaacaacaaaaatgcacaaaactccaaagatggcccattgggttggcagaaaaccaaagctgcccctccccccttctttgtaatggtcaggttgtaaaatcaggcagttgtctctcaaaatcattgctgaagatagccgcatgggtaacagcagcgtgaggctgacccagggaagccagctgatggaaaactattctgaaatcctgtgtgtgaaagtaacctgaaaaataaaatgtgtgagagcaacgtaaggcatttcttttcttatttatggctcatagagcttgcttgaggcatttc

SEQ ID NO: 791 - DNA, 557 bp, Homo sapiens
  MAP TO AB017653.1; EXPRESSED IN BONE MARROW, SIGNAL = 0.67; EXPRESSED IN BRAIN, SIGNAL = 0.67; EXPRESSED IN PLACENTA, SIGNAL = 0.7; EXPRESSED IN LUNG, SIGNAL = 0.54; EXPRESSED IN FETAL LIVER, SIGNAL = 0.71; EXPRESSED IN ADULT LIVER, SIGNAL = 0.73; NT HIT: AJ229041.1, EVALUE 9.00e-06; SWISSPROT HIT: Q9VCE9, EVALUE 6.90e+00; EST_HUMAN HIT: AW006890.1, EVALUE 8.00e-04
gccagtttattggtcaggattctccagagaaacagaaccaataagattatctatctgtctatctatctgtctatctatctatcatctatctatctatctatcatctatctatctatctacatctgtcactgtatctatctaatctgtcactctgtcgtctatctaatctgtcactgcatctatctaatctgtcgctctatcatctatatatttatctatctatctatctatctatctatctatctatctatctatctaatctgtcactctatctgtctagctacctacctccctatctatgaggagaattattacgggaatcacaattatgaaggccgagaagtaccacaatctgctgtctgtgagctggagagccaggaaagtcagaggtataattccctctgtgtccaaaggctcaagaagcaggagcattgttgttcaagggcaggagagggtggctgtctacgctcaagcagggagagcaaattagccctttctctgcctttgtgttcaattcacaccatcaaccagttggatgacacccactcacattggtg

SEQ ID NO: 792 - DNA, 510 bp, Homo sapiens
  MAP TO AL133515.2; EXPRESSED IN LUNG, SIGNAL = 1.2; EXPRESSED IN FETAL LIVER, SIGNAL = 1.5; EXPRESSED IN ADULT LIVER, SIGNAL = 1.5; EXPRESSED IN PLACENTA, SIGNAL = 1.8; EXPRESSED IN BONE MARROW, SIGNAL = 1.1; EXPRESSED IN HELA, SIGNAL = 0.96; EXPRESSED IN BRAIN, SIGNAL = 1.2; NT HIT: AF156100.1, EVALUE 8.00e-77; EST_HUMAN HIT: BF208341.1, EVALUE 1.80e-01; SWISSPROT HIT: Q90688, EVALUE 2.00e-04
tactgggaagcacttggtcccagctattgaattcaagactcaataacctcaaactttataaagtcatcatttatattatttttgacattcatagcctgtttagaaaatgtaaagctaagtattgtggtcaaacctcccttaatattagggatttggtcatattagtttggtccagaagtctcatcaatttttctcactcaataaaaacaaaaacatgatacaaacccagtacctgtgtgaacccacgataaacatatcgttaacggtccaggcaatctttggtttgggataacctgttgcagaacacatgatggagacctcagaccctcctgtgaaagactgattcttgggcatcacagtgactttgggtggttctgcaaataaaaatatacgtatgtagaaaaatgccaatttatcttgatgttagaagcttcctatgttagcagatttgtaggtttctcaccaccacatctttattgccttcctctatggatgaaccccatcacagat

SEQ ID NO: 793 - DNA, 545 bp, Homo sapiens
  MAP TO CHR21_61.0; EXPRESSED IN BRAIN, SIGNAL = 1.5; EXPRESSED IN HELA, SIGNAL = 3.2; EXPRESSED IN PLACENTA, SIGNAL = 0.9; EXPRESSED IN ADULT LIVER, SIGNAL = 1.1; EXPRESSED IN FETAL LIVER, SIGNAL = 1.7; EXPRESSED IN BONE MARROW, SIGNAL = 1.6; EXPRESSED IN LUNG, SIGNAL = 1.1; NT HIT: AL163285.2, EVALUE 0.00e+00; EST_HUMAN HIT: AA403053.1, EVALUE 1.00e-58; SWISSPROT HIT: P27401, EVALUE 3.00e-06
aggaaaatggtgtttgccaggtgaacagctgcatgccaggtaccagtagatgtgttcattggctcaaactgatacagcagctgccattggagtcaccagctggttaagcctacaataatccactgtcattttccaagatccatctgtcttctgcacaggccaaacaggagggttgaatggggatgtggtgggaatcaccacacttgtgtctttcaggttcttgatggtggcactaatctctgcaatccctgcagggatgcaatattgttttagatttactattttcctaggtagaggcagttctggtgacttccacttggtgtttccagctatgatggccctcattccatgagtcgaggacccaaatggggattctgccagctgctgtggatatctattccaattatgcatctggaacaaggaaataaccataggatgggtttgagaaccaatggacccactgtaagctggacatgggctaaaactcctttcatcacctgtcctccataagcccctactctgattgaagggccacacagacattt

SEQ ID NO: 794 - DNA, 549 bp, Homo sapiens
  MAP TO AL133408.3; EXPRESSED IN FETAL LIVER, SIGNAL = 7.9; EXPRESSED IN BRAIN, SIGNAL = 8.7; EXPRESSED IN HEART, SIGNAL = 7.2; EXPRESSED IN LUNG, SIGNAL =  11; EXPRESSED IN HELA, SIGNAL = 4.1; EXPRESSED IN ADULT LIVER, SIGNAL = 9.4; SWISSPROT HIT: P11819, EVALUE 1.50e-01; NT HIT: AL163283.2, EVALUE 3.00e-27; EST_HUMAN HIT: H69214.1, EVALUE 7.00e-32
ggctaatcccaaatcccatctattcaaacttttccagatcccttcatagcaaatacctttattccgctactttccaatggtgagtttctctgttataccccttattggagggtaccttttgttaaggttataggtatttgtcaggttttcctgttagattttggtacgatatatttaggtttatattatctcctgtacagtgcatagtggtggtgcatcatcatacaggtcttcatccttgttatcttcacgttgactaggctgagaaggaggaggaagaggggttagtcttgctgtctccgtggtggcagaggcagaagaggtggaagaggtggaaggggaggcaggagaggcaggcacactcagtgtaacttttattgaaaaacgatccctgtataagtggactcatgctgttcaaacttgtgttattcaagggccctctgtaattttgttagaattactaatatattagagtgttctacatttttcattctcaacattttactgatcattattattatttgagatggggtctcgttatattgccca

SEQ ID NO: 795 - DNA, 568 bp, Homo sapiens
  MAP TO CHR21_62.0; EXPRESSED IN HELA, SIGNAL =   5; EXPRESSED IN BRAIN, SIGNAL = 1.9; EXPRESSED IN FETAL LIVER, SIGNAL = 1.8; EXPRESSED IN HEART, SIGNAL = 1.2; EXPRESSED IN LUNG, SIGNAL = 1.2; EXPRESSED IN BONE MARROW, SIGNAL = 2.2; EXPRESSED IN PLACENTA, SIGNAL =   1; EXPRESSED IN ADULT LIVER, SIGNAL = 1.2; EST_HUMAN HIT: BF671606.1, EVALUE 3.20e+00; SWISSPROT HIT: Q16534, EVALUE 3.20e+00; NT HIT: AJ251835.1, EVALUE 1.40e-01
agtgaatgtgggaggaggtgtccccatcctgttctccaccaccaagttctgaaaggggagttgggaggtaccttcccagaacctgaagaccgagagcctcatggataggccttctgggaggaggctgcaccagcctggtggtgggggtgcctacaggaagacagctagggaaataaatacccaaactcactttgctttctactgtgatcacctgctgatgctccccatttgctgaattcaaatggaagtctgtaaggtcagcttgctgggacagagagggctgcggaggcaacctggaaggacaagtgcaagctaggcacacagcctcttagagcaatcggacactgctggatttgcagttgcatgaggctgttaattgctttattttaaagacactttgaattgccatttctgcttattgcactcaaaagtatcttaacaatcatagagaaaatattctacatacaaagccatactaaaaaataaaaaatgttatgggttaggaagggaatggatatacacagaaggggcaggcagaacccacagatgtagaaatgggcagagccac

SEQ ID NO: 796 - DNA, 525 bp, Homo sapiens
  MAP TO CHR22_208.0; EXPRESSED IN PLACENTA, SIGNAL = 0.74; EXPRESSED IN LUNG, SIGNAL = 0.84; EXPRESSED IN ADULT LIVER, SIGNAL = 0.7; EXPRESSED IN BRAIN, SIGNAL = 0.96; EXPRESSED IN HELA, SIGNAL = 3.1; EXPRESSED IN FETAL LIVER, SIGNAL = 0.84; NT HIT: gi15318458, EVALUE 5.00e-75; SWISSPROT HIT: O14994, EVALUE 7.00e-21; EST_HUMAN HIT: AI792940.1, EVALUE 8.00e-10
cacctttcttgctctggaggaaacagcccttgcttgggtagacagatctctgcccagggataagcagtgactggacatcagcccctcagccacactggacagagaagaagggcagtaaggagacaggaaggaggataatgatgcacccttgggtgcaggagacagcggctggacatgcacctctgggctgccttcctcccacactcccccagcccctgccccagagactcacatgtaagccttgtagttggatccaattttctggatgcggatgtcgtacttggagtcgatgaaggcctcggtggtggcgtaggttttggccatggcgaccacgctggtgatgtcctggaagtcaagctggttttccactttgatctgtgtgggaggatgagggggatgagtgccacccaccccgtgttcactgagcccaccctatgccaggaacaagtgctctgtctatagacacgaattcccttcagaaggtcacctgctggcaggggagacagacacgggaagcaaatcatt

SEQ ID NO: 797 - DNA, 593 bp, Homo sapiens
  MAP TO AC009472.2; EXPRESSED IN HEART, SIGNAL = 1.3; EXPRESSED IN PLACENTA, SIGNAL = 1.6; EXPRESSED IN BONE MARROW, SIGNAL = 1.6; EXPRESSED IN ADULT LIVER, SIGNAL = 1.4; EXPRESSED IN HELA, SIGNAL =   1; EXPRESSED IN BRAIN, SIGNAL = 1.4; EXPRESSED IN FETAL LIVER, SIGNAL = 1.5; EXPRESSED IN LUNG, SIGNAL = 1.5; NT HIT: AJ009867.1, EVALUE 0.00e+00; SWISSPROT HIT: Q9QXY9, EVALUE 3.00e-19; EST_HUMAN HIT: AI907171.1, EVALUE 8.00e-69
ttgttcacttcctgcttccccaggcctggatacaagtatttgctaaatgaataaataaaatgaatgaactgatttttaaaattcacattaaaatgatgtaattcagttaaatcattcaaacacttgctagatttaccatcttttctttgccttttcctctaaatttgatcccggtgatatgcaaattaatacaaccgtcaaacaactttacacatgtataaatatttctctgtcttacctgtcatattgcaagtcctctggttactttcaaaatgatattgtcgtcgtgcttgggcaatgtattctgcagcctccctttcctgtatttctctgattttcttctgtccatatttccccagaatatatactcctacaatcattaaaaaagtactatattcattagagtaccaaaaattctacacagtatttttaacctactttatgcaattataagttttatattagtggatagctaaaattacatttttaaaacctaaataaagaattttgtaagattggcccaaagaaaaggaaattagcatttttacagccaatgacagaggaaatgatgggcacataaggaccaggtttga

SEQ ID NO: 798 - DNA, 537 bp, Homo sapiens
  MAP TO CHR22_4.0; EXPRESSED IN BONE MARROW, SIGNAL = 1.5; EXPRESSED IN HELA, SIGNAL =   1; EXPRESSED IN BRAIN, SIGNAL = 1.5; EXPRESSED IN HEART, SIGNAL = 1.5; EXPRESSED IN PLACENTA, SIGNAL = 1.6; EXPRESSED IN LUNG, SIGNAL = 1.8; EXPRESSED IN ADULT LIVER, SIGNAL = 1.7; NT HIT: gi15309717, EVALUE 3.00e-58; EST_HUMAN HIT: BI754772.1, EVALUE 4.00e-58; SWISSPROT HIT: Q9H479, EVALUE 1.00e-17
tgcccatccctatctctgtctctctctgtgtcactctgtctcctctgagtctctctctgcctgtacacatgtgtgcctatgggtctctcacacatgctcacctgctcaagctcctcatcttcaaatgctccatcacaaaggcggccacacctctcggcaaatcgatgaccttcatgggcctcggcgcctgcaccaggcccgtgctctggagggcctccaggctcgccacctccccctcaaacatctgctgggcctgcatccagaacacagccatgagccttgtcagccttgttgactcagccagggcctctgcccaccgggctcttcacagaagctaccacgtggaaatcacaaggaccttcagtcactgatagcctctgggaactggcgtccacccgcagagggcagggtgcaagagatatgccctttattgggtgtgaactcatcataaagttcacccactggaaaagtatacaatttgatgctttattagattgatactgtgtgcaagttctctcttgcccactggcagttaat

SEQ ID NO: 799 - DNA, 500 bp, Homo sapiens
  MAP TO CHR22_114.0; EXPRESSED IN BONE MARROW, SIGNAL = 0.97; EXPRESSED IN LUNG, SIGNAL = 1.2; EXPRESSED IN ADULT LIVER, SIGNAL = 1.1; EXPRESSED IN PLACENTA, SIGNAL = 0.9; EXPRESSED IN HELA, SIGNAL = 0.78; EXPRESSED IN BRAIN, SIGNAL = 1.1; EXPRESSED IN FETAL LIVER, SIGNAL = 0.78; NT HIT: gi14778298, EVALUE 1.00e-100; EST_HUMAN HIT: BI254887.1, EVALUE 1.00e-100; SWISSPROT HIT: P32019, EVALUE 3.00e-06
ttacatcttgatccccagcccctgaaacttggggtacccctgctcactgcagtgccaagaaacggaagccagcttggacagaccgtatcctatggaaggtcaaggctccaggtgggggtcccagcccctcaggacggaagagccaccgactccaggtgacgcagcacagctaccgcagccacatggaatacacagtcagcgaccacaagcctgtggctgcccagttcctcctgcaggtgagttctggcctcatcctccccgcatgaaatccccaggcccaactcggcataccactgcccctcaccattaccctttgtataaccccttgtacctgccctcagcagcatccatttgttgtaacagtggaaatggggttgcaatctacattttcagatgaggaagctgaggctcagacacatggcatcacctgcccagggtcacccaactagtaagaggaacagttaggatttgaacccaagtgagtctggtttcagagccca

SEQ ID NO: 800 - DNA, 567 bp, Homo sapiens
  MAP TO U82695.2; EXPRESSED IN BONE MARROW, SIGNAL =   2; EXPRESSED IN BRAIN, SIGNAL = 1.7; EXPRESSED IN PLACENTA, SIGNAL = 6.6; EXPRESSED IN LUNG, SIGNAL = 4.4; EXPRESSED IN ADULT LIVER, SIGNAL = 4.9; EXPRESSED IN FETAL LIVER, SIGNAL = 2.4; NT HIT: U82695.2, EVALUE 0.00e+00; SWISSPROT HIT: P21810, EVALUE 3.00e-45; EST_HUMAN HIT: AU141310.1, EVALUE 0.00e+00
atggagaagacaggtgggtgctggtgctgatgatcccctcgcctcttcccccaggtccatccgccatgtggcccctgtggcgcctcgtgtctctgctggccctgagccaggccctgccctttgagcagagaggcttctgggacttcaccctggacgatgggccattcatgatgaacgatgaggaagcttcgggcgctgacacctcgggcgtcctggacccggactctgtcacacccacctacagcgccatgtgtcctttcggctgccactgccacctgcgggtggttcagtgctccgacctgggtttgtccctgagtgatggggagcggggcatgcagggaggctcaggtgcagcctgagagccccttctgaagggggcacatgctggtcctgtgggacggtggcgagcatgatgtaagtgtaggaggggtccagccgtctggctgtgagctgtgcagtttgtgcccacttgtggtggcatccccgtgtgcccgtcagtgtccctgtgtgtgtgtccccggtcctccctaccagtggggctagtcggctggatggctccaagttcat

SEQ ID NO: 801 - DNA, 557 bp, Homo sapiens
  MAP TO AL031283.26; EXPRESSED IN BONE MARROW, SIGNAL = 0.54; EXPRESSED IN BRAIN, SIGNAL = 0.59; EXPRESSED IN LUNG, SIGNAL = 0.57; EXPRESSED IN ADULT LIVER, SIGNAL = 0.52; SWISSPROT HIT: O68940, EVALUE 5.30e+00; EST_HUMAN HIT: BG386754.1, EVALUE 7.80e-01; NT HIT: AF320594.1, EVALUE 5.30e-01
gggagagcaaacaacagctctggagggtgcacaatggggattcccgtctgccaccacccagctgggttgctccaggcaagggactcagcatctctgagcctcagtttcccctggggctcaagaacctacctggtaaagttctgaggattaggtataaaaacaccctgagtctttgtgacgagcccatcatggtgtctgggctgtttgcatgatagatgatgtttttgaaaaatacaaggttctcgtatgtgatcattcttccaacagatattaagtttttgcgctacaagatccagagaattaaatgaatcaagttcctgccctcaagaggcttatagccttatatagaacaaacatgtatagaggtttggggatagagaggattgcacccacaaggctagcaatggaaggtttttttctttatttctgccatgattaccgaaagctctcatgaatgacaccatgctgatgttctctttgtagccagccccctgcctctgtgccccctccttgttaaacagagccactagttctagccattcctggaggagcctatg

SEQ ID NO: 802 - DNA, 554 bp, Homo sapiens
  MAP TO CHR22_9.0; EXPRESSED IN HELA, SIGNAL = 1.2; EXPRESSED IN BRAIN, SIGNAL = 2.1; EXPRESSED IN HEART, SIGNAL = 2.4; EXPRESSED IN FETAL LIVER, SIGNAL = 1.9; EXPRESSED IN ADULT LIVER, SIGNAL =   2; EXPRESSED IN BONE MARROW, SIGNAL = 1.9; SWISSPROT HIT: O43281, EVALUE 3.10e+00; EST_HUMAN HIT: BF935596.1, EVALUE 7.80e-01; NT HIT: AF235499.1, EVALUE 1.30e-01
agggtggtgaggttgatgacctccatcttcctgaagtgattcattgtccaatttcttgtaaatggacaaacaaaaagcttccacttttaagagcctctcatttcccactccaatcttgtcgtttgtttaatcagcctcctggaaatcataaacagcatagagccagctcagaaaacacaagaagaaaagcccaaccatgttccccagctacacagggttgatggcaaagcacatgtcccatgcctgcatggggaatgaaagggttccgtctgagaagcctattcttaaatgaggatttcaaggtatatggacttgttcttccaatgtctgatgcctgactctccctctgcccctcccccatgatgaaaattgttctagttttaaaaataaggaaactagaatgcggaaaaggccagggctccagactactccagaccactcagcaagtcagttcccaaacgagaaatgaaatcagatctctttgcttctctgagtcccaactctaaaagagatttggattaggtgaccctaaggctctctccagctttccgatg

SEQ ID NO: 803 - DNA, 511 bp, Homo sapiens
  MAP TO AL136231.3; EXPRESSED IN ADULT LIVER, SIGNAL = 1.2; EXPRESSED IN FETAL LIVER, SIGNAL = 0.61; EXPRESSED IN BONE MARROW, SIGNAL = 0.57; EXPRESSED IN BRAIN, SIGNAL = 0.59; EXPRESSED IN PLACENTA, SIGNAL = 0.81; EXPRESSED IN LUNG, SIGNAL = 0.84; NT HIT: AF074905.1, EVALUE 0.00e+00; SWISSPROT HIT: P43005, EVALUE 4.00e-15; EST_HUMAN HIT: AA278256.1, EVALUE 6.00e-54
ctaaatcctgatgcggaagcctgtttcttcccttccctcttggaaccaagacttggcaaacagtactggctatgtaatttgtgggttcctgggcaaaatgaaagtgcacaataattcaaaagttattaaaaatttcaatacagtaacagcagaatattaaaccacatacaaggccttgtgctgctatccgcatgcccttgaagccaccttgtggcaaaacactcacctgatgagatctaacatggcatccaccgtactgacttcaggggtgctgcctgtcctcgcaatttcacccactttctgggtgacaccaggcttgatgctcaccaccagcacaatacctgtggccaagaacagcgtccacagagcattaggaaccttccagggcacctggcacagctggcacctttagaacaatgggcatggttgtaccaggcaatagtgtgatggggaggaccctgaggtccagccaaaatgctgagcctcctctggaacctcagcagccacctta

SEQ ID NO: 804 - DNA, 590 bp, Homo sapiens
  MAP TO CHR21_64.0; EXPRESSED IN HELA, SIGNAL = 3.4; EXPRESSED IN BRAIN, SIGNAL = 1.4; EXPRESSED IN FETAL LIVER, SIGNAL = 1.8; EXPRESSED IN LUNG, SIGNAL = 0.97; EXPRESSED IN HEART, SIGNAL = 1.1; EXPRESSED IN BONE MARROW, SIGNAL = 1.8; EXPRESSED IN ADULT LIVER, SIGNAL = 1.2; NT HIT: M55166.1, EVALUE 5.60e-01; SWISSPROT HIT: O95838, EVALUE 3.30e+00; EST_HUMAN HIT: BE268685.1, EVALUE 2.00e-63
tcatgatctccagcaagcacccgagccatcttggctctaccatgggaggtggaggaacgctggaacgcacacagattctccaagagaggtgggccatggtgcctaacggggttcagatgcacccacagcacccagatgagtttacctgagcttcctttacagtcgtgggcttggtaatcagaaccactgatggagaggcagaaccagccaaatgcttcaagatgtccttgagaacgtcagacatcgcacttgtctcagccacctggtcctggtgaaagaggagaaagttgacaaatcgcctttgcaagcccactccctgctcccaatctcacgtcttcaggtgactaaaaccatgcaaagtaggaaggaaggaaattaccttcagattttagctctgtctttgcaaaaactgtggaaagaaaggacgccctgcccttggaagcagccttcggactcagcccaagttacgagtgcagcaccctcaccgtgggagagagggcctgatcgtcagacatggtggagcgtcaagcaggtacctacggtgtcattagccttggctgcatatgagtgctaaaatcatccccagccaa

SEQ ID NO: 805 - DNA, 561 bp, Homo sapiens
  MAP TO AL137843.1; EXPRESSED IN BONE MARROW, SIGNAL =   3; EXPRESSED IN PLACENTA, SIGNAL = 3.8; EXPRESSED IN LUNG, SIGNAL = 3.7; EXPRESSED IN ADULT LIVER, SIGNAL = 5.9; EXPRESSED IN HELA, SIGNAL = 1.4; EXPRESSED IN BRAIN, SIGNAL = 3.5; EXPRESSED IN FETAL LIVER, SIGNAL = 3.3; EXPRESSED IN HEART, SIGNAL = 3.2; NT HIT: X99944.1, EVALUE 3.40e-02; SWISSPROT HIT: P30954, EVALUE 2.40e+00
ttaaaaagggcataccccagccactggagtgacaatcccaacaatgtagattaaacacacaggctcaggcttttaagtcagcacctccagtttgcttgaaatggaactctgcaagcagaaaagatgcacagcatgtgtataggatatgaaactgtcctactgagattttatggctcagtgacattacttatcttacattataagattagaaaagatcttataggctgcaaaacaagagtcttctattttcctctttatgaaattatgaattgctactttttaaagtgtctccactacttatagctaatattattctcattttttttcagcctgggtaagatagacatgatacatctatcaataaagaaactcaaagaagatatggaagcaatggatattagtcctttataccaagagttgcaatctttccttttaatcaggaagactccgacttcatagatcagacccaattcttcagcttttctcatccacactgtgttggaatctgtattgtatcttatccaggtaagttcatgtcacactggccttcaggcattagtg

SEQ ID NO: 806 - DNA, 503 bp, Homo sapiens
  MAP TO CHR21_66.0; EXPRESSED IN LUNG, SIGNAL = 0.92; EXPRESSED IN FETAL LIVER, SIGNAL = 1.5; EXPRESSED IN ADULT LIVER, SIGNAL = 0.89; EXPRESSED IN BONE MARROW, SIGNAL = 1.9; EXPRESSED IN BRAIN, SIGNAL = 1.5; EXPRESSED IN HELA, SIGNAL = 3.8; EXPRESSED IN HEART, SIGNAL = 1.2; SWISSPROT HIT: P29148, EVALUE 9.20e-01; NT HIT: AF217490.1, EVALUE 4.80e-01; EST_HUMAN HIT: AL040111.1, EVALUE 1.80e-01
gaagactcagcccagtgaccctaagaaagtgtttgcatggtgactgcaaacgttctcactggctcaccaatcccatagtttatgcacctaccaaatgtagccagggccaccgagaactgtctggtcctgataaatttcagcagctggaaattctgcatcgtccgggccagcgtggacttcacaagggatccacaggatctggcaggagctgcccgtggtgctgaccccgagaatgctttcaaggcaggtgaaattggcccccaccctactttctggtgtcccttccttcccagtagtttccaatcacttccctaggtacagggacaccacgggggaccactcttgccagagcgagtggccagttagtgcagacccttgagactggatcactgttcacagaagaaagtccagacaggaatgatcagctgcactggccaggtggaaaatgagtcccttcctccctgagggtgtttggatgttaaagccatttgcattttcctctc

SEQ ID NO: 807 - DNA, 515 bp, Homo sapiens
  MAP TO AL138752.2; EXPRESSED IN HEART, SIGNAL = 2.1; EXPRESSED IN LUNG, SIGNAL = 2.5; EXPRESSED IN ADULT LIVER, SIGNAL =   2; EXPRESSED IN BONE MARROW, SIGNAL = 2.4; EXPRESSED IN HELA, SIGNAL = 1.5; EXPRESSED IN PLACENTA, SIGNAL = 2.3; EXPRESSED IN FETAL LIVER, SIGNAL = 2.3; EXPRESSED IN BRAIN, SIGNAL = 2.3; SWISSPROT HIT: P41157, EVALUE 4.80e+00; EST_HUMAN HIT: AW899432.1, EVALUE 1.00e-119; NT HIT: AL163279.2, EVALUE 8.00e-03
tccatctttaaaacaggggtgtcttgagacattccatcattcaaggcctatggccaggcaattcacgcactcaccgagcaccatgccgtactgcctgtggccaggatctctccctcctggcactcgccttccgcatcgatctgcagaagctggaagccttcaggaagtccatcttcacctgtctcctctaggatgccttcttgcccctgcagcacaggtgactctactttctgagtactcccttccaatttccagtccatggacttagtcctctgtcctttccaccagactggaaaaaggcacaattatgtgagctattacattatttcactaacataggtatctccctacatccaaatgacaaagtgttattgtgttactgaaagaagtgtgtaaaatactgaaccagatttactggactgagaaaagcatgtgtcttccagatacatgattcagcagagaaacagttcagtagtaaggaagttttgtttgtttgagacggttttgctctcgtt

SEQ ID NO: 808 - DNA, 507 bp, Homo sapiens
  MAP TO CHR22_215.0; EXPRESSED IN BRAIN, SIGNAL = 1.5; EXPRESSED IN HEART, SIGNAL = 1.2; EXPRESSED IN HELA, SIGNAL =   3; EXPRESSED IN LUNG, SIGNAL = 1.2; EXPRESSED IN FETAL LIVER, SIGNAL = 1.1; EXPRESSED IN ADULT LIVER, SIGNAL = 1.2; EXPRESSED IN BONE MARROW, SIGNAL = 1.3; NT HIT: M31013.1, EVALUE 1.00e-118; SWISSPROT HIT: P35579, EVALUE 8.00e-34; EST_HUMAN HIT: BG325739.1, EVALUE 1.00e-118
gaaggaatatgggaggggaggcgtggtcaaggggccctaacacaatccaggtggaaggagagaacagaagcctgcgtgaagccaaggcagccttgggcacccatggggtagcaggaggccatgcacacctgtctgaccagctgcttcttcttctcctcgctctgctcgtcccggccctgcaggtcccgctcgaactgggccttcatggcctgcaggttgacctccaaccgcagcttggcatcttcggtggcctgcagctcgtcctccagctcttccagctgcgtcttcatctcctccacctgctgctctagggcccgcttggacttctccagctcgtggacctgagccccagagagcccaagtcaggagcaaagggactggcaggtacctgggtctgcgcgacccggagtctgtgcacacaccgaccctctgtgatgaccccactcgggcccttcccaagacctggctgccaggcccaggactcacactcttgcccacatcatcctt

SEQ ID NO: 809 - DNA, 593 bp, Homo sapiens
  MAP TO AL135926.3; EXPRESSED IN FETAL LIVER, SIGNAL = 0.69; EXPRESSED IN PLACENTA, SIGNAL = 0.66; EXPRESSED IN BONE MARROW, SIGNAL = 0.53; EXPRESSED IN LUNG, SIGNAL = 0.6; EXPRESSED IN ADULT LIVER, SIGNAL = 0.73; EXPRESSED IN BRAIN, SIGNAL = 0.54; SWISSPROT HIT: Q03584, EVALUE 2.60e+00; EST_HUMAN HIT: AW665350.1, EVALUE 3.00e-03
tgggcatatttctgggagtctgggaggctttataatacagtggtagatgtccagggttctagtgacagactgccaagatttaaatattggctccaccaatttctagctgtgagctctggggaagcccctaacttttctgtacctccattttctcatccataaaatggtcacaatagtactgtagggttgaagagatggttaaactgagacatctatttaaagcattaacaatgcctagagccttgtagtaagtgcttagtatgtggtagacgtggaactgccacacactcccacctatttgcggcaggaagggagcacttgccagatctttttgagccctttggggaaaatttcactagaacagacaaatgtacaatttttccctcgctaatttaatgataatttgtccctattttgtagctgcttctttagccatgtgatggggcaggggcttgggttcatggaggagaagcaagggcaggaagaggtggaggaggaagaagaaaagcaggagctgagaaatccagtggcttcagagctgcaaaccggttgacacccacatacctccttcctctttttcagcaaggtttgcc

SEQ ID NO: 810 - DNA, 559 bp, Homo sapiens
  MAP TO CHR22_73.0; EXPRESSED IN HELA, SIGNAL = 3.2; EXPRESSED IN BRAIN, SIGNAL =   1; EXPRESSED IN LUNG, SIGNAL = 0.81; EXPRESSED IN FETAL LIVER, SIGNAL = 0.77; EXPRESSED IN BONE MARROW, SIGNAL = 0.78; EXPRESSED IN ADULT LIVER, SIGNAL = 0.8; NT HIT: gi14779046, EVALUE 2.00e-74; SWISSPROT HIT: O75791, EVALUE 9.00e-15; EST_HUMAN HIT: BI518664.1, EVALUE 4.00e-55
ccagacgatcagagaggaggatgcatctgcagcatctctgttctttctcccagggtcaccggggcaacagcctggaccggaggtcccagggaggcccacacctcagtggggctgtgggagaagaaatccgaccttcgatgaaccggaagctgtcggatcaccccccgacccttcccctgcagcagcaccagcaccagccacagcctccgcaatatgccccagcgccccagcagctgcagcagcccccacagcagcgatatctgcagcaccaccatttccaccaggtatctggaaagaaggcagtgggcacagtacggtggaaaggagaacctgcctcccctccaggcctggcccagcctcttgagttctcagagagttcatgatgaagaccctggacccccccaaatggcagaaatagggaaactgttcttggcaaagacatctctatgaattaaatggctcccacctgaacacacacacacacacacacactgtctcacacacacacacacacttaaactcacacacacacacacttcccctgaggacccagtaaaca

SEQ ID NO: 811 - DNA, 539 bp, Homo sapiens
  MAP TO AL137067.3; EXPRESSED IN BRAIN, SIGNAL = 1.3; EXPRESSED IN PLACENTA, SIGNAL =  16; EXPRESSED IN LUNG, SIGNAL = 6.9; EXPRESSED IN ADULT LIVER, SIGNAL = 6.8; EXPRESSED IN FETAL LIVER, SIGNAL = 4.1; EXPRESSED IN BONE MARROW, SIGNAL = 1.6; NT HIT: M26324.1, EVALUE 0.00e+00; SWISSPROT HIT: P05787, EVALUE 9.00e-80; EST_HUMAN HIT: BE615913.1, EVALUE 0.00e+00
agaactggagtccctcctggaagggctgactgacgagatcaacttcctcaggcagctgtatgaagaggagatccgggagctgcagtcccagatctccgacatgtctatggtgctgtccatggactacagctgctctcgggacatggacagcatcatccctgaggtcaaggtgcagtatgaggagattgccaactgcagccgggctgaggctgagagcatgtaccagatcaagtatgaggagctgcagacgctggctgggaagtacggggatgacctaagccgcacaaagactgagatctccgagatgaaccggaacatcagctggctccaggctgagaccgagggcctcaaaggccagagggcttccctggaggccgccatcacagatgccgagcagcgtggggagctggctgttaaggatgccaacgccaagctgtccgagctggaggccgccctgcagcgggccaagcaggacatgatggggcagctgcgtgagtaccaggagctgatgaacgtcgggcttaccctggacatcgaga

SEQ ID NO: 812 - DNA, 574 bp, Homo sapiens
  MAP TO CHR22_43.0; EXPRESSED IN BONE MARROW, SIGNAL = 1.2; EXPRESSED IN PLACENTA, SIGNAL = 1.6; EXPRESSED IN HEART, SIGNAL = 1.4; EXPRESSED IN LUNG, SIGNAL = 1.6; EXPRESSED IN HELA, SIGNAL = 1.8; EXPRESSED IN BRAIN, SIGNAL = 1.4; EXPRESSED IN ADULT LIVER, SIGNAL = 1.9; EXPRESSED IN FETAL LIVER, SIGNAL = 1.6; NT HIT: gi16163549, EVALUE 0.00e+00; SWISSPROT HIT: O75461, EVALUE 1.00e-100; EST_HUMAN HIT: BI458757.1, EVALUE 0.00e+00
tcttcttcctcagggccttctggatgagtgctctcagatgaagaggtcctgacaccttcagaccttttgttactggtctgaccctgctccacttctcacaaatagacatcgataggtccgttggtgctccttatgtgcactgtgatagagtcttctctgggagctggaacatccaatctggtttctgctggagctttaactgcaatgacgatctgttcatggaaggcctgaatgctatgaatgtcttgataggtcacatatgctagtctttcattttctttgtcatctgttaactcaaacagctgctgagcacaatccttaattaactcatccaaagcatcttccattgctggtaagtcagcaagttcctcctgtagcttcttttgttggggaactgctccaaaattgctaagatcagatcctatccatctaatatggttcttggatttcttttcaacgaggtcgattccatctaagacatcggtgatgtcatacactctccgctttcggactcccagtttcgttgcaaccttgtttaagtcaagaatacccccgggagcagatttctcatgga

SEQ ID NO: 813 - DNA, 523 bp, Homo sapiens
  MAP TO CHR22_140.0; EXPRESSED IN LUNG, SIGNAL = 0.61; EXPRESSED IN ADULT LIVER, SIGNAL = 0.6; EXPRESSED IN FETAL LIVER, SIGNAL = 0.61; EXPRESSED IN PLACENTA, SIGNAL = 0.54; EXPRESSED IN BONE MARROW, SIGNAL = 0.62; EXPRESSED IN HELA, SIGNAL = 1.9; EXPRESSED IN BRAIN, SIGNAL = 0.66; NT HIT: AL163284.2, EVALUE 7.80e+00; EST_HUMAN HIT: BE410354.1, EVALUE 0.00e+00; SWISSPROT HIT: Q62137, EVALUE 5.60e-01
aaactgccaacccttccttctctccctctcctcaccctccacccacaggacagggccgggcacacggaggagggacactgaggacctgggtggtggagaccctggctttcctctcttctcacccatggtgggctctgcttatcctcatcttttcttccccagttagggtttcctgggaggctgtgagttgtctggggacctcatcaacatttgcacaaatgccccagactctgctcacctctttcaaaggggctcctccctctgagcctgcaatgtctgtgtgattgggaggtgtcacctccaggccctgaaaccacagcacccgcagggtctctggccccagtctgaggtttctctacaagctttggagatgaatgaagcctctgttttaacaggaatagatcggtttatcaaagcatgtaaaggccagatgttcgtttctatgttagggatcctgaagagttgtttcagagtggatgaatgactgtcacatcctcagtggccctgccactctgacagatga

SEQ ID NO: 814 - DNA, 588 bp, Homo sapiens
  MAP TO AL133476.4; EXPRESSED IN FETAL LIVER, SIGNAL = 3.2; EXPRESSED IN BONE MARROW, SIGNAL = 3.9; EXPRESSED IN PLACENTA, SIGNAL = 5.1; EXPRESSED IN LUNG, SIGNAL = 4.7; EXPRESSED IN BRAIN, SIGNAL = 3.4; SWISSPROT HIT: P03975, EVALUE 8.30e-01; NT HIT: gi15298905, EVALUE 0.00e+00; EST_HUMAN HIT: AL549534.1, EVALUE 0.00e+00
tcccagctctacagcctctcaggctgcagccgtacacagcagcctgccccactggctgcccctgctgctcaagtctcagtcccagctccctcaggggaaccgcaggcatccactccccgagccactggcagaggtgccaggaaagctgggtctgagccagagacctctcggccatcgcccctgggcagctactcccccatccggagtgttggcccctttgggcccagcactgactcttctgcctccacttcgtgctcccctcccccagagcagcccacagccacagaaagcctgcccccatggagccactcctgtccttctgctgtccggcctgccacctcccagcagccgcagaaggaggatcagaagatactgaccttgactgagtaccggctccatggaacaggaagcttgccgcctctgggctcctggcgatctggcctcagccgagcagagagcctggcccggggaggtggtgagggcagcatggccaccaggcccagtaatggtacgagctccagcatctccctacccaacccgccacctcacgcaagcacttccaccacctcccctttgagtggttgctta

SEQ ID NO: 815 - DNA, 590 bp, Homo sapiens
  MAP TO CHR21_66.0; EXPRESSED IN FETAL LIVER, SIGNAL = 1.3; EXPRESSED IN LUNG, SIGNAL = 0.89; EXPRESSED IN PLACENTA, SIGNAL = 0.83; EXPRESSED IN ADULT LIVER, SIGNAL =   1; EXPRESSED IN BONE MARROW, SIGNAL = 1.4; EXPRESSED IN HELA, SIGNAL = 2.9; EXPRESSED IN BRAIN, SIGNAL = 1.3; SWISSPROT HIT: P57075, EVALUE 9.00e-37; EST_HUMAN HIT: AW962803.1, EVALUE 1.00e-79; NT HIT: gi9507220, EVALUE 1.00e-115
tcctattgctgccattttccaatgtaaatctttgctcgagacgtgaaacccctttgcctcttttctagaccctgagagccctattccagtacaaaccccagaacgtggatgagctgacgctaagtcctggtgactacatctttgtggaccccacgcagcaggacgaagccagcgagggctgggtgattgggatctcacagcggacgggctgccggggcttcctgccggaaaactacacggatcgagccagtgagtctgacacgtgggtgaagcacaggtgagtgctgcctctggctgcagccccgtcatctctctctgagttactgtgtgagagtgcccacctgccaacagtgtgcttctagaccattccattattggtaaaattgcattctgtatgctgacaaaattattcctgcaggtatatagtaaacatcttggttcgtccctggttttctgatgataacattcaaaaaagaatgaattactctgcattagagtaatttgagatggtaatccccaaattactgcaaaatactacttctttatcacacacataataaattatactcagaggtcctgagcttgggttt

SEQ ID NO: 816 - DNA, 596 bp, Homo sapiens
  MAP TO AC009802.13; EXPRESSED IN BRAIN, SIGNAL = 0.52; EXPRESSED IN FETAL LIVER, SIGNAL = 0.7; EXPRESSED IN PLACENTA, SIGNAL = 0.85; EXPRESSED IN BONE MARROW, SIGNAL = 0.61; NT HIT: gi11425220, EVALUE 9.00e-77; SWISSPROT HIT: P50452, EVALUE 6.00e-23; EST_HUMAN HIT: BG227962.1, EVALUE 1.00e-76
gctcattgcctggagcttaccacggcgaggtccgtgttgtcatcgggaagcagaatgaccatgctcagctcctcttccacatagggcagctccaggacctgggtgtgtacctcatccgcataccccattttaaacttagcttccttaaacatcatctgcactgtctttttttcctaacggaaaaattaaagttcgattactgaaaagtgggtataatttactaaaaataggatatatctaactcacagaaactctaggtgtgtataattactgtttctgcacatttatgctgatagatataaaatcttcattagtacatcttagtattgaatagaacaagctattgttccagcagatcaaatattaccaggtgagaaaaaaaaaacagtttggtaaatggagaaggacacaaaaattgacattatccttggaagaagctgtgtttgcttttttgagaacattcacagagaagctttctcatggaagcttccaactaaaaattctttatcgaagttaagataaatattcaggcccttgggctgaaggatctggttagaaaagatgtacggtccaaactctggaaagttgccttgttg

SEQ ID NO: 817 - DNA, 554 bp, Homo sapiens
  MAP TO AL138967.2; EXPRESSED IN PLACENTA, SIGNAL = 1.4; EXPRESSED IN ADULT LIVER, SIGNAL = 1.1; EXPRESSED IN BONE MARROW, SIGNAL = 0.9; EXPRESSED IN LUNG, SIGNAL = 0.99; EXPRESSED IN BRAIN, SIGNAL = 0.79; EXPRESSED IN HELA, SIGNAL = 0.62; EXPRESSED IN FETAL LIVER, SIGNAL = 0.98; NT HIT: AL163303.2, EVALUE 1.00e-14; EST_HUMAN HIT: R91187.1, EVALUE 6.00e-17
cttggaggtttgtggattggggtcagaccttaatcactatgtgtcaagcatgctccaaacattacttcatttaatcctcccaggcaccctatgagatagatgccattatcagcggcattttatacatgaagaaactgaggcaagaaagacttggggtctggcccaagatcccagaggtaagaactaggaggtggaagagctgggacacaaatcttctttctgttggtgactctctgcagtcctgaagtggcatagtgcatccatcacatggtgaggggaataggcatgctaaatcaggtctcgtttcctcttcttataaagccaccagtcccactcccatgataacccaataatccattagcccatgaatggattaatctatttcataagagctctgcctactgtgacccaatcattttttaaaggtttcatgtctcaatactgccacattggggttaaatttcaacatgagttttgaaggggacaaatattcaagccatagcacttatattcatagcagcattattcacattggccaagaggcagaaacaatc

SEQ ID NO: 818 - DNA, 591 bp, Homo sapiens
  MAP TO AC020582.3; EXPRESSED IN BONE MARROW, SIGNAL = 7.2; EXPRESSED IN BRAIN, SIGNAL = 5.7; EXPRESSED IN LUNG, SIGNAL = 8.3; EXPRESSED IN HELA, SIGNAL = 4.7; EXPRESSED IN FETAL LIVER, SIGNAL = 6.7; EXPRESSED IN HEART, SIGNAL =   6; EXPRESSED IN PLACENTA, SIGNAL = 8.9; EXPRESSED IN ADULT LIVER, SIGNAL =   9; SWISSPROT HIT: Q02817, EVALUE 2.60e+00; NT HIT: AL163249.2, EVALUE 0.00e+00; EST_HUMAN HIT: BE243895.1, EVALUE 0.00e+00
tagggtcttcttccacgctgtggaagctttgttctttcactctttgcaataaatcttgctactgctcactctttgggtccacactgtttttatgagctgtaacactcaccacgaagatctgcagcttcactcctgagcccagcgagaccatgagcccaccgggaggaacgaacaactccagacgctctgccttaagagctgtaacactcactgcgaaggtctgcagcttcactcctgagccagtgagaccatggacccaccagaaagaagaaactccgaacacatctgaacatcagaaggaacaaactccagatgtgccaccttaagagctgtaacactcaccgtgagggtccgcagcttcattcttgaagtcagtgagaccaagaacccaccaattccggacacagttacgactaaaatcagactttgggatcctgatccagcatagacagcccttcagcctgcagtgctttccactgcatttattaattcattaatccatccatcaaatattactacagtgcagtggttgagatcacagaccctagagttagactgtttaccttagaatcttgcccccaccacttacta

SEQ ID NO: 819 - DNA, 571 bp, Homo sapiens
  MAP TO CHR21_67.0; EXPRESSED IN PLACENTA, SIGNAL = 0.9; EXPRESSED IN FETAL LIVER, SIGNAL = 1.7; EXPRESSED IN ADULT LIVER, SIGNAL = 1.1; EXPRESSED IN BONE MARROW, SIGNAL = 1.7; EXPRESSED IN BRAIN, SIGNAL = 1.5; EXPRESSED IN HELA, SIGNAL = 3.1; EXPRESSED IN LUNG, SIGNAL =   1; SWISSPROT HIT: O76083, EVALUE 4.00e-25; NT HIT: AB017602.1, EVALUE 0.00e+00; EST_HUMAN HIT: BF858512.1, EVALUE 4.00e-83
aggtgtctgtctggtgggactgcaggagcatggggacgtgcagttgcaggggcagctgagcggcaggagggacctcctggccaggccagggcacaggcagctcccccagcccccacggcaccttctcctgactctacttgctccacttacatggctgggtgttgctcccccgtgcaggtacctggtgagggcgcctgagtctcccctcactctctccttgcctcccaggtaccagatcaatgcccgcacagagctggcggtccgctacaatgacatctcaccgctggagaaccaccactgcgccgtggccttccagatcctcgccgagcctgagtgcaacatcttctccaacatcccacctgatgggttcaagcagatccgacaggtgtgtggggtgagggccctcccaccggagtgggggcacattcagggacagagcagcccccactctccattggctggaagctcccagaagctcctggccacagcagtgccctggggacccaagggaacccctccctccttcctcacctcctccagggcccagagtggagccccaaaaagagggtac

SEQ ID NO: 820 - DNA, 503 bp, Homo sapiens
  MAP TO AC013371.4; EXPRESSED IN BONE MARROW, SIGNAL =   6; EXPRESSED IN BRAIN, SIGNAL = 2.5; EXPRESSED IN LUNG, SIGNAL = 7.6; EXPRESSED IN HELA, SIGNAL = 1.6; EXPRESSED IN PLACENTA, SIGNAL = 4.1; EXPRESSED IN ADULT LIVER, SIGNAL = 8.3; SWISSPROT HIT: P52859, EVALUE 3.00e-38; NT HIT: gi15431287, EVALUE 2.00e-71; EST_HUMAN HIT: BF972369.1, EVALUE 5.00e-76
atgatgccacctaaacctggagtttttactgtgggaaggtttttaactaaaaattcatttactttaattgatataagggtatttgggttatctatcttttttgaatgagctttagtaatttttcttttttggctggtggcggtagaatttattcgaatgtgtcttaatacaggcactgggggcttgcccatggtgcgcttgatatataaagcctagacattctgccaatttttcttgagtaatgacaccaggaagttgacagtcaggtgaatgttatacacaagtttattgtctgtaacatttacatggccaacagtcacagccagacacagcaccttcgtcatctggaacttgattgtggacttcacctcatccacttcattttcattgtgtatcagcagggaagggaacgtgccagccttatgtaggcctgggcgaggacttacgggatctgcttgatcagagactctgatgccaaaagagcatcctacttcttggccagc

SEQ ID NO: 821 - DNA, 588 bp, Homo sapiens
  MAP TO CHR21_67.0; EXPRESSED IN FETAL LIVER, SIGNAL = 1.8; EXPRESSED IN BONE MARROW, SIGNAL = 2.2; EXPRESSED IN HEART, SIGNAL = 1.5; EXPRESSED IN BRAIN, SIGNAL = 1.8; EXPRESSED IN LUNG, SIGNAL =   1; EXPRESSED IN HELA, SIGNAL = 4.7; EXPRESSED IN PLACENTA, SIGNAL =   1; EXPRESSED IN ADULT LIVER, SIGNAL = 1.1; SWISSPROT HIT: Q03164, EVALUE 3.30e+00; NT HIT: X59864.1, EVALUE 5.60e-01; EST_HUMAN HIT: AA807117.1, EVALUE 2.10e-01
cactcacctagccctgcttccagctaagagaaaggaagccagaaacatgcaaagatgccaagcaagcaccctgggcacggttttccagacctcgcagggaacagagtaaaagctaggaacgctgggcttcacgaaggagcagagggggcaggtgcggagggaggaggccggcagagagcaggtccctcctggagcagcgcgatcgggcgccgaggcctcatgcaacatccgacaactactcatggcaaggagaattctggactgactttctattgttttgattaaaagtaattttatccaaaaatccaaaatgtactggacgtgccaatcagaatggaacagaaggaaatgccgcactacctggctgcctctcccctcggctgctggtggctgcccatagacccctgtaaacagctgatgcatgtcccacctgcaccatagggcctggaggaagcggctgtagcaggactcgcagagttccccgtgcgtggccaccggccctgcctccatcgctgttgtctccccgcaggccaaggcgaggcaggtggggcgcactgcatggctctcaggggaaggatccactcagat

SEQ ID NO: 822 - DNA, 582 bp, Homo sapiens
  MAP TO AL138839.1; EXPRESSED IN PLACENTA, SIGNAL = 1.1; EXPRESSED IN ADULT LIVER, SIGNAL =   1; EXPRESSED IN FETAL LIVER, SIGNAL = 0.92; EXPRESSED IN BONE MARROW, SIGNAL = 0.87; EXPRESSED IN BRAIN, SIGNAL = 1.1; EXPRESSED IN HELA, SIGNAL = 0.96; EST_HUMAN HIT: AL553170.1, EVALUE 2.10e-01; NT HIT: gi14743393, EVALUE 1.40e-01; SWISSPROT HIT: Q06565, EVALUE 4.90e-01
cattgctccatttaggagctgttttggagtatgttcctactgattatttatggaaaggcaggagcctttccataaaaggagtagagagactatggagctggctctaaaccccacccaacagggagctaagcaagctccttgtgctgaaaagttctccagttgctcaaaatttatagaaacccttggtcacaaccagttgaatggtcagctctgcacagggaagatgaaacctgtggagtatcccacaagtgagtgggcatagtgactggagatcgaagatagataatattccataactgaagcaaacaaacataatttaagttatcaataggcaacagatgacaaaataaatcccaggaaggttaagtgacattcctgaggttatacctttcctaactttactaacattaactagcagagttagacatgaatacagagtaaagccgtcttaagaaggtaagattgcaaagcagctcacaagaactagagctctgaacctttgggatctctttttcatatgcctttgtcacttatcataccctatctaagattacagttgcttgtgcgcttctttgtctcctt

SEQ ID NO: 823 - DNA, 559 bp, Homo sapiens
  MAP TO AL136105.2; EXPRESSED IN BONE MARROW, SIGNAL = 1.5; EXPRESSED IN HELA, SIGNAL = 3.8; EXPRESSED IN BRAIN, SIGNAL = 1.7; EXPRESSED IN LUNG, SIGNAL = 0.49; EXPRESSED IN HEART, SIGNAL = 1.8; EXPRESSED IN FETAL LIVER, SIGNAL = 1.5; SWISSPROT HIT: P03304, EVALUE 6.90e+00; EST_HUMAN HIT: BG682198.1, EVALUE 0.00e+00; NT HIT: AB070618.1, EVALUE 2.10e+00
agctcaagagcctcaccttggtcagctgaggaacatcctccatgaagcttcggggacctgcctcaggggaagattcaggggtcactgggctgttacacaaaatagaagagcatggctcagttcaggatgtccgggggagctaccctcttgtacatttgcaaaagcgctgataagctcaatcgtttcatttcaagtggcactgtgcattgctttgatctcttcaacggtggagctgatttctaggaggcatccccagctaaacacagccactagacccatgcctcacagcccccgcagccacaggaagaaagaaaacaggctctccctcaccttggttcttctggtctaggtggtgagcaccctgaggggcagcagccaccggcccaggggtgccagcaggcccagagtgtggcccagcatctcagccacgatcctctgtaaacacaggggaaggaagcaagacttgccctcatccatttacaaccaagtccacagggttcagaaggtagagatcagagaagaaatggaggtgaatgttgctactgccttgggctcatgt

SEQ ID NO: 824 - DNA, 524 bp, Homo sapiens
  MAP TO CHR21_56.0; EXPRESSED IN HELA, SIGNAL = 3.8; EXPRESSED IN BRAIN, SIGNAL = 1.7; EXPRESSED IN LUNG, SIGNAL = 1.5; EXPRESSED IN FETAL LIVER, SIGNAL = 1.8; EXPRESSED IN HEART, SIGNAL = 1.7; EXPRESSED IN BONE MARROW, SIGNAL = 1.6; EXPRESSED IN PLACENTA, SIGNAL = 1.8; EXPRESSED IN ADULT LIVER, SIGNAL = 1.8; NT HIT: D85922.1, EVALUE 0.00e+00; SWISSPROT HIT: P48971, EVALUE 3.70e+00; EST_HUMAN HIT: BG752885.1, EVALUE 4.70e-02
tggaagaactggctcagaggagtgcgataaatcacttcacccctccacgaccccttggtcccaagtaaaagctgatggcctagatgctaatctggaactgcaactcccagaacttctccattaagcagctggctgggttgtcctgttgcgtgaggtggcaccgtcaggatggccactttgcagataatcatgttgtctctcctctgatggagagccacaggctcccagcgacacctgcagcaagacacacctaaaaataacaagggggtggctcgggacaagacacaccatgagcctccttttgttatcttgagttaccctctctccttccggcagggtcaagaaggaattctccagacctacccaagatccttcgccacccaaggacggtttcccacatgctttgagtttcttctcaggctgggcactgggactccccttggtggtggaggaagtcctaccactgcccctgggcctcccctgaacaatgctggggttcaccgactcactgtccttgtctgcca

SEQ ID NO: 825 - DNA, 501 bp, Homo sapiens
  MAP TO CHR21_69.0; EXPRESSED IN BONE MARROW, SIGNAL =   2; EXPRESSED IN HEART, SIGNAL = 1.2; EXPRESSED IN LUNG, SIGNAL = 0.89; EXPRESSED IN PLACENTA, SIGNAL = 0.91; EXPRESSED IN HELA, SIGNAL =   5; EXPRESSED IN BRAIN, SIGNAL = 1.7; EXPRESSED IN ADULT LIVER, SIGNAL = 2.3; EXPRESSED IN FETAL LIVER, SIGNAL =   2; SWISSPROT HIT: P35520, EVALUE 3.00e-13; NT HIT: AF042836.1, EVALUE 0.00e+00; EST_HUMAN HIT: BF205977.1, EVALUE 1.00e-54
ttgagctgcctgtaggtgactgggcacccgtttgagctgcctgtaggtgaccgcgcacccgcttgagctgcctgtagctgaccgcgcacctgtttgagctgcctgtaggtgaccgggtacctgtttgagctgcctgtaggtgaccgctcacctgtttgagctgcctgtaggtgaccgcgcacctgtttgagctgcgtgtaggtgaccgggcacctgtttgagctgcctgtaggtgactgcgcatctgtttgagctgcctgtaggtgactgggtacctgtttgaactgcttgtagatgactttgccaacttggtctgacggctgcaccttcccggcaagcagggacgagagcatgttcccaagcgtcaccattcccaggattaccctgtgggacgggggcaggcaggggtcagcgctcatacctcacccctcccaggacggtggggcacacgctcagctgccccagggaggagcgctctctggccacacatggaagtcctct

SEQ ID NO: 826 - DNA, 514 bp, Homo sapiens
  MAP TO AL050339.4; EXPRESSED IN FETAL LIVER, SIGNAL = 4.4; EXPRESSED IN HEART, SIGNAL = 3.7; EXPRESSED IN PLACENTA, SIGNAL = 5.5; EXPRESSED IN ADULT LIVER, SIGNAL = 5.5; EXPRESSED IN BONE MARROW, SIGNAL = 4.3; EXPRESSED IN LUNG, SIGNAL = 4.6; EXPRESSED IN HELA, SIGNAL = 3.3; EXPRESSED IN BRAIN, SIGNAL = 3.6; SWISSPROT HIT: Q9Y3N9, EVALUE 5.00e-38; NT HIT: Z97407.1, EVALUE 8.00e-03; EST_HUMAN HIT: BF820178.1, EVALUE 4.60e-02
ggtcagtatctggggcaaagacaaaagaattacctttggtgggtgtgcctttcaacttttcattgatgtggcactgtactcagttgaatgcatccttctgtccatgatgtcatatgatcgactcaatgctatctgcaagcctctgcatcatatgaccataatgaacctccaactctgccagggccttgtggtcatctcctgggtagttggtgtgattaattgcatcataccttccccttatgccacgagtcttcctcgatgtaggaaccaccacctagaccacttttttgtgtgtgtgaaatgtctgcaatgatcaagattcaagattgcatgtgtggacaccacagccatggaggtaaccacatttgccatgtgcctgattatagttcttgttcctcttcttcttattcttgtgtcatatggtttcattgctgtggctgtactcaagatcaagtctgcagcaggaagacaaaaagcatttgggacctgttcctcccatctcgttgtggtatcc

SEQ ID NO: 827 - DNA, 515 bp, Homo sapiens
  MAP TO AC015930.3; EXPRESSED IN BRAIN, SIGNAL = 1.3; EXPRESSED IN HELA, SIGNAL = 0.55; EXPRESSED IN PLACENTA, SIGNAL = 0.94; EXPRESSED IN LUNG, SIGNAL = 0.85; EXPRESSED IN ADULT LIVER, SIGNAL = 0.79; EST_HUMAN HIT: AA417144.1, EVALUE 7.00e-04; SWISSPROT HIT: Q63604, EVALUE 7.00e-29; NT HIT: gi14740035, EVALUE 4.00e-94
ctaaaacccatcccaaatgcccatgtcacataccactccatgtagcaaatgttcagtgaatgcggactgaattgagttggatcatttgcatcacattacatagaattcattaaggaaaaagaacaagactgtcaccttcttttttctctcctcctttctctggcatatgctggtgtcattatcaaataagatgcttcgagaaaggtccaggggtcccttgttccctcccatgaaccctccactcctgaaccctgaaggcctgctccctcctggagcccacctccccgcctcactgtacctgaggaacttgttgaggtccccatgcttcatgtactcaaagaccatgatgagggggtcgccctccacgcagacgccatagaacttgacgatgtgctcatgctggaggttggtcaggagctcggcctcacggtggaagtccttgcgtgcattgtcactggcatccttcagggtctggggatgggtgttaaaagagaaggattacttcagtgggccct

SEQ ID NO: 828 - DNA, 518 bp, Homo sapiens
  MAP TO CHR22_32.0; EXPRESSED IN LUNG, SIGNAL = 1.6; EXPRESSED IN BRAIN, SIGNAL = 2.2; EXPRESSED IN PLACENTA, SIGNAL = 2.3; EXPRESSED IN BONE MARROW, SIGNAL = 2.3; EXPRESSED IN ADULT LIVER, SIGNAL =   1; EXPRESSED IN HELA, SIGNAL = 2.7; EXPRESSED IN FETAL LIVER, SIGNAL = 1.9; EXPRESSED IN HEART, SIGNAL = 2.4; SWISSPROT HIT: P42387, EVALUE 6.30e+00
acagaattcaccatctcggggacacacctggggcaggaaggctctccgctggctcctcaggcagtgctcgcccaccgagtgcagctccataaatccacattcacctcacctgcctcagtgtcatgtctaggtctggttccgttcaattccattagttctatttctgcagctggtcttagtccttctgatgccctaaccactcactccccgttccaggctgccttgcagaacccgctgcagcagcttctccaccacccacagcagcttctccaccacccacagcagcttctccaccgcccgcagcagcttctccacccgcagcagcttctccaccgcccgcagcagcttctccacccgcagcagcttatccaccgcccgcagcagcttctccaccacccgcagcagcttctccaccgcccgcagctcctcacgcaggcctccagggcattccgaggcctctgcaggaggtagagagaggcctctctgggcctgggcggtgaagtcaggacagctcagcc

SEQ ID NO: 829 - DNA, 508 bp, Homo sapiens
  MAP TO CHR22_226.0; EXPRESSED IN HELA, SIGNAL =   3; EXPRESSED IN FETAL LIVER, SIGNAL = 1.2; EXPRESSED IN HEART, SIGNAL = 1.4; EXPRESSED IN PLACENTA, SIGNAL = 1.1; EXPRESSED IN LUNG, SIGNAL = 1.1; EXPRESSED IN BONE MARROW, SIGNAL = 1.6; EXPRESSED IN ADULT LIVER, SIGNAL = 1.1; EXPRESSED IN BRAIN, SIGNAL = 1.5; NT HIT: gi14731333, EVALUE 5.00e-07; SWISSPROT HIT: Q08579, EVALUE 5.40e-01; EST_HUMAN HIT: BF920211.1, EVALUE 8.00e-07
acctggtctcatcttgccacggcctcctcatggagcagaggggaagatggggaggtgcagggctgtctcatcttccctggcctcggcaggtgcctgctgtcatctccctggacttcacgatgtacagggtcttggtgaaccctccctgcagccagtgaggtcccagacaagggcctttgggtactggaggctgttcaaattgggataccaccacttttcagctgtgtgactttgggcaggtggctcagcctctctggtctttctgtgtagtggggaaacgacaccgcctgccttgttggggggttgtgaggtctgcttgggcccatccaggtgaaggcctggctcaaaggaaggccctggagagtggctgtggtcatttattattactggggtgctccttggggagcgaggaagaggataactatttagttttattccacaaaccccaaggcagggctaggcctgcaattaccccattttacagaagggcaggtagaggttcaggcag

SEQ ID NO: 830 - DNA, 530 bp, Homo sapiens
  MAP TO AC016709.4; EXPRESSED IN FETAL LIVER, SIGNAL = 0.96; EXPRESSED IN BONE MARROW, SIGNAL = 1.1; EXPRESSED IN HELA, SIGNAL = 0.61; EXPRESSED IN BRAIN, SIGNAL = 1.2; EXPRESSED IN HEART, SIGNAL = 1.2; EXPRESSED IN PLACENTA, SIGNAL = 1.2; EXPRESSED IN LUNG, SIGNAL = 1.1; EXPRESSED IN ADULT LIVER, SIGNAL = 1.2; NT HIT: AL163246.2, EVALUE 6.00e-10; SWISSPROT HIT: P31822, EVALUE 5.00e-02; EST_HUMAN HIT: AI813704.1, EVALUE 3.00e-06
gctgctgcaagattcacaagaatgctatagatgctctgagacagcattcaatatatagtacagtttttttttcattgccataatttaatgttccaggaatcaagggttggaaatgagagtgatacaattcaccgttatccctagtgacctcctagcaaaatgttagcttccttttcctacaacttcatgctctgagctggcctagaggtctttgtgccacagggagaagtgcttgcactaggagacacaacaatgattctattgaactccaggctgtgactgccacctggccacttgtggcttcacatgcctctgagtcagcaggataagggggaagtaatggtgtttgctggagtgattgatctagaatatcaagtgaatcttggattgctacttcataatgaaggcaagaaagattatatctttcttgtaaggaatacaagagatcccttagggtgtctcttaatgttaccatgacctgtaattaagatcagtgggaaattataacatcctcatccagccaggactac

SEQ ID NO: 831 - DNA, 593 bp, Homo sapiens
  MAP TO CHR22_83.0; EXPRESSED IN HELA, SIGNAL = 2.9; EXPRESSED IN BRAIN, SIGNAL = 1.3; EXPRESSED IN FETAL LIVER, SIGNAL = 2.5; EXPRESSED IN BONE MARROW, SIGNAL = 0.98; EXPRESSED IN PLACENTA, SIGNAL = 2.2; EXPRESSED IN LUNG, SIGNAL = 1.3; EXPRESSED IN ADULT LIVER, SIGNAL = 2.7; NT HIT: gi14778734, EVALUE 2.00e-65; SWISSPROT HIT: Q9UJY5, EVALUE 2.00e-18; EST_HUMAN HIT: AW665787.1, EVALUE 8.00e-66
aggtggggaaacagacactgagggctgacccagctaataagtggcaggggtagtaggtgaactcagtctaccccaggctggttgggcggggctatgaggaccctgtaggctagagggcttcccggggagtcctggggaggcagtagggtgtggacagggcttgagactgaagtgagtggggctgggcagtatcaaaggcctccccactgtgtccctgaagtatctgggctctcggacatcggagaaggtgaagaacaagatcttggagctcctctacagctggacagtgggcctgcccgaggaggtgaaaatcgcagaggcctaccagatgctaaagaagcagggtgaggcacacagagggtggggggcgaccagggcctgccttcccctcccccaccatgagctggggctccagcggcttcaggggcttctgagccagcaaggtcatgggtctgtcctttaacttctggagaaagtacatacagctagtgcggccttctgtgctctgcctgaggctagcttgggtggaaagaaggtgagttcgaatcaagcttcccctcaaagagtggtctccagggagtggcctcaaaata

SEQ ID NO: 832 - DNA, 572 bp, Homo sapiens
  MAP TO AC021311.4; EXPRESSED IN BRAIN, SIGNAL = 0.38; EXPRESSED IN PLACENTA, SIGNAL = 0.42; EXPRESSED IN BONE MARROW, SIGNAL = 0.48; NT HIT: AJ278435.1, EVALUE 9.00e-06; SWISSPROT HIT: Q60653, EVALUE 1.40e+00; EST_HUMAN HIT: AW832994.1, EVALUE 1.30e-02
aacaacacttggacagcaagtcaatatgactatgaaaggtctccaataatgagcaaattcagaccaatacacagtttgagtatttgcccttcttattgacaaaggttgctttcaatcacactgtatctattaccatatcaatcatcactctaaatgaatacagtgttatcattgacaaagacatcatttaagctgagaaagtaaagattctaaataacaaaataatgaaaagtaggttgttcactgcaggaaaatgaaaaatataccttaacaatctattcacaggatggtaaggacattggggagcagtatgaaaaacagcaacagcaataacaacaacaaaagctcacttactcacaaggaccttgaaatagatagtgattaatatcacactgttatttattaaagttaatacaactgagtattttacttggtatacagattaagatatagaattgaactgataaaaatgatttacatgcaggattaaaatattggcagctttatagagtgaaatgtcactattttgctgtaccttcaagttttacatttcctcctttgaatccctgtca

SEQ ID NO: 833 - DNA, 598 bp, Homo sapiens
  MAP TO CHR22_129.0; EXPRESSED IN BRAIN, SIGNAL = 0.64; EXPRESSED IN LUNG, SIGNAL = 0.84; EXPRESSED IN FETAL LIVER, SIGNAL = 0.59; EXPRESSED IN BONE MARROW, SIGNAL = 0.59; SWISSPROT HIT: Q27969, EVALUE 6.70e-01; EST_HUMAN HIT: BF508896.1, EVALUE 0.00e+00; NT HIT: AF368061.1, EVALUE 7.00e-87
tgtgaaagaggaagcaacccgagtttacaaagatggaaagtgaacagagcaaggcctctgttattatttattgttgtatgtccctgtttcttaaagcaacaggcactatcccaagttcatacaacctgtgcatgaggctctcaaactctgtgccttggttctcccaaggctaagcaggaagtcaaagattaagaagtcaagagcctcagcccaattctgcttcagcctggcactccctcccctcctgcatctcagctgcctctcacacagggtggctgggtcctcctcaccaatgatggcttccttcaggctggactcaacaggaaggatgttcttctccaccagctccatggggccaggcctctgtgcaatcttctcattgaggtcatcggctagtctggctctcttcagcttcagctgcttggcctggagggatggctcagccgaggtctctgcccatgggagagaaaggggtgcaggaagatatatgagtggacgtggttctgccccgggaactccagagcagctctccttcctcctgggcaagaggagtgactgtcagaacggtaagcatattccaagcagagaagagtggcct

SEQ ID NO: 834 - DNA, 501 bp, Homo sapiens
  MAP TO CHR22_147.0; EXPRESSED IN BONE MARROW, SIGNAL = 0.45; EXPRESSED IN PLACENTA, SIGNAL = 0.46; EXPRESSED IN ADULT LIVER, SIGNAL = 0.58; EXPRESSED IN HELA, SIGNAL = 1.6; EXPRESSED IN BRAIN, SIGNAL = 0.52; SWISSPROT HIT: Q50634, EVALUE 3.10e-01; EST_HUMAN HIT: BE465850.1, EVALUE 2.80e+00; NT HIT: AF320126.2, EVALUE 1.20e-01
tgggattattctgagccagggtgtcactgagctcttaataggagattatccctcctccattctcatgtttgacccccctgagttgtgatgccccaagctgtggccctcactcaaggtcatcctccccgctgacagcagcaacagcagccgcccacaccagccctttcaagcttcacagctgcccgctgccctcacaggggcgccctgatgcaatcagaactactgttgttatctctgctttgtggatgaggaaactgacactcagccagtcgcctgtcctaggttcacgcagcagcagcctcgactccagcctggacccactgcctctgaatgcccccctccctgcagccaatggctgcctttcctacctgatgcaaggtcaggacacacaccagatctagccgaaggattcaaataccacggcaggtaatttgatgtccgctgccctgttttaaggcaatgctataaatttcacacggaagcacagacaggaagtgcaaa

SEQ ID NO: 835 - DNA, 531 bp, Homo sapiens
  MAP TO CHR22_36.0; EXPRESSED IN BONE MARROW, SIGNAL = 3.8; EXPRESSED IN BRAIN, SIGNAL = 2.6; EXPRESSED IN FETAL LIVER, SIGNAL = 3.2; EXPRESSED IN PLACENTA, SIGNAL = 1.8; EXPRESSED IN LUNG, SIGNAL = 2.7; EXPRESSED IN ADULT LIVER, SIGNAL = 1.9; NT HIT: gi16117795, EVALUE 3.00e-61; EST_HUMAN HIT: BF213628.1, EVALUE 2.00e-63; SWISSPROT HIT: Q9Y3U8, EVALUE 3.00e-29
gcccaagacagctatgaagggtgtacaaaatggaggctctagtcctagttgaagagacaagatgtatataaatgaaatttctctttttctttttttttctgtgaagcttttattatgaacagagggcagggcaaggcagggggctcagtccttggcagcggctttcctcatggtggccaggacattgcgcagctcctcctacttcctcttggtgcggatgtgtgttcccacctttttcttgatgaacttgaaggcccttttgtccttggagaccttgagctactccatgggatgctgcccatacagggtgaagccacacacctctcagatcatatcccgcatgaacttggtgtgtttggtcaggcacctgcgatggcagctgggcctgggcttgctcacattcttggtcaccttgtggcccttgttgaggcccatggctgtaggataaagcagaaccatggctgctgctctccagtgacagccaaggcctgtaagtatttgaaatttccgccactgcttttccccactttc

SEQ ID NO: 836 - DNA, 531 bp, Homo sapiens
  MAP TO CHR21_72.0; EXPRESSED IN BONE MARROW, SIGNAL = 1.5; EXPRESSED IN BRAIN, SIGNAL = 1.4; EXPRESSED IN HELA, SIGNAL = 3.6; EXPRESSED IN FETAL LIVER, SIGNAL = 1.3; EXPRESSED IN LUNG, SIGNAL = 0.76; EXPRESSED IN PLACENTA, SIGNAL = 0.71; EXPRESSED IN ADULT LIVER, SIGNAL = 0.86; NT HIT: AB001523.1, EVALUE 0.00e+00; EST_HUMAN HIT: AA151762.1, EVALUE 8.00e-07; SWISSPROT HIT: P19661, EVALUE 3.00e-04
gaaccacaaatgtgccactgtaccccagcccacacaatggagtgagaccctgtcttaaaataagaatagcaataacaataaaaaggaacagagacaaagccacacggtgctctctgactgccgagtcccaggacttggtacaaaattgcgagggatctttgaaactcccaacagcagcccacatgctacccgatgaggaagccggggaccagaccaaggacactgaccatgcccaagccggggaccagaccaaggacactgaccatgcccaagccagggaccagaccaaggacactgaccatgcccaagccgtccagctagttcagagtcaagtggaaataaccagggcgggagcacagagagccacatcccagtggctccagatcctggtgtcggacagctgggtgcttggggaactgccgttcattcacagggctttgcggctgagctcagaacttgatcttgactttgatgggtggaaggaatgtgagtgcctggattaaagcggattgtcacgtaggccacaggatt

SEQ ID NO: 837 - DNA, 584 bp, Homo sapiens
  MAP TO AC021609.3; EXPRESSED IN FETAL LIVER, SIGNAL = 2.9; EXPRESSED IN PLACENTA, SIGNAL = 2.8; EXPRESSED IN LUNG, SIGNAL = 2.6; EXPRESSED IN ADULT LIVER, SIGNAL = 2.4; EXPRESSED IN BONE MARROW, SIGNAL = 3.3; EXPRESSED IN HELA, SIGNAL = 1.8; EXPRESSED IN BRAIN, SIGNAL = 2.8; EXPRESSED IN HEART, SIGNAL = 2.1; NT HIT: X80225.1, EVALUE 2.20e+00; SWISSPROT HIT: P07814, EVALUE 9.90e-02; EST_HUMAN HIT: BI826343.1, EVALUE 0.00e+00
aaaggtgttgttggtcaggctcctaacccagcaacctgaggggggctgctaacgtgttcatgtgtcccactgtagagatgcaacacaggcatagccaagctcctaggcgtcatgagaaggggaaaggaggctccagatgccaccttctcactgtgcaaacttgccaggccacagggtatcggacatgccctgtgggccacggggatgcttcaggatggagcaatgtgcccaaagccggattccttgaggctggggatgtcgttcttcctgtagaagtcagcctgcacatggttggcacggccaaagtcccggtttaggggctcaatgggctgattgatgcgcttcccatagacagaagacgtcagcactccaaccggcctctcctgttcctggtgaaagttatcaaagcacatagtcagcaccactgcattcgccagcacagctcacccgtgcacccatcagcctgggtcctgggagctttttctgcctgggtcccaccatggtagaccaagagggaacctccacgctgaagccaggggcttcacagggaagtagcctatggcagggaaccgttgaatttgcta

SEQ ID NO: 838 - DNA, 558 bp, Homo sapiens
  MAP TO CHR21_61.0; EXPRESSED IN BONE MARROW, SIGNAL = 2.1; EXPRESSED IN BRAIN, SIGNAL = 1.6; EXPRESSED IN HEART, SIGNAL = 1.2; EXPRESSED IN PLACENTA, SIGNAL = 1.2; EXPRESSED IN LUNG, SIGNAL = 1.6; EXPRESSED IN ADULT LIVER, SIGNAL = 1.1; NT HIT: AL163285.2, EVALUE 0.00e+00; SWISSPROT HIT: P20591, EVALUE 7.00e-30; EST_HUMAN HIT: BG055292.1, EVALUE 1.00e-105
ttgggtagggacacagaaccaaaccatatcatgagcatgatttgcaggccatgaagaattctccatttttgtttcctccaggtggctgagaacaacctgtgcagccagtatgaggagaaggtgcgcccctgcatcgacctcattgactccctgcgggctctaggtgtggagcaggacctggccctgccagccatcgccgtcatcggggaccagagctcgggcaagagctccgtgttggaggcactgtcaggagttgcccttcccagaggcagcggtaagaacttacattctgtgttagtctgctcaggctgccataacaaaataccacagacggggtggcttatacaacaaaagtttattttctcacagttgtggagactggaagtccaacatcagggtttagcttctcctgaggcctttctccatggcctgcagatggccacctcctcaccgctcccccatgcggccttccttccacacacaagcatctctgctgtctcttccccttcttcataagagcaccagtcatattggattggggcctaccctaatgacctc

SEQ ID NO: 839 - DNA, 563 bp, Homo sapiens
  MAP TO AC017013.4; EXPRESSED IN BONE MARROW, SIGNAL = 2.7; EXPRESSED IN HEART, SIGNAL = 2.5; EXPRESSED IN ADULT LIVER, SIGNAL = 2.4; EXPRESSED IN HELA, SIGNAL = 2.2; EXPRESSED IN BRAIN, SIGNAL = 2.3; EXPRESSED IN PLACENTA, SIGNAL = 2.8; EXPRESSED IN LUNG, SIGNAL = 2.6; EXPRESSED IN FETAL LIVER, SIGNAL = 2.2; NT HIT: AE002128.1, EVALUE 5.40e-01; EST_HUMAN HIT: BE009488.1, EVALUE 2.00e-01
tgagagagcatgagcagcagcaggcataaattaaattaaactttttcaccagtctgtagaccaatattaaaaaatgtaatgtctgtatgttttttcatgttcctcttaaccagaagaagaaaaagaaggagaaggagaaggagaaagagagcaagagaagaagaagaaggagaaggaggagaaggaggagaaggaggagaagcaggagaaggaggagaaggaggagaagaaaaagaagaagaagaaaagaagaagaagaagaagagaagaagaagaagaaaagaagaagaagaaaagaagaagaagaagaagaaaagaagaagaaaaaaagaagaagaagaagaagaggaagaagaagaagaagaagaagaagaagaaaagagcttggagagagatttattgcccatttatgtttggaaagagcccaaggatagtttttgctctctgtcttgaagaaaggagcataactgtaattttcttaattatatgaggtgtcacaagtaaaaaggtagcagtactagctcagttctctgtgggaacactggcatctgtgagaatttgca

SEQ ID NO: 840 - DNA, 570 bp, Homo sapiens
  MAP TO AL133330.5; EXPRESSED IN LUNG, SIGNAL = 1.1; EXPRESSED IN BONE MARROW, SIGNAL = 0.82; EXPRESSED IN BRAIN, SIGNAL = 1.1; EXPRESSED IN FETAL LIVER, SIGNAL = 0.93; EST_HUMAN HIT: BI857908.1, EVALUE 8.00e-04; NT HIT: AF023249.1, EVALUE 5.40e-01
gggttatcccaggctaggtcaggaaagctcatggtctactaacaaagctcagatttgggggagggcagctgaactatggattacatgctggtgtccatgtgatatggttggggtaaaggccaaactgggagagaggaggcatgacttcttccagcttggtcacaaagaagtggtgattggtaacgctaaggatgaaaatagtgataatgaggatgatgatgaggatgatggtggtaactatcactgactgagccctcattatgtgccaagcactggactaactactttatgaatgttctcatatgaaaatctctatctcataggcatgattagccccattctactgatgaagcaattgaggctaagttaacaatccaatcatccatagctaggaaagggatggagccaggacttaagcttggtttgtaactgagttacctctagttcatttaaactagggtatcttcttccttatctgcaaaaaagcacgggctaacaatctggctttacaatctggaatgatctctgtcctcatcaccaagatgaaagggaagtttgggatcaggtgga

SEQ ID NO: 841 - DNA, 505 bp, Homo sapiens
  MAP TO CHR22_226.0; EXPRESSED IN BONE MARROW, SIGNAL = 3.8; EXPRESSED IN PLACENTA, SIGNAL = 4.2; EXPRESSED IN BRAIN, SIGNAL = 2.9; EXPRESSED IN ADULT LIVER, SIGNAL = 4.8; EXPRESSED IN LUNG, SIGNAL = 3.8; EXPRESSED IN FETAL LIVER, SIGNAL = 3.2; EST_HUMAN HIT: BI916175.1, EVALUE 4.00e-27; SWISSPROT HIT: O15442, EVALUE 2.00e-07; NT HIT: gi4502496, EVALUE 3.00e-27
cttgtactcgtagggcaggctgcctgcaggggtggacacagacagacacacagcacacagccgtcagcttgtccagaagccacagcacggctgagagaggggcgggcaggaggaagctgcatgaactcctggtcaaaggtcagctcgtggttgcccgcgatcacgatcttgtactcatagggcaggctgcctgcaggggtggacacagacagacacacagcacacagctgtcagcttgtccagaagccacagcatggctgagagaggggcgggcaggaggaagctgctggaatcgctgacaggggtacctgctgccaggcccccaacaggtgtcttcatcagatcaaaggaggcagcagcctgatcactgtccccacagtcctgcctgtccaggcctccactggccatcggccccctgagatcatcgggaagaggctggacaggttcctcccaggctgctgagctgcagagtgcctggcctcatcctgggacttctctgcctcag

SEQ ID NO: 842 - DNA, 591 bp, Homo sapiens
  MAP TO AL135926.3; EXPRESSED IN HEART, SIGNAL = 2.7; EXPRESSED IN PLACENTA, SIGNAL = 3.5; EXPRESSED IN HELA, SIGNAL = 1.5; EXPRESSED IN BRAIN, SIGNAL = 2.5; EXPRESSED IN LUNG, SIGNAL = 3.3; EXPRESSED IN ADULT LIVER, SIGNAL = 3.9; EXPRESSED IN FETAL LIVER, SIGNAL = 3.2; EXPRESSED IN BONE MARROW, SIGNAL = 2.8; SWISSPROT HIT: Q09511, EVALUE 2.60e+00; NT HIT: AF188286.1, EVALUE 9.00e-03
ggtgtgggggagtgtctatgcaacagtgtacacctgcttcccagtagcttattagctcacccacacccaggtcacagggaaggtaggggacaggtgctcatggggctccctgccctgctttgccagtgccttgggctccttgatctgcttcctcagggaatttcccatgtcataaatctgcacccttccctctccccaccaccccatccatcctctgagctgagctctccatatccttgcagtctagcttcggggtctctgagccccccaggtgtgttctgaactgcattctctgatcagaactcagctctctgagcacctgggctcgactcattgcctttggctcctcctgcatatcccagcaccactttggaatgggctgggtgggacagagagcaagggaaagaggaaataaaaaacagagaaagaagaaaagagagacaaataatgaaagcacaaaagagcagcaaagagaaggggagagaagaggaagaggaaaaacgctcaggcagtcaaaagatgaagagtcagggacagaaagtaaggccacaggagagtcagctgggagacccagcagggtgttagggagag

SEQ ID NO: 843 - DNA, 595 bp, Homo sapiens
  MAP TO CHR21_72.0; EXPRESSED IN PLACENTA, SIGNAL = 0.99; EXPRESSED IN BONE MARROW, SIGNAL = 1.9; EXPRESSED IN ADULT LIVER, SIGNAL = 1.4; EXPRESSED IN HELA, SIGNAL = 4.1; EXPRESSED IN BRAIN, SIGNAL = 1.5; EXPRESSED IN FETAL LIVER, SIGNAL = 1.7; EXPRESSED IN LUNG, SIGNAL = 1.1; NT HIT: gi15320394, EVALUE 1.00e-109; SWISSPROT HIT: Q9NRZ7, EVALUE 2.00e-33; EST_HUMAN HIT: AI366140.1, EVALUE 0.00e+00
aaagggttgatatgcttgcgagctctcgatgcacgctatcagattctccaaaaacgtacagccagcttcgcctgcacctgcagcttctgtgatttgtgctcttaattgacgtggcgctttttttaggttgagtcgtttttcattgccaacaatcttctcctgcattgaaataatagcttgtaaagaagcctcacgcttcctttttctctgttgactcttctaggacgcgctccaggagatatataatcagaagggcatgtttccaggggagcagtttaagcctgcccggaggccgtggaccctcctgaacttcctgtcctgggccaccattctcctgtctcccctcttcagttttgtcttgggcgtctttgccagcggatcacctctcctgatcctgactttcttggggtttgtgggagcaggtaatggacactgtcgctaacagctcacactctgacgggcctcacagtatcagccacagggtccgggacctggtgactcatcacagtggctgtgggaggcaggggcctggctgttatggaccctggagccaggatccccccacggcctgcgggcctcagagcctggattcttg

SEQ ID NO: 844 - DNA, 526 bp, Homo sapiens
  MAP TO AC015855.4; EXPRESSED IN HEART, SIGNAL = 3.4; EXPRESSED IN PLACENTA, SIGNAL = 4.1; EXPRESSED IN LUNG, SIGNAL = 3.6; EXPRESSED IN HELA, SIGNAL = 2.4; EXPRESSED IN FETAL LIVER, SIGNAL = 3.8; EXPRESSED IN ADULT LIVER, SIGNAL = 4.1; EXPRESSED IN BONE MARROW, SIGNAL = 3.9; EXPRESSED IN BRAIN, SIGNAL = 3.4; NT HIT: AF284446.1, EVALUE 5.00e-01; SWISSPROT HIT: O15255, EVALUE 1.00e-03; EST_HUMAN HIT: BI913206.1, EVALUE 1.90e-01
agatggagaaccacccagcctgaggctagacattctctcctccgaagtcagggactgggtggggtgacctgcacatgtgttgcccaagggcagaagcggaggggaggggagagccggttagagttgtgaggacaccttgctgggtgaatggggagatccctggccgccgctcccctctgctcctccttggggctccatctgcagagtggggcttggccctcacgatggctgctggggacgggagcagctctgttggagagagggtgggtgctacctgggcactccgtcacctgtggaatggtggcaatagcaccgtcggcttccaaggcaagggagggtgggaggaaccagttgtgaagggagccaggggtaggggtggacatagtcattggccaggaacgagagacagtccctagaggaagattaggaaccaacctcagctttagagtggagaagatcatggaggaaaaaaaagaggcgacttctctgaagacaagacctttgtagacttggggaaaagctgaca

SEQ ID NO: 845 - DNA, 535 bp, Homo sapiens
  MAP TO AL139022.1; EXPRESSED IN BRAIN, SIGNAL = 6.7; EXPRESSED IN FETAL LIVER, SIGNAL = 8.6; EXPRESSED IN HEART, SIGNAL = 6.3; EXPRESSED IN LUNG, SIGNAL =   9; EXPRESSED IN ADULT LIVER, SIGNAL =  10; EXPRESSED IN HELA, SIGNAL = 4.4; EXPRESSED IN PLACENTA, SIGNAL = 9.4; EXPRESSED IN BONE MARROW, SIGNAL = 8.5; NT HIT: gi14752277, EVALUE 7.00e-68; SWISSPROT HIT: P49356, EVALUE 3.00e-20; EST_HUMAN HIT: BG325222.1, EVALUE 1.00e-67
gctgctcactccttcctctgtgttggaacagagctaactctcttagcccttcccatagccaaactctcctgaagcctgcatgtctgagtacaatcacatcaccatgacctggggcctgagagggggatggctcaaaagatacttactaataagctcttcaagttcaaggaacgttccctcttgaggattaccagcgcggccaggccacagaaggtatagccaccatgggcttccatccctggtaccccgccaatgccaccttcccagttctgacacctaagaagagattgagaaaagcagaatgagtggccagtgagtggacgtacacaagaccaggaccatcctaggtggcagagaaaaagttcactcagattaaggtgtgaaccatcacaactatgaatgaaaagatgccaactaattaacttttggaaatgtcttttcaaaaaaaaaaaaaaaaaaaagctgggcctggtggcacccatgtgtaatcccagctgctcaggagactaaggcaagaagatcacttgaggcgagg

SEQ ID NO: 846 - DNA, 530 bp, Homo sapiens
  MAP TO AC011266.3; EXPRESSED IN PLACENTA, SIGNAL = 0.8; EXPRESSED IN LUNG, SIGNAL = 0.67; EXPRESSED IN BRAIN, SIGNAL = 0.74; EXPRESSED IN ADULT LIVER, SIGNAL = 0.78; EXPRESSED IN FETAL LIVER, SIGNAL = 0.79; EXPRESSED IN BONE MARROW, SIGNAL = 0.89; SWISSPROT HIT: P40497, EVALUE 3.80e+00
ttctgttgacccagagtccccatctactctgagtggtctcatgcacaattcttaatagggtacaaaagaaaaaagcaatgcctgcatttttagaatgagagtcatcctccaaaggttgccccttaaaagtaaagaattgtaactctgtcatctttgtggtcaaattccttttcctcttggaaataaaagaatgttctttgactgtgattttctttctttctcatcagccatgagtgatgaaagacagataccaacaaatgaaattagactctctctgactatcctcagatcagaaactcttgaggtaagttactttgtcaatcattttcccccaataggacagagagcataaggtttgcataattgctagtaagctcccaccccaatacaattaggagtatgaaacaccagctgatcagctatagtgtggacatgttctgtggatcagtggaaaatgttggtaacactgtccacatgctatgatcaatgcatttatgtactccctttcaagaaggtgaagacacgggaaa

SEQ ID NO: 847 - DNA, 600 bp, Homo sapiens
  MAP TO CHR22_16.0; EXPRESSED IN PLACENTA, SIGNAL = 0.9; EXPRESSED IN BRAIN, SIGNAL = 0.72; EXPRESSED IN ADULT LIVER, SIGNAL = 0.58; EXPRESSED IN FETAL LIVER, SIGNAL = 0.59; EXPRESSED IN BONE MARROW, SIGNAL = 0.72; NT HIT: Y18890.1, EVALUE 2.00e-56; SWISSPROT HIT: P10264, EVALUE 1.00e-70; EST_HUMAN HIT: BG433460.1, EVALUE 0.00e+00
aattcaccagcaacacaggacgcggcgctgtatcctcagccgcccactgtgagacttaatcctacagcatcacgtagtggacagggtggtgcactgcatgcagtcattgatgaagccagaaaacagggcgatcttgaggcatggcggttcctggtaattttacaactggtacaggccggggaagagactcaagtaggagcgcctgcccgagctgagactagatgtgaacctttcaccatgaaaatgttaaaagatataaaggaaggagttaaacaatatggatccaactccccttatataagaacattattagattccattgctcatggaaatagacttactccttatgactgggaaattttggccaaatcttccctttcatcctctcagtatctacagtttaaaacctggtggattgatggagtacaagaacaggtacgaaaaaatcaggctactaagcccactgttaatatagacgcagaccaattgttaggaacaggtccaaattggagcaccattaaccaacaatcagtgatgcagaatgaggctattgaacaagtaagggctatttgcctcagggcctggggaaaaattcaggac

SEQ ID NO: 848 - DNA, 504 bp, Homo sapiens
  MAP TO CHR22_210.0; EXPRESSED IN HEART, SIGNAL = 3.8; EXPRESSED IN PLACENTA, SIGNAL = 4.5; EXPRESSED IN LUNG, SIGNAL =   5; EXPRESSED IN HELA, SIGNAL = 5.1; EXPRESSED IN BRAIN, SIGNAL = 4.9; EXPRESSED IN ADULT LIVER, SIGNAL = 4.2; EXPRESSED IN FETAL LIVER, SIGNAL = 4.2; NT HIT: AL163204.2, EVALUE 5.00e-04; EST_HUMAN HIT: AA693725.1, EVALUE 2.00e-04
atcgggtctgagaatgatgggaaccctcctaaaatccaagtccccagatgccagccaaagccaacctcgtaagcaggcctgttgaaggatggcagtcaggattgttatgttaactgtcttctgtactctcttgtttatacagaagagaattaacacagcaatcctggctgccatcctgtactctcctccctatacagaagagaacatagcaatcctgactgccatccttagaaaggcctgcttaacataactttttgggaagttagtcagtgattccactaatgctgcctttgttgacaatagttttggatttctctgggaattgcctttagagccctctatctatccaaaatataataaatctccaacattgaacgcagacttgatctctaatagccaacgtatatgcaaaaacctctttggttcaaaccagaagtcaacaataaaataataaactgcacctttctaccatggtcttcaggcacaaagggcaaggaccattta

SEQ ID NO: 849 - DNA, 522 bp, Homo sapiens
  MAP TO CHR22_20.0; EXPRESSED IN HELA, SIGNAL = 1.2; EXPRESSED IN ADULT LIVER, SIGNAL = 0.7; EXPRESSED IN BRAIN, SIGNAL = 1.6; EXPRESSED IN FETAL LIVER, SIGNAL = 1.4; EXPRESSED IN BONE MARROW, SIGNAL = 1.6; EXPRESSED IN HEART, SIGNAL = 1.8; EXPRESSED IN PLACENTA, SIGNAL = 1.6; EXPRESSED IN LUNG, SIGNAL = 1.2; NT HIT: AY014912.1, EVALUE 2.00e-86; SWISSPROT HIT: O95236, EVALUE 1.00e-12; EST_HUMAN HIT: BE900392.1, EVALUE 2.00e-66
tagcttgcaaagctcccatcaccagtagatggcagaactgaccctgcccttgtgggcttcttctcccctcagcctgaggtcactcactgccagcgaagcacttggaggaaatattcttcctgcactgctgagagggacatcctcaagcccagcagagggggctgcctggaggaggtgtgcctgccagagaaaactagcccggggagatctgggtggcatcaccggggtgccccaaggaggtaaccccatggaggttacctgggcaattcagccacacgcacaaatctcttccaggcttcatcgctagtcagcaggattttcagatgcactgggctaactttcttctggaagtattcaatgacttcttcagtgaagcgtttcttttctagttggaaacaaaaaggataagattggaagaaagtttgctaccacataaatggcattgagtataaggtggttcggtgttaatcctcctgaaccagctgtcacatggggtatttttgatggaggcaccagtgctat

SEQ ID NO: 850 - DNA, 548 bp, Homo sapiens
  MAP TO CHR21_6.0; EXPRESSED IN BONE MARROW, SIGNAL = 1.7; EXPRESSED IN BRAIN, SIGNAL = 1.7; EXPRESSED IN HEART, SIGNAL = 1.2; EXPRESSED IN LUNG, SIGNAL = 0.88; EXPRESSED IN HELA, SIGNAL = 3.7; EXPRESSED IN FETAL LIVER, SIGNAL = 1.6; EXPRESSED IN PLACENTA, SIGNAL = 0.87; SWISSPROT HIT: P07602, EVALUE 3.00e+00; EST_HUMAN HIT: BE389158.1, EVALUE 1.00e-127; NT HIT: AL163227.2, EVALUE 1.00e-121
attgcccagtcttgggtatgtctttatcatcagcatgaaaatggactaatacagtaaactagtaccagtagagtggggagttgctgaaaagataccagaaaatgtggatgtgactttggaactaagtaacaggcaaaggttggaacagtttagagagatgagaagaagacaggaaaatgtaggaaagtttggaactcctagagacttgttgaatagctttgaccaaaatactgataatagtatggtcaatgaaatccaggctgaagtggtctcagatggagatgaggaatgtgttgggaactggaacaaaggtgacacttgttatgttgtagcgaagagactggcagcattttgcccctgccctagagatttgtggaactttgaacttgagagagatgatttagggtatctggcagaagaaatttctaagcagcaaaggattcaagaggtgactagagtgctattaaaggcaatcagttttataagggaagaagagcataaaactggaaaatttgaagcctgacaatgcgatggaaaagaaaatccca

SEQ ID NO: 851 - DNA, 530 bp, Homo sapiens
  MAP TO CHR21_61.0; EXPRESSED IN BONE MARROW, SIGNAL = 1.7; EXPRESSED IN BRAIN, SIGNAL = 1.5; EXPRESSED IN HELA, SIGNAL = 2.8; EXPRESSED IN FETAL LIVER, SIGNAL = 1.6; EXPRESSED IN LUNG, SIGNAL = 1.1; EXPRESSED IN PLACENTA, SIGNAL = 0.92; EXPRESSED IN ADULT LIVER, SIGNAL = 1.1; NT HIT: AL163285.2, EVALUE 0.00e+00; SWISSPROT HIT: P20592, EVALUE 6.00e-45; EST_HUMAN HIT: AL551630.1, EVALUE 0.00e+00
agaaagggcaggagagaaggtatgtcgcaagtggggagtgaggaaaccgggttcataaggacagaaagggcgaagtgggactttctaaaaatcatcatttcaagtctcaggacttctttgactatggattcgttttatttctgagttcaacataatagtacttccaaatttgtttaagccaacaggaaagaagaaaaagaagtaatgtgtttgtcttttttatctaaccagagcacgattgaagacataaaagtgaaacacacagcaaaggcagaaaacatgatccaacttcagttcagaatggagcagatggttttttgtcaagatcagatttacagtgttgttctgaagaaagtccgagaagagatttttaaccctctggggacgccttcacagaatatgaagttgaactctcattttcccagtaatgagtcttcggtttcctcctttactgaaataggcatccacctgaatgcctacttcttggtgagttcccggcggggcaggagccgtgctctctgaaatttgca

SEQ ID NO: 852 - DNA, 545 bp, Homo sapiens
  MAP TO AL138758.3; EXPRESSED IN HEART, SIGNAL = 1.5; EXPRESSED IN PLACENTA, SIGNAL = 1.8; EXPRESSED IN LUNG, SIGNAL = 1.6; EXPRESSED IN BONE MARROW, SIGNAL = 1.5; EXPRESSED IN ADULT LIVER, SIGNAL = 1.8; EXPRESSED IN HELA, SIGNAL = 1.1; EXPRESSED IN BRAIN, SIGNAL = 1.3; EXPRESSED IN FETAL LIVER, SIGNAL = 1.6; NT HIT: AL163284.2, EVALUE 2.00e-03; SWISSPROT HIT: Q09966, EVALUE 7.80e-01
ttcaacctcccttttcatgcttcctaccacaactcatatccttacttatatcactcacatctaagttactataggtatcttctaaatgtttctcttaccccaattctgtgtctccccattcattggctgtctccccatccaatcattctgacaaacctcattgccaggatgatttttccaaagcaattctgtcatatcatttgcaatcgagaagttccaatgactccctattgctgtgagcccctcggtgactccgtagacatctccatttcctaccatgtctcagtcacatttctagcatgtgaacaaagaccaggtccctgctctcacagagcttatgttcttgaggggtaagatagacaataaacaagtaaaaaggaaatatctagataattgcagataatggtaagtgccaagaagaaaccagatagataaatagtgatggaggaggtaacctgaagtgttatgaggtgatctggaaaatctggggccataatctattctaggagagggaacagcaggtgccaaggccctaaggtggaaat

SEQ ID NO: 853 - DNA, 563 bp, Homo sapiens
  MAP TO CHR21_63.0; EXPRESSED IN BONE MARROW, SIGNAL = 2.4; EXPRESSED IN BRAIN, SIGNAL = 1.9; EXPRESSED IN HEART, SIGNAL = 1.9; EXPRESSED IN LUNG, SIGNAL = 1.2; EXPRESSED IN HELA, SIGNAL = 3.9; EXPRESSED IN PLACENTA, SIGNAL = 1.1; EXPRESSED IN FETAL LIVER, SIGNAL = 1.9; EXPRESSED IN ADULT LIVER, SIGNAL = 1.2; NT HIT: Z99770.1, EVALUE 5.40e-01; EST_HUMAN HIT: BF183581.1, EVALUE 2.00e-01; SWISSPROT HIT: P55303, EVALUE 7.00e+00
atgcttggttttgaggatgggcgcaacctgctgtggggccaccacactgcatccactctgagacgccatgaattctaatcctaaatgtaccattgtcctgatcacctccaaaataggaaaaaatgctgccaatgacaattgtaagaggccattgactccctcatagctgttagaatgcagaaaaaatagcatctaaggaactacgaatgatttttaatctggggcttgggaaaggggaactattgggagaaagaagttctctttgcactgagatcctcaggccatttaaccttggagacaagaagacagggatatattttgcaaaggacttgcccattactaaaggtgacacaggggaaaggagacactaaacatctggatccagccatttctgacactggatttcatgaagcagtacttcttcttcttcttcttcttcttcttcttcttcttattattattattattattattattattattaatatttgtctgcagggcctaaagcagtgactagcaccattcctggaacagactggccacctggtgcctccttactctgc

SEQ ID NO: 854 - DNA, 562 bp, Homo sapiens
  MAP TO CHR21_5.0; EXPRESSED IN HELA, SIGNAL = 3.7; EXPRESSED IN BRAIN, SIGNAL = 1.5; EXPRESSED IN HEART, SIGNAL = 1.2; EXPRESSED IN LUNG, SIGNAL =   1; EXPRESSED IN FETAL LIVER, SIGNAL = 1.4; EXPRESSED IN ADULT LIVER, SIGNAL = 0.99; EXPRESSED IN BONE MARROW, SIGNAL = 1.6; NT HIT: AF041428.1, EVALUE 1.40e-01; EST_HUMAN HIT: BG826739.1, EVALUE 7.90e-01; SWISSPROT HIT: P03468, EVALUE 2.40e+00
ccttgttgctctctcatcccacaatatgttgccttttaggttgcagacatcactgagttcacatatgaagagaaaaagagccaagtttcggagaccacagcctgtctttaacttgaagacagcctagaaattaaacacagtatttctattctactcatctaattgtagttacacagtcacaactgcatatgagaaaagttgggaaatgtggtttctagctggaaagtcatgtctttaagaagagggacaatgaattttaggtgaataacaagcagttgtcacaccaaccttttaagtttcaaaaactattgagtgattaaataagtttacatactcattaaacaagtatttatcaagtgattgctgtatttggttgattattctatgtgatagcaatatagactttttttttttaagaaaatcattaccaagtggtacatattttagaaaggagagataggtgttaaccaaattaccaaataaatatgtggataaattaagaagtaataagtattaagaaaaaaataaatttaaagaatagaggggctgttttcagatagaa

SEQ ID NO: 855 - DNA, 542 bp, Homo sapiens
  MAP TO CHR22_97.0; EXPRESSED IN FETAL LIVER, SIGNAL = 0.4; EXPRESSED IN LUNG, SIGNAL = 0.47; EXPRESSED IN BONE MARROW, SIGNAL = 0.44; EXPRESSED IN PLACENTA, SIGNAL = 0.36; EXPRESSED IN ADULT LIVER, SIGNAL = 0.4; EXPRESSED IN HELA, SIGNAL =   1; EXPRESSED IN BRAIN, SIGNAL = 0.4; NT HIT: gi9964314, EVALUE 2.00e+00; EST_HUMAN HIT: BG476842.1, EVALUE 0.00e+00
ttgaatattcttcgttgttgttttctatagtatgaagcctaatatggtaatagtaatactaaataatattaataatttagtactaaaacataatattttatatttttaaatcatttttaatgatacctgttgcattttaggccaatgttcattatacgtacttttattatgtaaccttccaaacttaggaagcttatacttcttctctgaagcagaaatatccggtgtgggggcagaagtgcacgctgtcagtgagttacttgaaccaagttgtcttttagaaaacaatatagagtgggaggtacgctgtctagtccgacatgccacttccctctctttacacagcaatggttcatccatcagcaatgtgatgacttgcttagatttttcccggatataataacctgaaaaatacattgactctgcttagaaaaggaaatactagttaaggctataattaattttttttctacagaaatttttttaaaaataaaaatctcagcagtgaaaaaacctgcagcaaataaagaactactgataag

SEQ ID NO: 856 - DNA, 569 bp, Homo sapiens
  MAP TO AL139227.1; EXPRESSED IN LUNG, SIGNAL = 0.78; EXPRESSED IN FETAL LIVER, SIGNAL = 0.55; EXPRESSED IN BRAIN, SIGNAL = 0.58; EXPRESSED IN ADULT LIVER, SIGNAL = 0.85; NT HIT: gi6756066, EVALUE 0.00e+00; SWISSPROT HIT: Q61967, EVALUE 1.00e-110; EST_HUMAN HIT: BG112234.1, EVALUE 0.00e+00
ctgctttggtaaggtttgcctctcttatgaatcctcatatgtttataaagggatgggctctgaccaaaagccctcccacatatgctacattcaaaaggtttctctccagtatgagtcctctcatgttggacaagggaagaacatcgactaaaggctttcccacattccttacactggaagggcttctctccactgtgtgtgacctcgtgttgagtgagggatgtgccatgcctaaaggacctcccacatagattacatcgatagggtttctctccagtgtgaattcgctggtgttgaacaagggaggagctgcgctggaaggctttcccacagagactacactgatagggtttctctccggtatgagcattctcatgctgaccaagagatgagctatgcctgaaggcctttccacatacattgcattcaaagggtttctccccagtgtgaattctctgatgctcagtaagctgtgtcttccagagaaaggttttcccacagtcggtacattcatggtgtttctttccaggataaattccttgatctgttccattagggaaagctccctc

SEQ ID NO: 857 - DNA, 518 bp, Homo sapiens
  MAP TO AC018671.5; EXPRESSED IN BRAIN, SIGNAL = 1.2; EXPRESSED IN HEART, SIGNAL = 1.2; EXPRESSED IN LUNG, SIGNAL = 1.1; EXPRESSED IN ADULT LIVER, SIGNAL = 1.1; EXPRESSED IN PLACENTA, SIGNAL = 1.5; EXPRESSED IN FETAL LIVER, SIGNAL = 1.2; EXPRESSED IN BONE MARROW, SIGNAL = 1.2; NT HIT: AY028460.1, EVALUE 1.00e-29; SWISSPROT HIT: Q99615, EVALUE 3.20e-01; EST_HUMAN HIT: AV756591.1, EVALUE 0.00e+00
atacctggaattcttggggcattttaaatgaaaatctgtgcttcctcaggtttgcattataatcatgatttactcgactaaatactaaagaatttacaagggcagtacttaattttttcttagatacatggcaaactgtgatgaattgtcattaatatttctattcagctaatctgagaaggcccacttctggttccatggatgatggcggttgagcagatgccaaaaaaggattggtacagcatcctgggagcagacccatctgcaaatatatcagacctaaaacaaaaatatcaaaaactcatattaatggtaagtcttttctttcagattttaaatcatgaggggaaaaaaatcaatttttatatgaaaccacaaatttaggtttccagaaaataggataccagtggcaggaatccaggtattaatttgatttaattgaacatttcagtaatattgcagaaaaacttgatttgaggtggaaaagcatggttaggagcaggagatctgagtcaggc

SEQ ID NO: 858 - DNA, 556 bp, Homo sapiens
  MAP TO CHR22_236.0; EXPRESSED IN PLACENTA, SIGNAL = 0.92; EXPRESSED IN LUNG, SIGNAL = 0.99; EXPRESSED IN HELA, SIGNAL = 3.9; EXPRESSED IN BRAIN, SIGNAL = 1.6; EXPRESSED IN HEART, SIGNAL = 1.3; EXPRESSED IN ADULT LIVER, SIGNAL = 0.99; EXPRESSED IN FETAL LIVER, SIGNAL = 1.4; EXPRESSED IN BONE MARROW, SIGNAL = 1.5; SWISSPROT HIT: P08631, EVALUE 9.00e+00; EST_HUMAN HIT: AI680402.1, EVALUE 1.00e-85; NT HIT: AJ271735.1, EVALUE 4.00e-91
cttttcctgtttgccctgagaatactcaccggcagtgcttgcagctgcagcgtttaccccgagataagtttgccatgaaatctctcgttttcatgatgacttctgcattgctcgagtatatcgactttggaaacaaaagacctcgttctatttatggcattctgtttttagtagtggtatttccatttacaaaatataggaattctcagttgctgaaaacgtcagatcccagaagacacagcgttcccacacgtggtgttaacatcgttcccagttgctggccaaagattcctttgatgaatccgatttttccaaaatagatgattctgatgattcagatgactctgatgttagttctgtttagaaataattccaagaacagtttttatgttttattttcacattgaaaatcagtcagatttacctcagcctcaaagagtgtgtttatgtaaaagtaaatgaacgctggcagtgagctgcaattttttttcctaaacgagaaaaagattaagctatttgtgtctttatgtttaaagcgtgtttcttgtaggcagca

SEQ ID NO: 859 - DNA, 546 bp, Homo sapiens
  MAP TO AL138732.2; EXPRESSED IN BONE MARROW, SIGNAL = 0.78; EXPRESSED IN HELA, SIGNAL = 0.6; EXPRESSED IN BRAIN, SIGNAL = 0.84; EXPRESSED IN FETAL LIVER, SIGNAL = 0.89; EXPRESSED IN PLACENTA, SIGNAL =   1; EXPRESSED IN LUNG, SIGNAL = 0.98; EXPRESSED IN ADULT LIVER, SIGNAL = 1.1; SWISSPROT HIT: P34545, EVALUE 1.00e+00; EST_HUMAN HIT: BE564415.1, EVALUE 1.90e-01
tggttgctttttccaaccaccatatgtggtgattaggcttttcagaatgacattggggtacacactgagcatacagcaacagtcttccaaataacttataataaataaagtatgtaagacgtttcccccagccagatgtaatcttcaatagtagaggaataaatttaaagtgacttcccacaggaaaatttgggaaatgcctggatggaccaagaaggcagtcatgctgttagaaataagcaaactcctttcctcctttcaggtgagaatatatgatggttcatttaaattttgtttttgtgatttctgggatttcttagaaaatgcatggataaaaccaaaaaactccagtgaactaaaagtctatttgaactgtttgaaccttgctttgcatttttgcttccaatattcaaaaacatttaagcagatggtactcagataagtgtggggacatctccctgagtgtgtagtaacagatctaatttttgtaaattgaattgtactttacatctaatagagacagcaccagttcctggggattcttga

SEQ ID NO: 860 - DNA, 600 bp, Homo sapiens
  MAP TO AC013341.3; EXPRESSED IN FETAL LIVER, SIGNAL = 0.42; EXPRESSED IN BONE MARROW, SIGNAL = 0.46; EXPRESSED IN BRAIN, SIGNAL = 0.47; EXPRESSED IN ADULT LIVER, SIGNAL = 0.48; SWISSPROT HIT: Q03042, EVALUE 2.00e+00; EST_HUMAN HIT: BF699076.1, EVALUE 2.10e-01
ttgccttgttccaagttgtgtaaatgagttttattttctaacccaattaggaaaagcttataggatgttgttcatgtaagaattggagaataaccaatttgttttctactagctgaagctatatatatatatatatataaaatcctcgtggcacaatccctaatggtacaaatacctgtgcctaaatacaaatacctgtgcctaaaatatctcagaattaatgatatatttagggaatggtgaatcataaaaaatgactagtcgaagttacatgcattataggatttactctattgtaagagctagacatctgggtagtgactcaagatataagagtcagcaggtctgatcctcatcaccataaagtcagtcctaacattttcagtgcttccaaaggcacaacctggatgaaaagtcttttctgcttcttgccaccccacagtccatgcagattccacaatgtcaactttaccttgatcatgctcatagaaaatgtcaggtattacaatgctagcggaaaactccattatgataaaatctatttctgcatcctatatatgcggttttgtctggatattacaaaacaacctgcctttgatt

SEQ ID NO: 861 - DNA, 542 bp, Homo sapiens
  MAP TO CHR21_65.0; EXPRESSED IN BRAIN, SIGNAL = 1.5; EXPRESSED IN PLACENTA, SIGNAL = 1.1; EXPRESSED IN LUNG, SIGNAL = 2.1; EXPRESSED IN HELA, SIGNAL = 3.8; EXPRESSED IN ADULT LIVER, SIGNAL = 1.3; EXPRESSED IN FETAL LIVER, SIGNAL = 1.6; EXPRESSED IN BONE MARROW, SIGNAL = 1.7; EXPRESSED IN HEART, SIGNAL = 1.5; NT HIT: AB038161.1, EVALUE 0.00e+00; SWISSPROT HIT: P45844, EVALUE 4.00e-38; EST_HUMAN HIT: BG283492.1, EVALUE 0.00e+00
ctttgggaagggaggatagccaagctgggaatcgcagggagggtgaacgacattgaccttcagccaacggcgtggctggctgggagaacgtcctccctcatgcctggcctttcctcctaggtatgggttcgaaggggtcatcctctccatctatggcttagaccgggaagatctgcactgtgacatcgacgagacgtgccacttccagaagtcggaggccatcctgcgggagctggacgtggaaaatgccaagctgtacctggacttcatcgtactcgggattttcttcatctccctccgcctcattgcctattttgtcctcaggtacaaaatccgggcagagaggtaaaacacctgaatgccaggaaacaggaagattagacactgtggccgagggcacgtctagaatcgaggaggcaagcctgtgcccgaccgacgacacagagactcttctgatccaacccctagaaccgcgttgggtttgtgggtgtctcgtgctcagccactctgcccagctgggttggatcttctctccattcccc

SEQ ID NO: 862 - DNA, 579 bp, Homo sapiens
  MAP TO AL137025.2; EXPRESSED IN BONE MARROW, SIGNAL = 2.8; EXPRESSED IN BRAIN, SIGNAL = 2.2; EXPRESSED IN HELA, SIGNAL = 2.2; EXPRESSED IN HEART, SIGNAL = 2.3; EXPRESSED IN PLACENTA, SIGNAL =   3; EXPRESSED IN LUNG, SIGNAL = 2.9; EXPRESSED IN ADULT LIVER, SIGNAL = 3.2; EXPRESSED IN FETAL LIVER, SIGNAL = 2.9; NT HIT: AB026898.1, EVALUE 1.00e-14; EST_HUMAN HIT: N66687.1, EVALUE 6.00e-14; SWISSPROT HIT: P39188, EVALUE 7.00e-09
ttagaaaatgatgccaggggtagtggttcatgtttgtaatcccagcagtttgggaagctgaggcgggaggatcacttgacaacaagagtcctagaccagcctggacaacatagcaaaaccctgtctctattaaaaaaaaaatttaaaaccaagatcatcataaggaaaagaaaatatatttaccatgtattaaatggaagtggatcatcacaaaggtccttgtcatctttacattgagtacgcggaggaagagaaggggttggtcttgctatctcaggagaggcagaggcagaaaaaaatccacataaaagtgggcccacacagttcaaacccatgttgtttaacggccaaccgtatttatagctgccccacctatagacatgctgactccacatataaacatctgtttcaccacatcctttactgtaactgagtctctgtagttatgtgttaaaacactcataattgtattccaccagctctaaatccacccttgtaaattctgctttgtggtccgggtctgggagcctgcaaactgttccttttttgccaggtagttctctgtttggttctgcccat

SEQ ID NO: 863 - DNA, 565 bp, Homo sapiens
  MAP TO AL137017.4; EXPRESSED IN FETAL LIVER, SIGNAL =   1; EXPRESSED IN ADULT LIVER, SIGNAL = 1.1; EXPRESSED IN BRAIN, SIGNAL = 0.93; EXPRESSED IN PLACENTA, SIGNAL = 1.1; EXPRESSED IN HELA, SIGNAL = 0.78; EXPRESSED IN LUNG, SIGNAL =   1; NT HIT: AE001159.1, EVALUE 1.40e-01; EST_HUMAN HIT: BF844161.1, EVALUE 7.90e-01; SWISSPROT HIT: P54948, EVALUE 1.40e+00
accctctcattcttggaccccagtccaattttgctgagaatgctaaaggctctgaggataatgtgtcttcccacaccccaggagactccactcaccaccaagtgtggccagaccatggctattctgtctgtgttcctgttgatttgtagaagaaagatggtagtacaaaagttttccctgccctgtgggataagatccctgcaggtagaccaggaggaataagcatgacagttgtaaaatcttagaaatattacttagcttccatcttttccataatgatgagttcatctgaaggagttcagaaatagattcttataccttctaagactggctggattttctattcttggccagacgtttgttctaggaagaattcatccaacaaacatatgctcttatcaattattttcttaggaaagcttgtcctagtataggggaagtttttaagtttttctaatgaatcacagacatgaggcaggagggagagagtatcaagcgtgttcctttctgactgatctaacgtgagaccaaaaactatggagtaagagcaaaacctcccaaactg

SEQ ID NO: 864 - DNA, 524 bp, Homo sapiens
  MAP TO AC011585.3; EXPRESSED IN FETAL LIVER, SIGNAL = 0.89; EXPRESSED IN LUNG, SIGNAL = 0.74; EXPRESSED IN PLACENTA, SIGNAL = 0.78; EXPRESSED IN BONE MARROW, SIGNAL = 0.79; EXPRESSED IN BRAIN, SIGNAL = 0.73; NT HIT: AL445564.1, EVALUE 1.30e-01; SWISSPROT HIT: O67248, EVALUE 5.60e-01
ccttcaaagaaatggtttgcttaaattttgtaaaactgaaataataaaagtgaaaagtcttatacaaaagcatgagacacataaagtttgctagtaagacattacaactgctacatttaataaagttttaattatgaatcaaaacaagataaatgagcaagaaaatgattctcatcaaattcacaacttcaagaggtcgatgaaatccctggaacttcacattcttcagtacatgaagatttaattagtgctcagagcaatgagaatgaaaaagaggattgttcataaccaattcacaactcaggagtgcaactccggcttgccctttagaaggggaagaaatatccgccttgaaggcagcaacctggatgagaaagagcaagtctccagagcacccctcattaaaggtcgatcctaaaaatggcactcatccccctcacagcatgagaatgtttctagcaaaacacaatctgattcaaattagcaaatacgatgtttcactgggtgagcatggcaggaaactt

SEQ ID NO: 865 - DNA, 544 bp, Homo sapiens
  MAP TO AC009802.13; EXPRESSED IN BONE MARROW, SIGNAL = 0.84; EXPRESSED IN PLACENTA, SIGNAL = 0.86; EXPRESSED IN BRAIN, SIGNAL = 0.5; EXPRESSED IN ADULT LIVER, SIGNAL = 0.33; EXPRESSED IN HELA, SIGNAL = 1.1; NT HIT: M31551.1, EVALUE 0.00e+00; EST_HUMAN HIT: BF666685.1, EVALUE 0.00e+00; SWISSPROT HIT: P05120, EVALUE 3.00e-45
aaaggatgatctgccacaaactgtgggcctccatgtccagttctccctgtcataacacctcctgtgccagcggctgcttcagtgccctcctcattcacatccaccatggcttggtggaacacttcagaaagaaacaggtcattcctctccgacatccctgagaaattggcccgtcccttgttgaaggcgtcctccatgcccatgcttctcagaatggatctgagttcataatgctcttctaatttgaactggggtatgtatacctcaacttcatcttcagccattttgtctttgctggtccacttgttgagtttgtcataggttatttcactttccagctgcaaagcaaaacaaaacaaaacaaacaaaagaaaatacagcaagtattagaaagaaggaaaacaactttaagtctaatattaaaaatcagtgactttactatattgtgggtgatatagaaagttaacagattggtcagatttttacaagaaggtaacacgtatgacatagttaaggctttgaatgaaatgtagaggcatgccat

SEQ ID NO: 866 - DNA, 570 bp, Homo sapiens
  MAP TO AL136537.3; EXPRESSED IN FETAL LIVER, SIGNAL = 0.43; EXPRESSED IN BONE MARROW, SIGNAL = 0.43; EXPRESSED IN BRAIN, SIGNAL = 0.38
tccacctcacctcaggattccctagttgcttaaaccatgtatatacagaaggtctcacagcccataaggctgaacaaacgccacatttacatgcttgatttaaaatcctgaaagataaagcttttagacactggctaataataaataataaaccaattaatttgttaacttagacttcatagaagtagaggtccaagtaccagcatgaaactgagaagatgcacctccttcctggaaatggtcaagtcccattttctagatgaaactctgccacttaataattgtacttcttttagacagttactctcattttttttctgtaaaattagaatagtaataggagtattactcaaccctacaatatttcttagaattgttatgaagattaaaccaattgatacatataaagtgctgatcacagtgagaacctatgacattgatgaagagaggctaagggacctgcccgaaaacccacaatgcctatctgtgtgggcaaatggaagggaaggcccacgtggatgcatgacttcttgtctcccactgagaaccaggtccctttagctagcctgg

SEQ ID NO: 867 - DNA, 599 bp, Homo sapiens
  MAP TO AC011980.3; EXPRESSED IN FETAL LIVER, SIGNAL = 2.2; EXPRESSED IN BONE MARROW, SIGNAL = 2.2; EXPRESSED IN LUNG, SIGNAL = 1.8; EXPRESSED IN ADULT LIVER, SIGNAL = 1.8; EXPRESSED IN BRAIN, SIGNAL = 2.5; EXPRESSED IN HELA, SIGNAL = 2.1; EST_HUMAN HIT: AL134018.1, EVALUE 1.40e-02; SWISSPROT HIT: Q04833, EVALUE 5.90e+00; NT HIT: gi11038636, EVALUE 9.00e-03
taaggaaaaagggctttgggggctttttctaatttaaaaaaaaaaaaaaggcgtcatccagttagtggttgttaattaggaacaggtcccagagaagctgcttctgcagcagcaccaataaatcactcattaactgtccgtggctgcctgcctccaagccgggctcctctgcagcctgagctccagtagcagccaggccagggccctccactgcagacctgtcagtaagggggtggggtgcatgtctctttgtctctctcctcctaaaagcatcctcaaaccacactaggtaggagaggaaagggctgagcctctagtcatcgactcatggacttaaatcccaatcttactgcaccaagccccttcctgatccaaccccttctgaccccactgaccccgtctctcaccactctcccttaattcagcttccaactccactgtgcttcttcacattcctggaacacaacctccttcatagtgttgcacatgcccagtggagctgtgaccgtgcatctacctgtgcctcccacagagaggagcacgcagtggacactcaggaaatcaattcttgcctgaccagctcctgccaactttctcac

SEQ ID NO: 868 - DNA, 522 bp, Homo sapiens
  MAP TO AL137007.4; EXPRESSED IN PLACENTA, SIGNAL = 0.98; EXPRESSED IN LUNG, SIGNAL = 0.98; EXPRESSED IN FETAL LIVER, SIGNAL = 0.58; EXPRESSED IN ADULT LIVER, SIGNAL = 1.1; EXPRESSED IN BONE MARROW, SIGNAL = 0.62; EXPRESSED IN BRAIN, SIGNAL = 0.58; NT HIT: U62293.1, EVALUE 5.00e-01; EST_HUMAN HIT: BI047198.1, EVALUE 3.00e-09; SWISSPROT HIT: P03181, EVALUE 8.40e-02
tgagaggtgatcccagatcccaggaattattgcaagggagtggaaaataaagcagggaagagagtggtttaatgagcacataattgtgggcaactgaggcttcatatgctggagactctcttataaatcatgcgaaacataactaaaagttgtcaacagaaatgagaaagcagtgctatgtatccacaacttgtcatcccttgtgcatatttctggcataaatgtggaagtgatgcaggatttttctcagcccgtttggcagactcgtgggagaggtgccccatctacttggtctattatgctcaagcttttgggggagagagcacatatgccagcaagtgcaggacctggctggccactccagatgccgaaacaggagcaagctccacacgggcccccagcctgaccaggtgtgttgccttggcgggaacatggtggaacccaggtgagggtgcctgtgacactgaagccccagaggggattttacagtgctcctttagttccaccattcacagacagcag

SEQ ID NO: 869 - DNA, 593 bp, Homo sapiens
  MAP TO AL138996.1; EXPRESSED IN FETAL LIVER, SIGNAL = 1.8; EXPRESSED IN BONE MARROW, SIGNAL = 1.6; EXPRESSED IN HEART, SIGNAL = 1.9; EXPRESSED IN HELA, SIGNAL = 2.5; EXPRESSED IN BRAIN, SIGNAL = 1.8; EXPRESSED IN PLACENTA, SIGNAL = 1.7; NT HIT: AF189124.1, EVALUE 6.00e-04; EST_HUMAN HIT: AW838294.1, EVALUE 4.00e-61
gcttggaggctagtgtcctgtctggagaatgggcttaatgtaacttcagttaagaaattaatgaatctgaaatagttataacccaaggaagagattttcctaaagaatgtccctttagagaaataatgaccagttccctcaaaaaaaaaaaaaaaaaaaaaaaaggaaaaacagacactagactggatagaaaagacttacatgttgaggctgatgatttctcttatggaactataaaaggactggactctaaggaaatgagggtcttcaacttcattggtgatatttccagttgttctggagctgtgatagaaccaggactagagaatgcagggcacgatgatagatttttttttatgtagcacttttaaacataaaaaatatatatctaatgtgccaatgcaagacctggcctttttgtaatcaagtaatattttgagtaataattgattgcacaacatcctgtgacacactgtgaaagagtaaaattggcttaaaaattttaagtacaaagacatttcagaagagttttgtccataactttgttagactgaaatgaggaattacatttggcaccaggaaatggatctgga

SEQ ID NO: 870 - DNA, 566 bp, Homo sapiens
  MAP TO CHR21_66.0; EXPRESSED IN HELA, SIGNAL =   3; EXPRESSED IN FETAL LIVER, SIGNAL = 1.6; EXPRESSED IN LUNG, SIGNAL = 1.1; EXPRESSED IN BONE MARROW, SIGNAL = 1.6; EXPRESSED IN PLACENTA, SIGNAL = 0.97; EXPRESSED IN ADULT LIVER, SIGNAL = 1.1; EXPRESSED IN BRAIN, SIGNAL = 1.4; NT HIT: gi13646748, EVALUE 2.00e-43; EST_HUMAN HIT: BI912541.1, EVALUE 3.00e-43; SWISSPROT HIT: P57057, EVALUE 9.00e-11
tggaggtgctaaagccagaccagagacaggatgtctttatgggagcgaagtcatatttaactctgttgcatgtttacacacacctgctgactccacatttggaggagacgcctgactgctctctctttcagggcgtgatagagttctcactgtgtctgctgtttgccaagctggtcagctatactttcctcttctggctgcccctgtacatcacgaatgtgggtgagtatccacgctagaacacattaaattccgcacagtgactggggtccgaagtctcttctgtctgctggtttctagagtattgaaaacacaaggtcatgaagggtgatttgagaggtacacctttgaataaagtactatgatgaaacataggctaaaagaattcagatatgcacattgtattgccataatggtaaactttatggggcttcacggttgacacgttctatcccagctagggctaccagttcatgaggtacttcctgttctggggcagcctgcgtttaaacgtgggctacactgaactttggatcatagcagccagtgagcagaagcagagcctt

SEQ ID NO: 871 - DNA, 569 bp, Homo sapiens
  MAP TO AL138748.1; EXPRESSED IN BRAIN, SIGNAL = 0.77; EXPRESSED IN HELA, SIGNAL = 0.59; EXPRESSED IN LUNG, SIGNAL = 1.2; EXPRESSED IN ADULT LIVER, SIGNAL = 1.4; EXPRESSED IN FETAL LIVER, SIGNAL = 0.93; EXPRESSED IN BONE MARROW, SIGNAL = 0.93; EXPRESSED IN PLACENTA, SIGNAL = 1.2; EST_HUMAN HIT: BG010107.1, EVALUE 3.00e-03; SWISSPROT HIT: O43583, EVALUE 8.20e-01
cagctgaaagtgtgctctgcagcaataaagctttaagcttttttctgacattctaattttgctatttttcctattaatgaaaatagagtttaattttcccttccaagacaaaggaagggttaaatttaaggaaccatgaatattctgaagtagaggatagggagaaaggaagagggaatcagcagtccttaaccctttgatctgtcatttctgtcctctcatctgtgtccccattcttgtttctgtttgtcttcttccttcccagggttgtcagtgaatgtagcaatgcctgactggcactggactgtgttaattgcttgcagaagtgtgctggctgtgggtacgttcttctgtgttcacattttgcaaggagcggaggatggtgatgatgctgttgataacttactatgtgctaggcattgcttcaaatactttcatttctatgttacaggtaaagaaaatgagttttagagtaacttctgtaaaattactgactgaggtcatgctgctagtaaaaggcacaactacaatttgaatccagatttgtctggtgccaaaggcttgattaa

SEQ ID NO: 872 - DNA, 577 bp, Homo sapiens
  MAP TO AC008432.2; EXPRESSED IN BONE MARROW, SIGNAL = 2.1; EXPRESSED IN BRAIN, SIGNAL = 1.8; EXPRESSED IN ADULT LIVER, SIGNAL = 2.3; EXPRESSED IN FETAL LIVER, SIGNAL = 1.6; EXPRESSED IN LUNG, SIGNAL = 2.7; NT HIT: AL163246.2, EVALUE 9.00e-03; SWISSPROT HIT: P87671, EVALUE 7.30e+00
ccaatcattcaccaaatcccatcttctctccctcctccctctctctccacaacttattcctaccatcaccactgctcctcccttgttctggtcaccagcatctctagccttgaccatttcagcagcctttgcagactccagtctttctgctcccatactgaactttgattagtgtttttaaaatgcaaacttaattaaatcaccttcactgcttaaaccactttgaggataccccacagatgtcagaaaaaatcaaaattacattaaatgatacaagagttcttcattctctgcctgtctctgcagctttatctcccaacattcttcttcatattcaaggccagactgaataccaaggtctcccatctctggcctttggcaagctgtcttctcactgcccagaatgaccttaccctcactcattttcttatgtctggattattactgtttattctttttaatttagttttagatgtcatctcctctgggaaggactctctgacccttcataagacagacagagagatagatcccacacatatacttaacagctattccacctggatactcctccagc

SEQ ID NO: 873 - DNA, 588 bp, Homo sapiens
  MAP TO AL137070.3; EXPRESSED IN PLACENTA, SIGNAL = 0.81; EXPRESSED IN LUNG, SIGNAL = 0.94; EXPRESSED IN ADULT LIVER, SIGNAL = 1.2; EXPRESSED IN BRAIN, SIGNAL = 0.55; EXPRESSED IN HELA, SIGNAL = 0.65; EXPRESSED IN FETAL LIVER, SIGNAL = 0.72; SWISSPROT HIT: O14520, EVALUE 2.00e-43; NT HIT: gi14720872, EVALUE 0.00e+00; EST_HUMAN HIT: AI732264.1, EVALUE 0.00e+00
tggagctcctgtgtgttgaggggtggggggtgatgtgaggggcagcacaggagggtcctgcagagcccccaggtggcctggggagcaggagtgagtcccaacatttccccaggccagtacagatacagatcctgcacctgcactgagtatcaaccctgtccctgaatcgggctgaggctgaccagggccctgggttgggggtgtttcctggggtagcctggggatgactcctctgctcaaccagtcttcgcccaaggtggatgagggtgctgtcctgggcatcagccccctcagcaggcctctgcctcttgcctgcagcgatggggagaactggtggtgggtgccagtggtggcaccacttctgggtgcctctctaggtggcatcatctacctggtcttcattggctccaccatcccacgggagcccctgaaattggaggactctgtggcgtatgaagaccacgggataaccgtattgcccaagatgggatctcatgaacccatgatctctcccctcaccctcatctccgtgagccttgccaacagatcttcagtccactctgccccacccttacatgaatccatggc

SEQ ID NO: 874 - DNA, 594 bp, Homo sapiens
  MAP TO AC021252.3; EXPRESSED IN BONE MARROW, SIGNAL = 1.1; EXPRESSED IN LUNG, SIGNAL = 1.2; EXPRESSED IN PLACENTA, SIGNAL = 0.87; EXPRESSED IN BRAIN, SIGNAL = 0.69; EXPRESSED IN HELA, SIGNAL = 0.61; EST_HUMAN HIT: BI915864.1, EVALUE 4.00e-58; SWISSPROT HIT: O04164, EVALUE 1.50e+00; NT HIT: gi16159905, EVALUE 3.00e-58
agttcaaattgccaaccgtcaattaagaaagcaccaattaagactttctcaaaacatgaacaaactgacctacaaatctcctatactgcaggatgtcttttcatgcattctgaatgcttcccagtgtctagaatatcttataaagccaagtggtgtttcttccaagctgatagaaatacttccttacgcaagagggcagccatgttttctattggtgtaactgtgcctgcaagtcacacagacccatctgggaaagttctgtgctgagcagaaaggtgtagggggttagagggtggggggatggcttacttggagcagtcttcacaagcaatattccctgtagtctccttgatggtgcgctcagagacgaatgctggatattcagtatcacaaggctccagggtctgtttcaatttctgggctgtagggatagtgggaaaaaaaaaggtaaagaatgcaaggcacaggctcaaaattgtgactggcagcccacagcaacccagaacacagttccgcttctgctgctctgtgatttttctagcacagcataatgcattattttctaattagtcaagtgatttcatctgccaagca

SEQ ID NO: 875 - DNA, 595 bp, Homo sapiens
  MAP TO AC021635.3; EXPRESSED IN LUNG, SIGNAL = 0.56; EXPRESSED IN BONE MARROW, SIGNAL = 0.53; EXPRESSED IN PLACENTA, SIGNAL = 0.64; EXPRESSED IN BRAIN, SIGNAL = 0.49; EST_HUMAN HIT: W92815.1, EVALUE 5.40e-02; SWISSPROT HIT: P13590, EVALUE 3.00e-01; NT HIT: U43713.1, EVALUE 8.90e+00
tttggttctttccatgctccaaaagaaaagtaaaataatcaacattacagctcctccgattctcttttatgcaaggaattggcctaaaaccaagtcaatgagaagttaactagcacctgggcatcatttcacagtgtttcttaattctgtctggtgttaagaatcccaccctagacctacagaatcacaacccacagcgggagtcagtatgtttaacaagcacttcaggtgattgttgttattagtcaagtgtgagagacactggaggagaaattactattaactcctcttttcagtgaaggatgctgtggctctgagtggtggttaaattaactgccccccaatcacatggctaagaaatggcaaagtcatggcctacaaatattacctttctccttccgcacagcatctctccaggccccaccacagctcctgccttctccttcagagcctctggtacagccgtagcaaatgctggtggcaggcacacatccctctgtggcccacggtcaccaccgcctgtggttgctgggctttctccccaccctgcaggttccacagccatgcctgagatggctaccaccgtgctgtcttt

SEQ ID NO: 876 - DNA, 599 bp, Homo sapiens
  MAP TO AC011225.5; EXPRESSED IN LUNG, SIGNAL = 1.4; EXPRESSED IN PLACENTA, SIGNAL = 1.2; EXPRESSED IN BONE MARROW, SIGNAL = 1.2; EXPRESSED IN BRAIN, SIGNAL =   1; EXPRESSED IN HELA, SIGNAL = 0.6; EXPRESSED IN FETAL LIVER, SIGNAL = 1.3; NT HIT: AL163202.2, EVALUE 9.00e-03; EST_HUMAN HIT: BF831354.1, EVALUE 1.00e-05; SWISSPROT HIT: P05707, EVALUE 2.60e+00
caagaagaacccattgggagattacagtaaaaatatatatgcatgatggtgaggtgtatcaagtaaggattgtaaaaacactgttatatgcatagttgacctaaagaggagaagctgaggccacattaatgtaagtagagaatttatctgggccaagcttaagaattgactgagggagcatggattcaaattgccgtgagtatactaattttgcctcagcttctcccttttaggttgacactatcatatgatctaggtctgcctttcctgtaaaacagagaagtcaagtatgttaagcccaagttttctagacctcattaatctgaagaaaatgtatccataaaatgtctaattcagaacccctgtcaagtaaaagattgaaaaaccatacctacctctctcattttcatatccttccgtctctcttcactgattatctcacaggtcccacgcacagcgagtagagcatgctgcaggaccaagagtcttgaagagagcaagatatgcaagtgtcaaatcgtgcaatgttaaaaatcatccttggggaccaaattgaatcatcattctggcccagacaaagtcagcacagcacacctcat

SEQ ID NO: 877 - DNA, 570 bp, Homo sapiens
  MAP TO CHR22_169.0; EXPRESSED IN LUNG, SIGNAL = 1.9; EXPRESSED IN ADULT LIVER, SIGNAL = 1.9; EXPRESSED IN BONE MARROW, SIGNAL = 1.7; EXPRESSED IN BRAIN, SIGNAL = 2.1; EXPRESSED IN FETAL LIVER, SIGNAL = 1.8; NT HIT: gi13376440, EVALUE 0.00e+00; EST_HUMAN HIT: BG421975.1, EVALUE 0.00e+00; SWISSPROT HIT: P22855, EVALUE 4.20e+00
gtttcagggtgggtgacaaccttgcagacggtgaggtctgaggagcccacaggttggggaagggcagagacctgctcaccggtggggaggtatctatagtagtagatgacaggatgaagaaagttagactgccaggcatcttctgtgtgccccacagaccggtcatcaaagaagacgtccttgtcggggccagagaaatttctgccatattccatgttgatgacgaagagcccgtgctttgccttcctccctgtgagtgtctccagctgggccagcatctgtatggggaactcctccaggtactcaaaggccgtggaattcctgggagaacagcaacgcgggggaggccctcagtgctgtggcagaggtgaggggtgcagcccgggggtgagcatgtgtgtgtgcgtgtgtatctccccctctaaggagcgtcaatcaagcagcacacccctcacttaacattactttttcagctcagctctcacgcacatgtggggtagagaccagaaaattccatgtaacctgaatgggatatctggggaaagagtgtcccaggcagagagaacagtc

SEQ ID NO: 878 - DNA, 534 bp, Homo sapiens
  MAP TO AL136311.2; EXPRESSED IN PLACENTA, SIGNAL = 0.41; EXPRESSED IN BRAIN, SIGNAL = 0.55; EXPRESSED IN HELA, SIGNAL = 0.67; EXPRESSED IN FETAL LIVER, SIGNAL = 0.41; NT HIT: gi11419034, EVALUE 1.00e-120; EST_HUMAN HIT: AW068195.1, EVALUE 1.00e-118; SWISSPROT HIT: Q9ULC3, EVALUE 4.00e-23
agttgccacacctcgaaatccactgcaatcagttaactattactccaatgagtcttggatatagttcacaaatcaaagccaaaggaataaaatggccaagtacttactgaatttgtcgctccaaaaaatcaactccaatggttttcttgtagtcttttgtaaaaatgcctttgcaatatcgctgaatcatacttgattttccaactgctccattccctacaaccaccatctttatggcgacttccatatcttcctccaacatttttggagctgaaatggtttctgtaccaactctaattctaggagatcagatcttccctctcaaatctgtggtttaaaatgaaattattttttcataacacaaaaatgtacaaaataaactaattgttttatcaagaaattatcacattgcattgcaaggatgtgttttcataactgaggtccctcccactctctttagataatgtaaactctttgaaaggtacagcaataacaattcatttttgaatgaatcctcatcaatagcgcaatgca

SEQ ID NO: 879 - DNA, 528 bp, Homo sapiens
  MAP TO CHR22_117.0; EXPRESSED IN BONE MARROW, SIGNAL = 0.59; EXPRESSED IN BRAIN, SIGNAL = 0.73; EXPRESSED IN FETAL LIVER, SIGNAL = 0.52; NT HIT: M25320.1, EVALUE 1.30e-01; EST_HUMAN HIT: BG338939.1, EVALUE 1.90e-01; SWISSPROT HIT: O33565, EVALUE 2.20e+00
ctgagaacactccaggagcccaggcacttcctgcaaaaaggaaatatgtgatcttcaggacacgctaccttgtcctctcttccatgttccgttagcaccagaagcaaaccagagcccggccaatgctgccgaagtctcctacctcactgaaactcgcctggatatgtgcgtccacacaggggaacagacacagacatcagaagcacttgctgcatctgtcctcactgcagcccaagcaggaatggaaagtggcaaggttctcttttgaatcatgtttttttcaaaggtttagttttccttgaaattcaaaaatcttgtcttttaaaacatgagggctttcagagatgggttcactggttcatgttatgggaaatgtctccagagggactggttgctgtacctatctgcactttcaaaagtcactaatttagtgtcaggtatgtttgtagagcacaggctctaatacagtatatgtggaagggtgcgttctgtaaccaagagagaaaatgggagaaaatgggaaagtcc

SEQ ID NO: 880 - DNA, 548 bp, Homo sapiens
  MAP TO AC017082.3; EXPRESSED IN BONE MARROW, SIGNAL = 1.4; EXPRESSED IN ADULT LIVER, SIGNAL = 1.1; EXPRESSED IN LUNG, SIGNAL = 1.5; EXPRESSED IN BRAIN, SIGNAL = 1.4; EXPRESSED IN FETAL LIVER, SIGNAL =   1; SWISSPROT HIT: O70338, EVALUE 6.00e-03; NT HIT: AL163246.2, EVALUE 0.00e+00; EST_HUMAN HIT: AL079752.1, EVALUE 1.00e-118
gaatggtgccatatcgaaggctcagtgttggtttatgctgctggcaaattgggcactcaggagtggccgtagccatgtcagttttggtgagtggaagtccacgttgctgagcccatgcgtaacctccatccctgccacaatggccactgtggtcatgggcccattgggcaatgacaggggtggctggggaaaaaggatgagtggtgtccacagaacaggtcatcctatccacttgattatttaaatcctcctttgctgaggtcacccgttggtgagcactcatataggatacaaatatcttcacagtttttgactactcagagagttccatccacatacctcatcgccaaattttttggtcaccaattttccaatcgtgcttcttccacatccctgaccaaccggccaaaccattggctacagcccatgaatcagtatgtaatcacacatctggccatttctccttccatgcaaagtgcacaaccaggcacagtgcttgaaattctgcccactgggaagacttcccttcaccactgtccttcagggat

SEQ ID NO: 881 - DNA, 569 bp, Homo sapiens
  MAP TO AL133492.1; EXPRESSED IN BONE MARROW, SIGNAL = 3.4; EXPRESSED IN PLACENTA, SIGNAL =   3; EXPRESSED IN LUNG, SIGNAL = 3.7; EXPRESSED IN BRAIN, SIGNAL = 3.6; EXPRESSED IN ADULT LIVER, SIGNAL = 3.5; EXPRESSED IN FETAL LIVER, SIGNAL = 2.8; SWISSPROT HIT: P39738, EVALUE 7.10e+00; NT HIT: AL163303.2, EVALUE 0.00e+00; EST_HUMAN HIT: AL521707.1, EVALUE 1.00e-107
gatagttgctgaaggctggggtggctatggcaatttctgaaaataagacaacactaaagtttgccacatcaatggactcttcctttcacgaaagttttctctgtagcatgtgatgctgtttgatagcctttcaccacggtataacttctttcaaaattggagtcagtcctctcaaaccctgctgctgctttagcaactaagcttatgtaatattaatattctaaaccctttgttgtcatctcaacaatgttcacagcatcttcactactagtagactgcatctcaagtaaccacttttctgcttctcatccataagaagcaactccttatccattcaagtttgatcatgagattgcagcaattcagtcacatcttcaggctccacttctaattctagttctcttgctgttttcaccacatctgcagtgacttccttcaataaaggatggaaccccttaaaggcatccgtgagggttggaatcaacttcttccaaactctgttgatgttgtgacctcctcccatgagtcacaaatgttcttaatgacatcgagaacggtgaatgcctctc

SEQ ID NO: 882 - DNA, 528 bp, Homo sapiens
  MAP TO AL137062.3; EXPRESSED IN HEART, SIGNAL = 2.7; EXPRESSED IN ADULT LIVER, SIGNAL = 4.1; EXPRESSED IN BRAIN, SIGNAL =   3; EXPRESSED IN PLACENTA, SIGNAL = 3.4; EXPRESSED IN LUNG, SIGNAL = 3.3; EXPRESSED IN BONE MARROW, SIGNAL = 2.9; SWISSPROT HIT: P24721, EVALUE 2.00e-06; NT HIT: gi7706060, EVALUE 3.00e-82; EST_HUMAN HIT: BI463516.1, EVALUE 5.00e-82
cttcatctctccaacccctggagcatttctctgatggcaactgaagggagtttgagatctgcagaaaacattgaatgtggagaaaatgtaagcccaatttagaaaaaatacaccattcctgtgcttggtttctccagaaggtcataaatgcagcccctgtgacacaaactggagatattatggagatagctgctatgggttcttcaggcacaacttaacatgggaagagagtaagcagtactgcactgacatgaatgctactctcctgaagattgacaaccggaacattgtggtaagaagattcttatgtcaaatattttggaggcaagggagagaaacctcaaatgtaacacttgacctttttttgttttttacatttttcttaacatctttcagtttgtactaatctaagacccttgtgaaacctagtaagaattacagaacccagatattcaatccactcataatattctacaacactgatagagttgatcagtcaaattgacttgtcccttcctgacagctcag

SEQ ID NO: 883 - DNA, 589 bp, Homo sapiens
  MAP TO CHR22_185_2.0; EXPRESSED IN FETAL LIVER, SIGNAL = 0.74; EXPRESSED IN LUNG, SIGNAL = 0.79; EXPRESSED IN PLACENTA, SIGNAL = 0.7; EXPRESSED IN ADULT LIVER, SIGNAL = 0.98; EXPRESSED IN BONE MARROW, SIGNAL = 0.68; EXPRESSED IN BRAIN, SIGNAL =   1; EST_HUMAN HIT: BI551734.1, EVALUE 1.00e-125; SWISSPROT HIT: Q99798, EVALUE 2.00e-40; NT HIT: gi4501866, EVALUE 1.00e-123
cagatggtcacagtggatggtggatggcatggtcaccttgggagcctgctgctgatgaactgcagcatggccatctgggccgtccatcctgcatggtcacgctgtccggccactgctgcaggtacgtcccgccccgctcaatttcctggctggtggggtcatccgggtgtctgtacacgatcttctctgagagggtcagaggccggttcaatcatttgcaaacaatgttaatgttcttctctagcaggtcatagtggatgtacttaggctcaaagggtctcatcgccaccttggcccgttggcacaggactgatgccacatggtactgccgcacacccagagctttctgcagccaagtaaccagtaggctgtagggcaccattttgtgcaaagatcgggtcacattgacaaagacgggtcacgtctgtgtttgttttaaaagagaatatattgtatctacaaggtctggaaaatgcagtaagaaaatggggtgaagatgcttccagcatctggaagagggtaaatctctggaatcaggcactcagccagcactcactctgacttcatcacctctttcagctggatttgc

SEQ ID NO: 884 - DNA, 527 bp, Homo sapiens
  MAP TO CHR21_46.0; EXPRESSED IN HELA, SIGNAL = 0.81; EXPRESSED IN BRAIN, SIGNAL = 0.4; EST_HUMAN HIT: AA484400.1, EVALUE 2.00e-04; NT HIT: gi6978887, EVALUE 5.00e-01
ctgtttgcaaatggctatggccaataaccatgttcttaggactactttagaagccatgaattttaccttaaaaggttaatctcttagagatttttagattacatggctgaaagaattgccaaaaattttgctggtctgttttacatttttaattataccactatcaactctggcaccaaccactgttaacaccaatcatcaaccccgccaacaccaccatcaccactgccaccactaccagcacaaacattatccaaataatagcagcaacaccaatatcatcgttattgctaccattaccattatcagcactatgaatttcactgccaacaacattggattcatcggcaccactactgacaatgaaaaactcattaccaagagtaacaagtacttagtgagaatataaaggcttattttttccctcttctgccatgccatctccaaatgtgaataatttggtctttgtttcattacatcattaaaacatcgagtagtattgtaagacacaaggagtgccattgaaa

SEQ ID NO: 885 - DNA, 553 bp, Homo sapiens
  MAP TO AL136105.2; EXPRESSED IN HELA, SIGNAL = 0.62; EXPRESSED IN FETAL LIVER, SIGNAL = 0.52; EXPRESSED IN PLACENTA, SIGNAL = 0.63; EXPRESSED IN LUNG, SIGNAL = 0.69; EXPRESSED IN BONE MARROW, SIGNAL = 0.54; EXPRESSED IN ADULT LIVER, SIGNAL = 0.59; EXPRESSED IN BRAIN, SIGNAL = 0.35; NT HIT: gi11427260, EVALUE 4.00e-91; EST_HUMAN HIT: AU123888.1, EVALUE 6.00e-91; SWISSPROT HIT: Q9H583, EVALUE 4.00e-28
gtgacagctgaactgaagcgaccacccacctgttttggagatgttcacctggttcaaggtgtcagcaaaaggcttcactaagtggccggcaaacagagtaaaaagccctttcagcttttcagcaatgcaatctgccaagttgtaaaatgtcaacaacctgtcctttggggcatcttctgttttagcccaatcaaacagctgaaaggataagacagtattagtttcttcgacatcttgtcacttaaatctgagcacaaaagagaggaagaggaagaaagcgtcaccttgaagaacaggggcctgaatgtgacctcggaaagtttgacaaccatggctactagacagtcaatgatacaattttccgtttttccaacttcctccagatcgttctgaaaacagaagagcccatttattagagtgctgatacctgactgtaaattattttggcaagtaccactgttacacggctagattgttctcggactcttcaataggtggataacagctttaggatttggaggagtgaacctgagcttacctcagagtgctgggc

SEQ ID NO: 886 - DNA, 583 bp, Homo sapiens
  MAP TO AL137068.1; EXPRESSED IN HEART, SIGNAL = 1.3; EXPRESSED IN PLACENTA, SIGNAL = 1.5; EXPRESSED IN FETAL LIVER, SIGNAL =   1; EXPRESSED IN LUNG, SIGNAL = 1.6; EXPRESSED IN ADULT LIVER, SIGNAL = 1.9; EXPRESSED IN BONE MARROW, SIGNAL =   1; EXPRESSED IN BRAIN, SIGNAL = 1.3; EXPRESSED IN HELA, SIGNAL = 1.1; NT HIT: AF111168.2, EVALUE 9.00e-03; EST_HUMAN HIT: AI967942.1, EVALUE 3.00e-03; SWISSPROT HIT: Q06481, EVALUE 4.90e-01
tctaccctttggtttctggcttatggaagaagaagaaaaggaagaagaggaagaagaagaggaagaggaagaaggaggaggagagaaagagagaaaaagaaggaaagagagagaaggaaggagaaagaaggaagaaagaagaagaggaaggaaggaaggaaggaaggaaagaaaggaggaggagagaagggagaaaaaaagaactagcattttctcaatgccttctaggtgcctgagctggcattttaggcatgcactcgttgaatcttcacgaaaccctgtgaggtaggtgcttttatgatccccatagtatgccctgcaccattcagataaggagactgagactgaacaggtcaagtaattgctgaagctggatgagggatacagcagtctgtgcttttgtctggatctaaagtccttgctctaaaagaaggtacgagctcgtcggttgaaagggcttttaatcttttcattcattcattcattgatgaatgctctttatcgttttatggattttggaaagaaggcagctgggtgtagctgagaggaccccagcccatgtgctgagagacttgggctctgg

SEQ ID NO: 887 - DNA, 587 bp, Homo sapiens
  MAP TO AL136140.2; EXPRESSED IN BONE MARROW, SIGNAL =   2; EXPRESSED IN BRAIN, SIGNAL = 2.1; EXPRESSED IN HELA, SIGNAL = 1.2; EXPRESSED IN FETAL LIVER, SIGNAL =   2; EXPRESSED IN LUNG, SIGNAL = 2.5; EXPRESSED IN PLACENTA, SIGNAL = 2.3; EXPRESSED IN ADULT LIVER, SIGNAL = 2.7; NT HIT: gi14781889, EVALUE 5.60e-01; EST_HUMAN HIT: BF697659.1, EVALUE 2.10e-01
atgtgtcccagccagatttcagcaaatctggaattcagcagtgtctcaccccctcgctgtttacacccagagtcactggtttctaggcaggcacgaacccagaacaaagctggagcagccatcgatgtagcattttagaagcagcatagataactgaaaaagtgaattcctgtggccagtgactaatgataaaataataaaggtttatctttgacaaaaaatgtcaagaaatggtagagaatatgacaaaggcagatactgttggactaggatatactaaaaaaatagacaaaagataaatttcagagcgcgccaatggcttcatacctgctgtctgcctaagccttccagcctccagagattttctctttgctacattcttcttgctgatacagggatagggactaataagttccatcaggattttcatccctaagattttaagcaaacaaacaaaaagatttcttgttagccaaccaattaatctgaaaagccaatcaaacaaagcactttaaatttgagaggtactcaatgactagtctacagtagtgcaataaaatcactttagggtcctgaagctgtgtttt

SEQ ID NO: 888 - DNA, 554 bp, Homo sapiens
  MAP TO AL137918.1; EXPRESSED IN FETAL LIVER, SIGNAL = 0.93; EXPRESSED IN LUNG, SIGNAL = 1.2; EXPRESSED IN PLACENTA, SIGNAL = 1.3; EXPRESSED IN BONE MARROW, SIGNAL = 0.94; EXPRESSED IN BRAIN, SIGNAL = 0.95; EXPRESSED IN HELA, SIGNAL = 0.62; NT HIT: gi14861873, EVALUE 1.30e-01; SWISSPROT HIT: P16812, EVALUE 3.10e+00; EST_HUMAN HIT: BF755396.1, EVALUE 2.00e-04
ctgcttccctcttccacttgcatagactcgtaattatattggtcccacctggacaacccagcatgctttccctatttaaaggccagttgattagcaagtttaattacccattgtcatgtaacctaacatattcatgggtcctggggattaggatgtgaacatcttgaggggatgtggggcactattcggcctactagaaccatttaaaaattattacagtgatccagatgagagccagaaggatggcaatggccaaagggaaggggtggagaaggcagttccaacagatgttaaggttgaaacttctaggatttggtggtggtcagatatggaaagtgacttgcagcctagctgccaggtgacagctgtgacccctcacagagaccggaacacatgcaaaggaccaggtgagagagggagataatgtgatacacatgcagaaccagaggtgctcatgggatgtctgggtacacacggctctgtgaacaagtggtctggagggaggactggctggagaaaaagaaataagagacagcggcataaaactcatggat

SEQ ID NO: 889 - DNA, 594 bp, Homo sapiens
  MAP TO CHR21_63.0; EXPRESSED IN BRAIN, SIGNAL = 1.8; EXPRESSED IN LUNG, SIGNAL =   1; EXPRESSED IN PLACENTA, SIGNAL = 1.1; EXPRESSED IN ADULT LIVER, SIGNAL = 1.5; EXPRESSED IN HELA, SIGNAL = 4.3; EXPRESSED IN BONE MARROW, SIGNAL =   2; EXPRESSED IN HEART, SIGNAL = 1.4; SWISSPROT HIT: P57078, EVALUE 6.00e-44; EST_HUMAN HIT: BG033582.1, EVALUE 0.00e+00; NT HIT: gi14780521, EVALUE 0.00e+00
tgttcaccaagctaccctccagctacatggcgtgtggttttcataccaaccaggacaagcttaggctcctggagtcctcatgctgcaaaaggcctcggtttcaagctctttcctccaagaagaaccacctcctcttctgcccttgtcctgacctcagggcttgaccccttgataccctgctccccaagacacaggccctccctgcccagctctctcgggcaccgtgcggccccccaccttgacgtggtagtgggcatccagcaggatgttcgcgggcttgaggtccaggtgcaggagtggcggggccatgcagtgcaggaagttcatgcccaccgccgtctcgtggatgattcggaaccggagatcccatggcaatggctccgaagccagcagcttttccagggagcccgtctccatgtactccatgaccaggccgacaggttcgcggcagatgccatacacaggcaggatgtagcgaaacttggccatctccatcttcttggcttcttccaaaagctccatgcgctccctgaaaaagttcaaaggcatgaagaatacgcaatggtcactcagccacaaacatggaacagcacc

SEQ ID NO: 890 - DNA, 514 bp, Homo sapiens
  MAP TO AL136103.2; EXPRESSED IN LUNG, SIGNAL = 0.83; EXPRESSED IN BRAIN, SIGNAL = 0.64; EXPRESSED IN PLACENTA, SIGNAL = 0.83; EXPRESSED IN ADULT LIVER, SIGNAL = 0.84; EXPRESSED IN FETAL LIVER, SIGNAL = 0.89; EXPRESSED IN BONE MARROW, SIGNAL = 0.84; NT HIT: AF334400.1, EVALUE 3.00e-05; SWISSPROT HIT: Q01484, EVALUE 7.20e-01; EST_HUMAN HIT: AL041144.1, EVALUE 1.80e-01
gatggtcgcacaacactttgaatatcattaatgccactgaattttatgcttacaagtttaaatggtaaattttttatatatatttttaccacaattttaaaagttgtagtgtaatatgtcaaaaattgttgaattatataatttgaatgggcaaacaatatagtatgtgaattatacctcaaaatagctgtttaaaaaaaacaaaaaaaaattacgtgcataaagttaaggatattcttgctgagaaaggaagctgcatatggtgacctgtggaaattcatctcaactgtgggaatgccattctttatcatggcatctggtctatcatgccccaaagagtccctatagaaggaggcatgactatcttgggtctatctaagggaggttagttacaatttgaatttatcagcactcttgataatgtgtccctcctgtatcattttcccataagatctacctgggaaactctagcctatattaattggatcatcacccagagattgaatgttctccg

SEQ ID NO: 891 - DNA, 501 bp, Homo sapiens
  MAP TO CHR22_73.0; EXPRESSED IN BONE MARROW, SIGNAL = 0.72; EXPRESSED IN LUNG, SIGNAL = 0.69; EXPRESSED IN ADULT LIVER, SIGNAL = 0.84; EXPRESSED IN BRAIN, SIGNAL = 0.81; EXPRESSED IN HELA, SIGNAL = 6.2; EXPRESSED IN FETAL LIVER, SIGNAL = 0.88; NT HIT: gi7705430, EVALUE 1.00e-109; SWISSPROT HIT: Q01033, EVALUE 1.20e+00; EST_HUMAN HIT: W89213.1, EVALUE 0.00e+00
tacatcaggcaattggcatcactagtgccagtttatttttagatataaatgtatgtctgtttgaaaaataaactttacatccaaaagagaatgacttggcaatgaagtaaaactggatctaatggtaaaggctcagcccacccttcctagatggataaaatccattttctctagccctggttcgaatgtgtcccatcacttgtgagtccagactggcaacaaaaggtgctgatctaaaagaagttatcgtccagtggcagggtctggggaaggggcggcaggcgccatgtccagccacgaaggtggcaagaagaaggcactgaaacagcccaagaagcaggccaaggagatggacgaggaagagaaggctttcaagcagaaacaaaaagaggagcagaagaaactcgaggtgctaaaagcgaaggtcgtggggaaggggcctctggccacaggtggaattaagaaatctggcaaaaaataagctgttccttgtgcctaagg

SEQ ID NO: 892 - DNA, 555 bp, Homo sapiens
  MAP TO CHR22_180.0; EXPRESSED IN BRAIN, SIGNAL = 0.66; EXPRESSED IN HELA, SIGNAL = 0.81; NT HIT: U25826.1, EVALUE 5.00e-04; SWISSPROT HIT: P29836, EVALUE 3.10e+00; EST_HUMAN HIT: BE268889.1, EVALUE 1.00e-05
ccacatttatctgcagcacgtttatactcaaccatcaggattccagagccggcctgggctgggccaagcgtgcaccctggggacagcgtggctctcaatttcagagcagctctgtggatccacggagcccaggctccatttctgcctcagcctggcctgaccccatagccagccccacccctgaggcggcgccacacagagaagctgtcactactcatccctgcctcagtcagcctcagtcctgcactgcctacccgccccctccactgtccccacaccccacccagtccacctgcccgaaagcctcctggcccttgacttcctgacaccttcttagtttgcacagagaggttaagtaacttgtccagggctgcacagctgagaagcagagcctggaggggacagtggcagcctgactccagggtccctgctctcactcaggacaccctcttacctctgcatcatcagcattgctcagcattgtgtcatttgagaggcctggggccatctgttaggaagtgggggcaggtggggacaggaaagggttcaggatca

SEQ ID NO: 893 - DNA, 561 bp, Homo sapiens
  MAP TO AL137062.3; EXPRESSED IN HELA, SIGNAL = 2.9; EXPRESSED IN HEART, SIGNAL = 4.4; EXPRESSED IN BRAIN, SIGNAL = 5.5; EXPRESSED IN PLACENTA, SIGNAL = 6.4; EXPRESSED IN LUNG, SIGNAL = 5.5; EXPRESSED IN ADULT LIVER, SIGNAL = 5.5; EXPRESSED IN FETAL LIVER, SIGNAL = 5.9; EXPRESSED IN BONE MARROW, SIGNAL =   5; EST_HUMAN HIT: R59615.1, EVALUE 7.90e-01; NT HIT: gi15791399, EVALUE 8.30e+00
cctcatggctctgaaaatgcagactttttattgttgatgctttcatgaatctaaataatctaacagacaatttatgaccatttttatattccttattatgatcaatgttaagatgttaaaaatattctaagataattctcttcctagaagaataatgaaattttaaatgcggtgatggggagcagtattcctacctttagatttctgcttcgatttacaacgattcttgaaactcagcgtcatatacccatcttcattctccatctcttcaaatgtctaatgtcttattatccagaaaatagtacaaagaaaatggaaactaatctcaaccttggatatgtctctttggcacaaggtactaaaagaaaactaaaaggaaggccaaaaatagtcaaaatttactcagacacagatgtctaaaaccacacaggatgtgttggtaaatgaaaatggatataagcttgttaatatctggctacaattctgtgaatttcaaggtaaaggtagctagtgtgttccactgttttcaacaaatggacttgtgtgttcctgccacttgtg

SEQ ID NO: 894 - DNA, 573 bp, Homo sapiens
  MAP TO AL136084.2; EXPRESSED IN BRAIN, SIGNAL =   6; EXPRESSED IN HEART, SIGNAL = 5.2; EXPRESSED IN LUNG, SIGNAL = 7.2; EXPRESSED IN HELA, SIGNAL = 3.5; EXPRESSED IN FETAL LIVER, SIGNAL = 6.3; EXPRESSED IN ADULT LIVER, SIGNAL = 7.2; EXPRESSED IN PLACENTA, SIGNAL = 6.9; EXPRESSED IN BONE MARROW, SIGNAL = 6.6; SWISSPROT HIT: O43194, EVALUE 9.60e-02; EST_HUMAN HIT: BF900049.1, EVALUE 3.00e-03; NT HIT: AL163204.2, EVALUE 3.50e-02
ggaaaaggcaaagaagagggcaatctagaggtcaaaagaaacttaagagacatattatcagttggaatacacagacattatttcaatcctgagccaaacaagtgaattctaatgacaacatttaagaaacattgggagacatttgaactcggggcttttgttgctattaaggaattattgtttattttgttaaagatggtaatggtattgtggttatttctccaagttctcatctttaagattgatgcagaaatgtttgtggttcaaatggtagatctaggactgcttcaaacaacaaggagggcaggagcatgtggggccagatggaatgagaggagaggtggctgccaaagctgggggtattgggggatggtgctgttacactgttcccttccatatttctttgaaagtttctgtaagtaaaaggtggttttgtttgcttttcaaagtcctttcaggttgtttaatgaagggacaagccaggcggtgctgtggagcgatgatgccaatggtggcgttgaaggatggataaggagcctggaaacaaggaaggcctgagtggcagggtcttag

SEQ ID NO: 895 - DNA, 551 bp, Homo sapiens
  MAP TO CHR21_65.0; EXPRESSED IN HELA, SIGNAL = 4.3; EXPRESSED IN BRAIN, SIGNAL = 1.5; EXPRESSED IN HEART, SIGNAL = 1.3; EXPRESSED IN LUNG, SIGNAL = 0.72; EXPRESSED IN BONE MARROW, SIGNAL = 1.7; EXPRESSED IN PLACENTA, SIGNAL = 0.88; EXPRESSED IN ADULT LIVER, SIGNAL = 0.96; SWISSPROT HIT: P15941, EVALUE 4.00e-08; NT HIT: AB029015.1, EVALUE 2.10e+00
ctccatgcagctctctttccctggctcggaatcgctgcaggcgccacagaccagacgcgcactgttccccactcctgcttatcggccgcgcggcatccccttgtcgcagcactccagcatccatgcagccgcgcggcaccccgtcttcggagcactccagaatccatgcagagcgcagcaccccacatccagagcgctccagaatccatgaagcacgcggcaccccctcgtcagagtgctccagaatccatgaagtgcgcagcaccccttaatcggagcgctctagaacccgtgcagcgagcagcaccccacacccggagcgctccagaatccatgaagccagcagcaccccacacccggagtgctccagaatccacgcagcacgtggcatctcctcgtcatagcgttctagaatccatgcagcgagcagtaccccacaccgggagcgctccagaatccacgcagcgtctggcacatctttatcagagcgctccagagtccatgcagccacagtcctccaacggaccctgagattgtttctgcaaaaggcc

SEQ ID NO: 896 - DNA, 587 bp, Homo sapiens
  MAP TO AL035367.1; EXPRESSED IN LUNG, SIGNAL = 0.98; EXPRESSED IN BONE MARROW, SIGNAL = 0.89; EXPRESSED IN PLACENTA, SIGNAL =   1; EXPRESSED IN ADULT LIVER, SIGNAL =  15; EXPRESSED IN HELA, SIGNAL = 1.3; EXPRESSED IN BRAIN, SIGNAL = 0.7; EXPRESSED IN FETAL LIVER, SIGNAL =   2; NT HIT: gi16165561, EVALUE 0.00e+00; SWISSPROT HIT: P34896, EVALUE 1.00e-19; EST_HUMAN HIT: AW963072.1, EVALUE 0.00e+00
aggacatctgtccaagggtgggtgcatctcagagtaattgaggtaagcatggagaccttgtgccctgccacactccccagctgggggacattctgacatttgtgcctcggcccccagccattgtaccccctttggtgtgtagtgtggggtgactcatttgtgtcttgtggcacagggatagagctgaccctgcagatccagagcgacactggtgtcagagccaccctgaaagagttcaaggagagactggcaggggataagtaccaggcggccgtgcaggctctccgggaggaggttgagacttcgcctctctcttccctctgcctggcctgcctgacttctaaaggagcgggcccactctggacccacctggcgccacagaggaagctgcctgccggaggacccccacctgagagatggatgagctgctccaaaggggaactgttgacactcgggccctttgagggggtttcttttggacttttttcatgttttcttcacaaatcaaaatttgtttaagtctcattgttagtaattctgggacaggttattaaaggatttaaatttgaacctggctttctcacagc

SEQ ID NO: 897 - DNA, 527 bp, Homo sapiens
  MAP TO CHR21_67.0; EXPRESSED IN FETAL LIVER, SIGNAL = 1.7; EXPRESSED IN HEART, SIGNAL = 1.3; EXPRESSED IN LUNG, SIGNAL = 0.82; EXPRESSED IN PLACENTA, SIGNAL = 0.86; EXPRESSED IN BONE MARROW, SIGNAL = 1.9; EXPRESSED IN HELA, SIGNAL = 4.4; EXPRESSED IN BRAIN, SIGNAL = 1.6; SWISSPROT HIT: P21483, EVALUE 5.70e-01; NT HIT: AF196779.1, EVALUE 8.00e-03; EST_HUMAN HIT: BG005471.1, EVALUE 3.00e-03
cagaaatgggaggaccagagggaaagccacttctcagagaagagtaacaggttcaactttggtccaataatcacaatttagagctgacagcagcttcagaggccatgtgacagataaggaaactaaggccccaaaagcagccgtggagaccagacccaggggttccggccacggctctgtgccttttgtaaaggcagcctatgtctgcactcacctgtgctctggcccaggccggccctgcacttcgattgccgggagccctgcacgcggaactgtgtctgcagaagctccttttggcacctgggagggcacctctcatcagtactccaggacctcggccatcgccacggaccgcagggtgaacgctgggtgggctgtaccatggcctcggccaccgcctgcagatccaggctccctgcagcctgctgggctggtggcctcaggggaccggtgagctgcgtctgcctgggctcccgaaaggccgctcccagattttgattttgctttgttacctagaacccaggccc

SEQ ID NO: 898 - DNA, 539 bp, Homo sapiens
  MAP TO AL136366.3; EXPRESSED IN FETAL LIVER, SIGNAL = 4.2; EXPRESSED IN PLACENTA, SIGNAL = 4.1; EXPRESSED IN ADULT LIVER, SIGNAL = 4.3; EXPRESSED IN BONE MARROW, SIGNAL = 4.9; EXPRESSED IN BRAIN, SIGNAL = 3.9; EXPRESSED IN HELA, SIGNAL = 2.4; EXPRESSED IN HEART, SIGNAL =   3; EXPRESSED IN LUNG, SIGNAL = 4.4; SWISSPROT HIT: P24559, EVALUE 3.90e+00; NT HIT: U82973.1, EVALUE 5.10e-01; EST_HUMAN HIT: BF348421.1, EVALUE 7.60e-01
ggctggctcacttactcctgcatgccactgacgactgtctttctgatgttttaccaaatccctttccaaaaccccaagtatcagggtgttaatttttaaataatcctgggctcccttaattctctcccctagtctcttacaaattagcagatgaagagaatggagtagtggtaatgtctatgagcagtgggtaatgactaacagaagtttatccagttggataaatgtctagtggattgctgctggggtcagtgttagttctggtcttaattaacatcttcattaatagtgtgggagagggaataaacaatagctaatgatatttgcagatggtagtaaatttagaggtgttgctactaccagtgagagcagcaagagccatggggatatcagagatgtgaacaagaagtgattataatgatgtttgttctggaaaaggcagaatgaaatgtttaagggggaaacaacgggggaaattgggaaatgatcaaagaatcagccattcttttatcaaagaatcgccattctttgtaacctgg

SEQ ID NO: 899 - DNA, 510 bp, Homo sapiens
  MAP TO CHR22_139.0; EXPRESSED IN HELA, SIGNAL = 1.2; EXPRESSED IN FETAL LIVER, SIGNAL = 0.66; EXPRESSED IN LUNG, SIGNAL = 0.58; EXPRESSED IN ADULT LIVER, SIGNAL = 0.6; EXPRESSED IN BONE MARROW, SIGNAL = 0.59; EXPRESSED IN BRAIN, SIGNAL = 0.58; SWISSPROT HIT: Q10181, EVALUE 1.60e+00; NT HIT: gi14769644, EVALUE 1.90e+00
tatctgtggactgggaaggctctacttactcgatcctcttcccagggtcgttgtgaggatcaagtgcacagcttcctataaacactaaaacactataacatcttgtgagccaggtactattattattcctcagtgcaaagaaagaagccgaagtccaagggggataaatgctggggtcccactgtgggtgagccgcagagtgatcattggaagccaggtgctcccccttcacttcctgtgtgcggagcacgctcgccctgggagtttcactagaaagaaggttgccatgggccagtgggacagcttgtatctcaagtgcacgcggatgccccagaatcccaggatctcagctgagctgtttgtggattattagatctgacttaaaaggtagctaatccagacccttcctcatctgtaatacatggatgacagctcccagctgtagtgttatgagaattagtgcggtcatgagtaaggtgcccagttaaagcccgagaagtaaagcagctg

SEQ ID NO: 900 - DNA, 513 bp, Homo sapiens
  MAP TO AC015478.3; EXPRESSED IN FETAL LIVER, SIGNAL = 0.56; EXPRESSED IN PLACENTA, SIGNAL = 0.55; EXPRESSED IN LUNG, SIGNAL = 0.6; EXPRESSED IN ADULT LIVER, SIGNAL = 0.44; EXPRESSED IN BONE MARROW, SIGNAL = 0.55; EXPRESSED IN BRAIN, SIGNAL = 0.69; SWISSPROT HIT: P12978, EVALUE 2.20e-02
tgactcctgatccctgatccagcctaggcccagcccccacctcacctcccctcctgcagcccagctccacaccacagtctcacacggtgtgcgacaccccaccctgcaagtctacgctctgtccatccctcctcacacacagctgcacgtcgaagtcttcatgtgggcacactggcacagagaagaggccacgtgggtcctggggccggagtatcaggagctggggcaggcccttctaaacccgggacccccttactcaggcctcggggtgtgcagggtagatggattttaggacaggtggggcagagggaccagtaggagggcatgaggatgtctgggtcagaaaccaccagggtctgagacagggcaggggaggagggattccagaggggtaagacaggactggacggtgcccgaggtgtgaggagagggcgagtcggggatgcccgcttgtttctgattagggtgagcaggggctgcagggcacgaggctgaggagcagtttgatgggaa

SEQ ID NO: 901 - DNA, 578 bp, Homo sapiens
  MAP TO AL138722.2; EXPRESSED IN BONE MARROW, SIGNAL = 0.54; EXPRESSED IN LUNG, SIGNAL = 0.66; EXPRESSED IN BRAIN, SIGNAL = 0.44; EXPRESSED IN FETAL LIVER, SIGNAL = 0.48; NT HIT: gi13643675, EVALUE 0.00e+00; SWISSPROT HIT: Q9S5X1, EVALUE 3.20e+00; EST_HUMAN HIT: AL526738.1, EVALUE 0.00e+00
tggcaggttagatttgtcccatggactatagtttgcagtatctgtagttttagagtatcaagatttacaggatagaagtgatgagtgttaaaatctccctgtgtggttctgttttcaggaaggtacttgatatttttcatatgactatgacaagctaatagtacaccatttctcctttccttgtatgttataggtactgaaatttgatgcctatttccaagaagatgttcctatgtcaactgaggaacagtataggatccgtcaggtgaacatttactattatctagaagatgacagcatgtctgtcatagagcctgttgtagaaaattctggaatccttcaaggcaagttaataaaacgccagcggctagccaagaatgaccggggtgaccattaccattggaaagacctaaatcgaggaataaacatcacaatttatggcaaaactttccgcgttgttgactgtgaccaattcacacaggtatagcatatatttttgaaagttgtggggtctgaggcatcattctaatttatagaaggatacatttcatttattagggtaaggggaggacattggt

SEQ ID NO: 902 - DNA, 517 bp, Homo sapiens
  MAP TO CHR22_178.0; EXPRESSED IN BRAIN, SIGNAL = 0.66; EXPRESSED IN FETAL LIVER, SIGNAL = 0.55; EXPRESSED IN ADULT LIVER, SIGNAL = 0.29; NT HIT: AB040105.1, EVALUE 5.00e-78; SWISSPROT HIT: O96017, EVALUE 6.00e-23; EST_HUMAN HIT: BI911591.1, EVALUE 8.00e-78
aaaccatattctgtaaggacaggacaaattttcctcctatgagagagtggaaaaaaaaaattccagtaaccataagataataatattacctttatttctgcttagtgacagtgcaatttcagaattgttattcaaaggacggcgttttcctttccctacaagctctgtatttacaaaggttccattgccactgtgatcttctatgtatgcaatgtaagagtttttaggacccacttcctaaaatagagaacattttgtttcagactttgaatagcagagatttatagtgggaaaatatctaaaaacaatgaccaaattaccagctctcctagatacatgggtattcattacctaccctgaaaatccgaaagtgtttcttgctgtatgttcggtatttatctgttcttttcagcagtggttcatcaaagcaatattcacagcttttgtccctcccaaaccagtagttgtcattcacacattctgtaatataaaagcatgcatcagagggctgttgaat

SEQ ID NO: 903 - DNA, 585 bp, Homo sapiens
  MAP TO CHR22_77.0; EXPRESSED IN HELA, SIGNAL = 7.9; EXPRESSED IN BRAIN, SIGNAL = 1.1; EXPRESSED IN FETAL LIVER, SIGNAL = 0.91; EXPRESSED IN LUNG, SIGNAL =   1; EXPRESSED IN ADULT LIVER, SIGNAL = 1.2; EXPRESSED IN BONE MARROW, SIGNAL = 0.9; EXPRESSED IN PLACENTA, SIGNAL = 1.1; SWISSPROT HIT: Q10571, EVALUE 2.00e-29; EST_HUMAN HIT: BI758462.1, EVALUE 0.00e+00; NT HIT: gi4505222, EVALUE 0.00e+00
aaattaacagaggggtggggtaaggttgagggggaaggaaacagacagggggagaggaagggcctggtagaggaggggatctttcttgtcattcaagttagggcagccacgaatgtcccaaatctgttggagatgtcagaatgcagggaccgccaggtgggcacggaggctcgagccttggcgtcacccacgtcgtctgtgcagtggacagacaggcactgcaagtggctgccaggctgggatgctgaggccttgtttgcagggaggtcgtgggctgtggagagagaaggaagagaggacattagtggcacactcgtctctgagggacaccataatgggggccaaagtggcagaggcatacaagacaggcaccgtccacgccctctttccatggctaaagctggtcccagaggatctagagatgttgttttgaatcttcttgctgttacccctgattcatctgtgagatctcagccaagggaagacctccctgttgggcctcagtttccccactgggaaataggaaagtgaggcaggataaactcagagtttgcccatctctgatgcaccagagttcccaaaaga

SEQ ID NO: 904 - DNA, 577 bp, Homo sapiens
  MAP TO AL133378.4; EXPRESSED IN BRAIN, SIGNAL = 0.56; EXPRESSED IN PLACENTA, SIGNAL = 0.67; EXPRESSED IN ADULT LIVER, SIGNAL = 0.55; EXPRESSED IN LUNG, SIGNAL = 0.67; EXPRESSED IN BONE MARROW, SIGNAL = 0.57; NT HIT: AY057494.1, EVALUE 1.40e-01; SWISSPROT HIT: P19738, EVALUE 5.50e+00; EST_HUMAN HIT: R14364.1, EVALUE 5.20e-02
tcaacacgtgcaaattgaggttacctggataaagcacctcaactaatgaaatgagtcactaaaaccaataggcattgtgaagacaaggttcatttcataaaattaaatgaaaaatttggtggcaataaaaatagaatcagaagccttttgttattatcacttcacctaacctccctttttccacagctgctatgacatgctacattgacagcagtgtcatttgtaaacagctgaaaaacctctctcatagacccaagtacttggcccatgctttctttcccttggatgttatggaaaatatcagtagaaaagatatgatggattttagttctttcttgaaaactcttggttcatcattaaatacaagttacagtacttgcttacaaggtatggcacaaggttatgatgaggaaacatcatctcttcaaccctttacacaaccttcaatttgtgaaaattttgaagcaggttattttctacataattaaaatatctgttacaagactaactctgaacagaagaaactgtcaatataaagttatgtgagatacaaaatgactgatgaatgagggagcaa

SEQ ID NO: 905 - DNA, 531 bp, Homo sapiens
  MAP TO AL158832.2; EXPRESSED IN HEART, SIGNAL = 2.6; EXPRESSED IN PLACENTA, SIGNAL = 3.1; EXPRESSED IN FETAL LIVER, SIGNAL = 2.8; EXPRESSED IN LUNG, SIGNAL = 2.6; EXPRESSED IN ADULT LIVER, SIGNAL = 2.3; EXPRESSED IN BONE MARROW, SIGNAL = 2.8; EXPRESSED IN HELA, SIGNAL = 1.7; EXPRESSED IN BRAIN, SIGNAL = 2.8; SWISSPROT HIT: P07623, EVALUE 2.90e+00; EST_HUMAN HIT: BI831482.1, EVALUE 3.00e-06
ctgcctccagagagaacaccctcaatcccgcttaacagacattagctctgcttatttgattggtggcagtggagatgaacagaagtgaacagtgagcagagaggggtctgtaccccacacacatccctgcaccccaactgtcaactgtcttccatcatcatttactatatccacgtccactcctgacagcatcagtggctcagtcttaccgacctgcatcagggttttgggctctgcctctgtttagacagagcacgatttgggaagtgctgctaagtcagccagtggctgagtagaaacagccctgcagtgggcctctgcctgctctgtggctcgtttatcatgtgtctcatctttaaaagttggggctcagtctaggtgcctcctggcctgagcaccccagaattctatgctgatcccttcattgtgacatggcctgtcatctactcttctgggaagaccatctgcacctcactgatacttgaagctcattgagtattgtcacatatcagcccagaaagtcacagggta

SEQ ID NO: 906 - DNA, 599 bp, Homo sapiens
  MAP TO AL135926.3; EXPRESSED IN FETAL LIVER, SIGNAL = 4.6; EXPRESSED IN PLACENTA, SIGNAL = 5.7; EXPRESSED IN LUNG, SIGNAL = 5.5; EXPRESSED IN ADULT LIVER, SIGNAL = 4.9; EXPRESSED IN BONE MARROW, SIGNAL = 4.4; EXPRESSED IN BRAIN, SIGNAL = 5.1; EXPRESSED IN HEART, SIGNAL = 5.5
ttcagagctaaaagggacttgagtcaaaatgtagtctagtttaaaaattaaatctttgtaaatgtcgaagttgagtctcagaaaagacaagtgtgagttacccaaaggcacagaggcaaggttattagatatcccaacatccaaacctgatgttctccatgacgccactgctgcaccaggcttgcgtgctgggtgtgctgttggctcagcactcctctttccatgctccctgcttcccaccttatgctgcctctgtgttccagaggctggaagcctgaaatccatatttctcagaatcccagcccgagttatgtttcaacaatgtgaagcaacgcaagaactggagaacagagaaaaaatagaaactattaagttttctgcagcagcaataggcagttgtatgcattgtgtggacttgcataactgtagatgtgacactgtccagaagcttccaggtatccttctgccaccaatcataccccttggtgttgtagcagctaagaaggttagtgaaggcttcctaaagttctttaaactttctgatttccagaatgtcagtggtagtattctttgacctttgctccctcagctccagtcta

SEQ ID NO: 907 - DNA, 509 bp, Homo sapiens
  MAP TO CHR22_106.0; EXPRESSED IN FETAL LIVER, SIGNAL = 1.7; EXPRESSED IN LUNG, SIGNAL = 2.1; EXPRESSED IN ADULT LIVER, SIGNAL = 2.1; EXPRESSED IN BRAIN, SIGNAL = 1.7; EXPRESSED IN PLACENTA, SIGNAL = 1.8; EXPRESSED IN HELA, SIGNAL = 3.1; NT HIT: AB050050.1, EVALUE 1.00e-07; SWISSPROT HIT: P39188, EVALUE 8.20e-02; EST_HUMAN HIT: BI032016.1, EVALUE 1.00e-118
taacaattcctcagggccacagctaggagaaaatctgtgtgcatctccgagccaagggaataagcctgggttcagttccaacaaccttagaatagaaaaaccagcatttcctgttagatctttctacacatataaggaagttcctcatcggctgttcctgagttccttcttaaaataattaagccatgatctatcagggccctgcctggaatgaacagatcatgtttccagttgtgcatgcatacgcacacctctagtccagctactcgagaggctgaggcaggaggatccactgaacccaggagaccagcctgggcaacatagatctcatctatttaaaaaaaaatggtaatagtaataataagaataatatctcatctcttttttaaaaaatggtataatcatcatcatcatcatcatcgtggaccagctgccagaagaacagcaatttgtggtggtgacagtgagggagacaggcagataaaaacacctgtctaggggtcacagga

SEQ ID NO: 908 - DNA, 524 bp, Homo sapiens
  MAP TO CHR21_10.0; EXPRESSED IN BRAIN, SIGNAL = 0.89; EXPRESSED IN FETAL LIVER, SIGNAL = 0.54; EXPRESSED IN HELA, SIGNAL = 0.59; NT HIT: AL163248.2, EVALUE 1.00e-23; SWISSPROT HIT: P07748, EVALUE 1.70e+00; EST_HUMAN HIT: AA635136.1, EVALUE 7.00e-35
gctgaacttcctgggtcaagtggggacttggggaactttcctgtcttacaagaggattgtaaaatgcaccaatcagtgctctgtaaaacacactaatcagctctctgtaaaacacatcaatcagcactctgtaaaacacaccaatcagcactctgtaaaacgcaccaataagcactctgtaaaatgcaccaatcagcaggatcctaaaggtagccacctttcactcttcacaataaaccttgctaccactcactctttgggtccttgccatctttaagagctgtaacactcaccgtgaaggtccacggcttcattcttgaagtcagcaagactgtgaacccactggcaggaaccaactctggacacacaaggactgcgagcacagtcagcactttggcagagaaaggtcacctggatgttacatggcgaggctacagggttgtaagggtcactttaccttcagctctgcactgaggctggctagtccttgagaaactaagtgacctgcttctcagctgtgcaag

SEQ ID NO: 909 - DNA, 513 bp, Homo sapiens
  MAP TO AB017652.1; EXPRESSED IN HELA, SIGNAL = 2.5; EXPRESSED IN PLACENTA, SIGNAL = 3.3; EXPRESSED IN LUNG, SIGNAL = 2.9; EXPRESSED IN ADULT LIVER, SIGNAL = 2.9; EXPRESSED IN BRAIN, SIGNAL = 2.7; EXPRESSED IN FETAL LIVER, SIGNAL = 2.8; EXPRESSED IN BONE MARROW, SIGNAL = 2.4; EXPRESSED IN HEART, SIGNAL = 2.3; NT HIT: D42021.1, EVALUE 2.00e-03; EST_HUMAN HIT: AW439890.1, EVALUE 1.20e-02
aatagactgggaagtggcccacataatttctaagctcccccctcaccccacattcctcctgtaagatagttccacaattagcttgagaatgccactcttcatatccagagatggcaccatcagaactggaaaaagggcttttggctaggcaggtaatcactttgagcctcagttttcctgtctgtaaaagaagaagaacaaccccaaggctgcttgttagcatgagaaacagaggaagatggctcacttaaatagaaccaggaaaatatttgcagaaagcaaggccagacgggctgcaaaaacctcttggggggcctctggatgcagatgcaaagaccgaaaagtgcaagacagggaactggtaacaactctaggtaacttagctttttaatgaggtaaaccttcagccagcagcagaaacgcttttacccacaaacctgaggccagaaatgcagtgatgcagcctccaatgttctcacttggtagtaacaggggggtacagtaaggccttcc

SEQ ID NO: 910 - DNA, 551 bp, Homo sapiens
  MAP TO AC018715.3; EXPRESSED IN PLACENTA, SIGNAL = 0.48; EXPRESSED IN BRAIN, SIGNAL = 0.4; EXPRESSED IN FETAL LIVER, SIGNAL = 0.52; EXPRESSED IN BONE MARROW, SIGNAL = 0.56; NT HIT: AF209746.1, EVALUE 3.40e-02; SWISSPROT HIT: P19704, EVALUE 6.80e+00; EST_HUMAN HIT: BE081371.1, EVALUE 7.70e-01
aaggatggcatttgagatgggacaagaaaaaaaaatgctgtttttaccaggaaacaaggaaggaacatagagcacataggataaaataaggagaggggacaaaaagtgtggtatagtgtttgagtggttctcaaacttcagcatgcattatactcacatgcagggcttaaaataaagacttctgggctccatctccagagtttctgaaggaataggtctggactagggccagataatttgcattcccaacaagttcctaggtatgctgatgcagttgatacagctgatgctgctgatctcgagccacattttgagaatcacaagtatagacagaatgactactaaaagaatagtaaaagaaagtgtaaataatagctgacagaaaggcaaaaatgatttttttaaaaagtacttgcttcaaagaatttataatgtgcttaatttggtggaagcacggggcaggggaatagagttctgcatgtaggatcataagtaatttgcgatgagaaaaaagaaaaaaaaacgtaatttgctaagaaatgtgatggcca

SEQ ID NO: 911 - DNA, 546 bp, Homo sapiens
  MAP TO AL133263.2; EXPRESSED IN BONE MARROW, SIGNAL = 0.92; EXPRESSED IN BRAIN, SIGNAL = 0.97; EXPRESSED IN FETAL LIVER, SIGNAL = 0.87; EXPRESSED IN HEART, SIGNAL = 1.2; EXPRESSED IN PLACENTA, SIGNAL = 1.4; EXPRESSED IN LUNG, SIGNAL = 1.4; EXPRESSED IN ADULT LIVER, SIGNAL = 1.7; EST_HUMAN HIT: AI343380.1, EVALUE 0.00e+00; NT HIT: gi14783030, EVALUE 0.00e+00; SWISSPROT HIT: Q9Y603, EVALUE 3.00e-33
tgtccagtccaccctactcccttccaggtgtggaaggagcaggacatggggagtggggctgatgtggggctgctttgctttccagaaccgggtgaacatgacctacgagaagatgtctcgtgccctgcgccactattataagcttaatatcattaagaaggaaccggggcagaaactcctgttcaggtgagtggcctaggggatgtggtgaaaggggaagcagaactggggttgggtgggctggaatccccctgcagctggggcaggagctgatttgcagttggggcctgaattctagatttctaaagactccgggaaagatggtccaggacaagcacagccacctggagccgctggagagccaggagcaggacagaatagagttcaaggacaagaggccagaaatctctccgtgaggggcaggtggactccaggcacccggtaccgatggggcagggaccgagtctcccatgaaggcagactcctcctcccagcagagcagcaggatccccagccagactctgtacccacaggattacagccatt

SEQ ID NO: 912 - DNA, 597 bp, Homo sapiens
  MAP TO CHR21_68.0; EXPRESSED IN FETAL LIVER, SIGNAL = 1.9; EXPRESSED IN LUNG, SIGNAL = 1.4; EXPRESSED IN BONE MARROW, SIGNAL = 2.3; EXPRESSED IN BRAIN, SIGNAL = 1.8; EXPRESSED IN HELA, SIGNAL = 4.7; SWISSPROT HIT: P56958, EVALUE 1.00e-01; EST_HUMAN HIT: BI908255.1, EVALUE 0.00e+00; NT HIT: AB038163.1, EVALUE 0.00e+00
ctctttatgccgtttcccagatgtagtggaaccaaaggagaggggcaagctcctagccacccagacagcagctgaattgtctaaaaacttatcttcacccagttcttacccgccagctgtgaataagggcaggaaggtagctagtcccagtcccagtggcagcgtgctattcacagatgaaggggttccgaaatttttgtcaagaaagactttggtagagtttccacagaaagttctgtctccattcagaaaacagggctctgattcagaagctcgtcaggtgggtcggaaagtgacgtcgccttcgtcttcatcctcttccagctcctctgattctgaatctgatgatgaggctgacgtttcagaggtcactcctcgagtggtgagcaaaggcagaggggggcttcgaaaaccagaggcctctcattcctttgaaaacagagccccccgagttacagtatcagcaaaagagaaaaccttgctgcagaagccgcatgtggacattactgatccagagaagccccaccagccaaagaagaaagggtcccctgctaagccatcagaaggcagggaaaatgcgagaccaaaaaccacaat

SEQ ID NO: 913 - DNA, 542 bp, Homo sapiens
  MAP TO CHR21_70.0; EXPRESSED IN FETAL LIVER, SIGNAL =   1; EXPRESSED IN BONE MARROW, SIGNAL =   2; EXPRESSED IN BRAIN, SIGNAL = 1.7; EXPRESSED IN HEART, SIGNAL = 1.2; EXPRESSED IN HELA, SIGNAL = 4.3; EXPRESSED IN PLACENTA, SIGNAL = 0.87; EXPRESSED IN LUNG, SIGNAL = 0.98; EXPRESSED IN ADULT LIVER, SIGNAL =   1; NT HIT: AF283321.1, EVALUE 1.00e-10; SWISSPROT HIT: P36699, EVALUE 3.40e-01; EST_HUMAN HIT: AA436134.1, EVALUE 1.90e-01
tgcagtgctcttacctgctcggtgatgagaaacccaattaagtaagtggcctgcagccatgtggcctgtgccaggagccaagcggggagccccggctctccccctgagcccccttgctcactcttcctgcctgcccctgcctgtggctgtcggaaagggtgtttctgcaatgaaccagctggaatccagcagtgctgtggggaatttcccacggctgctgtgacaaacgaccacaagctggttggcttaaaacaacagaaattcactctgaggcacgaagtccgaaatcaaggtatctgcagggccgtgttccctctggaggctctggggtgaatcttccttacctcctccagcattcccggttgctggaagcctctgagctccagtctctgcctccgccttcccctcccgtctgtgtcctttccccttaaaggacatcagccattgggtttagggtctgctctcatccaggacgatctcaccttgatgcttcactgaattacatctgcaaagattctgtttccaaataaggtcacatgccc

SEQ ID NO: 914 - DNA, 556 bp, Homo sapiens
  MAP TO AL137016.5; EXPRESSED IN FETAL LIVER, SIGNAL = 1.5; EXPRESSED IN BONE MARROW, SIGNAL = 1.5; EXPRESSED IN HELA, SIGNAL = 2.4; EXPRESSED IN HEART, SIGNAL = 1.8; EXPRESSED IN BRAIN, SIGNAL = 1.7; EXPRESSED IN PLACENTA, SIGNAL = 1.6; EXPRESSED IN LUNG, SIGNAL = 1.3; EXPRESSED IN ADULT LIVER, SIGNAL = 2.3; NT HIT: AF067509.1, EVALUE 5.30e-01; SWISSPROT HIT: P18937, EVALUE 5.30e+00; EST_HUMAN HIT: R43597.1, EVALUE 2.00e-01
tttttgaggcaccatccttcagtacatttcatttgattacttttccctttgacttaccttttttccaaagctttctcattagtcctcataggaaccaagacaaggtgtacaatttggcagcgaggaaattgggatttaataagtcccctgcacaatccagcatgtctacaaataatttgtaggattaggctccccagcctcatttggaactggatgcagctgacctgaataatgaaagttatgaatcccctcccagcattgcttcattagaatccccttacaaaataagaaataagactcatctcatcagctcgattttatggcatctgattagaccactattttctcagcaggtcccttttctttaaactgttgactatggatggcctgctgaatagaatgaactttggaccactaaattgcagcattatggttattttgtgtaatttatgaaaagcgggagaagccatgatcacttacttcttgttgctaatgatatcaccatttatctgaacaggtgtgggtttggaatattcctcccactcccgatactcaa

SEQ ID NO: 915 - DNA, 600 bp, Homo sapiens
  MAP TO AL136163.3; EXPRESSED IN BONE MARROW, SIGNAL = 1.8; EXPRESSED IN HEART, SIGNAL = 1.7; EXPRESSED IN PLACENTA, SIGNAL = 2.5; EXPRESSED IN LUNG, SIGNAL = 2.2; EXPRESSED IN HELA, SIGNAL = 2.6; EXPRESSED IN ADULT LIVER, SIGNAL = 1.9; EXPRESSED IN BRAIN, SIGNAL = 1.7; EXPRESSED IN FETAL LIVER, SIGNAL = 1.8; EST_HUMAN HIT: AI928409.1, EVALUE 4.00e-92; NT HIT: gi15671982, EVALUE 8.90e+00
agcaatttgcaggtcagagcatgacagctggattcgctgagcaacactggcctgagagaagtgtcaaagctagaaagagaagaaccaaatgttacactcctctaatatgaataaaatggatgaagcaaagtatagtttacttctcctggttacctgctctatttatgaacaagcacaaaacacaaaatgcgaagtaatacttgaggacaaagtcccctcaaatatttctttaaagtactgataacaattttgtaaaatgaatgcttaccgagcaaaataactttgtttccgttccttcttctcttccttggtatccataatacacaatcaaaagtgcaaagtatttgaaaaagtccctctttttaatcagtgagtcgtaaccctgtaagaaaagataacaaagcaactgtaaacttaaaagtttacactggccaatgtgaaaaataaaatggagtagaactacatggactaaaacaaatgaaaaataaactttaaccaggaaacagtcacatgagtcaaatatgaaatgcaaatgtccatgggagaaactacaatcagaatggagatgttaaactataaagcaaaacctgatggaaaacc

SEQ ID NO: 916 - DNA, 576 bp, Homo sapiens
  MAP TO AC017072.4; EXPRESSED IN BRAIN, SIGNAL = 0.49; EXPRESSED IN PLACENTA, SIGNAL = 0.49; EXPRESSED IN BONE MARROW, SIGNAL = 0.44; EXPRESSED IN ADULT LIVER, SIGNAL = 0.38; EST_HUMAN HIT: AA927155.1, EVALUE 4.00e-15; NT HIT: gi14760697, EVALUE 2.20e+00
tgctggacacttttctgtgccagcaaaagctggcgtcttcagggacagtccactcttagatggcccccgccctagccctccagcacgccacccctgctacctttgggttccaggccattggagttaaagtgcatcctcttctgacactccgtacagctcatcaggaaccgggtcacggcctctctcgggaggaaggcataggtctctgcgatctggaggagagaagagcttcgcttgttatatggatctgtggggaggcaacttggccatggggtcaccaaggtctgagctttggtggcaggtgcttcggctcttgcaaggaaagtcagggatttgaggagcaagggacaggtgtcctggattctcagctgtggcaatgagacagtacttttgtggaaaaccatttgttttaaaaatcgcaataaaggaggttaaaaattgaaaaagcaaaccctttaaacattatctagtctttaacctatattctaataagtaacattcctcagaacattttattgctgctacaaaaaaatgggcttacaaacattgctctagcgtagggtgagcagttcccct

SEQ ID NO: 917 - DNA, 598 bp, Homo sapiens
  MAP TO AL136231.3; EXPRESSED IN PLACENTA, SIGNAL =  11; EXPRESSED IN LUNG, SIGNAL =  12; EXPRESSED IN HELA, SIGNAL = 7.3; EXPRESSED IN FETAL LIVER, SIGNAL =  10; EXPRESSED IN ADULT LIVER, SIGNAL =  11; EXPRESSED IN BONE MARROW, SIGNAL = 9.8; EXPRESSED IN BRAIN, SIGNAL =  10; EXPRESSED IN HEART, SIGNAL = 7.9; NT HIT: AF074911.1, EVALUE 0.00e+00; EST_HUMAN HIT: AI763334.1, EVALUE 0.00e+00; SWISSPROT HIT: P43005, EVALUE 1.00e-39
cttcaacttaccccacacccaaatcccaaaacccagagcgcaaaggctgtgaatccaaatatagaaaataatctggaggtctgtatatcaaatcaaatgtacacttggccattagtgtttctcttttccttaagcagtgtttgagatgactctcacggaaatgtccttccttgtttccagtcatctgcagccaggggccctagaactgtgaggtctgggtgaatgagatggtgtcagacttgtctactgcaaagcctccattgacataagacttcttggtgtctgagtcttcgttgtcaaggattgtggattccaaggcaaagggattcacaatgttgacttcagatgaaacatccatctgctccagctccttcttggagagcttttccacaatgcccgtcccaaaagcatcaccaaggacgttgaccatggtcctgaaccggtccctggggagagacgggaggagtcagacaggaggcccagatttcattttccttcatcactggagagatgcaaggacctgacatgttcagtttagatttcagtaagtgcagaaagtgctgtcctcatggctgactgactgaaggctcctcacagg

SEQ ID NO: 918 - DNA, 568 bp, Homo sapiens
  MAP TO CHR22_100.0; EXPRESSED IN HELA, SIGNAL = 1.1; EXPRESSED IN FETAL LIVER, SIGNAL = 2.3; EXPRESSED IN HEART, SIGNAL = 2.2; EXPRESSED IN ADULT LIVER, SIGNAL = 1.9; EXPRESSED IN LUNG, SIGNAL = 1.8; EXPRESSED IN PLACENTA, SIGNAL = 1.9; EXPRESSED IN BONE MARROW, SIGNAL = 2.2; EXPRESSED IN BRAIN, SIGNAL = 1.9; SWISSPROT HIT: P55318, EVALUE 1.40e-02; NT HIT: Z95120.1, EVALUE 2.10e+00; EST_HUMAN HIT: AA359219.1, EVALUE 8.00e-01
aagcactcgccaatatcctgctgaatgtcagcagtttgaatgggaacgcggactgcacaaggagatcggggacgggaagagttaaactcttcacaggaggaaggagccagacttcactggcaaaaggaatttttttttctttctttctgcctttgcagccccaagcctggagcttggtactctagggaaggcaccaatcagattgttgcctgcatgttggaaaatatttatgtcacctaccaagctgggagcatactcagcaggcttcccggggcctcctgatagacaaggtcgcatcccagcagctgtgagaaaggaggcgtgccggcctggcagctgtgctgggcgccgggaggctgccagcgaacgtggcatcacacaggagagggagatgcacttctgtgaccccccgctctcaggcagtgggtgatggggcatccccgctgcgtgagacagctcctgggagcacagaccagctgggggcagggggtgggggcctgagaaaggacaagctaagggcacggacaagaggatggggtaaggatgagccaggcatttacaaggtgct

SEQ ID NO: 919 - DNA, 585 bp, Homo sapiens
  MAP TO AC013648.3; EXPRESSED IN PLACENTA, SIGNAL = 1.1; EXPRESSED IN LUNG, SIGNAL = 0.99; EXPRESSED IN FETAL LIVER, SIGNAL = 0.99; EXPRESSED IN BONE MARROW, SIGNAL = 0.85; EXPRESSED IN BRAIN, SIGNAL = 1.1; SWISSPROT HIT: P18377, EVALUE 5.00e-07; NT HIT: D13663.1, EVALUE 5.60e-01; EST_HUMAN HIT: BG755990.1, EVALUE 1.00e-107
agcaatgcatgaaaaacgtgtcagaatggtcatggcaaaggcaaccatggttatcacttgacagtgggattaagaatgatcccattcttaatggcttgatgcattttctattgtttttgtaataaacgtgtattgctttgatcattggaatacaatgttcaaaaacacaggcacccgctgggcactcctcccaccagcacactctattacagattcctacaggcaatgcttcccgcaagtggggaccagtcgggcagggactgcacctgccccaacatccctggcctgggtggagtggggtggaggccccacagaggggtttttctcccacagcgcctgactttggtccctgcaggtgaaggagcttggcgctgtcatctataactgcagccacctggcccaagacctggagaagaccttccagacctactgggtactgggggtgcccaaggctgtcctccccaaaacctggcctcagaacttctcatctcacttcaaccgtttccagcccttccacggcctctttgatggggtgcccaccactgcctacttctcagtaagacgggttgagaaggagcccatcag

SEQ ID NO: 920 - DNA, 510 bp, Homo sapiens
  MAP TO AL138499.1; EXPRESSED IN BRAIN, SIGNAL = 1.8; EXPRESSED IN PLACENTA, SIGNAL = 2.6; EXPRESSED IN LUNG, SIGNAL = 2.3; EXPRESSED IN ADULT LIVER, SIGNAL = 2.7; EXPRESSED IN HELA, SIGNAL = 1.7; EXPRESSED IN FETAL LIVER, SIGNAL = 2.2; EXPRESSED IN BONE MARROW, SIGNAL = 2.1; SWISSPROT HIT: P31271, EVALUE 5.50e-01; NT HIT: AL163300.2, EVALUE 1.90e+00; EST_HUMAN HIT: AL582555.1, EVALUE 2.80e+00
ttggtgagaccctaaggcagttgtggctacgggaagtatgtgccttggttctgggccattctcttctctgcttgtcttcaaacttgcctgtgtatcctgtgccaagtgatgactgcattactttctgctgttgaaaatgggaaccctaattgcaaggaatccttggttcccaagtctaaaattgctcagaatgcagatttaaagtacagagtatccaagaactgtacttttatggctctggttataatacatgccattctaattctgcaaaatccttgccacagctgccaggaaatgcccctgaaagctgccatcaagtgccttctgcaagcactgcggctgctggaagtttcaggaggaagagaaccacttcaaattttgggctatctggaagattctccatcctactccctctacatgggagacttcgccattgtcaccttggctacgataactagttgagtaaaaaataaaagacattgccctgctggggttgctatatatccaggc

SEQ ID NO: 921 - DNA, 511 bp, Homo sapiens
  MAP TO AL135786.2; EXPRESSED IN BONE MARROW, SIGNAL = 1.1; EXPRESSED IN PLACENTA, SIGNAL =   1; EXPRESSED IN LUNG, SIGNAL = 0.89; EXPRESSED IN ADULT LIVER, SIGNAL = 0.99; EXPRESSED IN BRAIN, SIGNAL = 0.9; EXPRESSED IN FETAL LIVER, SIGNAL =   1; SWISSPROT HIT: P38898, EVALUE 5.50e-01; NT HIT: AB038975.1, EVALUE 8.00e-03; EST_HUMAN HIT: AA039508.1, EVALUE 5.00e-05
gctgcatagggatgatgatgatgatgatgttgataaggaggaaaaggagaaaaacagtttctactgagtgctgatgctgctggaaagtagaattactagatcaaagagtaggtgcattttaaattttaatgttgttgtttccaaattcagccatagggttgtactacttttatatgccattctcattaataatgaagtctcaaaacaacctcagaggtagttagtattattacccatattttacagataaggaaacagagagattaagggacctacccatggacacaaagctaataagtggtggtggcaggatgcaaatgcagacagtctggttgcaaggcccagacgtggccccttcactgcgcctctcccttgtgctgccttgtgcaaacatcaccaccctccatctccagaacatttccatcgtaaccaaatgaaaccttgtacccattaaacacaaactccccactctccactccctccagtccctggcaaccaccattctcctttc

SEQ ID NO: 922 - DNA, 579 bp, Homo sapiens
  MAP TO AL138478.1; EXPRESSED IN FETAL LIVER, SIGNAL = 1.1; EXPRESSED IN PLACENTA, SIGNAL = 1.2; EXPRESSED IN BONE MARROW, SIGNAL =   1; EXPRESSED IN LUNG, SIGNAL = 1.2; EXPRESSED IN BRAIN, SIGNAL = 0.93; EST_HUMAN HIT: AW366341.1, EVALUE 1.00e-05; SWISSPROT HIT: P38459, EVALUE 2.50e+00; NT HIT: AF050157.1, EVALUE 8.60e+00
gcctagttgcctgattgctcacactgcaggttactttaaaatgttttatttgtgtgtatgtctctatgggtctctgaatatcccttattttctagtgaactcagcaatgcctttaaaacaagttactgtacttgatctaggatcttttatattatagtcagaagagaaccttccaaatgtctttctaccacttggctggaggtggaagtctttggtcatctcttctcttccatgtctacttgcagttgattttcaaaagaagctttgaacttgctccagtcccctgcttctacaatcccattaatcccatctacttttcacatttggcaaaagatcagagtcctcaactaaatccctggggaggacaactaccctacatgatatcctttagaattagagccattagttccagagagactcctagtgcaccaggtaagaggcagagatgacacatgctcattatactgtagtggaacccctaattaattggttaaacaaatgaacaaacaaacaaaaaatggcagatggccatgtcgtaaacctacaccttgacttgttagctgaaagcctgctcattct

SEQ ID NO: 923 - DNA, 588 bp, Homo sapiens
  MAP TO AC012186.3; EXPRESSED IN HELA, SIGNAL =   4; EXPRESSED IN BRAIN, SIGNAL = 3.6; EXPRESSED IN FETAL LIVER, SIGNAL = 3.7; EXPRESSED IN BONE MARROW, SIGNAL = 3.5; EXPRESSED IN PLACENTA, SIGNAL = 3.8; EXPRESSED IN LUNG, SIGNAL = 4.7; EXPRESSED IN ADULT LIVER, SIGNAL = 4.3; EST_HUMAN HIT: AL532275.1, EVALUE 0.00e+00; SWISSPROT HIT: P35294, EVALUE 3.00e-21; NT HIT: gi14777332, EVALUE 0.00e+00
acgacatcaccaagaggagctccttcctgtcggtgcctcactggattgaggatgtgaggaagtatgcgggctccaacattgtgcagctgctgatcgggaacaagtcagacctcagcgagcttcgggaggtctccttggctgaggcacagagcctggctgagcactatgacatcctgtgtgccattgagacgtctgccaaggactcgagcaacgtggaggaggccttcctgagggtggccacggagctcatcatgcggcacgggggccccttgttcagcgagaagagccccgaccacatccagctgaacagcaaggacatcggagaaggctggggctgcgggtgctgaccaggggccgggccggcagactgggggctccccacctccttgctctccccagcctgccaagcccagccctccagagccagccctcctgggtaccggcaactacagcagccgggtgaagctctggagctctgcatcctgtggcctggctgcgggatggaggctctccttgaggaaggggaagcaggataccctggcgggccaccctgccagccagcagctggccctccaccatcttcacatt

SEQ ID NO: 924 - DNA, 568 bp, Homo sapiens
  MAP TO AL137863.3; EXPRESSED IN HEART, SIGNAL = 1.2; EXPRESSED IN BRAIN, SIGNAL =   1; EXPRESSED IN HELA, SIGNAL = 0.9; EXPRESSED IN FETAL LIVER, SIGNAL = 1.1; EXPRESSED IN BONE MARROW, SIGNAL = 1.1; EXPRESSED IN ADULT LIVER, SIGNAL = 1.3; EXPRESSED IN LUNG, SIGNAL = 1.3; EXPRESSED IN PLACENTA, SIGNAL = 1.2; NT HIT: AL163301.2, EVALUE 3.00e-15; EST_HUMAN HIT: BF857870.1, EVALUE 1.00e-21; SWISSPROT HIT: P08547, EVALUE 2.00e-05
tccaagccttttagattggcttctttcacatagtaatatacacttaagattctctcatgtatgttcatgacctgatagctttttttttttcttgtttttcttctttttttggtggggcgggggggttgattaatattctgttgtctggatgtaccacagttgatttattgttttacctaccaaagaacatcttggctgcttccaagtttctgcagttatgaataaaagttgctataaacatctgtctgcaggtttttatgtggatgtaagttttcaactcatttgggcaaataccaaggagcatgattgctaggttctatggtaagagtatatttagttttgtaagaactgccaaactgtcttccaagtggccttaccattttgcattcccaccgcaatgaatgagattttctgttcttccacatctttgccagcatttgatcttgttaatgttttgacttgaaccattctaataggtgtgtatggaatctcactgttgttttaatttgtaatttcctaatgatatatgatgttgagcatcttttcatgtgcttatttgccatctgca

SEQ ID NO: 925 - DNA, 567 bp, Homo sapiens
  MAP TO AC024445.2; EXPRESSED IN LUNG, SIGNAL = 0.49; EXPRESSED IN ADULT LIVER, SIGNAL = 0.48; EXPRESSED IN HELA, SIGNAL = 0.56; EXPRESSED IN BRAIN, SIGNAL = 0.64; EXPRESSED IN FETAL LIVER, SIGNAL = 0.67; SWISSPROT HIT: P17720, EVALUE 4.10e+00; NT HIT: gi11467097, EVALUE 5.40e-01
ctctgagggaaaacagacgggcggtcaacaaggatgttgctcaatatatataatttttttaaaaaagcaagaatgaaggagcaggaatatgagggcaatcaccccaatataagtcacaattgtttgctcagttcccagagctgagtcaaacttgcatatttaggcccattgattaaagatgtatccaggttcctaggagaaaggaccctacaataccatgaaaaatatataccataatgattcctctggcccttcttcaaagggatatacaaccgcttactcaatctcaatggactgtgcactgtggaaaggattattagacacaggacctgagatgatgatgttaatgcctggagatgtcatcacaactcctccctgttagaatgagggcctataggggacaggtagcaaatggagtcctatctaaaatcagattctcaatggagccactgagtctgcccactcacactgcggtcatttccccactctacaagtgcataattggaatcgatagattttccacttggaaaaagcctcatattgaagagtcattgctctgtggagcaa

SEQ ID NO: 926 - DNA, 501 bp, Homo sapiens
  MAP TO AC021609.3; EXPRESSED IN HEART, SIGNAL = 1.2; EXPRESSED IN HELA, SIGNAL = 0.91; EXPRESSED IN BRAIN, SIGNAL = 1.1; EXPRESSED IN PLACENTA, SIGNAL = 1.2; EXPRESSED IN FETAL LIVER, SIGNAL = 0.95; EXPRESSED IN LUNG, SIGNAL = 1.2; EXPRESSED IN ADULT LIVER, SIGNAL = 1.2; SWISSPROT HIT: P48966, EVALUE 9.10e-01; NT HIT: S70116.1, EVALUE 2.00e-03; EST_HUMAN HIT: BI831619.1, EVALUE 1.10e-02
tcatcaaggtttctgtcccctctacagtgtcaggaccaaatactgacatcctgcctgagctcttttcctccctaaggtttccccaagcagaagccctaccccttactgaaactgcatggcagagtgtggctgatgctgggaccaaagaagtccctgcagacaagagcagtgcttctgaaagtgaagcacctgctaaacaagctattactggtccccacacaagccttccttgacctcctgggccctgagaggtgactgagagcaaagcatctgtcccagccctggcacctcttggctatggggcctcagagtcctctcagagaccattaccaatttttgaagcaataatttagatgaagctcttagaactgtgcatggcatgtagtaaatactgttagctatcttttaagcaaatatcccagattcatgcaaaacttgagaatcactgcccctgggaattgatcaaaagctttcagaaagggctcctgcccaacattttta

SEQ ID NO: 927 - DNA, 523 bp, Homo sapiens
  MAP TO AF239614.1; EXPRESSED IN BRAIN, SIGNAL = 0.55; EXPRESSED IN FETAL LIVER, SIGNAL = 0.57; EXPRESSED IN LUNG, SIGNAL = 0.49; EXPRESSED IN ADULT LIVER, SIGNAL = 0.42; NT HIT: AE006051.1, EVALUE 5.00e-01; SWISSPROT HIT: Q02817, EVALUE 3.00e-09; EST_HUMAN HIT: AL049160.1, EVALUE 7.30e-01
gacacgtggggaagtgatggcacccggcgaggttatcagggggacacgtgggggaagtgatggcacccggcgaggttatcagggggacacgtggggaagtgatggcaccggcgaggttatcagggggacacgtggggaagtgatggcacctggcgaggttatcagggggacacgtgggggaagtgatggcacccggcgaggttatcagggggacacgtggggaagtgatggcaccgggtgaggttatcagggggacatgtggggaagtgacggcacccggtgaggttatcagggggacacgtggggaactgatggcacccggcgaggttatcagggggacacgtggggaagtgatggcaccgggcgtcggccatggctttgggcatcacgtgggcacagctgcagcctgagaagtgggggtgccggcatccggcaggggcggctctgcaagctgtggctccgggttggggaggcaaagtgctcccggcctcctgggagattcggaacatctgcgtcgtcttca

SEQ ID NO: 928 - DNA, 576 bp, Homo sapiens
  MAP TO AC011803.4; EXPRESSED IN FETAL LIVER, SIGNAL = 0.54; EXPRESSED IN BONE MARROW, SIGNAL = 0.56; EXPRESSED IN PLACENTA, SIGNAL = 0.64; EXPRESSED IN LUNG, SIGNAL = 0.54; EXPRESSED IN BRAIN, SIGNAL = 0.59; EXPRESSED IN ADULT LIVER, SIGNAL = 0.53; NT HIT: J05475.1, EVALUE 9.00e-03; EST_HUMAN HIT: AA486794.1, EVALUE 5.20e-02
gaggcagaggtgaagaatgcataaattcctaaaaaatgatggccacactaaagaaaatcatggtatcaaaatggcagtggcaaattgactaaataaaaaaaagttatacttatttgcacattattctccatcctaaattatgaacagttcagcagatactgagtttgagtttaccatatgaatataaactggttaactgctcaatcactaagcttcaatattgccacttgtccctgttaaacaatttgggttgaaggaaggggaaaccacaagagtctgtagcatttgatacaactagaggtcagaggagaacactagtggtgactgtgatgaggagatagtagacagagtggcgatggttggtggacagtgttggtaaggatggtgaaggaactgtggagatggatatggggatgatgaggatgacggtggtagtggtggagctggcaacattggtgattgaactggtgccattggtggtagagctgatgtcgtttgtggtggtggaactagtaatggaggttttagaggtgaagatggtgagctgggagcagagctgggattggaagtgaggaa

SEQ ID NO: 929 - DNA, 580 bp, Homo sapiens
  MAP TO AL160237.1; EXPRESSED IN FETAL LIVER, SIGNAL = 1.2; EXPRESSED IN BONE MARROW, SIGNAL = 1.2; EXPRESSED IN HEART, SIGNAL = 1.3; EXPRESSED IN PLACENTA, SIGNAL = 1.3; EXPRESSED IN LUNG, SIGNAL = 1.2; EXPRESSED IN BRAIN, SIGNAL =   1; EXPRESSED IN ADULT LIVER, SIGNAL = 1.1; EXPRESSED IN HELA, SIGNAL = 0.59; SWISSPROT HIT: P06818, EVALUE 1.40e+00; NT HIT: AF114156.1, EVALUE 3.50e-02; EST_HUMAN HIT: AA315600.1, EVALUE 3.00e-25
ctcttgccacctccagtttcctagttggggtggcgagccactcttaccatctccagtttcctagctgacttagcgagccactctcgcatcctgtgtcgactggggtgtgagattcatccgaattgatgagctactcctgttgcccccagcccctctgggtcgaactattcggcacatcccaggaggtgattaggctccccttccatccccatgggacaggtcctgccttgggccctaaaaccttaccgcagttcctgaagggtgctgtttctgaaattgtcctgtagctcctttcaggttccattgcactgctgggtaggggcgccgggtcaggggagagctgatttcctctccgggctgaagttcttccagtggtacctggggtcacaggtctcctgaggcccagggctccagcgcccagagccaaaggaaacagtaaacctgctgtctctggtccttttgtggtcaccaaaaatgttgcaggaaactgaggaccagagagactgatatgagagtacagaaggattgttcattgtaggtacacgccagctcagtggactcacatccaaaaagctgagca

SEQ ID NO: 930 - DNA, 560 bp, Homo sapiens
  MAP TO AL132996.2; EXPRESSED IN PLACENTA, SIGNAL = 1.8; EXPRESSED IN LUNG, SIGNAL = 2.1; EXPRESSED IN BONE MARROW, SIGNAL = 1.6; EXPRESSED IN ADULT LIVER, SIGNAL = 2.7; EXPRESSED IN BRAIN, SIGNAL = 1.2; EXPRESSED IN HELA, SIGNAL = 0.61; EXPRESSED IN FETAL LIVER, SIGNAL = 1.4; SWISSPROT HIT: Q01159, EVALUE 1.80e+00; NT HIT: AL163227.2, EVALUE 1.00e-78; EST_HUMAN HIT: BG957173.1, EVALUE 2.00e-87
gacatctgagccctctttgcttggctcacattcttcttcctgctgccatgtaaaaaggatgtgtttgcttccccttctgccatgattgtaagcttcctgagtcctccccagccctgaagaactgtgagtcaattaaacctctttcctttataatttacccaatcttaggcagttctttatagcagtgtgagaatggactaatacagtaaattggtaccacagacagtggggtgctggtataaggatacccaaaaatgtggaagcaactttagaagtgggtaacaggcagaggttggaacagtttggagggctcagaagaagacagaaacatgtgggaaagtttggaacatcctagagacttggagtgctcagaagacagaaagacgtgggaaagtttggaacttcctagagacttcttgaatgacttcaaccaaaatgttaacagtgatatggacaatgaagtccaggctgagatgatctcagatgaagatgaggaacttcttgggaactggagcaaaggattagtaaagagactggcagcattttggccctgtcctaga

SEQ ID NO: 931 - DNA, 599 bp, Homo sapiens
  MAP TO AL136140.2; EXPRESSED IN PLACENTA, SIGNAL = 2.1; EXPRESSED IN LUNG, SIGNAL = 2.5; EXPRESSED IN ADULT LIVER, SIGNAL = 2.6; EXPRESSED IN BONE MARROW, SIGNAL =   2; EXPRESSED IN BRAIN, SIGNAL = 1.7; EXPRESSED IN HELA, SIGNAL = 1.2; EXPRESSED IN FETAL LIVER, SIGNAL = 1.9; EXPRESSED IN HEART, SIGNAL = 1.5; EST_HUMAN HIT: AI670034.1, EVALUE 1.00e-08; NT HIT: gi14768786, EVALUE 2.30e+00
tttgcattcctgaatctccctaaaccacagaaaacagaggtggacatactacaagcccacttccagcagatatctccccaggatcgtagagtgcagccacaacacaagcataggcatttgccacagagatggcttagtgtagaaagagtggaagaatcaagcacttgacttcaacatgatgacagaaggaactaggacacatacccaacacctcaaccttcccagctacatctatgcatctggcttctgccttactgatcacagggtactaatggaatatggcaccaagaatagagacaacagtctgaacaaatacaaagatttaaaaggtatcttaaaatctctagctggatggattggtgagatccttctgctacacaaggctaagaagactgagagaggcagttgtctcacgtaatgcacagaaaccaacacagagagagtcaagaacaattaagaaataggaaaatatattccaaaaaaaaaaaagcaacaaaataaatcaacagaaaccaactcaagtgaactggagatatatgatttacccaacaggaaattccaaataatggtcacaaagatgctcaccgaggtcaagagag

SEQ ID NO: 932 - DNA, 593 bp, Homo sapiens
  MAP TO AL137251.2; EXPRESSED IN BRAIN, SIGNAL = 0.63; EXPRESSED IN FETAL LIVER, SIGNAL = 0.59; EXPRESSED IN LUNG, SIGNAL = 0.88; EXPRESSED IN ADULT LIVER, SIGNAL = 0.94; EST_HUMAN HIT: AW963315.1, EVALUE 6.00e-11; SWISSPROT HIT: P18005, EVALUE 5.80e+00; NT HIT: gi16172557, EVALUE 0.00e+00
agctgtcagagagcaaagggggcataagatgcccagaactcttaccttcatttaacataagttcatcctcctccacggagctgtccattcgaaaactgctccgaaaacccgagaaagaggcgatcgtatttgctgccaatctcgaggcacaggagctcccattctgttttacttctgtttctcccatcaaaccagtgtacatgccgttcatttgcctttgctccttgattcttagcgtgtgaatgtcaatgactgtggaatagatatccctcatgtgtatgattttggtctctttgtcacggttttcatgaagaatggcattagcacaaatgaaaatgaaaatgccaatccccatggtgaatgggccaagcattttcatcttatcagaatgcaaatgctgctcaaagaagcgaaccaccacaccgccttcattccgaatgacctgagtttcatttgttgacagtgttgtttcagcatcaataaaatgttctttttggggccaatatccaagaacggccatagcaattcctataatggagatgagcactcctaaaataagaaaaaaaccagatggggaataaagccggattttg

SEQ ID NO: 933 - DNA, 507 bp, Homo sapiens
  MAP TO AC018608.4; EXPRESSED IN BRAIN, SIGNAL = 0.71; EXPRESSED IN LUNG, SIGNAL = 0.69; EXPRESSED IN FETAL LIVER, SIGNAL = 0.74; EXPRESSED IN PLACENTA, SIGNAL = 0.73; EXPRESSED IN ADULT LIVER, SIGNAL = 0.56; EXPRESSED IN BONE MARROW, SIGNAL = 0.82; NT HIT: gi14729565, EVALUE 1.90e+00; EST_HUMAN HIT: BE763252.1, EVALUE 4.50e-02
taggacaacgatgctttcccttgtgtgcctttagcaggcagtatcccacacaactacacaatatcacccaaggaatcatcagggtctgcctattgatgttgtgctcttcattgtttatgaattgagaaggtgagtttcagcacaaagtgttctagaaaacaccagtcatccttctgtttttttctctttgtttttgaacttgaggatcataagtttgttaaaatagtttctgttgacctcatgggctgtataggctcaactaatctcctgattatctttattctgtctatctgatgctttttgatggtaagctgtcatttgtaactaagttcattctttcaaaagtttttgtgactttttttcctgtggcataaagaaatcggaatgataacctcctttttgctgttttaattcagccagggtaacgtaccttttaatagtaacctcttttttccttgtatttgatttttgcgatcaactatattaccacttgctgggtgacagagt

SEQ ID NO: 934 - DNA, 539 bp, Homo sapiens
  MAP TO AL138747.1; EXPRESSED IN FETAL LIVER, SIGNAL = 0.73; EXPRESSED IN PLACENTA, SIGNAL = 0.8; EXPRESSED IN LUNG, SIGNAL = 0.75; EXPRESSED IN ADULT LIVER, SIGNAL = 0.83; EXPRESSED IN BONE MARROW, SIGNAL = 0.62; EXPRESSED IN BRAIN, SIGNAL = 0.74; EXPRESSED IN HELA, SIGNAL = 1.6; NT HIT: gi15809023, EVALUE 8.00e-40; EST_HUMAN HIT: BI824988.1, EVALUE 1.90e-01
tgaggtgatgctgagtggaccagtctttgtcaggcagagagcacaatggctaacattataggaattataatacaattctaccacagcaaaacagtgaagataactaaatgtttccaaaatgagattatgacttgtaactgttttctaatttcagtgtacaaatgttagcaatagagctaatcatccctcttgagtatctttataaccaaagtagacttattattctctcctccatcctcatcccacctctctcctgccccacaatagaacagtaagagtcattggtctgggattctggaagacactcacctgtgttagaattaagatcatcaggctctgattcggtcccattttggcttccatttccctgaagagtgttcatagccataagcttcatcttctgaagtttcatcgcctcagccatcgctgcagctgttatacctaaaagcagaattattccattccatttatttatttatattaataatttcaacttttattttagatttgggggtacaagtgcaggcttttcacatgaa

SEQ ID NO: 935 - DNA, 538 bp, Homo sapiens
  MAP TO AL137071.3; EXPRESSED IN BRAIN, SIGNAL = 0.82; EXPRESSED IN HELA, SIGNAL = 0.7; EXPRESSED IN FETAL LIVER, SIGNAL = 0.78; EXPRESSED IN PLACENTA, SIGNAL = 0.88; EXPRESSED IN LUNG, SIGNAL = 0.88; EXPRESSED IN ADULT LIVER, SIGNAL = 0.81; EXPRESSED IN BONE MARROW, SIGNAL = 0.88; NT HIT: U62556.1, EVALUE 1.00e-07; EST_HUMAN HIT: AI222110.1, EVALUE 1.00e-92
tcagccatgtgaccaagttctcttagatcaatgaagtaaatataaaaacactttcctcaacggtaggctaacagcagtgaacagagaaacatgagtgtgaaaggttttcaaaaggagtttgacgtgaaggatgctttatatgctgttgtcaatgcctggaacacagtgattaaagacacagttggacatgcctggcacaaattctggcctggaaccatattcagtgatgatgaccaagatggtgactttgaaggatttcatatgtcaagtgagaaaaaaaatgatgtatgacttccttgcatacgcaaaaaatataccttcagatttcatcggtaaactgggagaagcaaatattgaggaagtgtttcatatcaacaatgaagctacagttgttcattgaccaatggtgaaagagctgaaatgattctgaatcaaggagatcgtggtaaatagtgatgataaagtctacattgtcatcagaaaaagtgcctgtagatgacatggtgaaaatgtgtgatggggcttttgaaggactagg

SEQ ID NO: 936 - DNA, 583 bp, Homo sapiens
  MAP TO AC022619.3; EXPRESSED IN HELA, SIGNAL = 0.98; EXPRESSED IN ADULT LIVER, SIGNAL = 1.8; EXPRESSED IN BONE MARROW, SIGNAL = 1.9; EXPRESSED IN BRAIN, SIGNAL = 2.2; EXPRESSED IN LUNG, SIGNAL = 2.5; EXPRESSED IN PLACENTA, SIGNAL =   2; EXPRESSED IN HEART, SIGNAL = 1.7; EXPRESSED IN FETAL LIVER, SIGNAL =   2; NT HIT: AF007544.1, EVALUE 5.60e-01; EST_HUMAN HIT: R77369.1, EVALUE 9.00e-07; SWISSPROT HIT: P51565, EVALUE 2.50e+00
aggaagtcatgggagtgtgggtttacaggtaggttaggaaaggaggctgtaatgatctatatggtagtggactagagttggagacatcggtatgaacccatatttagcttaacacagatagagatgggctcatgtagaaatatatagagacaagtgtatttaagcagttaaagtacatcatctggtgcatatatttccttcttcttagctcagtgggctgagaagaacaacacccaggagcaatgggcatacttggcacccagatcttggtttctagtattatcctccaataaaaggaaccacagctgcttggataaactgctggttgtgggactgaagcagaaaatatacaagatgagtgtggagcatcttgtagtcccagaaggtaagaaggagtgtttagaaaaaacgaatggaggaggggccaagattactgaatggaagcagctgtggttcgtggcgctcacagagaggaacgaagggggcgaatggatacagcaccttcaactggaatatccaggctctggccttgggactgatagtgaaacaactgaacccttggaggatgaagaaaatcagggca

SEQ ID NO: 937 - DNA, 594 bp, Homo sapiens
  MAP TO CHR22_154.0; EXPRESSED IN BRAIN, SIGNAL = 0.36; EXPRESSED IN ADULT LIVER, SIGNAL = 0.36; NT HIT: AL116791.1, EVALUE 3.60e-02
tttgtatttgggctgtgcttcatagtttagataacactcaataccaatgtgtgctgatgatgaaaatgatgatggtgatggagataatggtgatgtttgatgatggcgatggtgatgataaggatggtaatgatggcaatggtattggtgataatagcaatgatgacaataatagtagtgatggtgataatgatggtgatgatgatggtggtgataatggtgatgataatagttaggatgataatggttagaataatgatgatgatgatagtgttgataataatggtgatgacaatgaaggtgctgatggcaatggtgatgatggtgatgatgacaataatggtgataatggtgatgatggtaatgatgatgatgatgacatcatgatgatagtgatgatgatgatgatggtggcgatgatgatggctgatgatgacaatggtgatgatgataatgatgataccatttcttgaattttgttatgtaccaggtattttatatgcatcatcatcacataattatcacaataactctatgtttattatttccatttcagttacaaagaaacaagactcaaagtgtttgctcaaagca

SEQ ID NO: 938 - DNA, 577 bp, Homo sapiens
  MAP TO AL138895.4; EXPRESSED IN BONE MARROW, SIGNAL = 1.1; EXPRESSED IN PLACENTA, SIGNAL = 1.2; EXPRESSED IN LUNG, SIGNAL = 1.2; EXPRESSED IN BRAIN, SIGNAL = 1.3; SWISSPROT HIT: P70687, EVALUE 9.50e+00; NT HIT: AL163206.2, EVALUE 1.40e-01; EST_HUMAN HIT: BI054206.1, EVALUE 1.00e-127
cctctaactgaaaggccacgtttcctttcattgctaacagaagcaacaaagcctcagaggaactggtcatggtcacccacagagagcactgatctttcacgtcacattccagctgctacagatgtcacaaaatcccatttatgcacttcttggcttcacagttacagcagttactgactcactgctcaaccctgttattgctgtcctaaagtagcatgttttacgttgtgttttcatattctgaaaattatatcaggtatttcctgatgtaatttgtcatcctatgtattgtgttttattttaaacatttaaagctttattctaagaaggggtcccagcacttcaccagcctgccagaggggtctatggcacagaaatgaggaagacccccagtcctaagtcagtgctttgtccaagttcccctttgatagcttgggaagtcctcactcagagggcagctggggccagcccatgttcaaacaggctctgacctccatgggcttggctctgtttggtggaaagagcttccagcaatcccaagttgtcacaggggaaggcaggtgttccataaaccgct

SEQ ID NO: 939 - DNA, 518 bp, Homo sapiens
  MAP TO AL137118.3; EXPRESSED IN BONE MARROW, SIGNAL = 1.1; EXPRESSED IN BRAIN, SIGNAL = 1.1; EXPRESSED IN HELA, SIGNAL = 0.69; EXPRESSED IN PLACENTA, SIGNAL = 1.3; EXPRESSED IN LUNG, SIGNAL = 1.2; EXPRESSED IN FETAL LIVER, SIGNAL = 0.9; EXPRESSED IN ADULT LIVER, SIGNAL = 1.1; SWISSPROT HIT: P32250, EVALUE 6.00e-30; NT HIT: AF279611.1, EVALUE 0.00e+00; EST_HUMAN HIT: BF514464.1, EVALUE 5.00e-39
aagcatgatgtgacactgccgttctgctcagagccactgtccaggagcattattgaggaagccatgataaggatccatatgatcccacagaggatccaggcactcctgatgctggtgacatgcagaagccgaaaggggtgaaccattgccaggaaacgcacaacactcagcacggtcaggaaataaatactgctgtacatgttgacatacaaggaataagacataatcctgcaggccaggtctccaaatatccaattggagcctctaagataatagtcagccctgaagggaagcgtgcttatgaacaggagatctgaaatggccagatttagcatgaaaacgttcacagatgtggacttcttataaggctgcaggaaaacatatatggacaacccatttcccaagactccccagaaaaatattatcagatatacaattgggaaaaattctctcttgaagttttcaattgtgcagttcctgctgttgttattgctgaaggtgccatttggttccatttc

SEQ ID NO: 940 - DNA, 501 bp, Homo sapiens
  MAP TO AL136094.1; EXPRESSED IN BONE MARROW, SIGNAL = 0.92; EXPRESSED IN BRAIN, SIGNAL = 0.79; EXPRESSED IN PLACENTA, SIGNAL = 0.97; EXPRESSED IN LUNG, SIGNAL = 1.1; EXPRESSED IN ADULT LIVER, SIGNAL =   1; NT HIT: AF280107.1, EVALUE 1.00e-23; EST_HUMAN HIT: AW977693.1, EVALUE 2.00e-41; SWISSPROT HIT: P79987, EVALUE 3.10e-01
gaagttgtgggagacggaagctccattttatagtaaatatcatagaatggtgtttacttatcttcaggcagttgctggccacatgagctcatgctttgactgacaattgctgagttttctgtttccagaatgcaagaaacacacttaccagtccaaaccaaaagaatggacttagagacaggaagaacaatggaagtgagacttttaatggtggtcttgcgagatcgggtgtctggtaggcaggcacatccaggacagttgcagcaggtaattgatttcctagcatgcaggtccctcccccagttccttattggtggaatactactgggttgcaatcttcctggacgtggcccaggttttattatccccttataagatcatattctggtccccttcccgcttaagttttggttttaccaataaagacattttatttcatttagtgagctgacctctcctttacatcctgcttgcttattgtgactttctaggtgcatgggc

SEQ ID NO: 941 - DNA, 589 bp, Homo sapiens
  MAP TO CHR22_166.0; EXPRESSED IN PLACENTA, SIGNAL = 1.2; EXPRESSED IN LUNG, SIGNAL = 0.6; EXPRESSED IN BRAIN, SIGNAL = 0.71; EXPRESSED IN FETAL LIVER, SIGNAL = 0.72; NT HIT: gi11418060, EVALUE 2.00e-50; EST_HUMAN HIT: BF884753.1, EVALUE 3.00e-28; SWISSPROT HIT: P32927, EVALUE 3.00e-16
gataggtcatgtggggcaactgtgttaaattgtgacaaaataagagaagattgtcaccattgttaccagcaccatcctcaacgacatcagtgtagaacgtgctccccagaaaccccagatcagacagtagtgcctggcaggtgcctggctgagcaggagctcccgggagggcctccgtcctcctctgtcctctgtctactcccaccccgaggctgacctgacacatccctctctacaccaccatcccacgccaggcagaggggacaccgtagcccctacccgtggcccctgcacccaacgtcacagactcattcacccggcgaatgagggtcacgttgacgagccgctgggcatcctgggtgtctgcccacccgcaggtgatgtggctggtatagtcactgtagcagcgcagggtctgcagcaggacggtttctgacaagaggggcaggaaggggtcacctctctcccctgcagggtcccttatcaccaccacccccagctgatctggggcagaggtgccctgggttgggaagggggtctgccagggtgagcttctgcctgtggaccctcctctcctgacagaagcacc

SEQ ID NO: 942 - DNA, 543 bp, Homo sapiens
  MAP TO AL139253.1; EXPRESSED IN BRAIN, SIGNAL = 0.44; EXPRESSED IN PLACENTA, SIGNAL = 0.46; EXPRESSED IN LUNG, SIGNAL = 0.46; EXPRESSED IN FETAL LIVER, SIGNAL = 0.43; EXPRESSED IN BONE MARROW, SIGNAL = 0.42; NT HIT: S66385.1, EVALUE 2.00e+00; SWISSPROT HIT: Q9Y463, EVALUE 1.00e+00
tttcctgaaactgggaatcggacagagagtcccaggagggggtgagcagggggaaatgccctctctctgacatttccacggggctctgggcccactcccaggcaggctggaggcccaagtctggccttcaagagccataaaaaagtacactcccaattaggcaccatcctggtacatttggggggatttgggtggcagtgagggcccctgcagaaatgcccaccttgggggtggtgaagaaccagctcttgctggggtggcacagcgaggactgtgccttggaggagctgctgtgtgaaccacatgcccctgggtgaggacggggcaagggctggcgtggggtgggggtggcacttgagctgggccggtgttttgggggcaggcagggtggctggggcctgggagggccctggcttggaggcaggtctggggctctgcccagcagcagcgccctggccaacggaggcctggctgtgccccgccatgccccgcctcagatggcttgttaatttcatcgtttagcccgtttatggtgttcccagt

SEQ ID NO: 943 - DNA, 542 bp, Homo sapiens
  MAP TO AL136972.1; EXPRESSED IN BRAIN, SIGNAL = 0.91; EXPRESSED IN PLACENTA, SIGNAL = 0.75; EXPRESSED IN ADULT LIVER, SIGNAL = 0.68; EXPRESSED IN FETAL LIVER, SIGNAL = 0.64; EXPRESSED IN BONE MARROW, SIGNAL = 0.77; NT HIT: gi7662227, EVALUE 2.00e-53; EST_HUMAN HIT: BG286057.1, EVALUE 1.00e-18; SWISSPROT HIT: Q61548, EVALUE 1.00e-14
cttgcaaagcagcaaatgagcttattatccatgaaacttttatttgaatgcagaatgatcatctgattaggatgcaggagtacagagtacagctctgagtgagaagttggatgagacgacttccaaagtcacttccaaccttaatatactgtgactccgaggcacttccaaccctaatatactgtgactctcttacaccttctattatatatactccagatacatgagcaaatatttaaaaaattatattcccaagaaaacttaatattacttacctctgcaaccttgagaaattcagacactcgtgtcattctagttagaaatcgtttgtaaatttctagagcatctttacattgtcctttcttcatttcaaaaaacttttctagagaagataaagagataagcaatttgaaaagagtattatgttctatttttttctaagcttatgttaagattactactcaaaacttaattaatgtttgaatcaaaacacttggcagtaaaacttatatgaggtattaaggcacctaaacaaagggaac

SEQ ID NO: 944 - DNA, 512 bp, Homo sapiens
  MAP TO CHR22_102.0; EXPRESSED IN FETAL LIVER, SIGNAL = 4.8; EXPRESSED IN PLACENTA, SIGNAL = 5.5; EXPRESSED IN ADULT LIVER, SIGNAL = 5.4; EXPRESSED IN BRAIN, SIGNAL = 4.7; EXPRESSED IN HELA, SIGNAL = 4.1; EXPRESSED IN LUNG, SIGNAL = 5.9; EXPRESSED IN HEART, SIGNAL = 4.4; EXPRESSED IN BONE MARROW, SIGNAL = 5.1; NT HIT: U82440.1, EVALUE 1.20e-01; EST_HUMAN HIT: AA720719.1, EVALUE 2.80e+00; SWISSPROT HIT: P28481, EVALUE 6.00e-03
tgtacattacccctcctgggcctgtaccactggggttggagcccctgcctctgtgctcacagccagaggagctgctcccatatgcaacggcatgtccacagaccggccagagggcattgcggatgcggggggcaacagcttttctgcagaggtggggtttagtgggaaggggtgtagagtcagcaaggaggcgggagagcattccaggtggaagctcaggcaggaggatgcccttgaagaactgaaggaaggctgctgggccaggtcctcgggggcagaggtaggggcctcgtggaccagcagtggagggatctccgtgttccccactcctgacgacagcctggtgtgggtttggctccctccccactgctgcctgtacccctttgtgccctgttttcacccttggcacatgtgcctcaggctgttcttacctgtgtccttgtgtgtttaattgtaatgaagaagctgtgggttctgggaagcggggcggcccatctgttctccgtgtccct

SEQ ID NO: 945 - DNA, 531 bp, Homo sapiens
  MAP TO AL121909.4; EXPRESSED IN BONE MARROW, SIGNAL = 4.2; EXPRESSED IN PLACENTA, SIGNAL = 4.4; EXPRESSED IN LUNG, SIGNAL = 4.2; EXPRESSED IN BRAIN, SIGNAL = 4.2; EXPRESSED IN ADULT LIVER, SIGNAL = 3.7; EXPRESSED IN HELA, SIGNAL = 2.1; EXPRESSED IN FETAL LIVER, SIGNAL = 4.6; SWISSPROT HIT: Q11018, EVALUE 4.90e+00; NT HIT: AF034077.2, EVALUE 3.20e-02; EST_HUMAN HIT: BG181414.1, EVALUE 3.00e-06
tgcaaagcgtacaatcaagggtaaaagacttacaatgtgagaatagaatgatgtcactaccacttttatcattactcttgcctagtatgtatcgagcaacaatgaaacgtcagaacttcttctaagtcatttcaatattaacgcctttaattctcaaaacaacgctcttgaagtaagcactgtgattattcccattttacaaatgaggaaactgaaatacggagaggttaagtacttgctgaagatcacacagttataaaaggcatgcctgctatttgaatttttgcagtctgactccagagcccatacttgtatgtactggtcagatggaagaagcaggggatcccaaatgagcccctcacccaaagctgtgggttagagaagggtcccagagtcagtgacatctgtgctaagtcatggatgatgggtaggtatttgccaggtgaaggaggaggaagaggaaggtgttgagttatgttctgttcggatgataatacagactggttattatggttgcagtgtgtgtgtgtg

SEQ ID NO: 946 - DNA, 519 bp, Homo sapiens
  MAP TO AC011802.4; EXPRESSED IN BRAIN, SIGNAL = 0.62; EXPRESSED IN BONE MARROW, SIGNAL = 0.57; EXPRESSED IN ADULT LIVER, SIGNAL = 0.79; SWISSPROT HIT: P02566, EVALUE 1.70e-02; EST_HUMAN HIT: AV719677.1, EVALUE 0.00e+00; NT HIT: U69609.1, EVALUE 6.00e-93
tactgagtggggccagagactctactgcctctgtgaccacatccctttccatactggtatctcgtttgttctaatgagtgtgtccattgcttttaatagtgaattttctgagcaatgagaatttgaccaaattgaaaagggggatttccatgcatttgaaattgccatgtgtttcttcttctgatccatttgctctaagaaatatagtctaagtttaggactgagggtttttttttaacagaatactgaatgattctttgttttgatttttttattgcaatttcaaaaatatgacctgctttccacaggactctctagcagaagttgaagagaaatataagaaggctatggtttccaatgctcagctagacaatgaaaagacaaacttcatgtaccaggttgataccctaaaagatatgttgctggagcttgaagaacagctggctgaatctaggcggcagtacgaagagaaaaacaaagtaagcattagtatgatacagaatgttaacaataggctgc

SEQ ID NO: 947 - DNA, 592 bp, Homo sapiens
  MAP TO CHR22_55.0; EXPRESSED IN BRAIN, SIGNAL = 1.4; EXPRESSED IN LUNG, SIGNAL =   1; EXPRESSED IN HELA, SIGNAL = 1.5; EXPRESSED IN HEART, SIGNAL = 1.2; EXPRESSED IN FETAL LIVER, SIGNAL =   2; SWISSPROT HIT: Q9Y3I1, EVALUE 7.00e-39; NT HIT: gi14778462, EVALUE 1.00e-126; EST_HUMAN HIT: BI014317.1, EVALUE 0.00e+00
tgtctcccatttctgaacccaatgatgtactttgactttcagcacttagttcactttaggatacaaaaatgtatagtgtaaaaataagtctttaattaattcattgttttgttttcctttttcagttagggcctagtcaaaattttgaagctgagtcaattcaagataatgcgcatatggcagagggcacaggtttctatccctcagaacccatgctctgtagtgaatcggtggaagggcaagtgccacattcattagagaccttgtatcaatcagctgactgttctgatgccaatgatgccttgatagtgttgatacatcttctcatgttggagtcaggttacatacctcaggtaagtactgcaagcaaaacacagacatcttatgattgctcatacatgtggatggttcctgctctcaagttgcccgtagtctgagagtggcagagagagacaaaaatataaagcactgtgctatattggtgaagttctgggagaaacatactcatatataggatgccaggaattcatggaggagaacatttagaatattgcttctcaaactttaatgcgctttggaatacctggggacc

SEQ ID NO: 948 - DNA, 584 bp, Homo sapiens
  MAP TO CHR22_6.0; EXPRESSED IN BONE MARROW, SIGNAL = 2.2; EXPRESSED IN BRAIN, SIGNAL = 2.2; EXPRESSED IN HEART, SIGNAL = 2.2; EXPRESSED IN FETAL LIVER, SIGNAL = 2.3; EXPRESSED IN HELA, SIGNAL = 3.7; EXPRESSED IN ADULT LIVER, SIGNAL = 3.7; EXPRESSED IN LUNG, SIGNAL = 2.9; EXPRESSED IN PLACENTA, SIGNAL = 2.5; NT HIT: AF182714.1, EVALUE 3.00e-89; EST_HUMAN HIT: BG766043.1, EVALUE 2.10e-01; SWISSPROT HIT: Q14681, EVALUE 7.50e-02
cagatcaggagccactagccctgcccgaggggtccgggtaggcttcttggaggatcggccataggggtcatactggggtggctggagggggttgtgtccttctgggtgctcatggcggttgtcctgttgcaggtgccctgctgcaggaggagaggctggacgcggtgaccctgctttacgccacctcgctgcccagcttctgcctgctggcgggtgcagccctggtgctggaggctggcgttgccccaccgcccactgctggcgactctcgcctctgggcctgcatcctgctcagctgcctcctgtctgttctctataacctggccagcttctccctgctggccctcacctctgccctcaccgtccacgtcctgggcaacctcaccgtggtgggcaacctcatcctgtcccggctgttgtttggcagccgcctcagtgccctcagctacgtgggcatcgcactcactctttcaggaatgttcctttaccacaactgcgagttcgtggcctcctgggctgcccgtcgggggctgtggcggagggaccagcccagcaagggtctttgagacctgggggatctcagg

SEQ ID NO: 949 - DNA, 542 bp, Homo sapiens
  MAP TO AL138832.2; EXPRESSED IN BRAIN, SIGNAL = 5.8; EXPRESSED IN FETAL LIVER, SIGNAL = 5.1; EXPRESSED IN LUNG, SIGNAL = 5.9; EXPRESSED IN BONE MARROW, SIGNAL = 4.7; NT HIT: AF281870.1, EVALUE 2.00e-25; EST_HUMAN HIT: H81480.1, EVALUE 0.00e+00; SWISSPROT HIT: P16582, EVALUE 5.90e-01
ttgccatcatcctcattacctaccctgaaactaggaatatgaaacattaatttttattatgttaactagaaatgattatgtctatattcacatgaaccaggatcatgaaaaataaaatagcacatatccacatttggtgagaggtggtaatctgctcatgagtgttggttattatttccagatggaataacttgctggaagagattgctgagcagctacagtccagcaaggccctacttcagctttggcaaagatacaaggactactccaaacagtgtgcttcgacagttcagcagcaggaggatcgaaccaatgagctgttgaaggcagccacaaacaaggacattgccgatgatgaggttgccacatggattcaagattgcaacgtatgttcaggagctaccttgttttccccacatgcccttcttagactgcccaagtttagcttttggtctgtgtaagctttggtatgtctttctatgtgagacagttacccaaaaataactgtcttaggatcaaagagcctgcctgattttcagaac

SEQ ID NO: 950 - DNA, 502 bp, Homo sapiens
  MAP TO AC025745.1; EXPRESSED IN HELA, SIGNAL = 2.5; EXPRESSED IN HEART, SIGNAL = 4.5; EXPRESSED IN LUNG, SIGNAL = 5.5; EXPRESSED IN ADULT LIVER, SIGNAL = 4.7; EXPRESSED IN FETAL LIVER, SIGNAL = 4.8; EXPRESSED IN BONE MARROW, SIGNAL = 5.6; EXPRESSED IN BRAIN, SIGNAL = 4.8; NT HIT: AL163303.2, EVALUE 2.00e-19; EST_HUMAN HIT: AL521707.1, EVALUE 5.00e-91; SWISSPROT HIT: P16591, EVALUE 2.10e+00
tttttctcatggatctgggcaaagaaaattgagatccttctgaaaaggatttagcattctagatgttattaaaaacactgtgattcatgagaagagaacaaaatatcaacattaacaggaattagaaataagttgattcccacactcatggatgactttgaggaattcaagacttcatcagacaaagttactgcagatttggtagaaatagcaaaagaactagaattagaagtggagtctgaagatgggactgaactcctgtaatgtcatgatgaaactttaatgaataaagcaatgtttcttatggctttgcaaagaaagtggtttcctgagatggaatctactcctagtaaagatgctgtaaacattgttgaaatgacaataaagagtttaaaccattctataaacttagatgaaaaaggagtgtcagggttcaagaggattgactccaattttgaaagaagttctgctgtgggtaaaatgctatcaaacagcatggcat

SEQ ID NO: 951 - DNA, 589 bp, Homo sapiens
  MAP TO CHR22_163.0; EXPRESSED IN BRAIN, SIGNAL = 0.47; EXPRESSED IN BONE MARROW, SIGNAL = 0.57; EXPRESSED IN LUNG, SIGNAL = 0.53; NT HIT: gi14779485, EVALUE 1.00e-128; EST_HUMAN HIT: BI463836.1, EVALUE 1.00e-123; SWISSPROT HIT: Q9UKN7, EVALUE 2.60e-02
ttgccttctgcacagagttgccggcagcaccactgcactgcggacaggtgcctcccgccctgcctctcgctccctttcccaccttgcacccgctcttgcctcctttccatcccactcctccaccgttcctatccccacgtctgcccccctcccagggaatggatgctaaggacctgccagtgggatccttgcatgtgcccccaccccagactcacccgtcttctcagccactcaaccctgggccatagtagggcccccaaagtccccccagtgggatttgtggatgtggcatgaggaggcctgggacacctggcaggatggagaactcacacaggggtggctctgcgactttgaccctggtctcagctcctgagtgggcaatgagagggcagatctggtgccttccgagacgtcagggacactgctccctctctgggccacggccgagtcaccagtggccattggtgtggctgctgtctcggaactgaacctgctcaggaagtccgggtatttcagcctccccttggcattgactggcatctcgttccagagtctgtcaaactggagaaggagcagaagtcatttccca

SEQ ID NO: 952 - DNA, 511 bp, Homo sapiens
  MAP TO AL136450.1; EXPRESSED IN BRAIN, SIGNAL = 1.8; EXPRESSED IN HEART, SIGNAL = 1.6; EXPRESSED IN BONE MARROW, SIGNAL = 1.8; EXPRESSED IN LUNG, SIGNAL = 1.9; EXPRESSED IN ADULT LIVER, SIGNAL =   4; EXPRESSED IN PLACENTA, SIGNAL = 2.2; SWISSPROT HIT: Q00653, EVALUE 4.00e-03; NT HIT: gi13650211, EVALUE 2.00e-77; EST_HUMAN HIT: AU116901.1, EVALUE 3.00e-77
actgtcccaagatgtcaggggaacgtaagagagagagagtaatgggagggaggaaaagggggtacagagagaggaggagttggggagatggtagtggagagttgcaaggctacaggtggttcccttgtcctaagtcttaaaccatattacaccaaggttacctgggggtcagctcagttttttcccctgatgcagtagccttaagtgtagacaccccagttcccacttgggccctgttatcctcaccctgtatcacctccacaggccagttcatgatgcggtggtcaatgacaacctggagaccatctggctcctgctgtcctatggggccgatcccacactggctacctactcgggtcagacagccatgaagctggccagcagcgacaccatgaagcgctttctcagtggtaagcatggtccagacttgacactgttgtccttggggccagcctctgattcctgaacttgtgaggacatcctcttcatctccttccaccttgaacagctc

SEQ ID NO: 953 - DNA, 547 bp, Homo sapiens
  MAP TO CHR22_180.0; EXPRESSED IN PLACENTA, SIGNAL = 2.3; EXPRESSED IN LUNG, SIGNAL = 2.6; EXPRESSED IN ADULT LIVER, SIGNAL = 3.3; EXPRESSED IN BONE MARROW, SIGNAL = 2.2; EXPRESSED IN BRAIN, SIGNAL = 2.1; EXPRESSED IN HELA, SIGNAL = 2.3; EXPRESSED IN FETAL LIVER, SIGNAL = 2.6; SWISSPROT HIT: Q9P2N4, EVALUE 5.10e+00; EST_HUMAN HIT: BE783410.1, EVALUE 1.00e-103; NT HIT: gi15319117, EVALUE 0.00e+00
tatgaagactggtccctcggggtcagttgtggccctgggggtgctggacggtggggtgtgtggctgccactgagggcttggtccagggcccggccagcagtggggcagggctagtggtcgtcatggtgacctggagcagctgctcgccctgtatcagtctcaggagggcccgcaggcggtccagggatgactgggtgcccctctggcgggccagcaggcttgtcttcaactccaggcatttctgttggggagaaggtcaggggaaagggtctcagtattcggctctacagccatcctggggcagccaccgtctgggcccctctcccctccactacaaaggcctacaagaaaccaggctgagggcttcacaaaaaccaggcagtggtgcaaatgcaattaaagagcagccagacccacaggagatgatgctcgctttggaacttagggctagaaaaagtgtggctctgcctgggaacgtccttcccatggctgtgatgtgacctcctcctccccgctagctgcccacactcttcctcctcctcctgct

SEQ ID NO: 954 - DNA, 572 bp, Homo sapiens
  MAP TO AC011792.5; EXPRESSED IN LUNG, SIGNAL = 0.79; EXPRESSED IN BRAIN, SIGNAL = 0.78; EXPRESSED IN ADULT LIVER, SIGNAL = 0.86; EXPRESSED IN FETAL LIVER, SIGNAL = 0.79; EXPRESSED IN BONE MARROW, SIGNAL = 0.83; SWISSPROT HIT: P48197, EVALUE 1.10e+00; EST_HUMAN HIT: AL521707.1, EVALUE 2.00e-75; NT HIT: AL163303.2, EVALUE 3.00e-24
gattcaccattccagatgccattcacaacattcatgattcatgggaagaggtcaaaatatcaaccttaacaagagttaggaagaagttaattccaaccctcatggatgacttcgaggggtcaaaatttcagtggaggaggaactgcagaaatggtaaaaagaacaagagaattagaattagaactggaccctgaagatgtaattgaattattataagcccaggaaaaaacttgaatggatgaggagttgcttctgatggatgagcaaataaagtggtttcttaacatgaaatctgttcccggggaagatgctgtaaacactgctgatatgataacaaaggacttagaatataacataaatttatttgacaaagcagtggagcagtttaagaggactgactcaaatattaaatgaagttctactgttggtaaaatgctatcaaacagcattgcatgctacagagaaatcttttgtgaaaggaagaattaatccatgcagcaaacttcattgttgtcttatttgaagaaactgccacagccagcccagccttcagcaaatatcaccctgatggg

SEQ ID NO: 955 - DNA, 538 bp, Homo sapiens
  MAP TO AC006349.3; EXPRESSED IN BRAIN, SIGNAL = 0.54; EXPRESSED IN FETAL LIVER, SIGNAL = 0.42; EXPRESSED IN PLACENTA, SIGNAL = 0.49; EST_HUMAN HIT: AV703205.1, EVALUE 1.90e-01; NT HIT: gi16157381, EVALUE 1.30e-01; SWISSPROT HIT: P42065, EVALUE 1.30e+00
aagaaagcccaggttgtgtggaaagactgtggctgtccacagttgtctggcaggtgcctccacagcaggcacagaatgtgcctgtgcctcgaaggaaagactgggcccagggaaggacttcttgccaagtggatgcaaaggcacagctagcaggccaggaaaccctgtcagctctttctcgacgtgggcaatcagcaggaacagccgaggccatgcctcacacctcctcttgtctctgcatcatcacatagctgctgtcctgcaagctcccgccctggcatcgccaccagaaaacatgcccagggttccatccctcaatcatctcccaggagaccctctgcagtccttccaggatcgccctcctaaatacctcctgaaggagacattgtgcatgacagatgccctttgcacattctggtctcctcgctacctcaggccctgccctgccatcttgccacatgccatcaggtgagcgtccatcactttcccccagtctctttcttcccctctggctggaagctgatgaatttgggctcat

SEQ ID NO: 956 - DNA, 549 bp, Homo sapiens
  MAP TO AL121954.3; EXPRESSED IN BONE MARROW, SIGNAL = 0.48; EXPRESSED IN PLACENTA, SIGNAL = 0.48; EXPRESSED IN LUNG, SIGNAL = 0.74; EXPRESSED IN BRAIN, SIGNAL = 0.57; EXPRESSED IN FETAL LIVER, SIGNAL = 0.47; EST_HUMAN HIT: BG929480.1, EVALUE 0.00e+00; NT HIT: gi14750736, EVALUE 0.00e+00; SWISSPROT HIT: Q03933, EVALUE 3.00e-23
ttgggatgattaaatcccattcattacagaactcaacactgaccaaaacagagaaaggtggactatgtgggttcatcatctgaaaggaagattactcaaagagaaacagaacatgtgaagtgaacaaagaaagcaaataattttagacaacatctagataagcactcactttcccaaaagattgatgttatcattcaaaatggaatccatcatggtcactggatcttctgaggtcagactggatgagccatttagctggacagcactagacatgagagggctgctgccatcactgcctgaacttagggattctctggctggttcattctgctctccactctgaatgacaggtgcatactcatcttcattgtcatcttcaacgatgacaatatcagggtactggctacagctaaatcagcaataaaagaaggaacctattacattttcaaatttaataagttcatactatccattcattctaaatggaaactctctccccataccacatactgaaaggcttaaatttcttgagcgagcagcttaatcaca

SEQ ID NO: 957 - DNA, 530 bp, Homo sapiens
  MAP TO AC021010.3; EXPRESSED IN BRAIN, SIGNAL = 0.5; EXPRESSED IN FETAL LIVER, SIGNAL = 0.55; EXPRESSED IN LUNG, SIGNAL = 0.53; EXPRESSED IN BONE MARROW, SIGNAL = 0.64; EXPRESSED IN ADULT LIVER, SIGNAL = 0.44; EST_HUMAN HIT: AA716001.1, EVALUE 1.00e-110; NT HIT: gi12741314, EVALUE 3.00e-58; SWISSPROT HIT: P51522, EVALUE 7.00e-36
ttcctcagcttcaacatcccaaataattttttgtaggctcaaaacccatatttctaataagtataggaataatttcctgcattcttcattattcacacaaatacaggaagtacatatgaacgaaaaacctttccaatgtaatgagtgtggcaaagcctttaattatagctcacacttaaggagacatcacataatccattcaggagagaaacaatataaatgtcatatatgtggcaaagcctttcatcagaagcaataccttccatgccaccatagagttcatactggagaaaaacctcagaagtgtaatgagtgtggcaagaccttcagtcagaagtcttaccttcaatgccatcatagacttcatactggacagaaaccttacaaatgagaataatgtgacaaagtttacagttgcagatcacaacttaaaacacataggagaattcatactggaggaaaaagcatacaaatgtaaggtttgtgagaaggctttctgggataattcatgcctttcatgccaaaagaga

SEQ ID NO: 958 - DNA, 583 bp, Homo sapiens
  MAP TO CHR22_1.0; EXPRESSED IN BONE MARROW, SIGNAL = 3.8; EXPRESSED IN HEART, SIGNAL = 3.4; EXPRESSED IN LUNG, SIGNAL = 4.6; EXPRESSED IN BRAIN, SIGNAL = 3.4; EXPRESSED IN PLACENTA, SIGNAL =   4; EXPRESSED IN FETAL LIVER, SIGNAL = 3.7; SWISSPROT HIT: Q07092, EVALUE 2.20e-01; NT HIT: gi15308934, EVALUE 2.20e+00
taattctgttgggggtcgagggacaggaacccaggacagcttcctggaggtggcttttgaggtgggtcttgaagaatgcacagaagcttggcagaggctcagaaagccaagagggcaaagccatggaagtgtggggaggcagagggtgccaggggtgccggctgtcccaggacagcagcgaggaagggggtctctactcctttctcctcctcctggtggacgatctcagaccctgtaggtcccaggaggggagggagaagcttgattctctgagcctgaggtctctgagggcagaccctgtgctaccctcctcacaccctaggagcaggtgccagtctgggaagctctgagggcttttccttttcagaatgggtgggggtggctatgtctcagccttcacagttgatcagtgacacagaccctaggcctgtggtccctggtcaggaagttgtgctgggggcagggaggggcctgccctcaggtgctggttggccttggtggagagtggggagtgctaggggctgggaagactcccctgggtcccagagggaagggctgtggaggtgcttgactttcccacctc

SEQ ID NO: 959 - DNA, 563 bp, Homo sapiens
  MAP TO CHR22_11.0; EXPRESSED IN HEART, SIGNAL = 3.5; EXPRESSED IN HELA, SIGNAL =  17; EXPRESSED IN BRAIN, SIGNAL = 3.9; EXPRESSED IN LUNG, SIGNAL = 4.2; EXPRESSED IN ADULT LIVER, SIGNAL = 4.5; EXPRESSED IN PLACENTA, SIGNAL = 4.2; EXPRESSED IN FETAL LIVER, SIGNAL = 4.3; EXPRESSED IN BONE MARROW, SIGNAL =   4; SWISSPROT HIT: P47045, EVALUE 1.10e+00; EST_HUMAN HIT: BE747633.1, EVALUE 7.90e-01
gcttcaggcttcaccatctcagctttacgctcagcacaacagaaatagagctcctctctctcagagtcctgggtgtggatctcactgacttgatttaggtcacgtgaatatccctgaatgcatcagtgagactggaggggcttgggatggaatctgccaattcacgtagatcaatcagagccctgtgtctactggctgaggaaaagggaaggtggttctccaaaagaaatctggggcccagatggtacctttggcacagcctcagctgcctccaacaggcctttcaccagccaccagcccttggtcacctccctctcctgggtcctcatctgtaacacaggaccgtcataggacagacctccagcggtgattgtgaggatgctcagagcttggagcagagcctggagcatggtgagagctccatgagcgtgagcactcagcatcgtggccccatttgcaccttccatctccttgcatgtgatgcgtgggtcatgcctcctttcctgggtctgcttcccttagcctctgtgactcatctgtctcgtggctctcctcttcctcct

SEQ ID NO: 960 - DNA, 535 bp, Homo sapiens
  MAP TO AC016714.2; EXPRESSED IN LUNG, SIGNAL = 1.3; EXPRESSED IN FETAL LIVER, SIGNAL = 0.94; EXPRESSED IN BONE MARROW, SIGNAL = 0.92; EXPRESSED IN BRAIN, SIGNAL =   1; SWISSPROT HIT: P18039, EVALUE 8.60e+00; EST_HUMAN HIT: BF991933.1, EVALUE 8.00e-07; NT HIT: AF099810.1, EVALUE 5.00e-04
tggggtgttataaagccaggacatccctcaggtttccatctcttcctgtacctccaattcccctttcaccttctccatcatatgagcagcatgaaagagctcaccagaagctggggacatgcccttgagcttctcagccttcaaatcatgggctacatataagcctctttcctttataaattacctagtctcagatattcttttacggcaacacaaaatggactgtcttattttggtgtaattggtcaaaataaatgaaaaatgtttactaagcactaactatgaagtcagcatctactagaagttaatagaggataaaaaagaaatagacatcatggcccccatctcaagttgggtatgatctggttgaggagatgaggaaatcagacctaaagaatttcagaatgtcttgcttgcttttcccccatggagtcccagatatcctctttccagctgctcacagttagatctcctcatgatcctccctctctactgccacagacaaaatctgtctcctccctttgctgtgactggt

SEQ ID NO: 961 - DNA, 568 bp, Homo sapiens
  MAP TO CHR21_24.0; EXPRESSED IN FETAL LIVER, SIGNAL = 0.98; EXPRESSED IN ADULT LIVER, SIGNAL = 0.47; EXPRESSED IN PLACENTA, SIGNAL = 0.64; EXPRESSED IN HELA, SIGNAL =   3; EXPRESSED IN BRAIN, SIGNAL = 1.2; NT HIT: gi4758763, EVALUE 2.00e-93; SWISSPROT HIT: O15394, EVALUE 8.00e-29; EST_HUMAN HIT: AI500562.1, EVALUE 0.00e+00
cgagattgttttcctggacctcaataaaatgtttatatcgtatagaaaatgcagaagtaacatattccctcaataattaaagtgtgattttaattttactgtctattttctgaggtaataaaagttgactcatgtatactttcttgtaatttcaaaagaacattcaggtgtttcaggaagttctgtaactcgaacatattaagtgatacaggtagcagttttccttcactcctagttctcataacaccataagccttaataatggccattcccattcccttggttatgttttctttatatttctttgtccatagacgtgccatccagtccctatggagtgaagatcatagagctgtcgcagaccacggccaaggtttccttcaacaaaccggactcccatggaggtgtacctattcatcactatcaggtggatgtcaaagaagtagcgtcagaaatctggaaaattgtacgctcccatggagttcaaagtgagtcaacaatttcaaaatgtgttggttaattcaagctgatcttcagtatacctgtatgattggctttttcggtttcc

SEQ ID NO: 962 - DNA, 599 bp, Homo sapiens
  MAP TO CHR21_27.0; EXPRESSED IN BONE MARROW, SIGNAL = 1.1; EXPRESSED IN PLACENTA, SIGNAL = 0.68; EXPRESSED IN BRAIN, SIGNAL = 1.1; EXPRESSED IN ADULT LIVER, SIGNAL = 0.51; EXPRESSED IN HELA, SIGNAL = 2.8; EXPRESSED IN FETAL LIVER, SIGNAL = 0.86
ttcccagggagttgagacagaagccagtccttggtgcggcccgctgaaaaattggaatgttgcatgccaggtccaatgcttttcctcccctaggataagctgtgaaaagaggtttcttcccaatcatgtggcactgtactgagggacaggctgtgagaggtaagtgcacacttcaagctattgctgtcttcagtgttccccagtcatgcagagtgtacctgatctcatcagcactctgagactggaaaaacagaagccaattcctgggtcaaccccacaaaatttggaatgttggctacatcatccaaactctttccctctccagggagaaactggaatatggaggtttctgcaagctcgatctgtgcagagcgagagaaaggggctatgataaatgaatatatgctattaaaaatcaccatctttgttctcggcagcccccaacctgagatcatcttctgtcagtatcacttggtcagcctccagaaagtgagaacgttggacatatgctccactcttttccttttctttttttttttctccagggagaaactttgatctagggtttatcttcacatggtgaggttgtgcaatggaga

SEQ ID NO: 963 - DNA, 529 bp, Homo sapiens
  MAP TO CHR22_163.0; EXPRESSED IN FETAL LIVER, SIGNAL = 0.46; EXPRESSED IN PLACENTA, SIGNAL = 0.5; EXPRESSED IN LUNG, SIGNAL = 0.49; EXPRESSED IN ADULT LIVER, SIGNAL = 0.59; EXPRESSED IN BONE MARROW, SIGNAL = 0.46; EXPRESSED IN BRAIN, SIGNAL = 0.39; EST_HUMAN HIT: AF012354.1, EVALUE 8.00e-44; NT HIT: gi14779488, EVALUE 6.00e-93
gtcccagattcttgacccaggccagccactaagtttgtgagccaagtccccaaacctctcagacatcagtgttttcatttctaaatttaaaaggtaaattcaataattcctaagatctctgcttgctctaaaattccctgactctaattactgtctttctagtgtgccatctttcttatttataaaatgaaatattaaaatactcagttgacaaatagttactaaatacctattccatgacagacactgtggttttgatatgtgcattcattttgcttaattttacctctcagaaagatctggctgctgctgttcatctttttgtaaatgttcacttaacagctgatcctttggaacaagaactggagagacagtgggtgggccatcaattcctatgcatgccaaaagtttcttgtaaaggattcttcctgaaccaatgtcctgaatcttactgcagagtctgaattttaaaaaataattaaaacacactcagtagagtaattaaaacggaaaagactgaccctgccaa

SEQ ID NO: 964 - DNA, 508 bp, Homo sapiens
  MAP TO CHR21_22.0; EXPRESSED IN BONE MARROW, SIGNAL = 0.85; EXPRESSED IN LUNG, SIGNAL = 0.61; EXPRESSED IN BRAIN, SIGNAL = 0.83; EXPRESSED IN ADULT LIVER, SIGNAL = 0.55; EXPRESSED IN HELA, SIGNAL = 2.6; EXPRESSED IN FETAL LIVER, SIGNAL = 0.84; EST_HUMAN HIT: BE041640.1, EVALUE 1.80e-01; NT HIT: gi15616630, EVALUE 1.90e+00
tgatatccactgcaggttgctacatcaaagcattttatttttttgattactccaccaaatttttcatggtttcttaccatttaaaaacaagaaaacctctgacaataatgaaacaacaatagagtgaagggttttgaagcccatgctaatatgaattacaaattatttttataatagattcattcactataacaagaaaaacaacaaaaacaaaaatattttaaattgtgcttacttgcttttgattatgcataatgtccttcaccgtcttgagcattacttagatgttttaaaattgaatagctaatttgaaattgagtataaaccaagaacaacttactgcaatttatgtgtcaccacaatgatgataacaatcttcataaaaattcttttgtccatcaaagtatgcaatatgtcttataacaaattaaatgttgatcaaaacattacagataaataggcatactttttatataataaaacctttagttccttgctgttctgcaaa

SEQ ID NO: 965 - DNA, 525 bp, Homo sapiens
  MAP TO AL121994.3; EXPRESSED IN BRAIN, SIGNAL = 0.92; EXPRESSED IN FETAL LIVER, SIGNAL = 0.94; EXPRESSED IN PLACENTA, SIGNAL = 1.1; EXPRESSED IN LUNG, SIGNAL = 0.97; EXPRESSED IN ADULT LIVER, SIGNAL = 1.2; EXPRESSED IN BONE MARROW, SIGNAL = 0.93; NT HIT: AF120996.1, EVALUE 8.00e-03
tctgcatgtggagactttgcatgtgccaagtcctccgctaagaaccgaaacctgtgtagtcgcattaaatcctcacagccgcccagggaggaacgtggaattatcaccgactatgttttatacataaggaaactgaggcacaggttactggctcagggtcacgtgaggccagagatgggctcctgaccattgtcccctgctgctctgcctccctggtaagtggttgaaggatgaaactattgttgtttttgcaaaggcgagagatggaggatcagctggaatctgttctctggcttcagtaggtgtccatatattttcctcatgtcacattctcattagatggcgtattctaccgccttccggaaatgcggtgagggcctgaggtcctgtttccttctgccagtgagctcggccctcagcgggaagggttggcagacgaccgtattttacaccaggtgatagtgggttgacctcacttgtgcttaaaaatttataacgttcccatccagatctttccaccaatgg

SEQ ID NO: 966 - DNA, 585 bp, Homo sapiens
  MAP TO AL133553.2; EXPRESSED IN BRAIN, SIGNAL = 1.1; EXPRESSED IN HELA, SIGNAL = 0.59; EXPRESSED IN FETAL LIVER, SIGNAL = 0.95; EXPRESSED IN BONE MARROW, SIGNAL = 0.99; EXPRESSED IN PLACENTA, SIGNAL = 1.3; EXPRESSED IN ADULT LIVER, SIGNAL = 1.4; NT HIT: gi14730471, EVALUE 8.00e-65; SWISSPROT HIT: Q9WVH8, EVALUE 3.00e-03; EST_HUMAN HIT: BG714827.1, EVALUE 1.00e-64
gatgggagctcaaaatggtcataagttttcatagtgagcttccatttccgggtacagccatgaccctgggacctggagctcaattatcctagaagttgggagtacttatggaaaaagaaagatttccttgttagcttaaatttactctaatcacttcttttaaaatgaatgccttacttgacttgttgacggcaaactgatctcagtcacggaaacagccagacactcaccaatacaggttccattttctgccttggtcattccatttggacaaagatcaatgcacttatagccaccacgggtgttcttacagtgctgatctggtctgcatacattttgtctacactcgttcacatcttgataaaagaacaaaggtaatgtagattaagaaaattatttattcaacttttccagagaaatcatacttttggattttagggatattatttatatatacattcattgcataatcattgtgtaaggttaaagtgcttaaattcaacaatgtatgtaacacactttaaaatataataaaaatcaaaaacaaacacaaaatattgttttacagagcaggtagccatacca

SEQ ID NO: 967 - DNA, 533 bp, Homo sapiens
  MAP TO AL160058.2; EXPRESSED IN BONE MARROW, SIGNAL =   1; EXPRESSED IN LUNG, SIGNAL = 0.99; EXPRESSED IN BRAIN, SIGNAL = 0.96; EXPRESSED IN PLACENTA, SIGNAL =   1; EXPRESSED IN HELA, SIGNAL = 0.73; EXPRESSED IN FETAL LIVER, SIGNAL = 1.1; NT HIT: AF272652.1, EVALUE 1.30e-01; SWISSPROT HIT: P33951, EVALUE 1.70e+00; EST_HUMAN HIT: AI281987.1, EVALUE 1.90e-01
aagtgtaaatgccctgtggcagaaagtagcttgtagagcagaaagtatcagtgaccactgactgctgcaagaggaagacagggaggggaggaagggccacattaagattggccttgttggccataataaggatcaaattcttatgcaccaccacatagccctttccaaagcccacattgatcttcatcccccacagcaccatcctgctgtacaaaagggcccagttgtgataatcactacaactggggagatgttggtcatcacaggctctgggggtctgggcaggatagaactgagctccgtgtgaccttcactacccccctaagcaatttagcatcactctgtagctggcctaagaagagggcagatcctccttccaactctactcgcttcttcccacctgactccaccacccacccttacaattttaagtgtttttaaatccacctacttctgggaaatttctggggctcttattgagtcctgctaagagcctgagggaactgagagaaagacaggaggctctccctttt

SEQ ID NO: 968 - DNA, 551 bp, Homo sapiens
  MAP TO CHR22_85.0; EXPRESSED IN LUNG, SIGNAL = 0.75; EXPRESSED IN BRAIN, SIGNAL = 0.69; EXPRESSED IN PLACENTA, SIGNAL = 0.72; EXPRESSED IN ADULT LIVER, SIGNAL = 0.76; EXPRESSED IN FETAL LIVER, SIGNAL = 0.62; EXPRESSED IN BONE MARROW, SIGNAL = 0.64; NT HIT: AB043547.1, EVALUE 3.40e-02; SWISSPROT HIT: P98133, EVALUE 6.80e+00; EST_HUMAN HIT: BG326038.1, EVALUE 3.10e+00
ctacaaggggcagaaagctgccaaaaaccacatgagcttggactctcccagccgagcctcagatgagaccccagccctggttgacgctggattctagcttcacagaggaccttgctgggccttgcctgactcaacccacaggaacacaacgtgtgctgttggaagaggacatgtctctgcaacactgctgtgcagccctagataactaacacagtgacctggtcacacaaagcaatggtcaggatcctgggattggggattcccagctccaacatatccctttctgttaacagcacctgctctgcctgggtcagccccactggggtgagtctccttccagctcagggatagccctttctctctggtcagcagccactttacacatggcccctgccgaggccccaaccatctctgcagctgctgtggctgctgcgtctgtctgtggagctcatgtaaaccctgggcagaagccttgggctatgagaaggaagatgccttctgctttctgtgcaaaggtgctgctgcctgaggctccttgtctgaaccccaaa

SEQ ID NO: 969 - DNA, 512 bp, Homo sapiens
  MAP TO CHR22_104.0; EXPRESSED IN HELA, SIGNAL =   2; EXPRESSED IN LUNG, SIGNAL =   3; EXPRESSED IN PLACENTA, SIGNAL = 3.5; EXPRESSED IN ADULT LIVER, SIGNAL = 3.1; EXPRESSED IN HEART, SIGNAL = 2.4; EXPRESSED IN FETAL LIVER, SIGNAL = 2.8; EXPRESSED IN BONE MARROW, SIGNAL = 2.8; EXPRESSED IN BRAIN, SIGNAL = 2.8; EST_HUMAN HIT: AI384071.1, EVALUE 4.60e-02; SWISSPROT HIT: P10220, EVALUE 4.20e-01
atcatttcctgctccacaccctgctggagccctgaggttctgaaagacactcacaagaagctatgcaggtccagggacatttttagcgttttggtttggtttgtttaagacaagaagccacttatgagtatggaataaggactacggtgccgaatgtggggaagctgagaaattaaactgtgaggacagaggccaactcagcaataaataaaatgtccctgcccagagcccagagccaaaaaacctctgtctccacttgcagggtgacgtaggccaaggccctgccctctctaggcttcagcaggccctgcccctcaacccccaaccctgggaatctaagggcgagaagccagtccaagatcctggcgtgtcagcacatcagacccgtggggccctttggagccccagggtgggctgggggaggtggattcctgagctaatcagagttagagggtctcagacacattcaggcctttctgtttggactcacaggctctatgaggccagacctg

SEQ ID NO: 970 - DNA, 523 bp, Homo sapiens
  MAP TO AL136382.1; EXPRESSED IN PLACENTA, SIGNAL = 0.64; EXPRESSED IN FETAL LIVER, SIGNAL = 0.63; EXPRESSED IN LUNG, SIGNAL = 0.8; EXPRESSED IN ADULT LIVER, SIGNAL = 0.64; EXPRESSED IN BONE MARROW, SIGNAL = 0.59; EXPRESSED IN BRAIN, SIGNAL = 0.7; EST_HUMAN HIT: BG610801.1, EVALUE 2.00e-69; NT HIT: gi14727196, EVALUE 1.00e-69
ctcaaagtccaagtttcgagctacttttgaactaaaagttgtccttgctattaagagtactgtataggtgatatggcatttctgaggagcatctttaaatgaaatggatttaacttaaattttgtatgtgcatttgtaattagcctgaagcaggacattctaaatgaaaagactgaattggaagcaacacttaaggaagcggagttggtaactcattctgtagaattgcttttgccactatttaaggacaccattgaaaagattaattttgaaaatgtgagtgacttatgaatatataataaaatgaaaagctagtataatactcagaatgcattaactgaggtctcatatcttatataggtatgctcacttatgagtatttcataccaaaaatgagggtttatcagaattctttattcctgtgtcattaactacagttcttttcctgaaagataatctcagcatacacctgataagaggctaagctagaaacaatatattttggatgtttgaattacccgga

SEQ ID NO: 971 - DNA, 502 bp, Homo sapiens
  MAP TO AC015930.3; EXPRESSED IN PLACENTA, SIGNAL = 1.1; EXPRESSED IN LUNG, SIGNAL =   1; EXPRESSED IN HELA, SIGNAL = 0.97; EXPRESSED IN BRAIN, SIGNAL = 1.1; EXPRESSED IN ADULT LIVER, SIGNAL = 2.5; EXPRESSED IN BONE MARROW, SIGNAL = 1.1; NT HIT: X15585.1, EVALUE 2.00e-03
agcgcatggcattaagaaactggctgagtgaaaatggaatattttaaatctcaaatactgtatcttcagcttagcaaatgtatcatacacctccaaatgtgggggacaaaagcaatataggttttttaaagaatttcccttattttttaaaaattttatccatttttcccctagattatttctcagacttactgagaaagtcccctgatcctccctcctgtccttttccaaagaatctatctctctttgtctctgtctctgcctcactctccgtctctctctcactctctctctgtctctctctctctctctctttggcagcctcattcatttcctcactctggagagtcacatacaacaaataaaaattttaaaaatgtagtgagaagatgagcatgcacttatctgctatttcagtagatagcacaggatggttactgctggagatgctgaggctggctgaacaaaagggagacaggggactgcatctccaagggaagac

SEQ ID NO: 972 - DNA, 523 bp, Homo sapiens
  MAP TO AL121993.2; EXPRESSED IN BRAIN, SIGNAL = 0.53; EXPRESSED IN PLACENTA, SIGNAL = 0.64; EXPRESSED IN LUNG, SIGNAL = 0.67; EXPRESSED IN FETAL LIVER, SIGNAL = 0.5; EXPRESSED IN BONE MARROW, SIGNAL = 0.44; SWISSPROT HIT: P36328, EVALUE 1.30e+00; EST_HUMAN HIT: BE741077.1, EVALUE 5.00e-82; NT HIT: gi16161328, EVALUE 3.00e-82
tgcttcactgtcattttgggaacagaagtaacagagataaatgcttgtgttcagtctgtatttttaactgaaatttctcaaagttctcaatactttctctgtttcatgctttcatttgtttttgtttctgttttcctaacacatccaaacttatgtgtgtttccattgttttcagggtgccgaacaggtgaagcaaaattgacaaaaggattcaatctagctgcccggttcatcattcacacagtgggacctaaatataaaagccgctatcgcacagcagctgagagttccctttatagctgctacagaaacgtacttcaactagcaaagtatggtctactcattttctggacatagcatatcatacattgttaaaggccccagtttttaaagataaaggccccagtttttaaagattaaaaacctagcagtggaagtcaaattttgagggacttaggtgatttaggaggaccctgacaatagaattatcttttcaaacttagcgggataaatgggatagatt

SEQ ID NO: 973 - DNA, 506 bp, Homo sapiens
  MAP TO CHR22_198.0; EXPRESSED IN HELA, SIGNAL = 0.52; EXPRESSED IN FETAL LIVER, SIGNAL = 0.6; EXPRESSED IN BONE MARROW, SIGNAL = 0.53; EXPRESSED IN BRAIN, SIGNAL = 0.6; SWISSPROT HIT: P30957, EVALUE 4.10e-01
ggtcatgcaagcaaattcactatacatgttacaggataaggaatttaatacaggatggacattatgcaaatgtgggaatagctaaagaaatgaaagttcaaaagagggtgttggaggatcaatgcaaaagtcaccaatctctcttcctgaagctggtgcaagtggacaaactggagctggcagaaaaacctgagaagccaagcatgtctagctgcggaactaggattgtgaaggtggtgtgtggaggggatctgtggggaagatgttgcttccatgtaatcattacgaggcatttggtgatggacctgggactgctgttggtcagcaagatcagcagtcacctggagaaagatgaaaaactggaacttaccaggcaccatcacattagtcaatgaagactcttagaaagcagtagctgctatttcacttccacctcccaagtttcttaaaagttcgtctattggcatattctaacctgaaaccatacaaagaagagggttccagga

SEQ ID NO: 974 - DNA, 579 bp, Homo sapiens
  MAP TO AL133543.2; EXPRESSED IN HELA, SIGNAL = 1.4; EXPRESSED IN BRAIN, SIGNAL = 0.68; EXPRESSED IN FETAL LIVER, SIGNAL = 0.8; EXPRESSED IN LUNG, SIGNAL = 1.7; EXPRESSED IN BONE MARROW, SIGNAL = 0.76; EXPRESSED IN ADULT LIVER, SIGNAL = 1.5; SWISSPROT HIT: P15924, EVALUE 6.00e-34; EST_HUMAN HIT: AW370867.1, EVALUE 0.00e+00; NT HIT: gi15300899, EVALUE 1.00e-111
ggccaactcttcttgattgcattgtggggcagtcataaatcccaaatcacttctgcctgtctcctttcagctgaaaacaatgcggcaggaagattacatgaagacgatagccgaccttgagttacattaccaagagttcatcagaaatagccaaggctcagagatgtttggagatgatgacaagcggaaaatacagtctcagttcaccgatgcccagaagcattaccagaccctggtcattcagctccctggctatccccagcaccagacaggtcggcttgggacatctttctctttgtatcaaccatccataccattttaaaaagaagggagtttgcataaaactggtttcagaaccatttctctgaatgctatatagccagtgttcttcgtgcactaaattttcagaattgattctgaaattcaaaggaagaaggtatacttttaggtagtatggatgttttttgaggcctagcaccttgatacctaggtattctctgatttttgtggccctaacttctttttacagtgaccacaactgaaatcactcatcatggaacctgccaagatgtcaaccat

SEQ ID NO: 975 - DNA, 547 bp, Homo sapiens
  MAP TO CHR22_107.0; EXPRESSED IN HELA, SIGNAL = 2.6; EXPRESSED IN HEART, SIGNAL = 2.7; EXPRESSED IN LUNG, SIGNAL = 3.6; EXPRESSED IN FETAL LIVER, SIGNAL = 3.2; EXPRESSED IN PLACENTA, SIGNAL = 3.7; EXPRESSED IN ADULT LIVER, SIGNAL = 3.8; EXPRESSED IN BONE MARROW, SIGNAL = 3.5; EXPRESSED IN BRAIN, SIGNAL = 3.3; NT HIT: gi14778023, EVALUE 0.00e+00; SWISSPROT HIT: P08392, EVALUE 2.30e-02; EST_HUMAN HIT: BG696148.1, EVALUE 0.00e+00
tacaaactccaccctcagccaatcaaaaccccctcccctgccgccggaccaatgaggagcagcagatgtggccgtcaggcgccgcctcaatgcctcctgggagttgtagtttagaagggagagcggaacttagaacccgggttcccctcgggtgatcccgccccctcgactccccagccaatcagcaacattagtctggttagacgctctctttgcttttccccacgagtgaccacggctagataggccgccggccagatgtggcgggggagagccggggctttgctccgggtgtgggggttttggccgacaggggttcccagaaggagaccgctaagctgcgatgctgcgtcgcaggcgggaagcaattatccccgctgttggaactgcggcggcccatggggccccgggcgggaggacaggttcttctgcccacagtgccgagcgctgcaggcacctgaccccactcgagactacttcagccttatggactggtacgagcgacggtttcgggaaacgggcccgggcgagagacacgtcgaggtct

SEQ ID NO: 976 - DNA, 501 bp, Homo sapiens
  MAP TO CHR21_8.0; EXPRESSED IN BRAIN, SIGNAL =   1; EXPRESSED IN HELA, SIGNAL = 2.5; EXPRESSED IN PLACENTA, SIGNAL = 0.78; EXPRESSED IN FETAL LIVER, SIGNAL = 0.93; EXPRESSED IN BONE MARROW, SIGNAL =   1; NT HIT: AL163213.2, EVALUE 0.00e+00; SWISSPROT HIT: O09047, EVALUE 2.70e+00; EST_HUMAN HIT: BE872407.1, EVALUE 1.80e-01
aattgtctttctgcgatgtggggcattgaaaggaaacttgtgaattactacccttcttttctgtgtctatacatgacaggatctactgttcctacagttaattcagtcaaagaaaccatttgatctgaatgtgtgaccgaatgaccagtggtttgactgaattcacagccaccgtggctgctctgcccatgcgagtccacaagggctttgtttgcttgctggcagtctctgcacagagaacacacagcatatgccaggtggccatgtgtctgaggcagagggaagggagaacaaagcaaaaaaagattccatttggacagagatgctttaagccatccgactgccagtaacatattaaagagagaagaaaatgcaatgatgcttgaatatactcaacagtaaacaactttaagcctgagcttcagatcacaaatctccctctgccgctgctgacatgctcagcttgaacgtggttgcaggagacaaaggaacctgctccag

SEQ ID NO: 977 - DNA, 540 bp, Homo sapiens
  MAP TO CHR21_29.0; EXPRESSED IN BONE MARROW, SIGNAL = 1.3; EXPRESSED IN HELA, SIGNAL = 3.9; EXPRESSED IN BRAIN, SIGNAL = 1.3; EXPRESSED IN LUNG, SIGNAL = 0.9; EST_HUMAN HIT: BE093705.1, EVALUE 7.60e-01; NT HIT: AF310888.1, EVALUE 1.30e-01; SWISSPROT HIT: P51820, EVALUE 5.10e+00
tgctgttggaaacacagctccccaaaataggctaggacctgtataataagcctaagaaaaatgatttttcacaaacaagagttaaataaacagtaatcagaatctcctgactcaatagccaaaatatcaagatcacagtcaacgatcatctattggaagagccaagatggccaagatggaagagcctctcatactcagagaccagaccactaagaagacctgcacagtccaagatcttcagaaggaaggcactgagaatatacagcccagggaagatgcagaccctgggctaagggagagaaagctgggaacgcttcacagggttatctagcactacaactgattcctggctaacagcagctgtgagaaaaggggtgagttacacaggcatgtagttgccactctagccaagaacctccacaatcttagacgcaggagatcccatgcaccccatggacatttgggctggccgagagagctgcttggagagttggctgggacaggactctatcctgtgcaggacccagagggtttgacaaa

SEQ ID NO: 978 - DNA, 566 bp, Homo sapiens
  MAP TO AL137145.3; EXPRESSED IN PLACENTA, SIGNAL = 0.43; EXPRESSED IN BONE MARROW, SIGNAL = 0.58; EXPRESSED IN BRAIN, SIGNAL = 0.55; EXPRESSED IN FETAL LIVER, SIGNAL = 0.43; EST_HUMAN HIT: AI365263.1, EVALUE 2.00e-66; NT HIT: AF111167.2, EVALUE 1.00e-102; SWISSPROT HIT: P07812, EVALUE 4.20e-02
gtcagctttcttctccaccgggtggtagagatgtctttaactctctggaggttggcgagggaggaatcccttacattgagctggtgagcaaggccatgctcgagctgaagcctctggagtcttcagacctcaccaaagtcgtggtttatggctactatttgtacaagctccagaccaagtggatgctccagtccgtggctgagtggcaccgccagcgccaggagtgagggatgctcaaacttgcagaggcatgaatcccctcgaagtaggcccttggatgaagccaaccagcttccagccaatgcgatgaaggccaggatgtagagattacattgtgcccagagctagagggattcctctagtttggtttaaactctgctccagcctgataagttaagggaaaaccacctgtttaggggtctctgaccttgctctgagtcttgctgtaaatatctctttcatggttgccagtaaaataaagttaaaaaaaaaaaaaagaaagaaaattgcagaagagaaagcagaagaaaccagagagttgagctcccgagttttgattccgttgt

SEQ ID NO: 979 - DNA, 501 bp, Homo sapiens
  MAP TO CHR22_202.0; EXPRESSED IN BONE MARROW, SIGNAL = 0.52; EXPRESSED IN BRAIN, SIGNAL = 0.56; EST_HUMAN HIT: BF898946.1, EVALUE 1.80e-01; NT HIT: X14614.1, EVALUE 1.00e-07; SWISSPROT HIT: P40356, EVALUE 2.70e+00
aagcacaaggcttgatcaccattgtggaaatactgagaacaaaaatgaaagaatgcatccaaataaaaaaaaatagtcatattgattgcttggaataaagaacctttgccgagaactcggtgattttaaatactttctgattttatgtaataggcatgtattgctttgaacataactcaataaataaattttagtaagtttagaaagtttcttcttattgctcttagctcagaaagcccatcctttgaagatgctactgagatccctgtgtggaggaggtgtgttgtgtggtgctttatgcaaatctttaccacattcaccacctttagcaccacccaggttctcagccctgagagcagccacactgtgaggggactgcccagagtggccgtgtgttgcgggaggaagcagctgctctaacattttacacgacccagtgagcaactgtgcagggttcattcagtttgaactccttgagcttcttatgatgcagacgaccca

SEQ ID NO: 980 - DNA, 518 bp, Homo sapiens
  MAP TO AF168787.1; EXPRESSED IN FETAL LIVER, SIGNAL = 0.78; EXPRESSED IN BONE MARROW, SIGNAL = 0.68; EXPRESSED IN LUNG, SIGNAL = 0.84; EXPRESSED IN BRAIN, SIGNAL = 0.75; EXPRESSED IN ADULT LIVER, SIGNAL = 0.79; EXPRESSED IN PLACENTA, SIGNAL = 0.75; SWISSPROT HIT: P38570, EVALUE 6.00e-15; EST_HUMAN HIT: BG033211.1, EVALUE 7.30e-01; NT HIT: gi15314182, EVALUE 6.00e-53
ctgctccccatctctcagactgaggcacccctcacccttggaggccaccagcctaggaattggctctgatagactcagagcaacccagatctgcctcttctcaccagcttcctcctcctcctcgtcttcctcctcctccttgtcttcctcctcctccttctccagagcccggcgctgcctggctgtgttcacatcgtcttctccaccgccttctttgttgctgtagcagtctccagtgtccacacgtgcatctggatccaggagattttctttaaaaacacacatggaagagctcagagtcagaaaggctccatcctcgcctgagcacgctcacacatggttctgccctgattcctttcacgtgatgcctcaaccctgccttgctccactgtgggcctgcgtcccactgcatctgccgtgagctggtgccttttcttggagaccaaggagatctctttagagctatccaaggccagtgaatgtccaatccttaccaaggtcgaagaagttggcctgag

SEQ ID NO: 981 - DNA, 511 bp, Homo sapiens
  MAP TO AC017082.3; EXPRESSED IN LUNG, SIGNAL = 0.6; EXPRESSED IN BONE MARROW, SIGNAL = 0.61; EXPRESSED IN PLACENTA, SIGNAL = 0.62; EXPRESSED IN ADULT LIVER, SIGNAL = 0.58; EXPRESSED IN BRAIN, SIGNAL = 0.73; EXPRESSED IN FETAL LIVER, SIGNAL = 0.75; NT HIT: AL163281.2, EVALUE 1.20e-01
aatgcagtttgggagtcctgcaggggaagagggataagaaggaggagacactcagttttcaagtgcatagttgtcagactgtcatctaataatggattgtagcatgtagcatacctgactgcagcaacagagatgcaaaaagactgggaagtttgaaggcctgagtccctactccgatctctctctgtctctttctctctctctctctctctccccaacccccccgcccccactctctcacttctcttattctccctcttgttttgtctcttgctcccaccttcacttttcttctttgtcttagcatccatagcagcagcaatagtcacaaagcctctagctcttccaccaacttctggacttagtgaaagctgagtaacacaacttggaagtacagaggagttaagacttcctaaaatgaccattgatcaataagaactggatcctaggagttgttgacatttaagtgcctctcctttctttcctctcctccctgctcttcatgaatggt

SEQ ID NO: 982 - DNA, 566 bp, Homo sapiens
  MAP TO AC018691.5; EXPRESSED IN HEART, SIGNAL = 1.3; EXPRESSED IN PLACENTA, SIGNAL = 1.6; EXPRESSED IN HELA, SIGNAL = 0.85; EXPRESSED IN BRAIN, SIGNAL = 1.4; EXPRESSED IN LUNG, SIGNAL = 1.8; EXPRESSED IN ADULT LIVER, SIGNAL = 1.7; EXPRESSED IN FETAL LIVER, SIGNAL = 1.2; EXPRESSED IN BONE MARROW, SIGNAL = 1.3; EST_HUMAN HIT: AA883645.1, EVALUE 3.00e-19; SWISSPROT HIT: P04951, EVALUE 9.30e+00; NT HIT: AL163204.2, EVALUE 3.00e-15
ggagtgctaggagccacttgaatacgacagagcttaaggtgccatctggaggctcttctctttggacagtttctgagtggcttctgtcctttgtcatctccttaggagacgaacaagaagacagtccatgcaaaatattgcagcaggtttgtccatgctccctggaaggatgggagcttggtccacgtcaacattaccaaagagaagtgcaagtggtacagtgagagaatccacacagccctggcccggatccgaaggaggttggtgttatttgcaggaagttacaagtggtctcctcgctctggacattctcatctgcttgatcttttttcctcccttttatttttagttgacacataatgattgtacctatttatgtgatacagagtgatatttaggtgtgtgtatacaatgtacaaagatcaaatcagggtaactcacatatccatcacctcaaacacacgtcgtttctgtatgttgtgaacattcaaaattctctcatttagctttttaaaaatatacataaattatagctgaccatattgaccctccagagctgcagaata

SEQ ID NO: 983 - DNA, 519 bp, Homo sapiens
  MAP TO AL133406.3; EXPRESSED IN FETAL LIVER, SIGNAL = 1.2; EXPRESSED IN BONE MARROW, SIGNAL =   1; EXPRESSED IN PLACENTA, SIGNAL = 1.2; EXPRESSED IN BRAIN, SIGNAL =   1; EXPRESSED IN LUNG, SIGNAL = 1.2; EXPRESSED IN HELA, SIGNAL = 0.72; SWISSPROT HIT: Q60301, EVALUE 5.50e-01; NT HIT: AJ012013.1, EVALUE 1.20e-01
ttggcactttatctgggtccagaagtaatgggaggagccagtaccttggtgccttccccctcaggatggaccagggcaccagagcagctgttcccaaggcagcagggatgaccacagccatgctcagagcccagcccttgactcgggaggccgacacagtagcagtgttaggagggcagacagtgatggtggtggtggggatgtccattaaacaagtggctggaaactcgcgacaggtggggatgtgcaaatatggagaggtacatgaactaccttttatgtgcttgaggtagactgcatataagaggcaggatatgttcttgactttctcttttaaacagcttttcagatagagttgacttccatagatcctctaagagtgataatgaaggttctaaattttgttttgttttttggatttttaaaaaaacataaggatttatttcaatccattggaatttatatttcacatacatgaaatacacttttataaatgtccgatttgtcccttctttggca

SEQ ID NO: 984 - DNA, 507 bp, Homo sapiens
  MAP TO AC021722.4; EXPRESSED IN FETAL LIVER, SIGNAL = 1.6; EXPRESSED IN BONE MARROW, SIGNAL = 1.4; EXPRESSED IN HEART, SIGNAL = 2.8; EXPRESSED IN HELA, SIGNAL = 0.78; EXPRESSED IN BRAIN, SIGNAL = 1.6; EXPRESSED IN PLACENTA, SIGNAL = 1.8; EXPRESSED IN LUNG, SIGNAL = 1.5; EXPRESSED IN ADULT LIVER, SIGNAL = 1.6; EST_HUMAN HIT: BI827007.1, EVALUE 8.00e-07; SWISSPROT HIT: P14373, EVALUE 2.00e-12; NT HIT: gi14778111, EVALUE 1.00e-04
agaagtagcctcctgccctcaaactcagagtccaggatagacactctgaagtgtaatctttccttgttgatcaagagattttttgcaaattgccagctcccattcttcacctgttcccatacccacctcccaatcatggtcaccagaggtaaaaggaggagagcccaagacacaaactgtgaagtcgaatctcccagcaagctcttgctgattctatttgatatgcttacattggatgctccagaggtcatcagaaataataaagaagttatgggtcgtgtcaacatccaaggtcacgtccacttggaacttcagcattctaggattcatctgtagaaaagctctcagctggggctccatttccttgatattgggaatctgctttcatagctgccagttggacctgatgtcatttttctgagaaaccactatgcaaaagaagaacaataaaccttttccatgaggctctttctgcagtgaattgacactgttgaggcagaagatgca

SEQ ID NO: 985 - DNA, 556 bp, Homo sapiens
  MAP TO CHR22_77.0; EXPRESSED IN HELA, SIGNAL = 0.9; EXPRESSED IN BRAIN, SIGNAL = 0.44; EXPRESSED IN LUNG, SIGNAL = 0.5; SWISSPROT HIT: P49290, EVALUE 7.90e-01; NT HIT: AF120999.1, EVALUE 3.40e-02; EST_HUMAN HIT: AW898189.1, EVALUE 0.00e+00
gacaaaaatgcaggagtcccctgggatgagctgacaagtgccagcaatttcctcctgcccagtgtgatcacccagaaaggccaccttcccaaccaacatgccacccagccctgagactggacctacagggataatctctgagatgagatttaagtcaattccaagcatggaaatcggtgaaattaccctccaccgctccaacaacatctctgggcaggcaaggttgggtgggtggaggtgttggttaagggtttggggggttttgacaaaaagaaaaaaaagagagaaagagagagacagtatcagcaaattggagggtaattttttcccagggaagagaaccacatgccaggcactattctaagcatttcatgtatattacttcatcgggtcctcccttcaaaggcagggactgttattcctttttaaaggatgcagaaacaggttcagagacgtggggtgacttgcccaacaccacacagcaagggagcagccaactcaggatgaagccatatcagtttccaaagcatcttctactttttccccacaccagaaa

SEQ ID NO: 986 - DNA, 594 bp, Homo sapiens
  MAP TO AL160002.2; EXPRESSED IN BRAIN, SIGNAL = 0.74; EXPRESSED IN FETAL LIVER, SIGNAL = 0.68; EXPRESSED IN LUNG, SIGNAL = 0.65; EXPRESSED IN ADULT LIVER, SIGNAL = 0.63; EXPRESSED IN BONE MARROW, SIGNAL = 0.75; EXPRESSED IN PLACENTA, SIGNAL = 0.77; SWISSPROT HIT: Q16787, EVALUE 5.00e-08; NT HIT: gi13507635, EVALUE 6.00e-81
ccgtagctcaaaaggcacagaagaatagctgaaattgtaatggaactgacctatgcacacattctcatcgtccagttgtgcagaagcatttctgaagtagcccagcctgcataactcacagtgctgccctctagtgttgtgtttacagctcacgcaaatgactgtatttagcagatcgatataactgcatcgattggagtggccgaagcattcacaatcttgcaaggaagaacagaaatgtatacagagtgtatacagtagcagagtaatagcatactacatgcttgggtaaaatgagggatggagaaaagacggtggaatggcattacatatatgtgattcaacacaacacatggtggcaacaggtggttgtgactggcacggaaatagcatctgtttcaagcaggatagaaaggtcggacattcggaacaagactgaagattgttaattcttggcagacaaaatgaacagaagcatttgcaggtgtacaccttttaaaatttgggaagcctcagtttctagtgatgaaaaagtctattatttttattttttgcagatggagaattttagtgtctttgcaccatttcccttgt

SEQ ID NO: 987 - DNA, 594 bp, Homo sapiens
  MAP TO AL132765.16; EXPRESSED IN BRAIN, SIGNAL = 0.44; EXPRESSED IN FETAL LIVER, SIGNAL = 0.53; EXPRESSED IN PLACENTA, SIGNAL = 0.45; EXPRESSED IN ADULT LIVER, SIGNAL = 0.39; EXPRESSED IN BONE MARROW, SIGNAL = 0.44; SWISSPROT HIT: Q62267, EVALUE 3.90e-01; NT HIT: U60822.1, EVALUE 9.00e-03; EST_HUMAN HIT: BG911878.1, EVALUE 3.00e-03
aattagccaacgcatgttccacagaacactggttcaagggaagctaactgatgttacttaaaaggctgtctggtctaggaaaggtaaaagataatgggctaggccaggtcagtagttccctagctttacaggacttttcaaagccgtaaataggctggtgtacattgtgaatccctgagaatggggggaggcctagggactattgtttggaaaattagtaacctaactctattcctccccattttatagatgaagcaactaaggccaagaagggaaagtgatttgggcaaggttatgcaactagttcatgctgggattaccccagatgctatgttgaggcatacttcatgctgtgcagaagcatctctttgtacctcagggcagccctgtcctcctggttgtgttcctgctgtctggagtctgtgtgttttcctttctcccacatatccctgcataagggtttgtgggcttctatggcactgctcctgtgagggcccatgggcacccaaagtgcccaacccctgcctgggacatgcccctcactgctgcatgcctgagggaactattgagaggtgcagaaaaccacatgggtct

SEQ ID NO: 988 - DNA, 543 bp, Homo sapiens
  MAP TO CHR22_87.0; EXPRESSED IN BRAIN, SIGNAL = 0.28; EXPRESSED IN PLACENTA, SIGNAL = 0.36; EXPRESSED IN HELA, SIGNAL = 2.2; SWISSPROT HIT: P04052, EVALUE 1.50e-01; NT HIT: Y19213.1, EVALUE 1.30e-01; EST_HUMAN HIT: H82812.1, EVALUE 0.00e+00
tccagtgtgatagccgtcagccacatcagcccttgaaatgtggccgctggactggaagcactgaattttaaattttattttaattaacttaaatagccacgtctggttcatagtcactgtgcagacagcacagacgtagaacgtgtcggcgttgcaggaagttctgcacagcactgtgctaaaacaaaaggcaggttgtgttactctttcagcgggaatcccctcgtggctggttctctcgctgagaatgcaaggcaaaagcaaagtctttactctggtctttgaggttcctggtgatcccacctccccacaagtacaggtcactgtcccataccttcatgctgctccagccaagtggcccccacacaccaagcatacgcttagaacatccttcccagatggcagcatggctcagtctttatctccttcagctctctgcttctctgccaccttccctaggagctttctcagggcagctacgtacagtgtgcagcctgccctgtcactcccccaccccccgacccgcttgctccttgtcttttc

SEQ ID NO: 989 - DNA, 580 bp, Homo sapiens
  MAP TO AL133263.2; EXPRESSED IN PLACENTA, SIGNAL = 0.6; EXPRESSED IN ADULT LIVER, SIGNAL = 0.29; EXPRESSED IN BONE MARROW, SIGNAL = 0.6; EXPRESSED IN BRAIN, SIGNAL = 0.58; SWISSPROT HIT: P70444, EVALUE 1.30e-01; NT HIT: AJ229043.1, EVALUE 9.00e-03; EST_HUMAN HIT: BI562222.1, EVALUE 1.00e-39
ggccaaccctctcattttctaagacagtttttagtaactagtggtaagtgattttacagataattaagtgggattatctcttttgaactcttttttctcaatgcagatcataatctactttctcagcccaaggagcatagcattgttcagaagcatcaccaggaggaaataattcacaagttggccatgcagctgagacacattggggacaacattgatcataggatggttcgagaggtgaggcttcagtttccccagccagggcctgtcaggtaggaggaaagagcaaacaaaactacggctgccaagtgtctgagatgcccaggaattatcagaattaatggaataatgctgtctggattaccaaatgttagatctaaacattgtgaacctgagccaaagctggcatttaatctcatacttgctactcagactgtggtctgtggactggcagcatcagcatcacttgattagatgtgcaagatctgagactccagcccacacagtcagaccagcccacacagtcagaatcagaatctacctttttacacattccccaggggatttgtgtgcacattga

SEQ ID NO: 990 - DNA, 530 bp, Homo sapiens
  MAP TO CHR22_117.0; EXPRESSED IN PLACENTA, SIGNAL = 0.43; EXPRESSED IN LUNG, SIGNAL = 0.47; EXPRESSED IN FETAL LIVER, SIGNAL = 0.45; EXPRESSED IN BRAIN, SIGNAL = 0.44; EST_HUMAN HIT: AW020352.1, EVALUE 1.90e-01; SWISSPROT HIT: P11369, EVALUE 1.10e-01; NT HIT: AF288742.1, EVALUE 1.30e-01
tctctcaaaagaagcaatgggaaattctacaattagtgttgttcatttcaatagctctctctctcacagacctacaaaataaatacacaaaaaaacagtaagaatatatatttgaactattagccaacttaggctaattgaattcgtagaaaactatacccacagcagcagaataaacattgctatttcaaatacacagggaacatttttcatgatacttcctattctaggccacaaaacaaatgttaacaaatttgaaaatatgaagctcatgcaaggtatgatttaatgcagaattaactaattaaatggaattgatacatgatgaactgtggtaaatcttcaattttttggaaatgaaagaagataaaactacatatttcataagtcaaagaaaaaaatcacaacaaaattagaaaatactgaacttttaaaacacaaaaacaaatgtattaaaatttaaaaaatagatataagtaagtagttttaaataaatctattggattgaatgtttggcagtggaaagaagc

SEQ ID NO: 991 - DNA, 566 bp, Homo sapiens
  MAP TO AC023123.3; EXPRESSED IN HELA, SIGNAL = 1.2; EXPRESSED IN HEART, SIGNAL = 1.6; EXPRESSED IN LUNG, SIGNAL =   2; EXPRESSED IN FETAL LIVER, SIGNAL = 1.8; EXPRESSED IN PLACENTA, SIGNAL = 1.9; EXPRESSED IN ADULT LIVER, SIGNAL = 1.6; EXPRESSED IN BONE MARROW, SIGNAL = 1.8; EXPRESSED IN BRAIN, SIGNAL = 1.8; EST_HUMAN HIT: BI604179.1, EVALUE 2.00e-94; SWISSPROT HIT: P19360, EVALUE 1.60e-01; NT HIT: gi14770736, EVALUE 3.00e-76
gcctaccctatcccttcctggagcacatccgggactcggcgaggcgtggtctcgggaggcggagtctgacgcaagccggcccagcccacctggctaaattcacagtcgcgctcgctccttccgcccgccagaggtcgcaggctgcgagagcaggttcctggtttggcaagcactcgccccctcaggcccgttcattctcgcgagagaaagcgcgaggcctgccgggagtgagcgcggccgtacttaggtttgctcaaaatggcagcgctggaggaagaattcacgttgtcttcggtagtcctgagcgccgggcctgaaggactcctaggcgtggagcagagcgacaaaacagaccagtttctagtgacagacagcggcaggacagtcatcctctataaggtgaaggcaataggtttgggagcgccccgactgccttctcgcccctttctgagcgcggagctcgagctcaagtttctcacagcttcagaaagagatcgtggagaaggcttagcagagagccggctgggcctgttggggacgctgagtgaggtctggaatctggcttg

SEQ ID NO: 992 - DNA, 600 bp, Homo sapiens
  MAP TO AL133499.1; EXPRESSED IN BONE MARROW, SIGNAL = 0.66; EXPRESSED IN BRAIN, SIGNAL = 0.9; EXPRESSED IN PLACENTA, SIGNAL = 0.87; EXPRESSED IN LUNG, SIGNAL = 0.98; EXPRESSED IN HELA, SIGNAL = 2.7; EXPRESSED IN ADULT LIVER, SIGNAL = 0.76; EST_HUMAN HIT: BG955496.1, EVALUE 0.00e+00; SWISSPROT HIT: P78563, EVALUE 5.00e-76; NT HIT: gi14780762, EVALUE 0.00e+00
aaaggaggaaaacaccagggcccgtcctccccaagaacgccctgatgcagctgaatgagatcaagcctggtttgcagtacacactcctgtcccagactgggcccgtgcacgcgcctttgtttgtcatgtctgtggaggtgaatggccaggtttttgagggctctggtcccacaaagaaaaaggcaaaactccatgctgctgagaaggccttgaggtctttcgttcagtttcctaatgcctctgaggcccacctggccatggggaggaccctgtctgtcaacacggacttcacatctgaccaggccgacttccctgacacgctcttcaatggttttgaaactcctgacaaggcggagcctcccttttacgtgggctccaatggggatgactccttcagttccagcggggacctcagcttgtctgcttccccggtgcctgccagcctagcccagcctcctctccctgtcttaccaccattcccacccccgagtgggaagaatcccgtgatgatcttgaacgaactgcgcccaggactcaagtatgacttcctctccgagagcggggagagccatgccaagagcttcgtcatgtctgtggtcg

SEQ ID NO: 993 - DNA, 558 bp, Homo sapiens
  MAP TO CHR22_120.0; EXPRESSED IN BRAIN, SIGNAL = 0.41; EXPRESSED IN PLACENTA, SIGNAL = 0.44; SWISSPROT HIT: O83873, EVALUE 3.60e-01; NT HIT: AF207550.1, EVALUE 5.30e-01; EST_HUMAN HIT: AI204914.1, EVALUE 1.30e-02
gacagcggttctgctttctccttgtgcggctttccaggtgccctgcatttgctaggggaagacaagatcatgaagaggcatagcggctgtgccatgggtcaggcagagccgggcgtgtgccacttccactagtaatccactgcatgggactcagtcacatggccacacctgaccacaagggaactgcagaatgcagtcagggggagtggccaggaaaaagcagaaatgttttttcctgaacagttcagtttgtgctacagagaggctgctaggaaaagatttctaaagcggcactgtccgaaggcacctgcacactgtcatggaagcacaccggcaccagggccagaggcactcggcacttcctggaaactttggaagggaagtgcatctgtatttctgcaggagagaggagtgtgaggttgtgtggacagggagtgaggacaggattctgggcagagggagtgatgtaggtagaggctgagctgcatgagaggggagtgtgagatcgtgtggacaataggtgaggacaggattctgggcacagggagtggtgtaggt

SEQ ID NO: 994 - DNA, 575 bp, Homo sapiens
  MAP TO CHR21_16.0; EXPRESSED IN HELA, SIGNAL =   3; EXPRESSED IN FETAL LIVER, SIGNAL = 0.83; EXPRESSED IN BONE MARROW, SIGNAL = 0.95; EXPRESSED IN ADULT LIVER, SIGNAL = 0.49; EXPRESSED IN BRAIN, SIGNAL = 0.95; NT HIT: gi14731347, EVALUE 0.00e+00; SWISSPROT HIT: P31641, EVALUE 4.00e-89; EST_HUMAN HIT: BI029772.1, EVALUE 1.00e-92
cgtccactacatcgtcatcgtggcctgggctacagactacctgttccagtccttccagaaggagctgcccagggcacactgcaaccacagctggaacacgcccccctgcatggaggacaccatgcgcacgaacgagagtgtctggatcaccatcagctccaccaaccttacctcccctgtcactgagttctaggggcgcaacgtgctgagcttgtcccctggaatcgaccatccgggctctttgaaatgggacctctctctctgtcttctctttgtctggctagcctgtttcttctgcatctagaaggatgtcaggtccacggggaaggtcgtctacttcacagccacgttccagttcgccatgctcctgaggcagctggtccgagggctgatgctgcccggcatgggtgccggcatcaatttttctctgtatccagacatcacctgcctcgagggcgcacaggtgtgtattgacgctacgacccagatattcttctcctaggccatctgcctgggggccgtgacctctctacggagctacaacaagtacaagtacaactcgtacagggactgca

SEQ ID NO: 995 - DNA, 583 bp, Homo sapiens
  MAP TO AL133472.2; EXPRESSED IN FETAL LIVER, SIGNAL = 0.44; EXPRESSED IN ADULT LIVER, SIGNAL = 0.47; EXPRESSED IN BRAIN, SIGNAL = 0.38; SWISSPROT HIT: Q92562, EVALUE 7.00e-26; NT HIT: gi14750816, EVALUE 1.00e-85; EST_HUMAN HIT: BG772492.1, EVALUE 1.00e-85
gacacctgaaaatttgtatggctataaatcatagaaataataaagtgagaaatgtatcaaaggtctttggccttttaaataggcatctaaaagccattactaagtttataaagcatatttctctttattttttgttgcataggttttgtcaggttcttagaaggctattatattgtgttaataactaaaaggaggaagatggcggatattggaggtcatgcaatctataaggtcgaagatacaaatatgatctatatacccaatgattctgtacgggttactcatcctgatgaagctaggtatgtatggtggtaactacctttttttttttggagacaaggtcttgccctgttgcccaggctggaaggctggaatataatggcatggtcatagcttgctgtagccttggcctcccaggctcaagtacttttttttaatgtcgtagatcaggtagaaaataaaatacagtttagatattatgaatgttatgtaaaaagatcaaatgttggctcagaattttagaatttttgttaagagctgttaaagactccattatagcaattggcaagaatcaacaatggct

SEQ ID NO: 996 - DNA, 547 bp, Homo sapiens
  MAP TO AL160313.1; EXPRESSED IN FETAL LIVER, SIGNAL = 0.61; EXPRESSED IN ADULT LIVER, SIGNAL = 0.65; EXPRESSED IN BONE MARROW, SIGNAL = 0.64; EXPRESSED IN BRAIN, SIGNAL = 0.6; SWISSPROT HIT: O88101, EVALUE 3.90e+00; NT HIT: AB058725.1, EVALUE 5.00e-78; EST_HUMAN HIT: AI144487.1, EVALUE 1.00e-14
gacttcccccgatttctttcttacgtgagatccaagaaccctctcttgggccctggattgggacccctttccgtaacagaggcacatgcacgtctggagccagggaacatcccaggtgggaactaatttcaggcctgtgtggtccttcccctacatcagagaccagaaggaccacagggtggaggaccagtcccaggcacgagcaaccagcaaggagaggtctcaggagtgctcaccggcctcgtcctccccgaaggagatgatgtacgggtagtagttgttgatgaggcctgggaactcacaggtctggccgtggcccatgcagatctcactgtactgccactggcctgtccctgggttctcttggagggacatcagacgcctgcaaaggaagatgagctgtgaggccatgcctggcatggcacccaggggaacctacccaccaatccatccatccatccatccatccatgtatccattcctccctcccttcttccctccatccttccaccatccatctacatatccactcacccactgatccatg

SEQ ID NO: 997 - DNA, 535 bp, Homo sapiens
  MAP TO AL160191.1; EXPRESSED IN PLACENTA, SIGNAL = 1.8; EXPRESSED IN LUNG, SIGNAL = 2.1; EXPRESSED IN ADULT LIVER, SIGNAL =   2; EXPRESSED IN BONE MARROW, SIGNAL = 2.1; EXPRESSED IN BRAIN, SIGNAL = 1.5; EXPRESSED IN HELA, SIGNAL = 2.4; EXPRESSED IN FETAL LIVER, SIGNAL = 2.2; SWISSPROT HIT: P91697, EVALUE 3.80e+00; NT HIT: AE004470.1, EVALUE 2.00e+00; EST_HUMAN HIT: AA088754.1, EVALUE 7.50e-01
ttggtagaccctgcagatccattcccaatggtgtatcttcatactaatcatgaaatccatctaatagccatacaagtgaggttttaaaacccaacaaactagactcaaatgaaatctgatgagggaatttatgatttgttcttcctacagcctttggtatcactgacataaaactgaatgtatgtgctgagggtgcttgtgtcttggtgatagacaaggtaggtggtccagcccatggtactggcagcttaaagtcagccagccatcagtgggaagtgcctgtgaattatgcaggagtgggaggggagggagtaggcagtaaagtaatgcatttctgtggatccaaagctttccaaactacctgcaagtcagcaaatatgggggatgttgtatgactaagtgagaatcagataatataatgtgtatggagctctttagttcttcagaaaaaaatgctgtctaaacaaatagtgctgatatcaaagataatgatacagtaccctaattttaatgctctgctacctacctgccagct

SEQ ID NO: 998 - DNA, 575 bp, Homo sapiens
  MAP TO CHR22_176.0; EXPRESSED IN PLACENTA, SIGNAL =   1; EXPRESSED IN LUNG, SIGNAL = 1.1; EXPRESSED IN HELA, SIGNAL = 1.2; EXPRESSED IN BRAIN, SIGNAL = 0.93; EXPRESSED IN ADULT LIVER, SIGNAL = 1.1; EXPRESSED IN FETAL LIVER, SIGNAL =   1; EXPRESSED IN BONE MARROW, SIGNAL = 1.2; EST_HUMAN HIT: BE727083.1, EVALUE 0.00e+00; SWISSPROT HIT: P49640, EVALUE 4.20e+00; NT HIT: gi12742752, EVALUE 0.00e+00
aacaagaacgtcttgcccagggtcacacaactgagggctgagcctttatctcttccctgggtgttggcacagtgctgtgagggaagcacaggagatcggcagaggccgcagaggggcaggagaaggtctgaggacactcaccacttcctctatggctgcgctgtctcccagcagcggctcctcagccagcagggacagcaccagccctttgacgcagtgagtgtagagattcatcctcacgagccccatgcaggactctgctggtgtcagcctggagctgattccatctgcagaggggccagcaccctgacagtttgctgagcctgaactgcattccagaccaggggctgcgtggctttcacagaccccatcaacatcctcatccaggccttgttcccccgtgggaagcttgtttcctctctgtcctggatctaagcgaggcaataacaagggcctgcgggtccttctggggagagggtctgctctgggaatgggggcttggctgctatggccaggatggtcttcgagctgctcttgggctccatgctgggtcagcatctcaggagcagagggag

SEQ ID NO: 999 - DNA, 528 bp, Homo sapiens
  MAP TO AC024066.3; EXPRESSED IN BONE MARROW, SIGNAL = 2.5; EXPRESSED IN ADULT LIVER, SIGNAL = 2.4; EXPRESSED IN BRAIN, SIGNAL = 2.5; EXPRESSED IN FETAL LIVER, SIGNAL = 2.5; EXPRESSED IN LUNG, SIGNAL = 2.4; EXPRESSED IN PLACENTA, SIGNAL = 2.5; EXPRESSED IN HEART, SIGNAL = 2.3; EXPRESSED IN HELA, SIGNAL = 1.7; SWISSPROT HIT: P39855, EVALUE 8.40e+00; EST_HUMAN HIT: AW183512.1, EVALUE 2.00e-56
tgattgcttcagcaacatctgtttatgctgtccataaccaatttttctttgtatgtctattacaccttactttagcaattgtaatgaacagcataactatttgtgtgactacacttggtataattctattaagcatggagattgcaacttttgcattaaatgcaaccacatacaattggtcaaacgtaagtaccaattttaataataattagatcaaaattttaatataaatgaaaaattatggtgaatgatgtatgttgaagtgagtaaggcatagaaaaggccaccaaatgtgtcaattatctttggcatagaaatgtaaagataaactgtattttctctatattcttgctataagcacattgaaaaataagtttttctcaaaaatcgtgatgcactataaacctcaaagagagattaaaattatcgttaagataaaatgatagaatacttagaaaccccaaagacctacctgaaaaacaactgcagaagtcaaacagtttagagaggtggctggacaaaagaaaa

SEQ ID NO: 1000 - DNA, 573 bp, Homo sapiens
  MAP TO AC015889.3; EXPRESSED IN HELA, SIGNAL = 2.8; EXPRESSED IN FETAL LIVER, SIGNAL = 6.2; EXPRESSED IN LUNG, SIGNAL = 6.1; EXPRESSED IN BONE MARROW, SIGNAL = 6.8; EXPRESSED IN BRAIN, SIGNAL =   6; EXPRESSED IN ADULT LIVER, SIGNAL =   6; EXPRESSED IN PLACENTA, SIGNAL = 6.7; EXPRESSED IN HEART, SIGNAL = 5.6; SWISSPROT HIT: Q37680, EVALUE 9.40e+00
aattggctcttgtgacccagtacacgctgacttcaggctccactgccccaaccaggatgctttacaaaaaacttaaaactaaatattacacatgggtgccccttaacaactaatgacctgttgcctcttcagccagctggagctttggcctccagagcaacgtcctatctttctgctccatttctgacttctcagttcccaacatctaagaagtaataaataaaattgaacatacatttttcaaaaatctcatgttcctagggagagtaattccttcctttgctttcccatttcttgctgactcgttccctctctgactgactagctgtgcatgtgagtcagagtcactagctgtggaaatggagccccttccaaaaaggcattttgatccagctcttaatgttcctcctacgttgttttggagtggtccttctcaggacagctggtggtaggagtaattttctttaatttatggagcggtatctaagtcatgtagactcacagtgaagagagtgtatgtctcatagcacaaggggatgcccttgcactggggctgccttggacaaaagagga

SEQ ID NO: 1001 - DNA, 567 bp, Homo sapiens
  MAP TO AL023656.8; EXPRESSED IN BONE MARROW, SIGNAL = 1.4; EXPRESSED IN BRAIN, SIGNAL = 1.6; EXPRESSED IN HELA, SIGNAL = 1.7; EXPRESSED IN HEART, SIGNAL = 1.6; NT HIT: L11172.1, EVALUE 5.40e-01; SWISSPROT HIT: Q00326, EVALUE 7.10e+00; EST_HUMAN HIT: AI656894.1, EVALUE 6.00e-91
ttgctgatgagccatgctacttctattcacactttgtaaaactgataatcacagtactgaaacatttttcatctcaaaagaacatacccaaattttggggaataagaaaataaatcatttctataaaatgaaatataaattttataatcactgccccccccaatgtaattaaattatcaaacatacctttgtgctatattcctgccaaggccccatttctgctctgaatccttcagagactgagtaagggtagaaatcaagtggatgacaacctgctggtccaatgttgctactgtttctaaaatgctgtaaacctggtaatagtacctcataccataatcctggataaactgcctgaaagtaaaacaggtttatttaggattactcctggggcaattccttgtgttggtatctacgtggcaatcaactatgaactgaacataacaaagatcatttcataaaagtttactgtaagaatctggatgcaatatgaaaactatttaaaacactttaaaataaagaattgaagtggcttatttaagttgagccatgaccagagtgaaagca

SEQ ID NO: 1002 - DNA, 588 bp, Homo sapiens
  MAP TO AC025170.2; EXPRESSED IN BONE MARROW, SIGNAL = 0.67; EXPRESSED IN ADULT LIVER, SIGNAL = 0.62; EXPRESSED IN BRAIN, SIGNAL = 0.66; EXPRESSED IN FETAL LIVER, SIGNAL = 0.67; NT HIT: gi13385681, EVALUE 2.00e-34; EST_HUMAN HIT: BG756187.1, EVALUE 3.00e-96
aaagtgaaaaccagaaaaagatgcttaccatagcaactttggcttcataatcattggaaatctggatacaaacttcttcagctcttgcttgacaagctctttctaccacatctttccactgcttttgcactacggaacgccagactttccagactttcttcagtaaagttctctggtagtactggtcagctagtttaccttcataaacctaaataaaagtaaaatataacttcaaaaacacagttgattgataaatatattggtagtaataataaacataacatggtggtaagtgtacatatacacattatttaattctatgtaatcatattattctcatcttgcatataggagaacaggcttagagaggttaagcaagctacgtagttcacataagtagatgagtaaagccagacttgcctgactccagagactgagctcttatccattacatcattgctttatgcaactaatcaagttagagaaaaagaatacaaccaaatgaaagaaaatgagcaaatcaccacttgccatcttagttatgaatttagcaggaccaggagaataacagagtggctagaaggcagg

SEQ ID NO: 1003 - DNA, 553 bp, Homo sapiens
  MAP TO AL160168.1; EXPRESSED IN BONE MARROW, SIGNAL = 1.7; EXPRESSED IN HELA, SIGNAL = 0.66; EXPRESSED IN BRAIN, SIGNAL = 1.7; EXPRESSED IN PLACENTA, SIGNAL = 2.3; EXPRESSED IN FETAL LIVER, SIGNAL = 1.5; EXPRESSED IN ADULT LIVER, SIGNAL = 1.8; SWISSPROT HIT: P37729, EVALUE 9.00e+00; EST_HUMAN HIT: AA878827.1, EVALUE 2.00e-01
agagctgacagtgagagggctagttttgatacagttgtatcatatgtgattagaaaacacatatgtgactagtgatgcttttctgaaggtatatgtttttacatagtccccttgcaatgccctacaaagagaagagatcctttaatgaaatggagattcatcctgtacctttgcagctgcccttccatttggtgtgcagtcaactgtgtatttcatacaaatattgcttcaggatttccatagcagataagaagactgctgatgtcagaatgcagtacagagagaatctgcacacaggtagccctgtgaaatttagcttggtgaataattaccgtgatgatcataattaataattatcttgtgccagtggagaattgtactaattggtaatctcttctcttaaaagtcctaatattttatttctgcttattgctaactatcaagtggaatgctaatgaaagtgtggatgactggtattgtaataattataactgtaatcacattcagcagctaacctctaattaaaataaatcagatgatgtagcaaatcggc

SEQ ID NO: 1004 - DNA, 547 bp, Homo sapiens
  MAP TO CHR21_49.0; EXPRESSED IN BONE MARROW, SIGNAL = 0.65; EXPRESSED IN HELA, SIGNAL = 0.71; EXPRESSED IN BRAIN, SIGNAL = 0.68; EXPRESSED IN FETAL LIVER, SIGNAL = 0.65; EXPRESSED IN LUNG, SIGNAL = 0.53; EXPRESSED IN PLACENTA, SIGNAL = 0.56; SWISSPROT HIT: P02840, EVALUE 3.00e-02; EST_HUMAN HIT: AU132357.1, EVALUE 1.20e-02; NT HIT: AL163252.2, EVALUE 0.00e+00
aatggtgagacgtagctgggtatgaagcaaggattttggtagcttttataccccaaagtactcaatctgcagtggtttagagtttggaaactcttggataagcagttaagttgtccaaagcagttggaaccgttgcggagggtttggcaggctttggatgcatttcgagtgggtatgtggcaattgcatacatacccattggtctgggtgcttgggctgcagctggggctggggctgacgttggtagtttcacagacactgaagacttggcctgctgatggggagttgcagggcacagaggagtttgacgggtcacaaccagtggtactgcaggtcttgggctcacagctgggagatttgcaggttggtgcttcaccgtaggattcttggcagtaatccaggagccagagatttccttggtagctactgggtaagcagtgtccaaaggtagggcttaaatcactggagctaagagtaacagaagaggtcactgggatataacagtgagttctgtatgatgtggtactgcagacaccaggatagcctg

SEQ ID NO: 1005 - DNA, 539 bp, Homo sapiens
  MAP TO AL138967.2; EXPRESSED IN FETAL LIVER, SIGNAL = 0.67; EXPRESSED IN PLACENTA, SIGNAL =   1; EXPRESSED IN BONE MARROW, SIGNAL = 0.94; EXPRESSED IN BRAIN, SIGNAL = 0.92; NT HIT: AL163246.2, EVALUE 3.00e-79; SWISSPROT HIT: P03364, EVALUE 4.00e-09; EST_HUMAN HIT: AA984295.1, EVALUE 1.00e-76
ctggcatgcaaatgtctcaccaataagtccagtgtgcttgctacttcttgctcactggatccaatcagcataatgccatcaacgtaatggacccagtgtgatatcttgtggaagcgaaaagagatcaaggtctctctgaataagattatgacacaaagccagagagttgatatacccctgaagtaggacagtaaaggtatattgctgaccatgccggctgacggcaaattgcttctggtgggccttatggacaggaatgtagaaacaggcatttcccaagtcaatgactgcataccaggtacacagagatatgttaatttgctcaagcaacgaaaccacatctggtacagctgctgcaattggagtcaccacttgtttaagcttgtaatactccgctgtcattctccaagatccgtctgtcttctgcacaggccaaatagaagagttgaagggggatgtggtgggaatcaccacttctgtgtctttcaagtctttgatggtggcagtaattgctgcaatctctttccagggatgcgata

SEQ ID NO: 1006 - DNA, 518 bp, Homo sapiens
  MAP TO AL160231.1; EXPRESSED IN PLACENTA, SIGNAL = 2.9; EXPRESSED IN LUNG, SIGNAL = 4.9; EXPRESSED IN BONE MARROW, SIGNAL = 4.3; EXPRESSED IN ADULT LIVER, SIGNAL = 4.6; EXPRESSED IN BRAIN, SIGNAL = 1.8; NT HIT: gi14749996, EVALUE 2.00e-65; SWISSPROT HIT: P49815, EVALUE 2.00e-04; EST_HUMAN HIT: AW861215.1, EVALUE 0.00e+00
cctttcaaagtcccaactgctgctgtatgtgcagacaaaatggaaggcagaaacaataacaaactagttgttaagttgttgtatctcctaaaataatacttctataataagctaggaaaaaaaagaaaaataagcttatgcttccaaatataaatatttcgtataatttaaaaataatacctcccaaccaagaccagctacaaaatcttcatatgcttgacttcctcctgtattggtgagaatggagtgtttgtcttcttgtccttcagcaacataaaatactgcaatcttgtgtgtctctcggctataaaacaaaagattacaccattaatttaatcactattttatctactcattcatccaacaattaagttctatgtacaaagtatgtagcaataaaaagatgaaaaagaattagatcttatagtctacagaaggagatataaatgcaatgtaagtaaaaaattactacaaaattgccattagaataaaagacaggcacgatcacttttgactgc

SEQ ID NO: 1007 - DNA, 527 bp, Homo sapiens
  MAP TO AL050339.4; EXPRESSED IN BONE MARROW, SIGNAL = 0.73; EXPRESSED IN BRAIN, SIGNAL = 0.81; EXPRESSED IN HELA, SIGNAL = 0.89; NT HIT: Z97405.1, EVALUE 3.00e-05; SWISSPROT HIT: O76001, EVALUE 2.00e-56; EST_HUMAN HIT: BG395849.1, EVALUE 7.40e-01
gcatgaccaacagcagtgtcaagggagacttcatcctggtgggtttctctcatcagccccacctggaaaagatcctctttgtggctgttttgatatcctatctccttacccttgtgggaaatacagtaattattctgatctgctctgtagaccctaaactcaagacacccatgtattttttcttactcacctctccttagttgatatctgttttaccaccagtattgtcccccagctgctgtggaacctaaaaggacctgacaaaacaatcacattcctgggttgtgtcatccagctctacatctccctggcattgggctccactgagtgtgtcctcctggctgtaatggcttttgatcgctatgctgcagtttgcaaacctctccactataccgccgtaatgaaccctcagctgtgccaggctctggcaggggttgcgtggctgagtggagtgggaaacactcttatccagggcactgtcaccctctggcttcctcgctgtggacaccgattgctccaacatttct

SEQ ID NO: 1008 - DNA, 560 bp, Homo sapiens
  MAP TO AC016569.2; EXPRESSED IN BRAIN, SIGNAL = 0.39; EXPRESSED IN PLACENTA, SIGNAL = 0.48; EXPRESSED IN LUNG, SIGNAL = 0.44; NT HIT: M17262.1, EVALUE 1.00e-07; SWISSPROT HIT: P35575, EVALUE 9.20e+00; EST_HUMAN HIT: AI336932.1, EVALUE 3.00e-06
ggcagtgattgccctaaatgaaacctaaaacgatccacagagctttaaatgctattagaggaataggttcattgattccataaatatttattgattgccttccctacagtaagtgttgtgctaggtgcacatgaaacattaattgaaccttgcccttggattcacttgcgggccatattacagctggcagtgattatgaaggtccttggaagtccaggttagtgttaccttatgctgaattctgctctgtattaggccatcttgtaggaccttttcaagtgtactttatcttgatataagcctggaaaagcacattataatagctaataagacctaacgtaacttatagaattctaggcatagccctaagcctttgcatgcattatgtctttttatcctcaccacaaccttatgaggtaggtactatcattaccctcattttatagataaagaaactgaggcacaggaggttaattaatttgagttacgtcacctagctaactagtagagccaaaatgttcactttgtcaacttaactccaatgcacatcactcttaagg

SEQ ID NO: 1009 - DNA, 512 bp, Homo sapiens
  MAP TO AC018691.5; EXPRESSED IN FETAL LIVER, SIGNAL = 0.41; EXPRESSED IN BRAIN, SIGNAL = 0.49; EXPRESSED IN ADULT LIVER, SIGNAL = 0.36; EST_HUMAN HIT: BE464334.1, EVALUE 1.00e-05; NT HIT: AL163227.2, EVALUE 2.00e-03; SWISSPROT HIT: P41765, EVALUE 9.40e-01
caagctggtttctctccctgctgccccttcccctgccttctgacccgatggaggcctcacccacccaggacttgaggggaggccccagcccctcccaggagtgcacttcacctaccgcactggtctgcacggactcattctccggtttggcttttatatccacaaccccatcagcgtggcggaaagagcagtcggcaagcacatcatacaaggatagcttctgggccttcaagccatatttctgcagccatgtcttagagtcccaggtgtcttctggattcgatgcaatctcaacagaggttgtttctgactctgtagaatcacagcttgtcagccattcatactgcatgagccattcatattacacccccaacttaatattgaccaacttggaacgtgttctttattagacacaaagcccatgtttcatttcagaaaacagctttccaaagcaggactggcaaagaattattaggcttttaatggcaaaaaccacgactacttttgcacca

SEQ ID NO: 1010 - DNA, 544 bp, Homo sapiens
  MAP TO CHR22_130.0; EXPRESSED IN BONE MARROW, SIGNAL = 2.8; EXPRESSED IN BRAIN, SIGNAL = 2.4; EXPRESSED IN HEART, SIGNAL =   2; EXPRESSED IN HELA, SIGNAL = 1.6; EXPRESSED IN PLACENTA, SIGNAL = 2.9; EXPRESSED IN LUNG, SIGNAL = 2.4; EXPRESSED IN FETAL LIVER, SIGNAL = 2.2; EXPRESSED IN ADULT LIVER, SIGNAL = 2.6; EST_HUMAN HIT: BE144526.1, EVALUE 2.00e-93; NT HIT: AJ006345.1, EVALUE 1.00e-110; SWISSPROT HIT: P08548, EVALUE 1.00e-54
gatcaccatgaccaagtgggatttaacccagaagtcaatgtgatacatcatattaatggaatgaaggccaaaatacatatgatcatttcaattgatgctggaaaagcatttgataaagttcaacgtcccttcatgataaaaaccttcaaaaaactgagtatagaaggaacatgcctcaacataataaaagccatatatgacagacccacaactagtatcataatgaatggagaaaaactgaaagcctttcctctaagatgtagaacatgacaaggttgcctacttttaccactgttattcaacatagtactagaagtcctagccagagcaatcaaacaagagagagaaataaagggcatccatactaaaacagaaaaagacaaattagccttgtttgcagatgatatgatcttatgtttggaaaaacctaaagactccaccaaagaactattagaactgataaacaaattcagtaaagtacaggatagaaagtcaacatacacaaatcagtagcatttctatatgccaacaacaagcaatctga

SEQ ID NO: 1011 - DNA, 560 bp, Homo sapiens
  MAP TO CHR22_133.0; EXPRESSED IN BONE MARROW, SIGNAL = 0.47; EXPRESSED IN BRAIN, SIGNAL = 0.48; EXPRESSED IN PLACENTA, SIGNAL = 0.6; EXPRESSED IN LUNG, SIGNAL = 0.59; EXPRESSED IN ADULT LIVER, SIGNAL = 0.69; SWISSPROT HIT: P11369, EVALUE 8.00e-07; EST_HUMAN HIT: H27198.1, EVALUE 0.00e+00; NT HIT: AF389851.1, EVALUE 6.00e-10
gaccccatgccatagttcagatggccttttgtcttcttcctgggaagttctttttacactggaggctccttctaagggcatccttcctgtccggataaagcaggactttacctttcttctcttccaaaagcctctcttttttcccttcatagcacatagtcacagttggcagcaacgtctccttttgggtgtggatttatttgttccccaatgcaactgtgagcaccatgagtgcaggaaagtgcctgtttctgatcatggtatttcctgggtgtgacttcatgtacagtcaagaggagaaactctgagtgggagcactagggaatagttgaagcttaatcttcattttggagaagagggagtgttattatccacgttcattattcacagtagcaaatttcacagtagcaaaaaggtgacagacactcaattgtccatcgacagataaatggataaacaaaatgtgccatatccatacagtagaatattactcagacataaaaaggaatgaaattccgatgcgtgctacatgtagacaaaccctgaaggcatgatgctat

SEQ ID NO: 1012 - DNA, 511 bp, Homo sapiens
  MAP TO AC021010.3; EXPRESSED IN PLACENTA, SIGNAL = 0.44; EXPRESSED IN BRAIN, SIGNAL = 0.43; EXPRESSED IN FETAL LIVER, SIGNAL = 0.44; NT HIT: AL163302.2, EVALUE 5.00e-04; SWISSPROT HIT: Q45730, EVALUE 4.70e+00; EST_HUMAN HIT: AW290871.1, EVALUE 3.00e-09
tttaacaagcccattcaggctttgaggatgagaaaaggggtcaaaagacaaggaacgtggcttttctagaactcagaaatggtaaagaaagagattacttattagaccctctcagaaggaaatgcaaatgccaacagcttgatttttagcccagtgaaactcaggcagacctctaaactacaaaactttaagataataaatgtgtgttgtttaagcccctaaatctgtgctaatgtgttacagcagcaaacatgaactaatatatagtgatttttggaatattcaggatgaagataataatcaggaacattgtgattccaaacacttcctgaaagtggcctgtgaaacaaaactgcagctttttgagaaagcaggagttgtaagttgtaagtccttagaataagtgtagagatatcttgttcctgtaccaagttattcagaaccttgggagtataccaatcagttcatttgctgtgtagaatcttaatcttgcaaaaaggaagtcagcacg

SEQ ID NO: 1013 - DNA, 589 bp, Homo sapiens
  MAP TO AL138788.1; EXPRESSED IN HEART, SIGNAL = 2.6; EXPRESSED IN PLACENTA, SIGNAL = 3.7; EXPRESSED IN LUNG, SIGNAL = 3.1; EXPRESSED IN ADULT LIVER, SIGNAL = 3.3; EXPRESSED IN HELA, SIGNAL = 3.6; EXPRESSED IN BONE MARROW, SIGNAL = 2.7; EXPRESSED IN BRAIN, SIGNAL = 2.8; EXPRESSED IN FETAL LIVER, SIGNAL = 2.8; NT HIT: gi15920163, EVALUE 5.60e-01; SWISSPROT HIT: P47897, EVALUE 5.70e+00
gcaagaagaggacacccaagaaaggtgcatattgaggatgcaaaataaattttaactgtgttcagatgtgtctaaactcaaatttacttttatagaaactataatgagaaacatcaccaacaaaaagtcaagcttcaaaaagtcaagtatcgtttaactaatgaagtagaactacgagataagagaattaaccaatttgaagatgaaattggaatcctgcaacataaaatagaaaaggtgaggaaaaaataaaaggtgaagagctcactggtgattcccatggtcagccatttggagaaagccttttcattttaaaaattatttgagaccccttcatagtcctcgttttcatttcttttctttgcaccatctttcaataagtaattctttaagccctgaccaaaagtacataagactcctagtgctgctacacggaattgaatactgaaaatactctgtactgccaacttatgatcaatgtctttcttcagatggaaatgccttttcttgaacactcctgagcacagacttccaaaccactctcagtaactcatttctgctttgtggagccctcattttgcctcagact

SEQ ID NO: 1014 - DNA, 579 bp, Homo sapiens
  MAP TO AL136978.3; EXPRESSED IN PLACENTA, SIGNAL = 0.38; EXPRESSED IN BRAIN, SIGNAL = 0.47; NT HIT: AL163267.2, EVALUE 3.50e-02; SWISSPROT HIT: Q52883, EVALUE 9.60e+00; EST_HUMAN HIT: AI051267.1, EVALUE 3.20e+00
ctattgggctcttctgctcgtgtttccatgttggtcaaacccaaatgaagcccaagagtaatggagtccaggtgatgcagtctctagaggtcatcctctcagagaagggatgtcaatcattcagggaagagaggatgaagaataaccagcatataccctcaaatcagcacctgagacttggtgaagatttcccttccaagcaggcttctagtgaagtgtagaaggtaaggtgaaaactcagttcattttagcactggcctttaactcatccttcaaggccaatctgataaatcacatcctccagaaaaccttctctagacccttctctatgtccccttatcttccagtgcctaactctttcacaacacttaacaaatttcgctgaagttatatctatgtgtctctctccctcactggactgtaagctccttgaggatagggattatatattacacacctttgcatctaacatagtgtcaggcatctaaaattgcccactttgtaccagagatttcttattcaacagtatacattttccaccaagttcttagtcttcaaactgcaaactttcccttgcat

SEQ ID NO: 1015 - DNA, 572 bp, Homo sapiens
  MAP TO CHR22_174.0; EXPRESSED IN PLACENTA, SIGNAL = 4.6; EXPRESSED IN LUNG, SIGNAL = 4.3; EXPRESSED IN ADULT LIVER, SIGNAL =   4; EXPRESSED IN BONE MARROW, SIGNAL = 4.9; EXPRESSED IN HELA, SIGNAL = 2.7; EXPRESSED IN BRAIN, SIGNAL = 4.4; EXPRESSED IN FETAL LIVER, SIGNAL = 4.3; EXPRESSED IN HEART, SIGNAL = 3.6; EST_HUMAN HIT: BI758586.1, EVALUE 0.00e+00; NT HIT: gi16167919, EVALUE 0.00e+00; SWISSPROT HIT: P19474, EVALUE 3.00e-04
tccccaggtaatctgagcacactaagtttagagaatcccttgtctaacccatgacatagacatcgggtttttgtttgtttttgtttttgacatcaccaggtgattctgtatgttgtcagggctgagaatctgatgatgaagcatctcaattttaggtgccagacagcagctaatccccatgtggaatgaggggccaactgcacaaatgatttttcctggtctggtcttgggaagggggcagggtatacagatgccttaccttggaacttccgcatccttgggttcatctgcagaatcttcttcagcttgggctccagttccttgatgtgggaagccagcctctctagctgccgattgcgcctgattttgttcttccgagagaccatggaagagcaacagcaaagtagatcctccccatggggctccttctgcagtgaattaatgcacttgaggcagacggcgcatccacactccagggacattggtttttccagatagtctgagcagacgggacagctgcttgcttcttggaagagtgcagccatgtccactgccaggggaaaagtacacaa

SEQ ID NO: 1016 - DNA, 536 bp, Homo sapiens
  MAP TO AC015819.4; EXPRESSED IN PLACENTA, SIGNAL = 0.78; EXPRESSED IN BONE MARROW, SIGNAL = 0.68; EXPRESSED IN LUNG, SIGNAL = 0.68; EXPRESSED IN BRAIN, SIGNAL = 0.52; EXPRESSED IN FETAL LIVER, SIGNAL = 0.67; SWISSPROT HIT: P15941, EVALUE 4.40e-01; EST_HUMAN HIT: BF129275.1, EVALUE 3.00e+00; NT HIT: gi4507868, EVALUE 5.10e-01
cttcttggtagcctgcttgggtttcctctggataaagagctgggatgtgtcactggcttaacagaaacgaaacacagatgtatgtggtatgagccacagagggtcctggggccttggccccatcaggctggaccctgcgaaggccaccctgccacgctccatgctgctgggaggaggtcgggccttcaccccttgcttcattctctgtcccctcaggttccaggagggactccccttccctctgccaggctccatcttcaacaggagtgacagcggtgtgtgtcacaaccctaacgagcagcccgggctggggcacagcttggactcacttcgtcctgcagcccagctccccagcttctcctgggcatgggtggggcggtcgccttcacctcccaccaccagagggtgcgacctgaaggccccaggagacggcatgtggcccaccagcctccccatatccagggtttcacctggccgtgcaagtgcgcccaggcggggatgcgttaccctggtgtgcagcgaatcccagttctctc

SEQ ID NO: 1017 - DNA, 571 bp, Homo sapiens
  MAP TO AL137793.1; EXPRESSED IN FETAL LIVER, SIGNAL = 1.2; EXPRESSED IN BONE MARROW, SIGNAL = 1.2; EXPRESSED IN HEART, SIGNAL = 1.2; EXPRESSED IN PLACENTA, SIGNAL = 1.3; EXPRESSED IN BRAIN, SIGNAL = 1.3; EXPRESSED IN LUNG, SIGNAL = 1.2; EXPRESSED IN ADULT LIVER, SIGNAL = 1.4; SWISSPROT HIT: P08159, EVALUE 2.40e+00; EST_HUMAN HIT: BG570142.1, EVALUE 5.10e-02; NT HIT: gi14861872, EVALUE 4.00e-05
aatggcagggaagttttgtgttttaactcaccctggccccatcctctccccggtgtggcagcagtctttgtcttgaaacacagcagccagccttgttccaatttcctccttgtaaactggaagaatcagagcagatattacttgcgaattattatatacatgtcttttaaactgtctgggagataagtgaaggactgactcactaatctgtgttacctaactcagaacacagctggaaaaataagtggacactgttaataaaagctgcaagatcactataggctcatggcctgggcaagagattttgagtggagccatagagtagaccatctaaggcccagatgagaagctggagtaagactctttgggaaattaggacactcaaaagcagctgttacgagagaatttagaaagccatgtgcatgcccaggcaagacacaggctcacaaagtctgaagaaagccttaggctttacctgaagctgatccctagggtctgaataagcctcgctagtcttgaaagagtgctctagtacagaggctatctgaaaagactgcaagagcccttagga

SEQ ID NO: 1018 - DNA, 595 bp, Homo sapiens
  MAP TO CHR22_125.0; EXPRESSED IN FETAL LIVER, SIGNAL =   5; EXPRESSED IN HEART, SIGNAL = 3.5; EXPRESSED IN BONE MARROW, SIGNAL =   3; EXPRESSED IN PLACENTA, SIGNAL = 4.7; EXPRESSED IN ADULT LIVER, SIGNAL = 4.2; EXPRESSED IN HELA, SIGNAL = 1.9; EXPRESSED IN BRAIN, SIGNAL = 3.5; EXPRESSED IN LUNG, SIGNAL = 3.8; NT HIT: AF029308.1, EVALUE 5.70e-01; SWISSPROT HIT: P34687, EVALUE 3.90e-01; EST_HUMAN HIT: BE001041.1, EVALUE 3.30e+00
ttgtaagggtggagacctgggcatcaatggctgactccacagaatcccattgagggagcccctccctgccagggtcccaggcccaccctgcacatccagaggcaagaggtacgtccctcatggccaccccaaagttgtcaggagccccaacttctgcagaatcacctccctgccaggaaagagagcggggagaagctgcagttgagaagatactaaacaggaaagtcagcgttttaattaaacaggattcaaaattgatgggagaaaacaagcatggacacaatcatattaacacaagaatcccgtcagagcccctggcaaggaagcttcagtgcacaacaaccactgggacgggggttagaggactcgcagtgagaggctgcctttctttgctcagtttctcctaaagtgttgtgtgtgtgtggatgggagagtgtgtgtgtgtgtgtgtgtgtgtgtgtgtgtgagagagagagagagagattcaaggaaaatatgtgtgtgtgtggtgctgtgtgtgcattggggcatgaatgcttgcatgcatgagttgtgggtgagtgtacggctggggacagtccacatcccttcacct

SEQ ID NO: 1019 - DNA, 512 bp, Homo sapiens
  MAP TO AC020721.4; EXPRESSED IN LUNG, SIGNAL = 3.7; EXPRESSED IN BONE MARROW, SIGNAL = 3.6; EXPRESSED IN ADULT LIVER, SIGNAL = 3.6; EXPRESSED IN BRAIN, SIGNAL = 3.2; EXPRESSED IN HELA, SIGNAL = 1.4; EXPRESSED IN FETAL LIVER, SIGNAL = 3.8; NT HIT: J03982.1, EVALUE 3.10e-02; SWISSPROT HIT: Q9QZ67, EVALUE 6.20e+00; EST_HUMAN HIT: AL603136.1, EVALUE 2.80e+00
tattggccttgctatctgggagaataatactagtacctacttttcatggttgtgtttaggattaaatgagttaatccacctacttagaacagtgtctcaaacagagaaaggacttagatgtgaattagtattatggaaagagtatgcgcactggagcccaacagagctggatttaagtgccagctctccctttattagctgtgtggtcataggtaaatcaccttcctgctttaaacattaatttcctcatttgtaaattaaagcctctgttacctatcttgagagttgttgtaagctttatatggagtacatgtaaactacctagtacctaacaaagagtagacctgcaatgatagtgattagtggctgtggctgcggtatggatgggcggtggcagcattgggtggtgggggcagtgatgatgggttgggagtgctgaaggtgacaatggtgttggtagtgatggtgccagttttgttggcactgggaatggtggtggtagcagtggtgtg

SEQ ID NO: 1020 - DNA, 567 bp, Homo sapiens
  MAP TO AL121876.23; EXPRESSED IN HELA, SIGNAL = 2.4; EXPRESSED IN BRAIN, SIGNAL = 2.3; EXPRESSED IN FETAL LIVER, SIGNAL = 3.1; EXPRESSED IN LUNG, SIGNAL = 2.1; EXPRESSED IN PLACENTA, SIGNAL = 2.3; EXPRESSED IN BONE MARROW, SIGNAL = 3.5; NT HIT: U25342.1, EVALUE 2.10e+00; SWISSPROT HIT: P08491, EVALUE 4.10e+00; EST_HUMAN HIT: BI835799.1, EVALUE 1.30e-02
tctgcaccagtgtttcatccctagctttgcacataaacaccatctctctctggaaaatctttccagtctctgactgggtaatgtaatgtagccccatccctcaaggaccagctcaggtgcagcctcctccatgaagccttccatgatttcatttcccctatctccaacagatgtgacctctcctgtggctatgggtttggggtggggcatctgtgctggggtgtagaggagtgttggaacactgagatgggagcaaactgacaggaagaatcagaggtatacatttagaatttgtagtttgtattaataacaagcacccttggtgatcctcattatcaggtaagtttgggaaacactggcccagtcttatcccctcattttttagaagagacaactgaagctcagagaggggaaatttactggcctaggatcacacaatcctttagtgacagaaccaagaccagcatgcagatatcccactatctttccagtccagttatgtttccctttgtattatattaccgtaacaagactggctacataatttgcatggcccagtgtaaaatt

SEQ ID NO: 1021 - DNA, 532 bp, Homo sapiens
  MAP TO CHR22_118.0; EXPRESSED IN PLACENTA, SIGNAL = 0.5; EXPRESSED IN BONE MARROW, SIGNAL = 0.43; EXPRESSED IN BRAIN, SIGNAL = 0.38; NT HIT: AL161550.2, EVALUE 2.00e+00; SWISSPROT HIT: Q57899, EVALUE 8.50e+00
ctcttcggtgctccttcaacacataaaatgctaattactattatatagtaaatatcaaaacgaacttttctatttattcgtctaaatagacagtacttatactgtttcctagcaccaggcacaatgccttgtcaattaactccttgcacgtagcgaagtactctacagttaaagacaacaagattatatcctggaaacatgccaggccttaagaaattatttttctcagacgtgtttggagtgataacactgccaagtaacggaggtataataagtgattctcaagataattaatcctacgcagctacaaacgctgtaaggtaaaaacaatcatttttacagttatcatttttattcttactagttttgtaacttttaacttactagtgttatattattataacacgacgtaaaggaatagtgcgtaaaggaactgctatgtaccaatgagacctgagcagggcacacaagactgaaagaaaaacaaccccacgcaaaatctaagtcttgcagttttcactcctcgcgtctc

SEQ ID NO: 1022 - DNA, 591 bp, Homo sapiens
  MAP TO AC011802.4; EXPRESSED IN BONE MARROW, SIGNAL = 0.75; EXPRESSED IN BRAIN, SIGNAL = 0.66; EXPRESSED IN LUNG, SIGNAL = 1.3; EXPRESSED IN PLACENTA, SIGNAL = 0.63; NT HIT: gi14728840, EVALUE 0.00e+00; SWISSPROT HIT: O34549, EVALUE 9.80e+00; EST_HUMAN HIT: AU117069.1, EVALUE 0.00e+00
tgccgtgacagttttctctgccagcacaagtatactaaaacagcacatgtgaaagcatttacttctacacaagaattgacatttactttgtaggtccattacatgcatgtctgtcccgttttccaagacatcatcttcagatcgaagattgtctagtttgccaatcttctgtctctcctccagctgccctttgagtttcttaatctgaaaacacccgccagtaaaatctgttaatttctctactctgaatgagaccgaaaagctgaagttagagcccatcagaaaggaagcagcatgtcaaatgacagaaggcactttgtgtccatcagtactcttctcagaaacacaattcaatgtacaatgaatgaaaaatgaattacactgtaactctgagagaaaagtcatttctaaagtgaaattcttctaggactcaggaggagactgtacatgaaatacctgcaatgtttaagactcagtaagtcaccatgctattcactttctctttatttactaagaaaccagaaagggccacttggagccttctgggctccaatatattgtaattaagtcccccaaaagtcgagtgctttc

SEQ ID NO: 1023 - DNA, 594 bp, Homo sapiens
  MAP TO CHR22_121.0; EXPRESSED IN PLACENTA, SIGNAL = 1.4; EXPRESSED IN LUNG, SIGNAL = 1.2; EXPRESSED IN BONE MARROW, SIGNAL = 1.2; EXPRESSED IN BRAIN, SIGNAL = 0.87; NT HIT: gi14779288, EVALUE 1.00e-109; SWISSPROT HIT: Q9Y3A4, EVALUE 8.00e-19; EST_HUMAN HIT: BE536740.1, EVALUE 1.00e-109
gttagctggaggctgacgagcgccagcactaagtgcacagggacccagaggtgggcactgatgacctagggtccccacccactgagcaaatgcatctgcccctagggggtgatggggaaccgccacacagggtgctgccaggctgggcctctttccacagagtctggtgcgagccccgtgcttagggacgccctccctcctcgaccaccaagtccagcgcccgccctcaggagcactggccacaggcctcatccgtggctggggccaaggccgaggggtctgaggatggactgggggtggcttacgctccatcttgctctctcgatgctgccaggcgtagaagttgagcagctcttttcggctgcgcttccgtctctccctctccagcacccgcaagctggctgcctcagtccgggggagcacaggccgccggccccggcgggtcaccttcacccagccctcctcgtcagggaccccctcctcctccttggccttagcttcttcctgcaaggaaggtgatcccatcctccggtgggacctcctgcagcctccagcagcgcgccctccacgccctcctcccaaagtcagaactgc

SEQ ID NO: 1024 - DNA, 595 bp, Homo sapiens
  MAP TO AC025179.2; EXPRESSED IN PLACENTA, SIGNAL = 2.3; EXPRESSED IN LUNG, SIGNAL = 2.3; EXPRESSED IN FETAL LIVER, SIGNAL = 2.2; EXPRESSED IN HEART, SIGNAL = 2.2; EXPRESSED IN ADULT LIVER, SIGNAL = 2.3; EXPRESSED IN BONE MARROW, SIGNAL = 2.3; EXPRESSED IN HELA, SIGNAL = 1.1; EXPRESSED IN BRAIN, SIGNAL = 2.4; EST_HUMAN HIT: AL521707.1, EVALUE 1.00e-117; NT HIT: AL163285.2, EVALUE 5.00e-63
cctctcaaatcccactgctgctttatcaaataagtttatgtaatattctaaatcctttgttgtaatttcaacaacattcacagtatcttcaccaggaagagattccatcttaagaaactactttttttgctcatctataagaagcaactcctcatctgttcaagttctatcatgagattgcagcaatttaatcacatcttcaggctccacttctaattctagttctcttgctgtttccaccacatctgcagtaacttcctctacggaagtcttgagcacttcaaagttattcatgagggttgaaatgaacttcttccaaactcctattaatgttgatattttgacctcctgtcatgaatcatgaatattcttagtggaatctaggatggtgaatccttttcagaaggttccagtttacattgcccagatatatcagaagactcactatctatgtcagctatagccttatgaaatgtatttcttaaataagaagatgtgaaagtcaaaattattcattgatccatgggctacagaaaggatgttgtttgagcaggtattgttctccttgtacatctccatcagagcctgtgagtca

SEQ ID NO: 1025 - DNA, 508 bp, Homo sapiens
  MAP TO AL137790.1; EXPRESSED IN FETAL LIVER, SIGNAL = 2.1; EXPRESSED IN HEART, SIGNAL = 2.3; EXPRESSED IN PLACENTA, SIGNAL = 2.7; EXPRESSED IN LUNG, SIGNAL = 2.3; EXPRESSED IN ADULT LIVER, SIGNAL = 2.3; EXPRESSED IN HELA, SIGNAL = 1.2; EXPRESSED IN BONE MARROW, SIGNAL = 2.2; EXPRESSED IN BRAIN, SIGNAL = 2.1; SWISSPROT HIT: O35625, EVALUE 2.10e+00
gtgcaggaaagagaagtggcacagatgttccactgatatgcacatcaagcctttccttgcatttatatcctggaagaaaagcccacaacttgaatctctttaggactatgaatccaagcctggtgggtggagtgatgaagagcttccccacccctggggaaggtgagtcttcagagccggcagacctaagtcccagaagaggaaagaaatagacatgagacggaagaaaggttgcagttgggcccctgagtggcatgctgacagacaggaacagagttcaccagataatgagaggaacctggcagtgagaaaagcccagtgacaagtgatacctctgtccccacttcccatcaagcttctctagctgggaatgccttccatgatgatgggtgttctgctgaccccgggatgacagatacgattgcagcagatggccctgggtctgcttggctaggaaggtgagttcaggacgtaggcacagaagcagggcaccttcctggtacctgaa

SEQ ID NO: 1026 - DNA, 595 bp, Homo sapiens
  MAP TO AC013816.3; EXPRESSED IN BRAIN, SIGNAL = 3.6; EXPRESSED IN PLACENTA, SIGNAL = 4.7; EXPRESSED IN LUNG, SIGNAL = 5.1; EXPRESSED IN ADULT LIVER, SIGNAL = 7.1; EXPRESSED IN HEART, SIGNAL = 4.2; EXPRESSED IN FETAL LIVER, SIGNAL = 4.3; EXPRESSED IN BONE MARROW, SIGNAL = 4.7; SWISSPROT HIT: P25499, EVALUE 9.90e+00; EST_HUMAN HIT: AA811230.1, EVALUE 1.00e-27; NT HIT: AL163303.2, EVALUE 5.00e-29
aaggggccttacttcattggaaggggccttacttcattattactcaaaatattgaggaataaatgaattacctaatggaaaatttttttaccagcatacatacctaccacataataactcaataaatgctagttactactactgctgctgttgctgctgctactactactactactaccactactgctactagtactactactactactactattaccaattattgttatatttgcatcaagacaatgtgaccttaggtggaaattcagccatagctttccaattatttcctttttggcccaagaggagcagcacttttccctttaaaatatatgaacagattgttctttttgctgatttgattttttttcacctttaagtggttatttgaatattctactgtgaagagcaaaataataatattcagccaattctgcatggtcctttcttggtaaataaattggtttctgcatttgtccattttcatgctgctgacagatatacctgagactgggcaattaacaaaagaaagaagtttaatggagttacagttccatgtggctgggaaggcctcacaatcatggcagaaggtgaa

SEQ ID NO: 1027 - DNA, 565 bp, Homo sapiens
  MAP TO AL160233.1; EXPRESSED IN BRAIN, SIGNAL =   1; EXPRESSED IN HELA, SIGNAL = 0.81; EXPRESSED IN PLACENTA, SIGNAL = 1.2; EXPRESSED IN LUNG, SIGNAL =   1; EXPRESSED IN ADULT LIVER, SIGNAL = 0.94; EXPRESSED IN FETAL LIVER, SIGNAL = 0.9; EXPRESSED IN BONE MARROW, SIGNAL = 1.1; NT HIT: AB042297.1, EVALUE 4.00e-05; EST_HUMAN HIT: BE500981.1, EVALUE 1.00e-05
cattcttctcagtgggagcctctgacaatggctgtttctagttggccatcttggcccctcctctgcagtgccttttttagtaccttagttgttcctgttttcttcagtcatatcacgtttattatcaatagtcttaaatacttctacataccactctcctaacagatgatccaaaataagagaggtaaaattatgctgagtagcactcagagtcgaaattatgcctctgcaaatgagcttccaagagaataaatgagcttccaatagaatcagtggcgaagatctggacaatagtgatgatctttcctgcagctttggctgagagaaaataaaaaacaggattgagggtaaagaataatagtcttcagattcccagaaatagattgacaattgcacagccatggttagtgttagggttagaactgattttaaacttgtccaattgtctaattcgtgctaatgatcagtaatgagtagtggtctcactccaatgaacatgcttctcaggctgacattaaatgtctgcctgtgtaatcaacacaaaacgtgctgttcaagctgatct

SEQ ID NO: 1028 - DNA, 505 bp, Homo sapiens
  MAP TO AL133418.2; EXPRESSED IN BONE MARROW, SIGNAL = 1.2; EXPRESSED IN BRAIN, SIGNAL = 1.1; EXPRESSED IN HELA, SIGNAL = 0.67; EXPRESSED IN FETAL LIVER, SIGNAL =   1; SWISSPROT HIT: Q12691, EVALUE 3.50e+00; EST_HUMAN HIT: BG427989.1, EVALUE 0.00e+00
tgtatggttttaagaaattccctgaaaacttactatagagtaataatgtaatctaacagcaaacataatgtataataatattacattatatttatagatctaacttaacagatctataaatattagctaatattatgactcttctgttatttggcttctttctattctactttctcagtgcttttatttgtttaattcaggcccttgttttgacactaagtttttgcatttttttttaccttgccaattatgctctttgtataaaacacagttacacaatattgttactgttatcaaaactaataacttttagaactagagcatatcttaaaaatttatcagggcctttatttcacaagttaagaaattccaacaatgaaagtgaaagacagtgcttgccaaaaagcactcctgtggagaattagagaagagaaggaaatggactgcccgggaaaagattctaacacgaaaataacggtagggggcattccaggccctattcaga

SEQ ID NO: 1029 - DNA, 575 bp, Homo sapiens
  MAP TO AL118512.8; EXPRESSED IN BRAIN, SIGNAL = 0.36; NT HIT: gi14730477, EVALUE 0.00e+00; SWISSPROT HIT: P32004, EVALUE 2.00e-09; EST_HUMAN HIT: AW874462.1, EVALUE 8.10e-01
tcggatgtgttttcaattcttggcaaaagtttaaaaagctgcttctcaattggttataaggttttatcaatgagtaatgttttacaagctggagttttcatcttttcagagagataaaaaatacaatttaaattcaacatgcttcagatgagagtaagccaaggtgaattataaaaaaaattaaaatgcaataaaaattttttaaaaaattctctcacagcaactgattctcagaattatacttatttactaaacattcactatcacttactttccaattattctacatttaccacaatgtttacatacctaggaccttgaggataaagtgcttgctgacttctccagcttcatttgaggcaatgcaggtgtactttcccgaatcttcagtctctgctttgaggagctgcaggaccattccatgggtgctgactgtcagatgggcatcaagccccagaggctggccatctctaagccaggccatactgggagctggggttccatcagtaatgcatgccatagaggtggaactacctttgagaactgtgatttcctctgtccccattgaattgtcc

SEQ ID NO: 1030 - DNA, 586 bp, Homo sapiens
  MAP TO CHR22_176.0; EXPRESSED IN BONE MARROW, SIGNAL = 0.91; EXPRESSED IN BRAIN, SIGNAL = 0.98; EXPRESSED IN PLACENTA, SIGNAL = 1.2; EXPRESSED IN LUNG, SIGNAL = 0.86; EXPRESSED IN ADULT LIVER, SIGNAL = 0.94; EXPRESSED IN FETAL LIVER, SIGNAL = 0.94; NT HIT: gi14251218, EVALUE 1.00e-109; SWISSPROT HIT: P53674, EVALUE 3.00e-10; EST_HUMAN HIT: BF727162.1, EVALUE 1.00e-109
aagtgtgtcagaacccctggctattttatgggctcccagattggctgggccacacttgtgtcccagaaggaggagggaggaggaggccaaggtgagggaaaaagagaatagggacagaggataagagtctggggaggtggagaagaagaaaagggagagtaaatagaaaggagagaaaataagccaagaaaaaggaggagaaagaggtgcggaggagtaagaggtgaaagaggaagaggaggaggagaagaaggaggaggagggaaggaaggaaagaaggcatggcacccagccactgcacccccaggtccttaccctgtagttcccaggaggcagttccgccgccttggcgctggtaataggcacggttgttggggccagggtagtgccgggactaggggatgttcctgcaggtggggcccccttccccttggtgtcaggccctgggttcaccgccactgtggccgaggccgaggcctttgcagcctgagacatggttcccgcctgcaaaagtctgtaaagaaactctggccttcagggatgacacccccaaactgcctcctgccctcatagccccacatcctgt

SEQ ID NO: 1031 - DNA, 518 bp, Homo sapiens
  MAP TO AC011792.5; EXPRESSED IN BONE MARROW, SIGNAL = 1.4; EXPRESSED IN BRAIN, SIGNAL =   1; EXPRESSED IN HELA, SIGNAL = 0.7; EXPRESSED IN PLACENTA, SIGNAL = 1.1; EXPRESSED IN LUNG, SIGNAL = 0.9; EXPRESSED IN FETAL LIVER, SIGNAL = 1.1; EXPRESSED IN ADULT LIVER, SIGNAL = 0.99; NT HIT: AL445564.1, EVALUE 1.20e-01; SWISSPROT HIT: O14842, EVALUE 6.30e+00; EST_HUMAN HIT: BF959593.1, EVALUE 5.00e-05
tcccttgcaataattctgggatatgaccaaggtgttgggaatcgctgctttaatgcatttatttgtcatgtcagaataaatatgctctgtcagaatttgagtatgatgccagattgtgaacgtttcttttgtgaggattaatatgatttattagaattccattaaacacgaacatgggttcctgtttctccacaggtccctgaaatatcaatttaaaagtgttaatgttttacttacccatcatgttgtacaagctctgtggggcaaactgccttggcattttctgaattgcttccttgtatacactaagggcttcctaatttataaaacaaaaaaaatagataaatcatcaataaagtgcagggatcgtcactgaaaataagataataactttcttccaaagttaaaaccatccactgctatttctaaatggttcactagaggaaaataattgaactgtccttttgtggcatactatctcaattccaccaatgaaaacactcagcccagtcagtgaa

SEQ ID NO: 1032 - DNA, 514 bp, Homo sapiens
  MAP TO AL133520.2; EXPRESSED IN BONE MARROW, SIGNAL = 0.91; EXPRESSED IN ADULT LIVER, SIGNAL = 0.29; EXPRESSED IN BRAIN, SIGNAL = 0.86; EXPRESSED IN HELA, SIGNAL = 0.68; EXPRESSED IN FETAL LIVER, SIGNAL = 0.85; NT HIT: gi14786187, EVALUE 5.00e-72; SWISSPROT HIT: P46333, EVALUE 7.00e-05; EST_HUMAN HIT: AL449904.1, EVALUE 7.00e-72
atagtgcccaggcaataaggaagacaggaggaatgcccacttgcaaaaggaaagcacaaagactaaaatcctgaagctgtgtgcttggggtgtgctacagctcttcccccagaccccccctgtcagcttcctaccgtctcttctggaactgctggtctatctctgccaacgactggccttttgtttcaggaacaaataaatagatgaagcccaggccgaggacagcggtcagtccgtagagcaggaaggtccaggacaagccgatggtgcctggaaacaggagggcgggagtgtaggcccaggaccaagcactctggccccgcagcctgggccaactggtaggttctaggtcaggcatggaaagtcagttcactcaaagcaaacgttcccgttggtcaatttgcagagtgaccaataagctgtcagtgaagtaccttaaagcggaaatctcgctgattgtctcaaaggcggggatgagccaggacgcaagtccacaagcacagagacaaaggca

SEQ ID NO: 1033 - DNA, 547 bp, Homo sapiens
  MAP TO CHR22_214.0; EXPRESSED IN BONE MARROW, SIGNAL = 1.4; EXPRESSED IN LUNG, SIGNAL = 1.2; EXPRESSED IN ADULT LIVER, SIGNAL = 0.86; EXPRESSED IN BRAIN, SIGNAL = 1.3; EXPRESSED IN FETAL LIVER, SIGNAL = 0.93; SWISSPROT HIT: P49939, EVALUE 5.90e-01; NT HIT: Z22795.1, EVALUE 5.00e-04; EST_HUMAN HIT: AA744097.1, EVALUE 3.00e-06
gctcatcttttccctttccccagtcctgtatctttcactctcttataaatgctgacaagtgacaagcctcaggacacccgctgcacccacggagtcccctccaacccaggactctagacattcaggacagggctgcttgtaccactctgctgcctctgaactggggtcctggatttgtgccagtgaccgggtgggaagcccctggcttgccccagcaggtctggcttcctgcagtggggccagaaatatgagctctggctccccctggtggcaagaccagaaacgagctcagcgtgactgtccagtgtcaaagatgtgggaggaagcagcggagaaaccaaaggaggaggaagacgccaccatcactgtccccagccatgcagcctaaaagtcactatcccttcctctcttagagtcttttggttcagtttccgcccccatcatagtaacagaaggggccttgggcccagttgcagctaaattttgtccccgtgaaagttcgtatgttgaagccctaaatcccagtacctcggaatgcgactgtatt

SEQ ID NO: 1034 - DNA, 563 bp, Homo sapiens
  MAP TO AC011980.3; EXPRESSED IN BONE MARROW, SIGNAL = 0.55; EXPRESSED IN BRAIN, SIGNAL = 0.53; EXPRESSED IN LUNG, SIGNAL = 0.6; NT HIT: AJ002153.2, EVALUE 3.40e-02; EST_HUMAN HIT: AI766210.1, EVALUE 5.10e-02; SWISSPROT HIT: P08426, EVALUE 8.10e-01
atccatccctcacgttgttccagctgttacctctcaaagagcccctgctagtgccctccctgggtttcccgctgctggcagctcgggtcctgatccttagcagggcagccccagcccttcttcccagagccctatccttcctcgagtttattactttcatgcagattcaacacagcctctggtcagtgtctggtgatgtcggcagaaaagaccaaagcctcactaatcagagtgaaaatagggaaggtctttctgatttcgagtgatatggaggaaaaatgaggcttgttgaccctcagaaccaattcaactcagcaaattttttgttaaggacctactgtgtgccagggtccatggaggatagaaagcagtcagctcacccctgttggggagacagaaacacactaaacagtttgccctgaagcagccactagtaaggggaactggtgacggagtgtgccagggtgtgtggggctacagaggtgtaatgcaaactgggaggttgggggaacttcctagagaaaggtgctaactactgaggaacacaggcaagtttgcacatt

SEQ ID NO: 1035 - DNA, 577 bp, Homo sapiens
  MAP TO CHR22_216.0; EXPRESSED IN BONE MARROW, SIGNAL = 4.3; EXPRESSED IN BRAIN, SIGNAL = 3.9; EXPRESSED IN FETAL LIVER, SIGNAL = 3.3; EXPRESSED IN LUNG, SIGNAL = 4.5; EXPRESSED IN ADULT LIVER, SIGNAL =   4; NT HIT: X63578.1, EVALUE 9.00e-80; EST_HUMAN HIT: H18303.1, EVALUE 2.00e-69; SWISSPROT HIT: P20472, EVALUE 6.00e-20
aaggcaggtctgatggacacttggaagctagagtcccagcccccactccctctcgtgcagccgtgggctgggcagcccctgcaggcctccgcttaccccagctcatcctcctcgatgaagccacttttgtccttgtccagcatgtgaaacaccttcttcacatcatccgcactctttttcttcaggccgaccatttggaagaactttttgtggtcgaaggagtcggtagctgtggggggaagagcagggtcaaacaaggaccagaaaggctggtagggaagcctgggagaatggggggcatcaaggcatttgttgatggattcccacatgccagtcatggggaatgagaggtacccacctccattggagggctgagggagcccgggcaagggaggataacctgtccaaggtcacaaggctgggagtggaagaggtgtgctcaaacccagacctccctggctctcaagcccgcccccacgccccacctccactgcacccattgctgatgatgggagcagcacctaagaaccaaaggcttttgttcttctgagaaccttgtgcccaggaagacttttga

SEQ ID NO: 1036 - DNA, 530 bp, Homo sapiens
  MAP TO AC024195.2; EXPRESSED IN LUNG, SIGNAL = 0.66; EXPRESSED IN ADULT LIVER, SIGNAL = 0.69; EXPRESSED IN BRAIN, SIGNAL = 0.46; EXPRESSED IN FETAL LIVER, SIGNAL = 0.46; NT HIT: AJ251961.1, EVALUE 3.00e-98; EST_HUMAN HIT: BI768198.1, EVALUE 4.00e-98; SWISSPROT HIT: Q03167, EVALUE 3.00e-25
agtggtttgatcacccttgcccctttggggcagaattaattgctgtttctgagtggcttgtgtttgtgattcccttggcaggtccagagcctggtgcactgtgtgaactgtcacctgtcagtgcctcccatcctgtccaggccttgatggagagcttcactgttttgtcaggctgtgccagcagaggcacaactgggctgccacaggaggtgcatgtcctgaatctccgcactgcggccaggggcctggccagctacagagagaggtaggtgcaggtgtcagctctcagcccactgccactgagtctgcagagatgattttctggacagaagtccttttcttctcttctggggttcaacaaaagaagctcatgtatgaacataagagaacagatttaaaataccagctgctgtctggattgggcaactttaggatttctctgtctagagattggttggctctccccatttcctggccctccgtattggaaaaaaacgttcataagaatttcaacttttaggccaggcatg

SEQ ID NO: 1037 - DNA, 586 bp, Homo sapiens
  MAP TO CHR22_129.0; EXPRESSED IN LUNG, SIGNAL = 0.82; EXPRESSED IN PLACENTA, SIGNAL = 0.9; EXPRESSED IN ADULT LIVER, SIGNAL = 0.9; EXPRESSED IN BONE MARROW, SIGNAL =   1; EXPRESSED IN BRAIN, SIGNAL = 0.88; EXPRESSED IN FETAL LIVER, SIGNAL = 0.88; SWISSPROT HIT: P75330, EVALUE 1.50e+00; NT HIT: M73753.1, EVALUE 3.60e-02; EST_HUMAN HIT: BI029379.1, EVALUE 2.00e-50
ctactatcgcctgggtcctgcatcagaccaggccttttctgctcaaggctgtgcgatggcttcccacacaatggagccaaagccaccctgccctggtgcccaggaggccacgcatgatctggccatgaaggccttcttcccctttcctcaactccactccaacccgccaggtactcccgaggccgcacagatgcacacagctgcccctgctcacaggagacatcctggaccttccccaccaggctccccagacctctccctctcctccatttttgtcctaaggctcctctcggatcttccatatgatctgcttatttcttatatttgttgtccacctccccaggctgcactgtgagctccacaagggcaaatgtctcttctgttcgttgggaggcgagggccttggggcagtgcttccagctgaaggacggcaccttccctggtcctctcgcccaggccttggagacgggagggctcacagccaccactgcatccacagtgcttgcccaagactggtcacgcacggaagcattcaataaaaacaaaccaacccagggctagagacacctatgaacagagaaggccg

SEQ ID NO: 1038 - DNA, 528 bp, Homo sapiens
  MAP TO CHR22_93.0; EXPRESSED IN HEART, SIGNAL = 1.4; EXPRESSED IN LUNG, SIGNAL = 1.6; EXPRESSED IN ADULT LIVER, SIGNAL = 1.5; EXPRESSED IN FETAL LIVER, SIGNAL = 1.5; EXPRESSED IN PLACENTA, SIGNAL = 1.7; EXPRESSED IN BONE MARROW, SIGNAL = 1.6; EXPRESSED IN HELA, SIGNAL =   7; EXPRESSED IN BRAIN, SIGNAL = 1.7; SWISSPROT HIT: P13373, EVALUE 2.00e-05; NT HIT: U93494.1, EVALUE 2.00e-12; EST_HUMAN HIT: BI521576.1, EVALUE 9.00e-19
ggggtaaagtagaggcaggcaatgtggggacacattggcatctgtaactcctcctctgtgaggtcagtggaagggataagagaggcctggagcagcccactccagctctggacctcagaagggctgtgtccaccatggctcctgtcctcctgctgctcctctctcacttcccaggtaaggacaggcctcccacgtccagggcaggtcccccaggcttcagcagtcccctctggctcagatcttccagcaacttcatgctggtaagtgagccagcagccatatccacctgtgtctgcaggttccctctcccagcctgtgctgactcagccgccctccctctctgcatctctggaagcaccagccgcacttccctgcatcctgagcactggcgtccatgctgatttctattggatatactggtaccagcataagccagggagccctccctggtatctcctgagccactaccaaaatgtacttcatgaccagggctccagggtcccgagctgctcctctggattgatggaa

SEQ ID NO: 1039 - DNA, 543 bp, Homo sapiens
  MAP TO AL160168.1; EXPRESSED IN HELA, SIGNAL = 0.66; EXPRESSED IN BRAIN, SIGNAL = 4.6; EXPRESSED IN FETAL LIVER, SIGNAL = 3.6; EXPRESSED IN BONE MARROW, SIGNAL =   3; EXPRESSED IN PLACENTA, SIGNAL = 3.9; EXPRESSED IN LUNG, SIGNAL = 4.7; EXPRESSED IN ADULT LIVER, SIGNAL = 5.9; EST_HUMAN HIT: BI002334.1, EVALUE 6.00e-23; SWISSPROT HIT: P08547, EVALUE 7.70e-01; NT HIT: gi13638562, EVALUE 9.00e-09
tttatgtgtcaactcgactgggccacggggtacctagatatttggtcaaacattattctgagtgtttctgtgaggatagccttggatgagattaataattaaattgtagactgagtaaagcagactacccttcctaacgtaaatggccctcatccaataagttgaaggcctgaagagaacaaaatactaaccctctagtgagtaagaaagaattctcctgcctgatggcctttaaggtagtatatcagcttttcctggttctacagcagcttccagcctttggacatgaactgggacatctgctctggcagattttggacctgccaggctccataatcatgtgagccaatttcttataataaatcacacacacacacacacacacacacacacacacgcgatggatatatatatatatccatcgtgtttctgctactgcagaaaacccttactaatgcataggcctataacaaataaagatatttagttagtaatcaaaaaacttcccacaaaaaaaatctgaggttcagatggcttcactgg

SEQ ID NO: 1040 - DNA, 593 bp, Homo sapiens
  MAP TO CHR22_219.0; EXPRESSED IN HELA, SIGNAL = 3.1; EXPRESSED IN HEART, SIGNAL = 1.2; EXPRESSED IN BRAIN, SIGNAL = 1.8; EXPRESSED IN PLACENTA, SIGNAL =   1; EXPRESSED IN LUNG, SIGNAL = 1.1; EXPRESSED IN ADULT LIVER, SIGNAL =   1; EXPRESSED IN FETAL LIVER, SIGNAL = 1.3; EXPRESSED IN BONE MARROW, SIGNAL = 1.5; SWISSPROT HIT: P28503, EVALUE 4.40e+00; EST_HUMAN HIT: AW881682.1, EVALUE 1.40e-02
ggcaggaaaaagatgatcccagacggaggtctgatgcaactgggaataaagaaaaatgaagaacagcgatagtgtgaaacaataacaatgacttctggataaaaacagatttaaaatacacaacagtgatggcatttacttgggtgaatggagttaaagtgttctaagatccttatattcttcaggaggaaggtgaagatagataccaaatacactttgacgaatttaagaatccagattgtcattactgggataaacactgtaggactggaaatactgtgtatagttatccaaattattggaggaggaaaaagaatgattaaaccaacccaaacaactgtaaagcaggcaagaatggagagaaaaataaatacaagacggggcagggaggggacaaatagacgatagctataaattcgaatattttgtgattcaataaatgcaactaaatattgcagttaaaatacaaagattatcagaatgcataaatagctagatgcagtttacaagagaaacccacaagagacacttccaaaacataaagctagtgatggtcaaaagtaaacacatggggggaaaataccacgcaaatg

SEQ ID NO: 1041 - DNA, 523 bp, Homo sapiens
  MAP TO AC024052.2; EXPRESSED IN BONE MARROW, SIGNAL = 1.1; EXPRESSED IN BRAIN, SIGNAL = 0.68; EXPRESSED IN PLACENTA, SIGNAL =   1; EXPRESSED IN LUNG, SIGNAL = 0.97
tggcattctgaaagaagcacaatgttctcttaactaaaattacaacagttaatacctgcagtgaagatgaatttatacctgcaaacatcgatttatctttttctttttgcagaacagatttccccctagaaacaagaaaatttttatgacccaatattttaagaaagaggttaagattatatgttctgcttatctcaaacaacatccatcttctggtttaactgcagcagaatctgttgctggtaatcttgaaatacatggctatcacactagtgattttcttgtaggtaagatggttatttaagtgagcattaagtgaagccaaggattttttaaatggcctgagacaggaaaggtctatttcatcatgtggcctactttatcctcatttttagtaggaaaaaaaaacagaaaatgataatttgtttatccattttcacgtagtaaatttccaaaagtagatatttataagttgtatattagtaacctgaaatttaagaggaggatttttgttgcagcatca

SEQ ID NO: 1042 - DNA, 528 bp, Homo sapiens
  MAP TO AC013637.3; EXPRESSED IN FETAL LIVER, SIGNAL = 0.95; EXPRESSED IN LUNG, SIGNAL = 0.83; EXPRESSED IN BONE MARROW, SIGNAL = 1.1; EXPRESSED IN BRAIN, SIGNAL = 0.68; SWISSPROT HIT: O75521, EVALUE 2.20e+00; EST_HUMAN HIT: BI548510.1, EVALUE 4.70e-02
ggagcagtccaggagatcagatgggtgaagacgccatcgaagtgacacagagggagggtgatgaagacctgcaacagggatggattagtgagaagagagcaggtgaaatcgcttttggattagtgagaagagagtgggtgcaatcgcttttggattagtgagaagagagcaggtgaaatcactttcggatcagtgagaaaagagcgggtgaaatcgcttttggattagtgagaagagagcgggtgaaatcgcttttggattagtgaaaagagagcaggcgaaatcacttttggatcagtgagaaaagagcaggtgaaatcgcttttggattagttagaagagagagggtgaaatcactttgaggaaattttcagagaaccagacaaagagaaaagagaaggaatcatttatctgtcttaacaatccattcacatcaaaatattagagtttgagctgaaggaatgcattcagctttggagaaactcttccaaatagttcgcaaagtttcgcaaacgtccaaaaccagat

SEQ ID NO: 1043 - DNA, 568 bp, Homo sapiens
  MAP TO CHR22_132.0; EXPRESSED IN BRAIN, SIGNAL = 0.35; EXPRESSED IN FETAL LIVER, SIGNAL = 0.41; EXPRESSED IN PLACENTA, SIGNAL = 0.55; EXPRESSED IN LUNG, SIGNAL = 0.51; EXPRESSED IN ADULT LIVER, SIGNAL = 0.54; NT HIT: AF303827.1, EVALUE 1.00e-29; SWISSPROT HIT: P32908, EVALUE 8.00e-07
tcttcttggtaagcccaagcccatacctagtgattctaacatagaaagttttatatccaacaactaatggttacatcttcatgacatcttacctcttccttctctaattttgcttgtctgcgctctgccgctatattttttttcttattaaagttaaactgtgcatcctcttcggctttttgtaactttcttttcttttcttcatattctcctataagctctcctgaagtgctgatttcctcaaaaaactgggtcctttctttgggtttcttcactgaaattgactctacagttcccttttaaaaacagtaatgcacatcaacatataaaatatagtgatgtattttcaaaactctgaatcaaataaactactatagctacttacctgaaaaaccaaacaattttgtgctttgactattatgcctatcttttccaactctgcaatgtaaacagaacgactcacaagattatcattaaagcgaaattctgagcatccccctaaaataaaaaaataaaccctgttaaaaaatatataaataccagatatacctcaaaatccaccgaaagt

SEQ ID NO: 1044 - DNA, 507 bp, Homo sapiens
  MAP TO AL133215.16; EXPRESSED IN BRAIN, SIGNAL = 0.28; SWISSPROT HIT: O60299, EVALUE 2.00e-05; NT HIT: gi14747301, EVALUE 0.00e+00; EST_HUMAN HIT: BF971661.1, EVALUE 0.00e+00
gagtaccactgcccaaaagccccccagccacacggccccctagggagcctgtgctcttgctggaggaggaccggccactgtctgagtgggagggcccagtagggacccctcgggctggcccaggcagtgcccctcgcccagagccatgggaaggcaggtgcccgcctggggagctggtggttggctcggcacctccggtgctgtaggtgggcaggctggacagtgagtttcggccagagtcggatagcgtccctgatgggcagccactggcccagccactaaatgccaggggtttgtcagcagctgaagaggaggaggaagaggaggaggaggaggcagggcccccaaacagctgcgtcaggctgccctggctcccagacagcccggtggcccgaggacccatgaagctaggcagggacggagcccctcgaggtttgggcagcactggcttgaaggctgttgggcggatcaggatcttctccatgttctgaaatgaggtgccatgtg

SEQ ID NO: 1045 - DNA, 600 bp, Homo sapiens
  MAP TO AF168787.1; EXPRESSED IN HELA, SIGNAL = 1.5; EXPRESSED IN HEART, SIGNAL = 1.7; EXPRESSED IN LUNG, SIGNAL = 1.7; EXPRESSED IN FETAL LIVER, SIGNAL = 1.9; EXPRESSED IN PLACENTA, SIGNAL = 1.8; EXPRESSED IN ADULT LIVER, SIGNAL = 2.2; EXPRESSED IN BONE MARROW, SIGNAL = 1.9; EXPRESSED IN BRAIN, SIGNAL = 1.8; EST_HUMAN HIT: AL525827.1, EVALUE 5.40e-02; SWISSPROT HIT: P08572, EVALUE 6.70e-01; NT HIT: AF196176.1, EVALUE 4.00e-88
gctttgctggttctcagctcaggggtcatgagggagtcacccacccttcccccatagcctttgttctggtcgggagatggaggcctggtgtgcagggggggtcaggtttcaggggacccccctacacatacctgggtcagggccagattgcttgattcttggaaaataggctggggggtaaaccagccccttcccaggcacgacagagaggatgggcggagttcttggccccatctcacatgaccacgaggtaagcgggctctgaggagacccactggggcccagggaacccaccttctctatcatgacggcatagatgcccatctgctggaaaccgcgggtgtagtagagcatgttggtccagcccaaggccagggagaataccatggaagccacatactccttgaggtggctgaagtacagcaccacggtggccagcatgaacagtgactgcagaaagctgcgggtggaggggcagaaagctccgtctacgggaacccaggaggcctggcacccccagaacaaaaggtcacaggccgctcagaggtccagactgcaggccgcaataggagctagggttgggctgtcctgactctttca

SEQ ID NO: 1046 - DNA, 543 bp, Homo sapiens
  MAP TO AL138740.2; EXPRESSED IN BRAIN, SIGNAL = 1.4; EXPRESSED IN LUNG, SIGNAL = 1.3; EXPRESSED IN FETAL LIVER, SIGNAL = 1.4; EXPRESSED IN BONE MARROW, SIGNAL = 1.1; EXPRESSED IN HEART, SIGNAL = 1.4; SWISSPROT HIT: P38213, EVALUE 3.00e+00; NT HIT: gi14756099, EVALUE 0.00e+00
tggcctatcagagagcaaggaccagactccaagctccatgagggcaggccccgtgtctgccttcttcaacaagagtttctcaacaaatgtctgttatttgactgaatgatgacatagagaagccatgaatgttcaatacaagcaacattaatcacaacttggagaaagttattcacgctctttttcattctttaatactgcatttcagactaaagaagaagaaataagaaaaaggctacggagtgaccgacttttgccttcagccaatcactcagattcagctgaattagatggggccgaggttgcatttgccaaaggacttcaaagggtgaggtctgctggatttgaaccatctgacctgcagggaggaaaaccattgaagaggaagaagagtaaatgtgatgcaaccttgattgatagaaacgaaagtgatgaaagttttggggtcgtggagtcagacatgtcctacaaccaagcagatgacatagtctactaagccattttttgtgaatttcataagaaagcattcattctccccatttg

SEQ ID NO: 1047 - DNA, 593 bp, Homo sapiens
  MAP TO AL160058.2; EXPRESSED IN FETAL LIVER, SIGNAL = 0.56; EXPRESSED IN PLACENTA, SIGNAL = 0.8; EXPRESSED IN LUNG, SIGNAL = 0.63; EXPRESSED IN ADULT LIVER, SIGNAL = 0.64; EXPRESSED IN BONE MARROW, SIGNAL = 0.54; EXPRESSED IN BRAIN, SIGNAL = 0.59; NT HIT: AJ310932.1, EVALUE 3.60e-02; EST_HUMAN HIT: AA679076.1, EVALUE 1.00e-05
atttgaaatgccgaaagcactcactgaaaacttaagccaatccacaaaatatggctctgagaatccttcccataatggattcagttatagtttcatcattctaggtaattataaaggatagtaaagataactataatttcttaagaccctcttatttttcagctgtgcattgcctcaaaccccatattccatttacagaggaagaaactgaggctcaataatttgtgtaatttgtctaagatctccctgcaagtgaacgtagaacttgggaatggaaccaagattagtcttctaagtcctatgttcttcaccagtgagctacacagccttacggtgcagatagcacagcgtctgtgggcatccaacactcgaatagtttggaaaatcatcagcctgtgttccccaaatgagatctggtgcctcttcttggcctcagtatttctaggggaattccacattctgtgttatcagggtaggttaatcctaaaggtaactgggtactcgttcactattctgtagggttggagatttcctttggacattttccttgggcatggtgatgagtggcaccagggtaaggatgtagtgggcga

SEQ ID NO: 1048 - DNA, 583 bp, Homo sapiens
  MAP TO CHR22_34.0; EXPRESSED IN FETAL LIVER, SIGNAL = 3.1; EXPRESSED IN BONE MARROW, SIGNAL = 3.8; EXPRESSED IN HEART, SIGNAL = 3.5; EXPRESSED IN ADULT LIVER, SIGNAL = 1.2; EXPRESSED IN HELA, SIGNAL = 2.8; EXPRESSED IN BRAIN, SIGNAL = 3.7; NT HIT: AF174135.1, EVALUE 7.00e-56; EST_HUMAN HIT: BI025042.1, EVALUE 1.00e-55; SWISSPROT HIT: O96017, EVALUE 1.00e-13
ttcatccatctaagcagggggttattcctgagtttaaaaatcatcaatctaagattattttgggaagttatgaagacgtgttaataaaaggtgatcagccttttattggtacttactgcctctcttgctgaaccaatagcaaacttccttttgctgatgatctttatggctactttcttacatgttttcctctcgaaagccagctttacctctccacaggcaccactagagggaaaaacaaagatagtgattgtctgaatgtttttaattatgagacctaccactcctgggtccacttcaagtattagaatttacagacattccatataacagcctttccattgtccctgtttgcagaggacacagtgaaacttcaccagtgtaaaatgtcaagggcttaacagccaaaaacactaagtcagctccaaattccatttctgagcccagcaatacaaacatgggtcttactgtagccctggattgtgaaattcccagaaagatactaagagaaaaatgagagagaaactacgtatccgagaggtcagaaaaacattaactagaaacagtcctccctggtcaaaaa

SEQ ID NO: 1049 - DNA, 551 bp, Homo sapiens
  MAP TO CHR21_73.0; EXPRESSED IN PLACENTA, SIGNAL = 0.73; EXPRESSED IN BONE MARROW, SIGNAL = 1.2; EXPRESSED IN ADULT LIVER, SIGNAL = 0.72; EXPRESSED IN HELA, SIGNAL = 2.3; EXPRESSED IN BRAIN, SIGNAL = 1.1; EXPRESSED IN FETAL LIVER, SIGNAL =   1; EXPRESSED IN LUNG, SIGNAL = 0.79; NT HIT: gi14780681, EVALUE 0.00e+00; SWISSPROT HIT: O75144, EVALUE 1.00e-44; EST_HUMAN HIT: AL560774.1, EVALUE 0.00e+00
ccaggtgaagaaaatggagcaatatgcactgggcacggcacccattcctgttcccagagaccgcggtggttctcactgtgcggcatgtgcctctcacctcccctcccttccaaccacctttcgggtgctgagccgcgtcgaagggactttttgtctcctacctcagaggctctcccaagccagccctggccccactgtcgggcacagctcagcacgcaggcgccgggaccttacctgtctggctgccgacagtcaggttctgctgcagaagcacgttctctatgcagcagccaatgttcacgctgggggtccgtgcgatcctcagcacgctgaccacgtcatacaagccccgcatgttcaagaagacggtgtcattctgcagagcctggtccagcaggctgttgtccgtcttattgatccagtacacgttgggcctggggtagccgtttatggatgtacacgtgaaggtgagctcatcctgggaggggctgtggggggcgctgacgacgggcacgctgaagtttgctgcaggggagggaaacagattgtga

SEQ ID NO: 1050 - DNA, 582 bp, Homo sapiens
  MAP TO AC017082.3; EXPRESSED IN FETAL LIVER, SIGNAL = 2.8; EXPRESSED IN BONE MARROW, SIGNAL = 2.4; EXPRESSED IN BRAIN, SIGNAL = 1.9; EXPRESSED IN HEART, SIGNAL = 2.2; EXPRESSED IN PLACENTA, SIGNAL = 1.6; EXPRESSED IN LUNG, SIGNAL = 2.2; EXPRESSED IN HELA, SIGNAL = 1.9; EXPRESSED IN ADULT LIVER, SIGNAL = 3.7; SWISSPROT HIT: O35502, EVALUE 1.50e+00; EST_HUMAN HIT: AI184134.1, EVALUE 4.00e-12; NT HIT: AL163209.2, EVALUE 2.00e-13
ctccttatttccctgacccgccagcccctggcaaccaccattctattctttgtgtctatgagtttgactattttagatacctcacctaagtctatcacgcagtatttgtccttttgtgattggcatatttcacttagcatagtgtcctcaaggttcatccataacctcttttctgaagacctgtaaattcagctcttccaatatttttctgagagtatcaatcatagctagcatggtgttgctttttttcacttgaacttgactgataactacaatctgttctatgaaaattggaaggaccaccatggctggagtccctggcacgccgtgaacaatctccaaaatcccatctgatttcttgccataatacagcatggcagtgggaagcatctcccagggtattggagaaggcattttagactctggagtgaccttccctctctcactctacttgctgtgactgtttgcatagtgctgtggaacagaatgtgggctttacagttcaacttaccccaagtgcctatgtcaatatgctccctcagtcctgttaaaaaaaaaaatacagtgggagtctgatcagca

SEQ ID NO: 1051 - DNA, 525 bp, Homo sapiens
  MAP TO CHR21_68.0; EXPRESSED IN FETAL LIVER, SIGNAL = 1.5; EXPRESSED IN LUNG, SIGNAL = 0.77; EXPRESSED IN PLACENTA, SIGNAL = 0.79; EXPRESSED IN ADULT LIVER, SIGNAL = 1.1; EXPRESSED IN BONE MARROW, SIGNAL = 1.5; EXPRESSED IN HELA, SIGNAL = 2.9; EXPRESSED IN BRAIN, SIGNAL = 1.4; NT HIT: AB039887.1, EVALUE 0.00e+00; SWISSPROT HIT: P57081, EVALUE 1.00e-08; EST_HUMAN HIT: BG722541.1, EVALUE 2.00e-69
ggtctccctgttccaagaccaaggccccctcacctgcttgctatggaggtggccaggaatcggctgccgccccgcaccaccaacgtctgcccgcacaacgccagtcccacagagcccgccatgtacccgcccgcctcaccgccatacacatgtgccagcccagagcctcttcctgtccgcaccggtcggtgacgccaggcgcagacgccgagagatgacgtataccccacgtaccgcgcatgctcaaggacgagcctgccttgagcatgcgtgaaaggtgctgtgaccgccctccgggttgtggctggtggccttcggtgtttcgggtttggcagttcactcaccaaggtgatctgatggagtgcacttcgcacgattccaagtacttgcctaatgttcatcctttcctctagacggggtagggctggttctggatctttttccgcggtagctggagagacgtaggacctgatgatggctactagatgcctggtaaatgatccttcaagaagtgaatgaaccggg

SEQ ID NO: 1052 - DNA, 530 bp, Homo sapiens
  MAP TO AL160002.2; EXPRESSED IN HEART, SIGNAL = 1.3; EXPRESSED IN BRAIN, SIGNAL = 1.2; EXPRESSED IN PLACENTA, SIGNAL = 1.4; EXPRESSED IN ADULT LIVER, SIGNAL = 1.3; EXPRESSED IN HELA, SIGNAL = 0.64; EXPRESSED IN FETAL LIVER, SIGNAL = 1.2; EXPRESSED IN BONE MARROW, SIGNAL = 1.3; EXPRESSED IN LUNG, SIGNAL = 1.4; NT HIT: Y15994.1, EVALUE 2.00e-03; EST_HUMAN HIT: BF817299.1, EVALUE 8.00e-07; SWISSPROT HIT: Q9IAL9, EVALUE 2.20e+00
ttttagaagccctcacctgggaggagagcatctagccagtgacagttaggacttatttccccttcagccccaggagaagcagcagagccaggttgtgacagtctctccatctttctctgtctgcctggctccccctctttcaggatactagatgagggtaaagagcaacaaaacaatgcttgtgttattgaagaggtttgtggcggggaataatcatgtgactctctgggtctggaattaacaccagggcttggatgtcaagcaagggaaagggccaaactagagtcctgatatatttttaaacaatgctttgacaagaacggccatttatcttgggttttggatgtgttttagggtgatccacaagaagcatgtgagtgacatcccagttgtgggctgaaacacatcagaatcacctgggggcttaacgtgtagcttgctgagctccaacgccagcctctctgattcagtaggtctggggtgaggtccaagcagttgtatttccaataagttgctggatgatgctgatg

SEQ ID NO: 1053 - DNA, 508 bp, Homo sapiens
  MAP TO AL136478.2; EXPRESSED IN PLACENTA, SIGNAL = 0.62; EXPRESSED IN LUNG, SIGNAL = 0.56; EXPRESSED IN BRAIN, SIGNAL = 0.51; EXPRESSED IN FETAL LIVER, SIGNAL = 0.58; NT HIT: AF003528.1, EVALUE 5.00e-04; EST_HUMAN HIT: BG929497.1, EVALUE 0.00e+00; SWISSPROT HIT: P43026, EVALUE 2.70e+00
ttctttgggagtgggacttgtagttattatgtaggcatcacatttctaataatctttgatcctgaaagaagcagaagtaaaaatcaagacaaaactgcaaagcagaaggtgtgcttatttttggctaagaggaagaggagggaaggcgtgttgacctcacagggcagggagagaaggagtcttatccctgggagatgctgggagcaggggcttcaaaagacctgtgcttttgcagtgagaacattctgcagagacacacctggaagctgatgaaagtaggtgtacatcttttagggcagggacttctgtttgtttttctaatcgcttagaacagtgcctgccatatggtagatattgtagtcaacaaatatttgttgaatgaatgaatgaaaggtgatgggatggatgtgcttccaccaagttttgagttctgggattaaaatttctgccagggcatagacacatgctgtgttgggttccctccatttgttgcctacaaagcagcctt

SEQ ID NO: 1054 - DNA, 575 bp, Homo sapiens
  MAP TO AC022263.3; EXPRESSED IN BONE MARROW, SIGNAL =  12; EXPRESSED IN LUNG, SIGNAL =  11; EXPRESSED IN PLACENTA, SIGNAL = 5.9; EXPRESSED IN ADULT LIVER, SIGNAL =  21; EXPRESSED IN BRAIN, SIGNAL = 5.3; EXPRESSED IN FETAL LIVER, SIGNAL =  15; SWISSPROT HIT: P02248, EVALUE 5.00e-31; NT HIT: X07499.1, EVALUE 0.00e+00; EST_HUMAN HIT: BG181223.1, EVALUE 0.00e+00
aaaaatcaggggaggtttgcggaatgttaccatgtttaaggcattttgaaggagtagttgctaactttgaagcatattagatgtaaaagcaagaaatacaatcatcctgagatgacacgcttatgttttacttttaatctaggtcaaaatgcggatcttcgtgaaaacccttaccggcaagatcatcacccttgaagtggagcccagtgccactatcgaaaatgtcaaagccaaaatccaagataaagaaggcaatccctgtgaccagcagaggctcatctttgcaggcaagcagcgggaagatggccgcagtctttctgactacaacatccagaaagagtcgaccctgcatctggtcctgcgtcggagaggtggtatgcagatcttcgtgaagaccctgaccggcaagaccatcaccctggaagtggagcccagtgacaccatcgaaaatgtgaaggccaagatccaagataaagaaggcatcccccccgaccagcagaggctcatctttgcaggcaagcagctggaagatggccgcagtctttctgactacaacatccagaaagagtcgaccc

SEQ ID NO: 1055 - DNA, 568 bp, Homo sapiens
  MAP TO AL132765.16; EXPRESSED IN FETAL LIVER, SIGNAL =  11; EXPRESSED IN BONE MARROW, SIGNAL = 9.2; EXPRESSED IN BRAIN, SIGNAL = 9.5; EXPRESSED IN PLACENTA, SIGNAL =  12; EXPRESSED IN LUNG, SIGNAL =  11; EXPRESSED IN ADULT LIVER, SIGNAL =  15; SWISSPROT HIT: P75595, EVALUE 2.00e-10; NT HIT: AB037819.2, EVALUE 0.00e+00; EST_HUMAN HIT: AI355276.1, EVALUE 0.00e+00
ccttctacctttttggcctggttcatgagcccccctcggcctttctgccctgggttggggccccctccacctttttcccctggtttggggttgtatctacctttttaccctggttctgggccccctccgcctttttgccttggtttggggttccttctgcctttttgccttggtttggggttccctctgcctttttcccttggtttggggttccctctgtctttttgccctggtttggggttccctctgcctttctgccctggtttggggctccttcagcctttttgctttgattctgagtcccctccgcctttttgccctgagtagtgccagtggctggtgtgttgcccttggcacccactgggggcaccaccaccatcggcacctccttgggagcagtttccaagatggcagccttcgaagtgagaacctggatggaattcactacagagctgacagctggttccacttttgccacttttttctccttcttctttttgtccttgggggaggaggccagcttctcctggggcatggctggaactgtggcgacaggagcaacgataat

SEQ ID NO: 1056 - DNA, 506 bp, Homo sapiens
  MAP TO AL137840.3; EXPRESSED IN PLACENTA, SIGNAL = 1.3; EXPRESSED IN ADULT LIVER, SIGNAL = 0.6; EXPRESSED IN FETAL LIVER, SIGNAL = 1.3; EXPRESSED IN LUNG, SIGNAL = 0.97; EXPRESSED IN BONE MARROW, SIGNAL = 1.2; EXPRESSED IN BRAIN, SIGNAL = 1.4; EST_HUMAN HIT: BG402095.1, EVALUE 1.10e-02; SWISSPROT HIT: Q16587, EVALUE 2.10e+00; NT HIT: X64467.1, EVALUE 8.00e-03
gctgatggctacctccacacttgagttcctctctggccactttatgtaaagttttaatccaacacctcctatccccatagctaacattttatatgccttcctggcattattgttttcttgttaataattatcattctcaaacatattttgctttcttcttgttttcagtttgctttctccagtatattgtaaactccatgacaacaattatctcagcctgttttgttcgctactgtattcttatgacttcaaaaagtgtctagcatgtaataagtacttaataaatatttgttgcattgaatcttcaatatacatcatttattcaacaaacactttttaagcacttgttatgtcccaggcactatgctgtgtactgaggatatgatgcagaacaagactgacattaccactgaacttaaacctgtgaaaagcaggtaagtaaatgagtatttacaatataaagtgttaaggaagtaagataggagtcagcaaactgtggaggcata

SEQ ID NO: 1057 - DNA, 559 bp, Homo sapiens
  MAP TO AL158832.2; EXPRESSED IN LUNG, SIGNAL = 1.1; EXPRESSED IN FETAL LIVER, SIGNAL = 1.1; EXPRESSED IN PLACENTA, SIGNAL = 1.3; EXPRESSED IN ADULT LIVER, SIGNAL = 0.86; EXPRESSED IN BONE MARROW, SIGNAL = 1.4; EXPRESSED IN BRAIN, SIGNAL = 0.99; EST_HUMAN HIT: BI768494.1, EVALUE 1.00e-128; SWISSPROT HIT: P05468, EVALUE 5.30e+00
cgttcaacttcatgcaccacattctacaaagaagttcatagcctcggtctgaaacatcatgtcttagaccttctggtctgaaacgctggataagaggttctacccataaagagctattcgattgtgtttgtgaatccactggtgaacattgatggtataaaaccccatgaggcctgccttctcccttcgcaggacaaccacctggagaagttcttcaccctctgccactccctggagagccaggtgaccttccccatccgcgtgctggatcagaaaatcagcgagatggcgctggagcatgagctgaagctcagcatcatctgcctgaactcctcccgcctggagccgctcgtgctcttcctgcacctggtgctggacaagctcttccagctgtccgtgcagcccatggtcatcgctggccagacaggtatgaacctgcagggctgggctgggaggaggcaggagcaagcaagcattgccttctttaatgaaaaatgactttccagaaatccagagacaatgtgatcttcctttccactgatgatgtgtgctcaaggga

SEQ ID NO: 1058 - DNA, 512 bp, Homo sapiens
  MAP TO CHR21_27.0; EXPRESSED IN FETAL LIVER, SIGNAL = 1.4; EXPRESSED IN BONE MARROW, SIGNAL = 1.5; EXPRESSED IN HEART, SIGNAL = 1.2; EXPRESSED IN PLACENTA, SIGNAL = 0.78; EXPRESSED IN HELA, SIGNAL = 4.2; EXPRESSED IN BRAIN, SIGNAL = 1.5; EXPRESSED IN LUNG, SIGNAL = 0.87; EXPRESSED IN ADULT LIVER, SIGNAL = 0.9; SWISSPROT HIT: O70433, EVALUE 4.80e+00; NT HIT: AL161532.2, EVALUE 1.90e+00
ttcaaggtctggatgtgctgactactttatcttttaacaatggctattttttctaacttttttatgtaacacatcttagattttagaatgaaaattatgtgcaaatgaacagtggagaatgaggtaaacatttatgttttgaaatgggtctgtcctttcttttgtcaagtcgtaattgtaaagtatttagtcactgttgtcaggagttgagttgggtttgggttttgttgtggctacatttattacctttatactgagatgtcaatttcctttcatcttggtcagctggtaccatatactggatgtggggtctggggtgctgaagagatttttgtgttcctaatctactttccgctttccgtaatttctgaacaagcctgtgccacagagagtgtttatatatcattttgtcccttccacaataaacagtagactgtcatttctgttaatgggtgcaggtgtcaaagtggaggtagggttggttctgtcttccacttcgtcagcctcattga

SEQ ID NO: 1059 - DNA, 512 bp, Homo sapiens
  MAP TO CHR22_200.0; EXPRESSED IN HEART, SIGNAL = 1.5; EXPRESSED IN BRAIN, SIGNAL = 1.5; EXPRESSED IN LUNG, SIGNAL = 1.7; EXPRESSED IN HELA, SIGNAL = 1.3; EXPRESSED IN ADULT LIVER, SIGNAL = 1.7; EXPRESSED IN FETAL LIVER, SIGNAL = 1.1; EXPRESSED IN BONE MARROW, SIGNAL = 1.3; EXPRESSED IN PLACENTA, SIGNAL = 1.7; NT HIT: AF148319.1, EVALUE 8.00e-06; EST_HUMAN HIT: AA780477.1, EVALUE 5.00e-05
tgatcaggtccctcatcctccaccatctccaggtgatgtctgatcatgctggtgtgccttcagcaagaatcctgttaggtggatttaggagaatctcccttacccctgatgtttcctttcagtagttttccatccactaacctccccacccctactctgcaccttggctataaattccaactttcccatttatatttggagttagcccaatctcccccactgcaaaatcccattgcagtggtccccatcaatgtggtggtcctgaataaagtttgctttattatgctctaacaagtataacaactgaatcattgcttttctttaatactttctcttaacttcatttgcccacttccttctctgttcaggatattctggccatgctggcttcttgtcagttgttcaaatgccccaaactctaaggacttatctctggccaagcccagagttgaatcctgagtgtccacaggtccctggctcagccgttcccctgcaagtgtaggagcggaaag

SEQ ID NO: 1060 - DNA, 520 bp, Homo sapiens
  MAP TO AL132765.16; EXPRESSED IN HELA, SIGNAL = 2.7; EXPRESSED IN BRAIN, SIGNAL = 1.6; EXPRESSED IN FETAL LIVER, SIGNAL =   3; EXPRESSED IN LUNG, SIGNAL = 2.2; EXPRESSED IN BONE MARROW, SIGNAL = 2.2; EXPRESSED IN PLACENTA, SIGNAL = 2.9; EXPRESSED IN ADULT LIVER, SIGNAL = 3.4; SWISSPROT HIT: Q02277, EVALUE 9.50e-01; NT HIT: gi14786602, EVALUE 3.00e-45; EST_HUMAN HIT: H89869.1, EVALUE 1.00e-45
ctgtgcttcatagggtgtcgtggaaaagccccaccgagacacacgagtctcacaggtgacagagacaatcctgtcaactctcccctgggcttcatgtgctccacggcgccgggaggcaggcagggctgcatataccttctggagctcctcctctgcggcgcccaccttggccctccacacctgctcctcctcctccacgctcttctgcaggtctctgagcatgccctcctggggggaaaccgaggtgaggcagggccctctccctcccgagacccgcaccacacaaccgcatcttcctgtccctgcagccctggtgacctgccgtgctccgcctgctgacttcatgagcgccagcgttaggtggggagggaaggcaaccactgtcctgggagggaggtcctctggccagtgggccagtgtggctgcagtgccaggcaaggaaatgaggtctgtgacctgcacaggaccactaggatgcttgttactgccggggtttgccaccagcaccaagtgtgtcaat

SEQ ID NO: 1061 - DNA, 579 bp, Homo sapiens
  MAP TO CHR21_69.0; EXPRESSED IN LUNG, SIGNAL = 0.93; EXPRESSED IN FETAL LIVER, SIGNAL = 1.6; EXPRESSED IN PLACENTA, SIGNAL = 0.84; EXPRESSED IN ADULT LIVER, SIGNAL = 1.1; EXPRESSED IN BONE MARROW, SIGNAL = 1.6; EXPRESSED IN HELA, SIGNAL = 3.3; EXPRESSED IN BRAIN, SIGNAL = 1.6; SWISSPROT HIT: P02488, EVALUE 5.00e-33; NT HIT: gi14780622, EVALUE 0.00e+00; EST_HUMAN HIT: BF726222.1, EVALUE 0.00e+00
cacgcctttccagagaaatcccttaatgcctccattctgctggtggcatatatagggagggctcggccttggctccacactgcgctgcccagaggccccgctgactcctgccagcctccaggtccccgtggtaccaaagctgaacatggacgtgaccatccagcacccctggttcaagcgcaccctggggcccttctaccccagccggctgttcgaccagtttttcggcgagggcctttttgagtatgacctgctgcccttcctgtcgtccaccatcagcccctactaccgccagtccctcttccgcaccgtgctggactccggcatctctgaggtaagacgtggcccgtggtgctggcctctcctcgctgctcagagggtggtggcctcggtgggtggagagcgatggactctggtcttgctccgtcaggcaggtggcctcgtcccacttcatccccttgcagaggctgggcgagagcctgtgtccccactgcagccacgtggcagagcttcccctggcactggggagagggtggacaagggagcagcctgaatccacctttgctttcctccatcagc

SEQ ID NO: 1062 - DNA, 528 bp, Homo sapiens
  MAP TO CHR22_83.0; EXPRESSED IN BRAIN, SIGNAL = 0.59; EXPRESSED IN ADULT LIVER, SIGNAL = 0.65; EXPRESSED IN HELA, SIGNAL = 1.8; EXPRESSED IN PLACENTA, SIGNAL = 0.67; EXPRESSED IN FETAL LIVER, SIGNAL = 0.62; EXPRESSED IN BONE MARROW, SIGNAL = 0.56; SWISSPROT HIT: O60610, EVALUE 6.50e-02; NT HIT: AF183604.1, EVALUE 2.00e+00
attaaatgggggagcaggtcaggcacggtgtctcagggttcctccctgctctgacttctaggactcagaagctggctctgacctcccctaccttccctggctggagcacccaggttggctgcgggtgtggatggcgcctctgtgggccgccctccttcagcaccgccagctgaaggaggtacagcttccctttccccgcctctgccccctgtccctggcagggcgggaatgaccgagctggcctggatgacttgtctagaccaagctgagcccatttctcatggcagcagccaagatccagcccaggacaaaggaattccagagagctcactgcctctatttcaggacagttataacgtggggaggagaatccctggggtggtggccttagcctgggggatgcaggagggagcactaacatcgagcccctccttagacatcactcctatcatcctccaagcagtggccttattcccatcttccaggcctggaaacgggttcagagaagccaaggacctcagctacagc

SEQ ID NO: 1063 - DNA, 549 bp, Homo sapiens
  MAP TO AC015845.4; EXPRESSED IN BRAIN, SIGNAL = 0.54; EXPRESSED IN LUNG, SIGNAL = 0.48; SWISSPROT HIT: O35569, EVALUE 2.70e-01; NT HIT: AJ277662.1, EVALUE 8.00e-03; EST_HUMAN HIT: AW449607.1, EVALUE 2.00e-78
tgctccaaatgtctcacctggcagagggcctaagtgtccggaaccccagatgtttgaagaaatgggacaggagtctgttcctcagacatttaccgcctattaattaggaggtagtgtcttcttgactccctccagcgggtcccaggcctgcctgcccgaacatctgttctcctaacaatgtctgcccataaatcctgtccccgagtccagggtggcttagctggggaacaatggagcctatgaccggcagccaaatcctcaccatggttacacgagggtgtgactgcaactgtgtgtgcttgttggcaggcaccagcacctgcaactggggccaaggttgtgtgtgtgtagcggtctccagggccaggggtgggggcgttgggctgcggttgggagggatcctcacagagcaccttctgtaggcttctgccattcatgctgttgtaattcttggcctctgtgaagaaaagaggtttttatcttgcgcatcctgacatacagtaggtgctcagtaagtgttttttgactgccagtgaatgagcgagtgaa

SEQ ID NO: 1064 - DNA, 535 bp, Homo sapiens
  MAP TO AL160314.1; EXPRESSED IN FETAL LIVER, SIGNAL = 1.7; EXPRESSED IN LUNG, SIGNAL = 1.4; EXPRESSED IN PLACENTA, SIGNAL = 1.2; EXPRESSED IN ADULT LIVER, SIGNAL = 1.3; EXPRESSED IN BONE MARROW, SIGNAL = 1.4; EXPRESSED IN BRAIN, SIGNAL = 0.97; SWISSPROT HIT: O14249, EVALUE 3.00e-15; NT HIT: gi13649743, EVALUE 0.00e+00; EST_HUMAN HIT: BI908581.1, EVALUE 0.00e+00
caaaatgatgatgccgtcaggaaacacttattgacttaccatgggattctttcctccccaggtctccagaataagttcctggccagatatgtatccctcccaaaccagaataagatctggacggtgactgtgagccccgagcaaaacgaccgcacccccttggtgatggtgcatggttttgggggcggcgtgggtctctggatcctcaacatggactcactgagtgcccgccgcacactgcacaccttcgatctgcttggcttcgggcgaagctcaaggccagcattcccaagggacccggagggggctgaggatgagtttgtgacatcgatagagacatggcgggagaccatggggatccccagcatgatcctcctggggcacagtttgggaggattcctggccacttcttactcaatcaagtaccctgataggtaataaggagatggctccatccctcgtgacctaattcctggccttactgggaactttccagtattcatttccaaacttctctcattcccaggcgatttaa

SEQ ID NO: 1065 - DNA, 583 bp, Homo sapiens
  MAP TO CHR21_71.0; EXPRESSED IN FETAL LIVER, SIGNAL = 1.4; EXPRESSED IN BONE MARROW, SIGNAL = 1.5; EXPRESSED IN BRAIN, SIGNAL = 1.4; EXPRESSED IN HEART, SIGNAL = 1.3; EXPRESSED IN LUNG, SIGNAL = 0.98; EXPRESSED IN HELA, SIGNAL = 3.5; EXPRESSED IN PLACENTA, SIGNAL = 0.91; EXPRESSED IN ADULT LIVER, SIGNAL = 1.2; SWISSPROT HIT: P56182, EVALUE 4.00e-15; NT HIT: U79775.1, EVALUE 1.00e-105; EST_HUMAN HIT: BI223794.1, EVALUE 1.00e-105
tgaagttcatcgaccccttctgcagaattgctgcccggaccaaggagtaagtggtgggtggcctgatcgggcccgactccttcactgagttcttccatggggctgctgttgtgggggtgctgctccctcgagggatgaatctgtctcagagtggccgctggccgtgtgggtggggagaggttgcaggggagtcggcggcttccgcttgggaatccagcataacgggcctgctcaccggcctctgctctgcccctcagttccttggttttgaacaacatcactcgaggcatctttgagacgattgtggagcaggccccgcttgccattgaagacctcctgaatgaactggacacacaggatgaggaggtggcgtcggacagtgatgagtcctctgagggtggtgagcgtggagacgcgctgtcccagaagaggtctgagaagccgcccgcaggtgggggtcacactgcgcctggcttctcctcggggcctgtcctgggctgagccagtgcgatctcctgctgggttgctcctgccacctcctacctggtccccttgtctctgcccctctccacagtccatcctc

SEQ ID NO: 1066 - DNA, 502 bp, Homo sapiens
  MAP TO AC025758.1; EXPRESSED IN BONE MARROW, SIGNAL = 1.7; EXPRESSED IN HELA, SIGNAL = 1.3; EXPRESSED IN BRAIN, SIGNAL = 1.6; EXPRESSED IN FETAL LIVER, SIGNAL = 1.7; EXPRESSED IN LUNG, SIGNAL = 1.7; EXPRESSED IN PLACENTA, SIGNAL = 1.8; EXPRESSED IN ADULT LIVER, SIGNAL = 1.6; NT HIT: gi7110678, EVALUE 1.00e-121; EST_HUMAN HIT: AW963153.1, EVALUE 0.00e+00
aaaaatgatggcaaagcagggacataattagcatcctgaaaactattttacaaactttcattgcatcctgaaaactattttacaaactttcatttttcaggtgactttgaaacaccttatttctttgattaatttagcacctagaatagatttttaaacatgaatttatcaaattcataactcttcatcccattacggacagtgagctagaaaatgtaagctcttctccataaaaaaaaaactttaaatacataccttttattttcagccatactggctccttcatccttcagctgtttacttttctcagcacagccttcaagaagaatttctttcctacgtttaatggcatgaagccagttcccttcatcgttgtcaactacatccttctcatcagcagcttcagcttcaaactgctgggaagtgacctttgagaccttctcaccaattttcctcttccacccaaaggaagccattctggaaaattacaaagaaacagctt

SEQ ID NO: 1067 - DNA, 524 bp, Homo sapiens
  MAP TO AL138722.2; EXPRESSED IN FETAL LIVER, SIGNAL = 2.3; EXPRESSED IN BONE MARROW, SIGNAL = 2.5; EXPRESSED IN LUNG, SIGNAL = 2.3; EXPRESSED IN HELA, SIGNAL = 1.3; EXPRESSED IN BRAIN, SIGNAL = 2.3; EXPRESSED IN PLACENTA, SIGNAL = 2.5; EXPRESSED IN ADULT LIVER, SIGNAL = 2.3; EST_HUMAN HIT: AW938682.1, EVALUE 0.00e+00
agtggtcaggaccttgcatcaaaatctgcactatcattcctgcagcagtgtacttattcacttggacgtaacacttgctgatgcttccaattctttatccaaatgttaaaataaatatgccagtatttatacattcaaatcagtatttctccccttcaaaagcctgctcttggcaagctgtgtactaattctagtgatgctgtcactactgagaataattttggagctcctgctttggagttgccttccgagtttgcaacacatttcctgattgcctcagtggtggcaaaccttcctcagctgggaaacagccaggcactgtgcggggccaacttgggcttccgaggtggggaatcgaggttgtcaataagtatgctcattaaagtaatgaaaattctcttgaaagactggcagttctaaaaggggcatttagtaatggcatggagtatgtatttaggattggaaggaattacagttggtccctgaataacaccggggttaggggctcccatcatctccacagt

SEQ ID NO: 1068 - DNA, 585 bp, Homo sapiens
  MAP TO CHR21_3.0; EXPRESSED IN LUNG, SIGNAL = 1.1; EXPRESSED IN BRAIN, SIGNAL = 2.5; EXPRESSED IN PLACENTA, SIGNAL = 1.1; EXPRESSED IN HEART, SIGNAL = 2.5; EXPRESSED IN ADULT LIVER, SIGNAL = 1.5; EXPRESSED IN BONE MARROW, SIGNAL = 2.4; EXPRESSED IN HELA, SIGNAL =  10; EXPRESSED IN FETAL LIVER, SIGNAL = 2.2; SWISSPROT HIT: O15084, EVALUE 1.10e-02; NT HIT: AL163202.2, EVALUE 0.00e+00; EST_HUMAN HIT: BI459694.1, EVALUE 0.00e+00
gccagttctttcagcaggagatggatttggtttaaatacatagaataaaaatgaatttatctcattgaaatataactagtttgtgaaacctgtggaatatttatttatatttcctataatttataatttacttcttgctttaatactgacaggctctgcaatgccagagggaggcttgtgcaaatattctcatagattctggtgctgatccaaatattgtagatgtgtatggcaacacagctgtccattatgctgttaacagtgagaatttgtcagtggtggcaaaattgctgtcctgtggtacagacattaaagtgaagaacaaggtagacattaaccaatgttattttcaaaatatttgaaatccatttgttttaacattaacatatgtaaattgttttatatttggaagctcaaacattcctatttttctatgaaaatagtttgacaaaacttaattgtctaggattttgctttaaatattaatatttttacaagaactattagtatggcttttctgtgcattatgataaatatttaaatttgttaaaggtaaaacattttcaaatattctttcccacccaa

SEQ ID NO: 1069 - DNA, 585 bp, Homo sapiens
  MAP TO CHR22_206.0; EXPRESSED IN BRAIN, SIGNAL = 1.1; EXPRESSED IN FETAL LIVER, SIGNAL = 1.2; EXPRESSED IN HEART, SIGNAL = 1.5; EXPRESSED IN LUNG, SIGNAL = 1.5; EXPRESSED IN BONE MARROW, SIGNAL = 1.1; EXPRESSED IN ADULT LIVER, SIGNAL = 1.3; SWISSPROT HIT: P28968, EVALUE 9.90e-02; NT HIT: gi13648116, EVALUE 0.00e+00; EST_HUMAN HIT: BG028472.1, EVALUE 0.00e+00
cttccctgctgagaacaagcctcagtatatccacgttacaggtgaggagctacgggcagagttgggcaggtgggtccacatccctttccttgcaccaagcctatggctgcagaaccacctcagcaggctccaggagccctcctggtggctgccacacaggcgctcccctttctcttcaggaacagtgtttctgcagctgccctactccaagcgcaagttctcagggcagcagcggcggcggcggaactccaccagctccaccaaccagaacatgttctgcgaggagcgggtcggctacaactgggcctacaacaccatgctcaccaaaacatggcgctccagcgccacaggggatgaaaagtttgctgatcggctgctgaaggacttcacggacttctgcatcaaccgtgacaaccggctggtcacgttctggacaagttgcctggagaagatgcatgccagtgccccgtgaggccaggctgcacctgtgctgggggaaggtgggtgagccactgccctcaaacccggggcggaggattccaggcaggctctaggagtcaggtgtccgtttgctgctatcagtga

SEQ ID NO: 1070 - DNA, 596 bp, Homo sapiens
  MAP TO AL160237.1; EXPRESSED IN HEART, SIGNAL =   5; EXPRESSED IN FETAL LIVER, SIGNAL = 6.1; EXPRESSED IN PLACENTA, SIGNAL = 6.1; EXPRESSED IN ADULT LIVER, SIGNAL = 5.4; EXPRESSED IN BONE MARROW, SIGNAL = 6.7; EXPRESSED IN BRAIN, SIGNAL = 5.6; EXPRESSED IN LUNG, SIGNAL = 5.8; SWISSPROT HIT: P50400, EVALUE 3.40e+00; NT HIT: AL163209.2, EVALUE 1.00e-08; EST_HUMAN HIT: AA513261.1, EVALUE 2.00e-13
gagcccatacctccttcctcctgacccaggatggaaaatgtctcttccaacagccttccaaacctgaaatgaactgctccttacagaactgccaaaaggaagaaatagaaaagaaaaaagaagcaataggtccaaagtaagtccaaaacccaataaggcaaacaacactgtctactcattaaatactgaggcttgagaataatcttatttggctccatgtctcaccttttagacacactggggcaggggttgtcccccaaggccctgggcaacccagccccaaaatttattctctcacagttctggaggctgggaagttgaagattaaggttccagcagagtctgtgtctggtgaggactttctctctgtgtctacattgctgcaacatctggaggggacaaatattgtatcttcacatggcagaaagaatggaaggaaagagctcactggttttcctgggtacattccacactgcagctctcatgggttgtagtcttgtgccttttagctttcacaggctggcgttgcatacttgtggctctacaatcctggggtcttaaggatagcctcactcccaccactccaccagtctgtg

SEQ ID NO: 1071 - DNA, 531 bp, Homo sapiens
  MAP TO AL137070.3; EXPRESSED IN BRAIN, SIGNAL = 0.55; EXPRESSED IN ADULT LIVER, SIGNAL = 0.67; EXPRESSED IN LUNG, SIGNAL = 0.61; EXPRESSED IN FETAL LIVER, SIGNAL = 0.6; NT HIT: L11910.1, EVALUE 9.00e-12; EST_HUMAN HIT: AA130165.1, EVALUE 2.00e-22
tgcaaacacacacattagcctaggcctacacacgatcaggatcatcgatataattgtgttttaccttcacacctcgtcccactggaaggtcttcaggggcaataacatgcatggacctgtagtctgctgtgataacaatgccttcttctgaaatatctcctgaaggacctgcctgagacagtcttacagataattttttttaataaataagagtatgccctaagataacattaaatagtaaagtatatacataaatgagtaacatagtaatttattatcattatcaagtattatgtgttgtacataattatatgcactattcttgtctatgattggcagcacaataggtttgtttatatcagcatcaccaaatgcacttgaggaatgcattgagctttgaagttataatggctattatgtcactacatggaagatatttttcagctccattagaatcttatgggaccactattttaaatgcagtgtgtcattgaccaaagcattattatgtggggcatgactgtaaacgtt

SEQ ID NO: 1072 - DNA, 534 bp, Homo sapiens
  MAP TO AL138895.4; EXPRESSED IN HELA, SIGNAL = 0.72; EXPRESSED IN BRAIN, SIGNAL = 0.74; EXPRESSED IN FETAL LIVER, SIGNAL = 0.61; EXPRESSED IN PLACENTA, SIGNAL = 0.69; EXPRESSED IN LUNG, SIGNAL = 0.66; EXPRESSED IN ADULT LIVER, SIGNAL = 0.66; NT HIT: gi16160466, EVALUE 1.00e-115; EST_HUMAN HIT: BF970037.1, EVALUE 1.00e-115; SWISSPROT HIT: P42852, EVALUE 1.70e+00
cagggacaaggcagaagaagctcaccctggccgagctgacggtggtggaggtgccgtggctgcctgtggatgaacccgtgtcactgtaggagaccatggagtaggtgtccccagccccggggcctgggggctgccgcgccttcatggactcaatctcacgcctcagcaccaggtggtcgaagcgttctaggtcttgcggggaaatggtgcctctcacctcagagaggagtgagaactggaggcggggacaaaaggggcactcagcagggagcgctactagaaggtggaacaggggccctgctacccccaaaggactggcatgcaaacttgaccctgcctcccctccttaactgtctggctccccagtgctctcaagagaaaggccaaacaccgtcacctggacaccaggcccagcatcatctcactcctgcttccctgtcatctcctcagcaagcacatgtagctgtgactccctggacacactgcaacatttcatgccacaaagcctctggctgtctgaaccttccacccaga

SEQ ID NO: 1073 - DNA, 554 bp, Homo sapiens
  MAP TO CHR21_73.0; EXPRESSED IN FETAL LIVER, SIGNAL = 1.1; EXPRESSED IN HEART, SIGNAL = 1.2; EXPRESSED IN BONE MARROW, SIGNAL = 1.2; EXPRESSED IN LUNG, SIGNAL = 0.78; EXPRESSED IN BRAIN, SIGNAL = 1.2; EXPRESSED IN ADULT LIVER, SIGNAL = 0.91; EXPRESSED IN HELA, SIGNAL = 2.5; SWISSPROT HIT: Q9Y5U5, EVALUE 1.00e+00; NT HIT: gi13385987, EVALUE 1.30e-01; EST_HUMAN HIT: BF341143.1, EVALUE 5.00e-02
aatcaccacctagggcacagctgtggccgaggctcccatgatgaagcgtctgtgtcagcgctgacgaggtctgccgaggacgcgtttctctctgcagcccggcaccagtctcaaggccatcggctccgacagcgtcacctcctgggaccttcccttcatgtatggtcccagcggcatgcgggcctggtggaggaggtcctggcctgccgcccagggatggccggtccaggcgcagggccgattgtccacttctggcccctgaggtaccgggagggctggtgagcagcatgtctcgctctgagaccggccaggctgctggggcaggcatctgatgtacagtagttcccacacgtggcaatgtcaccagcaagagccacgtatgataaattcaggccgtccaccgtggcaacactgggaaggctgattctgtaggaaaggattggccttgggccatcactgttcaaagaagaagaaatccctggatcactgtctgatccaactccagacagacactccacacaggattcctcctggggatcacggctcttctcttg

SEQ ID NO: 1074 - DNA, 590 bp, Homo sapiens
  MAP TO AL136978.3; EXPRESSED IN BRAIN, SIGNAL = 0.63; EXPRESSED IN FETAL LIVER, SIGNAL = 0.6; EXPRESSED IN LUNG, SIGNAL = 0.55; EXPRESSED IN BONE MARROW, SIGNAL = 0.59; EXPRESSED IN PLACENTA, SIGNAL = 0.63; EXPRESSED IN ADULT LIVER, SIGNAL = 0.69; SWISSPROT HIT: P08548, EVALUE 2.60e-02; NT HIT: AL163252.2, EVALUE 4.00e-08; EST_HUMAN HIT: AA961470.1, EVALUE 9.00e-04
cttatcgcaagagacagggcattatataaccacacaagggtcaatttaccaaaaacatttaataagtatgcaacaaacatcagaactcttaaatatataaagccaacattgacagaattaaagatataggtcaacaataatagtaagagtcttcaaaatcccatttcgataacgaataaaacaaccatagagaagatcactaaagaaataaaggacttcatcaacactgtagttcaaattgaagtaaaagatagatatataaaggacattctactcaacaacaatataatatatggttttcttaagtatacacatggaacatccttcaggataaaacatattaagccacaaagcacgtcttaatacatcttgaaagattaaaccatacgaagtattttttcctgattacaatggaatgaaactagaaataataccagaaaaattattggaaaatctataagtatctggaaattaaataacagctttaaataaacaatagatcaaagaaaaaatcacaagagaaattaaaaaatgttttcagacaaatgaaactaaaaacacaatataccaaacctgtgagatacagtgaa

SEQ ID NO: 1075 - DNA, 593 bp, Homo sapiens
  MAP TO AC020759.3; EXPRESSED IN HELA, SIGNAL = 2.2; EXPRESSED IN FETAL LIVER, SIGNAL =   3; EXPRESSED IN BONE MARROW, SIGNAL = 3.8; EXPRESSED IN PLACENTA, SIGNAL = 3.2; EXPRESSED IN BRAIN, SIGNAL = 2.2; EXPRESSED IN ADULT LIVER, SIGNAL = 2.8; SWISSPROT HIT: P48525, EVALUE 2.00e+00; NT HIT: AJ278581.1, EVALUE 0.00e+00; EST_HUMAN HIT: AL555274.1, EVALUE 0.00e+00
tgggaatgagtccctactgcaattaagtataaaaaatatcttccatcataattggagtgtgacctgcattggagagtggctctgagtaaagagttgataaaaatccacaaagagttgggtttttgtcttttaaaaacattcctttacacactacaaagaaataattagtattttggctttttaaattcctacatgatatttagaatggcggtccccaagggtcctcccttcacgtaattgtgaacacagaccctcttccaagggcacatcccggagggtgcggactctgaagacttcgacctccacgtgtttatactggtttgagaacaaagacagcgtcatccagaacgtagtagtcattatacatgtcgccttcacacaggtatggtagtctggtgaaagcttcgataacaaaaccagcttttctgaaaacttcaggcagactattcacttgttcttcccagttctgtcctttgatttccaaaatttctgatggtttctcccacttgccacctactaatacaaataagaacattcagttaaattcttgaacaaacaagtgatttaaagagggaagcagggaggagccatat

SEQ ID NO: 1076 - DNA, 506 bp, Homo sapiens
  MAP TO AL138748.1; EXPRESSED IN FETAL LIVER, SIGNAL = 0.56; EXPRESSED IN BONE MARROW, SIGNAL = 0.55; EXPRESSED IN PLACENTA, SIGNAL = 0.6; EXPRESSED IN BRAIN, SIGNAL = 0.65; EST_HUMAN HIT: AI126362.1, EVALUE 0.00e+00; SWISSPROT HIT: P24386, EVALUE 5.00e-69; NT HIT: gi14759325, EVALUE 0.00e+00
gaacttgataaaaggggtaagggaatatatatataaagcctggtgtttattattatatttcttattagtcaggatttgcatgaagatgtcgaagaagctggtgcactgcagaaaaatcatgctcttgtgacatctgcaaactccacagaagctgcagattctgccttcctgcctacggaggatgagtcattaagcactatgagctgtgaaatgctcacagaacaaactccaagcagcgatccagagaatgcgctagaagtaaatggtgctgaagtgacaggggaaaaagaaaaccattgtgatgataaaacttgtgtgccatcaacttcagcagaagacatgagtgaaaatgtgcctatagcagaagataccacagagcaaccaaagaaaaacagaattacttactcacaaattattaaagaaggcaggagatttaatattgatttagtatcaaaggtaagtactaattttacccatctttgcattgaaaacagtatctgggccca

SEQ ID NO: 1077 - DNA, 546 bp, Homo sapiens
  MAP TO AF239614.1; EXPRESSED IN FETAL LIVER, SIGNAL = 0.49; EXPRESSED IN BONE MARROW, SIGNAL = 0.43; EXPRESSED IN BRAIN, SIGNAL = 0.64; EXPRESSED IN ADULT LIVER, SIGNAL = 0.38; NT HIT: gi15300154, EVALUE 1.00e-100; SWISSPROT HIT: P54296, EVALUE 3.00e-28
tccttctccaaattggcatcatgtttcataaaactcaaaaaagatgcatgaccatcctttgtgtgcgagacgcagcgggcgcgcctggtggtcctgggatagcgagaacagagcatttcttcctcctccacacgcctctggggacctcgcggttttcactgccagtctcgtttctgtttctctttgtagtccgtggtggggagcggcagctggcagagagtcaacgcccagacggctgtgagatccccgagatatgccgtgtttgacctcatggaagggaagtcttatgtgttccgagtgctgtcagcaaaccggcatggcctgagcgaaccttcggagataacgtcccccattcaggcccaggatgtgaccggtgagctgtcacactgggtggccccaagtcaggatggactaagagtggggtgacaccaaatagccttaaattgtgtgaataaagacattaatgttataaacgagttgaagttcaagtggacttaaaacttcactttacgagagattaagagctctctgccatgttttgtttgg

SEQ ID NO: 1078 - DNA, 505 bp, Homo sapiens
  MAP TO AL137145.3; EXPRESSED IN FETAL LIVER, SIGNAL = 0.51; EXPRESSED IN PLACENTA, SIGNAL = 0.64; EXPRESSED IN ADULT LIVER, SIGNAL = 0.67; EXPRESSED IN BRAIN, SIGNAL = 0.63; SWISSPROT HIT: Q04759, EVALUE 1.00e-20; NT HIT: gi5453975, EVALUE 1.00e-94; EST_HUMAN HIT: BE840877.1, EVALUE 9.00e-90
aagggatgtttggatggatggcaggtacaccgaaatgtaagataaatatggaggcaatgactcgtgtctcctaatgagggcgccattgaaggtatcatgctgagacaggttagaggggaggtagggttgtcggagcagaagccataccttggtctggaatgtacaaaacatgtgcgtcagaaacggatgctcccaggccaaggaaagaactctcttctctaccatcgtgcactcaacatcatcgtccatcaagaccacatctttctttaaggcctttattgcgaaaaattgattggttttcttgaattctgccaggaagacctagaaggagagggaagaagtaactttattttagaatttggattcccatttcttaaaaaagagacagagtcctgagagacacctgtgttgggtgggaaaaggggttccttctccaacccccatccatcctgcataggccattcctgagacaaaatggagcacttctctggtttcggacatgaca

SEQ ID NO: 1079 - DNA, 581 bp, Homo sapiens
  MAP TO CHR21_60.0; EXPRESSED IN FETAL LIVER, SIGNAL = 1.7; EXPRESSED IN HEART, SIGNAL = 1.5; EXPRESSED IN LUNG, SIGNAL =   1; EXPRESSED IN ADULT LIVER, SIGNAL = 1.2; EXPRESSED IN BONE MARROW, SIGNAL = 1.7; EXPRESSED IN BRAIN, SIGNAL = 1.7; EXPRESSED IN HELA, SIGNAL = 4.5; SWISSPROT HIT: P38983, EVALUE 5.00e-09; NT HIT: AL163278.2, EVALUE 0.00e+00; EST_HUMAN HIT: AA730904.1, EVALUE 5.00e-27
tttcgaaacagtgtgccatcactaatagaatacacaaagacagcaactccatgaaacaaaatcagaaaccaaaaccaaagaacaggctgcaaaggaaggggaaagaagatgagcattaaagacagaaagatggcaggttgtgtgctccacaaggagcacattttgcactaacaccacaagagtctggctcagtgaatggggattgatagtagtttaaatgtctgagagctttgaggagggattaaaacatgtgaaaaatggagacgagctcactccacaggtctgatgtaggcgatgctggcccaggaagttctgtgcatggtggcacccctgtgacacccatggaaggccatgtctgatctccagttccacagagatcctgaagagacagaaagggaagagcagctgctgcggaaaaggttgtggccagggaggaatttcagggagaatggactgctccagttcctgagttgactgctctccaagctgaggctgcagactgggctataggtgtaggtggcctctgggcccattcagctgatccctactgaagtctaaggggctcagtctcccactgaagg

SEQ ID NO: 1080 - DNA, 575 bp, Homo sapiens
  MAP TO CHR22_151.0; EXPRESSED IN BONE MARROW, SIGNAL = 0.77; EXPRESSED IN ADULT LIVER, SIGNAL = 0.81; EXPRESSED IN HELA, SIGNAL = 4.9; EXPRESSED IN BRAIN, SIGNAL = 0.79; EXPRESSED IN FETAL LIVER, SIGNAL = 0.76; SWISSPROT HIT: P50839, EVALUE 2.50e+00; NT HIT: AF338735.1, EVALUE 0.00e+00; EST_HUMAN HIT: BG818863.1, EVALUE 0.00e+00
tgtaattcccttgaggcacctggataacatgtgtctgcaagtcaaaataagctcttcttccatgcgttcccagtttacgttgctgttaaattcagctgcttttttggcagctttcttaatatcctcaggcactttactggcttcaactttctgagtattctgttgttgcatttgggaatactctttataatggtctgtaattcgctgacattcattttcttgtagaataacagaatactcagcatgtttggctggatattcttttatcattaaatcaatcacttcatcactgcgcaatgctgttatacctagcatgcactgagtttcagtaatgactttagctctctcaggtagagtttctccttgtgagacaaatctcgctctaaatctggatatttccttttaaaggaggtcacacccaaatattcactgacttgttattgaagcatatagtattctcctatttcatcaggtggccttttgtactctatcaaattttctgctggatagtgactaaagccaagatcttgacttgaagtttcataactattagaactacctcctgagcccattca

SEQ ID NO: 1081 - DNA, 507 bp, Homo sapiens
  MAP TO CHR21_62.0; EXPRESSED IN BONE MARROW, SIGNAL = 1.8; EXPRESSED IN BRAIN, SIGNAL = 1.5; EXPRESSED IN PLACENTA, SIGNAL = 0.75; EXPRESSED IN HEART, SIGNAL = 1.3; EXPRESSED IN HELA, SIGNAL = 3.6; EXPRESSED IN FETAL LIVER, SIGNAL = 1.3; EXPRESSED IN ADULT LIVER, SIGNAL = 0.88; SWISSPROT HIT: P24025, EVALUE 2.10e+00; EST_HUMAN HIT: T98677.1, EVALUE 1.80e-01
attggcatggaagtgaggaggctcctgagaccagttagttctccccggactgtcccagtgaggaacccaggacccaggtgaccaaatgatcagtgggcatcagaagtaggatggagactggccctggctcacagcgccatacttacccgagagagaccctgggggcagacccctgggcgaaacttcccaggacagccagacgtggagcagccagcaggtgcttccagaagaaatgaacattccaagccaaggcacctcccgccaacaccaccccccaaggcgctaaggatgcccagagccactccatcttgggggcgctgtcatttggtttcagaaaaccacattctgtagtgggtgccagggtgtcctcaagacttctgggctctggcactcgtcatctggactccttttcaaaggaaaatgccccaggcgaggtggggctagcatctgcccctcaccctgcggccagctgggcggccccacccagcctggctctaagacctgtgc

SEQ ID NO: 1082 - DNA, 582 bp, Homo sapiens
  MAP TO CHR22_153.0; EXPRESSED IN BONE MARROW, SIGNAL = 1.1; EXPRESSED IN BRAIN, SIGNAL = 0.94; EXPRESSED IN HELA, SIGNAL = 1.4; EXPRESSED IN FETAL LIVER, SIGNAL = 0.96; EXPRESSED IN ADULT LIVER, SIGNAL = 0.77; SWISSPROT HIT: P55957, EVALUE 5.00e-27; NT HIT: gi15317435, EVALUE 1.00e-118; EST_HUMAN HIT: R09650.1, EVALUE 1.00e-126
atcaccgtctaacagtgggcacatgggctcaccacacatgcgtttgcttaccgagccccctgcagggagtgattgcagtcttccctttccattgcctctcagaactcaactgtttctcattctttccgcccagcagccctggatacttaataagtactttgaagtgcttcttcatactggggactgtctttcctttgagagggaagagtattagtaaaccaggttctgtgtgcccctctgtgcaggaccggaacagggacctggccactgccctggagcagctgctgcaggcctaccctagagacatggagaaggagaagaccatgctggtgctggccctgctgctggccaagaaggtggccagtcacacgccgtccttgctccgtgatgtctttcacacaacagtgaattttattaaccagaacctacgcacctacgtgaggagcttagccagaaatgtaagaacccttgaggtcagctccttccctgcctgccgcccatgcccttttctctggaaggttgagaagcccagcggggcccctgcctctgatgccagcacaagggttacaggctgtcctgctc

SEQ ID NO: 1083 - DNA, 506 bp, Homo sapiens
  MAP TO AL136457.1; EXPRESSED IN PLACENTA, SIGNAL = 2.8; EXPRESSED IN HELA, SIGNAL = 2.3; EXPRESSED IN BRAIN, SIGNAL = 1.6; EXPRESSED IN LUNG, SIGNAL = 2.8; EXPRESSED IN ADULT LIVER, SIGNAL = 3.6; EXPRESSED IN FETAL LIVER, SIGNAL = 1.7; EXPRESSED IN BONE MARROW, SIGNAL = 1.6; EXPRESSED IN HEART, SIGNAL = 1.4; SWISSPROT HIT: P34061, EVALUE 2.10e+00; NT HIT: gi14727273, EVALUE 2.00e-37; EST_HUMAN HIT: BG423471.1, EVALUE 3.00e-37
atgctggagtcaggagatggtaagaaatagcctcctcttctgtggccaagcgtccccccagagaagcagcgagaatcacatgatactcacttgtttccctgacactgatacagcgtctccacctctcgaaacaccctactccgactgtgccctgcttgtttctcgatgatctgtgggaagaataaaatctgtcatgtacacccacctgacttccaaacagccctttggcaggagtcctctgggagaatgcaaggccacactcagtccaaatccagtgtccagcagaagtctggcctacgccttggtgacaccggcactgtggctctgttggcaaagcagcagactggcctcagggctttccagctcagctgagcccattccactctggccaagcacaacaccaaggaagtgaatgaggctgctgcccccagctgcccaggggagactgaggcagccggcaagacaaagagctaccttactcagctccacctcctgtggacacctct

SEQ ID NO: 1084 - DNA, 572 bp, Homo sapiens
  MAP TO AL136975.1; EXPRESSED IN FETAL LIVER, SIGNAL = 0.88; EXPRESSED IN ADULT LIVER, SIGNAL = 0.94; EXPRESSED IN BONE MARROW, SIGNAL = 0.78; EXPRESSED IN PLACENTA, SIGNAL =   1; EXPRESSED IN LUNG, SIGNAL = 0.89; EXPRESSED IN HELA, SIGNAL = 0.62; EXPRESSED IN BRAIN, SIGNAL = 0.9; SWISSPROT HIT: P08548, EVALUE 7.00e-37; NT HIT: AL163209.2, EVALUE 3.00e-12; EST_HUMAN HIT: AL044589.1, EVALUE 3.00e-03
tttttcagctcagtgacatgctagatttcattaagtaatttgtaaatattattactgtttagcatacctgtaatgaatcccatttaatcatggtgtgtgattatttttattcattgtcaaattcaatttactagaatgttcatgagaatatttgcatctctattcataagatatattggtctgcagttgtcttttcttgtaacgtctttgtctgtttttagtattggggtaatgctagcatcagagaattggttagaaattattatctccgcttctgtcttctgaaagtgattattaagaattaatataatttttttcttaaatgtttggtagaattcactagtaaactcatctggtcctgatgatttctgttctctaaagtttttttaaattgattcaacttctttagtaggtataaaagtattagagtttctatttccttttgttcagttggcagacggtgtctttgaaggaattggttcatttcatcgaggttttcaaatttgtgtatatagagttgttcataatattctcttattatctttttgatgtctgtgggatttgcagtgatg

SEQ ID NO: 1085 - DNA, 559 bp, Homo sapiens
  MAP TO AC005629.2; EXPRESSED IN PLACENTA, SIGNAL = 0.66; EXPRESSED IN ADULT LIVER, SIGNAL = 0.45; EXPRESSED IN BRAIN, SIGNAL = 0.71; EXPRESSED IN HELA, SIGNAL = 0.8; EXPRESSED IN FETAL LIVER, SIGNAL = 0.77; EXPRESSED IN LUNG, SIGNAL = 0.49; EST_HUMAN HIT: AW296733.1, EVALUE 0.00e+00; SWISSPROT HIT: P39768, EVALUE 1.00e+00; NT HIT: AL163203.2, EVALUE 0.00e+00
agggttcagtgtggaaaacgggaaaccaaaagcccctctgaatcctgcccaccgaggttctccccagccaaggtgaggcggccgcagtgcgagatccacaccgcagcctcggaagacaaatgcagcattcctaatgcagacatggcactcaaaagatgacaccccccttgctcatgtaacaagcacctgtagtgctaatgcactgcctcgacacaaaaacattaatataagatccacaatcccctcgctgccgtgcagtcctaagacagcgatcataataatcaacattgacatagtcaatacaaacgtagtaacgaacctaggcttaaggttggtgttaggggttaagtttagggttaggggttggagataggggttggggtcagagttaggggttaggagtcaacatttagagttaggggttaagagaggttgggggttagggattaggggttagggttgggttagggggagggggagagttgtggttaggggttagggttagggattagggttaaggttaggggtcagggtcaggggtcccactctgttggctgtc

SEQ ID NO: 1086 - DNA, 507 bp, Homo sapiens
  MAP TO AL136371.1; EXPRESSED IN BONE MARROW, SIGNAL = 0.63; EXPRESSED IN ADULT LIVER, SIGNAL = 0.38; EXPRESSED IN BRAIN, SIGNAL = 0.63; EXPRESSED IN FETAL LIVER, SIGNAL = 0.66; NT HIT: gi15920163, EVALUE 4.80e-01; EST_HUMAN HIT: BF997059.1, EVALUE 1.80e-01; SWISSPROT HIT: Q9Z809, EVALUE 1.20e+00
catgggatttagcagtgtggtaatcataatgacattgacaaggcagagtcaggtaagtgaacatgtgattggaatgggtataagagagaacacgatttgtaaaatagatgatagtatgtagagacaaactatttcaaagattttttctataaacagatgaagaaaaaaaggacactagttggacgaaaaaactgtcaagttttttatgttaagagaagtaatgtcatatgttatgttagtgtgctaagaattaaaaccaagtaggagaaaaaaaaatgtgctggaagaagataagaaaacagtaggataatgatcttctttagacaagagaggatggaatccagtgtaccagcagatggagggacttagctaggagtttggtcggtacattcatactcacagaagggaaggtcgttataaacacaaacggaatatttgtgttctgcattatcagtttcctgaatgttatctccaaggaagagacctgagaacaatacatcttgggga

SEQ ID NO: 1087 - DNA, 517 bp, Homo sapiens
  MAP TO AC022057.2; EXPRESSED IN BONE MARROW, SIGNAL = 0.61; EXPRESSED IN BRAIN, SIGNAL = 0.53; EXPRESSED IN FETAL LIVER, SIGNAL = 0.68; EXPRESSED IN LUNG, SIGNAL = 0.62; EXPRESSED IN ADULT LIVER, SIGNAL = 0.72; SWISSPROT HIT: Q01344, EVALUE 1.20e+00; NT HIT: AE007665.1, EVALUE 1.20e-01
catgctccatttgtttttgcttgttggttctatttttagcagatttaccaaccactgggaatttgagattttctttagatacaataatataaaggtcatcgtgaattttgtgcttgtaattattaaaagaatctgttatatactggtaaatattatgagaatctgttaccttaaactctgtcatttctacttctttctttatgggaagaacagacatacctatttatggtttttatgagttgggatccatttagctaaaattgtgagtggggtaaaatttctctggtgttgtttgcctcccatagaaaatgacaaaataatgtacatccttcagattagggacaatattcaatttctcagtaacttgtactatagtttctggttactcctttctcagtgtttttttttttttttttttctctgtcaaagcctatcaaaacctaattttttctttttttctgactactcattattttcttagtaaactctgcttccatgctcttctccgtggtttctg

SEQ ID NO: 1088 - DNA, 575 bp, Homo sapiens
  MAP TO AF238280.1; EXPRESSED IN FETAL LIVER, SIGNAL = 1.1; EXPRESSED IN LUNG, SIGNAL = 1.1; EXPRESSED IN ADULT LIVER, SIGNAL = 1.1; EXPRESSED IN BONE MARROW, SIGNAL = 1.2; EXPRESSED IN BRAIN, SIGNAL =   1; EXPRESSED IN HELA, SIGNAL = 0.73; SWISSPROT HIT: P52742, EVALUE 5.00e-79; NT HIT: gi14732082, EVALUE 2.00e-16; EST_HUMAN HIT: BE162832.1, EVALUE 0.00e+00
gagaattcattctggagagaaaccttatgactgtaaggagtgtggcaaagccttcagtacacaattatttctcattcagcatcagagaattcatacaggagaaaagccctatgaatgtaatgaatgtgcaaaatcctttagcctgaaccgaactcttactgtccatcagagaattcacactggagagaaaccttataggtgtaatgaatgtgggaaatcctttagtcaatgctcacaagttattcaacataagagaattcacactggagagaaaccttatatctgcaatgagtgtggaaaatcatttggtgctcgtctatcccttatccagcatcagagaattcacactggagagaaaccttatggttgtagtgtgtgtgggaaaacctttagtcaaaagggacatcttattcagcatcagtgaattcacacaggagagaaaccctatgaatgtagtgagtgtggaaaagctttcagccagagttttaatcttattcaccatcaaagaacacacaatggtgagaagtcctatgaatgtaatgaatgtgataaagccttcagtttgctttcttccc

SEQ ID NO: 1089 - DNA, 501 bp, Homo sapiens
  MAP TO AC011799.5; EXPRESSED IN BONE MARROW, SIGNAL = 1.3; EXPRESSED IN HEART, SIGNAL = 1.2; EXPRESSED IN BRAIN, SIGNAL = 1.1; EXPRESSED IN ADULT LIVER, SIGNAL = 1.5; EXPRESSED IN HELA, SIGNAL = 0.8; EXPRESSED IN FETAL LIVER, SIGNAL = 1.3; NT HIT: AF167306.1, EVALUE 0.00e+00; EST_HUMAN HIT: BF224056.1, EVALUE 0.00e+00
tctcatgaaggagctgagccaaatctgcccacattatggggaaagggaggttcaatcaacattagcaaatactcatgcaattgatgaaatataaaatggtatcagtggcttggtgaatgtcctgtgggtagggtgaatcaatctactcttaaaaaacatacattttcccaatcatgcttttaaacggcatcttttaaaaaaacaagttatatatacagatatcaccccaaaatgaatcttttacagtctactactataaatttaaggcatcctgatattctgttcttctgctggtgaggcattgttttcatggttctctttccaaagaggatagtccagaaatttccaataatttccaaagggcatcagtgagagaaaatttaaaaagtgatttacaagaagagttcttttgactctggctcagcaatgtgctttatgctgtaggatttcttcatttttctattgatgtcattatgcctaagcagaagagaaaccacaggc

SEQ ID NO: 1090 - DNA, 501 bp, Homo sapiens
  MAP TO CHR21_65.0; EXPRESSED IN HEART, SIGNAL = 1.3; EXPRESSED IN BRAIN, SIGNAL = 1.7; EXPRESSED IN LUNG, SIGNAL = 0.88; EXPRESSED IN HELA, SIGNAL = 4.2; EXPRESSED IN FETAL LIVER, SIGNAL = 1.5; SWISSPROT HIT: Q08397, EVALUE 1.60e+00; NT HIT: AB038161.1, EVALUE 0.00e+00; EST_HUMAN HIT: BG394670.1, EVALUE 1.80e-01
acttgggtgatgagcctttgtcacgtggcctctgcagaatcagctagctgggcaaggggcctaagctccggaaggttcccctttggtcatttttgggtgtctggtgattgccaggcttccagtatctcaccactcaaattagagccccagaaagggagcatggtgtcatttcatcccctgggccgtggttgtgggagcccatggtgccttctgcagggcactggagaacgctgtgtgtgctcatcttgggacaggcaggagaggagggcaggtggcaggatgagggcggctgtagcctgcaggtcacacagtgttatgccagaccacggtgcctgccacgctgggtctccaacggccacacgaggcactgcttccatgttatcagtgaggaaactgtggcctggagacaggtgggcgatgagttcaagttcctgctgccaacaggtggaccccaggaccaagcctagcccagttgacccctggctcctcctgtttgctctt

SEQ ID NO: 1091 - DNA, 549 bp, Homo sapiens
  MAP TO AL136445.1; EXPRESSED IN HELA, SIGNAL = 0.62; EXPRESSED IN BRAIN, SIGNAL = 0.73; EXPRESSED IN ADULT LIVER, SIGNAL =   1; EXPRESSED IN FETAL LIVER, SIGNAL = 0.81; EXPRESSED IN PLACENTA, SIGNAL = 0.93; EXPRESSED IN BONE MARROW, SIGNAL = 0.7; EXPRESSED IN LUNG, SIGNAL = 0.93; SWISSPROT HIT: P34687, EVALUE 7.80e-01; NT HIT: gi14756016, EVALUE 2.00e-37
ttggaatcaacaaggactcgaatgaatttcacttactgttctgccaggaattcctatcccttgtgggcctatgtcccctggggaaccgtgaacacctggaagtcctctttcaccctgtgaaatgaaaggcttctgttactgcaaggctcaagagacatacatttttctgctgtattttgttaattattcattccttaaaaattaactataatatttgtatacctttggcccacgtggaccaggtgctccaggatttccatctaatccctaaaagaaaaaaagtatgaatacatatcttcttctagaaaagttataaacacattagaagttataactaaaatatgtttcatcactcttcatcttgcttgaataaatctttttctataaaagaataaggaacggggagtaaaaatttcaatatgttatagattttgtatagttgctttaaaatataaaatatttttatttataaaatgaggcacctgatattgagaaatattattattatttaatacataaaaagttcaaaggagatgaaaaacaaaggca

SEQ ID NO: 1092 - DNA, 529 bp, Homo sapiens
  MAP TO AC007029.3; EXPRESSED IN BONE MARROW, SIGNAL = 0.8; EXPRESSED IN HELA, SIGNAL = 0.82; EXPRESSED IN BRAIN, SIGNAL = 0.71; EXPRESSED IN LUNG, SIGNAL = 0.64; EXPRESSED IN FETAL LIVER, SIGNAL = 0.72; EXPRESSED IN PLACENTA, SIGNAL = 0.59; EXPRESSED IN ADULT LIVER, SIGNAL = 0.63; EST_HUMAN HIT: AI174896.1, EVALUE 1.20e-02; SWISSPROT HIT: P20438, EVALUE 2.20e+00
atgacagattttcgggatgcagcctccagctctgcctgtctgacttcctcacccccagctttctggagtgtgggctgttataacttggctgtgtggaacagaagcttcttcaacagcttcctggctcattgtgtgtaatgggcagtggctgcatgctgacattgattttgtggacatccagatgataaaacacacccttgtctactcttatcattttaagacagaacaggagacagcagatgttactcatcacttcttgtgggcatcaattgggctgccctctgaggagccctagagaaggctgctttctgccagaggtgacaggtggtgccctggtagatccaggtcccagtgtgccacctccaagattaaagatggcattgtttcagggagctctgcttacgttttataaagaggctagtaatatcagaagtggaataacggttaaagtcagaagagagatgatagtttgtctcttgaagaaccaagaaaaattttgataaaatgagcaggctcattaattcggagc

SEQ ID NO: 1093 - DNA, 521 bp, Homo sapiens
  MAP TO CHR21_52.0; EXPRESSED IN BONE MARROW, SIGNAL = 0.5; EXPRESSED IN BRAIN, SIGNAL = 0.56; EXPRESSED IN PLACENTA, SIGNAL = 0.49; EXPRESSED IN HELA, SIGNAL = 0.78; EXPRESSED IN LUNG, SIGNAL = 0.56; EXPRESSED IN ADULT LIVER, SIGNAL = 0.41; SWISSPROT HIT: Q28686, EVALUE 3.70e+00; NT HIT: AJ229041.1, EVALUE 0.00e+00
caaattccccctcctctctcaaaaaacactctttaggaaaagaattccagaagaatctacccacagattctgagtccttaatctagctatccaatgtgacacagaactcagacactgtgagaaggttttgcttttactgggcctgttctccaggtctgtgctttctaattataaagttgatgtctcagtccttctttgatcagttcaactaagaggacttggtgtttatggcaattgaattgcttctttgtcacgatgtcagattcgtcccaccgttcaactacctctaacacacgaattgtatcaactaagcgcatcaaacagtaatggtgaaagggagagggactagtgcagtggctctcaactgggggcagtttttccccccaggagacgtttggtggtgtttggacacatttttgatggtcacagccagagaaagggatgctactggcatctggtacgtagaggccagggttgctgctacctattgtacaaggcatagagcagccccacaagataaa

SEQ ID NO: 1094 - DNA, 546 bp, Homo sapiens
  MAP TO AL133499.1; EXPRESSED IN ADULT LIVER, SIGNAL = 0.65; EXPRESSED IN FETAL LIVER, SIGNAL = 0.42; EXPRESSED IN BRAIN, SIGNAL = 0.41; SWISSPROT HIT: P31627, EVALUE 1.70e+00; NT HIT: AL163301.2, EVALUE 0.00e+00
gctttgccatgatgattgtgttttttaaaatacttccagttgcttacttctgtttagttatctcagtgctaaatattgttaattaattaaatataagcagcatgttctagattttatgtgtctggaattcttactaaaaatcttcctggatatgacttccagtcataacgttatggattttattgtaaacaaggtagaattttatttgccttttaatcatttcattatggtgagtgtcctccttacagagcgtgtactgaatttgggttttactccttttttgttcatttccacaagttgaactctgtgttattatcctattttctgttagggtcattgtgttgttaagtaatcgacttacatagaaggtgtgcacctagaaggttaacagaaaacaagttgaaacatgactgaaaatatatttctgtaagaattactgtaattcttctgagagtataaatagccagggttttaaagatctgctttataggatttatactgcaaataacttggcaggattaattggcctgcatttgcttgctgtag

SEQ ID NO: 1095 - DNA, 560 bp, Homo sapiens
  MAP TO AL137784.2; EXPRESSED IN PLACENTA, SIGNAL = 0.64; EXPRESSED IN BONE MARROW, SIGNAL = 0.61; EXPRESSED IN LUNG, SIGNAL = 0.56; EXPRESSED IN BRAIN, SIGNAL = 0.53; EXPRESSED IN ADULT LIVER, SIGNAL = 0.67; EST_HUMAN HIT: AL530470.1, EVALUE 6.00e-48; SWISSPROT HIT: Q9ZED6, EVALUE 9.20e+00; NT HIT: gi14249723, EVALUE 4.00e-48
atccatggcatattggaaccataacataccttaaagttatgattttagaaattttaaatctgattattttcacagaatgcttttaaattatttttaagccccctggctactatcttagttgactgatctgcgaattaggaaaagagattttggtaacatcagtggctcatctgaaagcagctattattcaaacagttattactcaccagctgagagtctgaggaaggaaaaatcttgagttttgtactactttctttgatctcattcatcagatcagtaagagtataagtctgtgccaagttctaaaagaaaacaaaattaaagtcttcagattcagttaaaatatgcctctgattttatggaatacactctcaaatttcatctagcatagcaaaagtgtctatttcaaaaaatattaagatttagttgagtacattttacatttagtaaaggtcactattaccgatagagccatggtaaaatacacagaagacctttcagaagccctgtgtgaaaataaggtacatgtatacatatggtgatggcccaagatagcgtaa

SEQ ID NO: 1096 - DNA, 507 bp, Homo sapiens
  MAP TO AL121830.11; EXPRESSED IN HEART, SIGNAL =   2; EXPRESSED IN BONE MARROW, SIGNAL = 1.7; EXPRESSED IN PLACENTA, SIGNAL =   2; EXPRESSED IN LUNG, SIGNAL = 1.8; EXPRESSED IN BRAIN, SIGNAL = 1.9; EXPRESSED IN HELA, SIGNAL = 0.9; EXPRESSED IN ADULT LIVER, SIGNAL = 1.5; EXPRESSED IN FETAL LIVER, SIGNAL = 1.9; EST_HUMAN HIT: AL603345.1, EVALUE 1.00e-127; SWISSPROT HIT: Q12053, EVALUE 2.70e+00; NT HIT: gi15304835, EVALUE 0.00e+00
gggcatctactcagtggctcaaaatagctcccaaccccagcccagacatagaacctcttacagggggtgtcgaatggtgtgtacggtccttcatcatcatcctcgtcctcctcttcctcctcatcattctcattgtcctcattttcattctctgtttcgttgccagcctcagccacaacatcgtccctccgtgtcccattcacgcccctgtctggggcactgctgggccctgtcccattctccacggtgtgcttaattgggattttgatggccacctcagattccccgttggtataagccctgctgtttatcaatctttgtctctggaaagagaaaggcgcactcttaccacggtcagagggattgcaaataccttacactcagaacatgagctgttgggatctttccctggcagctgacgatatgcttccagaagaccctggagtcaagttttaaggggcctctcaatgtgataaccaactccagacaacttccatctgggaggaa

SEQ ID NO: 1097 - DNA, 526 bp, Homo sapiens
  MAP TO CHR21_68.0; EXPRESSED IN BONE MARROW, SIGNAL = 1.6; EXPRESSED IN HELA, SIGNAL = 4.6; EXPRESSED IN BRAIN, SIGNAL = 1.6; EXPRESSED IN FETAL LIVER, SIGNAL = 1.3; EXPRESSED IN PLACENTA, SIGNAL = 0.8; EXPRESSED IN HEART, SIGNAL = 1.2; EXPRESSED IN LUNG, SIGNAL = 0.87; EXPRESSED IN ADULT LIVER, SIGNAL = 0.74; EST_HUMAN HIT: BI030377.1, EVALUE 0.00e+00; SWISSPROT HIT: P57081, EVALUE 3.00e-31; NT HIT: AB039887.1, EVALUE 0.00e+00
gtggctgagttgaaagaggcttacccatggacccaaaaaacatagctgccgccccacacccccaggcttatggaaaggcagggcataggacatctggaaggtgccgagtctcacctgccactggtcgcccacaggcctgtagagcaccaggggggcttcctggcagtcctggagcacccacagcccctgggtctcctcgaaagccacgtcccacacttggtgctggaacgccagctgctgcctgtacaccaactgctgtctgcgggcgtccagctggaagatgtagaccacaggagtgcttgccacgaagaaagagagcatgattactaggactgcaggcccacgggctccgctctgcagccagcaccccagacggtgcagccctcgccggtgccacctcaggagagcctacgctgaaagccccagctgcgccactcccaaatgccggcgccggggaaaccatggggtgacgtacacttttttaagtcctaagctctggagtggctcgtggtgcagcaatagctaa

SEQ ID NO: 1098 - DNA, 508 bp, Homo sapiens
  MAP TO CHR22_14.0; EXPRESSED IN BRAIN, SIGNAL = 4.5; EXPRESSED IN HEART, SIGNAL = 3.7; EXPRESSED IN LUNG, SIGNAL = 4.3; EXPRESSED IN HELA, SIGNAL = 3.3; EXPRESSED IN ADULT LIVER, SIGNAL = 4.3; EXPRESSED IN FETAL LIVER, SIGNAL = 4.2; EXPRESSED IN BONE MARROW, SIGNAL = 3.9; EST_HUMAN HIT: AW295137.1, EVALUE 1.20e-02; SWISSPROT HIT: Q94890, EVALUE 4.70e+00; NT HIT: AF106072.1, EVALUE 1.00e-07
gccagagatagagcctgtggttccaagcacagagctattctctctctctgacctacttcaactcaggagtcatgacaattgcagccagtcattgggagaggagaaacaagaaacaatagacagataatatactgtgagaggcaaatcaagcaagacaaaaggcaggaagtgacaaatatgtgccagtttttagccaaaaggagttcagggacactctccatgaagtggggcatttaagccaagacctgaatgaaggagcaaaccatgtacagaaccaagaagagtgtcccaggctgcaggcgcagcaggtgcaaaggccctgaggcaggacagaggtgcttggcacaaacaaggaatagcaggaggccagtggagctggagtagggtgggcacgaggggagagggaaggtgctaggaggtgaagacaatgaggtctccagagcacgtagggccctggaggactgagaaacgccttgggtgttcaccatccaagggttttgtgcaagat

SEQ ID NO: 1099 - DNA, 597 bp, Homo sapiens
  MAP TO CHR22_207.0; EXPRESSED IN FETAL LIVER, SIGNAL = 1.2; EXPRESSED IN BONE MARROW, SIGNAL = 1.4; EXPRESSED IN LUNG, SIGNAL = 0.7; EXPRESSED IN BRAIN, SIGNAL = 1.3; EXPRESSED IN ADULT LIVER, SIGNAL = 0.86; EXPRESSED IN HELA, SIGNAL = 2.7; EST_HUMAN HIT: AA341779.1, EVALUE 2.10e-01; SWISSPROT HIT: P13866, EVALUE 3.00e-42; NT HIT: L29333.1, EVALUE 0.00e+00
atggatgacaaagctgaggcccagaatgggaaggtgatttgcccaaggccactcagtgagggctctgtctgtgggttgggtcctctcagtttctcaggcatctatggaaagaagctgctatgacgagttgaaggtttcagaatgttcatttctgtaccgatgttttccagcttttcacgaagtgggaggctatgacgccttcatggaaaagtacatgaaagccattccaaccatagtgtctgatggcaacaccacctttcaggaaaaatgctacactccaagggccgactccttccacatcttccgagatcccctcacgggagacctcccatggcctgggttcatctttgggatgtccatccttaccttgtggtactggtgcacagatcaggtacccaagctggatgtgcgggatggacagagtcttctccagggccctacaggaactcctgtctgtctgtggtttgcagggttgggacagggaggggagagctcaggtggtttgtaagttgccacgccccagtgatacagcagtgccaggccaatgacccaagatggcgaagctaggaagtacaaaggtgtcacagggtctctggt

SEQ ID NO: 1100 - DNA, 594 bp, Homo sapiens
  MAP TO AL137005.2; EXPRESSED IN LUNG, SIGNAL = 7.3; EXPRESSED IN BONE MARROW, SIGNAL = 7.7; EXPRESSED IN ADULT LIVER, SIGNAL = 7.9; EXPRESSED IN HELA, SIGNAL = 5.5; EXPRESSED IN BRAIN, SIGNAL =   7; EXPRESSED IN FETAL LIVER, SIGNAL = 7.4; EXPRESSED IN HEART, SIGNAL = 6.5; SWISSPROT HIT: Q9NG98, EVALUE 9.90e+00; NT HIT: AF099810.1, EVALUE 3.00e-09; EST_HUMAN HIT: AL048984.1, EVALUE 1.00e-12
aaaggatggagttgtggtgccaaattctgcaaacaagtggctagaagaactggaaagaggtcatgtgttagcttcccagggctgctgtaaaaagtaccacaaaatgggtggcttagagcaacaataatttgttttctcatcgatatggaggctagaagtctgcaatcaaagtgttggcagggccttgttccctctgaaggctcttaggaagaatttgtccttgcctccctagcttctggtggtgacatcagaccttggtgttccttggcttgtagatgcgtcactccagtcactgcctccattgtccatggtggtctccctgtgtgttttgcagtctcttctttttttataaaaacaccagtcagattagattagggccgccctgatgacctcatattaacttgatgacatctgcaaagaccctaattccagataacctcaagttcacaggcttggggtggatgttaatgtttgggagacactctttagcccagtacaggccgtctttggagatggttacggagagagtggtctccatgagtggtgtgggcagatgtaggtagcattgatgagaggggtaagagatggagcaca

SEQ ID NO: 1101 - DNA, 570 bp, Homo sapiens
  MAP TO AL158832.2; EXPRESSED IN HEART, SIGNAL = 2.7; EXPRESSED IN PLACENTA, SIGNAL = 3.3; EXPRESSED IN HELA, SIGNAL = 1.9; EXPRESSED IN FETAL LIVER, SIGNAL = 2.7; EXPRESSED IN LUNG, SIGNAL = 3.1; EXPRESSED IN ADULT LIVER, SIGNAL = 2.7; EXPRESSED IN BONE MARROW, SIGNAL = 2.8; EXPRESSED IN BRAIN, SIGNAL = 2.9; SWISSPROT HIT: Q9SEU8, EVALUE 4.20e+00; EST_HUMAN HIT: BF899273.1, EVALUE 1.00e-114
gcatcttccaactttgctccagcaacttcagctcctcattaaatccctccctgtaggtcatccctgcaaccagttgacactggagctcagcagccagctgataggggccttcactcctcttgtcgagctgctcctctctcctctcaaagccctctttccttctctcctgctggctgacctagaagctcagctaaagaggtgttcaaagggtccagtcgcttaaacaggtggccagtgtgctttctgctataactccttgctccttgagctcagctccaagctgtagaaggccatggaagagcacattgatgtcatcttgggaataattaacagggtccggtttttctgttcgtttccttgcaccagatgaagagtaggataaacttgggagaagccaaagtgatgtttttgtattgtggctttgaatgatttcaaggtcccttggttaacctattctcagcaaaagaaatagaagatggtcccaagatggtaagagcagagtgtttggttgataatttgatctaaaagtgaccagactccacaagttaacccccagagctgctcaattac

SEQ ID NO: 1102 - DNA, 582 bp, Homo sapiens
  MAP TO CHR21_71.0; EXPRESSED IN HEART, SIGNAL = 1.2; EXPRESSED IN LUNG, SIGNAL =   1; EXPRESSED IN BONE MARROW, SIGNAL = 1.6; EXPRESSED IN BRAIN, SIGNAL = 1.3; EXPRESSED IN HELA, SIGNAL = 3.2; EXPRESSED IN FETAL LIVER, SIGNAL = 1.6; EST_HUMAN HIT: AL526390.1, EVALUE 0.00e+00; SWISSPROT HIT: P56182, EVALUE 2.00e-22; NT HIT: AY033999.1, EVALUE 0.00e+00
gtaagtggaaagagcccgtgttggcattctctggctcatggggtcttgctgttttgtcagggaaaggtgagaaggagcccccgagcccgggcatggagaggaagaggagcaggaggaggggtgtaggggccgaccccgaggcgcgggcagaggctggtgagcagccaggcacagctgagcgggccctgctccgagatcagcccaggggccgtggccagagaggggctcgccagagaaggaggacacctcggcccctgaccagtgcccgagcaaaggcggccaatgtccaggagccggagaagaagaagaaacgcagggagtgatgtggccgggccaaggacaggcagggagggaggccaggcctcgcttgcaccgcgggacgaggctgaccgggctgttctgtagactcaggaccgtggctccagaactcctgtgccaggcgggagggaagggcggcactggagagatgggcccatcattaggggccagcatcccaggaactggacctttccccagagcctccgcctgtggctgtgatgaccttgggccagaaggtcaaactccgaagactgaaactctgcc

SEQ ID NO: 1103 - DNA, 570 bp, Homo sapiens
  MAP TO AL160191.1; EXPRESSED IN BONE MARROW, SIGNAL = 0.82; EXPRESSED IN BRAIN, SIGNAL = 0.68; EXPRESSED IN HEART, SIGNAL = 1.6; EXPRESSED IN PLACENTA, SIGNAL = 1.1; EXPRESSED IN ADULT LIVER, SIGNAL = 1.2; EST_HUMAN HIT: AL519606.1, EVALUE 1.00e-05; SWISSPROT HIT: P09953, EVALUE 6.30e-01; NT HIT: AL163227.2, EVALUE 6.00e-07
cacacattatatggccgctgtaagtgtgcagtgatatgatgcatggggactcagttcatgaggcagtgtgaattctgaaggtatcacaatgggacaggtgtttttttctccactcattttctccgaaagtcttttgttttgttgccctccctctttggggcatatgctttcagctcataccttaatgacatcagaatctgcaatttcctggcaacttttgtggttaaaattattctgcccttccattttaaagcactaatatcaaaggtattaggtgcaaaatgatgataaaaataattgcaatttttaccattaaaagtcatggcaaaaccacaattactttggcaccagctgaatattttgaaactccctactctgatgttaaccaagttcatgattcaacgaacttgcagaggggtaggggaatttcaagggaaagggggagatgcctggggttgtcacacactctgtctttcatcctctattgacatgttggttatttggagatggtattcagttccactatagcccctcagtcactgtagaccctctcaaaggggcaatcatgtt

SEQ ID NO: 1104 - DNA, 531 bp, Homo sapiens
  MAP TO CHR22_18.0; EXPRESSED IN HELA, SIGNAL = 2.7; EXPRESSED IN BRAIN, SIGNAL = 3.4; EXPRESSED IN FETAL LIVER, SIGNAL = 3.2; EXPRESSED IN BONE MARROW, SIGNAL = 3.6; EXPRESSED IN LUNG, SIGNAL = 3.3; EXPRESSED IN HEART, SIGNAL =   3; EXPRESSED IN ADULT LIVER, SIGNAL = 3.1; EST_HUMAN HIT: AW887037.1, EVALUE 1.00e-64; SWISSPROT HIT: Q9IA18, EVALUE 4.90e+00; NT HIT: AL163285.2, EVALUE 6.00e-47
ggtgatcccttgatttggtgcacttccccttcccctagggatggagattcctatgagccagactgcggtgattattattgcccttctgggtctagccacccagtggggctaccaggctctgggcccatgctggggaacgtctgcaaagaacccggtgatgtgatccatcttcagatctcccagctgtggataccagcacctgctgtggtggtggtgccaggggaatggcgtagactctgtgagagtccttgtttgtagatatgtttagtgtgcaggctttctcaaatgctggttatgctaccagtgaagtcatcatgtggacacactcaggaccactggttagaaaggatgttgcaggcagtggaattagctgttgtttttctccttccttggagcagggttgttctgttatgaattgctgtaatgtcctgagttaattggcctccagccaggagatggcacttttgagagagcaccagagtttttcacctgtcttgtggaatttgcagcagcctgccacttctttcaaag

SEQ ID NO: 1105 - DNA, 560 bp, Homo sapiens
  MAP TO CHR22_211.0; EXPRESSED IN FETAL LIVER, SIGNAL = 1.1; EXPRESSED IN LUNG, SIGNAL = 0.74; EXPRESSED IN BONE MARROW, SIGNAL = 1.2; EXPRESSED IN ADULT LIVER, SIGNAL = 0.87; EXPRESSED IN BRAIN, SIGNAL = 1.3; EXPRESSED IN HELA, SIGNAL = 2.2; EST_HUMAN HIT: BF312374.1, EVALUE 5.00e-02; SWISSPROT HIT: Q07687, EVALUE 6.20e-01; NT HIT: AY046029.1, EVALUE 5.30e-01
agtcatctggcacaaaacccacgttgggagatctgggttcaggcgggattgttacatggatcaattatcttctaacctcccaatccagaactaggaccagcacatcagcaggatgtttgcgtctgaggagcagaggcatttacccaggcatttgtcttctattgatcatgtggaggaggaaggagagagagatcaaattagtccccgttgctacattcatctaagcagaaatgtggtccccaaccggatcattcactccatcactctggaggtaggaggtgtaaaaggtctggaggtgctgttgaaagtccccatcaagaaaatagtggtagaaaaaggactcccctgagcagggttcagtcacctcttgcttttgtctacctgccccctgcctttcatggaaaaggaaacagtgacaccaaggccctgtgagaggagtacagagacagatttttttctgtattaagccagcagcataatctatccatttcagatacagcaaacgaccaatttaaaacaaaagacttttcattagatttccgcatttcccatgtacacaa

SEQ ID NO: 1106 - DNA, 588 bp, Homo sapiens
  MAP TO AL080248.7; EXPRESSED IN PLACENTA, SIGNAL = 0.75; EXPRESSED IN LUNG, SIGNAL = 0.66; EXPRESSED IN FETAL LIVER, SIGNAL = 0.88; EXPRESSED IN ADULT LIVER, SIGNAL = 0.93; EXPRESSED IN BONE MARROW, SIGNAL = 0.84; EXPRESSED IN BRAIN, SIGNAL = 0.68; EXPRESSED IN HELA, SIGNAL = 0.61; EXPRESSED IN HEART, SIGNAL = 1.3; NT HIT: gi15295589, EVALUE 1.00e-04; SWISSPROT HIT: P23201, EVALUE 1.50e+00; EST_HUMAN HIT: AA046502.1, EVALUE 2.00e-14
cataggtgctgttgccaatgcttggaagatggtgactaaaggcacagttgtgcatgcctggcacaatctctggcttatgactatgttttgtgatgatgacaaagtggtgactttgaaggattccaaaagtcagatgagaagaaaaatgtcagatctccttacatatgcaaaaattgtatcttcagaatctgtcaatagggtggaacaggtggataacaaagaagttcttaacatcaataatgaggctccggttgttcattcattagtcagtagtgaaaaagccaaaatggctctgagtctagatgattgtgataatagtaacaatgaaaatgactttgttaacactacagaaaaagtgcttatacatgacatgctgaaaatatgtgatgggtttatcgaaggactagagcagcgtatgttcgtagctgatagcagaacaagaaatcacttcagtttataaaatgaaagagagacttctaaggcaaaaaaatagttactaatgacacagatgacactacagttaacattttaacaagccatttagaagaatgtcccctcatctccagaggacctacttcccggtccttc

SEQ ID NO: 1107 - DNA, 507 bp, Homo sapiens
  MAP TO AL139112.1; EXPRESSED IN BRAIN, SIGNAL = 0.46; EXPRESSED IN FETAL LIVER, SIGNAL = 0.56; EXPRESSED IN ADULT LIVER, SIGNAL = 0.58
caatagagttttccttcggggtacacagggctagagatgagcatggaggagcttcgtgatgctgataaagtatttctcaatctggattctgttcatgttggttcatacaatgtgaaaattgagtaagaactatttttatgatttgtatatttttgttatacttcaataaaaattttatttaaaaaactgtataattctggcaaataatatcagtggatgctaaaattattaggtgaaatattttgaggggcaaggatatattaatgcaatttcaaagtaacacttcacagattgtacattaattacaaaggggaaatgttaccttagtaaacgaggaaatacgacaattcccacttaaaccaagtggttagtcagtgcgaattatgaagtgacagactggtgttaggcacctcctgacataatgtaatgtaacacaacggaaaatatacaacatcatttatgtaatgttcttgacagtaattcttaacctgtatcgcatcatgagga

SEQ ID NO: 1108 - DNA, 600 bp, Homo sapiens
  MAP TO AL138879.2; EXPRESSED IN PLACENTA, SIGNAL = 0.45; EXPRESSED IN ADULT LIVER, SIGNAL = 0.52; EXPRESSED IN FETAL LIVER, SIGNAL = 0.49; EXPRESSED IN BONE MARROW, SIGNAL = 0.47; EXPRESSED IN BRAIN, SIGNAL = 0.46; EXPRESSED IN LUNG, SIGNAL = 0.5; EST_HUMAN HIT: AI275214.1, EVALUE 2.00e-04; NT HIT: AF292561.1, EVALUE 2.30e+00; SWISSPROT HIT: Q35038, EVALUE 4.50e+00
ttgctggacatatttcagaaggtggataaaaatgaccaagtccttatcactgatgtctgtaagtatgctttcatctcaaaaacctttttattctgtaattaaccattttcgtgtccatctttttaaataaaatacatatatatcattttatataaagtagtaatattacccacaaattttgcagcaagaatttaaaataactgaggattttgagactacactatcagaggatattccttttaacatactctggatttgcagtgatgtgtactcagtcatctaggagacagcactttatgcagttatctttgctaataattgtattttatttgcaaatagtaatagtaatatgaataatggtaataataatatttcaagcccatatttaccctgagatatgaaaggtacatttcataattggattagcctcagcatagttctgttcacaaagcaacatatcacaaggggtatttccttctgagagaagaacacaaaatataaatgcagagcctaatgtagcactgtaaatgaaatagccatgagattactacctacatcaagaaacaagatattactagaagcttcacaccctcatgccac

SEQ ID NO: 1109 - DNA, 500 bp, Homo sapiens
  MAP TO AC020698.2; EXPRESSED IN PLACENTA, SIGNAL = 0.87; EXPRESSED IN ADULT LIVER, SIGNAL = 0.99; EXPRESSED IN BONE MARROW, SIGNAL = 0.48; EXPRESSED IN BRAIN, SIGNAL = 0.46; EST_HUMAN HIT: AW137342.1, EVALUE 1.80e-01; NT HIT: M86547.1, EVALUE 1.20e-01; SWISSPROT HIT: P25439, EVALUE 8.00e-02
gggaggtcacgcacactaacgtgggaggtcacgcacactgccgcgggagttcacgcacactgacgtgggaggtcacgcacactgccgcgggaggtcgcgcccactgccgccgggaggtcgcgcccactgctgccgggaggtcgcgcccactgccgccgggaggccgcgcacactgccgctgttgtgtgggtttgtgttgaaggtaaagggccgggaggccgcgcacactgccgctgttgtccgggtttgtgttgaaggtaaagggccgggaggccgcgcacactgccgctgttgtccgggtttgtgttgaaggtaaagggccgggaggccgcgcacactgccgctgttgtccgggtttgtgttgaaggtaaagggccgggaggccgcgcacactgccgctgttgtccgggtttgtgttgaaggtaaaggccgggaggccgcgcacactgccgctgttgtctgggtttgtgttgaaggtaaggaacatccgtgctcatttt

SEQ ID NO: 1110 - DNA, 515 bp, Homo sapiens
  MAP TO AC015937.3; EXPRESSED IN FETAL LIVER, SIGNAL = 1.8; EXPRESSED IN BONE MARROW, SIGNAL = 1.8; EXPRESSED IN PLACENTA, SIGNAL = 2.9; EXPRESSED IN BRAIN, SIGNAL = 2.3; EXPRESSED IN HEART, SIGNAL = 1.7; EXPRESSED IN ADULT LIVER, SIGNAL = 1.9; EST_HUMAN HIT: BI917304.1, EVALUE 6.00e-29; NT HIT: gi14772401, EVALUE 4.00e-29; SWISSPROT HIT: P08489, EVALUE 2.20e-02
cactggagcaggtatgggtcttattctttctcttctccgttccagcacaggaacccacacagaggagatggccacagcagctgccagaaggaatggctgagtggtagggtggacagcagtggagccagttggttcttatctggagctgtgcaagtgcccacccctaagtcctcgcctggcaccctctgaaccactgaaataagctaacatcctcacccccttcttaccagtttcagagttggtggcggcaaccggcatggtgaaggaggcaagggctctgaaacgtctctcctggagaggggagagaggaggatgagcagatacaagggcaaagcaatggggaagggaataggaagagcctccccttcaggacgagccagaaaggtaggggagaaggtgctgcccagaaagtgggggttggagaacaacaatgattccaacagtcctgggaagcaggaagagcaggtattactcgcctatttctctgaggaggaggagaccagggaggataaggg

SEQ ID NO: 1111 - DNA, 599 bp, Homo sapiens
  MAP TO AL136105.2; EXPRESSED IN BRAIN, SIGNAL = 2.3; EXPRESSED IN LUNG, SIGNAL = 3.5; EXPRESSED IN HEART, SIGNAL = 2.8; EXPRESSED IN PLACENTA, SIGNAL = 4.5; EXPRESSED IN ADULT LIVER, SIGNAL = 4.4; EXPRESSED IN HELA, SIGNAL = 3.4; EXPRESSED IN FETAL LIVER, SIGNAL = 3.1; EXPRESSED IN BONE MARROW, SIGNAL = 2.8; NT HIT: AF193806.1, EVALUE 0.00e+00; SWISSPROT HIT: O00214, EVALUE 9.00e-37; EST_HUMAN HIT: BF842859.1, EVALUE 0.00e+00
cagtagccttccctgagcacttcacttccatcttaccagcagagctttagctgcacaggcaggcctagctgcgagggaggctgggaaaggtaggtttttattctgggcagattcagacccagttcaaactcaggggctattttactgaggaagacagaaaagattagacagtcagctctttaggcctcatagtgaatgaatgaggagggattggtcagtcccttgtcactgggcctggagtgtagtgcctgctggtcctttactggtggctttcctttctgagcactcatggggcccctgtgtcttccctcatatagattccaggtggatctgcagaatggcagcagcatgaaacctcgagccgatgtggcctttcatttcaatcctcgtttcaaaagggccggctgcattgtttgcaatactttgataaatgaaaaatggggacgggaagagatcacctatgacacgcctttcaaaagagaaaagtcttttgagatcgtgattatggtgctgaaggacaaattccaggtaggttttggagagggacaggttgagtcctcattagtgagcaggagtgcacaggggtgcttttcacattt

SEQ ID NO: 1112 - DNA, 535 bp, Homo sapiens
  MAP TO AJ239319.2; EXPRESSED IN PLACENTA, SIGNAL = 2.6; EXPRESSED IN BRAIN, SIGNAL = 2.1; EXPRESSED IN HEART, SIGNAL = 2.2; EXPRESSED IN ADULT LIVER, SIGNAL = 2.7; EXPRESSED IN FETAL LIVER, SIGNAL = 2.1; EXPRESSED IN BONE MARROW, SIGNAL = 2.4; NT HIT: gi14759179, EVALUE 0.00e+00; SWISSPROT HIT: P21675, EVALUE 3.00e-24; EST_HUMAN HIT: AU123960.1, EVALUE 0.00e+00
tttagtgtccaggggaggtgagatgggctgatcctttggtggcactgagaatgggaatggtcaggtagaggatggtgtccgagcttgagagatgacatgtttctcttctcagttatgggagctatgaggagcctgatcccaagtcgaacacccaagacacaagcttcagcagcatcggtgggtatgaggtatcagaggaggaagaagatgaggaggaggaagagcagcgctctgggccgagcgtactaagccaggtccacctgtcagaggacgaggaggacagtgaggatttccactccattgctggggacagtgacttggactctgatgaatgaggcttcctttgggcctccttggtcagccttccctgttctccagcctaggtggttcacctttccccaatttgttcatatttgtacagtatctgatcctgaaatcatgaaattaactaacaccttagcctttttaaaagtagtaagtaaatgataataaatcacctctcctaatcttcctggggcaatgtcaccctttgatt

SEQ ID NO: 1113 - DNA, 531 bp, Homo sapiens
  MAP TO AC020996.4; EXPRESSED IN BONE MARROW, SIGNAL = 1.4; EXPRESSED IN BRAIN, SIGNAL = 0.85; EXPRESSED IN HELA, SIGNAL = 2.2; EXPRESSED IN FETAL LIVER, SIGNAL = 1.6; EXPRESSED IN LUNG, SIGNAL = 0.83; EXPRESSED IN PLACENTA, SIGNAL = 0.83; EXPRESSED IN ADULT LIVER, SIGNAL =   1; EST_HUMAN HIT: AW850263.1, EVALUE 2.90e+00; NT HIT: M62991.1, EVALUE 5.00e-01
ccacaacttccaccctgttcttagtaacactgaggctggagctgagtgctctgggtgttgtggaagaagccattagtctattttttctatgccatagtaaataaattattttgttctgggattaaagagggagtcaaagagttcctgattctccaaatgagactgccccaccactggccttcgtaacatcattagaagattgaaaggggtgtggctgtgcattttctctcatcgctagtatttctgggcctgaagcgggatgttgatgtcttctttgctctcatcctggtttgtctgggacctatggatttcctgggacctgggattttccatgctaaaatcgagaaagtctgaggcaaactagaatgagttgattatcctacttcacttccaagtttgaatcattctcttttctttcttcatataatcctctagctttctcatctcatcttagattagccataactctttcttactgcagtcaactgcagcagtgcttttcaaactatctgtgaaggaccaatctccagc

SEQ ID NO: 1114 - DNA, 598 bp, Homo sapiens
  MAP TO AL136970.1; EXPRESSED IN ADULT LIVER, SIGNAL = 0.69; EXPRESSED IN HELA, SIGNAL = 0.61; EXPRESSED IN FETAL LIVER, SIGNAL = 0.54; EXPRESSED IN BONE MARROW, SIGNAL = 0.58; EXPRESSED IN BRAIN, SIGNAL = 0.5; EST_HUMAN HIT: BG696063.1, EVALUE 4.00e-55; SWISSPROT HIT: P48163, EVALUE 6.00e-14; NT HIT: gi13435400, EVALUE 3.00e-55
ttctgcttttcctttgtggctggtggttgaccataagagagtcaaataccagctacaaagatgactgaagatcagattttatcatcaaccagaaagtacagattgtcgataaatgtaaaaaggtttgcaggtaatttagtcactggtcactgcctcctttaccataatcatgcatttcaacagccacaggttctaaaggttcttgtaaaaaaaaaagtatattcagggacagcaacagaaataatctattctggatagacacatgatattatcatttgtccattaacagttatgaggaaatagataggatatatgcatttttcattcaaattacttctaattattaaaccatattgcataaatcttggattttttaatagtctgttatgttattgttactgactaaaatataggttaaataaagatacatacttggaagaaactgcctccatgaattcgtccaaaaaatcatcatattcagaacctcttactcttctctgccgtagtccaatgtagagtggatctttaagtaactcctattaaaaaaagttaccataaaaatagaaataactataaccaaatcatttattgagcctca

SEQ ID NO: 1115 - DNA, 515 bp, Homo sapiens
  MAP TO CHR21_61.0; EXPRESSED IN HELA, SIGNAL = 3.4; EXPRESSED IN FETAL LIVER, SIGNAL = 1.3; EXPRESSED IN HEART, SIGNAL = 1.2; EXPRESSED IN PLACENTA, SIGNAL = 0.89; EXPRESSED IN LUNG, SIGNAL = 0.95; EXPRESSED IN BONE MARROW, SIGNAL = 1.4; EXPRESSED IN BRAIN, SIGNAL = 1.4; EST_HUMAN HIT: AA457407.1, EVALUE 0.00e+00; SWISSPROT HIT: O15393, EVALUE 2.00e-26; NT HIT: AL163285.2, EVALUE 0.00e+00
ctcgaggaatcggagaacacagtcagaaggaggacaggatagttaccctcatttgtcgataaatccagtccgtgaataccatcacattcccgtacactcctggtctgtaagctttggcacagccagaaccccagcttgtatcccctatcagccaccagatattgttcttcgaagtgaccagaggccctccactgtcaccctgtgggacacagcaaggtacagagagcagaaaatcaagtcacaatctgccgcacaccactgaccaggcctagaggagttggggggcgggggtcgcagtgtgagttacgagtgactgtgtgggcttcgaatctccaccatcaaggggtgatggtaacagagatgtaacccccaaagagatagcccccatcctgaattttaatctgttcaagctaaaagttactaaataaattgccgttcataatttaaaatagtctaaatacttgtttctgttccactggcacttttaccaaataccggtttttcagagggtgtgt

SEQ ID NO: 1116 - DNA, 500 bp, Homo sapiens
  MAP TO AL137016.5; EXPRESSED IN FETAL LIVER, SIGNAL = 0.64; EXPRESSED IN BONE MARROW, SIGNAL = 0.51; EXPRESSED IN BRAIN, SIGNAL = 0.54; EXPRESSED IN LUNG, SIGNAL = 0.54; EXPRESSED IN PLACENTA, SIGNAL = 0.61; EXPRESSED IN ADULT LIVER, SIGNAL = 0.52; EST_HUMAN HIT: BG401264.1, EVALUE 3.00e-43; SWISSPROT HIT: P08547, EVALUE 3.00e-47; NT HIT: AL163213.2, EVALUE 9.00e-52
gaggaggaggaaacactcccaaactcattctaggaggccagtattaccctcataccgataccagacaaagatgtatcaaagaaagaaaactacaggccaatatccctgatgaatattgatgcaaaaatcaacaaaatactaacaaaccaaatttgtcaatacattagaaagatcattcatcatgaccaaatgggatttacccctgggatgcaaagatgggtcaacatacgcaaatcaatcaacatgttgcatcatatcaacaaaatgaaggataaaaaccatatgatcatttcaattgatgctgaaaaagcatttcataaaattcagcatcccttcatgataaaaaccttcaaaaacagggtgtagaagggacatacctcaacataataaaagctatatatgacagaccaatgactagtgtcatcctgaatgacaaaggtgaaatcctttcctctaagatctggaacacaacaaggatgtccgctgtcaccagttattca

SEQ ID NO: 1117 - DNA, 587 bp, Homo sapiens
  MAP TO AL136381.1; EXPRESSED IN PLACENTA, SIGNAL = 0.94; EXPRESSED IN ADULT LIVER, SIGNAL = 1.1; EXPRESSED IN LUNG, SIGNAL = 0.91; EXPRESSED IN BONE MARROW, SIGNAL = 0.69; EXPRESSED IN BRAIN, SIGNAL = 0.64; EST_HUMAN HIT: AU135111.1, EVALUE 1.00e-118; SWISSPROT HIT: Q16513, EVALUE 1.00e-36; NT HIT: AF118089.1, EVALUE 1.00e-120
ttggctcaggaaaagtaacagacagaaaagcactttcagaagtaattttaaataaaaatttttatttggtttaataaatacattattcaaagtatgtgattatttaaatgacaacaattgtcttttccctgtgcaaggctcaagcaagatttaatgaatcaagtcagaagttggaccttttaaagtattcattagagcaaagattaaacgaagtccccaagaatcatcccaaaagcaggattattattgaagaactttcacttgttgctgcatcaccaacactaagtccacgtcaaagtatgatatctacgcaaaatcaatatagtacactatccaaaccagcagcactaacaggtatgtagtgtatagccattgttttttgtgtgtatttttgtctataactggttctgatttaataattgaaagaaaaacctgtgcatagatttttaaaattatgataagatacacatagaataaaatttgttgtattaaccattttaattttattcaatttggaagcatttgctatattcacaatattgtgtgaccatcaccactacctagtttcaaagcattttcatcacccc

SEQ ID NO: 1118 - DNA, 555 bp, Homo sapiens
  MAP TO AL138743.1; EXPRESSED IN BONE MARROW, SIGNAL = 0.56; EXPRESSED IN BRAIN, SIGNAL = 0.51; EXPRESSED IN PLACENTA, SIGNAL = 0.69; EXPRESSED IN FETAL LIVER, SIGNAL = 0.52; EXPRESSED IN LUNG, SIGNAL = 0.62; SWISSPROT HIT: P08547, EVALUE 8.00e-07; NT HIT: AF003529.1, EVALUE 2.00e-16; EST_HUMAN HIT: BF967431.1, EVALUE 1.00e-14
ccagccccagttagaatgactattactaaaaagacaaaaaataacacaagttggtgaggttgcagagaaaagggaacactcatacactgttggtgggaataacacatgttctcattcacatgtggatgctgaaaaatgtgtacacatggacgtagagcatggaatgatagataacagacttggaaaggtgagagagcaggaggtgggagatcatgagaaattacttaatgaatacaatgtgtgttatttgggtgatggaaactctaaaggcttgacttgacggctctgtaatctatccatgtttaaaaaaaaagtgcacaagtacccccgtaaatttatataaataaaaaaagatcatcaacaaaacataaattcctttgagaatgtttagaaatgaagcataaaaccctcttttcattaattaaaaaaagacaactagagttcctagtctgtatatacttattgtatttgagcatcttgccctagatacatgtaacctaacaatatcacagtcttaccacctaaaactacatatcactccttgtccgtctggtt

SEQ ID NO: 1119 - DNA, 527 bp, Homo sapiens
  MAP TO AC016078.3; EXPRESSED IN BONE MARROW, SIGNAL = 3.9; EXPRESSED IN BRAIN, SIGNAL = 3.1; EXPRESSED IN LUNG, SIGNAL = 4.9; EXPRESSED IN HELA, SIGNAL = 1.5; EXPRESSED IN PLACENTA, SIGNAL = 5.2; EXPRESSED IN ADULT LIVER, SIGNAL = 4.4; EXPRESSED IN FETAL LIVER, SIGNAL = 3.5; EST_HUMAN HIT: BE741180.1, EVALUE 9.00e-16; SWISSPROT HIT: P55202, EVALUE 7.40e-01; NT HIT: AL163303.2, EVALUE 6.00e-53
tctgagacaaggcaaatcccttccatgtatgagcctgttaaataaaaacaagttacttacttccaatatacaatggaggtataggcatttggtaaatactccagttacaaaagggaaaaattggccagaacaaaggacctatgggcctcatgcaagtctgaaacccagcagcacagtcattacatcttataattccaaaataatatcctttgactccatccatgtctcacatccagggcacactggtgtgaggagtgagctcccaaggccctggaaagctctgcccttgtggctttgcaggatttagcccccacagctgctctcatgagctggggttgagtgtctgcatcttttccagacacagagtgaaagttgtcagtggatctaccttcacaggacctggaggatggtggccctcttctcacagctgcactagacagtgcccaagtggggactctgtatggagaatccaatcccacatctccctgcccaactgccctagtagaggttctttgtgagggctctgc

SEQ ID NO: 1120 - DNA, 590 bp, Homo sapiens
  MAP TO AL136134.1; EXPRESSED IN FETAL LIVER, SIGNAL = 1.1; EXPRESSED IN LUNG, SIGNAL = 1.5; EXPRESSED IN BONE MARROW, SIGNAL = 1.3; EXPRESSED IN ADULT LIVER, SIGNAL = 1.5; EXPRESSED IN BRAIN, SIGNAL = 1.1; EST_HUMAN HIT: AL521707.1, EVALUE 1.00e-89; NT HIT: AL163303.2, EVALUE 7.00e-59
ggcaaagcaaattgaacctcatagaaagtatttctcattctaggtgcaattaagaacattcgtggtttatgagaagtcaaaatactgacattagcaggagtttgaaagaagttgattccaaccctcataggtacctttgagggtctcaagacttcagtggaggaagtcactgcagatatggtagaaacagcaagagaactagaatcagaagtggaacctgaagatgggactgaattgctgcaatctcatgatcaaacttgaatgaataaggaattgcctcttatggggagcaaagaaagttgtttcttgagatggaatctacttctggtgaagatgctgtgaacattgttgaaatgacaatgaaggatttagaatactatgtcaacttagtttatgaagaagtggcagggcttgagaggatttactccaattttggaagaaattctactattggtaaaacgctatcaaatggcatctcacgttacaaagaaatctttcataaaaggaagagagagtccatcgatgcctcaatttccattgttgtcttactttaagaaattgcctcacagccacccaaacttcagcaacaa

SEQ ID NO: 1121 - DNA, 565 bp, Homo sapiens
  MAP TO AL137071.3; EXPRESSED IN FETAL LIVER, SIGNAL = 0.56; EXPRESSED IN BONE MARROW, SIGNAL = 0.59; EXPRESSED IN BRAIN, SIGNAL = 0.52; EXPRESSED IN PLACENTA, SIGNAL = 0.77; EXPRESSED IN ADULT LIVER, SIGNAL = 0.88; EST_HUMAN HIT: BG217402.1, EVALUE 3.00e-68; SWISSPROT HIT: Q04804, EVALUE 1.80e+00; NT HIT: gi14249409, EVALUE 2.00e-68
ctgccccaactgtaaccttccactacctatcccaaacctataaaaccagttccactcccaccgcccttcgctgactcccttttcagactcagcccgctcgcaccggagtgaataaacagccttgttgctcacacttagcctgtctgggtagtctcttcaattaggcacgcgcttaacactttccaaattttctacattcaaatgatgtgccaaagctggctcgcaccaatctgaggtgtcaattttgtgcgtcttttccaaactttccatgcaatgatgatagactgatagcttgaaatcggtcatagtgaagtatttacaccatggaaattggcaattctacaaacaggctttttccatctaaagagctggttgctatacattaccagcacaccactggcaatgacgatgaccaaattctgatcagaaagaaagacaaacacacacatacaacagtaagttactgtttagagagaagtatttcttgggtctcagaaagcttcataaagagacaaatgcatgtccaggtcttagcccaaggatatgaaagtggcacagtgaccct

SEQ ID NO: 1122 - DNA, 540 bp, Homo sapiens
  MAP TO CHR22_9.0; EXPRESSED IN BONE MARROW, SIGNAL = 0.93; EXPRESSED IN BRAIN, SIGNAL = 0.88; EXPRESSED IN HELA, SIGNAL = 1.2; EXPRESSED IN FETAL LIVER, SIGNAL = 0.89; EXPRESSED IN LUNG, SIGNAL =   1; EXPRESSED IN ADULT LIVER, SIGNAL = 0.98; EST_HUMAN HIT: AW611542.1, EVALUE 6.00e-17; SWISSPROT HIT: P33726, EVALUE 1.20e-01; NT HIT: AF030442.1, EVALUE 5.10e-01
cgaggctggctctagatttggaactaagatgagcacgattctgaccctgaggctcgcaccactggccacctctggcgagtacacatggtgtgccaggcgctgtgctaaggcctgggtgccattccctgacctttgcttctgggaagaggacgcgggggcctggagcagtgcgcaccctgcccacagtgacaaggatatggggtgctcgtggtcttttcccttctgactatcaacacattcttgccgtgctgctgcagactggcatagttctggagaaagtacacaatcagagggctcttcccataaatgttgaagaggtttgaagtcagctcagggcttttgcaggcagcacacgactaaggatgaaagaaaaaggaaaaataaaggatattgtcatttttacagtctgtattaagaaccagaaaggcatcaaagcactcatgtcctttgatccagtaattccagttttaggatgcaccctaagaaaattactcaaaataaagcaaaaaaaggtcaaggggcaaagatgtccactgcaga

SEQ ID NO: 1123 - DNA, 597 bp, Homo sapiens
  MAP TO AL136147.2; EXPRESSED IN BONE MARROW, SIGNAL = 0.57; EXPRESSED IN PLACENTA, SIGNAL = 0.86; EXPRESSED IN BRAIN, SIGNAL = 0.57; EXPRESSED IN ADULT LIVER, SIGNAL = 0.81; EXPRESSED IN LUNG, SIGNAL = 0.79; EXPRESSED IN FETAL LIVER, SIGNAL = 0.6; SWISSPROT HIT: P03522, EVALUE 4.40e+00; NT HIT: gi15100159, EVALUE 5.70e-01
aagccaacgtgaacctcaagatggttaagccaatgaccttgacctctttaaccccaaccaacggagtacttgatcctaaggttaacaatgcgcgagtaacatagtgactgtaggtgtctaagtcagtggccactaatatcaagcaataaacatgtggaaatgataaagaacactgcttattttccttttaggaaaatatttcctaaacttactatgttaaagtgatctggactctgctgaacacctaaattctaaatgtctgaaaaatgaaaatcatcattcaacgttgtgttcttttcatcagcttcctgatgaattcactcacttccaatgacagcagaaggattactcacactgataaaggaaattggcggaagctacccagaagggccacacctccaaaaggtttttttaagtacatgaaacattgatgcacgtgccccgcctggtaagtagcttgtctgttactagggtgacatgttgcatggggtatgagcaaaggtttttgatgctgaactccatctcttccatttgttagcatcgtaactctgggaacatttctcaaactttctgaaatgcagttttccctcctgtgaa

SEQ ID NO: 1124 - DNA, 539 bp, Homo sapiens
  MAP TO AL137068.1; EXPRESSED IN FETAL LIVER, SIGNAL = 0.71; EXPRESSED IN BONE MARROW, SIGNAL = 0.82; EXPRESSED IN PLACENTA, SIGNAL = 0.85; EXPRESSED IN ADULT LIVER, SIGNAL = 1.1; EXPRESSED IN BRAIN, SIGNAL = 0.68; EXPRESSED IN LUNG, SIGNAL = 0.99; EST_HUMAN HIT: BE900541.1, EVALUE 1.00e-122; SWISSPROT HIT: P13648, EVALUE 3.90e-02; NT HIT: gi6754595, EVALUE 5.00e-72
atgctgagcagacaatgcagtactttaaaaagatatattattaccctttttgcatcttgcttaggccagatagcagcaaatgaagccctgaagaaggatttagaaggtgttatcagtgggttgcaagaatacctggggaccattaaaggccaggcaactcaggcccagaatgagtgcaggaagctgcgggatgagaaagagacattgttgcagagattgacagaagtcgagcaggagagagaccagctggaaatagttgccatggatgcagaaaatatgaggaaggtatgatttttttcctgcctattttccgtagcttcataagtagataatgtccaaattaagttagttggaggaggtaacagtacatttttaagtgggaaaaagtattagtggctatatggtgatttttttcttttaacagttgggcttttttttttcttctttagctgtgatacatttggaattattattttttctttgctcagaaaaggaagattatttaagctgcatttctatccctgaaaggtattgttgcc

SEQ ID NO: 1125 - DNA, 531 bp, Homo sapiens
  MAP TO AL139100.1; EXPRESSED IN FETAL LIVER, SIGNAL =   1; EXPRESSED IN LUNG, SIGNAL = 1.2; EXPRESSED IN PLACENTA, SIGNAL = 1.1; EXPRESSED IN BONE MARROW, SIGNAL = 0.91; EXPRESSED IN BRAIN, SIGNAL = 0.86; EST_HUMAN HIT: AI085247.1, EVALUE 0.00e+00; NT HIT: gi14782931, EVALUE 0.00e+00; SWISSPROT HIT: P25435, EVALUE 8.50e+00
tcataggacaggggagcaagtcttccttatgctgtttagaaaactcagtatcacagcagcatgatctcctggtgaagcagaacaggtaatataaaaccgatacaataaggcctcccctctatccttatctgtctggtcgagtcattccgggccgagtgggcaccatcatgggacgggcaggaggtctcatcattgggggcccaggcatcattggcatatggcctcccatgggcggcctcattccaggagctgcaggacaaaacaaagaagagggagaaaaagggagtcagaaaatacgatttagggagagtttgatgggacttcaattaaaaacaaaaaacgtagccccccttgcaaaatgctggaaaaaagacacacgtgacagaagaaatgcaacaaatttatcacatctgtaaattacttagacattctcaaacaaaaaacaaaaaggtcaacacaagaaccatatgggaatcatgatctaatgatagtaagggggaaactattaatagactgctttccagaaatcgc

SEQ ID NO: 1126 - DNA, 591 bp, Homo sapiens
  MAP TO AL136312.1; EXPRESSED IN LUNG, SIGNAL = 1.9; EXPRESSED IN HELA, SIGNAL = 1.3; EXPRESSED IN BRAIN, SIGNAL = 1.9; EXPRESSED IN PLACENTA, SIGNAL = 2.1; EXPRESSED IN ADULT LIVER, SIGNAL = 1.9; EXPRESSED IN FETAL LIVER, SIGNAL = 1.9; EXPRESSED IN BONE MARROW, SIGNAL = 1.7; EST_HUMAN HIT: AV757142.1, EVALUE 5.30e-02; SWISSPROT HIT: P51582, EVALUE 1.50e+00; NT HIT: X06870.1, EVALUE 1.40e-01
acacattgcttggttccaccttttatttccttttaaaagattcttacctggagcccaaaatagtaaatgtaaattgctgcaacagtaggtcctcttccagatagtagctatagttattatattagttcaaagcatattataaggataaataaataatcaaggcaagaagaataaaattcatgctatggagtaaactatggatagtaacaaataatcttcaggtataagctatggtgttagcatgacatcagtgatgaattcttccatcaaaacctagggtaaaccttagctagaagcaaattacctgcctgccctaatttgtatctttgcactctccaattgttgcacctttgcatcttccatatgtgttgtccacatgggtatcctactctggtccattttgtgtcccatcttgtagcagaactgttttagattgtacagaaggtctctcagctgcaattgcttcatggtttagagataggcctctaccacaaatacatagggttttggtctgtacggttttactatttttattttggtacccagttcctatagctgactacagatgatggaggaagagcaggcattgag

SEQ ID NO: 1127 - DNA, 595 bp, Homo sapiens
  MAP TO CHR22_43.0; EXPRESSED IN FETAL LIVER, SIGNAL =  11; EXPRESSED IN BONE MARROW, SIGNAL =  12; EXPRESSED IN BRAIN, SIGNAL =  11; EXPRESSED IN HEART, SIGNAL =  10; EXPRESSED IN HELA, SIGNAL = 6.1; EXPRESSED IN LUNG, SIGNAL =  12; EXPRESSED IN ADULT LIVER, SIGNAL =  12; EST_HUMAN HIT: AI375037.1, EVALUE 2.00e-78; SWISSPROT HIT: O60658, EVALUE 2.60e+00; NT HIT: U82828.1, EVALUE 3.60e-02
ttttcaggaggctgaagtggaagaatctcttgagcctaggagtttgagttcagtctggggagcattgcaagagcccagtctcaaaaatattaggtcaataagatttattttaattaaacaagaaaaagaaatatctgctaaaatttaaagctcttctattcttcctctgtctcttctattcttcctctgtctcttctagtgttcttggggaagatcccgacttagccattttccagtggcacctcttccaccatgagttcctgaggcagtccgatggggctactttattccagaacaatcacagtgagaccttttctctcaataaatgccccttttctctccttaatatattctcttgcttacaaaacactggtgtctccttatcatggtttggttctaccccactgggcccaagaattcttgcccaggagcaactgaattttcttcttgcttgctttttaaaactttggtggggtagagccaattttaaatcttctgatccattttttcattgcttttctcgcccttctgcattttctgcaaattccgttgaatcattgcagttacttaggtttgcttcatctcccccattaca

SEQ ID NO: 1128 - DNA, 589 bp, Homo sapiens
  MAP TO AL137019.1; EXPRESSED IN PLACENTA, SIGNAL = 1.4; EXPRESSED IN BONE MARROW, SIGNAL = 0.77; EXPRESSED IN LUNG, SIGNAL = 1.2; EXPRESSED IN ADULT LIVER, SIGNAL = 1.6; EXPRESSED IN BRAIN, SIGNAL = 0.7; EXPRESSED IN FETAL LIVER, SIGNAL = 1.1; SWISSPROT HIT: O46655, EVALUE 5.00e-01; NT HIT: U52111.2, EVALUE 2.00e-03
aggcatttgcattgcttctcttttcctcagcagtgagtaacaatgattccacaaatatagaaaatcaatattattaagatttagatctctggagatagattatggatagaagaaagtcttttaaaagaagaccttaatttattagaaagcttacaacactaaaacaactcttccctttcagttgctgcacaagtaaagtcatcttgaaactatttttaaaggataatttaacctcaccatcaaaatttagtactcaaaacctctaaacaaatagtagagatgaagttacagcagtatgtttaccagagaaggatttggggtcaacttttgaaatagaagtgggtgtcatcatgataggcaggcatggcattcttccagcactgttcagaggtgtgaccagacggacggtacaccgcatcttagcacacgcttctccttcatccttgctgccctctctcctcctcttccttgatacctggctaacacacccatttgacttggaggacttagcttcactctggatctagtggtagaaaaaatttgaataactttttaagcttacacagctagaaagtggctgggtcaagac

SEQ ID NO: 1129 - DNA, 512 bp, Homo sapiens
  MAP TO AC020698.2; EXPRESSED IN BRAIN, SIGNAL = 0.75; EXPRESSED IN PLACENTA, SIGNAL = 1.2; EXPRESSED IN HELA, SIGNAL = 0.7; EXPRESSED IN ADULT LIVER, SIGNAL = 1.4; EXPRESSED IN FETAL LIVER, SIGNAL =   1; EXPRESSED IN BONE MARROW, SIGNAL = 0.94; EST_HUMAN HIT: AA662998.1, EVALUE 3.00e-03; SWISSPROT HIT: P49018, EVALUE 9.40e-01; NT HIT: L12127.1, EVALUE 3.10e-02
ggctgttactagagcccaaagaggagtattttcacaaatcagaaaggtgctaaagttttagttctgaatatttgtctcagcaataataatgcaatttttcatatccaaaggcatctgttggagcaagtcttgatcattagagtcagattcagccctgcaatacctgtgcacagagaaaatcacatttctacaagtcagtcatttagttcacaaatagttattaagcatctactatgtgccaggcatgattctggtcactacggaccccagggtgaagatgggagaccagactactccttttgtggagcttttgtatggtggagatgataaacaaatcagtagataaacagaaattcaggcagtaatacgtgctaaggaagatgacagcgcaggcatgagggagagattcttcagcagtggaccctatggagaactttcagaggaagcaacacgaaagctgagactggcaagagtcagtcacgcaaaaaacctgtgggaagacactcctggaa

SEQ ID NO: 1130 - DNA, 543 bp, Homo sapiens
  MAP TO AL138840.1; EXPRESSED IN HELA, SIGNAL =   1; EXPRESSED IN BRAIN, SIGNAL = 1.3; EXPRESSED IN FETAL LIVER, SIGNAL = 1.2; EXPRESSED IN HEART, SIGNAL = 1.3; EXPRESSED IN PLACENTA, SIGNAL = 1.5; EXPRESSED IN LUNG, SIGNAL = 1.3; EXPRESSED IN ADULT LIVER, SIGNAL = 1.2; EXPRESSED IN BONE MARROW, SIGNAL = 1.1; EST_HUMAN HIT: N54701.1, EVALUE 4.90e-02; SWISSPROT HIT: P12978, EVALUE 8.80e+00
cactttcttggcttggcttctgggtcatcagtccctcttgcttttctatttcattggtgtccccttttcaggctcttctggattcatctcatcctcacaacctcagagatctcttctcatttctttcttttttttttttttttgaagaataatgtagattttgttgcagatttttacctggaatatgacatagaagacttctacaaatccttcttagatgcctcttatgctcatgtttttcaacagaaagtgaatgtttggctctctcatgctccctcctagtgcctgatcatgtacccttagctccattcatttcttcatcactttcatcaaccaccctcccaagagcatattcctagtccccctaagaaatgctgtttatcttcaactccctttgttacacttactccctacctgggttacataaatacactcaagcctccttcacagacttcccagcgtgctggatccctcactttctcatcattacagatcagcctcagcgttcatttcatatcatgctgaaacctgcatggaacacct

SEQ ID NO: 1131 - DNA, 594 bp, Homo sapiens
  MAP TO AF235094.1; EXPRESSED IN BONE MARROW, SIGNAL = 8.2; EXPRESSED IN BRAIN, SIGNAL = 7.1; EXPRESSED IN HEART, SIGNAL = 6.9; EXPRESSED IN LUNG, SIGNAL = 8.7; EXPRESSED IN PLACENTA, SIGNAL = 9.6; EXPRESSED IN HELA, SIGNAL = 4.5; EXPRESSED IN FETAL LIVER, SIGNAL = 7.5; SWISSPROT HIT: O43653, EVALUE 1.00e-18; NT HIT: gi16162442, EVALUE 0.00e+00; EST_HUMAN HIT: BG765417.1, EVALUE 0.00e+00
tagagcattaggcagggtgggacaggaggaggcctggggcaggtcaggcaggtgagcacacagggcagccccatccccggatcccgctgctccccaggcgcagttggcctcctgaccgtcatcagcaaaggctgcagcttgaactgcgtggatgactcacaggactactacgtgggcaagaagaacatcacgtgctgtgacaccgacttgtgcaacgccagcggggcccatgccctgcagccggctgctgccatccttgcgctgctccctgcactcggcctgctgctctggggacccggccagctctaggctctggggggccccgctgcagcccacactgggtgtggtgccccaggcctctgtgccactcctcacacacccggcccagtgggagcctgtcctggttcctgaggcacatcctaacgcaagtctgaccatgtatgtctgcgcccctgtcccccaccctgaccctcccatggccctctccaggactcccacccggcagatcggctctattgacacagatccgcctgcagatggcccctccaaccctctctgctgctgtttccatggcccaccattctccacccttaa

SEQ ID NO: 1132 - DNA, 575 bp, Homo sapiens
  MAP TO AL138726.2; EXPRESSED IN FETAL LIVER, SIGNAL = 0.8; EXPRESSED IN BONE MARROW, SIGNAL = 0.78; EXPRESSED IN BRAIN, SIGNAL = 0.68; EXPRESSED IN LUNG, SIGNAL = 0.78; EXPRESSED IN PLACENTA, SIGNAL = 0.86; SWISSPROT HIT: Q14916, EVALUE 6.00e-23; NT HIT: AF362498.1, EVALUE 0.00e+00; EST_HUMAN HIT: AU135352.1, EVALUE 3.20e+00
ccagtggaaatagcccagactggaagcgacttaagtatagccttgataggcagagattgtctacttgaactgacctggagagaaattcattaagaattagcacattagaacaaactggaacatgtttagtttggagtagaatctgggagatgccaatatggagaactgtgttctacctgctggaccagggaggatgtgatgtattccttttcactgatgcttatacatgggtggtctttggggtcatcataaaacagaacgaaccagagaagacatacggcacagccacaagcacctatcaaagcagggtaagttagaattggaagtctctgtttgtagtggatctctttcccagaatggcatttttcaatgtatcagtctgagaaactggacctcctctttcttttttgaaacttttcaacaagacttgtgtttttcagtcctccttttatccacagggacccctccctactagaaatgggataaggcctatgccctttcctgatctcctatcctctgctccctccactcctgacagctggacctccctgccctcaggccctcatcttttcaaa

SEQ ID NO: 1133 - DNA, 501 bp, Homo sapiens
  MAP TO AC016078.3; EXPRESSED IN LUNG, SIGNAL = 1.2; EXPRESSED IN HELA, SIGNAL = 0.85; EXPRESSED IN BRAIN, SIGNAL =   1; EXPRESSED IN PLACENTA, SIGNAL = 1.3; EXPRESSED IN FETAL LIVER, SIGNAL = 1.6; EXPRESSED IN BONE MARROW, SIGNAL = 1.3; EST_HUMAN HIT: AI431753.1, EVALUE 1.00e-05; SWISSPROT HIT: P08547, EVALUE 9.00e-11; NT HIT: AJ271735.1, EVALUE 1.20e-01
ggattgaaattttatccagagaccttcctatatttgcttattagttcaaattgagttttttaatcagtgctctgggaatttctatatatacaattatgctattggtgaacaaagacagttttgtttatttcttcccaatctttttaccttttatatttttcttgtcttgttgcactagctaggacttccagtatggcattccataggaatggtgacagatgacatcctggccttgctcctgatgctggcagaagtgaccagtttcccatcatttaagtatgttagttgcagattttttgtaggtgttccttataaagctgagaaaacacacctattcttaatctactcagaattttcattatgaattggtttgaattttgtcaaatgctttttatgcataaatttataaaatcatatgatttttcttttttagcccatggatttgatagattacattcattgagcttcaaaggtttaaaaagcctcacaataaccgaaaaa

SEQ ID NO: 1134 - DNA, 541 bp, Homo sapiens
  MAP TO CHR22_235.0; EXPRESSED IN HEART, SIGNAL = 5.4; EXPRESSED IN LUNG, SIGNAL = 6.6; EXPRESSED IN HELA, SIGNAL = 8.7; EXPRESSED IN BRAIN, SIGNAL = 6.8; EXPRESSED IN FETAL LIVER, SIGNAL = 6.2; EXPRESSED IN BONE MARROW, SIGNAL = 6.8; EST_HUMAN HIT: BG435165.1, EVALUE 7.60e-01; SWISSPROT HIT: P42580, EVALUE 5.80e-01; NT HIT: Y09788.2, EVALUE 3.30e-02
tttttccaacagaaatgggcctcttgggccctgtacaaacccaagcactgtgttcatcaatgccagctcaccggcatgagaaatgcacccgtggcccacagagaagacacaacaacatccacagtggccgctgggaggactctggaggccagcgtggggacggccgagccgtcgttctcctcgtctgcacctcctcttccagcctggatctctgaagcaagcctggtgtgggtctcctcgccctcccccggccccccgcagccctgacaggccccactttgggcccatgactgccttgtagatcttctaccctgaacagctgttggtggatcttccctgctgcctggaattcccggagggcaggggcagtgggggaaagcacatgggcttccaaggctgtcccaggtggctcaggtgagacgcccaggtgtgtagcccctccctgcctgggaagccccacccagcgaggcggagccgcagagccactcacctgtgctcctcctggcactgccctcgtctgccctttgtttctgatgcgtga

SEQ ID NO: 1135 - DNA, 504 bp, Homo sapiens
  MAP TO AL121836.9; EXPRESSED IN FETAL LIVER, SIGNAL = 0.63; EXPRESSED IN ADULT LIVER, SIGNAL = 0.89; EXPRESSED IN BRAIN, SIGNAL = 0.58; EST_HUMAN HIT: BG990113.1, EVALUE 1.80e-01; SWISSPROT HIT: Q80922, EVALUE 3.50e+00; NT HIT: M27634.1, EVALUE 4.80e-01
caaggtaataaatcaaccgtggaaacatgcttgctcagttcacctcagcatatctccctcaagtaatgttgcatacctgaggttaacaacttcttaaaatgttttcaagaactgctaaaataatttacctaggactggagttcgacatgcaactggagatgatgtgtctgtgtaaaacgagctggtctgttttctaccactgtcatctaaaatgttaagtggatcgtggatgtcactgtaggggggcagtgaacgaatgctgctgatgacagaaacgtgctgattcaccattgatccgagcctgtgagactctgggtagtttatgttgcttccatagtatcctgtaacagaaaatgttgagaatttgctgttaacttactacaaagaactttcaggaaggaaaaaagtgacaaagtaatgaggtgacgtcctaaagatatcaaactgtaagtattacatgtgtatctatacatgctacagaactggatttgtgcttgtacatgg

SEQ ID NO: 1136 - DNA, 543 bp, Homo sapiens
  MAP TO CHR22_47.0; EXPRESSED IN FETAL LIVER, SIGNAL = 1.1; EXPRESSED IN BONE MARROW, SIGNAL =   1; EXPRESSED IN LUNG, SIGNAL = 1.1; EXPRESSED IN BRAIN, SIGNAL = 1.1; EXPRESSED IN ADULT LIVER, SIGNAL =   1; EXPRESSED IN HELA, SIGNAL = 1.7; SWISSPROT HIT: Q05193, EVALUE 4.00e-02; NT HIT: AL163201.2, EVALUE 3.30e-02
tcatccaaagaggacttccgctttttaaaatcgtgcatttaaaagttagaatttagttctttgaaatttgtttttaaaagaaaagcggattttaaaaagtgtataggtttgtttctttgatctctcttaagaagaaggatttcacacctttcggagtgtgcacgatgcaaatgaagatccgagagctcgcggaaggccgtttggagctaattctgggctggtttgacagccacgacactgaaggggaagcatcgagctgacaaagcgaggctttctttggtaacatcccaacctctcaaaatagtcactttccaaactaacatttgtcatgttggtgtttgaaagaagttttttgctcattgatccaaccatgcgccgcacccccttaaaactctgcagaggtttccctcctgtgtcccgggtgagtccaggcactgctcctgtggtcaaggcctctggcggggaccccatggtccctactaggcctggctccacccctcccctttgtctgtccgaggcttcggggcagttgtcacattgttg

SEQ ID NO: 1137 - DNA, 507 bp, Homo sapiens
  MAP TO CHR21_12.0; EXPRESSED IN BRAIN, SIGNAL = 0.98; EXPRESSED IN HELA, SIGNAL = 2.9; EXPRESSED IN FETAL LIVER, SIGNAL = 0.95; EXPRESSED IN BONE MARROW, SIGNAL = 1.1; EXPRESSED IN LUNG, SIGNAL = 0.69; EXPRESSED IN PLACENTA, SIGNAL = 0.8; EXPRESSED IN ADULT LIVER, SIGNAL = 0.66; SWISSPROT HIT: Q41142, EVALUE 8.00e+00; NT HIT: AL163248.2, EVALUE 1.00e-13; EST_HUMAN HIT: AA829142.1, EVALUE 3.00e-40
ccaaataatcctggtggtggcttgtgtgagtcaggctccttcagttgcacagtacaagatcaaaactcaaacttgtttaggcacataaagggagtttaggtgtttcatctgtttgggatcctgtaataaaatatcacagactggataccttgtaaatagcaatttatttctcacagttttgaaggctggaaagtccaagatcaaggcaccaacagatttggtgtctggtgagggcttgcttcctggtttgtagatggctgtcttttcactaaccttatatggtagaaaaagactagctagctgtctagggtctctcataaaattactaatcccattcatgagtgtgtaaccctaatgacttaatcatctcccaaaggtcccaccttctaataccatcgccttagtgattaggttttaacatatgaattttgagggtgaggaggacaagcacattcagaccatagcaattgccttaataaagtaggagctccctaagtacccctggct

SEQ ID NO: 1138 - DNA, 532 bp, Homo sapiens
  MAP TO AL121957.3; EXPRESSED IN LUNG, SIGNAL = 0.57; EXPRESSED IN FETAL LIVER, SIGNAL = 0.45; EXPRESSED IN BONE MARROW, SIGNAL = 0.44; EXPRESSED IN BRAIN, SIGNAL = 0.42; EST_HUMAN HIT: BG958104.1, EVALUE 2.90e+00; SWISSPROT HIT: P55259, EVALUE 3.80e+00
gcaaaaggcaaattcacaacagaagtttggttaatgaaatgtacatggaacatataccctaggatataaacacatttagcacagtccactctcattgtactttacaaccacacattgtggcattaataaatctgacgtattacaaaatcttcacaatctaagtattttagggtatatgtcccacctcctagaagccaccaataaataccgtgctgccccactagctgcccaagatgctcttttttcatctcaggtgggagagtccactgcctggtgtcaggacgttgctccatatgcctataggttgggagagcaagattcaaaatctttgtcttccacagtggaaggcaaggttatatatcccaacaagaccacactcagtgaggaattcctccaaaggtaaaagcccaaaggagtgttacagtgttttctcagactactcactgtagccactttatagcaattcattctattaggaaagtgaatggaggtctataaaataattttgaaagggcaggcaaagatcaaattg

SEQ ID NO: 1139 - DNA, 505 bp, Homo sapiens
  MAP TO CHR22_168.0; EXPRESSED IN BONE MARROW, SIGNAL = 9.1; EXPRESSED IN HEART, SIGNAL = 6.2; EXPRESSED IN LUNG, SIGNAL =   8; EXPRESSED IN PLACENTA, SIGNAL = 7.6; EXPRESSED IN ADULT LIVER, SIGNAL = 7.6; EXPRESSED IN HELA, SIGNAL = 5.5; EXPRESSED IN BRAIN, SIGNAL = 7.1; EXPRESSED IN FETAL LIVER, SIGNAL =   8; EST_HUMAN HIT: BG752169.1, EVALUE 0.00e+00; NT HIT: gi7661861, EVALUE 0.00e+00; SWISSPROT HIT: P13055, EVALUE 5.00e-04
ggtttggctcctatcacctggtggtctgattcataccctagcctgaggctccactggaagatctcgcagcctcagtgtatgggaaaccctttccccaggcttgtcccagcactgccgctccccacccctgagccaggaccccagaggatggccatgccccgtgcctggcagaggtctggtgccagcactgggagctgctccgcccttgccttggggccgagggagccctcgtccacccctgcacagcagctgggcacagaggagcgctcttccatcttgaccaggactgcaccaagaagcaccaggtgtcttcagcctccaacctccggggcgaccttctcttccagccacagtcccatgagggcccctagccagggacactggtctgtaaattgtaatcctttctccagcccagctctccacttgttccttgtgtgagctgagcaggcagtgcacctctgagtgtcccttttgtaaggcccaggggttgcactgagtctgcaga

SEQ ID NO: 1140 - DNA, 592 bp, Homo sapiens
  MAP TO CHR22_185_1.0; EXPRESSED IN FETAL LIVER, SIGNAL = 0.55; EXPRESSED IN PLACENTA, SIGNAL = 0.65; EXPRESSED IN LUNG, SIGNAL = 0.52; EXPRESSED IN ADULT LIVER, SIGNAL = 0.49; EXPRESSED IN BONE MARROW, SIGNAL = 0.5; EXPRESSED IN BRAIN, SIGNAL = 0.44; NT HIT: AL163252.2, EVALUE 2.20e+00; SWISSPROT HIT: P27460, EVALUE 5.70e+00
tgccgagactaattgcagtggatgcactgttctgtttccagcaacctccttttcatctgcagaagtccacattccacctttgctttatgaaaacttttggcctccaattcccattttcctttccatctgttgccgttcttctgaaaacaccatcatggacccatccaatcatgtatcctgacagcaatgtaaaggcatcatttccaagcatcttcaggtactctccctgtagcacctgcgttcccctccaggccgtgaccactccgagtgtgatccaggtacaaaaagcatcagcatcacctgggagctgctcaagaagacacaactgcaggcccatcccaagattatgaatcagagcccgcattttaacaagatcccaggaaatccatgttcctcttacagggtgagaaacactgctgtcaacgtctttgtcctcactgccagctgctcacctcagaccacggatgtggaaatccactctcgggctacaccctcctgtccctccaggtctctcatgccttgtcaacctttcctacaagcttaaaaggtacctaaactactgcagattgctacccactcttcccagaacaaa

SEQ ID NO: 1141 - DNA, 511 bp, Homo sapiens
  MAP TO CHR22_155.0; EXPRESSED IN BRAIN, SIGNAL = 1.2; EXPRESSED IN FETAL LIVER, SIGNAL = 1.1; EXPRESSED IN LUNG, SIGNAL = 1.1; EXPRESSED IN ADULT LIVER, SIGNAL = 1.2; EXPRESSED IN BONE MARROW, SIGNAL = 1.1; EST_HUMAN HIT: BI907981.1, EVALUE 4.00e-58; NT HIT: gi14777659, EVALUE 0.00e+00; SWISSPROT HIT: P19440, EVALUE 7.00e-36
actcagtttctccaacccccggcccacctggtcaatgtttctctccactgtcgtgacgttgggcagaagctggttgtgcagccggggctcctccacggcccgcttcacgtcatagccgaaccagaggttgtagatgatggcctggggcatgggagtgtgatcagcatggcttgggggctgtgcagggtgggcacggccagggagaaaaggggtgacacatatcagtgcagtggctgtggtgatctgtgtgcccccagcagctcccaccaccatccggacctggccgtcctggcccaccatgatcgtcgggcacattgacgagagcggctgcttccctgtggccgatgggagaagacagggatgcccgtcagctgcctgcccaggacacccgcccctctccaccccagtcccccatccccagacctccaccccatacctggctggatgaaattggcaggtgaggggggcaccccaaactcgttggtgatgttgggagagctgaagtcatcca

SEQ ID NO: 1142 - DNA, 598 bp, Homo sapiens
  MAP TO CHR22_52.0; EXPRESSED IN LUNG, SIGNAL = 1.2; EXPRESSED IN BONE MARROW, SIGNAL =   1; EXPRESSED IN HELA, SIGNAL = 1.4; EXPRESSED IN BRAIN, SIGNAL = 1.1; EXPRESSED IN FETAL LIVER, SIGNAL = 1.1; SWISSPROT HIT: P50904, EVALUE 5.10e-01; EST_HUMAN HIT: BF951927.1, EVALUE 9.00e-47; NT HIT: U07000.1, EVALUE 0.00e+00
tgcagtgtatattggcctgcctggtgaccctccttgctcctggtcccactgccaaacctctggagtctgccacatccctgcatagacagggccactgacaggcagtggcagccagttcagtggcactcagccaggtctccaggggtgtgcgctttgctctgggggcagggtagcgggggctgaggccactggctgcctccagggcccccccaccagccagcagctggaagctccaccttggtcttcacttgggccgtcttccttctccacttcctcagctgctatgtgggcttctttggcaacttttccttgtctcaccagtcaaggccctgctgatttgttgatgatcagactgtagttcgtgtacctggggaagttttccagcatctccatggagccatggtctctgattcctggagcatgtcgtagtcggttcaggctgctgtaacaaagtatcatctgctgagaggctcacacacaggcctttacctctcacagtggtggaggctggagatccggcagggtgccagcagggtcaggttctgatgagggcagtgagaagcacggccaccctcccactgtaccctcacatggcctt

SEQ ID NO: 1143 - DNA, 571 bp, Homo sapiens
  MAP TO CHR22_171.0; EXPRESSED IN BONE MARROW, SIGNAL = 0.91; EXPRESSED IN BRAIN, SIGNAL = 0.68; EXPRESSED IN HELA, SIGNAL = 0.9; EXPRESSED IN FETAL LIVER, SIGNAL = 0.99; EXPRESSED IN LUNG, SIGNAL = 0.96; EXPRESSED IN ADULT LIVER, SIGNAL = 0.98; NT HIT: gi14779708, EVALUE 0.00e+00; SWISSPROT HIT: P41765, EVALUE 6.00e-03; EST_HUMAN HIT: AI745690.1, EVALUE 0.00e+00
tctggggtccttgaagaatgaggcgcttgatgatgagcaggatctgagtgctgcctggaggaggtttgaggtcatcaatggacaggcagcttgtcccagtacttggaacttggggcagcagagctgcctagctgggcacaacctgggccaccccacaaagggcaggagtgagaggggccaaagatggtgctcccaggccgcctggacctttttgtccagctggtccttgggcatgaggcggggtggcactgagggtgggggtgcccgtaaccggagtccatgtttgccacacagggtcgggtgtgctgacagccggctgttaagccctgcctgccccgcgccaaaggaagtgactgctgccccagccgtggctgtgccccccgaggctactgtggccatcaccacagcactgagcaaggctggccccgccatacccaccccagcagtctcttctgcactggccgtggcggtccccctagggcccatcatggcagtcacagcagccccagccatggtggccaccctggggacagtgacaaaggacgggtgagcaggttgagtgtgggggtag

SEQ ID NO: 1144 - DNA, 550 bp, Homo sapiens
  MAP TO AL137016.5; EXPRESSED IN HEART, SIGNAL = 1.8; EXPRESSED IN LUNG, SIGNAL = 2.1; EXPRESSED IN FETAL LIVER, SIGNAL = 1.9; EXPRESSED IN PLACENTA, SIGNAL = 2.3; EXPRESSED IN BONE MARROW, SIGNAL = 2.1; EXPRESSED IN BRAIN, SIGNAL = 2.1; EXPRESSED IN HELA, SIGNAL =   1; EST_HUMAN HIT: N94463.1, EVALUE 9.00e-10; NT HIT: Y10196.1, EVALUE 2.00e-06; SWISSPROT HIT: P37897, EVALUE 4.00e+00
cccttcatgatatggcttggtttggttgaaagaggattggataatacagccttagaggtagaagacctagctttttctttctttcatatcatagaatgcaagggttatcaaactacagcctgggggcaaaatatggcctgctggctgtttttgtaaataacctttactgaaacacagccaattgtctattgctgcttttgtgctccatgcgcagagttgagtaattgcaacagaggtcatatggcctgaaaaagtctaaaatgtttgccgtctggccctttacaggaaaagtttgcagacccctgatttagtaacctgcctttagagggttattacttccaagtcttcattggcggtagtagtggtggtggtgatggtaatgatgatgatgatgatgatgatgatgatgatagctaacacatactaacacttaagtaccctaagcactttgcatgtatacattcatttaaccctcacaacaaccctatattatagcactgttactatcccaattttgcatataaggaaaaggaagcagagagagggtgag

SEQ ID NO: 1145 - DNA, 597 bp, Homo sapiens
  MAP TO CHR22_161.0; EXPRESSED IN FETAL LIVER, SIGNAL = 0.98; EXPRESSED IN LUNG, SIGNAL =   1; EXPRESSED IN PLACENTA, SIGNAL = 1.3; EXPRESSED IN ADULT LIVER, SIGNAL = 1.1; EXPRESSED IN BONE MARROW, SIGNAL = 1.1; EXPRESSED IN BRAIN, SIGNAL = 0.92; EXPRESSED IN HELA, SIGNAL = 0.69; EST_HUMAN HIT: AI207620.1, EVALUE 4.00e-06; NT HIT: AF020503.1, EVALUE 2.00e-03; SWISSPROT HIT: Q59996, EVALUE 2.60e+00
tatgggaaaacagaggccaggtgggaataatggccacacctttcctccatcacgaggactctgagtgtccctctcgagtgcatcttggcagctaggctgttctgtgcccctctccagaatactgtaattcaccgagcgattgttttctggagagagtgttctcctctggggcacctcctcccattgggttggggatgcgtctgacacgcgtgtaaccaggcggttgtgacccgatgccctttctgccagggctacttggaaatcacgcatcgtgaaccttgaaggtatccggtattcctttgagctaaaagttcactgtaggaagtttacttcaggaagtaattgacattgttagctgatgtgtgtttgagaatactgggcaattagaaataatcaaaatactcacaaattggggaaaggtgacatagaaatgcgtatgatggaagccagtgtcaccttcaaaatggatgttttagagcacggttggcaaatgttttctgtaaaggcctagatagtaaatatttgagcctgtaggccatgtggtctcctgtagccactccactgtgctgcgatagggcaaaagcagccacacacagt

SEQ ID NO: 1146 - DNA, 514 bp, Homo sapiens
  MAP TO AC012482.3; EXPRESSED IN BONE MARROW, SIGNAL = 1.4; EXPRESSED IN BRAIN, SIGNAL = 1.1; EXPRESSED IN HEART, SIGNAL = 1.7; EXPRESSED IN LUNG, SIGNAL = 2.1; EXPRESSED IN FETAL LIVER, SIGNAL = 1.5; EXPRESSED IN PLACENTA, SIGNAL = 1.6; EXPRESSED IN ADULT LIVER, SIGNAL = 1.6; EST_HUMAN HIT: BE971378.1, EVALUE 1.80e-01; NT HIT: AE001996.1, EVALUE 7.60e+00
gccaatagcagccttctgtctgcagcatccaggctgtctttgcaaacaattccagtcaaggtcaacagtcacgaatatgcccttaaatcagtctccatcacctccatgcttccaccttcagtattctttcctcaccttcggccatcttccatccaagcccaggttggggaggacaaaagggaactgacacaaggaagcctgctttgtagctgcacgtggctctaaagcggcagatgcaggggcctcaggacaggaaccagtgcgagctgtccaggcccactggatacctaacctctgtcaggcagcaggcaaggaaggcttttgcagatgcagatgtgagggatgaccacagtggtaccaggaaaaccctgccgcctcttctcacccatgtctggcatccatttatagactccaaagctgagcctgctggaagtaagagttaaggttgccagccaaacatcccctcacaggcttcattcacagtgagacaaacacggtgaaaacattgatgcag

SEQ ID NO: 1147 - DNA, 586 bp, Homo sapiens
  MAP TO CHR22_13.0; EXPRESSED IN HELA, SIGNAL =  15; EXPRESSED IN BRAIN, SIGNAL =  19; EXPRESSED IN HEART, SIGNAL =  15; EXPRESSED IN LUNG, SIGNAL =  19; EXPRESSED IN ADULT LIVER, SIGNAL =  18; EXPRESSED IN FETAL LIVER, SIGNAL =  19; EXPRESSED IN PLACENTA, SIGNAL =  20; EXPRESSED IN BONE MARROW, SIGNAL =  20; NT HIT: gi14777847, EVALUE 1.00e-105; EST_HUMAN HIT: BI764878.1, EVALUE 4.00e-98; SWISSPROT HIT: P19440, EVALUE 5.00e-31
tggtgggaagggtctgtatctcctcatcccattatcagcacagggtcctgaaggcagagggctgctccactgctgctacggcctgcaaggtccttgggctgtgcctgccctgcctgtgtcagggggccgcacccacagacataccacaagacaggctgctgctcgatgacggtccgcttgttttccagggctgccgccaagcccttgcccacggggaagccctggcgggccagctggatgctgggctggaagaggcgagcccagggcagccgcccatgccgctggtgtgccagctcatagcctcggatctccccaggcaccgccaccgacagcccccctggggagagagagccatagttagtgaccctgagtgggggacatcgggatctctcgcaggcagcatcccaggcacagtccctgactcattttacagatggggcaatgaggcttaggaggaaagattttttttttttcttttttgagttggggtcttgccatcttgcccagcccgatctcgaactcctggattcaagcgatcctcccacctcagcctcctgagtcgctgagattacaggcgtgaacagca

SEQ ID NO: 1148 - DNA, 530 bp, Homo sapiens
  MAP TO AL136163.3; EXPRESSED IN FETAL LIVER, SIGNAL = 2.9; EXPRESSED IN BONE MARROW, SIGNAL = 3.1; EXPRESSED IN BRAIN, SIGNAL = 2.9; EXPRESSED IN HEART, SIGNAL = 2.5; EXPRESSED IN HELA, SIGNAL = 1.4; EXPRESSED IN PLACENTA, SIGNAL = 3.3; EXPRESSED IN LUNG, SIGNAL =   3; EXPRESSED IN ADULT LIVER, SIGNAL = 2.7; NT HIT: AJ403246.1, EVALUE 1.30e-01; EST_HUMAN HIT: AW167343.1, EVALUE 4.80e-02
aatcctttgtgccactgtccctatgctcccaagatcacatttcagcattttaggatacgttttttgtttcatttttagaatacttttcagaagaggtcatgataagcaagacaattttacatttctgagttgaaaaaactgtgctgctcttccagaacagttttggtttgtattctcagtttcaggggctcccctgactctacattttaggaacaagaagaggttaacattgagcaggttgttcatgaaccggcagttacctttactacaggaatcactttggattcaggctgagaaggcactatagctcttaaaatcactatgtagggcaagtgaagaagaaagaaaagaaagaagaagaaagtaaggaggaggaggaaggaggaggtgggagaaagaaggaagggggagaagcgggaagggggaggaggaagaagaggaggaagaggagcaggaagaggagcaggaagaaagggaggaggtgaggaagggagacggggaggaaggggaggagaagcatgaccaccatt

SEQ ID NO: 1149 - DNA, 543 bp, Homo sapiens
  MAP TO AF235095.1; EXPRESSED IN FETAL LIVER, SIGNAL = 1.6; EXPRESSED IN LUNG, SIGNAL = 1.5; EXPRESSED IN BONE MARROW, SIGNAL = 1.6; EXPRESSED IN BRAIN, SIGNAL = 1.4; NT HIT: AF020503.1, EVALUE 1.00e-17; EST_HUMAN HIT: R17988.1, EVALUE 3.00e-28; SWISSPROT HIT: Q60519, EVALUE 3.90e+00
aaggagcaccagttccaatgctagcactgtcctggtggaggctctcccacctccggctgcgatgcttcatcactgtttgtgtaggtctcggcacagatgaaggcaagggtcgcaggtccaaggtcagctcgcatggcattgcgggcaggggagaggaggccctagagggaaatattgaaatcatcagatacagaaagtggaaggaaacttagtgtttctttttttttttaaactttcattctaggtatggggtacatgtgcagccttgttatataggtaaactcatgtcatggaggtttgttgtacagattattttgtcacccaggtactaagtctcgtacccaatagtttttttttctgctcctctccctcctcccaccttccaccctcaaggaaatcccggagtctgttgtttccttctttgtgaacatggaaacttagtgtttctttacagaaacccttaggttacctttcggtttctgtaatgaggtaggagaggctaaactgactttttaagtcattaggttcctgtttccagtccac

SEQ ID NO: 1150 - DNA, 565 bp, Homo sapiens
  MAP TO CHR22_207.0; EXPRESSED IN FETAL LIVER, SIGNAL = 1.6; EXPRESSED IN BONE MARROW, SIGNAL = 1.8; EXPRESSED IN HELA, SIGNAL =   4; EXPRESSED IN BRAIN, SIGNAL = 1.7; EXPRESSED IN LUNG, SIGNAL =   1; EXPRESSED IN ADULT LIVER, SIGNAL = 0.85; EXPRESSED IN PLACENTA, SIGNAL = 0.86; SWISSPROT HIT: P13866, EVALUE 3.00e-19; EST_HUMAN HIT: AU100445.1, EVALUE 3.00e-65; NT HIT: L29328.1, EVALUE 0.00e+00
caggacagctcttacctgccgggccgccgccccagccaacagctcagccgggtgctccttcctgggctccacgcccggagctgcttcctgacggtgcagccgcaaggcatcgcaggggccccgcgctactgccctgctccctcaaagtcccaggtcccctcccctggtgctgatcattaaccaggaggccgtataaggagctagcggccctggcgagagggaaggacgcaacgctgccaccatggacagtagcacctggagccccaagaccaccgcggtcacccggcctgttgagacccacgagctcattcgcaatgcagccgatatctccatcatcgttatctacttcgtggtagtgatggccgtcggactgtgggtatgcagcgggttctgggatgcgggtggggagggtgcgcacagaggaggagcaatggcctcgctgagctgcaaggggcagtaggcttaagtgtcggtggaggggagaggaaatgacttggaagcactttagaagcactcagaggcacagcatgaagggaggagggcaagcaaggatgagcagaagtga

SEQ ID NO: 1151 - DNA, 521 bp, Homo sapiens
  MAP TO CHR21_17.0; EXPRESSED IN HELA, SIGNAL = 3.4; EXPRESSED IN FETAL LIVER, SIGNAL = 1.1; EXPRESSED IN LUNG, SIGNAL = 0.81; EXPRESSED IN PLACENTA, SIGNAL = 0.62; EXPRESSED IN ADULT LIVER, SIGNAL = 0.82; EXPRESSED IN BRAIN, SIGNAL = 1.2; EST_HUMAN HIT: AA620377.1, EVALUE 2.00e-13; NT HIT: Z79462.1, EVALUE 1.00e-10
ttggtctcagccaatgacagaagctatgtttcaaccactcacagccagccaactgtccaaataaggcaaacaccaagctgctaccaattcagctgtttctgtacctcacttccattttctgggagtcactttccttttctaactgtaaatcctctccaaccacacggcaatgccagagtctgtctaaacctgttctggtttgggagggctgcctgattcgaatcatgtttttgcccaattaaactctgtgaaatttaatttgcctatgttttttctttcaacaatactaaattgttgatctgagtctgtcagttcttaatttcttgtgggaatgtcactggcttccactaattataagagtgtttatgtagagcatggctgtactacttggtaagcatcaaataaagactgtgccaaatgctttaacaatggcttgggacaaaggtctttgttctattttgaaccttaataatcagttgtagaaacataaacatatcccatggctctcactgtcaacccag

SEQ ID NO: 1152 - DNA, 573 bp, Homo sapiens
  MAP TO CHR21_21.0; EXPRESSED IN PLACENTA, SIGNAL = 0.51; EXPRESSED IN LUNG, SIGNAL = 0.68; EXPRESSED IN FETAL LIVER, SIGNAL =   1; EXPRESSED IN ADULT LIVER, SIGNAL = 0.77; EXPRESSED IN BONE MARROW, SIGNAL = 1.2; EXPRESSED IN BRAIN, SIGNAL = 1.2; EXPRESSED IN HELA, SIGNAL = 3.8; EST_HUMAN HIT: AI632438.1, EVALUE 3.20e+00; SWISSPROT HIT: P32525, EVALUE 5.50e+00; NT HIT: AJ005426.1, EVALUE 2.20e+00
ctgtttttcaggcttcagggatcataggtttacaattttggtatttagctaaattatgtcaatcttttttttagttgttttttgtttgttctgtttttgtttttagcaaatctggccatacttccactgaatacaaggattacttcggagaagttatactttgtaagaaaatagattctgtgtttgaaaatatgattaaaaaattaccccaatagaaatatttgggaacagttattgctagtaaataaaactgcctttaaaattatttttattattgaaaaatttcatcgaaaagaattttgctgttctcaaagttatgatgcaatttaaagtataagtgattattttggcccaaaacctatgagaattttctctccctaatatgtctataccatctgctggctattagtggcaatcaaacccacaatacaaaaaatcaaattttaaaaaaccacacttttttcctgttagttccctgagctctgtcactacaaatattgatgtggcaaggctgaatatttctctgaacatctatttcaaattgaaactaaatgcctgtgccagaatgacttt

SEQ ID NO: 1153 - DNA, 588 bp, Homo sapiens
  MAP TO AL133418.2; EXPRESSED IN BONE MARROW, SIGNAL = 1.1; EXPRESSED IN PLACENTA, SIGNAL = 1.2; EXPRESSED IN LUNG, SIGNAL = 1.3; EXPRESSED IN ADULT LIVER, SIGNAL = 1.2; EXPRESSED IN HELA, SIGNAL =   1; EXPRESSED IN BRAIN, SIGNAL = 1.3; EXPRESSED IN FETAL LIVER, SIGNAL = 1.3; EXPRESSED IN HEART, SIGNAL = 1.3; NT HIT: AF083249.1, EVALUE 1.00e-72; EST_HUMAN HIT: AV709169.1, EVALUE 2.00e-72; SWISSPROT HIT: gi6685501, EVALUE 7.50e+00
attttcggatttggcttgtggaatgcaaatattccaaaatcaaaaaaaaatctgaaatccaaaacatttctggttccaagaatttcagttaagagatattcaacctgtaataagagagcaaacaaaactctggtagaaaaaacagtagttggtaatgtcactgaattacctttatagaacttgactcataaattaaaatcaaatacttgcacaacagaacgattgttatgtttaccttgaagtccattaaggatcgaagtaatttctatggacttaatatgagcagtatcagagtttttggcatcagtgagatccagtttggataccatttcaggagatggatttgtctgaaatggtggtttggacaagcgccgaagtttacagttttttggagagtatttttcatctttgtctttttctttgtctaatttattctaggttaagaaaaaaagtatgtcgtaatttatcataaggcatttatcagaaacaatgttaatgtccacttttaactcactattacagaatatgttgttaaatatttaacataaaaagaaagaacataagaagcccctcaaaacagccagattt

SEQ ID NO: 1154 - DNA, 533 bp, Homo sapiens
  MAP TO AL137855.1; EXPRESSED IN FETAL LIVER, SIGNAL = 8.4; EXPRESSED IN HEART, SIGNAL = 7.1; EXPRESSED IN PLACENTA, SIGNAL = 9.3; EXPRESSED IN BONE MARROW, SIGNAL = 8.5; EXPRESSED IN LUNG, SIGNAL =  11; EXPRESSED IN ADULT LIVER, SIGNAL = 9.6; EXPRESSED IN BRAIN, SIGNAL = 8.2; NT HIT: AF198614.1, EVALUE 0.00e+00; EST_HUMAN HIT: BI712715.1, EVALUE 0.00e+00; SWISSPROT HIT: P35658, EVALUE 5.80e-01
atcgtgatttgtttctgccccaccctaactgatcaatgtactttgtaatctcccccacccttaagaaggttctttgtaattctccccacccttgagaatgtactttgtgagatccacccctgcctgcaaaacattgctcttaacttcaccacctatccccaaacctataagaactaatgataatccatcaccctttgctgactctcttttcggactcagctcgcctgcacccaggtgaaataaacagccatgttgctcacagaaagcctgtttggtggtctctccacacggatgcgcgtgaaaggtaccttgaccgaggtcatccaggggccagccctgggtactttccaggtatcacccatggagaacgtgtttgagcagggcctacaggtgtgtgccgagcttcacctgactctgccgagagcagctcggtccaggagaccctaacccagcggcgctagaggaattaaagacacacacacagaaatatagaggtgtgaagtgggaaatcaggggtctcacagccttcagag

SEQ ID NO: 1155 - DNA, 526 bp, Homo sapiens
  MAP TO AC012186.3; EXPRESSED IN BONE MARROW, SIGNAL = 3.6; EXPRESSED IN BRAIN, SIGNAL =   3; EXPRESSED IN PLACENTA, SIGNAL = 3.4; EXPRESSED IN ADULT LIVER, SIGNAL =   4; EXPRESSED IN LUNG, SIGNAL = 4.4; EXPRESSED IN HEART, SIGNAL = 4.9; EXPRESSED IN HELA, SIGNAL = 2.3; EXPRESSED IN FETAL LIVER, SIGNAL = 3.1; NT HIT: gi14777330, EVALUE 0.00e+00; EST_HUMAN HIT: AL532276.1, EVALUE 0.00e+00; SWISSPROT HIT: P35294, EVALUE 1.00e-57
tgtagaagctggtgctggtgggcgacgcaagcgtgggcaagatgtgcgtggtgcagcgcttcaagaccggcgccttctcggagcgccagggaagcaccatcggcgtcgacttcaccatgaagacgctggagatccagggcaagcgggtcaagctgcagatctgggacacggccggccaggagcggttccgcaccatcacccagagctactaccgcagtgccaatggggccatccttgcctacgacatcaccaagaggagctccttcctgtcggtgcctcactggattgaggatgtgaggaagtatgcgggctccaacattgtgcagctgctgatcgggaacaagtcagacctcagcgagcttcgggaggtctccttggctgaggcacagagcctggctgagcactatgacatcctgtgtgccattgagacgtctgccaaggactcgagcaacgtggaggaggccttcctgagggtggccacggagctcatcatgcggcacgggggccccttgttcagcgagaagag

SEQ ID NO: 1156 - DNA, 588 bp, Homo sapiens
  MAP TO CHR22_162.0; EXPRESSED IN BRAIN, SIGNAL = 1.1; EXPRESSED IN LUNG, SIGNAL = 2.9; EXPRESSED IN PLACENTA, SIGNAL = 2.1; EXPRESSED IN ADULT LIVER, SIGNAL = 4.7; EXPRESSED IN FETAL LIVER, SIGNAL = 4.3; EXPRESSED IN BONE MARROW, SIGNAL = 3.4; NT HIT: AJ238852.1, EVALUE 0.00e+00; EST_HUMAN HIT: BG164374.1, EVALUE 1.00e-102; SWISSPROT HIT: P39023, EVALUE 2.00e-30
tgagcctcatcaacgaacagctgggcctgaaaccacttctcccccaggtttgcacagcaactcaagccaccgcaaagctcacctttgtagcctttgcccttggtcaccccgatgacgtcgatcatctcatcctgcccaaacacttggttcacaggtacctgctgctcaagcctctcgcgggcccagtccagcttctcggccacagtgcctccgttcacctggatctccatcaggtgggccttcttctggcgcagaggaagcaggcgcatctaggagaaggtagacacagctcagctccagctgccagcgctcctcccacagcagaggaactgcagctccatgcggcctgattgatgtcaagcacacggcaaaaagccagtaactctgaacaagtcactgaacctcaccaagaggaaggaactttcatttttgccaacagcaacaacttaactttggatactggtgcctgagttactgtcaggatgagcggacaagacccacaccacaggcaaacaaccagatcccagcccctaccagcccaatgttcctgtggctgtcctttgggtcagttccttttggggtactgca

SEQ ID NO: 1157 - DNA, 573 bp, Homo sapiens
  MAP TO AC024445.2; EXPRESSED IN HEART, SIGNAL = 1.3; EXPRESSED IN BONE MARROW, SIGNAL = 1.8; EXPRESSED IN LUNG, SIGNAL = 2.7; EXPRESSED IN PLACENTA, SIGNAL =   3; EXPRESSED IN ADULT LIVER, SIGNAL = 1.7; EXPRESSED IN BRAIN, SIGNAL = 1.4; EXPRESSED IN FETAL LIVER, SIGNAL = 1.6; SWISSPROT HIT: P25059, EVALUE 4.00e-07; NT HIT: AL163246.2, EVALUE 0.00e+00; EST_HUMAN HIT: AW850837.1, EVALUE 0.00e+00
attggaaggccttatccaccgtcatggtattccacacagcattgcctctgaccaaggcactcactttacggctaaagaagtgcggcagtgggctcatgctcatggaattcactggtcttaccatgttccccatcatcctgaagcagctggattgataaaacagtggaatggccttttgaagtcacaatcacaatgccaactacatgacaatactttgcagggctagggcaaagttctccagaaggctgtgtatgttctgaatcagcatctaatatatggtactgtttctcccatagccaggattcacagggctaggaatcaaggggtagaagtagaagtagtaccacttaccatcacccctagtgatccactagcaaaatttttgattcctattcccacgacaatacgttctgctagtctagaggtcttagttccagaaggaggaatgcttccaccagtagacacaacagcgattccattaaactggaagttaagattgccacctgtacactttgggctcctcctacctttaagtcaacaggctaagaagggagttacagtgttggctggggt

SEQ ID NO: 1158 - DNA, 568 bp, Homo sapiens
  MAP TO CHR22_181.0; EXPRESSED IN BONE MARROW, SIGNAL = 0.4; EXPRESSED IN LUNG, SIGNAL = 0.51; EXPRESSED IN BRAIN, SIGNAL = 0.37; EXPRESSED IN PLACENTA, SIGNAL = 0.58; EST_HUMAN HIT: AI141882.1, EVALUE 8.00e-01; SWISSPROT HIT: O14647, EVALUE 3.20e+00
gtttccctgatcccttttccctcaatagagactcatgtttctaaaggctgaattcctcttctcagatgctcattttcttccacaggggctaccgtggttccaccccagcatgactcagatagagcttcgcgctaacccaaacctaatctccaaaacggggactgcaagggacagtgtcagggaaaagaacccacctgtggcaaatgcattccgcatcaagaagcaaaggcaatgaggtctgtctgtccatattctgaggagcacagaggccctctgcacttctgagacaacaacatgctcaactcacaatgacattcacatgtccagtgtccacaaatagctgtaatggatcatttccaaccctgtaggctcagagaaaacatcccgtaaacgtagcatcacttccacaaccacatcaacagcagctccacacatctcagggacttcataaacgactccccctagacccagagcaagggaagtgcaaacaggatacaagcaaaacaggataagtgtgtccggaatggcctcccagtgattgctcacgtcgctttctgcatcttcacac

SEQ ID NO: 1159 - DNA, 583 bp, Homo sapiens
  MAP TO AC011985.3; EXPRESSED IN LUNG, SIGNAL = 0.81; EXPRESSED IN HELA, SIGNAL = 0.95; EXPRESSED IN BRAIN, SIGNAL = 0.89; EXPRESSED IN PLACENTA, SIGNAL = 0.85; EXPRESSED IN FETAL LIVER, SIGNAL = 0.86; EXPRESSED IN BONE MARROW, SIGNAL = 0.8; NT HIT: M55270.1, EVALUE 5.60e-01; EST_HUMAN HIT: W28136.1, EVALUE 8.20e-01
tgacagcagtcacttggagggaagcactatgctcttcccattttccatacaggccaccggggcgcagataagttaaatgactggcatgaggacagtcagaacaggaacttgaatttcactgtttagagaagaaccagaaatagaacagctcgtttttatttactttttctgaaatgttgctttgaagaaaataggatgtgtgtaaatcaaatccagcatctgaacctgccttctttagcttcagcaggtttttcttgagcaggaggtcactgtgcggcggctgggtgcatgccggagtaggaaaccactccagtttggtgtccgtgctcgactccacccttcggaggaggaggctgcgtgtgaaagggtacaaaagaggaacgcttgcaggaaaatcttttttaggacaaaatcattattctgttccttgctgtcttttagtagcgatccagctttccaaaattgtttctctggctgtaataaggattgttaaatcaggacactcattatgtctctcctcattttggagtcaggtacatctttcttcagctgagcttaacctagaagccagcatggaaaggta

SEQ ID NO: 1160 - DNA, 589 bp, Homo sapiens
  MAP TO CHR22_215.0; EXPRESSED IN HEART, SIGNAL = 1.4; EXPRESSED IN LUNG, SIGNAL = 0.95; EXPRESSED IN BONE MARROW, SIGNAL = 1.7; EXPRESSED IN ADULT LIVER, SIGNAL = 0.8; EXPRESSED IN PLACENTA, SIGNAL = 1.1; EXPRESSED IN HELA, SIGNAL =   4; EXPRESSED IN BRAIN, SIGNAL = 1.8; EXPRESSED IN FETAL LIVER, SIGNAL = 1.6; NT HIT: AF289667.1, EVALUE 1.40e-01; EST_HUMAN HIT: BF872002.1, EVALUE 0.00e+00; SWISSPROT HIT: P06589, EVALUE 1.70e-01
ttgcctgtgtctctcacaccacgccttggaactggcaagttctgggctaccctttgagaccttcttctcttctacacagagaaacccctgacattgacaagcagtatgtcttagtgaccattttcatagtagaattagttgctgccaatttgtgtaatttcagggatactgagcagactcacaacttcccaaccaaggaggaaaacacttcctctaccatcttgtccaaattcaggtcttttcagcattagcaatttatataggtggttctgaaagtgttttgaatcttctagaggttccataaaattgcaaatggccttggtgtgcacacaggtgaagctgtcactactaaggcatcagttaggctggtgacacctgcgagtgagacctggaaggttgggggtgcaggtggtaggtcaggaggcagtaaggtggctggagcgtccatgtggagccagaatgaatagccagatctcccactccagtcagctggggcagtggccagaaccagtagccttcagccaggtgaaagggcatgaggcattggaagggagcagatgccaggcaaagtgaactcctgtctctccgg

SEQ ID NO: 1161 - DNA, 537 bp, Homo sapiens
  MAP TO CHR21_25.0; EXPRESSED IN FETAL LIVER, SIGNAL = 1.2; EXPRESSED IN BONE MARROW, SIGNAL = 1.2; EXPRESSED IN HELA, SIGNAL = 3.5; EXPRESSED IN BRAIN, SIGNAL = 1.3; EXPRESSED IN LUNG, SIGNAL = 0.76; EXPRESSED IN ADULT LIVER, SIGNAL = 0.75; EXPRESSED IN PLACENTA, SIGNAL = 0.74; SWISSPROT HIT: Q9UMQ6, EVALUE 9.90e-01; NT HIT: AL163227.2, EVALUE 0.00e+00; EST_HUMAN HIT: BE391030.1, EVALUE 0.00e+00
cctcccaccatgattttgaggcctccccaggcaagcaaaactgtaaggacaattaaaactctttttgtttccagtttcaggtatgtctttatcagcagcatgaaaatgaactaatacagttaattggtaccaggagtggtgtgatgctgaaaagacacctgaaaatgtgcaagaggctttggaactgggtaacaggcaaaggttctaacagtttggagggctcagaagaagacaggaaaatgtgggaaagtttggaacctcctagagacttgttgaatgcctttgaccaaaatactgatggtgatatgaacaataaggtccaggctaaggtggtctcatatggagatgaggaacttgttaggaactggagcaaagatgactcttgttatgtttttagcaaagagactggcagcattttgatcctgccccagagatttgtggaactttaaatttgagagagatgatttagggtatctggtggaagaaatttctaagcagcaaagcattcaagaggtgacttgcgtgctgttgaaggta

SEQ ID NO: 1162 - DNA, 509 bp, Homo sapiens
  MAP TO CHR22_164.0; EXPRESSED IN BRAIN, SIGNAL = 0.41; EXPRESSED IN FETAL LIVER, SIGNAL = 0.66; EXPRESSED IN LUNG, SIGNAL = 1.2; EXPRESSED IN BONE MARROW, SIGNAL = 0.69; EXPRESSED IN ADULT LIVER, SIGNAL = 0.93; SWISSPROT HIT: Q05319, EVALUE 3.00e-03; NT HIT: gi13642099, EVALUE 0.00e+00; EST_HUMAN HIT: AW404639.1, EVALUE 0.00e+00
actggaaacggagtgaatgcatagctggtgacggcggcgggcactgctgagtcacgtgaaacacaggttcccccacgttccccccacccccgccggcccgcgtggcccccgcgtaactctggctgcagcacctgctcccgggcgactccgggcagcccgagacactcgtgctgcgggtaagacccagcttctgtttgtgcacaagtaacacgacgactgaaatctgcaactactgcaaagacgcgggcacttttacagtgttctgctacggagccaggacaaaggccggtcagaagccggaccagcagtcagctggtgacgacgagcctccctccagcaggcaccacgtcagagaggccccaggcccactgagcccgggaggagacccagccggccagccagacgtgtgcctgaatgccacagacttcaagcagtttacaaacgaaactcactgttaaaagctgttaaatctcattaaaacagtagacgagtgctttagattctctgaa

SEQ ID NO: 1163 - DNA, 557 bp, Homo sapiens
  MAP TO CHR22_182.0; EXPRESSED IN PLACENTA, SIGNAL = 0.63; EXPRESSED IN LUNG, SIGNAL = 0.56; EXPRESSED IN BONE MARROW, SIGNAL = 0.72; EXPRESSED IN BRAIN, SIGNAL = 0.43; EXPRESSED IN FETAL LIVER, SIGNAL = 0.68; NT HIT: gi14777728, EVALUE 0.00e+00; EST_HUMAN HIT: AW575365.1, EVALUE 0.00e+00; SWISSPROT HIT: Q9UKI3, EVALUE 1.00e-60
caggagtgggtcttcgactcccagacccaccacagtcatttttctcagccaggatcttatgaccctcacaatagctgttgttgacatgttgaatattattaacccattttacagaggggaagcaaggctcagagaaagtttaaaagggacccaaggtcaggggcagaaatgggaggcagaggggaggcacccatctcacaccccacccctagggactaaagccgtagccaacagagcagtagtaatccgcgtcgtcttcaggctgcacgggactaatggtgaggacacaggcattgtgggcctcatccttggctgccgagaatcgatcggggatgtcagcaggccggtggtgatcctcctccgagcggtagtagaggagatatcgaggggcactgcctgcccgctgctggtaccaggacacaccgtagtccctgatggtgacgtgctgggggctgagcgtgcaggagagttgagccacttggcctgggaagaccagcagtgcatccagctgggccaggactgtctgggaaactgcgagacacaaacccactcagcct

SEQ ID NO: 1164 - DNA, 600 bp, Homo sapiens
  MAP TO AF235096.1; EXPRESSED IN HELA, SIGNAL = 0.91; EXPRESSED IN FETAL LIVER, SIGNAL = 2.2; EXPRESSED IN LUNG, SIGNAL =   2; EXPRESSED IN ADULT LIVER, SIGNAL = 2.2; EXPRESSED IN BONE MARROW, SIGNAL = 1.9; EXPRESSED IN BRAIN, SIGNAL =   2; NT HIT: gi14748908, EVALUE 9.00e-71; EST_HUMAN HIT: BG393311.1, EVALUE 1.00e-70
ttgagcaaaatgaggcacagagagcttaagtaaccttcctgaggtgatatggctggaagggcaaaaccaagattccaaactaggcagtcttctccagagtgcattctcttaattgcagtgacaagacataatttcttaattccagtataaaattgaaactattttaatgaaacatttaaagttattttcttgaggatagttgcagttaacatttatgtgaagggatttgctgtttataagactgttctcggtcacttatgtaacactttattttaactttatcttaactgttttatgattgtagcatattggaccagctatcccagaagtcagctctgtctggtttaaactgtacatttatcatgtcactggacaaggaccaccatcccttttattgtccaaaggtacaagacttcgaaaactgccagatatatttcaggtatgtgtgggaggtttgggtggtttttttatgtgtgtgtgagcagtatgctaaataatttcttaatattttccttatttttgaatgccattttacctggtaatttcttttcaaatagagttatgatcggattgctaataacatcttggggtcatgatcct

SEQ ID NO: 1165 - DNA, 599 bp, Homo sapiens
  MAP TO AL118512.8; EXPRESSED IN PLACENTA, SIGNAL = 3.7; EXPRESSED IN LUNG, SIGNAL = 3.6; EXPRESSED IN ADULT LIVER, SIGNAL = 3.1; EXPRESSED IN HELA, SIGNAL = 2.8; EXPRESSED IN HEART, SIGNAL =   3; EXPRESSED IN FETAL LIVER, SIGNAL = 3.4; EXPRESSED IN BONE MARROW, SIGNAL = 4.2; EXPRESSED IN BRAIN, SIGNAL = 3.4; SWISSPROT HIT: P13596, EVALUE 1.00e-09; NT HIT: gi15296873, EVALUE 0.00e+00; EST_HUMAN HIT: BG114247.1, EVALUE 2.10e-01
atgatgagactgacctggggaaaaggtatatatgtttaaaatgatgggttataaataaatgactttcagtacttgaggcctatatctcccatccaggatgctagattacgttagccagtgaatggacatattgagcctctttctacttaccatggacacttaagtcatattttttgtcagtcattcctgctacattcacagcaacacacacataacggcctgtgtcagatacatgaatgttcttcagctgaaggatgtgaccttcatccagtatttctactccctttgccttgatcaaggggtggccatctttcatccaggtcactgttggtggtggaataccctgcacctcacactccaaggagatactcttccctcgggtcacaataatttcagtagggtggctgccactgttggttatggttggtctaactgagggttggaggaagataaaaagaaacaaaagaggaaatgtttgcttcaagtcttacataggaattttcatcagccaaacttaaatatatttttatgttaaaatataaataactaaagaaaagacccaggactaacagacatgatgttatgctgagaggcggaat

SEQ ID NO: 1166 - DNA, 514 bp, Homo sapiens
  MAP TO AL137799.2; EXPRESSED IN BONE MARROW, SIGNAL = 6.1; EXPRESSED IN HEART, SIGNAL = 3.2; EXPRESSED IN PLACENTA, SIGNAL =   4; EXPRESSED IN LUNG, SIGNAL = 5.5; EXPRESSED IN BRAIN, SIGNAL = 3.6; SWISSPROT HIT: P10105, EVALUE 7.20e-01; NT HIT: Z22957.1, EVALUE 4.90e-01; EST_HUMAN HIT: BE270262.1, EVALUE 1.20e-02
ttttatgaggcctgaccctggtcataggctaaattcccaacatcagggcaagatgcctttccctgttggaatagatcctatcacactggaattttatcaaatttcccagacggacagcaaccctgagaccaccagtccaacctcaacatccatcccaacatcagtccccatccaaaccaaggtcagaggatgcacctacatcaacatcatcattcagtcaacagacactccttgaaggctcataacatggcaggtgccatctctggtgagcagaacaaacacagctcctgacctcatggaggtacagcccatcagaggagtctgacactgagcaagtacacagatgaggaaacacaatgacagtgtgcaaaaagggccacaaaacaggtgttcagaagaccatgatagagattcatggaatgacctggcatttgatcagggtcggctcctctgtgcagtgacatttgagctgaggaatgaggagccagctctgtgggaaaaggggaacagaaag

SEQ ID NO: 1167 - DNA, 512 bp, Homo sapiens
  MAP TO CHR22_167.0; EXPRESSED IN FETAL LIVER, SIGNAL = 1.4; EXPRESSED IN PLACENTA, SIGNAL = 1.4; EXPRESSED IN LUNG, SIGNAL = 1.4; EXPRESSED IN ADULT LIVER, SIGNAL = 1.5; EXPRESSED IN BONE MARROW, SIGNAL = 1.3; EXPRESSED IN BRAIN, SIGNAL = 1.1; EXPRESSED IN HELA, SIGNAL = 0.82; NT HIT: AB052913.1, EVALUE 4.90e-01; SWISSPROT HIT: P48681, EVALUE 8.30e-02; EST_HUMAN HIT: AA582625.1, EVALUE 0.00e+00
cagctcagggaaatgggtagacagtcgactgcattcttctgacagaagggatggctcccgcccaggggctgcgctactccaccctgaccctcagcctcccgctcccttgactctggcagagtttgatgcccaacagatcacgctctgcaggatccaaaaactctgcggccacgggcactcagctgagccctcagccctcatggctttcccgatgctcaccggtgcagaggagccagctggggagcctctgtgtatcctttttattaacttatttctgaagttctccaagacgcccagagttgaattcctccagagctctgtgcagacagtccaagcagcggatggcagagaggtccttgctagcaagaaacttacaggccaggctgtctcctgctccagcatgccggtgagcatgcaccgtccccgcagggcacaggggtatcctttgaagtgtcaagggacacctgagtccgtgccagacacttagggattggagaaagtgcaacccagac

SEQ ID NO: 1168 - DNA, 522 bp, Homo sapiens
  MAP TO CHR22_183_2.0; EXPRESSED IN BONE MARROW, SIGNAL = 0.83; EXPRESSED IN HELA, SIGNAL = 0.55; EXPRESSED IN BRAIN, SIGNAL = 0.9; EXPRESSED IN PLACENTA, SIGNAL =   1; EXPRESSED IN LUNG, SIGNAL = 0.85; EXPRESSED IN FETAL LIVER, SIGNAL = 0.71; SWISSPROT HIT: P81122, EVALUE 4.00e-03
ggagaagtgctgggagtcagctcagccgggctgggtcctccccaggcccaccctgcatgagaggaccatgcagatgagggtcttgcaggcccacctggtgtcagtctgtaggaccctgactcagggatggagtgggccagcctgaggccttgatggccctccttagagcccaggtccactgacatgaagcagagagacctggtgactgggcagccctgtgctctctgcctgcccctggccatggaggtggccctgagggacatgagcagggtgcaaggctggtggcctgcctgctttgtccagaggaagtgaggacctaccagagccctggtgctcccatctcagcccagtggcaggcagtttcgcgggacggagacatactggatgggccgggccctctgcctggtgtggaggctgcactgtccacacacctctggttgccactctgtagccctcatcaccttggcctgctttatccctatcacccttgtcccagcctaggcttaccagggcattgtggag

SEQ ID NO: 1169 - DNA, 544 bp, Homo sapiens
  MAP TO AL139021.1; EXPRESSED IN BONE MARROW, SIGNAL = 0.64; EXPRESSED IN BRAIN, SIGNAL = 0.47; EXPRESSED IN PLACENTA, SIGNAL = 0.6; EXPRESSED IN LUNG, SIGNAL = 0.83; NT HIT: gi13259496, EVALUE 1.00e-114; EST_HUMAN HIT: BE882846.1, EVALUE 1.00e-113; SWISSPROT HIT: P29374, EVALUE 4.00e-36
ttttaaccatttccccgttggtgagcatttaggtttttttgtttttttgttgtttttatattgttataaactttgtgcatttgtgcacttatttctgtaggataccaagaaatgtaattgttaggtctgttgcattttgatatttaagaattttatttataatctgagtcaatcttttttattatttataggacaaagcagtgatagtgaagatcttcctgtcctagacaattcaagtaaatgtaccccagtaaagcatcttaatgtatctaagccacagaaacttgcacgatctcctgcaagaatatccccgcacatcaaagatggagagaaagataaacacagagaaaaacatccgaattcatcccctaggacatataaatggagctttcagctcagtaagaagcttatagaaaacttgatagatgaatactgtaaagtggaatagatcttaaaatatcaacttggattaatgttaataaaataaggaataatgattaactatttagatattccaaatattgccttagcaagaatcaccaca

SEQ ID NO: 1170 - DNA, 598 bp, Homo sapiens
  MAP TO AC012661.4; EXPRESSED IN BRAIN, SIGNAL = 0.62; EXPRESSED IN LUNG, SIGNAL = 0.63; EXPRESSED IN ADULT LIVER, SIGNAL = 0.52; EXPRESSED IN FETAL LIVER, SIGNAL = 0.59; SWISSPROT HIT: Q06730, EVALUE 1.00e-10; NT HIT: gi15297006, EVALUE 4.00e-11; EST_HUMAN HIT: BG764597.1, EVALUE 2.00e-63
tgaaagtctcaggtttggggtttcttctactatccatggctctgctccttgctctagcttgaagatcatctcaggtttggtaatgtaatgccctggtaatgagaaacaatggaagactttgtcaaaccactaagtcaaatccttttcagaatgacgacagctgggcttcagggactgtgcaatgaaggagccaatttgaacatttcattagagtagtgacacatttttcatcaactggaagcttacaagtaaatattattataccttaaaagggttcctatatttaccagcaacaaaatacaatcctgggagttactggcaagtttcactcacccaatgataccaggctgctgtaggtctccagcatcacgtccctgtacagggtcctctgagcatcatccaggtcctgccactcctcccaggtgaagtgcacagctacctcctcaaaggacaccaactcctgtaatgataccaggctgttgtaggtctccagcatcacgttcctgtacagggtcctctaagcatcatccacgtcctgccactcctcccaggtgaagtgcacagccacatcttcaaaggacaccaacccctgtaatgg

SEQ ID NO: 1171 - DNA, 551 bp, Homo sapiens
  MAP TO CHR22_225.0; EXPRESSED IN LUNG, SIGNAL = 0.97; EXPRESSED IN HELA, SIGNAL = 3.4; EXPRESSED IN ADULT LIVER, SIGNAL = 0.96; EXPRESSED IN BRAIN, SIGNAL = 1.6; EXPRESSED IN PLACENTA, SIGNAL = 0.98; EXPRESSED IN FETAL LIVER, SIGNAL = 1.6; EXPRESSED IN BONE MARROW, SIGNAL = 1.8; EXPRESSED IN HEART, SIGNAL = 1.3; SWISSPROT HIT: P37443, EVALUE 7.90e-01; NT HIT: gi14764230, EVALUE 6.00e-07; EST_HUMAN HIT: BI759005.1, EVALUE 5.00e-08
cctctgagcattcctccaacacattaacaacaaatgatgatgataatggtaggacctgggtactgagagcctactatgtgccaggccttggatacagcacttttcttaactcatactgtttccttctcacccaggtctacaaaggaggtggcttctgccatgatggccattttacagatggggaaactgaggcacagaagaaggggccacttggccaagttcacataggggcatacagcagggtcagggatggtctgaattccagagtctgggctcttgaccactaccctgctgccggatggctgtgggagcttgggccacctaaaacaggccaggggaggagactccagggatctggggttctagcttcattcttctgacaacgtgtatgagagccagctgttgggcccagttttcaggaaaaactgcaggggtgtagggagggggcagcagagaaagggggtcaagaaacttaggaacctcatctggaaggtgggaggagtctgaccttagccatctctatccagaacccacctttcattgcacgaaaa

SEQ ID NO: 1172 - DNA, 583 bp, Homo sapiens
  MAP TO AC011580.4; EXPRESSED IN LUNG, SIGNAL = 0.75; EXPRESSED IN FETAL LIVER, SIGNAL = 0.56; EXPRESSED IN PLACENTA, SIGNAL = 0.57; EXPRESSED IN BONE MARROW, SIGNAL = 0.46; EXPRESSED IN BRAIN, SIGNAL = 0.54; EST_HUMAN HIT: BI914722.1, EVALUE 7.00e-60; NT HIT: gi11436372, EVALUE 5.00e-60
ttttgcatcagaaaggcttgaattcaggtcattgttctctcctattataagttatgtgaccgtggggaaattatttaattcctctgagtcttatatataaaatcatcatcatcatgattacttaattcgtaagattaccatgacaatcaagtgagataacctacagcatgtacacaagaaagttaatgtccctccacattctttaaagtaattaattatatcaccaaaaggtgaatgttaaaatgctggatttctaaggcttagtcagaagacttctagaaattaatcttcaagttttagttggatattaatatgaatattaataagatgatctggtgatttgttatactcctgatgactgttcattctttttataggattgaaagccacaaccactgatgtcaggaagaatgactccatcatttcaaacgtaacagtaacaagtgttacacttccaaatgctgtttcaacattacaaagttccaaacccaagagtaagtatgaggatttgtgctgaagtgttaaactagtgtgttgcataaaactagtttcagaatgttttccagcatacaactgccaagga

SEQ ID NO: 1173 - DNA, 532 bp, Homo sapiens
  MAP TO AL138735.2; EXPRESSED IN PLACENTA, SIGNAL = 0.81; EXPRESSED IN LUNG, SIGNAL = 0.74; EXPRESSED IN HELA, SIGNAL = 0.68; EXPRESSED IN BRAIN, SIGNAL = 0.79; EXPRESSED IN FETAL LIVER, SIGNAL = 0.68; EXPRESSED IN BONE MARROW, SIGNAL = 0.77; SWISSPROT HIT: P11369, EVALUE 3.00e-18; NT HIT: D13624.1, EVALUE 6.00e-16; EST_HUMAN HIT: AI281265.1, EVALUE 4.00e-21
tggcctattctggatgttccagataaaaggaaccgtacactatgtgaccttttgtgtttgacgtctttcacttaacaccctgttttcgaggttcatccatgttgttgcatgtattagtgtttatttcctttttattggtgaataatattccattgtatgaatataacacatttgtttatccactcatcagttgatggacatttgggttctttccaccttttcagctctgtgaataatgtttctaggaacatttgtgtgcaagtttctgttggagtacccattttcggtgatgtggggtatatacctagaagcagaattcctgggtcacatggtaatgcaatgtttaaatgtgttgagaaaccagctgaactgccctccacagtggctacaccattttccatccctactgggaatgcatagggtgccagtgtctccacttccaggtcaacacttgtgattttgtgtttttggttgtggccaacctggtgggtgtgaagggaagcttcattcttcacaagttcccaggatggtt

SEQ ID NO: 1174 - DNA, 557 bp, Homo sapiens
  MAP TO CHR22_184_2.0; EXPRESSED IN PLACENTA, SIGNAL =   1; EXPRESSED IN LUNG, SIGNAL = 0.82; EXPRESSED IN BRAIN, SIGNAL = 0.77; EXPRESSED IN ADULT LIVER, SIGNAL = 0.89; EXPRESSED IN FETAL LIVER, SIGNAL = 0.75; EXPRESSED IN BONE MARROW, SIGNAL = 0.89; EST_HUMAN HIT: BG679831.1, EVALUE 3.10e+00; NT HIT: AY055592.1, EVALUE 1.30e-01
cttctgccacctccagtctctaggttgaggctatctgtgatattttgtcatatgacatgtactggtgggataaggtggatcttaggaaacctctgactcttagaaaggtaagactcactggagatcatatcatccgtctccttcacaccacaaatggagaagcagaaggcaagaaatgggcaataatgtacccaaagctacccagtgacttctgccacttaccagcagattacaccaaaaaccaggtcttttatggaaggtgagtcttgccattctttcattttactttccaaagcaagcagaggcaaccagagaaccaatggccaatactgaggtactctaagcagtctcctttttcctcttcctccacccagcagaaattatctgtttccttgaaattccttctgacgacaaatagcaggcacctctatgtcaccaaagtattttaaagctagtgggtccaagttgactttccatccaatagagagtaccaccattgcatgttaaatgcattcaacaaaaccatctcttatggaccctaagtgtggccttgtggt

SEQ ID NO: 1175 - DNA, 571 bp, Homo sapiens
  MAP TO AL138691.2; EXPRESSED IN BONE MARROW, SIGNAL = 0.65; EXPRESSED IN LUNG, SIGNAL = 0.56; EXPRESSED IN BRAIN, SIGNAL = 0.56; SWISSPROT HIT: P47013, EVALUE 7.10e+00; EST_HUMAN HIT: BF085317.1, EVALUE 8.00e-01
cagaattagagatggcagaatgctagcatgtgcgctcacgtgctgaagaacttctaaaccgtgtccatcagcttgtcgcctattttggtcacagatgctccccatgccaggatttctacgaactttctaaagaagatgcttagtctaatagttttgaccatcagcaaaactgctctaagagttaccctagattctacctttctatttcattaactctcctagaaacaattctgttccagtacattctttctttctttctgggttcagagttctcttctctctaggaaaaccatcaggttacacagtgtttgtagttccgaacgtcacgggcggttatgagggacagttgatgtgtcccaccagcagcaagactgtgaattgtacatgacggtgacagaaatgaccagtccagtccatgtgcaaaggcaggagtttacaaagtaaaggggtcagtactaattgatcactggcaccctgaaaccacaacttttcattcacctttttatttttttgaataattattttatcttatatgttcatcaaatatatatgtatctggggaaaatgctcc

SEQ ID NO: 1176 - DNA, 569 bp, Homo sapiens
  MAP TO AL133338.2; EXPRESSED IN BONE MARROW, SIGNAL = 2.5; EXPRESSED IN ADULT LIVER, SIGNAL = 5.6; EXPRESSED IN PLACENTA, SIGNAL = 3.2; EXPRESSED IN LUNG, SIGNAL = 5.8; EXPRESSED IN BRAIN, SIGNAL = 2.5; EXPRESSED IN FETAL LIVER, SIGNAL = 2.9; EXPRESSED IN HEART, SIGNAL = 2.9; SWISSPROT HIT: Q99372, EVALUE 1.50e-01; NT HIT: gi15300842, EVALUE 0.00e+00; EST_HUMAN HIT: BG196117.1, EVALUE 0.00e+00
tacaaaacctggccaacctcctcaaagctgaccaggctccaacccttggaataatccgagtactccaccttcggtgccatctggactcccaccaagtgcaacaccctccactgtgccttttggaccagtaccaacaggaatgtatctctccgtgcctcccaccggaccacctccaggacccccagcaccctttactccttctgaaccatcatgccccccacctggtggtccttatccagcctcaactgtgccaggccctggcccatagggccatatcctataccaaatatgccctttccagagctacccagaccatatggtgctacccacagatccagctgcagctggtcctttaggtccatggggatccatgtcttctggaccttgggtgccaggaatgggagggcagtatcctacccctaatatgccctatccatctccagggccatatcctgttcctcctcctccccaagcctctggggcagcaccacctgttccatggggcaccgttccactaggagcctggggaccaccagcaccatatcctgcccctacaggatcgtatccca

SEQ ID NO: 1177 - DNA, 515 bp, Homo sapiens
  MAP TO AL137222.3; EXPRESSED IN HELA, SIGNAL = 2.6; EXPRESSED IN BRAIN, SIGNAL =   3; EXPRESSED IN BONE MARROW, SIGNAL = 3.3; EXPRESSED IN PLACENTA, SIGNAL = 3.6; EXPRESSED IN LUNG, SIGNAL = 3.4; EXPRESSED IN ADULT LIVER, SIGNAL =   4; SWISSPROT HIT: Q92785, EVALUE 9.00e-48; NT HIT: AF001433.1, EVALUE 0.00e+00; EST_HUMAN HIT: AL559898.1, EVALUE 0.00e+00
cctttcttggcctcacagactggagtagcccagaacaattattacagctggatgaagaagtaaccaggttctaggattggcctctggacaactactcgtaccctgcccagcactggcggaaaaagcggtgagcccacccctgtgaagatccacaatttttcttcccacctattaagccagacacagaccccaccctgaagaaggaggggctgatctctcaggacagcagcagtttagaggttctgttgcacactgaccccctggggaagcgaggtaccccagatccccgagttgatgatgacagcctgggcaagtttcctgtgacaaacagtcaagcacgaaagcggatcctagaaccagatgacttcctggatgacctcgatgatgagtactgtgaagatgctcccaagcatcggggaaaggggtaatccaagggtaaaggtgtggcagtgcccataaggagctggatgcttccaacctggaggaccaggataagccctatgcctgtgacattt

SEQ ID NO: 1178 - DNA, 563 bp, Homo sapiens
  MAP TO AL136361.2; EXPRESSED IN HEART, SIGNAL = 2.9; EXPRESSED IN PLACENTA, SIGNAL = 3.2; EXPRESSED IN LUNG, SIGNAL = 3.1; EXPRESSED IN BONE MARROW, SIGNAL = 3.4; EXPRESSED IN ADULT LIVER, SIGNAL = 3.3; EXPRESSED IN BRAIN, SIGNAL = 3.1; EXPRESSED IN HELA, SIGNAL = 2.2; SWISSPROT HIT: O64765, EVALUE 1.40e+00; NT HIT: AF289050.1, EVALUE 1.40e-01; EST_HUMAN HIT: BE003342.1, EVALUE 3.10e+00
ttgaggactcaggacttgggaacatcagtctcatctcaacagaacccttttttcagttccctgctgtttcctgcacaaactgggggaatgtgcttggcctccctggagctcggattgtctagcagcttggattgcttagtccccctttccacaccttcctgccaccctgagggggaggcctgatggttcatgggcttccgcagaaggaatttgcccactctgcttcctaaaatgtgcagctgcattttgctgctgggaaaatattgattgaaggtctggaggagtctgacaacttgtaaggcacatacagtttttatctgcaggatgaagttagtttttgtttgggcctggtgttttcgaaagaaggaaatcactttcataagcatcagattagatccaggaagcgtccgcaggacaatgagaagctgatagaggcagtgtctcaggattttgccattggttactaccgccacctcctggctgaaattgtgaactacacagcatgggcttcctgggcaaactggtttaagaaaaggtagccccgttttccccattttctgcaa

SEQ ID NO: 1179 - DNA, 553 bp, Homo sapiens
  MAP TO AC018691.5; EXPRESSED IN BRAIN, SIGNAL = 1.8; EXPRESSED IN LUNG, SIGNAL = 1.8; EXPRESSED IN BONE MARROW, SIGNAL =   1; EXPRESSED IN ADULT LIVER, SIGNAL =   4; SWISSPROT HIT: P00829, EVALUE 5.00e-59; NT HIT: gi4502294, EVALUE 0.00e+00; EST_HUMAN HIT: BG249598.1, EVALUE 0.00e+00
ttgtggatttcctcactccctagccaagagtggcaaaattgggctttttagtggtgttggagttgacaagattgtacccatcatggagttaatcaataatgttgccaaagcccatggtgcttaatctgggtttgctggtgtttttgagaggacctgtaagggcaatgacttatattatgaaatgactgagtctggtgttgtcaacttaaaaaatgttacctccaaggtaatgctgatgtaaggtcagatgaatgaaccacatgctactcatgcccaggtagctctgactggactgactgtggctgaatacttcagagaccaagaagttcaagatgtactcctgtttattgataatatctttcacttcacccatgctggctcaagggtgtctgccttattgggcagaatcccttctgctgtgggctatcagcctaccctggccactgacatggtgggtatgatgtggggaaagaattgccactaccaagaggagatctatcacctctgtacaggctatgtacctgctgatgactcgactgcctctgctacttcc

SEQ ID NO: 1180 - DNA, 537 bp, Homo sapiens
  MAP TO AL133543.2; EXPRESSED IN BRAIN, SIGNAL = 0.83; EXPRESSED IN HELA, SIGNAL = 0.55; EXPRESSED IN FETAL LIVER, SIGNAL = 0.81; EXPRESSED IN BONE MARROW, SIGNAL = 0.69; EXPRESSED IN PLACENTA, SIGNAL = 0.8; EXPRESSED IN LUNG, SIGNAL = 0.75; EXPRESSED IN ADULT LIVER, SIGNAL = 0.69; NT HIT: gi14589963, EVALUE 1.30e-01; EST_HUMAN HIT: BF696174.1, EVALUE 7.50e-01; SWISSPROT HIT: P44985, EVALUE 2.20e+00
tctcaatgctcatgccactctgggtcctaaatcctgtagcactctggagccagtgccctgggggtgcaaaggctgcgggattctggtacagctataaatgcctgaacatccccaggaggagagttttaagttgaatctttgtgtgcagataacatgactatatggagctttctcttaagataacataattcataatgccacaaaataggaaacggacatattttatccaaaaaagtaaattaaaagggctatctatgcaagacataatgtcttccccccatccgccttttttttctgcagaagagaggctggaagatcaacaattttctagccaagccagcttcagacatttgtcagctgaggtcattctttatattcccatatttgatataagacttcaacatggcaaagtaagtgccaccagaattataaaactttggcatagaaagtgacattggagagcattatcttggcatcttggggtggcccagagggcctcggggttagcttcctaattccaagggtgaatcttgcaac

SEQ ID NO: 1181 - DNA, 510 bp, Homo sapiens
  MAP TO AL138967.2; EXPRESSED IN BONE MARROW, SIGNAL = 2.3; EXPRESSED IN HELA, SIGNAL = 1.1; EXPRESSED IN BRAIN, SIGNAL = 2.5; EXPRESSED IN FETAL LIVER, SIGNAL = 2.9; EXPRESSED IN PLACENTA, SIGNAL = 3.2; EXPRESSED IN LUNG, SIGNAL = 2.8; EXPRESSED IN ADULT LIVER, SIGNAL = 2.7; SWISSPROT HIT: Q36426, EVALUE 2.80e+00; NT HIT: gi14731317, EVALUE 1.20e-01; EST_HUMAN HIT: AV654352.1, EVALUE 7.00e-04
caacccacacaaacaaaacctctgaaatttccagtcattgttaagagtgtgaaagggccctgagaccaacatgtttgataactgctactctagtccagtggttctcaaagagtggccccagaccaccaccaccaccgccatcgccatcatcatcatcatgcctgggaacttgttagaaacatcagtcctcaggccccactctaaatctactgaattagaaactctggggatgaggcccagcaggttctgttttaacaagctttccaggtaatgctgatcctcactaaactttcagaactccaagtcctactcccaaccccttacagatcagtgtccatagttccttagtgtctgattggtgatggtgggaaagctcactttccaagccaaatgttacaaactagcatttgctttggactcaaaaatagatatcctgctcaccccacccgttcctccacttgcaccctagtcacttaggtgagcaccacaagggaatgtgccagaacatct

SEQ ID NO: 1182 - DNA, 561 bp, Homo sapiens
  MAP TO AL050339.4; EXPRESSED IN FETAL LIVER, SIGNAL = 3.2; EXPRESSED IN LUNG, SIGNAL = 3.4; EXPRESSED IN HELA, SIGNAL = 2.9; EXPRESSED IN PLACENTA, SIGNAL = 3.7; EXPRESSED IN HEART, SIGNAL = 3.3; EXPRESSED IN ADULT LIVER, SIGNAL = 3.8; EXPRESSED IN BONE MARROW, SIGNAL = 3.6; EXPRESSED IN BRAIN, SIGNAL = 3.5; SWISSPROT HIT: P10272, EVALUE 1.00e-13; NT HIT: D11078.1, EVALUE 1.40e-01; EST_HUMAN HIT: T87947.1, EVALUE 3.00e-43
atcctccataaccatgctgccttctgggctgaaagaggcttccttaccacacaaggctcttccattatcaatgcctccctaacaaaggccctccttaaggttgctttcctgccagccaaggctggagtcattcattataaagggcaccagaaacctactgatcttattgcaaaaggaaatgcctatgccaacaggacggcaaaagaaatagctgatgcctccacatccactaatattccagccctcactccagaggtccagtatttctccttctcctccaacactcccacctacttttctgaaaacctgctctaccagtcttttccaactcaaggcaagtggttcttataaatcatggaaaattcattcttcctgcctcacaagctcagtccattctttcttcccttcatgaccacttccatgtgggatacaagcctgtggcttgattcctgcagctcctcatctccttctcttcatggaagtccatccttaagaccataacctctcaatcctctgtctgccatgccaccagcccccaaggctttctcaggcctcctcctt

SEQ ID NO: 1183 - DNA, 538 bp, Homo sapiens
  MAP TO CHR22_209.0; EXPRESSED IN FETAL LIVER, SIGNAL = 2.1; EXPRESSED IN PLACENTA, SIGNAL = 1.3; EXPRESSED IN ADULT LIVER, SIGNAL = 1.3; EXPRESSED IN HELA, SIGNAL = 4.6; EXPRESSED IN LUNG, SIGNAL = 1.2; EXPRESSED IN HEART, SIGNAL = 1.7; EXPRESSED IN BONE MARROW, SIGNAL = 2.1; EXPRESSED IN BRAIN, SIGNAL =   2; SWISSPROT HIT: P50617, EVALUE 1.30e+00; NT HIT: D10697.1, EVALUE 2.00e-03
agccgattgacatcatctccttatttgggaggcaggaagttgttccccacccccaccctcttgtccttccagggccccatcctgcgcccccaccccaccccactgtccagtttccggcttcctgagggtctttgagacctcgccgtttgctggcctggatgacaactatttttccctggtttgagagcgagagagtgtgtgagtgtggactgtgtgcaccagagggccagagaggcagtggtgagggtcactcagaacaagccagtcccaagaagttaaaattagctctgggaactggaatgtcggggtcttcaaggagcagcagctgtgaaaagaaagtacaaggcgaggaaagaaaatacaccccatcccacacccgccacaaacctcgctcgcccacttcatctgccctggggtctctgcagcttctcactcctcccgggatatctctggccaagtccttgaggccgatcagtgggaatttccccctgtatgctgtcattttcctctctggtaaccacagaacaaggtggctgag

SEQ ID NO: 1184 - DNA, 511 bp, Homo sapiens
  MAP TO CHR22_213.0; EXPRESSED IN FETAL LIVER, SIGNAL = 1.5; EXPRESSED IN BONE MARROW, SIGNAL = 1.6; EXPRESSED IN BRAIN, SIGNAL = 1.5; EXPRESSED IN HELA, SIGNAL = 2.9; EXPRESSED IN PLACENTA, SIGNAL = 0.79; EXPRESSED IN ADULT LIVER, SIGNAL = 0.83; NT HIT: AF242865.1, EVALUE 8.00e-06; SWISSPROT HIT: P32225, EVALUE 5.50e-01; EST_HUMAN HIT: BF734866.1, EVALUE 7.10e-01
gtcccgagcattgttttaggcactggaaacacaccagttgataaaataaaccaaaaatagaattatttgttgacagacaagaaatacaggaaataagtaatataccgagaatgttagaaggtgatccatgctacaaaattttttttaaagcaggataagacagatgaaagggccacggaggaggcgcaggttgcagctgtaaatagggtggttggactagatcccattgagaaggtggcgtctgagcaaaggcctggaggacatggaatgagccagccaggcagagaggatgaactagccagtgtaaatgctctcagaaagggtatgttcggggcacagaggaggccagtgtggctaagtggagggggccaggggacagtggctggggatgagctaagggaactgatggggcagactgtgtagagacagtccctcagctttggcactattgacctttgggctggataattctttgtcgtaagggcctgtctcgtacattgcaggacattgg

SEQ ID NO: 1185 - DNA, 594 bp, Homo sapiens
  MAP TO AC018678.5; EXPRESSED IN FETAL LIVER, SIGNAL = 0.48; EXPRESSED IN LUNG, SIGNAL = 0.49; EXPRESSED IN BRAIN, SIGNAL = 0.5; EXPRESSED IN ADULT LIVER, SIGNAL = 0.41; EST_HUMAN HIT: BF087324.1, EVALUE 1.40e-02; NT HIT: gi4506414, EVALUE 2.20e+00; SWISSPROT HIT: P33200, EVALUE 9.90e+00
caaatggaatcctgtttggggagatgaatacagtaaagcagtctgcagtgacctctgaattaatcaaaatggaggggtcatgtagataataaaacagaggtccacatgtagatcagaaacagaaaacatgcaccaaaagaataaggcaaacaaaatgaaagtggtacttttctcactttttttcttcctgggagcaagatgctgatcagtccccagaactctgtgtccatccttgcctcttttccaaatgtcatggcacctatttccaataaacatcatctggtcatttacaggcatatccccaaccccaaatacagaaatattcctccaggaacgactcaagaaaccgtcaggaactttatagatcagctcctcccctgtgttgaaggcaaaaatagctatggcctcttaatgaaacacttggatggtgaagtcaggggaccggagcttggataggggaaggagggaatctgtcatacatctcttctcttataaccagttcaaacttggaacctcttgtggccacatctgtgcctgatactttaacatgtggaattgaggggagccctgtcttcctctccagacatgcatctg

SEQ ID NO: 1186 - DNA, 528 bp, Homo sapiens
  MAP TO CHR21_4.0; EXPRESSED IN PLACENTA, SIGNAL = 1.2; EXPRESSED IN ADULT LIVER, SIGNAL = 1.5; EXPRESSED IN BRAIN, SIGNAL = 1.8; EXPRESSED IN LUNG, SIGNAL = 1.3; EXPRESSED IN HEART, SIGNAL = 1.3; EXPRESSED IN HELA, SIGNAL = 4.2; EXPRESSED IN FETAL LIVER, SIGNAL = 1.9; EXPRESSED IN BONE MARROW, SIGNAL = 2.1; SWISSPROT HIT: P13816, EVALUE 3.70e+00; NT HIT: AL163204.2, EVALUE 0.00e+00; EST_HUMAN HIT: AA927847.1, EVALUE 0.00e+00
atgtgctgaggttagggagcttctcccccgcagataatccctgatctcccaaaatttggttgacatctaaggttgattgccatacaactccttttctgaagttttacttatttccaacaaggcaagttttcctgcttccatgatgatggagagcaggcacctcctttcttgagtttcagcttgcttctgacagggaaggtgagtgtaagttttttccagcttctaagatggcagagaacaatcaccagcctgagacttatttccaggtaagtagctgaattagagttttgtcttaaaatttttccttaatgactaaaatttaagattactcaccagctgcttttaatttctccttaccattagaacactcagtaatcatatgaattgtgcatttgtttgttttgcttaactctttttgtttgtttatgtttggggttttgttgatgttgtttcacttttctcccatctcttcctgacttggtcagatccaaagaatgctccaaattgtggggaacaaggcttctgaat

SEQ ID NO: 1187 - DNA, 505 bp, Homo sapiens
  MAP TO CHR22_136.0; EXPRESSED IN BONE MARROW, SIGNAL = 0.8; EXPRESSED IN BRAIN, SIGNAL = 0.72; EXPRESSED IN HELA, SIGNAL = 1.6; EXPRESSED IN LUNG, SIGNAL = 0.72; EXPRESSED IN ADULT LIVER, SIGNAL = 0.73; SWISSPROT HIT: P46060, EVALUE 9.20e-01; EST_HUMAN HIT: AW850523.1, EVALUE 0.00e+00
cagagtgagagaagctggggaaacagatttcttgcacttcaggccagatcctggaagccttacattgcatacatattctctcctgtgagggctggtgctccaggaagggaggaagcaatggtagagcaactcttctagaacagtggcttttgctcaggaaggcaagcgatgggaaatcttgccatcttttcaggatgcagctgggaaaactctctagctgctcagtttaattagagcccccaccaagtctcataggagggggctctcgcttggctgccttgctagggtactgcagagaatgtagcaaggctgaaggcactgcgatgactttagtgccctgggcctgtggatgggagcttctgcatatgtttcaacaggctgcagccacagccctgagagatgaacacttggctcagggtcaagacataaatggagacaatcaagagggaagaggatggtgggtgagggcggtttctcctgagggccaggcgggaaactgtattgt

SEQ ID NO: 1188 - DNA, 585 bp, Homo sapiens
  MAP TO CHR22_72.0; EXPRESSED IN BONE MARROW, SIGNAL =   1; EXPRESSED IN HELA, SIGNAL = 2.4; EXPRESSED IN BRAIN, SIGNAL = 0.85; EXPRESSED IN PLACENTA, SIGNAL = 0.97; EXPRESSED IN LUNG, SIGNAL = 0.95; EXPRESSED IN ADULT LIVER, SIGNAL =   1; SWISSPROT HIT: Q13615, EVALUE 2.00e-41; NT HIT: U58034.1, EVALUE 0.00e+00; EST_HUMAN HIT: BG955814.1, EVALUE 0.00e+00
actcaggttgttgggtcctggaattggtggtgtgaggaggaggaggctactgcatggcttactgggttccccgtcctgacagagtaaattgaagtgttctcagggatgttaggataaggtggctcagctgagctgacttatcagagtgtgcatgcctgattgcttaatttgtgcttcattggacttccataggtgaaactggtgcagcatacctattcctgcctgtttggaacattcctgtgcaacaacgccaaggagagaggggaaaagcatactcaggaacggacatgttccgtgtggtcacttcttcgggcaggcaacaaggctttcaaaaacctactgtattcctctcagtcagaagccgtatgtatccttcagcctttccactgtggtcagcagaaggaatttggggttggttacatatgagagcctttttgagtagtgactgtttttgtgaagacatctctactgtctctggatggactggttccatttttcccccatgattctgtcctgaggaaggcctgcttctgatggtgctctgatctgtttctgatgactacttgctgagggtggtttggttta

SEQ ID NO: 1189 - DNA, 575 bp, Homo sapiens
  MAP TO AC012661.4; EXPRESSED IN BRAIN, SIGNAL = 0.34; SWISSPROT HIT: P18175, EVALUE 2.00e-07; NT HIT: AL163202.2, EVALUE 2.00e-80; EST_HUMAN HIT: BI064298.1, EVALUE 8.00e-69
ctggaatcctatgtgagggcaaatattcagaacacagcaggagtgttctgaaatcctatgtgagggacaaacattcacaccacagcaggagtgttatggaatcctatgtgagggataaacattcagaccacaacaggcgtgttctggtgtcctatgtgagggacaaatactcagaacccagcagcagtgttctggaatcctatgtgagggacatacattcagaccccagcagcagtgttctggaatcctatgtgagggacaaacattcagaccccagcagcagtgttcttgagtactacatggggtacaaacattcagaccacagcaggagagttctggaatcctatgtgagggacaagcattcagatgctcctagcagtgctctggaatcctatgtgagggacaaacattcagaccccagcagcagtgttcttgagtactacatggggtacaaacattcagaccacagcaggagagttctggaatcctatgtgagggacaagcattcagacactcctagcagtgctctggaatcctttgtgagaaataaacattcagacaccagcagcagtgtt

SEQ ID NO: 1190 - DNA, 587 bp, Homo sapiens
  MAP TO CHR21_4.0; EXPRESSED IN BONE MARROW, SIGNAL = 1.2; EXPRESSED IN BRAIN, SIGNAL = 1.1; EXPRESSED IN HELA, SIGNAL = 3.4; EXPRESSED IN FETAL LIVER, SIGNAL = 1.2; EXPRESSED IN LUNG, SIGNAL = 1.1; SWISSPROT HIT: O95013, EVALUE 3.00e-46; NT HIT: AL163203.2, EVALUE 0.00e+00; EST_HUMAN HIT: BG193339.1, EVALUE 5.30e-02
gagcagtcaatgtggagcaggccttcaccatgcttacagaggagctattcctaactgtaacaagtattacagtgtaggagacaaccaagaggagaaaggaactcagagaaagaaagccactatctgcaactattagtaggctgacaacataagtgtctatgcaggctaacttggtcactagaggaaggtcacagaaaaaaactatctaccttattaggaccacaaaatggcagattaacagtgaatgccaactggctggtggtatggatgaagcccacaaaccaggaaatgaggaagagcacaacacatacacagcagctcatgattgtcatgtagtggggaggtttgcatatagcaacataacggtcataggccatggaaactaggagcaccatttcactgccagtgaagagatgaacaaagaaaatctgggccaggcgggcatcaaaagaaatagtcttgtgctcaaccagaaagtctgcaatcattttaggggtagcagaagaggcaacacatacgtctataaatgacaggttggcaagcagaaagtacatgggggtgtgaaggcgggaatctgaggtcacagt

SEQ ID NO: 1191 - DNA, 530 bp, Homo sapiens
  MAP TO CHR22_215.0; EXPRESSED IN BONE MARROW, SIGNAL = 1.6; EXPRESSED IN LUNG, SIGNAL = 0.79; EXPRESSED IN HELA, SIGNAL = 3.2; EXPRESSED IN PLACENTA, SIGNAL = 0.73; EXPRESSED IN ADULT LIVER, SIGNAL = 0.8; EXPRESSED IN BRAIN, SIGNAL = 1.4; NT HIT: M81105.1, EVALUE 0.00e+00; EST_HUMAN HIT: BG257998.1, EVALUE 0.00e+00; SWISSPROT HIT: P35579, EVALUE 8.00e-60
gttcaaggatgtcaccccagcactccttcaagcccccttctcaaccagagagccagggcccaggcacgtgagggtgatgggaagacccgccccccccccccacctcggagccctcagacccagcctgcggggtgccacggcagccacttacgtagatgagccctgagtagtaacgctccttgaggttgtgcagcaccgaggcttcgttgaggcacgtgagctctgccatgtcctccaccttggagaacttgggcgggttcatcttctggatgtcatccttgttcaccttcaccttcttcccattctccaccagctccacgatggcctcttcgcccacctcctccttgaggctggctggctcaaagccactcttgtcggaaggcacccataccagcttcttggcagcccagtcggcctgggccagcggattgttgatgaagtttttatccacatagagatacttatcggcagcttgctgtgccatggtgacttatagccaggacctaagcggggaggagaaggacaacaca

SEQ ID NO: 1192 - DNA, 579 bp, Homo sapiens
  MAP TO AC015822.3; EXPRESSED IN BRAIN, SIGNAL = 0.47; EXPRESSED IN FETAL LIVER, SIGNAL = 0.46; EXPRESSED IN PLACENTA, SIGNAL = 0.55; EXPRESSED IN ADULT LIVER, SIGNAL = 0.54; NT HIT: gi13095578, EVALUE 8.60e+00
ttttggctttgtccttccacactgctgttttacacctctacagagctggtgctgtgcatacagataggcactcagcctgcagaaacagtttgtatactttatttcacatatcaggatacgcattgcacccagagacatggctcccaagttcctgtcacaggaaatgtcatacaatatattgatcataaacatcctgaaaattggatctggtctctttaatatcatatttgctgttgcaatggaaatgtttcctaataaaagtatccagacctgccaaaccagtgtagtgatctccagtgtaatgtactgctttccaagtactctacaattttatgatactaatgccatgtcaccaaacttggccaccaagcttgctgcagaaagttgaattcttagcaaaaatgcttttataatgactcccattctcttgctcagactaactctcaaatcatgaaaatgtccaaattcattattaattttttttattattcctcattgagttctctggtatagaactaaccatttgaaaactactcatctttttagtctactttattttgattgagggccttttgttga

SEQ ID NO: 1193 - DNA, 590 bp, Homo sapiens
  MAP TO CHR22_218.0; EXPRESSED IN BONE MARROW, SIGNAL = 1.5; EXPRESSED IN LUNG, SIGNAL = 0.9; EXPRESSED IN PLACENTA, SIGNAL = 0.69; EXPRESSED IN ADULT LIVER, SIGNAL = 0.72; EXPRESSED IN HELA, SIGNAL = 3.5; EXPRESSED IN BRAIN, SIGNAL = 1.6; EXPRESSED IN FETAL LIVER, SIGNAL = 1.4; SWISSPROT HIT: Q92841, EVALUE 2.00e-37; NT HIT: gi14778912, EVALUE 5.00e-94; EST_HUMAN HIT: AV650587.1, EVALUE 7.00e-94
aaactgcagcaccaagacacaaaattgtgcaaaattatacagcttgtaatcagcagagctaaatttcaaactcaagaattcagaatccttgcatttaaccataatgctctgacaaatgatatgatgatggattatcagaaacctagcaatgcttttaatgttctcaggcctcaaaatatactggtttctacagtactaattttggagggttattagaaaaggtttatcagcattatcaaatcagagtaaaatatctttcatacttgtggtctttttcactttccatgcagacatccactatctggaggatgttgtggttggcactcaactccagattgcctacgttgatctgggtgtaatcacgaaggaaatcctctgcaagctgtcttacttcttttggccaggttgcactccacatcagtgtctgcctatcaggctatcaaaaaaggaaaggctttctttcaggctaaggaacttggacaaatggcataaagactgcttattattagctttacacaccctgatttggtcaacaattttacggatctggggttcaaaccccatatcaagcattctgtcagcttcgtcca

SEQ ID NO: 1194 - DNA, 565 bp, Homo sapiens
  MAP TO CHR22_236.0; EXPRESSED IN BRAIN, SIGNAL = 2.1; EXPRESSED IN HELA, SIGNAL = 4.2; EXPRESSED IN FETAL LIVER, SIGNAL =   2; EXPRESSED IN HEART, SIGNAL = 1.7; EXPRESSED IN LUNG, SIGNAL = 1.1; EXPRESSED IN ADULT LIVER, SIGNAL = 1.2; EXPRESSED IN BONE MARROW, SIGNAL = 2.3; EXPRESSED IN PLACENTA, SIGNAL = 1.1; EST_HUMAN HIT: W89135.1, EVALUE 9.00e-13; SWISSPROT HIT: P10354, EVALUE 1.40e+00; NT HIT: V00855.1, EVALUE 3.00e-15
atgaggtcattgagttgggccctaatctaatgactggtatccctttctaaattacacaatctgctaaccttctctgtatcattccaattttagtgtatgtgctgctgaagcaagcacctggtattcttataagaagagaaattgggacacagacacacagagcaaagacagctatgtgacaatggagacagagcagagtaatgtggccacaagccaaggaatgcaaagtattgacggccaccagaagccgaaagaggcaggaaagacccctctttatgggtttcagagggaacacagtcctgctgatgcctggacttcgggcttccgacctccagagctgtgggagagtgagttgctgccattctcagccccccaggctgtggcgctttgtcatagcagccataggacatgaatccactttctcagctaaggcaactccgggcttcctaggtgagaggcactcctgcactgctcatgtctgacccgctggcaaagcctgtcggctcccctttcaaaataagtccagagccagccctgtgtcaccgcctcctctgttccctcaaca

SEQ ID NO: 1195 - DNA, 518 bp, Homo sapiens
  MAP TO CHR22_50.0; EXPRESSED IN HELA, SIGNAL = 2.4; EXPRESSED IN HEART, SIGNAL = 2.5; EXPRESSED IN LUNG, SIGNAL = 2.8; EXPRESSED IN FETAL LIVER, SIGNAL = 2.6; EXPRESSED IN PLACENTA, SIGNAL =   3; EXPRESSED IN ADULT LIVER, SIGNAL = 3.1; EXPRESSED IN BONE MARROW, SIGNAL = 2.9; EXPRESSED IN BRAIN, SIGNAL = 2.6; EST_HUMAN HIT: AL549157.1, EVALUE 7.30e-01
atacccacacccttccttccctacagagctccactgttgccgagctactgtgcttctcatcgcatgctttcatcatagacagcagcagcatcgaagccaagaagataattattttatggtttgggattttaatatatttttggcagcaaagcaacttgactctcttaattgtgctttgcttcatcttgaattaaaataattacattgaattctgtgacaaacaatagaatgctagtagtcattcttccaaccaacattttttaagtgtcttctatgtgctgtctggtattgctgtgtgcacttgtaatgcagaagaatgagataaggcagagttgcccaagaggtatgcagtgtagtgcagtggtagaaaaaatactaggggctatgtttgaagaaggtgaaaggttcaattttctcattcaaacatttggatacttttataaggacctaaagacataattacaggacactgtaataagtgtagtaaccaaggttggtgcaggcagagaaagagagga

SEQ ID NO: 1196 - DNA, 538 bp, Homo sapiens
  MAP TO AL136444.1; EXPRESSED IN FETAL LIVER, SIGNAL = 2.8; EXPRESSED IN BONE MARROW, SIGNAL = 3.1; EXPRESSED IN BRAIN, SIGNAL =   4; EXPRESSED IN PLACENTA, SIGNAL = 3.8; EXPRESSED IN LUNG, SIGNAL =   4; EXPRESSED IN ADULT LIVER, SIGNAL = 3.9; EXPRESSED IN HELA, SIGNAL = 2.1; SWISSPROT HIT: Q62730, EVALUE 5.00e+00; EST_HUMAN HIT: AW834504.1, EVALUE 7.50e-01; NT HIT: AF348479.1, EVALUE 8.00e+00
aaaggaggttctcccattgcagataaactaagatgctgaaagaatacctgaaactaagaacagccaatataagctgcaggtagtggagcaaactccactgatgttccataatgaggcagacttccacagtggtagcaggcatgttagtttactcttttatatcttccaggctagacataagcaacagtgtcctcatgcatacttagggcagagatactaggctatacctgggaaactagcacttctctacaggattagaaggaaagataagtaatcgaaatcagatgaccagccactaatgtattatgtctactgcaagccatctcatcctctgtttttattgaaaactgcatagtgtgtaaactcaggagctaattctaacctttatccccagccaggctgcacaagcagaagcagtgaacagtctaccagggaatattaacttcaaggatcatctcaaagccaataatcatcacactgttgaagagtgactgcaccaggaaagagacagggcagcagtgggaacacagcaaacaga

SEQ ID NO: 1197 - DNA, 587 bp, Homo sapiens
  MAP TO CHR22_76.0; EXPRESSED IN BONE MARROW, SIGNAL = 1.2; EXPRESSED IN PLACENTA, SIGNAL =   1; EXPRESSED IN LUNG, SIGNAL = 1.1; EXPRESSED IN BRAIN, SIGNAL =   1; EXPRESSED IN ADULT LIVER, SIGNAL =   1; EXPRESSED IN HELA, SIGNAL = 4.9; EXPRESSED IN FETAL LIVER, SIGNAL = 1.2; NT HIT: AJ006345.1, EVALUE 8.70e+00; SWISSPROT HIT: P57095, EVALUE 8.80e-01
atgccagaggagacaccaagtggcaccatcggcctccctctgcttggccagctccggcagcctctccaccaggtgacggccgatgccagagaccagggctgcagcggcacatccgaggagtgggcacagaagagcagcagcagcccctgcccagtgactcctggaacaagcttcccctgcggggtgttggcggggggtggtgagagaatccccatggcaactcacagaaacatcatctgggtgagacttggaggagaaggtgaagggagagaggtatcgagagattctagcagagaaaatgcccgaagccagggtcctgccttccctgggctcccatcatcccctgtgctgggacgaggggcagctgctctgctgctcctctctccacctgatcctccccagtccctggccagatccatggagtccaggctgcaggggcccaggcctcctccgccatgaaactgcctcttcccaccacccagagccccaggttctgcacaggatgtgggcagttgtgtgggggctcctctctgcaccccagctccattcccttccccatctgggctcctctgctccttgcaacctct

SEQ ID NO: 1198 - DNA, 589 bp, Homo sapiens
  MAP TO AL159176.2; EXPRESSED IN BONE MARROW, SIGNAL = 0.54; EXPRESSED IN LUNG, SIGNAL = 0.68; EXPRESSED IN BRAIN, SIGNAL = 0.54; EXPRESSED IN FETAL LIVER, SIGNAL = 0.5; NT HIT: gi9631294, EVALUE 8.80e+00; EST_HUMAN HIT: BI754200.1, EVALUE 1.00e-05
tacccagagggagtggaaaggctttgaaaggtaaagtctatgtattttctgagtttcaaattgataaagcttcttctttgaacaggaagagtttctatttagtccaataatctgaggctatattgaattaccagttcattcgctataaaatttttagaaccacatgtcaaaaagtggcccatctaaagaattgtataatttagcaaaaagtcattaaaagccatttaattaatgctctttttctttaaaataggattcaagtatttggaaaaatgtatttatggtgattggttatgaagtatttctagatgttttgatggttctggtgaacagcatcgtattctgttcactaatgttttataaaaaggcagaaattttctggctttctggggaaccacgtaactcaaatgagtttgcagctcgttttctattccaattattgcactaaagaggttcttatactaagattatcattcttttttaagctatcaagtatgatctatacatgtcagtaaaatataaatattaatactggtacaatgttaaattgggattattcctaattaatgcacaaaatgctgaaatggtt

SEQ ID NO: 1199 - DNA, 576 bp, Homo sapiens
  MAP TO CHR21_60.0; EXPRESSED IN BONE MARROW, SIGNAL = 1.3; EXPRESSED IN BRAIN, SIGNAL = 1.5; EXPRESSED IN LUNG, SIGNAL = 0.64; EXPRESSED IN HELA, SIGNAL = 4.4; SWISSPROT HIT: P33147, EVALUE 2.50e+00; EST_HUMAN HIT: BE257886.1, EVALUE 1.30e-02; NT HIT: AL163278.2, EVALUE 0.00e+00
acccacgaacctgcattaagtcaggttggttcgctggcaccctgaagccagccatagcatagtatttgattcaaaatccaaacacacagcagccaaagaggaaagcaaagggcaaattaagccaccactgaaggtgccgggacaggccagaggaagattccatcccacacccagctcaacttcttcccacctttcttctttgtctgtctgcatctgacatttcagttctcataatcttctctccaaacaaattctgccacgttctcccgggacaccctcttgctttctctctccctcttgatgcaacagtagttctcaaaccttcccatggaaaatcccaccagtttcttccttcctgggaccctctctcctttcctttccctataccaaaagatcaagaccaagctgggattacagaaagcgggaaccctgagagtggagtaggaaacagagactgaggttattggtgcacaaaatatgtggtccctggaacactattaatattgtattgatggcctacagtgtgttggccaccatattaaattgctgaatttaacaggggtctaaattgggctt

SEQ ID NO: 1200 - DNA, 534 bp, Homo sapiens
  MAP TO AC013697.3; EXPRESSED IN BRAIN, SIGNAL = 0.46; EXPRESSED IN FETAL LIVER, SIGNAL = 0.45; EXPRESSED IN PLACENTA, SIGNAL = 0.53; EXPRESSED IN BONE MARROW, SIGNAL = 0.46; EXPRESSED IN ADULT LIVER, SIGNAL = 0.47; SWISSPROT HIT: P08547, EVALUE 1.00e-24; EST_HUMAN HIT: BF670627.1, EVALUE 1.00e-42; NT HIT: AJ271735.1, EVALUE 8.00e-37
accatctttgcatcctggaggtaaattccacttggtcataataaaagatctttttaatgccttgctgaattccatttgctcgtactttgttgatgatttttgcatcaatatcaaatcagagatattggcctgtaatttttttaatgtatctttgattttgatatcaaggtaatactggcctcatagaatgagcttggaagtattgcctcctcctctatttctttgaatagtttgagtaggattggtattagttctttaaatgtttattagaattcagcaatgaagccatcaggtcttgggcttttctttactgggagaatttttattatggtttcgatctcattacttgttattggtctgttcagattttggattgcttcatggtcaatcttggtaggtctgttcagattttggattgcttcatggtcaatcttgctaggttgcatgtgtctgggaatttgttcattttctctagcttttccaattttttagcatatagtggtcatagtagctcctaatgatcctttgaatttc

SEQ ID NO: 1201 - DNA, 503 bp, Homo sapiens
  MAP TO CHR22_30.0; EXPRESSED IN FETAL LIVER, SIGNAL = 1.7; EXPRESSED IN LUNG, SIGNAL = 1.6; EXPRESSED IN BONE MARROW, SIGNAL = 1.6; EXPRESSED IN PLACENTA, SIGNAL = 1.7; EXPRESSED IN ADULT LIVER, SIGNAL = 1.6; EXPRESSED IN BRAIN, SIGNAL = 1.7; NT HIT: M23442.1, EVALUE 3.10e-02
gctcagaggcagtgaaatccttgtcatgctgctaataagttgtagagctgagattcaaactgggttttcttccctccaaatgcacaggcctcaggcactgtttagcatctgctctcaatgtggatcgaggagcatgatccaccgtgaaagtcttttacagggcagtgaacagtaaagtcaaacaaagctcgctcgctctctctctttttttttttttttttttttgacattgcagggtttggcacagctctgggttgtgaaataatggtatccaaccttctgagagttatcgcctctatagaatcctccctgctacatttatctgatatttacattgcactgccagcccagacagcccaattcatacccccaatagcacccaagaacaatgcaggtaagttcctgctctgtaagctggtccatagtggctctgggcctaggcaatttatctgatatttacattacaccgccagcccagacagcccaattcacacccccaatag

SEQ ID NO: 1202 - DNA, 523 bp, Homo sapiens
  MAP TO CHR22_223.0; EXPRESSED IN BONE MARROW, SIGNAL = 1.4; EXPRESSED IN HELA, SIGNAL = 2.3; EXPRESSED IN BRAIN, SIGNAL = 1.3; EXPRESSED IN FETAL LIVER, SIGNAL = 1.2; EXPRESSED IN LUNG, SIGNAL = 0.75; EXPRESSED IN ADULT LIVER, SIGNAL = 0.75; SWISSPROT HIT: P29349, EVALUE 4.30e-01; EST_HUMAN HIT: AI307126.1, EVALUE 1.00e-05; NT HIT: M13792.1, EVALUE 3.20e-02
tggaatttcgggagaaagtggaggtggctgcttcgtatctgacctccatctctgctggctgtgtgggagggattatcgtcccattttacagatgaagaaactgaactctggagagattgcctgacccatccgatgttgtgtgacttggcgctgagtccacttgcctctcctttctctccagtttgctcggcaggccctggctataactcattggctgttcagcccagcaaagcgtgcagccactgtgccttgctggagcccctgggagatatactgaacaatgacaacaggtatgaggaggcgttttgcaaccaccaagtgctgtgtgggtgttgactgctgcacagattctgcctgataactgaagcccaggccttggggtcacagtgacctggggttggatgctgatccagcccggggctaagcctgtgactctcttgagcctggaaggatgacacgggcccctgctgcatgcactgttggaagcattacctgagatgatgcaaagcacccagcacatatg

SEQ ID NO: 1203 - DNA, 592 bp, Homo sapiens
  MAP TO CHR22_33.0; EXPRESSED IN LUNG, SIGNAL = 1.6; EXPRESSED IN PLACENTA, SIGNAL = 1.8; EXPRESSED IN ADULT LIVER, SIGNAL = 1.8; EXPRESSED IN BONE MARROW, SIGNAL = 1.5; EXPRESSED IN HELA, SIGNAL = 1.6; EXPRESSED IN BRAIN, SIGNAL = 1.6; NT HIT: AF106656.1, EVALUE 1.40e-01; SWISSPROT HIT: P26660, EVALUE 1.90e+00
ggatctgggaggaagaaaggttcagagacaaccacagttttatagaatctatgactattttcctgctcacgtctggggccttgggagttgctttctcggggtggaggaagagcacagagcgccacctcttctgttttgagactgggtctggctgctgccaagttctcaggtttattgatggtgcagtaggtgattcctgtgcggccacagctgcctcctggaagggctggtagagggttgttggctgtgggccgcattttgttttctcttagaattaatctctatagtgagttagttttgtgttccaaaaccagtcactagagccactgtaacagcttgtgcatcagccagatgtgcctgcctcagccgtcatgcttttaaatagctgagagaaaaggccacctttacagcagctcactagcttttaagagggtgtcacctagctgggttttgtcgtgagagaatgtgctgtgttcttggaagttaattccttcaaagatacggtgtacctttaaaatgcttaatcattcacacacgtgcacagtgaggaagagaattaaatggaacaagcagttatgggatgcgctctgtt

SEQ ID NO: 1204 - DNA, 567 bp, Homo sapiens
  MAP TO AC018432.4; EXPRESSED IN PLACENTA, SIGNAL = 0.52; EXPRESSED IN ADULT LIVER, SIGNAL = 0.43; EXPRESSED IN BONE MARROW, SIGNAL = 0.41; EXPRESSED IN BRAIN, SIGNAL = 0.44; NT HIT: AL161531.2, EVALUE 8.40e+00; SWISSPROT HIT: P40389, EVALUE 8.00e-03; EST_HUMAN HIT: BG210224.1, EVALUE 0.00e+00
tgtgaaaggcattttgttggatttagtcccattttagtatccccttaaaaagtttgactgatgactctggatattcagccaacagtgttgtgtcaaaaacttgcttgaatttatctaaaaattcatagtcggtgctgaacctgaatttgtttgcccaaagcagcaccgtccctggctgggaaaggtacaccatggtggtgagcagcttgtccaggaagtagtgatggtagaccacatctgaggctaggacgtaatcatagtaaaaagctgacttgggaaagtttttgtccaggtcttccccccataccagttctttcacttcaggcagatgtgctgtacattgtagtgtgttttttaaaagattgtattgaaggtttcccaggacatcaggcaaatctgttgctgtgacttgagctcctaagagaaaaagaaaacaatgacctggaaacatctgggcagtcacagtgtacatatacccagggagaaacacaagaaacaactggattccttagccttggctctattggtgggtgggctggacatgtttgacctaatgtgggctggcta

SEQ ID NO: 1205 - DNA, 566 bp, Homo sapiens
  MAP TO AL136312.1; EXPRESSED IN FETAL LIVER, SIGNAL = 0.48; EXPRESSED IN BONE MARROW, SIGNAL = 0.45; EXPRESSED IN LUNG, SIGNAL = 0.59; EXPRESSED IN PLACENTA, SIGNAL = 0.57; EXPRESSED IN BRAIN, SIGNAL = 0.51; NT HIT: AF224669.1, EVALUE 1.00e-66; EST_HUMAN HIT: AI147291.1, EVALUE 3.00e-56
ttgtacttcacgtccccctccccttctatatttagaaaaatatgtataagtagccaatcgtgtcagctcagattgttcagtctgaccccagcccatgggggagtggcacagaagtagggactgcgttaaggataaaaaccccctggtcttctttgtttggtgtgctcttgcaatcttgattgacacaggtagcacccttctgcagaagtaagttgccttgctgaaagaattaatcttttgcctgagtgctggtttcacttcatggcaccgagcatttattcctaaagcattttatatccagcacataccactcggtgaagtatgactttccttgtagattaaatggctactattctaattaacttcactcattctttaaacagctttattgaggtaaaattggcacacagtaagctaaatggatttatagtgcacaattcaataagttttgatatacatatatatccctaaaaccatccctacagtcaagataatgaacacatccatcaccctaatagtctgttcatgtcactttctggagcacaggcttttcattttgggctcac

SEQ ID NO: 1206 - DNA, 537 bp, Homo sapiens
  MAP TO AL136382.1; EXPRESSED IN BONE MARROW, SIGNAL = 1.6; EXPRESSED IN HEART, SIGNAL = 3.8; EXPRESSED IN LUNG, SIGNAL = 3.2; EXPRESSED IN PLACENTA, SIGNAL = 2.7; EXPRESSED IN ADULT LIVER, SIGNAL =   3; EXPRESSED IN BRAIN, SIGNAL = 2.4; EXPRESSED IN FETAL LIVER, SIGNAL = 1.6; EST_HUMAN HIT: BG425757.1, EVALUE 0.00e+00; NT HIT: gi14727196, EVALUE 2.00e-86; SWISSPROT HIT: Q90339, EVALUE 9.90e-01
agcaaaactcagaaggacggctggacacctggccctgaagctccctaatggtgtgttcctggtctgcacacttccccttgcagcactgcagactctcctgacactcgtgaagcctccgttccgccgccgtcaaggaatcgcagacacgctctaactccttcagatgagactccatctggcctctcatctgagttgtggcagtagggaaataagtgcaagatcacacattcagcattaatatttttattatcttaaatactagatatgcttataacgtaagtattttaggtataatggctttaaataagaacacaactgaataaatattaaactctgttaaataagaatgtataactaaaaagtggggtagactttagttttcaaaaagtttgttgagcacataaatagggtaaattagctgacagggtggatgtttaactaatttttaagagcaaatttttaaaatcctgacattatattcaagcatagattatcactaataaccattactaataaagccgtaattgtctactgccc

SEQ ID NO: 1207 - DNA, 557 bp, Homo sapiens
  MAP TO CHR22_144.0; EXPRESSED IN HELA, SIGNAL = 2.1; EXPRESSED IN FETAL LIVER, SIGNAL = 0.89; EXPRESSED IN PLACENTA, SIGNAL = 0.95; EXPRESSED IN LUNG, SIGNAL = 0.83; EXPRESSED IN ADULT LIVER, SIGNAL = 1.2; EXPRESSED IN BONE MARROW, SIGNAL = 0.8; EXPRESSED IN BRAIN, SIGNAL = 0.75; SWISSPROT HIT: P14172, EVALUE 3.10e+00; EST_HUMAN HIT: BI832330.1, EVALUE 1.00e-105; NT HIT: AF195953.1, EVALUE 6.00e-04
tgtttatgctctgtgggctggctggctcacaagaactgggtgctaggagggcccactttccccacctggtggggagctttggggcactttgcccaagcaggaagcagacccgagccataggacctggagccagggtctgacagcatctccagctggaaggacagggagggagacccagagaacagaagtgacttgcccaaggtcacacagcaatatgctaagcacggctgagcctggaacccagtcctgtcctgctgtgcctgctacagtcaccccaagtcctccccaggtgcctctcccaggcggtcccacaacgttacctaggaaataccagagtagcacccccgccgaagccagcacgagcagggccagcagcacaaacaggggcaccaggcggaggtagccccgggcttttctcttggagtcctcacaggccttgaacatcccctccggctccgcttcctcgccatcacctccgtccccctgcccgccagccacctggggggcctcggccacgggcatcctgccagggaaacagaccaaagttggaaacagcc

SEQ ID NO: 1208 - DNA, 503 bp, Homo sapiens
  MAP TO AL121993.2; EXPRESSED IN FETAL LIVER, SIGNAL = 0.6; EXPRESSED IN LUNG, SIGNAL = 0.63; EXPRESSED IN BONE MARROW, SIGNAL = 0.61; EXPRESSED IN BRAIN, SIGNAL = 0.64; SWISSPROT HIT: P27715, EVALUE 2.70e+00; EST_HUMAN HIT: AA608775.1, EVALUE 8.00e-87
cttccatgttttcctcactcgtgtaatttctgcactatatatgattactcaagttgaactttaaaggatatttgcttccacaggtaggaacagaacctcatgctctgtcataatctcgatattgtgagagatgtgtgctgatcccttggccccatcctctccaacagctgtggcaaataactctatattcagttctgtctgcataccagctgccacctataagacacaaggtagctttaggaccagacaactctgagttcaaaccttgcttttaataatatgaatttgagcaagttacttaaactctcttacctttggtttcttcatctataaatttggcactaacaaatggtagttattataagcatttagcggaattacttcataatgaaggtagaattccattaagtaaaggggagccagggtaaattgttgaaggggcaaaccaggtgctatttaggaaaaagcataaggaagctaaatgccaggttattggaagtgga

SEQ ID NO: 1209 - DNA, 555 bp, Homo sapiens
  MAP TO AL133520.2; EXPRESSED IN FETAL LIVER, SIGNAL = 1.8; EXPRESSED IN LUNG, SIGNAL = 1.3; EXPRESSED IN PLACENTA, SIGNAL = 2.2; EXPRESSED IN BRAIN, SIGNAL = 1.1; SWISSPROT HIT: Q13183, EVALUE 3.00e-27; EST_HUMAN HIT: AL543135.1, EVALUE 0.00e+00; NT HIT: gi14786180, EVALUE 0.00e+00
agtcaacgccttaggcacacacctgctccactgctgccctgagaacaagccggggcaggccctgccgcaggcctccttccccctctgcccccagcccaggcctccttccccctctgccctgagccctgggcctccttccccttctgccccgagccccgctgaccctctgagcatgcatctcctcctgcaggaaggccgctgcttgtttgtcatcctgctcatggcggtgtactggtgcacggaggccctgccgctctcagtgacggcgctgctgcccatcgtcctcttccccttcatgggcatcttgccctccaacaaggtctgcccccagtacttcctcgacaccaacttcctcttcctcagtgggctgatcatggccagcgccattgaggagtggaacctgcaccggcgaatcgccctcaagatcctgatgcttgttggagtccagccggccaggtaagaacaggtaatggttccagccctacagcggagaggcagagggaccacacctctggagcctatacctgctcttcttgatttactcgtccaggccaa

SEQ ID NO: 1210 - DNA, 505 bp, Homo sapiens
  MAP TO AL139021.1; EXPRESSED IN HELA, SIGNAL = 0.58; EXPRESSED IN BRAIN, SIGNAL = 0.7; EXPRESSED IN FETAL LIVER, SIGNAL = 0.64; EXPRESSED IN BONE MARROW, SIGNAL = 0.65; EST_HUMAN HIT: R61450.1, EVALUE 0.00e+00; NT HIT: gi7662189, EVALUE 0.00e+00
gccttcagtgacctaacaagctccaaatatgtctttattttcttagtgtaatgtctgtggctaaggatgaagaaccagagagtatggatttccctgctcagcctccacctccagagccagttccctttatgccatttcctgccggcaccaaggccccttccccctcacagatgccaggttctgattcatcaacactggagagcacattgagtgttactgtcactgaaactgaaactttagataaacccatctctgaaggagagattttatttagctgtggtcaaaaattggcccccaagagtaagttaatttgtattagttgattttacttgttagattatgctaattccctaagtaatacttttctatttaaagtgtttttacttaactttcaagatttaacatggtatagtagaaagaataggggactcaatgcaatttagttaacttttctgggtcttaacttcagaaagtaaaatcttcctcataatcccaccctccagaa

SEQ ID NO: 1211 - DNA, 549 bp, Homo sapiens
  MAP TO AL138732.2; EXPRESSED IN FETAL LIVER, SIGNAL = 0.72; EXPRESSED IN BONE MARROW, SIGNAL = 0.69; EXPRESSED IN BRAIN, SIGNAL = 0.78; EXPRESSED IN PLACENTA, SIGNAL = 0.54; EXPRESSED IN HELA, SIGNAL = 1.2; NT HIT: D90389.1, EVALUE 3.00e-73; SWISSPROT HIT: P21953, EVALUE 2.00e-15; EST_HUMAN HIT: AW951497.1, EVALUE 2.00e-57
tttcgcagaatatgggcttcaacatatttaaaacaaatttataaattctccatgcagatcagttcctgagactttaaatactgtctctaatagtgacatcagcattcaactagtttttgaggctagaacctttgtagtcattctctgcatatttttctctttatttcaggttcatgtgatccgagaggtagcttccatggcaaaagaaaagcttggagtgtcttgtgaagtcattgatctgaggactataataccttgggatgtggacacaatttgtaaggtatgaatataatggtgatagaatgtcatttccctgaaacctttggccaaatatgttgtatatttgcaaataattcttttgaaattgtgagctatgtgagcattttcaattgatttaaaacttttaaatttgcagcatgaaagaaagttgtataaacagcttcatgctcaaggaaacaaatcactatagaatttatttttcctcctgtagtttcctttgtttaaaatattacaaaatggggtcctttatgcagtcaccttgggttgaat

SEQ ID NO: 1212 - DNA, 507 bp, Homo sapiens
  MAP TO CHR22_84.0; EXPRESSED IN BONE MARROW, SIGNAL = 0.76; EXPRESSED IN BRAIN, SIGNAL = 0.65; EXPRESSED IN HELA, SIGNAL =   3; EXPRESSED IN PLACENTA, SIGNAL = 0.93; EXPRESSED IN FETAL LIVER, SIGNAL = 0.79; EXPRESSED IN LUNG, SIGNAL = 0.77; EXPRESSED IN ADULT LIVER, SIGNAL = 0.9; SWISSPROT HIT: P40657, EVALUE 3.60e+00; EST_HUMAN HIT: AI332452.1, EVALUE 0.00e+00
aaccctctcctctcctccaggcacctgcccctctgctgagcagcccaggcctctcccatcctcactgcctggctgaacccatgagcagcagatttttggacaccaagagctgtgtttccaagcatggcgctaaagaggatgggctggcccagaaccatcctgagaaccaggcccagagacagctcaagggacagaagcattcagggcccccacagcagcacatgaacgtgaacatcagtctcaggatataccccaattccggaaacacaaatgtgcgaaaatgtagcctctgactcaaaggaacatggtgcttccagaagccacggctcacaggtgtttcttgggagatttgcacacttcacctcccggggaccctcaacagcccagttcacagatagggtgactgaggcccagtgaggtggagtggagtgcccagaggcacacggccatggggatggggttcagaactcaccacgcagtggggaggggtctggcaggttctgacat

SEQ ID NO: 1213 - DNA, 597 bp, Homo sapiens
  MAP TO AC018704.5; EXPRESSED IN HELA, SIGNAL = 0.85; EXPRESSED IN BRAIN, SIGNAL = 1.2; EXPRESSED IN PLACENTA, SIGNAL = 1.2; EXPRESSED IN LUNG, SIGNAL = 1.1; EXPRESSED IN ADULT LIVER, SIGNAL =   1; EXPRESSED IN FETAL LIVER, SIGNAL = 1.1; EXPRESSED IN BONE MARROW, SIGNAL = 1.1; EST_HUMAN HIT: BE888189.1, EVALUE 2.10e-01
cacaatgccacagtcattccaaccagtctccttaactagcataaatgttaaatcatatagaaacaaccaggaatgttttcagtaaagatggcttcactgaagcaatgcacaaagatgacaagagaggagagacctttgggtaggtaccttcttgtgaggagaaataataacagagggcatgggctctggagtgcttgcttgggtctttgactaaaactataaacaaccaccacaactgcaaaacaaacatactgatccaggcaagctcacatcatttcttctaatccattgacttaaacttctccacctaatttccctctaagacactgacttaaatacatgttttaccaaccttttgggtcagtaatggtcattgatagtgaggaacaaaagcctcagattcgatcaaaacaaatcctgtatctttattagtcacataatttgaagacataacgtctgaattgtagtaaggaactcaccctttcatctaggaataagggtaaagatattttcatttagaaaaagaaatattgcaagtaattaaatcacatgcctacattgcaatgccatgacagagccctaactctgcccctcact

SEQ ID NO: 1214 - DNA, 595 bp, Homo sapiens
  MAP TO AC013341.3; EXPRESSED IN FETAL LIVER, SIGNAL = 0.96; EXPRESSED IN BONE MARROW, SIGNAL = 0.83; EXPRESSED IN HELA, SIGNAL = 0.61; EXPRESSED IN BRAIN, SIGNAL = 0.88; EXPRESSED IN PLACENTA, SIGNAL = 0.99; EXPRESSED IN LUNG, SIGNAL = 0.82; EXPRESSED IN ADULT LIVER, SIGNAL = 0.97; EST_HUMAN HIT: H93909.1, EVALUE 1.00e-08; NT HIT: gi16174379, EVALUE 6.00e-07; SWISSPROT HIT: P18753, EVALUE 1.50e+00
gtccctggaaatagggaaggcagaatacatgcagcaaaggatctaaaaagaaaacgaaaacatccacatggacatcctaggtaagaacctaaaattctaaccaatgcaaagagcaaaaatatttttaatcaggcactgtgtttagtcttctactttgctatttatatttattaccagaactcttgaaatataaactgctgaaagatttctaatggctaatttttctcttctcacctcgggggaattaaattgatatctggaatgcaaaggagactatcagcacaacctctgcccctaacacatctacctacacccccctccacacacacatatgtgcagttatcagaagactcagaaacactttcagcaagggttccatccgtatgactgctcatctataggaaaaatcactgctgtagacagtagctagaggcatattatgtggacgtgagcaaggagaaaaccctattatctagagctcaacttccatataacagatggatattgctataatctgaatatatctcctaaaattcatatgttgatacataatcctgaatgtgatagtattaagagctggggcctttaggagata

SEQ ID NO: 1215 - DNA, 598 bp, Homo sapiens
  MAP TO AC018671.5; EXPRESSED IN HELA, SIGNAL = 0.6; EXPRESSED IN FETAL LIVER, SIGNAL = 2.4; EXPRESSED IN BONE MARROW, SIGNAL = 1.7; EXPRESSED IN LUNG, SIGNAL = 2.1; EXPRESSED IN PLACENTA, SIGNAL = 2.2; EXPRESSED IN HEART, SIGNAL = 2.4; EXPRESSED IN ADULT LIVER, SIGNAL = 2.1; EXPRESSED IN BRAIN, SIGNAL = 2.4; EST_HUMAN HIT: BG395291.1, EVALUE 3.00e-71; NT HIT: gi15920163, EVALUE 8.90e+00; SWISSPROT HIT: O21069, EVALUE 1.00e+01
tcagtgccaattcaaacacactctcttattattccaatatttagaaagattttatgttttaactttcacagtttagtcattaaataacttcaactaggttttcaaaaggaaaaacacactttccttccatttgaaagaaagtatatatttaagatgaatattcttgaacataaaaacttaccatgacaacaccaccaacgtattcaaaagcacaatgagctatacagccatattgaatagtatagccaacaagtcgaaaggttttccccagaacaccacgaagcatagttctatgtagactctgccaccattggcctgatggtaaatttcaaaaagtttcatgatcaatactatttaaaaacacttaagaaataactattgtaaaatattttacaatcacccaaaatgtactaagtgcctaatacaatttggtgcaggaaaccaagagtttgttatcagttctaatgatattttaaatggcaaattgtagccactaaatattttgatttaccaaagtttatattcaaatgtcactgggtctacatatgaattatataattagtagattataaactagtctgtccccttccatgtcttg

SEQ ID NO: 1216 - DNA, 586 bp, Homo sapiens
  MAP TO AL137070.3; EXPRESSED IN BRAIN, SIGNAL = 0.83; EXPRESSED IN LUNG, SIGNAL = 0.82; EXPRESSED IN FETAL LIVER, SIGNAL = 0.73; EXPRESSED IN BONE MARROW, SIGNAL = 0.72; SWISSPROT HIT: P11586, EVALUE 5.00e-18; EST_HUMAN HIT: AI589066.1, EVALUE 5.00e-70; NT HIT: gi14757749, EVALUE 2.00e-68
ggagcataacgatttgaggcactgcgacaatgcagaatggggagggtttttggaaaatgtgactcattcaccgttccgaccaaagggtaaatgaacccagcgtctgtgctgacccggacatcactgataggtaagatgaagtcccttggcacaccttttttgtcaggttggtgagacagagaaaggtcggtctttgccatgcagatgggcaaatttccaaaaccctgtaagaaaggaaagaaaatgtgttcactgatatagatgtgagtctcctatgtttttcaatttgcactttatacagtctcggcagcaatggtatgccagctcagatctaggcacacgcaggagctgcttgttactacttgttcactgaacaagcaagaaggtgaggataaaaactcatctccatgtgatgactgtttagtaggtcaagggtgacttttgtttattttggaggttctcgttaagagaaggcagtgttatgtgcatgtttgggaaaaacattgctattttcaggcaaagcagcagctgtagaaaccgctttccaagactattaatatccgggacccagcaaggtagtctggag

SEQ ID NO: 1217 - DNA, 563 bp, Homo sapiens
  MAP TO AC011981.3; EXPRESSED IN BRAIN, SIGNAL = 0.4; EXPRESSED IN ADULT LIVER, SIGNAL = 0.35; SWISSPROT HIT: Q00959, EVALUE 1.00e-05; NT HIT: gi13632014, EVALUE 3.00e-89; EST_HUMAN HIT: BG256658.1, EVALUE 2.00e-01
tccacaggggttctgaaatcaatccccaacagatactgaaggatgattatatgttctattatttttagcataattaaatatataccaatgtaatgtttttcatcctgtctatgtaaattaaaattccaactttaaaccctatttcttcttttgttcttcattttttcacaggtaaaatatggaaattatgctttcgtatgggatgcagctgtattggaatatgtggctatcaatgacccagattgttccttttacaccattggaaatactgttgctgatcggggatatggaattgcattacaacatggcagtccttaccgagatgttttttcacaaaggtaagatttgtgtatgaccaaataaggggagagatgaaatttagacaaagaatatccatttggttaccagatctggtttattacattttgtttcctttgttaggagaagcacaataaacaacaacaacaaaaaagatagttataagtagttgttcaataagacactcattacctaaaacatgaagtattgttttttccataagtagcgggaaaaataatgctaca

SEQ ID NO: 1218 - DNA, 542 bp, Homo sapiens
  MAP TO AC016672.4; EXPRESSED IN HELA, SIGNAL = 0.99; EXPRESSED IN BRAIN, SIGNAL = 0.97; EXPRESSED IN FETAL LIVER, SIGNAL =   1; EXPRESSED IN PLACENTA, SIGNAL = 1.1; EXPRESSED IN LUNG, SIGNAL =   1; EXPRESSED IN ADULT LIVER, SIGNAL = 0.98; SWISSPROT HIT: Q14957, EVALUE 2.60e-01; NT HIT: U34741.1, EVALUE 5.20e-01
ttccacctctgcagacacagacacacgcacccgaaccccttccacgaaggctgcttgctgttcaacaaacacaggtgcagaagccactccagctggaagcagggttgcagcagcgtcctctcggccagagctcactccgtccttctcaacacttccatggacttgtcccagcgcccggagggcagcagggcacaggctgacctggcacagtatgcttgaatccccgccgcggtcctgtttccatttgagaagtttattcacgttgtttcagttttatttttattacatgaatagtaccagcttattggtgaaacattagagaataggcgaaaacaaatgaacagcaactccaattcctctgtccagatattcagaaattttcctgtgtgtgggcataagcatgcacgtacatgtgcacacacttccagttacaatagctgtgtaacaaactatccccaaaacagagtggcataaaaccaccatctattatcctatgagaggaacttggttgtgtgcaatggggatggttcttctctgcccag

SEQ ID NO: 1219 - DNA, 583 bp, Homo sapiens
  MAP TO AC015819.4; EXPRESSED IN PLACENTA, SIGNAL = 0.64; EXPRESSED IN LUNG, SIGNAL = 0.57; EXPRESSED IN ADULT LIVER, SIGNAL = 0.57; EXPRESSED IN FETAL LIVER, SIGNAL = 0.51; EXPRESSED IN BONE MARROW, SIGNAL = 0.46; EXPRESSED IN BRAIN, SIGNAL = 0.53; SWISSPROT HIT: P39749, EVALUE 4.30e+00; EST_HUMAN HIT: BI438944.1, EVALUE 5.30e-02; NT HIT: AL163281.2, EVALUE 5.60e-01
aaagtccaatttggctggtgtggtctgtcctacaacaaagcacatgtaggtacagcaaaggaatggtgtgcattttccctcagcagcaaacatgactgaaatttccaggttcaccaggtgggcttcgttaatgacaaccaccacagggatcacactcttactgtgagccgggagctgaacttggggcttcccaagagcctcgcccgtttggtcatcattcccatcctgcagtgtgggttttctagatgagaaaactgagcctctgagtggctgctccttacccaggtttgcatagataagaaggggcagaggcaggatttctcaatgatgctgcagctttgtgcgatatcagtcatctgggcttataaaatcaataacttctcagaactaacatgtaggggctctccaagtgcccaaaggagctcttttggtactggggggtttgctttcaggtcctgctactttgaaagtgtccagtcatttgagtctggtgtcaagttgatcttttctcttcctgtcacaaatgccgcttttgattaagcgatgactgtgatgttttctcccatccacaaaagacccctgt

SEQ ID NO: 1220 - DNA, 595 bp, Homo sapiens
  MAP TO CHR22_115.0; EXPRESSED IN HELA, SIGNAL = 0.6; EXPRESSED IN FETAL LIVER, SIGNAL = 0.8; EXPRESSED IN PLACENTA, SIGNAL = 0.85; EXPRESSED IN LUNG, SIGNAL = 0.87; EXPRESSED IN ADULT LIVER, SIGNAL =   1; EXPRESSED IN BONE MARROW, SIGNAL =   1; EXPRESSED IN BRAIN, SIGNAL = 0.87; EST_HUMAN HIT: BE071630.1, EVALUE 5.40e-02; NT HIT: AL163252.2, EVALUE 6.00e-04; SWISSPROT HIT: P04499, EVALUE 2.00e+00
acaatggccactctgaggaccattaaatttgcctcctcctatgcttccccaagccccaaacccagcacctgcccactgggcaagcctgcaagtgaagggaggctctgtgcgccgcctcggcctcaggcccacacacatccgaggcattgttcttgttggctgcgagagctcgttaggctctgggcagaggctggctggactccaggaggcagacatcaagccccacaactcaaagaatggaggagcctggggcttggcattagatgatgccagtccactcctccgcatgcactggggctctgatgcccagtgagaacgttgactctggaggaagagggtagagatgatgtgttatgcatccctgtgtccccctagctcaaagtggtgctccatacaggattacaggatgactgggagctgggctgccgtggggtgagatggtgcaggatgggatagattggggtggggtaggatgggatagaatagaatagaatagactctggacattttcttcttttgttggagatccaaattcttcctcaagtggactgagaagtcagcaggtgtagacctggcgtggacagagtcacctgag

SEQ ID NO: 1221 - DNA, 522 bp, Homo sapiens
  MAP TO CHR21_30.0; EXPRESSED IN HEART, SIGNAL = 1.4; EXPRESSED IN LUNG, SIGNAL = 1.3; EXPRESSED IN FETAL LIVER, SIGNAL = 1.8; EXPRESSED IN PLACENTA, SIGNAL = 1.1; EXPRESSED IN BONE MARROW, SIGNAL = 1.9; EXPRESSED IN HELA, SIGNAL = 3.8; EXPRESSED IN BRAIN, SIGNAL = 1.9; SWISSPROT HIT: P36978, EVALUE 4.80e+00; EST_HUMAN HIT: BE148728.1, EVALUE 2.00e-13; NT HIT: AF029308.1, EVALUE 7.00e-28
gtctgtttctggcttctggccaaggctgtgcttcccagcctgtcagaatggccaccctgcaggctgcagcccttcatgagaagtaaagctctcatttctaaatttattaacctcatcatctttgagttgacattgcttattgtcatctgtattagctaaaatgaaaccaaaggaaagtgctgggtctgaccttgatatcataccaaacttagattttggtgagtctgagctttggccactagcctcagagccacccctcaaaggcaaaattatgcaaggacaacagaaagtacctccgagtcctgtggttaccaagaaagtactcaatgtggggaaagggcaaaacaaagtgatgaataaaaccacaggacatagtgtgaagtaattgttccattttgtagataggtatcatcagcttcctgaggaacctttaataaaatggattccaatagtagccaatttagaaggagtatcttttaagtgctgcagagatgaagagcatgtttgtgttgatgcaggacc

SEQ ID NO: 1222 - DNA, 568 bp, Homo sapiens
  MAP TO AC017072.4; EXPRESSED IN BRAIN, SIGNAL = 1.1; EXPRESSED IN PLACENTA, SIGNAL = 1.1; EXPRESSED IN LUNG, SIGNAL = 1.1; EXPRESSED IN ADULT LIVER, SIGNAL = 1.1; EXPRESSED IN FETAL LIVER, SIGNAL = 1.2; SWISSPROT HIT: P36955, EVALUE 4.10e+00; EST_HUMAN HIT: AV696221.1, EVALUE 5.00e-05; NT HIT: AF000573.1, EVALUE 4.00e-05
tcagtttccccagccataacatgaagctgcagtgaaagtttttgtgaagatgaaacaccttaatagtgcctggcatgtggaaggtgctatatataagtcattgccgtgattcattccaagctctagctctggtgtcagggtgaccttgggcacgtgacttaacctctttaaacctccactggctcctctttaaaatggggcttttaggagaaccgacctcacggggttgtgaggattttagaggatgcaggaaagcgctgagcacacagccgttctcgataaacacgagctctcttgctgtggtgctcttgccttgaggagctcgccagctagtgatcattaccatgtcgagtgtggggaaaagggaaaagaataaagctcgcgggaagccaccacggagctcagctggctctgccatcaggggatgcaataggagagaatgatccagagggccctcaggaacagggcaaggagtggggctgcgtgaaggaaggcttcacagaggaggtgacatttgggctgggtcttgaaggatgcgtggcacttctgccaccagaaagggtgatac

SEQ ID NO: 1223 - DNA, 575 bp, Homo sapiens
  MAP TO AL049828.3; EXPRESSED IN HELA, SIGNAL = 1.4; EXPRESSED IN FETAL LIVER, SIGNAL = 1.3; EXPRESSED IN HEART, SIGNAL = 1.2; EXPRESSED IN PLACENTA, SIGNAL = 1.3; EXPRESSED IN LUNG, SIGNAL = 1.3; EXPRESSED IN BONE MARROW, SIGNAL = 1.3; EXPRESSED IN BRAIN, SIGNAL = 1.4; SWISSPROT HIT: P11369, EVALUE 7.00e-23; NT HIT: D16473.1, EVALUE 3.00e-15; EST_HUMAN HIT: AW994400.1, EVALUE 4.00e-12
agccttttcacattggcttctttcacttagtaaaatgcagttaagtttctccattttctgtgcatagtttgatagctcatttctttttgcactgaataatatttaatttcctggatgtaccaaagtttatttacccactaacctatggaggggcatcttggttgcttccaagtttgggcaactatgaataaagcttctataaacatacctctacaggtttctgtgtagacataagttgtccactcctttacgtagataccaaggaaaatgattgttggatagtatggcatgagaatgtttagtcttgtaagaaccataaactgtccttcaaagtagctgtaccactttgcattctcatcagcagtgaatgagagttcctgttgcttcacatccttgccaacatttgttgtagtggtgttctgtacttacaacacttccgtaatcaaatatgtagattttacacacattgcaatttacatattatctgtgaacaccaactcagtatcctacagtttaattcaattctagcactaacaataggataagggctcagtcccacagaaccacctccaact

SEQ ID NO: 1224 - DNA, 557 bp, Homo sapiens
  MAP TO AL136987.1; EXPRESSED IN LUNG, SIGNAL = 0.58; EXPRESSED IN BRAIN, SIGNAL = 0.53; EXPRESSED IN ADULT LIVER, SIGNAL = 0.46; NT HIT: gi16162876, EVALUE 5.30e-01; EST_HUMAN HIT: AA872861.1, EVALUE 7.80e-01
ggctttatagctgcactcggtttgcattgatacttacctctgcttttagtgtaggagacattttccagtggtaaacactgctttatatcttcaggctcattaatccccagcatcagtgtgcctcatcacagatgagaaaatgcaggaggttcctgtttggggccttgctgtcatggtttcttgttgctagcaacacacagaagcatgaccagctgctgctgctgctgctgttcctgttagtctgctaactaaatatgggtgaatttttctatgagtcagtatttctacactgtcaataacaatgtgtgtgtgtgtttcaattaaggcctgattgttaagtcactaaggatcgactgaatccaattctaacatgaataatcttcaaaatttggcttatggtgtgccatagatgtccagctaaactgaatataatcctcaggcatgaattatgttaagaaaattactgctgattgaagctatcgttcatggattaactcacacttaataaaaagctatgttcctttgatatcttttcaggtttagtccagatttggcgg

SEQ ID NO: 1225 - DNA, 510 bp, Homo sapiens
  MAP TO AL133330.5; EXPRESSED IN BONE MARROW, SIGNAL =   7; EXPRESSED IN LUNG, SIGNAL = 8.9; EXPRESSED IN ADULT LIVER, SIGNAL =  12; EXPRESSED IN BRAIN, SIGNAL = 6.3; EXPRESSED IN FETAL LIVER, SIGNAL =  12; EST_HUMAN HIT: AV719930.1, EVALUE 3.00e-71; NT HIT: gi14763552, EVALUE 2.00e-71; SWISSPROT HIT: P43004, EVALUE 4.00e-14
tcatgggaataaggctccagtccatgaatttataagcttacatcatagttgagcagtacccaaataggccttaatccttaattccttggtcttagtactttagatttctctattccttggtggagagtatggggtgggggttgggggatgaattttatggctgcaggaaaattagagcttaaaattgccagggttggttttgctaagattctttccatttccatgacctgaacttctctgttctcatagcctcacagccaccctggcaagcgtcggcgcggccagtatccccagtgccgggctggtcaccatgctcctcattctgacagccgtgggcctgccaacagaggacatcagcctgctggtggctgtggactggctgctgtaagtgtctgtggatggggttctgctgggactgtgagtactgcctcctagggatgcacaggtggcaaggttgcaaccaagatcttagctaatccccatggcaactccctcactcttccttcctcc

SEQ ID NO: 1226 - DNA, 552 bp, Homo sapiens
  MAP TO AC023115.3; EXPRESSED IN PLACENTA, SIGNAL = 0.54; EXPRESSED IN FETAL LIVER, SIGNAL = 0.51; EXPRESSED IN LUNG, SIGNAL = 0.45; EXPRESSED IN ADULT LIVER, SIGNAL = 0.52; EXPRESSED IN BONE MARROW, SIGNAL = 0.46; EXPRESSED IN BRAIN, SIGNAL = 0.53; EST_HUMAN HIT: AI206381.1, EVALUE 3.00e-06; NT HIT: X95176.1, EVALUE 9.00e-06
gctggaaaacaaaaactgccaacacaatttttactggccataacacggatctttactttatctggcaaattgatctttcttttctgtaacctaaatttcccctatttctggtggtagttaaaagccatgttcctttttgacataaattcactaaagtcatcttcataaagtagtactttgactatgctgtagctttggatcactgtttcttctgtagagctcgaatctccagcatggcatctaaatatccctaaaggtaatattaatgatgatgacaatgacagtgatggtgatacccaccaattactgaactctaaccatatcccaggtactggtctaagtgctttataggtagtaactcatttaattctcataaccaccctatgagataggcaactgtcatccccgtgttataaatgaggacactgaagtacagagaggttaagtaatttaccaacattgcatgacaccaaagacgcagagctggtatatctgtggtctggctccagagtctgcacatctcacactgatgctcttctggctcaaacccac

SEQ ID NO: 1227 - DNA, 500 bp, Homo sapiens
  MAP TO AC012580.3; EXPRESSED IN BONE MARROW, SIGNAL = 1.2; EXPRESSED IN BRAIN, SIGNAL = 1.1; EXPRESSED IN HELA, SIGNAL = 0.63; EXPRESSED IN LUNG, SIGNAL = 1.3; EXPRESSED IN FETAL LIVER, SIGNAL = 1.2; EXPRESSED IN PLACENTA, SIGNAL = 1.3; EXPRESSED IN ADULT LIVER, SIGNAL = 1.2; SWISSPROT HIT: Q10469, EVALUE 1.60e-02; EST_HUMAN HIT: AW612781.1, EVALUE 1.00e-122; NT HIT: gi16190359, EVALUE 1.00e-115
tgccaggatagaaaactgggactcaccaccagttcactgaacatgacatccagctcctccacagggggcatgggcaatgctggttccatggtctgaagcgcaaagttgctatcatttcgcagccgatacgtgatttctgggtgatcattatttcggaaacagcaaaagatgaatgaaatacctcgtccacctctctttcttggggccatggctgaattctgttctatttcttgatgtgactaaacgctgcaaaaagaggatatgacatggttaagagtacaggaacagataaaatgatttttaaaaggccagaccaactcaagaaagagctccgtgtgctgacgacactgtgtgcgccctgcagggcacagagagaacaacaccgagtgggtttggagtccacttggacagagaacacacacccttctattcatttgttgactgtttcctgcaataactgctgagcaaacaggacaactccagccactctcctgacaaca

SEQ ID NO: 1228 - DNA, 600 bp, Homo sapiens
  MAP TO AC021311.4; EXPRESSED IN HELA, SIGNAL = 0.52; EXPRESSED IN BRAIN, SIGNAL = 0.77; EXPRESSED IN PLACENTA, SIGNAL = 0.8; EXPRESSED IN LUNG, SIGNAL = 0.68; EXPRESSED IN FETAL LIVER, SIGNAL = 0.76; EXPRESSED IN ADULT LIVER, SIGNAL = 0.65; EXPRESSED IN BONE MARROW, SIGNAL = 0.75; SWISSPROT HIT: P11369, EVALUE 4.00e-27; EST_HUMAN HIT: BE079609.1, EVALUE 1.00e-12; NT HIT: AJ271735.1, EVALUE 2.00e-07
aagtggcaagagtgggtgtccttgccctataccagaccttagagaatcagccttcagcttctctccattggacggtgatgctagttctgggtttttcataagcagccacaaccactattgtgttgagcaacttgcattctatactgttgagagtttttctcaagaaaggatgttgatctttgttgaatgctttttctgcattaagtgcgatgatcatgtggttattatcttccatcagctgagatgatgtaatcacattcattcacttccatctgttaagccagccttatatgccatggataaatcccatatgatcatgatctttttggtatgttgttgaatgctgtttgccaatattttattgaacaattttgcatcagtgtttatcagaggtattgtcttgtagtttacttatgatgtctttgtctggcttaggtatcaaggtgatgctggtctcataaaatgtgttaaaaagtatttcctacatctctacttttttgaaagagtttaagaagtattggtactaattattctttgaaagtttggtagaattcagcaataaattcatctggtctgtagcttttctttgttgagaggctt

SEQ ID NO: 1229 - DNA, 567 bp, Homo sapiens
  MAP TO AL121836.9; EXPRESSED IN PLACENTA, SIGNAL = 0.74; EXPRESSED IN LUNG, SIGNAL = 0.79; EXPRESSED IN BONE MARROW, SIGNAL = 0.6; EXPRESSED IN ADULT LIVER, SIGNAL = 0.67; EXPRESSED IN BRAIN, SIGNAL = 0.71; SWISSPROT HIT: Q49116, EVALUE 1.80e+00; EST_HUMAN HIT: BE889493.1, EVALUE 3.10e+00
tcatcagccaagtgcagaaggatacacaagctggctgcaaaacatgatgacctatccagtggaaagatgaaacctgacagagacctggggacaggctcagactctgcctgggaatgcttaggaatctggggaaaagcacatcggaaacttgaaaagggaaatggcaaacttcaaaaatgtacaagctgaaagctacaaaaagctcaacccaaccgtctttggaaaggcaatcccagtccttgggaatgtcatagagcaaatctattaccacatacatgaactctcagtgctaatatggcttgccaatgaaaatttggctctcatggactgaagcataatcaatgatacacaaatcaactattccgagtgtataaacgagctctgtgaattgatgagacatgtgtagccctgaggataagaggataacaggtgtatagtcactgttttctcagagctggtcacatgaaaggagaaagcagtgatgcatacagctgtatttatatcctgcattcaatcatggaaaaagcagcattcaatatcattgtctgcccccactaaaaggagatc

SEQ ID NO: 1230 - DNA, 568 bp, Homo sapiens
  MAP TO CHR22_100.0; EXPRESSED IN BRAIN, SIGNAL = 2.6; EXPRESSED IN HELA, SIGNAL = 1.5; EXPRESSED IN FETAL LIVER, SIGNAL = 3.1; EXPRESSED IN HEART, SIGNAL = 2.3; EXPRESSED IN BONE MARROW, SIGNAL = 2.9; EXPRESSED IN PLACENTA, SIGNAL = 2.7; EXPRESSED IN LUNG, SIGNAL = 2.7; EXPRESSED IN ADULT LIVER, SIGNAL = 2.8; EST_HUMAN HIT: BI488712.1, EVALUE 8.00e-01; SWISSPROT HIT: P39865, EVALUE 1.10e+00; NT HIT: AE006122.1, EVALUE 1.40e-01
gtctggcctggagacagaacccatgacttttaacatccaaccctctatggagaggttagaggcctaggctaggaccccaagccagagccaaaacctctccccaaggcctggccaggtactttttcccctgattctgtttcttcatccttcagacactgcaaggaagccagatttctccccctgctgccttcagctcccccactcacccccgcattgatctccagctttacgagggtgacgggccataccttttaattgcattattacatctttatggtctgatcattgagctgggcagccaggtgctggaatttatatgcggaactgaaacgtttactggaatcatattgataaaggcatattgtgaaaaggcctgtggctcttaagaagagactggggttctcaggagacagggagaaggcaggtcagaatactcccaaggagagagttggtcacttgtgagatatgagggcagggcctcccctcatgcccttcccaacccttaaatatttcctctttcatctgcctgttaggagctgggtaggaaagaagaaatgcctgcaaaagg

SEQ ID NO: 1231 - DNA, 547 bp, Homo sapiens
  MAP TO AL109804.24; EXPRESSED IN BONE MARROW, SIGNAL = 4.2; EXPRESSED IN BRAIN, SIGNAL = 4.5; EXPRESSED IN HEART, SIGNAL = 3.8; EXPRESSED IN FETAL LIVER, SIGNAL = 3.8; NT HIT: gi14771629, EVALUE 2.00e-96; EST_HUMAN HIT: AW298312.1, EVALUE 0.00e+00; SWISSPROT HIT: P76370, EVALUE 3.90e+00
caggacagtggcattgtgtcttccaggatcgactgcgggccacctgcacactctcagggaaccgggacaccctctggcatctcttcaatacccttcagcggcggcccggctgggtggagtacttcattgcggcactgaggggctgtgagctagttgatctcgcggacgaagtggcctctgtctaccagagctaccagcctcgtgagcgtcctgcccttgccctcctggacccccagcctgctccctggcctccgctctccttttctctctccctgtacttcctgcctttctctgtcatcctctttcttgtcactgtgaagcgatgaataaacctgggtgtagatccaggctgagccacttaccagctgtgtccctttggccaagtcccttaatttccctgagcctcaggcctctcttctgtaaaatgaagctcatggcagcatctgccgcggggagctgcagtgggtgatactgcgggacgatgcgtgttgagtattgagctgggctgggcacttcctgtatgcccagcacatggagtctcccctaa

SEQ ID NO: 1232 - DNA, 598 bp, Homo sapiens
  MAP TO AL138832.2; EXPRESSED IN BONE MARROW, SIGNAL = 1.3; EXPRESSED IN LUNG, SIGNAL = 1.7; EXPRESSED IN HELA, SIGNAL = 0.7; EXPRESSED IN BRAIN, SIGNAL = 1.1; EXPRESSED IN PLACENTA, SIGNAL = 2.5; NT HIT: AF281870.1, EVALUE 7.00e-50; EST_HUMAN HIT: AL589430.1, EVALUE 1.00e-130; SWISSPROT HIT: P30427, EVALUE 2.60e-02
gaggcgaaggtaaagtgtgcggtggaaatgcctaagaggtgtgagaacactgtgttttgcatcttacctgcacttcatcaaagagggtccttgcttgttgcagtggtataggaacacttccgagaccactcatggggaggtaggacacttcaaccaaccatttacgaagcttttctgccatctccctatagcgctgccactggcgaatctggctgtcaatgatcccccgcctctgctgggccctgcgaatcactccctgccattgattactgaggagtgtcaatttcaggttgaattcatccctagtgaagaaataattacatggtaaaaaagcactgttatcttggatgcagttacgcaatcagccaatgtatacactgtcaacaaccctaagccctgagaagtgatctagggcggtggtttttgaatatcatgccatgatctcttactgggttttgggtctattgcaattaatttttaaaattaaaccaccagtgtttgcaaatggtgagtgttttcatgtctcagcataggttgaaggcaaatatacaataaggtcattgtccttcactgtctccctgagagcatgagaggggag

SEQ ID NO: 1233 - DNA, 599 bp, Homo sapiens
  MAP TO CHR22_212.0; EXPRESSED IN HELA, SIGNAL = 5.7; EXPRESSED IN BRAIN, SIGNAL = 4.3; EXPRESSED IN LUNG, SIGNAL = 3.9; EXPRESSED IN BONE MARROW, SIGNAL = 3.7; NT HIT: gi14861872, EVALUE 2.00e-10; EST_HUMAN HIT: H91447.1, EVALUE 1.00e-18; SWISSPROT HIT: Q62203, EVALUE 2.00e+00
ttggaagtccacccattctctcctgttcctcacctccggctgtctccagagcaccctagccaccctgtggcatctgtcacttccacctcacctctaagaacagtcatgcatcccttaacaatggggatacactctgagaaatgcatcattaggagatttcatcattgtgcgagcttcataaagcacacttccataaaccctaagtggtctggcctactacacatcaaagctatatgttgtagcctattgctgctaggctacaaacctgcagagcatgtgactgctctgaatgctgtaggcagttgtaagacgatggtaagtatttgtgtatctagctatatctgaacatagaaaggggatagtaaaaacacactattatgatcttatgggatcaagatacacagcctgtcattgatgaaatattattatgctgtgcatacctgtatttgtatctatttcttgccttgaaatggtaggtccttgagggttcatgcttgcttcaacttgactctccccaaccctggcatctagcagatgctcaccagatatctgtgaaaagaaagggggtgataagcagaaggagtggggaagaaggaaag

SEQ ID NO: 1234 - DNA, 516 bp, Homo sapiens
  MAP TO AC023120.3; EXPRESSED IN FETAL LIVER, SIGNAL = 1.4; EXPRESSED IN BONE MARROW, SIGNAL = 1.4; EXPRESSED IN LUNG, SIGNAL = 1.5; EXPRESSED IN BRAIN, SIGNAL = 1.3; EXPRESSED IN PLACENTA, SIGNAL = 1.5; EXPRESSED IN ADULT LIVER, SIGNAL = 1.4; EXPRESSED IN HELA, SIGNAL = 0.53; SWISSPROT HIT: P57110, EVALUE 1.00e-03; NT HIT: gi16192073, EVALUE 3.00e-76; EST_HUMAN HIT: AL556670.1, EVALUE 5.00e-76
ttgctgattgttgaagctggttgataggtacatgggagtttgttttcatattctgtctccttttggaaatgtttgagattttccagtgtcttctttctccagtgtgctgagctattggtctgcccaaaaatctgatgttttccctttgttcccatgcagtgttccaagagctgccagggtggctttcgggtccgggaagtgcggtgtctgtctgatgacatgactctaagtaacctctgtgaccctcagttgaaaccagaagagagagaatcttgtaaccctcaggactgtgtccctgaagttggtaagtagagatttcaatcatgggggaaaggtttgtgttttttaagcttgtcagattctccggtgtgacaataacaagcctcttctaggtctttctgtgaccttgcacacagtcatggagttcagagggttgaggtgcttttggtattataaatttcatggtttaagatgatcattcatagcgaggatggctgtctaagccacccaccaaga

SEQ ID NO: 1235 - DNA, 586 bp, Homo sapiens
  MAP TO CHR22_22.0; EXPRESSED IN HELA, SIGNAL = 4.6; EXPRESSED IN FETAL LIVER, SIGNAL = 2.7; EXPRESSED IN BONE MARROW, SIGNAL = 2.5; EXPRESSED IN BRAIN, SIGNAL = 3.7; EXPRESSED IN HEART, SIGNAL = 2.7; EXPRESSED IN PLACENTA, SIGNAL = 2.6; SWISSPROT HIT: Q12772, EVALUE 4.00e-38; NT HIT: gi11418194, EVALUE 0.00e+00; EST_HUMAN HIT: BG829834.1, EVALUE 0.00e+00
acctcagaatgtcagcagggattcttcctgggggatgagattataggtggttttgttttactttcttgtagctttctgaagtttccctcgtttttatgagtgtgcactaattcctctgataattgggggcagggggagtagaagtctatatcaaaacaaaaagccggagcaaggccagtgaccattaacaccttttgatactttgtagggagattttgcagctgctgccggcaacctacaaacctgcctggcagttttgggccgggcactgcccacctcccgcctggacctggcctgcagcctctcctggaacgtgatccgctacagcctgcagaagctacgcctggtgcgctggctgctcaagaaagtcttccagtgccggcgggccacgccagccactgaggcaggctttgaagacgaagctaagaccagcgcccgggatgcggctctggcctatcaccggctgcaccagctgcacatcacaggtgagggggcagctgctgctgcctggcttgctgcaaggcatctcatgctacctctcctccttagcttgatttgccagttctgcaccctagctgaagtccct

SEQ ID NO: 1236 - DNA, 587 bp, Homo sapiens
  MAP TO AL136450.1; EXPRESSED IN PLACENTA, SIGNAL = 0.63; EXPRESSED IN LUNG, SIGNAL = 0.76; EXPRESSED IN FETAL LIVER, SIGNAL = 0.49; EXPRESSED IN ADULT LIVER, SIGNAL = 0.69; EXPRESSED IN BONE MARROW, SIGNAL = 0.6; EXPRESSED IN BRAIN, SIGNAL = 0.58; SWISSPROT HIT: P02339, EVALUE 9.90e-02; NT HIT: gi13650214, EVALUE 0.00e+00; EST_HUMAN HIT: BG822574.1, EVALUE 0.00e+00
tggggctccatcttaatgagggaagtagggttgaatggggagaaaggggctggggtgggggatcttgtcagaaggctcccagatgtggtcacactaggctcagccatcagcagggaccctgagcctgaggagagctcaagttcagccactggggtcagcccaacagtggggcggctgggaggagacaaagtctggttgcccagaaggctcggattgtgggaacccctggaaaccacctgggttggaagtggctgaagatgagcctgatctctcaggagctccctcagggtctcttcaggaaccagcagcccctccatgggggcccccgtcaccataccctgaacataggaggaggacctcagtggcccctccttgaccctaggggctgctgtagtgccagaagtcctgatgaaggcagcaatgacagtcccagggggctgagagctgggccctgctggtccagcccctgtgaccgtgggtggcgccgggttggtcggacggttggccccagccagaagttgggggaggccactgagaatcagtggagcccctggggctgccacctggctgtcttggaaactggcgtt

SEQ ID NO: 1237 - DNA, 522 bp, Homo sapiens
  MAP TO CHR22_177.0; EXPRESSED IN HELA, SIGNAL = 0.86; EXPRESSED IN FETAL LIVER, SIGNAL = 0.73; EXPRESSED IN PLACENTA, SIGNAL = 0.69; EXPRESSED IN BONE MARROW, SIGNAL = 0.58; EXPRESSED IN LUNG, SIGNAL = 0.84; EXPRESSED IN BRAIN, SIGNAL = 0.59; NT HIT: gi11418322, EVALUE 1.00e-103; EST_HUMAN HIT: AW602409.1, EVALUE 1.00e-103; SWISSPROT HIT: Q99457, EVALUE 6.30e+00
tgttgctcaagatggctttgctaaaagaaaccactgctgaaggcaccaacagcatcatgatgagaaatgcagctggaggaagtcagctgctgactgccgggggcggggcatccggatgaaggaggtgaggaagatgccagtgacctcagtacagggcagaacagaagcccacctgcggggacccagaaagtgcctccccaaatccacaaggtctctggtgggtcctggcacgtcaaggggtcattctgtttttccctgggccggaggaagggtctatccccagaggaggtgcaggtgccagctcacctggtccatcccatagtccaaggtcatggtgaccaggtgcttcatctcactgtcctccttaacattcttcagctcgatcagcaggtggtgccactccccgtcggtcacccgcaacccggacagcatcacggactccacatcggaggggccgtgggacacctcaaactggaggtagttgttcaggatctggagcagggagagccacaccgactgatt

SEQ ID NO: 1238 - DNA, 598 bp, Homo sapiens
  MAP TO AL136374.1; EXPRESSED IN FETAL LIVER, SIGNAL =   1; EXPRESSED IN PLACENTA, SIGNAL = 1.1; EXPRESSED IN BONE MARROW, SIGNAL = 1.1; EXPRESSED IN LUNG, SIGNAL = 1.3; EXPRESSED IN ADULT LIVER, SIGNAL = 1.1; EXPRESSED IN BRAIN, SIGNAL = 1.2; EXPRESSED IN HELA, SIGNAL = 0.76; SWISSPROT HIT: P53261, EVALUE 1.10e+00
cagggagaaagaggaaagggaatacaagcgcatgcacacacacatgtattttcccaaggaaaacatctatgggttggatttcagcagtattaagtctcactcaatcacagagagtttcagtgtattactcttagaaatgaatgcaaagcagagtctggattttttagaaaggtctatcacagaaaaagcagagagaaaagaaaagctctccaaaaaaaagaaaaaaaaaaaagcaaacaaagaacagaaaaaaacttaccttaaagcaataattaatatccccagagagtcaaggatgctataaaaaaggaatttgaagagaataagaaaaaactcttatacattcacaatatagcaaaaattaaaaatttaaaagaagaactggaacatgaagttgatgaagtctcactgaaagtaaaacacaaagatatgaataagaagagaaaaaacataaggaaaatggagaattctaacatcaaactaatagacgttgtagaaagctataacagagaaaaatgaataaaacagaattatcaaatgaataattttataacattttggaaaaccaaactacataagcatttagagtaaaagccca

SEQ ID NO: 1239 - DNA, 578 bp, Homo sapiens
  MAP TO AC022117.2; EXPRESSED IN HELA, SIGNAL = 0.68; EXPRESSED IN FETAL LIVER, SIGNAL =   1; EXPRESSED IN PLACENTA, SIGNAL = 0.89; EXPRESSED IN BONE MARROW, SIGNAL = 0.77; EXPRESSED IN LUNG, SIGNAL = 0.82; EXPRESSED IN ADULT LIVER, SIGNAL = 0.94; EXPRESSED IN BRAIN, SIGNAL =   1; SWISSPROT HIT: Q62763, EVALUE 3.00e-14; NT HIT: gi4758079, EVALUE 2.00e-56; EST_HUMAN HIT: BF332331.1, EVALUE 1.00e-55
ttttgcatgcacctattccctgaaaaaaatttcctgaaataattgtatgtaactataaatctcaagcatgcataatttaagaacaaaaagttactaaaacaagtaaaacaaacacatacttggtttcatccatcacttctacttcagtaggggctgtgatgggtgcatttgaacgtcctgcggtggggtcatctgtgtttaactctccatttgtagaacttacaacctgtttgaaaaaaaaattttttatatatgtatatgtacacacacatgctcataaatatacatacatattaaataggttatacaaggataaacataattgttaaagtatttcaattagaaagttaatgtgaggaacacaaaacaatatgtagctgttcataactaaatacagtaattggtctagcattttattaaagattaaagtcatctaatatgcgcttttcaacttacttcctttccttattgaaatctgtgtcttctgtctccttccctctggtttttaaggctaactcctgcatgtatgtctcaatcagtttcctcttgtgtgtctatgtcctctggcaccttgctat

SEQ ID NO: 1240 - DNA, 587 bp, Homo sapiens
  MAP TO AL121876.23; EXPRESSED IN FETAL LIVER, SIGNAL = 0.82; EXPRESSED IN PLACENTA, SIGNAL = 0.74; EXPRESSED IN BONE MARROW, SIGNAL = 0.97; EXPRESSED IN BRAIN, SIGNAL = 0.89; EXPRESSED IN LUNG, SIGNAL = 0.73; EXPRESSED IN ADULT LIVER, SIGNAL = 0.73; SWISSPROT HIT: O75969, EVALUE 9.80e+00
  unsure 57
  unsure 337
tgaaagaatgggagcaaaggatacattttgttactaacgtttcaatgtacaatttcnccaatgcactttcctcagtagctgcttatatttaattatccttaaatataattgctctactgtgtataccatgacactagtcttaacgtgttagtgaagctactactattactgccttcttcttcctaaaactaggttttatatgtttgacactaactttcctgagaagaatgctcaaaataacttgttcttttccatgataggcaatgattttatctatatgtacaaccagatcaactggtttgactgaaatgattggtcaatttccatgaacttagtntaaaaaataagtagactcatttgtttaattgaataaatgaatttgactacattgcccaagtgttacctactgttatgacaactttcattgtcctcttttgttgttgacttacctgtttaattagattggccagaaagaccaagtgggagggagtagaaggacagaaactcattaatttctgtgaatgaagctattttggaatttgtatgttatggtcaatgaaatggatcctcccaaatccattcagcat

SEQ ID NO: 1241 - DNA, 564 bp, Homo sapiens
  MAP TO AC016569.2; EXPRESSED IN PLACENTA, SIGNAL = 1.2; EXPRESSED IN LUNG, SIGNAL = 1.1; EXPRESSED IN HELA, SIGNAL = 0.72; EXPRESSED IN BRAIN, SIGNAL = 0.96; EXPRESSED IN ADULT LIVER, SIGNAL =   1; EXPRESSED IN FETAL LIVER, SIGNAL = 0.95; EXPRESSED IN BONE MARROW, SIGNAL = 1.1; SWISSPROT HIT: P28828, EVALUE 3.10e+00; NT HIT: AB044657.1, EVALUE 2.10e+00; EST_HUMAN HIT: AA358264.1, EVALUE 7.90e-01
ttccttccttcacaacctggctaccaggagtcatattacaatgaaaagaggttttagaaaatattctgacaatacctagacatttattcacaaaaagtctcaaaaacagtcttaaacatggcatgtagctaggaaagtcccagtctttatccttgggccctcttttacctttgagtcgtctgttcagcattccccataaaaggcttagttgaatttagggcaagcatattctgatagcaggtgtgtccagttttgtacagggtcaggtacagggtgctgtgtgaagtggaggacgtagaagcaacttgggggtctagactgcaagcttgcaccatttgtattcagaaagctgggcttgccaatgcttatgcttcattcaggtaagggcagagtttctggtataacacccctaaccaaccatctggtttgattactactcacctcaccaattagaaactattttaaatatccattatgttagtaagcctcctggcatgggtttagttaattatatttaaatgctaagtggaccatcttagaagatgttgactctggctagggtgc

SEQ ID NO: 1242 - DNA, 571 bp, Homo sapiens
  MAP TO AL160191.1; EXPRESSED IN LUNG, SIGNAL = 0.74; EXPRESSED IN BONE MARROW, SIGNAL = 0.8; EXPRESSED IN PLACENTA, SIGNAL = 1.1; EXPRESSED IN ADULT LIVER, SIGNAL = 0.76; EXPRESSED IN BRAIN, SIGNAL = 0.77; EXPRESSED IN FETAL LIVER, SIGNAL = 0.62; SWISSPROT HIT: P38946, EVALUE 1.10e+00; NT HIT: AJ297041.1, EVALUE 2.00e-25; EST_HUMAN HIT: AI934599.1, EVALUE 4.00e-15
actgggtggcgtaaaacaacaaaaatgtattgcctcacagttctggaggccagaattccaaaatcgggtgctggcagggctgcgctccctccaaaacctgtagaggagaatccttccttgcctgtccctagcttccagtgggttgctagcaatcctgggctgggtgactccagctctgccttggttgtcacagggcgttgtctttgtgtgtctctgacttcacatagccctcttcttcttctttttgtgtgtgtctgtgtgtgtccactctgaggcacagaagtttttatttatttatttattcatttatttatttcattgataaacataatagttatgcatagttttggggtacatgagatattggatacatgtgtacagtgtgtgataatcaaatcagggtgattggaatatccatcacctcaaacatttctcatttctttgattggggacattataattcttctagctattttgaaatatacaatagattattgtttactataatttccctgctgtactatcgaatactagaacttattccttctgttgagggtgtacttttgcaccc

SEQ ID NO: 1243 - DNA, 558 bp, Homo sapiens
  MAP TO CHR22_5.0; EXPRESSED IN PLACENTA, SIGNAL = 0.73; EXPRESSED IN LUNG, SIGNAL = 0.62; EXPRESSED IN BONE MARROW, SIGNAL = 0.58; EXPRESSED IN ADULT LIVER, SIGNAL = 0.61; EXPRESSED IN HELA, SIGNAL = 0.55; EXPRESSED IN BRAIN, SIGNAL = 0.71; SWISSPROT HIT: P45533, EVALUE 6.90e+00; EST_HUMAN HIT: BG989341.1, EVALUE 1.00e-55
gtgccagacacttcacatgggttatccagtgatccttcctttgacagaataggaaactaagaattttatgtgatcaatatcctgtagccaataaaaggagggcttaggattcaaattcaggtctgtctgtcaccaaagcccatatatgccattgttcttggaggaatccttagaagccttttctcactcactcatattgttctgaaaggatgtggatataaggacaatcaaagttcattctaatgttttttgttccagtagaggggcctgacgtgggaaaggtggaacactggttgggcagtacatctgtattggtaaccatgaccctcttcacagcttcacattcagacacacttttcttcctgtagagagaagacctgagtctcaggttgcctgcttggggcaggctgacattggatttggaaactctttcctgtgcgtgcttcatggaacccagtatttaatgatgcctctgatttgaagatgctgctaatctattatcactcaacatgacattgggtgtctttgtttgttttatggaaattggctgcatcagtt

SEQ ID NO: 1244 - DNA, 531 bp, Homo sapiens
  MAP TO AL133553.2; EXPRESSED IN LUNG, SIGNAL = 0.97; EXPRESSED IN ADULT LIVER, SIGNAL = 1.2; EXPRESSED IN FETAL LIVER, SIGNAL = 0.97; EXPRESSED IN BONE MARROW, SIGNAL = 0.95; EXPRESSED IN BRAIN, SIGNAL = 0.88; EXPRESSED IN HELA, SIGNAL = 0.64; SWISSPROT HIT: P46565, EVALUE 6.50e+00; NT HIT: gi14730483, EVALUE 3.00e-45; EST_HUMAN HIT: BF724457.1, EVALUE 5.00e-39
ataacgtggctgagggtgacttgatttgttctgcataagattaagtctaatggccaaatattttctataaaattaaagctgatttaaagtcttgtttcaagaatgggatggttttattattgttacatttttaaagttactgaaatgtgtataatgcaagcctaagttagtggtgagatgaaagagctgttttctgatacttttattttattttcagcaagggtacctacggtacctgaaaacaacgatggcatggaaaacacttcccatttacctgttgttgctgctgtctgttttcgtgattcagcaagtttcatctcaaggtagcttaaccatcgaacatacttttatttaacaactattgctaatcattcagtcttgatttttataacaacggaaatatatttctaaaaatttatatttgcttgagtttaatatactgtacaaccttaaaataatatataacatgtagcctgtttgtaagtgctttggaattctcatctttttctccttttgagagttttgagcttg

SEQ ID NO: 1245 - DNA, 590 bp, Homo sapiens
  MAP TO AC008432.2; EXPRESSED IN PLACENTA, SIGNAL = 0.48; EXPRESSED IN FETAL LIVER, SIGNAL = 0.4; EXPRESSED IN ADULT LIVER, SIGNAL = 0.47; EXPRESSED IN BONE MARROW, SIGNAL = 0.43; EXPRESSED IN BRAIN, SIGNAL = 0.51; EXPRESSED IN HELA, SIGNAL = 0.51; SWISSPROT HIT: P34576, EVALUE 4.40e+00; NT HIT: gi15791399, EVALUE 2.20e+00
attggccaactgaacattcctacttaagactataaatccacatgggagaaaacaaagcatagaagacaaagcttattcacagtggcatctgtgctcttaggagtttatggatactatgattggcaatcatagttataagaagaccatgaacaagcttgggtaaacctacctgactgtgctctgtgatgtcttcctgccttgttttctgtgttcaggactttgattcgatgaactgcacggttttctgcaaataaattcattttctgcttaggttagtcagatggatggactgatacacaaatgattaaatcaatgaatgagtaaaagcaacaaagcatcaaagaaagaacaggctcaatttccactacttttggcattctttctcttcctctttccattacttgacttcccaatcttttctgtaatagcaagtaatttttaaaacaaataaacattctagttttctaaaaacccttagggttcttatatcatgtacaaaaataatttataacatattgacttaataattttctactagcctgtgaactagttgaagtagaagctctgtatcctctcctttgggctgattt

SEQ ID NO: 1246 - DNA, 539 bp, Homo sapiens
  MAP TO AL138735.2; EXPRESSED IN HELA, SIGNAL = 1.9; EXPRESSED IN BRAIN, SIGNAL = 3.7; EXPRESSED IN FETAL LIVER, SIGNAL =   3; EXPRESSED IN HEART, SIGNAL =   3; EXPRESSED IN BONE MARROW, SIGNAL = 3.3; SWISSPROT HIT: Q02025, EVALUE 3.00e+00; NT HIT: gi15812223, EVALUE 3.00e-70
attagacgtggggtgtgagggaaagaggaaagccatgatgacttgggtttagagcctgaataaccagaatgaagttgaacgtcttggtctcctaagtcctcttctcccccgggaccttcctcagcagcctttgctgggtcctcgtcctgggtgggcccatcagctgctgggttcttcagggctccatcccaggtcactcctccgacctctccctgattgatactcactgttcccatgctgaagccagatgtcctgactgtgctctttgggtcactcctgcaggccctggctgtggagaatgctgaaggaagaagacgcagaagcaggacgaccctgaaagattcagcctcttcatcctcaaacaggtcgcttctcgggagttcttggtgttggaatattttacagcaaagcagtcgtaagaccatttcttggacccatatggtgtggagaatgccccaggaagtggaggagggctgctctgggcctggacatccattaatttctagaaaattttctctgggaaatggtcagggattgtg

SEQ ID NO: 1247 - DNA, 576 bp, Homo sapiens
  MAP TO AC011792.5; EXPRESSED IN BONE MARROW, SIGNAL = 0.59; EXPRESSED IN BRAIN, SIGNAL = 0.71; EXPRESSED IN LUNG, SIGNAL = 0.72; EXPRESSED IN ADULT LIVER, SIGNAL = 0.71; SWISSPROT HIT: P33599, EVALUE 1.90e+00; EST_HUMAN HIT: BF959593.1, EVALUE 0.00e+00; NT HIT: AL163247.2, EVALUE 4.00e-08
cgatcatggcatctcacatctgtttgttttgtttttttaattttttaattcttttaaacattttctataggtgcatatatttatgggatacaggagatgttttgatacagggatgatacggacatctcacatcttatctagaccaagatgtaagatacagacatctcacatattatctagatcaagatgtaagatacagacatctcacatcttatctagaccaaacctcataggcaaagtaacacatttttctatattttctgtacagggttcaaagttagtatcaccaccattgcatccctaatagcttagataactggctgtaaaacagtacctcaaacccatctatcccggtctgcatggagaaaaccaagttttaaagaccaaggaaggcggttactcactgttagagctagcagcttcccataggtgagatgagcagggatgtggtcagtcttggatctcagtgattccatataccaatgctctgcttcggggagtttgcttaaacgcatatatgcttcacctggaaagagaattaatcatgaaggtcaaagggaggatacagcttttcca

SEQ ID NO: 1248 - DNA, 538 bp, Homo sapiens
  MAP TO AL138691.2; EXPRESSED IN BONE MARROW, SIGNAL = 0.89; EXPRESSED IN BRAIN, SIGNAL = 0.94; EXPRESSED IN FETAL LIVER, SIGNAL = 0.88; SWISSPROT HIT: Q9LC48, EVALUE 8.60e+00; EST_HUMAN HIT: AI733779.1, EVALUE 1.90e-01; NT HIT: gi16329170, EVALUE 3.30e-02
gaaagacagtaagggcgtgccagccctcagtgtcggtgcggggcgcgcggacccacgcacacatctcccccggacaaacgcagggtaattttttttccattgtcggcagctgcagtttgcaggagatccttgtctgtctggctctaatctcggagacaaaaaccccacatgacttcactcgatggatcttaatctagagaaacactatgtcatttgcaaattatttcttaatcggactaagctatttagaagtgcgagtggaggagtgagtgttttggaagccgccagagctcagatgttgactaggaacactcttcctagcagcctcgctttcccccaaaggcacgttggtctaagtgtcaaaagcaaaattaagcaggtacgtttctttacttggggatttttaaaaaatttacttttgagaaactgtattcccttggagtttaaggcaatttagttcagtcctccaagatgctggtaacaagaggaagttggtccttgacatctttaaaaaaccgggtttgtgcaggaatttcgt

SEQ ID NO: 1249 - DNA, 529 bp, Homo sapiens
  MAP TO AC018432.4; EXPRESSED IN FETAL LIVER, SIGNAL = 0.51; EXPRESSED IN BRAIN, SIGNAL = 0.47; EXPRESSED IN PLACENTA, SIGNAL = 0.44; EXPRESSED IN ADULT LIVER, SIGNAL = 0.47; NT HIT: L78810.1, EVALUE 7.90e+00; SWISSPROT HIT: P35689, EVALUE 1.10e-01
gaggaaggccgaaaaatagggtgattaatgtttaataactagttcagcaagaggggaagaagcggtgattgacagcgtttgacgattgctctggagtaaatactcccaccgtgccgttttcagagaagcagcatgacttcgctggggaaagacgtgcagtacctcgccactgtgtagtgttcctaccgtacagacaccacagacacgattaacctcgagagcatagatattaggaagaggtaatagaataattgatgatgagttttgagtgtttatcaactttgcttttaatatacctttgtctttaatataatctatttaatcataagattctaacttaaatttaaatgatggttatatataacaatcagctacaaaaaatgctgaaattcaggtgccagtacaagccgtcgccagcacaccactgggtggtggctcagagcatcagggacctgtaccagcccctgctggcttccctgccctgccccactctcatccaggccatgcctgtccctccttccaaatgtca

SEQ ID NO: 1250 - DNA, 557 bp, Homo sapiens
  MAP TO AL160168.1; EXPRESSED IN PLACENTA, SIGNAL = 1.9; EXPRESSED IN LUNG, SIGNAL = 1.5; EXPRESSED IN BONE MARROW, SIGNAL = 1.2; EXPRESSED IN ADULT LIVER, SIGNAL = 1.6; EXPRESSED IN HELA, SIGNAL = 0.69; EXPRESSED IN BRAIN, SIGNAL = 1.1; NT HIT: AJ006345.1, EVALUE 2.00e-09; EST_HUMAN HIT: AA714381.1, EVALUE 2.00e-07; SWISSPROT HIT: P24896, EVALUE 1.60e-01
tattgctgctgggtaggtccatgtctgagctgatgtcaaatgtgatgatagaggtatgaggaaatttcctatggagaccttgctgagggggaaggggcctaccgtgatggtatcatcactatggagctttcacaaatctaaataaatttctttccctaaaaagtatctactatttttccttacatgaccatttacaatgacattctgggaaaataagacttcatagaggaaagtgttaacatactcttccataaaaaataaaagtctgaagaaggagtaagatttggtgagtgtcaccatcagaaatatccatggtgacacaatgagagaacgctctacattggttaggttggttatctcaaaaagaaagagaaagaaaacaataagtgttggtgaaggtgtggaagaatttgaattcatgtgcattgctgatgaaaatataaatgatgtacgcacttgaaaaaagggatggtgattccttaaaaacattaaacctataattaccatacaatccaggaattctatttccggatatatgcccaaaagaactgaaagca

SEQ ID NO: 1251 - DNA, 553 bp, Homo sapiens
  MAP TO AL137183.1; EXPRESSED IN FETAL LIVER, SIGNAL = 0.49; EXPRESSED IN PLACENTA, SIGNAL = 0.47; EXPRESSED IN BRAIN, SIGNAL = 0.66; SWISSPROT HIT: P25805, EVALUE 4.00e+00; NT HIT: AJ235272.1, EVALUE 8.20e+00
ccggcattagccataatttcttcacttttcaaaacctaagtaacatggctgtatttctttcccttgatttattaattataaatatatagtaaatttattattttgaaaaagaaggtaaactcgttcatgccaactcttatcttcaaatacatagtatatcttatattgtatgtactttatcataattattagttgattatgtagtttcattacagtgaatatataaatattgtttgctaaataagaaagcagtgtaatatgttgcatttcctgttttttgaaacctcattgttttctctagagttaattattgtcttagttttttcacttatataatttcttctatttacaaatgttaacaaatattctatcagatctttcattatcttgtagtaccaaatgttgctgtggaaaaatatgatgttattctgattgctccttcctatgaagtgtttttctctctagaagttagtgaatcctctctctatcactggtattatgatattgcataataatgtgcattggtgtggtaactttcggtatttcctgtgcc

SEQ ID NO: 1252 - DNA, 560 bp, Homo sapiens
  MAP TO AL133543.2; EXPRESSED IN BONE MARROW, SIGNAL = 0.9; EXPRESSED IN BRAIN, SIGNAL = 1.1; EXPRESSED IN HELA, SIGNAL = 0.93; EXPRESSED IN LUNG, SIGNAL = 1.1; EXPRESSED IN ADULT LIVER, SIGNAL = 1.2; EXPRESSED IN FETAL LIVER, SIGNAL = 0.94; EST_HUMAN HIT: BG111179.1, EVALUE 4.00e-52; SWISSPROT HIT: Q09282, EVALUE 9.20e+00; NT HIT: AL163282.2, EVALUE 3.00e-24
ttcaacgttggatgatgcagggttagacccacctctctttccttcttctcgactcacagtttttatccttatctttgtttctttttcttttatgtgggcttctactcctatcccttctatgtcgtgaacactcagcatccaaatagcttccaccagactgccgtgaatctactgaagctgatcgcctttcttcattcctaaaacacagaaaagaatgttaatcagtttgtgttaccactggtctccagtatacgtacacagacacaccagtctaaagtgtaatattctatatcaaaccaatggtagatatggtctaaatatgcacaatcttataacccatataaaaggacaaataaacacagctcttaacccatttatgcctgaggttgcaatttttttaatttttgcaatgagaccttggcgatgaccttgagcagtaggacataaataactcccacatgcttggtgttcccataatggaatactaggcataaatgttagtatgttttgctatttgaatatttcactaatatggctatcccctgaaaactgtcaaaggg

SEQ ID NO: 1253 - DNA, 584 bp, Homo sapiens
  MAP TO AL137863.3; EXPRESSED IN BONE MARROW, SIGNAL = 2.7; EXPRESSED IN HELA, SIGNAL = 2.2; EXPRESSED IN BRAIN, SIGNAL = 2.2; EXPRESSED IN HEART, SIGNAL =   2; EST_HUMAN HIT: AI560324.1, EVALUE 5.00e-79; NT HIT: AF228703.1, EVALUE 1.00e-14
agcagagcttccaagctgacatgtagactcatgagcaataacaatacatgattcttaagccaatgagttggggggtggggggcgttggctgttacatagtcattttttgaccatttactataggccaagctctgtgccaagaggttttcacagagtgcttcattaaattcatacaaccgctccacaaagtagaaattatcatcttcattctctagaggaagaaactgagatttaaaaaaattaaataacttgcctcagtcacacagtaagaagtggatctagatttgaagccaagcattctgactctacaaccatattagaatctttcttctggtagccttttttttttttctttttccacagagctgtttggctccaaaattttaggtctttttctttttagattcctgtcatagtacctgctacaggggtccccaacccccaggccatggaccagtaccagtccgtggcaggaggtgagtggcgagcaagcattgcctcctgagctcacctcctgttagatcagtggtggcattagattcttataggagtgtgaaccctattgtgaattgtgcatgtgaggg

SEQ ID NO: 1254 - DNA, 535 bp, Homo sapiens
  MAP TO AL136361.2; EXPRESSED IN BONE MARROW, SIGNAL = 4.7; EXPRESSED IN BRAIN, SIGNAL = 5.8; EXPRESSED IN HEART, SIGNAL = 6.5; EXPRESSED IN HELA, SIGNAL = 0.92; SWISSPROT HIT: Q01682, EVALUE 8.60e+00; NT HIT: gi14771962, EVALUE 1.30e-01
tccctagcagagctcaaacgacctgctgccgcatcgggcattgttctctccctcctcacccagaggaaagtccccatggcccattttctgagctgtgcttttccactctttcgtaatctattattgtgaccttgagatgcagagagagaaggctttggcaggacgcactgcctttggaaccagagctgctgctatctgtgccctggaccacatgctccatggccatggccgtgccagtcctactggttcctctgcaaccgccacccaagtcagcgcctgcaggagcgtggacactgagaggactgggacagcgaggaaagtgtgcttacagaagggccgtgtgtgtgtgtgtgtgtgtgtgtgtgtgtgtgtgtgttagagatgcacagaggtacagacacaggaaagaaagagaccaagagaatctgcctttaaagtagacttcaagttatttgtttctaggactgtacctgatagatttgattctcaccaaactcagttgcaaaaactctatccagggaaaggaatctgcaag

SEQ ID NO: 1255 - DNA, 589 bp, Homo sapiens
  MAP TO AC022117.2; EXPRESSED IN BRAIN, SIGNAL = 0.59; EXPRESSED IN HELA, SIGNAL =  10; EXPRESSED IN LUNG, SIGNAL = 4.4; EXPRESSED IN ADULT LIVER, SIGNAL = 7.2; EXPRESSED IN FETAL LIVER, SIGNAL = 4.1; EXPRESSED IN BONE MARROW, SIGNAL = 0.81; EST_HUMAN HIT: BE562878.1, EVALUE 0.00e+00; SWISSPROT HIT: P05783, EVALUE 5.00e-66; NT HIT: gi4557887, EVALUE 0.00e+00
ttctccaccaactagcggtccctgggctctgtccaggcgaccagctacggcgcccggctggtcagcagcacagccagagtctatgcaggcgccgggggctctggttcccggatctctgtgtcccgctccaccagcttccagggcggcttggagtccgggggcctggccgcggggatggccgggggtctggcaggaataggaggcatccagcacgagaaggagaccatgcaaagcctgaaagactgcctggcctcctacctggacagagtgaggagcctggagaccgagaaccggaggctggagagcaaaatccggtagcacttggagaagaagggaccccaggtcagagactgatgccattacttccagaccatccagaacctgaggattcagatcttcgcaaatactgtggacaatgcctgcatagttctgcagattgacaatgcccgtcttgccgctgatgactttagagtcaagtatgagacagagctggccatgcgccagtctgtggagaacgacatccacgggctccgcaatgtcattgatgacactgtcactcggctgcagctggagacagagatcgaggctg

SEQ ID NO: 1256 - DNA, 584 bp, Homo sapiens
  MAP TO AL133520.2; EXPRESSED IN ADULT LIVER, SIGNAL = 1.8; EXPRESSED IN HELA, SIGNAL = 1.1; EXPRESSED IN FETAL LIVER, SIGNAL = 1.5; EXPRESSED IN BONE MARROW, SIGNAL = 1.5; EXPRESSED IN LUNG, SIGNAL = 1.9; EXPRESSED IN PLACENTA, SIGNAL = 2.2; EXPRESSED IN HEART, SIGNAL = 1.7; EXPRESSED IN BRAIN, SIGNAL = 1.6; NT HIT: J04700.1, EVALUE 2.00e-03; EST_HUMAN HIT: AV727463.1, EVALUE 0.00e+00; SWISSPROT HIT: P81683, EVALUE 3.30e+00
tttgtgggaatcaggaaagcacgccatgacccaactacttcattacttaggaaataccaaactgcacaataattctgacttccgtatcttacaatgtgaggtttttagtcctagattagtttaatttatatccaaatggaccattggctaaagatgaaaaatgaaaagggtagtaaaggaggagctcaaaaataataattctgaaaaattcttcctaaatccaaagaaattagtgtttcaatattcccattttatgaatgaacaaactagtgaagaaggtacaaaatccttggctgaatgtaagaatgtgagaggctttttgtcttgctttgttttgtttttggtagatctgttttcttgccatttgcttcttttccccttccagtcctcatgaatccagtgatccgagagctgtggttattaaagacattcttaagcttctttcttgtgtatctgtgcatacctcatctcactctgtgcccctctcagctgcacttgaaccaaggtacttctgatctctcagtgtcagtttgctcatgtgtaaaatggggacaataatacccaccttgtttgctttcagagcc

SEQ ID NO: 1257 - DNA, 585 bp, Homo sapiens
  MAP TO AL133472.2; EXPRESSED IN PLACENTA, SIGNAL = 4.6; EXPRESSED IN LUNG, SIGNAL = 4.7; EXPRESSED IN ADULT LIVER, SIGNAL = 3.8; EXPRESSED IN HELA, SIGNAL = 2.9; EXPRESSED IN FETAL LIVER, SIGNAL = 3.8; EXPRESSED IN HEART, SIGNAL = 3.3; EXPRESSED IN BONE MARROW, SIGNAL = 4.3; EXPRESSED IN BRAIN, SIGNAL = 4.2; NT HIT: gi14750816, EVALUE 2.00e-87; EST_HUMAN HIT: AW131369.1, EVALUE 0.00e+00; SWISSPROT HIT: Q92562, EVALUE 2.00e-25
ccttccaggactaaaacctcctgaaaacctaagcatttatgagatttctgtgacaacagttcattatctctaaatgtgaggacaggagttattattaaaaacatggctccacacacatgtaataggtggtttaggcatcatagttgaaatgtcctgagaccagtataagggcacagatcctctaacttgtacatatgaagaataacttcctgcagtgaaagacatcacagaagcatcgcagagtatttgttcagtctccacttcatttgcaacatcaccctgaaaagaaaggtgcattgaaaaatattttatgttattagaaatgtttaatgaaataactttcaatgaagttataattcctattctttcaatgaagttataattcctattctttgaaagtcttgagaggtaaatattgatcaatattcaatatgcacattagaaaagcaaaaccattaaaatataataaagaaggcaattaaaagtagcagagaatagactagaaaaaaacaaattaatctctaataatacaagtcagataggaaacagctggtttaaataaatgggagagagggaaagaaatga

SEQ ID NO: 1258 - DNA, 532 bp, Homo sapiens
  MAP TO AC008432.2; EXPRESSED IN HELA, SIGNAL = 0.6; EXPRESSED IN BRAIN, SIGNAL = 0.56; EXPRESSED IN BONE MARROW, SIGNAL = 0.62; EXPRESSED IN PLACENTA, SIGNAL = 1.2; EXPRESSED IN ADULT LIVER, SIGNAL = 1.1; EXPRESSED IN LUNG, SIGNAL = 0.96; SWISSPROT HIT: Q92213, EVALUE 6.50e+00; NT HIT: AL163206.2, EVALUE 2.00e-19; EST_HUMAN HIT: BG007273.1, EVALUE 2.00e-13
aagggtgtgagggaactgtgtggggagatgtatgtgatcagtactgtttgaataaatgcgtaacagccagttctctgggaaactatgtgcatatatacatacaaaagtttattataagttttactgatataagaaatatctaggaattttagataggagatggagaaagatggcagactagaaagctccaccgatcactcccccaacaaggacaccaagttaacgattatctgtacagaaagaaacaccttcataagaaccaagaaacaggtgagcactcatagtacctggtttaacacatcactgaaagaggcactgaagagttagaaataccaatcttgaatcactgataccaccccttcccaacccctggcagcaacagcagcatggttcagagtgcgtctccagacactggaggagggagaacacaacaattgtgaggcattgaactcagggctgttctgttagagcagaaagaaaaagcaaaccaaactacctgacacccacccacagggggagcatttaaaccagt

SEQ ID NO: 1259 - DNA, 588 bp, Homo sapiens
  MAP TO AL160191.1; EXPRESSED IN FETAL LIVER, SIGNAL = 0.55; EXPRESSED IN BONE MARROW, SIGNAL = 0.51; EXPRESSED IN BRAIN, SIGNAL = 0.48; EXPRESSED IN LUNG, SIGNAL = 0.55; SWISSPROT HIT: P01362, EVALUE 4.30e+00; NT HIT: AL163278.2, EVALUE 7.00e-13; EST_HUMAN HIT: BE221470.1, EVALUE 4.00e-09
tcctcacaaggttgtccctctgtctgtctgtgtcctaatctcctcttcttataaggatagcagtcatagtggattagggcccacactgacggcactgttttaattttattacctttttaaagaccctgtctcaaaacccaggcacattctgggtactaagggctagggcttcaacacacaagttttgggacacacaattcagtccataaaagagtctgtctagttcttaccaagctctgtgactgggctgaatcctgtagcttctcgggtcctgagtttcttcccaacttgaaaatgaggtttgtggctcttgctcccaatgctgatgttacacagcttactttccatcttccttgtgaacatctccttgggttccagtacagctagatataagtaacaatggcagaaatgcaagtacggtgtcattacatttaatgttttccaaccctgtatgcatgtagtggggagaaaaaaagaagtgagaatgtccagagttgaaagcagtctgagacttcataggccacgtgaaggttggctgtagaacttaagatgggagagaagcagggttgggggagaacaaaagtaggg

SEQ ID NO: 1260 - DNA, 543 bp, Homo sapiens
  MAP TO CHR22_2.0; EXPRESSED IN FETAL LIVER, SIGNAL = 1.2; EXPRESSED IN LUNG, SIGNAL = 1.5; EXPRESSED IN BRAIN, SIGNAL = 1.1; EXPRESSED IN HEART, SIGNAL = 1.2; EXPRESSED IN PLACENTA, SIGNAL = 1.5; EXPRESSED IN HELA, SIGNAL = 0.61; EXPRESSED IN ADULT LIVER, SIGNAL = 1.8; SWISSPROT HIT: O60755, EVALUE 3.00e-55; NT HIT: AF129513.2, EVALUE 0.00e+00
ggattccagcttctcttcccaggtgcccgtctgatggggagatggctgatgcccagaacatttcactggacagcccagggagtgtgggggccgtggcagtgcctgtggtctttgccctaatcttcctgctgggcacagtgggcaatgggctggtgctggcagtgctcctgcagcctggcccgagtgcctggcaggagcctggcagcaccacggacctgttcatcctcaacctggcggtggctgacctctgcttcatcctgtgctgcgtgcccttccaggccaccatctacacgctggatgcctggctctttggggccctcgtctgcaaggccgtgcacctgctcatctacctcaccatgtacgccagcagctttacgctggctgctgtctccgtggacaggtgcgctgtgcctggggcctggctgggcagggctgtgggggcgggggttgggggaggagtcctgaacagatcctcactggccttaggaaggagagagtgggggaccagaaagggaggtgggtgggaggaaacaaaagctccct

SEQ ID NO: 1261 - DNA, 509 bp, Homo sapiens
  MAP TO AC020721.4; EXPRESSED IN BONE MARROW, SIGNAL = 0.92; EXPRESSED IN BRAIN, SIGNAL = 0.89; EXPRESSED IN PLACENTA, SIGNAL = 0.82; EXPRESSED IN LUNG, SIGNAL = 0.9; EXPRESSED IN HELA, SIGNAL = 0.68; EXPRESSED IN ADULT LIVER, SIGNAL = 1.2; EST_HUMAN HIT: AW615476.1, EVALUE 4.60e-02; SWISSPROT HIT: P11344, EVALUE 2.40e-01; NT HIT: AF016184.1, EVALUE 1.20e-01
tgcacttctgtgctgaggtccaaaattctgacgggcagcttctttcccacagccacaactccttccaagttctctacccatacttctgtcacttgcccatgcaccaaactcttcagttacccatttaagcatccctctttcctgatgtaggttgtctgacagagcatgctcagggaacagagcatggttagatatgctctttggaatgataactctggccaccatagtgtgaagaatggacaagaagcttcccagttctgaggcagagtggaagttcatgcaccaaaagggtcagatgagaaaaatagagacccaaactaagacagaagtgttgagtaaggtgagaggggagagaaggaagcttcatctatgggatgttgtgatggcatggatttgtaagttgaggaagtgagggaaatcggggatgactttgtgcagccgaacagacagcctcagagctgcagaagttacacactgggccagccaacaggaagcccaaagaaaggatc

SEQ ID NO: 1262 - DNA, 507 bp, Homo sapiens
  MAP TO AC024066.3; EXPRESSED IN BONE MARROW, SIGNAL = 0.46; EXPRESSED IN PLACENTA, SIGNAL = 0.38; EXPRESSED IN BRAIN, SIGNAL = 0.4; EXPRESSED IN FETAL LIVER, SIGNAL = 0.41; EST_HUMAN HIT: AW152651.1, EVALUE 1.80e-01; SWISSPROT HIT: P11369, EVALUE 2.00e-04; NT HIT: U66061.1, EVALUE 1.00e-04
gccaccacccatatcaagacaccaaacatattcagcaacccagaaatcacttatatctcttttcattccctattcccatcctcctccataagagaaaccactagctgacttccaacaccattgattcgttttgtctatttttgaactttatataaatgtaatcatgcagtacgtaccgttttgtgccttgttgctttcactcaaaattatgtttgtatgaaatccatcaatgttgttatgtttagtagtagttttgttcattttcattgctatgttattttccattctatcagtgtgctataatttgtctatccatatttttaccaatgcacatttgggttatttccagttttggctactgtgaaaaaggaggctataaacttgtatttcctttcgtaaaacataggtaagcatttctgataggcctatatctagaagtagaattactcagtcatagggtaaacatgtgttcaactctggaagatacggtcaaacaaatttccagtg

SEQ ID NO: 1263 - DNA, 548 bp, Homo sapiens
  MAP TO AL159176.2; EXPRESSED IN FETAL LIVER, SIGNAL = 0.64; EXPRESSED IN BONE MARROW, SIGNAL = 0.65; EXPRESSED IN BRAIN, SIGNAL = 0.75; EST_HUMAN HIT: AW896241.1, EVALUE 5.00e-45; SWISSPROT HIT: P47035, EVALUE 2.30e+00
atgaagctccagatggcaacagctaccaggatgatcaagtaatacttttattcttaaataactataagaagttatttaaaaatagttgtcaatttattaattaatatatttatatttaatgttttgcatgacaggatgaccttaaaagacgttcaatgtcaatagatgataccccaaggggtagctgggcctgtagtatctttgacttgaaaaattcacttcctgatgctttgcttcccaatttacttgatcgaactccaaatgaagaaatagaccgtcagaatgatgaccaaaggaaatcaaaccgtcacaaagaactttttgctttgcatccatcaccagatgaggtatagatgtttgcatataaagaagcaaatgattattaaaattgatcttttgggattatgattgatatatagtattacaaaatgtagaggataaagcaactgaaacagctgtaatttttataaatgaatacattttatactagtgaatttactattcttaatgagtaagttataatcaaatgacttctgtctgtggataaa

SEQ ID NO: 1264 - DNA, 510 bp, Homo sapiens
  MAP TO AL136537.3; EXPRESSED IN BRAIN, SIGNAL = 0.58; EXPRESSED IN FETAL LIVER, SIGNAL = 0.52; EXPRESSED IN PLACENTA, SIGNAL = 0.44; NT HIT: U76669.2, EVALUE 3.10e-02
tgccactctgtccaattctgtgggtctgtcaggcctctgctgctcccacttctccttctttctcctggatcccgatcttttcagcatcccctccagtgtcctctttcacctgccacaaaaaaaataaaaacaaaacaagcccacatttaaaacaaattattagagtcagatattttctcctttcttaagacctagagagcttgtcgattaaacaaataaacaaataaaatatcacacacagtccctcaatctccattcccttgctcttggtgagggtgatgagcaagacaatatctgccttgtaaatcagcaagacggaaatatacacatacatatacatattcatatattcatacacatatacctacatatatacttgtacatatgtatatgtttctatgtatatatgtgtgtttgcatatagaatatgtgtatcatgttacagaggtaaaaactgttataaaatgggaagttttaccttggctcttaccagggagtgattttagggca

SEQ ID NO: 1265 - DNA, 565 bp, Homo sapiens
  MAP TO AL136147.2; EXPRESSED IN BONE MARROW, SIGNAL = 0.99; EXPRESSED IN BRAIN, SIGNAL = 1.1; EXPRESSED IN HELA, SIGNAL = 0.84; EXPRESSED IN FETAL LIVER, SIGNAL = 0.74; NT HIT: gi15920163, EVALUE 3.40e-02; EST_HUMAN HIT: AV723313.1, EVALUE 1.00e-101; SWISSPROT HIT: O51761, EVALUE 3.10e+00
agaccctttggaatgctgtgtggaaaatgaatgggtatggtgggagggtaggagtggaggtgtagcaccaattagaaggttggggtcaacatagatgcgtaacaggctgtgactaaggggggtgaattggaatccatgttgaaggtagaagtaatagaacttatgaatgatttttaactctggaatcggagaagagtagcgagagaaggagagaaagccacttgttttctatgtatgccctgtatatcaggtagaataaattgatcttctttgtccttcattcttagttgcctatattggcatcatcggtggttagcctctatttcctcgaactcacagatgtcttcaaacctgtgcactctggatttagctgctatgaccggagtcttagcatgccgtacattgaaccaacccaggaggcaattccattcctcatgttgcttagcttggcttttgctggacctgcaattacggtaagaattacccccaaaattgtgtttatctgtcctggaaaactaaaaatcaccacatttgtataataaatgggttcaaagcaaacaaaacg

SEQ ID NO: 1266 - DNA, 521 bp, Homo sapiens
  MAP TO AL160058.2; EXPRESSED IN PLACENTA, SIGNAL = 1.5; EXPRESSED IN LUNG, SIGNAL = 1.5; EXPRESSED IN BONE MARROW, SIGNAL =   1; EXPRESSED IN BRAIN, SIGNAL = 0.95; EXPRESSED IN FETAL LIVER, SIGNAL = 0.98; EXPRESSED IN HEART, SIGNAL = 1.5; SWISSPROT HIT: P48443, EVALUE 7.00e-31; NT HIT: gi14735348, EVALUE 2.00e-86; EST_HUMAN HIT: AL567267.1, EVALUE 3.00e-86
cattccaacatccccaattcaggatcataatgattcccctttcatagatgagtaaattgaggctcatgtgggtaataaactttcccactgttgtcctgggcattatggtaacctctgcatgtcctgctgcatgtcagctgtgcaagaagaaagacagaggagccgagagcgagctgagagtgaggcagaatgtgctaccagtggtcatgaagacatgcctgtggagaggattctagaagctgaacttgctgttgaaccaaagacagaatcctatggtgacatgaatatggagaactcggtatgtgctcttagacacacatgtgtgttccatttcttgggtagggctggaaatgggagaaaggggtgtatttgagtcctgggacctgtgcctcacagtactttgttcctttttcagacaaatgaccctgttaccaacatatgtcatgctgctgacaagcagcttttcaccctcgttgaatgggccaagcgtattccccacttctctgacctcaccttggagg

SEQ ID NO: 1267 - DNA, 578 bp, Homo sapiens
  MAP TO AC022247.2; EXPRESSED IN FETAL LIVER, SIGNAL = 0.88; EXPRESSED IN PLACENTA, SIGNAL = 0.92; EXPRESSED IN LUNG, SIGNAL = 0.86; EXPRESSED IN BONE MARROW, SIGNAL = 0.8; EXPRESSED IN BRAIN, SIGNAL = 0.85; SWISSPROT HIT: P57273, EVALUE 5.60e+00; EST_HUMAN HIT: AI920819.1, EVALUE 0.00e+00
tgtgattttgattgcccttgtttactttcaaaggaaaagcaaaggaaaaaaagaagaggaaaaagtgaaagaggaggaagaggttatggtggtaccaaaatttgttggtgaaggaagctctgacaaagaatggtgtcctccctctgaccctgatttctctatgtatgtgtatgaggtgaccaaatcaatactgccaataaccaatattaaggaacagattgaggatctggcaaagtaagttgtctatgtatatatgtgtttttaatttctgaaaaaattttagtgtcatatacattttagccatgttttagacaaatacaccataaataaaattgaagtttacagcactctgactctgacacagaaacacaatgaattggaaaagtcctcaacttctatttaggtcatacgttcactaagaatcagagatagcagctggaaattgcttcaagaaaaatgcctgtcattttcttcagctagaccatgaaaagcatctttcaatgtgatcctgcagaagttatgaatgaatcaaaagtttgaagattaaatcatcccttaggtggatggggtgttcataa

SEQ ID NO: 1268 - DNA, 513 bp, Homo sapiens
  MAP TO AC017072.4; EXPRESSED IN BONE MARROW, SIGNAL = 1.2; EXPRESSED IN ADULT LIVER, SIGNAL = 1.5; EXPRESSED IN BRAIN, SIGNAL = 1.2; EXPRESSED IN HELA, SIGNAL = 0.84; EXPRESSED IN FETAL LIVER, SIGNAL = 1.3; EXPRESSED IN LUNG, SIGNAL = 1.2; EXPRESSED IN PLACENTA, SIGNAL = 1.2; SWISSPROT HIT: P43681, EVALUE 2.10e+00; NT HIT: AY052369.1, EVALUE 4.90e-01; EST_HUMAN HIT: AI624841.1, EVALUE 3.00e-65
ttgagccagggaggtaactgtaggaaaacaggtattggctcattaaatatagacatgctctgtgcttcctggcctaatatattaatattttcatttccgatgaaggccaattttcctaatggtgagaacaaaagaatcttattgggcaacattagtataaattcaacacatctgcccagagacttaatgtggattatggatagaaagagcaggaacgccctgcatcctgacatcagatttttaagtcctccctggcaaagttaataaatacttaagcagggcatcccttggcaggtcctttctggcttcctcgttttcctcagatggatctgaatgctcagcatgctaattcccaggctgcagacctaagagggggatcggcatgtcttaccaggccattagacaggctcctgccggggcgacctcagggagctcctgaatcggactgaatcttgcctgtctccccacatgagccaattaaatggacccctgcccctgatggtgaagtgaggt

SEQ ID NO: 1269 - DNA, 578 bp, Homo sapiens
  MAP TO AC011734.4; EXPRESSED IN FETAL LIVER, SIGNAL = 0.38; EXPRESSED IN PLACENTA, SIGNAL = 0.45; EXPRESSED IN BRAIN, SIGNAL = 0.35; SWISSPROT HIT: Q9HJ95, EVALUE 5.60e+00; NT HIT: gi15920163, EVALUE 2.20e+00; EST_HUMAN HIT: W72949.1, EVALUE 8.10e-01
aatttgccttccatcttatgcaaatttacctctatttctttgtcttcttcttttctttcttaagcattttcattcctatagagtaagtaaactaacaaataacttctatagttattgaatatatcctctttaactttctctctgttcttcctcctttcattctctgttctttctacacagggactgatttcaaattattgcctctgaactccaaatttactcttcattgtctgctctgtgaaaatggagcttgactctattaatattcgtcctttgccagctagcaggatgttactctttgtagtagaaagcactagagagacatttcgaggggtttctcttacttttttcagtctactcagatttcccacttctgcaatgcacatagttcctctgacatctggcttctgcagtgtgagcagtttttctggggccaggctttcaacacctgcttaaacagatatttggctttatttacttattcacttaatgtttaatttttttttaacatttaagagagaaatgtaatatttatttagttttcttagttatgagtggattttcatggctaaacatga

SEQ ID NO: 1270 - DNA, 548 bp, Homo sapiens
  MAP TO AL160002.2; EXPRESSED IN BRAIN, SIGNAL = 5.3; EXPRESSED IN FETAL LIVER, SIGNAL = 6.6; EXPRESSED IN LUNG, SIGNAL = 6.3; EXPRESSED IN ADULT LIVER, SIGNAL =  18; EXPRESSED IN BONE MARROW, SIGNAL =   4; EST_HUMAN HIT: BI861056.1, EVALUE 0.00e+00; SWISSPROT HIT: O00483, EVALUE 5.00e-40; NT HIT: gi14750620, EVALUE 0.00e+00
tggtggctaggttggttctctcctttccaatcagagacctctgccgcaaacatgctctgccagatcctcggtcaggccaagaagcatccgagcttgatccccctctttgtatttattggaactggagcttctggagcaacactgtatctcttgcatctggcattgttcaatccagatgtttgttgggacagaaataacccagagccctggaacaaactgggtcccaatgatcaatacaagttctgctcagtgaatgtggattacagcaagctgaagaaggaatgtccagatttctaaatgaaatgtttcactataacactgctttagaatgaaggttttccagaagccacatccgcacaatttttcacttaaccaggaaatatttcttctctaaatgcatgaaatcatgttggagatctctattgtaatctctattggagattacactgattaaatcaataaataactgaaacttgaaaaataaaataaaataaaattctatgaaacaaaatagcacaatacttacacccccaaaacatcctgctaaa

SEQ ID NO: 1271 - DNA, 500 bp, Homo sapiens
  MAP TO AC022263.3; EXPRESSED IN FETAL LIVER, SIGNAL = 2.1; EXPRESSED IN BONE MARROW, SIGNAL = 2.2; EXPRESSED IN BRAIN, SIGNAL = 1.6; EXPRESSED IN PLACENTA, SIGNAL = 3.3; EXPRESSED IN ADULT LIVER, SIGNAL = 3.1; EXPRESSED IN LUNG, SIGNAL =   3; NT HIT: AL163227.2, EVALUE 1.00e-109; EST_HUMAN HIT: AL602790.1, EVALUE 1.00e-119; SWISSPROT HIT: Q49127, EVALUE 3.10e-01
cctagaggcttgctgaatggccttgcccaaaatgctgatagtgatatggacaataaagtccaggccaaggtggtctcagatgaaaatggggaatctgttgggaactggagcaaaggtgacccttgtcatgttttagcaaagagactgttggcattttacccctgccctagagatctgtggaactttgaacttgagagagatgatttatggtatctggtggaagaaatgtctaagcagcaaagcattcaagatgtgacttggatgctgctaaaggcattcagttttataaaggaagcagagcataaaagttcagaaaatttgcagcctgacaatgtgatagaaaataaaatcccactttctgaagagaaactcaagccggctgcataaatttgcataagtgacaaggagctgaatgttaatccccaaaacaatggggaaaatgtctccagggtatgtcagaggtttttacagcagtccctcccatcacagacccaagacct

SEQ ID NO: 1272 - DNA, 544 bp, Homo sapiens
  MAP TO AL132765.16; EXPRESSED IN BRAIN, SIGNAL = 1.5; EXPRESSED IN PLACENTA, SIGNAL = 5.2; EXPRESSED IN ADULT LIVER, SIGNAL = 6.8; EXPRESSED IN LUNG, SIGNAL = 3.5; EXPRESSED IN FETAL LIVER, SIGNAL = 3.9; EXPRESSED IN BONE MARROW, SIGNAL = 2.3; SWISSPROT HIT: P29785, EVALUE 5.10e+00; NT HIT: gi15304922, EVALUE 8.00e-77; EST_HUMAN HIT: W45312.1, EVALUE 1.00e-76
acaggtgcaaagtgaggacctgggccagcagggggatcagacactcgcttcccagcaagggaaccccagaagggtgggtggtgggccgggtgggctgaagccctcgttaggaagtctctgtccccactacctccgcccagctctgcctcccctggggctcccagcccagcgctcccagcagcttgacgactccgcccagctctgcctctcccggtcctgcctccccggggctcccggcagctcgactcctcccgccctgctttggcgccaggcacgcactgccttttccagctgttcctgcagcttcttcaccgtgtccttctcccttgccagctgctcctgggtcgtcttcagaagctcctgcagtctcgtggcggcgcgccccaggtcacttgttaacttcttctctttttctagtctctcctgatggtcagaaggttgacgggcatcagcccttgcaccggcaggagggccaccccagctatgcccacaggaccctgacgccaggggctggagccctctggggacacaaggaaggcaactc

SEQ ID NO: 1273 - DNA, 508 bp, Homo sapiens
  MAP TO CHR22_155.0; EXPRESSED IN HELA, SIGNAL = 2.9; EXPRESSED IN BRAIN, SIGNAL = 0.37; EXPRESSED IN ADULT LIVER, SIGNAL = 0.62; SWISSPROT HIT: P01717, EVALUE 2.00e-25; NT HIT: X71967.1, EVALUE 0.00e+00; EST_HUMAN HIT: BG755759.1, EVALUE 4.00e-55
tcattgcttggtccacagtcttcctggtgctggaggaagaacacaacacagatgaaaaaggagtttgtgtctcacttccccatctgcctgtgtcactgagggattgtcctcatccccagacaaacagtaatagtcagcctcgtcttcggtcaggaccctgctgatggtcagggtggtcgtgttccctgaggtggacccagagaatcgttcagggattccagggtaccgctcactatcttcgtatatcaccaactcaggggcctggcctggcttctgctggtaccagtcagcataattttcccccagtacatctccagagcaggtgatcctggctgtctgtcctggggacactgacaccgagggtagctgtgtcagctcataggaggcaacagagcctgcaagagaggacaagagagggggcttgaagataacaaacccattccagtagtatcgccctgaggctatgcctgggctgagctcagggttcagggtaagaccaggggcttag

SEQ ID NO: 1274 - DNA, 509 bp, Homo sapiens
  MAP TO AC015819.4; EXPRESSED IN BRAIN, SIGNAL = 0.44; EXPRESSED IN LUNG, SIGNAL = 0.45; SWISSPROT HIT: P48634, EVALUE 1.40e-01
gatgcatgaacaatgaacggctgcgggatagaggcgctgatagcaaagcccgggaagaaagaagccaggccaacagctgacagcgcccgggatggccacgctttcaaatggagttctctcttgaaagaaaatggaatcccacccaccgaagggtccaggctggagtgtgttacagcagaaccggccaggccggcgctgcaggaaacgcagcgatgccccaaatccttgcttccgaaagcagcacctgggagccgaaggcacagcgctgcccaggcacagagcccagcggccttgccctgcgtccgcattcgcacagggcctctgcgtgcttccgggaacatcgcagtttgagaagctctgttttaaagaatgctgctccttttacggtcactgtggttcccactgggaattcctcctgtcctacctacaatgccgcaaccctcccaggctcaccggcagcccccacgccagcctctgaggccctccccacgcaattcctactttggagc

SEQ ID NO: 1275 - DNA, 534 bp, Homo sapiens
  MAP TO AC022263.3; EXPRESSED IN LUNG, SIGNAL = 0.78; EXPRESSED IN FETAL LIVER, SIGNAL = 0.83; EXPRESSED IN ADULT LIVER, SIGNAL = 0.71; EXPRESSED IN BONE MARROW, SIGNAL = 0.89; EXPRESSED IN HELA, SIGNAL = 0.64; EXPRESSED IN BRAIN, SIGNAL = 0.94; NT HIT: gi14775223, EVALUE 0.00e+00; EST_HUMAN HIT: AI809755.1, EVALUE 3.00e-43; SWISSPROT HIT: P27048, EVALUE 9.90e-01
ctcccaagagcacaggagtgcctgggtcgcagaccctccttgggcagctgcagttgcgcctggggagttcctgccctggcaacttggaaggggctgggctcccacttgtccccagctgccactggctccatagagtgtgcagccttggccgtgactcctcgctgcgttttccctgcagtagtgcatgggcgaggtgcaggtggcatgggggccctggctaatgccgcacaaatgaacctgatgctcctggggccaatcctgcaagacccggctgccagcgctgatgggctcccagatgtggtaggaagcgaaattgaggccgccatggagggtctgcacctggcagtgggtcctgcccagccattagggggcggcggcgcagtcagatgccttggggacacagggaacggggtcctaccaccgccactgctgctcctgctgctgctcctgacaacactgcccatgcggcccaagcgctactggcatgatggcaactgccactccagatggccagccgctcccatcaatagtgtc

SEQ ID NO: 1276 - DNA, 508 bp, Homo sapiens
  MAP TO AL121909.4; EXPRESSED IN BONE MARROW, SIGNAL = 0.42; EXPRESSED IN BRAIN, SIGNAL = 0.46; EXPRESSED IN ADULT LIVER, SIGNAL = 0.53; NT HIT: D21854.1, EVALUE 1.20e-01; EST_HUMAN HIT: AI149897.1, EVALUE 1.80e-01; SWISSPROT HIT: Q02817, EVALUE 3.00e-07
ttggggagtaggactggttgattcagagaggtggaggggaattcagaccacttcaatttcttttcagcctcgacactagtgacattctgggttggttaattgttcattgtggagggctgtcatatagtgacattctgggttggttaactgttcattgtggagggctgtcatacagtgacattctgggttggttaactgttcattgtggagggctgtcatatagtgacattctgggttggttaactgttcattgtggagggctgtcatatagtgacattctgggttggttaagtgttcattgtggagggctgtcatatagtgacattctgggttggttaactgttcattgtggagggctgtcatatagtgacattctgggttggttaactgttcactgtggagggctgtcatatagtgacattctgggttggttaattgttcactgtggagggctgtcatatagtgacattctgggttggttaattgttcattgtggagggctgtcata

SEQ ID NO: 1277 - DNA, 540 bp, Homo sapiens
  MAP TO AC022247.2; EXPRESSED IN HELA, SIGNAL = 2.3; EXPRESSED IN BRAIN, SIGNAL = 5.1; EXPRESSED IN LUNG, SIGNAL = 5.3; EXPRESSED IN ADULT LIVER, SIGNAL = 5.4; EXPRESSED IN FETAL LIVER, SIGNAL = 5.3; EXPRESSED IN HEART, SIGNAL = 3.9; EXPRESSED IN BONE MARROW, SIGNAL = 4.9; EXPRESSED IN PLACENTA, SIGNAL = 5.9; SWISSPROT HIT: P09985, EVALUE 5.10e+00; NT HIT: gi6754461, EVALUE 3.30e-02
tcttcctctcctcctcctccctttctcctagctttcctcctatgccttctgtctctaactgcagaagaccttatcaatcactgtagcagcagcagcatggtgcagaggaaagagtgatttggagtcagggctgcctctagatttctgttgtgctttgccactctgtggttatgtaaaaacagagcaggtgacaccctccctgagcctcaattatcttaggtgtgggtgggatcgagcagcacctgtcctccctccctgacccaacctttcagttcataggtgagaaaacaaggcccagagaggcacctggcttggtctcatggctaagatcctgcagggctaagatgagatcctggcccttgcatttaacccctgcagtcacagcgacccaggaggtgttagacacactcttgggatccaggactgtactggctgctggaggagagtggaggagaggtgtggggtggggagggcacaagctctggtgtaagccacagaacaagaagacactttctctgctgttgagaagcaggttggtcc

SEQ ID NO: 1278 - DNA, 520 bp, Homo sapiens
  MAP TO AB017651.1; EXPRESSED IN BONE MARROW, SIGNAL = 0.47; EXPRESSED IN BRAIN, SIGNAL = 0.46; EXPRESSED IN PLACENTA, SIGNAL = 0.59; EXPRESSED IN ADULT LIVER, SIGNAL = 0.66; EXPRESSED IN FETAL LIVER, SIGNAL = 0.63; EXPRESSED IN LUNG, SIGNAL = 0.58; SWISSPROT HIT: Q10605, EVALUE 9.50e-01; NT HIT: Z12611.1, EVALUE 4.90e-01; EST_HUMAN HIT: AA574289.1, EVALUE 4.70e-02
aaaaggtggctgtgatttgctgtcgctcatgcataatcccacaggccctatttctggccttctgccattcgtggggccagggaactgagaagcaatggaatctttctgactgctgatttaattaagtgtggctagtctgtgacagaggctgactcggcaccaagccaaagtcacaggtgagttggtcatgtcattgatgggtgagtccagcctcatgtttgaccaaatcaaccagtcatttgggatatctgaagacttacggatagcaattgatcctgctatggtgctggaagacactggtgatttggttaaaacccatctctctctctatatgtatatatagtaaagaacatactggctaattcaggcaatctgacagtctggggtagctacaactttagtgataccaagtattggacattatgtagtgaaaaccatgtttgacttatatcttttttcatttcacctagttgttgtggacattgtgctgacacacctaagggtggtttggaaacagttg

SEQ ID NO: 1279 - DNA, 545 bp, Homo sapiens
  MAP TO AC018715.3; EXPRESSED IN BONE MARROW, SIGNAL = 1.4; EXPRESSED IN BRAIN, SIGNAL = 1.4; EXPRESSED IN HELA, SIGNAL = 0.79; EXPRESSED IN PLACENTA, SIGNAL = 1.9; EXPRESSED IN ADULT LIVER, SIGNAL = 1.8; EXPRESSED IN LUNG, SIGNAL = 1.7; EXPRESSED IN FETAL LIVER, SIGNAL = 1.6; EXPRESSED IN HEART, SIGNAL = 1.3; SWISSPROT HIT: Q61542, EVALUE 1.70e+00; NT HIT: AY046055.1, EVALUE 3.30e-02; EST_HUMAN HIT: AA622947.1, EVALUE 3.00e+00
ccatttgcaaactagcccaccaaatattctagtaaatccctattggctattttaggggttctcttgtttttaggtccatagtattccccattgaactcttctactttctgataccaaacgttttgtaactattggtggcttgtccttatgacttgtatcttaaggtttatgggaataacttgtagctagatttgccataagtgtcaatggctttttgactttgccatctagctcctttttttctgtatttatgcaggagttcaagaaattcaaaaatgatgccctatcactgctgccatcttcccacaatctgcacagatggtattttcaaaccccatctgctatatctccttgtgaccaagcatatactgaaagaggtaagtgaggggtagggcaaaatggaaggaaggtaagtttgttacagtgagaaaatatatctttttcttatttctgtaaaatgtagtatatataactaataacaattagctataaaatgcctcttctcttagcccctctgcttatattctccatggccttcttactgc

SEQ ID NO: 1280 - DNA, 570 bp, Homo sapiens
  MAP TO AC023120.3; EXPRESSED IN FETAL LIVER, SIGNAL = 0.69; EXPRESSED IN PLACENTA, SIGNAL = 0.88; EXPRESSED IN BONE MARROW, SIGNAL = 0.79; EXPRESSED IN HELA, SIGNAL = 0.54; EXPRESSED IN BRAIN, SIGNAL = 0.8; SWISSPROT HIT: Q9P2N4, EVALUE 3.00e-06; NT HIT: gi16192073, EVALUE 3.00e-98; EST_HUMAN HIT: BF372176.1, EVALUE 0.00e+00
aagcatcccttgatggacagtagctgccaccccctttccatcatgtgacactcatctttttctgcttctttctgcagtgttccatcgagtgtgggagcgggacgcaacagagggaggtgatttgtgttagaaagaatgcagacacctttgaagtgttggacccctctgaatgttctttcctggagaaaccccccagccagcaatcctgccacctcaagccttgcggagccaaatggtttagcaccgaatggagcatggtaagtcatggtgctcttgatggaggttgcattggcacaacgtcccccacctgaactcctatagacccctctgggccaggcactgggttcagccctgaaagagattccctacagcaatctaccttaggtggtagctgctggagtaccccgtgactcagcctgcttcgtggggaaggcctgagacctagatgatcttgctttctaaactgtagaaacagtgactctcacacttcagtgtgcataggaatcatctgaggatcttgtttgacaagaccaactctgggccaactgtggccgaggatttgcattttta

SEQ ID NO: 1281 - DNA, 517 bp, Homo sapiens
  MAP TO AC021010.3; EXPRESSED IN BONE MARROW, SIGNAL = 1.3; EXPRESSED IN ADULT LIVER, SIGNAL =   1; EXPRESSED IN BRAIN, SIGNAL = 1.1; EXPRESSED IN HELA, SIGNAL = 1.2; EXPRESSED IN FETAL LIVER, SIGNAL = 1.1; NT HIT: AJ310932.1, EVALUE 9.00e-09; EST_HUMAN HIT: AV730237.1, EVALUE 1.00e-08; SWISSPROT HIT: P45285, EVALUE 4.80e+00
tacccacctcccttactgccaaccgtgtatattccaatatgttctctctctcttaaactcagcactgagttccttttattatttatggtgcactaagtgtccgaactcaggtcttcccacccaaagaaaagcaccctataccagtggctttcaaatttgagcttacatctgaatcacttcattaaaacacaaatgtctgccattactttagagttttggatcaacaattcacatttttaacaggtttccagcaatgctgatgctgccggtccaggggccacactttgagaaccactgccctatacttaactatcctgagtttgaggaggtaggccttatctcaaatattctcatcaaattaccctgtaagattattatttcttattagatgctgaagtgttgggatggtggaggttcataaaataaggataagacataaaaatgaacaaagttactttcttctttctttctcattcttttttttttttgtccaccctcctctccacctccaagacag

SEQ ID NO: 1282 - DNA, 584 bp, Homo sapiens
  MAP TO AJ239319.2; EXPRESSED IN LUNG, SIGNAL = 3.8; EXPRESSED IN PLACENTA, SIGNAL = 3.9; EXPRESSED IN BONE MARROW, SIGNAL = 3.8; EXPRESSED IN HELA, SIGNAL = 2.3; EXPRESSED IN FETAL LIVER, SIGNAL = 3.6; EXPRESSED IN HEART, SIGNAL = 3.2; EXPRESSED IN ADULT LIVER, SIGNAL = 3.4; EXPRESSED IN BRAIN, SIGNAL = 3.6; SWISSPROT HIT: P03181, EVALUE 1.00e-03; NT HIT: AE005692.1, EVALUE 5.60e-01; EST_HUMAN HIT: BI827666.1, EVALUE 3.00e-99
gaacactgaggtggagagggccggcagaggcctgctgccattctccagggctggggctcagcatgcctctcccactgggaccgacctccaggtccacccagttttcagcggacccttcagtagtggcgtcttcagggaacgggtgtccctggatgctggacggtggcacgatggcggctgtctcatcaaccaggtaggacgagtagtccacaccgtccccttggtcgtcgaccggggtgctaggccggccttcctggccccagagcaccacccttccctgctctatcaattcgctctcagactcgaagctgaagccctcgggatctgtgaacctgctctcgcccttgctgctgtgtggtgcccccagatcgaggcctcggctgtggccctgtggggctccggggctgactgtgcaggtgccagcctgctcgccaccccccaggtcgaaaccagccctccaaacggacacctcatcgggggagctcatggcgccagttcaggcaccctggcctatggggagacggtcgagcccaaccaagcccagccaagcaggccacgggacaggaacaacaaggccttcagga

SEQ ID NO: 1283 - DNA, 520 bp, Homo sapiens
  MAP TO AC015937.3; EXPRESSED IN BONE MARROW, SIGNAL = 3.3; EXPRESSED IN BRAIN, SIGNAL = 3.2; EXPRESSED IN HELA, SIGNAL = 1.9; EXPRESSED IN FETAL LIVER, SIGNAL =   3; EXPRESSED IN LUNG, SIGNAL = 3.1; EXPRESSED IN PLACENTA, SIGNAL = 3.7; EXPRESSED IN ADULT LIVER, SIGNAL =   3; SWISSPROT HIT: Q08708, EVALUE 7.00e-16; EST_HUMAN HIT: BG723031.1, EVALUE 0.00e+00
accttggtacatggagcctggtttttccaacctccactcctgctctgattttaggttatgaagccctggagggcccagaggaaatcagcgggttcgaaggggacactgtgtccctgcagtgcacctacagggaagagctgagggaccaccggaagtactggtgcaggaagggtgggatcctcttctctcgctgctctggcaccatctatgcagaagaagaaggccaggagacaatgaagggcagggtgtccatccgtgacagccgccaggagctctcgctcattgtgaccctgtggaacctcaccctgcaagacgctggggagtactggtgtggggtcgaaaaacggggccccgatgagtctttactgatctctctgttcgtctttccaggtaacagatatctctccttccccaggctggggacaggagctgcagagggaagagggaggggtggtggggcataatcctggtaccaacattatgggcactgagtcctcagggagatcatgcaggtcaagca

SEQ ID NO: 1284 - DNA, 571 bp, Homo sapiens
  MAP TO AL138895.4; EXPRESSED IN BRAIN, SIGNAL = 2.2; EXPRESSED IN LUNG, SIGNAL = 1.7; EXPRESSED IN HELA, SIGNAL = 2.1; EXPRESSED IN ADULT LIVER, SIGNAL = 3.2; EXPRESSED IN FETAL LIVER, SIGNAL = 1.7; EXPRESSED IN BONE MARROW, SIGNAL = 1.5; EXPRESSED IN HEART, SIGNAL = 4.1; EXPRESSED IN PLACENTA, SIGNAL = 1.6; SWISSPROT HIT: Q44052, EVALUE 3.20e+00; EST_HUMAN HIT: BG981138.1, EVALUE 0.00e+00
ccgtcagcaccataacaatcactattaccatcaccatcattcaccatcataaccatcaccatcactatcaccattatcaccaacaccatcactattaccaccaccatcatcaccatttttaccattaccgtcatcatcataaccatcaccgtcatcatcgtaaccatcaccattatcaccatcaccgttatcgtcatcaccatcattatctgcacagccaccatggagacaggcccgtggaaaagcaacaccccttagtgggatttgctcatcatgatgttggggggttatcttaactgcccccactgcaccaaggtcaggaatgagcagtttagggtgggcctggtggaaggggctccctggcccccaggcaagcaggctctcttgcttaagctgtataggtcccggctgtagccgaaaaatcaactccaagtgtggcatggtccccgccgcctccccctctttcaggcccagcctccccagatgagaacaaagctggattttaataatcccctcagccatctgctcagactcccctgtgggggcctttcctatcagcacccctctcctg

SEQ ID NO: 1285 - DNA, 582 bp, Homo sapiens
  MAP TO AC015478.3; EXPRESSED IN BRAIN, SIGNAL = 1.5; EXPRESSED IN PLACENTA, SIGNAL = 2.1; EXPRESSED IN LUNG, SIGNAL = 1.8; EXPRESSED IN ADULT LIVER, SIGNAL = 1.9; EXPRESSED IN FETAL LIVER, SIGNAL = 1.6; EXPRESSED IN BONE MARROW, SIGNAL = 1.9; EST_HUMAN HIT: AW894179.1, EVALUE 5.20e-02; SWISSPROT HIT: Q07217, EVALUE 3.80e-01; NT HIT: AF029308.1, EVALUE 3.60e-02
ttcccagtactgaaggggtgaaggcaacctgcagggagtggcaggactggggttggatgcaggagttgagaaggacagaggcctggaatagttctaggggagaaagggaaagtcacaggagggctcggtgacactggtgacagccacgggtggcacctgtgccctggtgatggtacctgtcctccttggcatgcagcgttttcagtagttgctggagacctagcacagacatggaggaagcagccagttgcattatccctggctggctttggcagggcaggagtggaaccgggaggacactaccccactgtgggctcactagtcctgggacaggacttcccttcctgtaaaaagacgaggcctggttcctggcacatattaagtgctcaatacatgttggggtgcagtgctggctcttcctcacgctgttgtgtggtgaagagccatcgcagcacctccagtatctgtttacatctgtttctcattctccacatcagtctgggatctcctaagagctggaaccaggtccattcatgtcgtcctcaggacccccacaaactgggcatggagtcagacgaacaa

SEQ ID NO: 1286 - DNA, 585 bp, Homo sapiens
  MAP TO AC005283.2; EXPRESSED IN LUNG, SIGNAL =   7; EXPRESSED IN BONE MARROW, SIGNAL = 5.6; EXPRESSED IN PLACENTA, SIGNAL =  10; EXPRESSED IN BRAIN, SIGNAL = 5.3; EXPRESSED IN ADULT LIVER, SIGNAL = 7.4; EXPRESSED IN FETAL LIVER, SIGNAL = 8.8; EST_HUMAN HIT: BI015928.1, EVALUE 1.00e-119; NT HIT: gi14741311, EVALUE 0.00e+00; SWISSPROT HIT: Q62786, EVALUE 3.00e-06
cacccactatcagcatgcaccttgcagacagtctctccacaccagccccacagagccccacccacccccaggcagtctctgcactaaacccactggcccaggacagccgtgccctgcggccttacctggctgtttcacagtgacttctgtgcgcccagaaacctcctctgccagcttgtaccaggcgtagttggggctcagcagccactactccacgtggcagtagtagctgccgctgtcgctgacctcggctctctggacggtgaggctgaacaggtcccccgacacatgcctctcaaactggagcctggctctcaggccctcctcctccacgtaagtaccgtattcgaaggcggagttgtgggtggtcttcaggataagcttgccgttggcatctgagggcttgtggacgtaccagagcaccgcaaagtgggagttctggctggtctgagacttgactgagcagttcagctgaatgggcttgttttccaccagggtgagggtcctcttcgatttgctcacctgcagctttgtcactgcaaaggaaaggggaacacaggaatcaccacagactcccagaaacgt

SEQ ID NO: 1287 - DNA, 504 bp, Homo sapiens
  MAP TO AC005283.2; EXPRESSED IN BRAIN, SIGNAL = 1.5; EXPRESSED IN HELA, SIGNAL = 1.1; EXPRESSED IN PLACENTA, SIGNAL = 1.6; EXPRESSED IN BONE MARROW, SIGNAL = 0.99; EXPRESSED IN HEART, SIGNAL = 1.5; EXPRESSED IN LUNG, SIGNAL = 1.3; EXPRESSED IN ADULT LIVER, SIGNAL = 1.2; EST_HUMAN HIT: BG723950.1, EVALUE 3.00e-40; NT HIT: AL163201.2, EVALUE 0.00e+00; SWISSPROT HIT: Q25116, EVALUE 2.70e+00
actgtaatcaccgcgagaccagttaatgagagagttcttccttatccttactctatattgaatacaatttgttgcacttcgaaatatctggatcagactatagttgttgtcgtcactgagaatgtaggagtgggaaagagaaaaatcatgcaaagtcttgctgatagcgttcacagtgacagcccgaaagtatgattctaaggttgtaagcattttatatttagatttttaagttgtggagtatacttttaaagataaaaataataagccaggtctcttaatacttatctaaagaagtgtttgtataacatttaataaaatgttttatctcagtggcatttggatttaaaaattattttgggctgtcacagaatgttgacttttcttaatctgttacatagggctgtgggtctggatttccaggaaagcggagacctcgaggtgcaggactgtcggggtgaggtggccgaggcaggtcaaagctgaaaagtggaatcggagctg

SEQ ID NO: 1288 - DNA, 543 bp, Homo sapiens
  MAP TO AL158832.2; EXPRESSED IN BRAIN, SIGNAL = 0.62; EXPRESSED IN FETAL LIVER, SIGNAL = 0.92; EXPRESSED IN LUNG, SIGNAL = 0.77; EXPRESSED IN BONE MARROW, SIGNAL = 1.1; EXPRESSED IN PLACENTA, SIGNAL =   1; EXPRESSED IN ADULT LIVER, SIGNAL = 0.76; EST_HUMAN HIT: AW969060.1, EVALUE 0.00e+00; NT HIT: gi15791399, EVALUE 8.10e+00
atgcttgtaacagtgcctgcatagagtaagaatgaaataatgttagctattttttattgttacatttaaaatagattttgctggtagtgaaatatgaatgataaaatcatctcctcagctgttttccttgcataagtaccttaaaataatgtatttgcaatttccttctgaatccttgaataaaagacaccagataatcagaagatgttactgacattagtaggcatttgaagttcactctgatgggatcagtctatttacaacaaattgctatagagagtaaaaagcgccaaccttttcctgtagtttttgaatgacagcatctttgttcatgcagttggctttgctgcatttccacttcatcaattttttggctctgtctttgcaaaaaaaaaaaaaaaaaaaaattacagagggagaattttaaaacacaaatgaagaaaaagaaattactttgaaattgccaaaattgtttggctgaaagagcttatttagaaaaacagagctttttatgtataaacctgtttcattggtgttgtatca

SEQ ID NO: 1289 - DNA, 535 bp, Homo sapiens
  MAP TO AL031283.26; EXPRESSED IN BRAIN, SIGNAL = 0.39; EXPRESSED IN ADULT LIVER, SIGNAL = 0.34; SWISSPROT HIT: P35978, EVALUE 2.00e-01; NT HIT: AB067524.1, EVALUE 1.00e-122; EST_HUMAN HIT: AW445211.1, EVALUE 0.00e+00
agcgtaaatggatgtgggagaaaggaaagtcatgctgaaagccccagttgcacatcctttcaaagcatgtgcgtgttctctgcaattgcagaaagtgaatgaaacagaattagacattggcctccttaaagcggccaccagcggccgcgggtaatgcctcttatgcgcgaacgttttccttgtagtacctggatatgagcaaaaccctcggaagtctcatgaacatcaagaatatgtcaggccacgtgtccatgaaatacctctcccgccaggagagggagaaggtcaaccagcttcgacaaagggacctcgacctggtgtttgataagatcacccaactcaagaaccagctggggaggaaagaggagctgttgagaggatatgaaaaggacgttgaacagctcaggtacctcggcacccccatgtccccacagaaaggcccgggcctcccttctcctggctaaactcaggctagcagcagacctctaggcctgggacaggaggacagagacccacgtgtggaatacctgcaatg

SEQ ID NO: 1290 - DNA, 589 bp, Homo sapiens
  MAP TO CHR22_146.0; EXPRESSED IN BONE MARROW, SIGNAL = 0.94; EXPRESSED IN BRAIN, SIGNAL = 0.86; EXPRESSED IN LUNG, SIGNAL = 0.89; EXPRESSED IN HELA, SIGNAL =   2; EXPRESSED IN PLACENTA, SIGNAL = 0.8; EXPRESSED IN ADULT LIVER, SIGNAL = 0.83; SWISSPROT HIT: P03341, EVALUE 1.30e-01; NT HIT: gi14774931, EVALUE 6.00e-04; EST_HUMAN HIT: BG995722.1, EVALUE 9.00e-04
caggaactcactcccaaagcccctccctcccctgccatcagccccagcatcaaattggagagggacgagccgggcactgaccggaaaccgcaggcgtggatactgctgtcttcctgcctcatctcacctaatccccatcacagccctgatcccattctaccacacgaagcaaccgaggagcggaggatgatcgggccggagccccacggccagcgggggatgaatatgaatgagctgggatggaacccacgcgtctactccaaagcccatcggctccttccacgacatcctgttcggcaggcagtaggaggggccacaggggcagacacccccacatttcctgacctagcacccagaaccgggactccacaggccccagcctgtctccagcagcctcagaggtgactctagaagggcccctgaagcctgcctccctgctccgaccaccaggaaagccagcaagaagcccagtgctagcattcctgactgcacgccaggcgtagcaccaagtgcttcatagtgtcacccttgggtggtgggcactacttttattcctacttgacaggtgaggacactgaggcacacacag

SEQ ID NO: 1291 - DNA, 559 bp, Homo sapiens
  MAP TO AL158832.2; EXPRESSED IN HEART, SIGNAL = 2.4; EXPRESSED IN PLACENTA, SIGNAL = 2.6; EXPRESSED IN BONE MARROW, SIGNAL = 2.4; EXPRESSED IN LUNG, SIGNAL = 2.4; EXPRESSED IN ADULT LIVER, SIGNAL = 2.3; EXPRESSED IN HELA, SIGNAL = 1.7; EXPRESSED IN BRAIN, SIGNAL = 2.5; SWISSPROT HIT: P57068, EVALUE 5.30e+00; NT HIT: gi12963480, EVALUE 2.10e+00; EST_HUMAN HIT: BF931544.1, EVALUE 1.00e-117
gtcctgagcatctttccagctctaacaggtgaagatgcacaagaatctccaagcagatcaatcagcaccacgagctactccagcagctgtgctaggaaaccaaacagccctggaaggcttctccctggcttttgaccctcaaggaaaattctttcattatctgctggtatggccggcagccaaaatggctggatggattttaaaactgatttaaggaaaaaaaaactttgtctataagtattgaaagaggtttgggtctcttgaggttttcctgaatctgacatgttttaaacaatagtgaaaggggtggggtaaagaaaagcaaatatataatttactcttggtaacgaacgactgtaaaacactccaaaaatacagtgtaaagtacaaagctagtgatacgtattaatgacagacatttgtgggtgtacctatgcatgcaaccacaacacacagtataattaaaccttgcaaaatagccattgtttcaggactagaaatgatttacatcaaataagcagtgaaaggttgttacacacccctctccccaaacttccta

SEQ ID NO: 1292 - DNA, 515 bp, Homo sapiens
  MAP TO AC004846.2; EXPRESSED IN PLACENTA, SIGNAL = 1.5; EXPRESSED IN LUNG, SIGNAL = 1.1; EXPRESSED IN BONE MARROW, SIGNAL = 0.98; EXPRESSED IN ADULT LIVER, SIGNAL =   1; EXPRESSED IN BRAIN, SIGNAL = 0.91; EXPRESSED IN FETAL LIVER, SIGNAL = 1.2; SWISSPROT HIT: P49768, EVALUE 5.00e-27; NT HIT: AF109907.1, EVALUE 0.00e+00; EST_HUMAN HIT: AW376952.1, EVALUE 2.00e-93
tttgcaacatagagaaatgcacatactttcctctgggtcttcaccagcgaggatactgctggaaagttcctggacagcagctcgtgactcaggtgtagagcgatgaggccctagatgactgtccctctgggcttcccattcctcactgaacccgccatcatcattctctgcaacagtgtcttgtgactccctttctgtgccttcaagagaaagtggaagttacagctctaatatttagaaaaatttaatacctttaagaaaattacatggaaacagtaactagctgtcattgtaactagctggcccttaaaccacaaagcatgggctgtagcagtgcctgctggtagtttatccaacagctattttctcctttatttcctgagggcagaatcctgaattgtttgggttcccaccccctcccacatgactctggtggtgaatcctgaccaagccaagccaagcacggtaatcccaccaagcctcttcctaacaaaagctctaaggttgtggggttg

SEQ ID NO: 1293 - DNA, 551 bp, Homo sapiens
  MAP TO AL121994.3; EXPRESSED IN BONE MARROW, SIGNAL = 0.79; EXPRESSED IN PLACENTA, SIGNAL = 0.77; EXPRESSED IN BRAIN, SIGNAL = 0.65; EXPRESSED IN LUNG, SIGNAL = 0.9; EXPRESSED IN FETAL LIVER, SIGNAL = 0.78; EST_HUMAN HIT: AV734754.1, EVALUE 8.00e-07; SWISSPROT HIT: Q16465, EVALUE 8.00e-07; NT HIT: gi14744848, EVALUE 1.00e-04
ccctcctcttctttgccttcactgctagaaaacttagaaacaaatttgagtcccacctctagcaggtagcatggcttatattctgcatcctgacaccatttctagtaccttattttcctccttgtgtttcttcttttacttgtcatcccctcccctttttaaatttttttcgattctttggctgcgacaacggaagagatgatttagtgtatatgtgttacactcagccaccactgagaacagaactagtccaggctgtcccaggtccagggcagaggacaaaagggactgctttggtgaccaagggggatctcttagaggtgctcttggtgatcagatggcgatggatgttctggatccattgaaagacaagttgtagacagtagcatgcagtccaacggttgtaccagtgtcctcagcctctggcactccctctgcctccatgggtacacaggcttccacctctgccccatctttcttcttttgcgttttagcctgtgtttggctctcatggcaagtaggtttctaagaaggtggcactaaggctaaga

SEQ ID NO: 1294 - DNA, 500 bp, Homo sapiens
  MAP TO AC012360.2; EXPRESSED IN FETAL LIVER, SIGNAL = 0.39; EXPRESSED IN BRAIN, SIGNAL = 0.46; EST_HUMAN HIT: R54206.1, EVALUE 4.50e-02; SWISSPROT HIT: Q99814, EVALUE 3.50e+00; NT HIT: AF243108.1, EVALUE 4.70e-01
tggaattttccagaagtggcattgtaaagcagattatcctgaagctcattttcttttccatggcaataacactattaatgtcgtgattctgacctgagaacctcagagaagccgtggatatggctggcttggccaacaggctgcctgctcaacaggagtctctcttcctgctgccaacagagctcagctttggtccggacacacccggacatccaggcaggtgggcaggccccagttctggccattgtgatgtaaggggagccagccggggtgctcttcggaaggatttttgctcctgtatgaagcacaatagtgtaggagggggcccagccatttggcacctaggaagccacacaaggctgaaaaccagcggcagctgcactgcggagccggcagccctgaatcgagagcctttgcttccctttgttgaccaggcatctttattgctaaagccaccattcactcagttttctcttccttgaagcccaacttaacaggca

SEQ ID NO: 1295 - DNA, 578 bp, Homo sapiens
  MAP TO AL138722.2; EXPRESSED IN LUNG, SIGNAL = 0.73; EXPRESSED IN PLACENTA, SIGNAL = 0.71; EXPRESSED IN BRAIN, SIGNAL = 0.42; EST_HUMAN HIT: AA287162.1, EVALUE 1.00e-106; SWISSPROT HIT: P04146, EVALUE 4.30e+00; NT HIT: gi13643675, EVALUE 1.00e-119
cctggcagttgtgtgtcaagtctttcttgacacactcattccttctttttttctctctaacaccatcttatattagagaacttccctcagtgtgtgctagaaatctctgaccaagaagtgttggaatggtatactgctaaagacttcattgttgggaagtcactcactatccttgggagaactttcttcatttatgattgtgatccatttactcgacggtattacaaaaagaagtttggaatcactgatttaccacgtattgatgtgagcaagcgggaaccacctccagtaaaacaggtaatcagatagtacttcttagtgtggtgagaaaactaattttttgaggtagaaatttaagaaaaaaagacttctatgcaaatattcgataaataatggacaaagtatatgtaacacagtagttcacaaaagaagaaatacaaatgacaaaaaaattatgagaagaccctcaatctaactgataatcagtgaaatagaatgaaaataatgatgtttttggatctgttcaattttaaaagattcatgatatccagtgtttgccctatatgaagaaatgggaa

SEQ ID NO: 1296 - DNA, 512 bp, Homo sapiens
  MAP TO AL133553.2; EXPRESSED IN HELA, SIGNAL =   2; EXPRESSED IN BRAIN, SIGNAL = 0.76; EXPRESSED IN FETAL LIVER, SIGNAL = 1.3; EXPRESSED IN ADULT LIVER, SIGNAL = 2.1; EST_HUMAN HIT: AI472459.1, EVALUE 4.00e-95; SWISSPROT HIT: P12270, EVALUE 2.00e-13; NT HIT: gi15296870, EVALUE 7.00e-99
tcagataatggtgagctgcgaaaatgtactttaattaaaacccaagaaaatctttttcttttctcacttgagaaataacaattttatttgctatgactataaccatttcaatgtatgcacaacttttagtaacacttgcctttctaaacatccctcagagattagttttagttcaaagaattttataaaaatatgccaaaataccaaaaagttcatgggattgctaatttaaaaaaaccaagagagagagagaaatacataatggaaagggagaaaagccaagatttttttcaagttcatttttcataatgaccagtacttttaatacctgaactggtggtcccaactcctgaggtggggcatgaatggtcagtcttgggggaagtggatgtggtgggcgtctcggtgactgaggtgctcgaggggcctgtctttcagatgctgatgatggctgttgttctctagaaacctcctgagaaaaagaagattctgcagcacctgtatttccttca

SEQ ID NO: 1297 - DNA, 575 bp, Homo sapiens
  MAP TO AL139022.1; EXPRESSED IN FETAL LIVER, SIGNAL = 1.7; EXPRESSED IN HEART, SIGNAL =   2; EXPRESSED IN PLACENTA, SIGNAL =   2; EXPRESSED IN LUNG, SIGNAL = 1.9; EXPRESSED IN ADULT LIVER, SIGNAL = 2.1; EXPRESSED IN BONE MARROW, SIGNAL = 1.6; EXPRESSED IN BRAIN, SIGNAL = 1.7; SWISSPROT HIT: P49356, EVALUE 2.00e-13; NT HIT: gi14752271, EVALUE 6.00e-47; EST_HUMAN HIT: BE072361.1, EVALUE 6.00e-88
cttccccacagaagctgttcaaatgcatactgtactttctggcaaaatcttgtctctcagagttgatgattaagacttttctcaaagaccagagtcaagagccaaaagaaaaggccacagaagaaaccagaatccttctcttggaagttcaaagtcttgttctacccaccagcttacattagttttctaaagtggaggagtttcaggaagttgccggaggtcatgagaagagcaaagatttctttgtggcactgtttttttccattccaaacaaacaaaacagaaacaaaacaaaatcccaaactcaaaatacaatttcagagaacaccccagatttcccaaagacagactcactctgtagccactatctgggggatgggttcatctagcagttccaagctgtgcaggatccaatagcagagccatgggcggctggcatccagacactgggagagagacaggagagaaaacatcccttattcacaatcactccaagacactgctgccaaggctgtatctgtctcactcccagcagcctggcaagggggaggagggcacccttgctcaaacaacaa

SEQ ID NO: 1298 - DNA, 541 bp, Homo sapiens
  MAP TO CHR22_84.0; EXPRESSED IN HELA, SIGNAL = 1.4; EXPRESSED IN BRAIN, SIGNAL =   1; EXPRESSED IN PLACENTA, SIGNAL = 1.1; EXPRESSED IN ADULT LIVER, SIGNAL = 1.1; EXPRESSED IN FETAL LIVER, SIGNAL = 1.2; EXPRESSED IN BONE MARROW, SIGNAL = 1.1; EXPRESSED IN LUNG, SIGNAL = 0.98; SWISSPROT HIT: Q63003, EVALUE 3.00e-04; NT HIT: AY046056.1, EVALUE 8.00e+00; EST_HUMAN HIT: BE902190.1, EVALUE 4.90e-02
atttgcacacttcacctcccggggaccctcaacagcccagttcacagatagggtgactgaggcccagtgaggtggagtggagtgcccagaggcacacggccatggggatggggttcagaactcaccacgcagtggggaggggtctggcaggttctgacatggggtagaggagtacccagtgaagccgggaagaaaccgggtggctagagggagagctgagacgccccatgccaaacacccctgcggagaggcagccacaagggccagtgtgggaggctggagcgggtggacagacgtttgaaggggagccaggaacagcaccctcttgtccctggtgggagggagaggggaaggcaggtggggccgaggggcaggagagccagccaggaggggcagctgccaaggagaccacagaggagctgtggaggggagggccgaatccccagggcatgggggccgcctgggcccaggcagagcctccccagacaaaggccattctgtccctggctcccctcccaagggcagaccttcctggtctctg

SEQ ID NO: 1299 - DNA, 518 bp, Homo sapiens
  MAP TO AL121993.2; EXPRESSED IN PLACENTA, SIGNAL =   1; EXPRESSED IN BONE MARROW, SIGNAL = 0.88; EXPRESSED IN LUNG, SIGNAL = 1.1; EXPRESSED IN ADULT LIVER, SIGNAL = 1.2; EXPRESSED IN BRAIN, SIGNAL = 0.8; EXPRESSED IN FETAL LIVER, SIGNAL = 0.96; SWISSPROT HIT: Q07960, EVALUE 5.50e-01; NT HIT: gi16161328, EVALUE 1.00e-128; EST_HUMAN HIT: AL516398.1, EVALUE 1.00e-117
atgacaggatgttgtgctcgtaagtgctgctctatagaacagttaatataccataccaggtgagggagaacttctggtacttcttaccctggcatcatattcaaggacaaaaggaggaaagtcaatctgttctggtgatatggcagaaaacagctggtggaggctgtccacatggtggattttgtccttcagtcctgagacagaaaaggtggtaaaaaaccatgttgacacctgattaatagaagagaaaaaataatttaagctagttgccatagttagaaacataaacacaatttggaaaatttatagtagataaaaactatatttcaaagtcttaaaataactagtgttttcaaagcgcaatctgaattttgcaatcatcagtttagttgattattaataacattaaaaagaagaaacgaggataacactgactagagactataagaagaatgagttttgtttcatgaagcttttgtttccattacatgtatataagttcccatgcgtgtagtgtg

SEQ ID NO: 1300 - DNA, 505 bp, Homo sapiens
  MAP TO AL139017.1; EXPRESSED IN LUNG, SIGNAL = 0.93; EXPRESSED IN FETAL LIVER, SIGNAL =   1; EXPRESSED IN PLACENTA, SIGNAL = 1.1; EXPRESSED IN ADULT LIVER, SIGNAL =   1; EXPRESSED IN HELA, SIGNAL = 0.55; EXPRESSED IN BRAIN, SIGNAL = 0.89; EST_HUMAN HIT: AA921983.1, EVALUE 4.50e-02; NT HIT: AL161542.2, EVALUE 3.10e-02
tctaaatagctctcaaaccagcagaaaattaaaacagtttttgacttatgcaaaaccaaaagtttctcagatactggcacgttcagatttcagcatttccaggtttctatcacattcaaatgtataggtgtcatccatctacttcatagtagcctggaatcttttagttctgttctgtatttcacaattgatagtacacataatttaataaattaccaggagaacatgaccatattcatcttctacacacctacttttttcgacatcaaagagaatggaaagattatcaaaagatcttttccttttactgttattaaaacagtaataaatgaccatgattctcatggaattttaaccatctaaattgaagtacaagaatcctatggtgcataataccttttgaagatgattttatttataataaacagaaagaataagggggccatttatacataggataacatattctgggacagtctctaaggtcacccttgccataagttga

SEQ ID NO: 1301 - DNA, 515 bp, Homo sapiens
  MAP TO AC017072.4; EXPRESSED IN HEART, SIGNAL =   7; EXPRESSED IN BONE MARROW, SIGNAL =   6; EXPRESSED IN BRAIN, SIGNAL = 6.1; EXPRESSED IN PLACENTA, SIGNAL =  12; EXPRESSED IN ADULT LIVER, SIGNAL =  12; EXPRESSED IN HELA, SIGNAL =   3; EXPRESSED IN FETAL LIVER, SIGNAL = 6.6; EST_HUMAN HIT: AA454994.1, EVALUE 3.00e-03; SWISSPROT HIT: P02469, EVALUE 4.80e+00; NT HIT: AF099810.1, EVALUE 8.00e-03
atggactcagtgccaccttcctttataatacatatgtatttgtttcctgtctctgttcatctcacctactggaatgtacattcctagagggcagagctctgtcctgttcactgcagtatctccaacatccagaacaatacctgacacgtagtaggtgtcccatatgtgtttactgaataaatgaatgaatgaaaatccctgagagagagagagagagagagagagtgtgtgtgtgtgtgtgtgtgtgtgtgtgtgtgtgtgtgtgtgtgtgtattttgactatacactgcaatgagatccaggaagatttctgctgaattggagaggcaggggccttttttgcttatattcattttgtctttggcaagtcacttcccttcattaagcctcggtttcctcatctgtaaaacggagctagtgcctgctttgcagaatctttgtgaagcgtcaatcaaatacggtgcaaagtgcctaggtggggcctggcacacagtaggtgggcaactctgtcattt

SEQ ID NO: 1302 - DNA, 561 bp, Homo sapiens
  MAP TO AL138886.1; EXPRESSED IN BONE MARROW, SIGNAL =   9; EXPRESSED IN LUNG, SIGNAL =  13; EXPRESSED IN BRAIN, SIGNAL = 1.4; EXPRESSED IN ADULT LIVER, SIGNAL =  14; EST_HUMAN HIT: AW157350.1, EVALUE 3.00e-65; SWISSPROT HIT: P40429, EVALUE 8.00e-30; NT HIT: gi15302570, EVALUE 5.00e-63
cccccagcttcctaagtaccaggctgtctgtggcacctggattgccacccttgggtcctctacaccccacggcagcaacggtggaagggcaggccaggccaatcataaggaataaacagtctttagtgggctcaaaccaggagtccataggtcttgaggacctctgtgtaattgttttctcctccacattcttttgggcctgtttacatagcctcataagctgcttttcttccaatagcagatattggccttcttcctcttctcctgggtggctgtcactgcctggtacttccagccaaactcgtgaaccaggcaccccagataggcaaattttctcacaggcttcagacacacaaccttgggagcagcaggaagcatcatccactttttcttgtcatagggcagtgggatcccattaaacaccttggggtggtcagggacgtcctggcctcgcttggtcttgcgaagcagcatgcctcaagcggtctgccaaaagatgcagatggggggcctcaggaagggttggtgttcatctacttgtgaaggaaggccaggtactcc

SEQ ID NO: 1303 - DNA, 556 bp, Homo sapiens
  MAP TO AC011802.4; EXPRESSED IN BONE MARROW, SIGNAL = 2.3; EXPRESSED IN BRAIN, SIGNAL =   2; EXPRESSED IN HEART, SIGNAL = 2.6; EXPRESSED IN HELA, SIGNAL = 1.5; EXPRESSED IN LUNG, SIGNAL =   3; EXPRESSED IN PLACENTA, SIGNAL = 2.9; EXPRESSED IN ADULT LIVER, SIGNAL = 2.3; EXPRESSED IN FETAL LIVER, SIGNAL =   2; EST_HUMAN HIT: BE082943.1, EVALUE 1.00e-105; SWISSPROT HIT: P55573, EVALUE 9.20e-02; NT HIT: AL591787.1, EVALUE 2.10e+00
aacttgcccatcttgtccacagccctgtacatttaatgctttcaattgacatttgatggttattttagtctacagttgaaatcattcgttcattcaacaagtatttcttgagtttgccaggcctcatctggtcactagccctggtgaggaaacaaactaagagatggtatttgacatgagatcatgagcacccctgaagatctatatgagatcacaagcacccctgaagatctggatgagatcatgagcacccctgaagatctggatgagatctggagcacccatgaagatctggatgagatcttgagcacccctgaagatctggatgagatcttgagcacccgtgaagatctggatgagatcatgagcacccctgaagatatgggcttccttataattcgcaagcagggcacttcggcaggtccccagcagagcctgtgaggccagcagagggttctgtgcccagcacagtgcagggtgtccaggggctggaatggaggggccttcagcagtggcgaggcttgctatatggtgctgcgtgggtctctcttgaaga

SEQ ID NO: 1304 - DNA, 500 bp, Homo sapiens
  MAP TO AL133500.2; EXPRESSED IN FETAL LIVER, SIGNAL = 0.72; EXPRESSED IN PLACENTA, SIGNAL = 0.7; EXPRESSED IN BONE MARROW, SIGNAL = 0.71; EXPRESSED IN BRAIN, SIGNAL = 0.79; EXPRESSED IN LUNG, SIGNAL = 0.7; EST_HUMAN HIT: BG771237.1, EVALUE 6.00e-94; SWISSPROT HIT: Q94517, EVALUE 2.00e-10; NT HIT: gi14758969, EVALUE 4.00e-94
gcaagaaagccaagttttccaagttcagtgccaatggacaaaatgtggaggaaggtcaacaaattctggtaaccttcctttatactcacctcctcccaaaatgagtgttgccaactgccattgaaggatgtacttaagacacttgccaattcccactggagtcatgttaaaggagcacatgggatccccagctattgtgtcagctcccagctgtaagaccactgctttgggattaaaggcttggtatacttcctttagtacactatataaaatagaaaggatacaaaatataggtcagtttggtctaggggtagtggtggtggtagggcaagttggaggtataattgaattagcaaatagttaagggaaaaaaacacaacctgtcaaactcatcaaactttccacttaagagaggtgaatcagactacatgtaaatgataccttaataaacctgacttacaaaaaaatttccctctacttccacgctcatcaatgaacac

SEQ ID NO: 1305 - DNA, 526 bp, Homo sapiens
  MAP TO AC011985.3; EXPRESSED IN BONE MARROW, SIGNAL = 4.2; EXPRESSED IN BRAIN, SIGNAL =   4; EXPRESSED IN LUNG, SIGNAL = 3.6; EXPRESSED IN HELA, SIGNAL = 1.8; EXPRESSED IN HEART, SIGNAL = 3.1; EXPRESSED IN PLACENTA, SIGNAL = 3.9; EXPRESSED IN FETAL LIVER, SIGNAL = 3.7; NT HIT: AF056048.1, EVALUE 3.20e-02; EST_HUMAN HIT: BG682609.1, EVALUE 1.90e-01; SWISSPROT HIT: P50273, EVALUE 2.20e+00
aaggcaatggtgtccttcaccctgatattaggaggggtcacctgggtggccctgaaaacacttcaaccaacatcactctgattttttaaaatatattttgggattccatttattatttgcaaaggcgatttctctgctaccatttgccttccacgctccctgaaagtaaatcttgaaaaccaagttctaagagaatggcaatggcagtttgatgtttagggggaaggaaaagcagaggaaccccctggagccaaggcaggcctgggtgagggtggagacgagagagggaaaggaaggcatcgtcaggcatgggagtaccaggatggaaatgggagcagtggtgggggctgaagctgagaggttggaccctaggactcaatttgtggactttgttgctttgctgaaggccgtggcagataatgttcccagaccactgaaaatcatccaggcttccagaaaacacaggcccatctaaagacagacaggtgacaaggtgacagaacctagtggcgtgattcttctagcc

SEQ ID NO: 1306 - DNA, 581 bp, Homo sapiens
  MAP TO AC011731.4; EXPRESSED IN HEART, SIGNAL = 1.5; EXPRESSED IN PLACENTA, SIGNAL = 2.3; EXPRESSED IN LUNG, SIGNAL = 2.4; EXPRESSED IN ADULT LIVER, SIGNAL = 2.4; EXPRESSED IN BONE MARROW, SIGNAL = 2.3; EXPRESSED IN BRAIN, SIGNAL = 1.7; SWISSPROT HIT: P22412, EVALUE 2.50e+00; NT HIT: AF283320.1, EVALUE 3.60e-02; EST_HUMAN HIT: BF028168.1, EVALUE 5.20e-02
aatggggagacctgacagtggaggtgtgagggaggtgagggaggtgagggagccagccctggggctatcccagtggggaagcgcatgcgccctgatggaacagcagtcatggagacgctgaggcggaagggccggggtgtgtttgaggaactttaggaaagcccgcatggtggaggtgattgagaggaaggaaggaaggaaggaaggcgagatgagctctgataagttggtggtgactgcggaggtccgtctggttgtgagcaaggtgggaaccacgcagtgtgctgagcagaggtacgagtgatctgactcgccttggaacacagtcactctgggtgaccaaaagtcaggggtgggcattgcgggtcattttggtaaacttatcttccctgtagaaaatgagagggtgggtgggtattatcttctaaaagagttcatttggatatgaagttcaaaagcaactcaagatctttttgaaaagctggtcacaaatgtccaagcaagccttttgtcaaagaagagaggtggctggcggcccagtgccacagcatctggaacgggcctttgaacctcctgctgag

SEQ ID NO: 1307 - DNA, 597 bp, Homo sapiens
  MAP TO AC018608.4; EXPRESSED IN FETAL LIVER, SIGNAL = 0.69; EXPRESSED IN BONE MARROW, SIGNAL = 0.6; EXPRESSED IN PLACENTA, SIGNAL = 0.58; EXPRESSED IN LUNG, SIGNAL = 0.52; EXPRESSED IN BRAIN, SIGNAL = 0.53; EST_HUMAN HIT: M78465.1, EVALUE 5.40e-02; SWISSPROT HIT: P06333, EVALUE 4.00e-03; NT HIT: AJ296304.1, EVALUE 5.70e-01
gcaccttggagagctctttgtaagcattttaatatcctcttgggtgtgtacgtgtttgtgtgtatgcacatgcacagatacaccgacatatctatatgcacacacatatacatgtatataaaattacacatctatgcataacatgctcatatatgcatcaatatacatatacaaacatatatgtacacatttagatttatacaatgtatttatatatttgcagattcacagacaattttcagatggattcagcattatcaagggagatactgtggaattattactatgtgatgatttcagggctgacatcatgttttactcttcgttaaattatcttccccaggatgaactagcttagaacttgaccgtcctttatttgaaacagtgatgaccctagatgtataccccttgaaaattcattgttataacaaaaatattaagtagaaattgtggtattccatctgctatgctacatacttcatatacatttacagaatctttacaattatactactaggttggcattattattgtgattctaaaatgtaggaaactaaggttgagatcatttcaaatgatgtgcagggttcacttacg

SEQ ID NO: 1308 - DNA, 532 bp, Homo sapiens
  MAP TO AC022619.3; EXPRESSED IN LUNG, SIGNAL = 0.65; EXPRESSED IN PLACENTA, SIGNAL = 0.82; EXPRESSED IN ADULT LIVER, SIGNAL = 0.8; EXPRESSED IN BONE MARROW, SIGNAL = 0.84; EXPRESSED IN BRAIN, SIGNAL = 0.93; EXPRESSED IN FETAL LIVER, SIGNAL = 0.85; EXPRESSED IN HEART, SIGNAL = 1.2; SWISSPROT HIT: P40913, EVALUE 2.20e+00; NT HIT: gi6678863, EVALUE 2.00e+00
cacacctccatttagctcccttcagtggctgtgtatgttcttttgaattacagacatggaaggagaaaaaaaaaagctactacattttctgctaactgaaatgacattcagcaatgcaagcaatagtcacctttttgtttttgtttttgtgatcacagattggcaggttggtaccaacccatctagagcagtgattctcaccttggcagcactttggtgttgccaggaagctttaaaaaggagagaggcctgggtcctattcaggggttctagcttcattagtttgagctgaatccgggacatagggattcttaaaaactccctggatagttataaaatacaacctagaagaaaccttaagaaactcaattccccaaagtaactcttagaattaactacatagaaaaccctgcctggattttcatctcataaataatacttaatcttaatggttctagacatagagcctggccatacttattcaaatatgaattcagtgtgagtttgagagtgggagtgtgaaaaacatggg

SEQ ID NO: 1309 - DNA, 513 bp, Homo sapiens
  MAP TO AC025735.1; EXPRESSED IN FETAL LIVER, SIGNAL = 7.2; EXPRESSED IN BONE MARROW, SIGNAL = 7.1; EXPRESSED IN LUNG, SIGNAL = 6.6; EXPRESSED IN HELA, SIGNAL = 2.9; EXPRESSED IN BRAIN, SIGNAL = 6.9; EXPRESSED IN PLACENTA, SIGNAL = 7.2; EXPRESSED IN ADULT LIVER, SIGNAL = 7.1; EST_HUMAN HIT: BF438837.1, EVALUE 1.20e-02; SWISSPROT HIT: O70258, EVALUE 2.40e-01; NT HIT: AE000161.1, EVALUE 1.90e+00
aacaagttttccccagctcccaagcacgtcccatctgaatactggaaactatgtgtaaatcttaaacagcagggtgtggaggagaatccgttcaaattagagtcgaatgttatgaagacatcccaggatcctcctggggaaggagatctgaaccatcaggcacctgaagaactgcttggtggcgaggtagtgtcgaggcatttcagtgtggttagtgctacacatagcctctatgcagatgggtgagaagcctgattgtctttgactaagactgaatttggttccacttcaaactcttattctactgcatggtagaaatgaaatagcaggcagttcaggctttcccatgatgttacacaaaacaatatgaaattgctgctatttgatcatttctaaactataaaaattgcaactacatatggcccagatgataatttgtctccatcactcccagggtttgtgacagtcatgatcccaggggccacctggtttccatcaccacccactctgttg

SEQ ID NO: 1310 - DNA, 521 bp, Homo sapiens
  MAP TO CHR22_167.0; EXPRESSED IN LUNG, SIGNAL = 1.6; EXPRESSED IN FETAL LIVER, SIGNAL = 1.2; EXPRESSED IN BONE MARROW, SIGNAL = 1.2; EXPRESSED IN HEART, SIGNAL = 1.3; EXPRESSED IN BRAIN, SIGNAL = 1.1; EXPRESSED IN PLACENTA, SIGNAL = 1.5; EXPRESSED IN HELA, SIGNAL = 1.1; EXPRESSED IN ADULT LIVER, SIGNAL = 1.6; NT HIT: gi12738839, EVALUE 2.00e-25; EST_HUMAN HIT: BE567729.1, EVALUE 7.30e-01; SWISSPROT HIT: P09027, EVALUE 9.60e-01
agctgccaggtgagagagacctccacccttggaaaccagactcgctggaccctggggccccagctcccaggcatgaggactctcctacagccccgttggtgtgggttaggagcagggcgtcccactcacccagcagcggctgcctggcggtctcctttgctcgtgcctggctgtggggccggaggtggcacttggcatctcggatcttgaagcgggccttctgtttgatgggggtggtgggggcatctggggaaagccaaaattcccccaggtggtggcctctcctgcaggcaaggaggtggtgggggacgggggctgccaggggacaaatccatctggagctgggggtggggcttgatctgagtccctgtgccccgacagctctcctggggtgggggaccctctcctgccccatttctctccctgcaaggcctaaaacaggtgaacacatggatggtggggtcaagctcaagcccaggggccacccgccagaggtcttctgagaaggaggacagggatcc

SEQ ID NO: 1311 - DNA, 588 bp, Homo sapiens
  MAP TO AL133515.2; EXPRESSED IN PLACENTA, SIGNAL = 0.95; EXPRESSED IN FETAL LIVER, SIGNAL = 0.91; EXPRESSED IN LUNG, SIGNAL = 0.98; EXPRESSED IN ADULT LIVER, SIGNAL = 1.1; EXPRESSED IN BRAIN, SIGNAL = 0.7; NT HIT: gi15296873, EVALUE 4.00e-76; EST_HUMAN HIT: BG115636.1, EVALUE 5.00e-76; SWISSPROT HIT: O75325, EVALUE 6.00e-04
taaggacatgctggttgcacaatccaaaaagaaaaggcaatctggagggtataatgagttcagcttgtctgaaattaaaatgtatttttaaacataattctttgagagccaaggtcacttttaacaattaagaaaccacttacaaaaccccttggccagactcagctggtgactcccaagaatgtctttttgtgtacataaaaaagggaaatctggaaacaacattaacaatgtagatattgttcaagaaataggaaataacaattaagagagatatctaattgtaattagaggaacagagttatttgattaaaatataagaacaactactttgaacacagtttcgaaacaataacattgggtgtgtctcttaccatgcacaaccacagaggtagttttgttattggtcccagcaacgttactggccacacaagtatattcaccaccatcctgaagctgaactctttcaatatggaggctcccatcactgcgcacagtgatgtaaggattttggagcaacttaaaggaaaaaaaaaggtaatttttatttaaaaagaaaggatttgtgagagtcaaaaatgaacctgc

SEQ ID NO: 1312 - DNA, 558 bp, Homo sapiens
  MAP TO AC015930.3; EXPRESSED IN HEART, SIGNAL =  12; EXPRESSED IN LUNG, SIGNAL =  17; EXPRESSED IN FETAL LIVER, SIGNAL =  18; EXPRESSED IN ADULT LIVER, SIGNAL =  17; EXPRESSED IN BONE MARROW, SIGNAL =  18; EXPRESSED IN BRAIN, SIGNAL =  15; EXPRESSED IN HELA, SIGNAL = 8.7; EXPRESSED IN PLACENTA, SIGNAL =  17; NT HIT: AF344189.1, EVALUE 5.30e-01; EST_HUMAN HIT: BG221190.1, EVALUE 5.00e-02; SWISSPROT HIT: Q10566, EVALUE 6.90e+00
caagcaacctaaagccaaggctaagaaatggatccttaccccagcagttcatcaaatggccccttcataaaaaagattctgagtaccccctacaggttaaatctctaaatgtaatagaatcaattagccccagtctggctctgagcctgtcacatgaggacggtaagggtcacggccattagcactgatcagtcacacccatggacctgctgtcacccatcaccaccatgttttattgaagaccttaacaagaggtcctgagttattagtgacctagtgtgacctaaggtgagggagggggaagtaaaggggaggagagcaggactgatggctactgactacaacatgccaagcctcatgctagatgtatgtgtattggaaatccctgaagatgcaaaagaactaaagaagttgggcatacttatcctcattttactcatgtaagcaaagtgctaagtgcagcagctggctcttaataaggcccccaaacagcagacatttatatctttataatgctgctactaccatttttcagaatggaagctgaggctgattgag

SEQ ID NO: 1313 - DNA, 571 bp, Homo sapiens
  MAP TO AL136303.3; EXPRESSED IN BONE MARROW, SIGNAL = 0.57; EXPRESSED IN LUNG, SIGNAL = 0.64; EXPRESSED IN BRAIN, SIGNAL = 0.65; EXPRESSED IN PLACENTA, SIGNAL = 0.73; EXPRESSED IN HELA, SIGNAL = 0.51; EXPRESSED IN FETAL LIVER, SIGNAL = 0.61; NT HIT: AJ005931.1, EVALUE 1.40e-01; EST_HUMAN HIT: BI252610.1, EVALUE 8.00e-01; SWISSPROT HIT: P48409, EVALUE 1.40e+00
tgcaagagtgcttggagatgactctccaagtaggcatgactcaaaataaaccaatggattccctttctaggatcaaggaactggggagccccaatctagatctaatctataaccatgatatgaaagaaaatgtcaaaattaaattgtaggtcatacaccgggatattaagaagaatttctgcactgactacatagacttcatcagcctggagtcaatcaaacattaaggaagtgacactcatagcaggaagttacagtgttccatagaatacaaacggcaagtctttctcattgtgcccctaaatctgggacttgaagactgagagataaacagaatttattaaatgtattctgaaatgtttagaacaccaggcattactcttatgctttttgtgtgtgaagagcactatcaaaaagttctggagttcctgatgctgaagtgcttggcaagtgctgtggaaaagagagaagggacaaagttgcatataatcagggacttgcctcagaagcaacattggaaactccagccttgcttctatcatgctgtttcaggacttcggcgtttctcata

SEQ ID NO: 1314 - DNA, 592 bp, Homo sapiens
  MAP TO CHR22_169.0; EXPRESSED IN FETAL LIVER, SIGNAL = 0.68; EXPRESSED IN BONE MARROW, SIGNAL = 0.74; EXPRESSED IN PLACENTA, SIGNAL = 0.82; EXPRESSED IN ADULT LIVER, SIGNAL = 0.79; EXPRESSED IN BRAIN, SIGNAL = 0.58; EXPRESSED IN HELA, SIGNAL = 0.9; EXPRESSED IN LUNG, SIGNAL = 0.69; SWISSPROT HIT: O15371, EVALUE 5.00e-20; NT HIT: gi14778605, EVALUE 9.00e-71; EST_HUMAN HIT: AA810270.1, EVALUE 1.00e-106
tgatggccaacagtaacagccccaagatggtgtggttgctggctcttggcctacctgggcaaatctcattcgattccgctggtaggccgtcttctgtgtgcgcgctgtatccaccagctggaagctactttcatcctcctcatggaaataagcatattgacttccaccaccaaactgagaggagtacttatctggaggcaaaggtgatggcatgtagtaactgcacccacagactttaccagatatgcaccagtctaaagccttgctatttcaagtgtggtcttgagacctgtagcattggctgaaagcttgttagacacacagactcacagtcccaccccatacccactgaatcagaaccagcattttaacaagatccccggatgattcatatgcacattcaattttgaacaactctggcctaaagaactttctaagccaagaatctgaaggactcaaactaacccatttcactctctgcgttattgtgtgagaatctgaggtatttattgctaaccaccatctccattatcaggggcccatggcaggtatgtctaatagatcacgatatactttcttgccaatctcagcc

SEQ ID NO: 1315 - DNA, 564 bp, Homo sapiens
  MAP TO CHR22_185_1.0; EXPRESSED IN BRAIN, SIGNAL = 1.1; EXPRESSED IN HELA, SIGNAL = 0.53; EXPRESSED IN FETAL LIVER, SIGNAL = 1.3; EXPRESSED IN PLACENTA, SIGNAL = 1.5; EXPRESSED IN ADULT LIVER, SIGNAL = 1.8; SWISSPROT HIT: P95514, EVALUE 7.00e+00; NT HIT: gi4503576, EVALUE 1.40e-01; EST_HUMAN HIT: AW863327.1, EVALUE 2.00e-01
ggtgaaactgtgtgcctgtctagcagggagggctcaggatgctcagcccagtgccgaggccaagtgacacacccctgtccctgttcccaccctttaggtgcatccctggaacagtcagaaccttcatctaagcaggtagatagagccaattatgccatggcagtggatgggaagtttttggaaaagggactagagagaggaaggggaggtgatgttggtcttgatgtaaggaaacattctcccagagatcatggaaaagccctttttataaaagaagttagaggtaccacccgtgctagtataggtttaataagtagaacattgacttttaactaagctggtaataataataatggtataacaaggacagtgatgacagacactgtgattctgtcatcacagtgatgacgacagtacaaacaactagtattttgagtatttctacaggccaggtattgttataaggacttctacatatgtttactctttcttcacaatgattctttgtgccaggtgcgtttaatacacctgttttacagatgggggggatgaggcagataagct

SEQ ID NO: 1316 - DNA, 548 bp, Homo sapiens
  MAP TO CHR22_171.0; EXPRESSED IN PLACENTA, SIGNAL = 0.9; EXPRESSED IN BONE MARROW, SIGNAL = 0.86; EXPRESSED IN LUNG, SIGNAL = 0.91; EXPRESSED IN ADULT LIVER, SIGNAL = 1.6; EXPRESSED IN HELA, SIGNAL =   1; EXPRESSED IN BRAIN, SIGNAL = 0.75; SWISSPROT HIT: P16818, EVALUE 3.50e-01; NT HIT: gi14779708, EVALUE 2.00e-90; EST_HUMAN HIT: BG768098.1, EVALUE 2.00e-90
tgactctgaatctcccccaggtttggagccccccatgcttcagagagttgctcaaagaatggcccagagcgtggaggccaggatgggaaggcgagcttggaagcacacagagatgcacctggggcaggtgccccaccggcccccgggaagaaggaagcgccccctgtggagggtgactcagaaggtggtgctgggcgccaggggctgggagtgtgggtatcggggacaggacatggtaccccggcctgggtgttgtggaggcttcatttggagctgaggcatttggggctcactgtggcccggagcctgaatccccagctatttcccagccgtcctgagtaggggtctgtgctgcgctgtgcccagcgcaaggtggcctcctgcccctgccttgcagttgtggtcactcagccacgttgccaaggctggtgggtggtgtccacctagtctccatcgtccgtccagcccccacacagtcaggcacaggcctgacgccctccccagcacagcagcacaggccggccgccaccttcatggccgacatctat

SEQ ID NO: 1317 - DNA, 531 bp, Homo sapiens
  MAP TO AL031283.26; EXPRESSED IN FETAL LIVER, SIGNAL = 1.6; EXPRESSED IN BONE MARROW, SIGNAL = 1.5; EXPRESSED IN BRAIN, SIGNAL = 1.3; EXPRESSED IN LUNG, SIGNAL = 2.1; EXPRESSED IN HELA, SIGNAL = 0.59; EXPRESSED IN PLACENTA, SIGNAL = 1.6; EXPRESSED IN ADULT LIVER, SIGNAL = 1.5; EST_HUMAN HIT: BE888078.1, EVALUE 3.00e-83; SWISSPROT HIT: P49025, EVALUE 8.60e-02; NT HIT: gi16168403, EVALUE 1.00e-112
tagcacctatgtgtgtgcccagggggcatattattgttgccgtcatacacagctcccaagacctcactgagtgactctctgtttcccagatcatggtggaagagcggctaatcctgcagcagaagatggtaaaggccctccaggatgagcaggaatcacagagacacgggtttgaagaagagatcatggaatataaggagcaaatcaaacagcacgcccagacaattgtgagcctcgaagagaaactccagaaagtcactcagcaccataaaaaaatagaaggcgagattgcaacattgaaggacaatgacccaggtaagtccgaagggaggccaaggaaatcttagtgttcggggcaggttctgattgtccgctgggtcccaacaggctgatggctaagaaaaaggccgtgcctcattcgaaagctcattcattctctgaggcccccttttgttcttgttacacaacgatgtcagaagccctccgaggcccaggttcagcagaagtcatggcaatgagttgggacatcct

SEQ ID NO: 1318 - DNA, 555 bp, Homo sapiens
  MAP TO AL139227.1; EXPRESSED IN LUNG, SIGNAL = 2.1; EXPRESSED IN BONE MARROW, SIGNAL = 1.3; EXPRESSED IN HEART, SIGNAL = 1.6; EXPRESSED IN PLACENTA, SIGNAL = 3.4; EXPRESSED IN BRAIN, SIGNAL = 1.6; EXPRESSED IN FETAL LIVER, SIGNAL = 1.9; NT HIT: gi11430799, EVALUE 0.00e+00; EST_HUMAN HIT: BG261110.1, EVALUE 0.00e+00; SWISSPROT HIT: P22223, EVALUE 7.00e-42
atatggaaaatgcacctcgcccataaacggggacctaaagcagcaggtgcaggagtcccaggagggatacatgacagagtgagaaatacctgcccccaaacccctattcagtcttcagcctcaaagagggtaggaagaagagaacctatgcaggagggatattcctatttaacaatctctatggtaatcagaacaaacgttggccatgatcacccacccaccaactgtaccagtacgtgctgcttactgagcccagctcctgagtacctgatcttttgattctccttgtcagggtcttctgcagtgtagacacacacaggctccccagtggggatgccctcctggacctcaacgactttggagggtgggacaaacacaggtgcctcattcacatcctccacgtggaccactatggtggctgtggaggttgggagcttcagcacaaaaggggcctcgttggtcacttcaacgtacagggtgtgctggtttttggcctcaaaatccaaaccctaggagagaagaggaagaaggacctggaccaccattttgagagga

SEQ ID NO: 1319 - DNA, 597 bp, Homo sapiens
  MAP TO AL135926.3; EXPRESSED IN BRAIN, SIGNAL = 1.1; EXPRESSED IN FETAL LIVER, SIGNAL = 0.99; EXPRESSED IN LUNG, SIGNAL = 0.97; EXPRESSED IN PLACENTA, SIGNAL = 1.1; EXPRESSED IN BONE MARROW, SIGNAL = 0.86; SWISSPROT HIT: P14546, EVALUE 4.40e+00
gctgcctcactgcatacatcacctgtgctcctacagtttatcacctgtgtcattcttgtgactttgaattgactgtagtggaataaacagaaagttgctaggcatctgggcgaggctgagtgagcatttttaatgggggttgtgctggcgccactgaactctccaagctcttggaaactgaagaaagcaagtaaatgctacttttgataaagttgaagacctggaggagagcccccccagaatcaaaatatattttagtttttattcaatatttttatggtcataaaggatttattgttttatatgtgtagtgtcatgcatcttgtgttgtggcatcttatgggtgttttgtttaatatgtctaaatattcaatcttgctaatatagattaaactagccaaaaatgaggtggttgatctgacattagcaaaaattgatatccagcatggtctgagaatcatagtatgtaggaagagaacactcaattaacctctcttgtgatattggactcaattccagctcttctctgtcagatgggataacgggatgcagcgagacagagaggcaagaaccaggtcccctgagttcaaatcctga

SEQ ID NO: 1320 - DNA, 585 bp, Homo sapiens
  MAP TO CHR22_171.0; EXPRESSED IN BONE MARROW, SIGNAL = 1.8; EXPRESSED IN BRAIN, SIGNAL = 1.4; EXPRESSED IN HEART, SIGNAL = 1.9; EXPRESSED IN FETAL LIVER, SIGNAL = 1.8; EXPRESSED IN PLACENTA, SIGNAL = 2.5; EXPRESSED IN ADULT LIVER, SIGNAL = 2.4; EXPRESSED IN LUNG, SIGNAL =   2; SWISSPROT HIT: P32517, EVALUE 3.80e-01; NT HIT: gi14779725, EVALUE 0.00e+00; EST_HUMAN HIT: BG325910.1, EVALUE 0.00e+00
agtgagctggtcacaggtcccacttgcctggcaggctgacaggtaggcggcccaaagcagcaagtagatgacagggtggcgcagtgggctcagcagcagggctcccagggccactagtgcacccagcaggctcagcagctccaggccctgggccgtgtccagccccagtctcggcgcttcccacagcagcgtcggggtctcccacagctgctgccagcgccccttgccctgaggccgcagcgtcctccttgcaggtaggatgccctcggggccatacaggcctgtgggagggcatgtcatggccaggccctggacagcccttgcagactagactacctctgagtcagggcctgcagatcccccagcctaggtcagagcatgcggatacctccatccctaggtcagagtctgcagtccctccagagcccgtcccccaggtcgggacctgtcaaaaccccgtcccagggctagaggcctgctcaactacctgagtcagggcctcccacccagcagagcccactgccctcttccaggtctcagcccgatctcctacctgtcccaccaggtctgggaggaagcctctct

SEQ ID NO: 1321 - DNA, 524 bp, Homo sapiens
  MAP TO CHR22_112.0; EXPRESSED IN PLACENTA, SIGNAL =   7; EXPRESSED IN FETAL LIVER, SIGNAL = 6.2; EXPRESSED IN ADULT LIVER, SIGNAL = 8.2; EXPRESSED IN BONE MARROW, SIGNAL =   7; EXPRESSED IN BRAIN, SIGNAL =   5; EXPRESSED IN HELA, SIGNAL = 1.9; EXPRESSED IN HEART, SIGNAL = 5.7; SWISSPROT HIT: P39188, EVALUE 2.00e-09; NT HIT: AF229118.1, EVALUE 1.00e-26; EST_HUMAN HIT: AA347735.1, EVALUE 1.00e-30
acgctttcgaaaacaagcactcaaactcaggagatacttgattgaagttgaaagagtggtgcattccccaaggcagtaccctcatgaatgggattagtgtcctttaataaaagagacccaagagaggtcccttgctccttccagcatgtgagattacagcaaaaagatgctgtctatgaaccagaaagtgggccctcaccagacactgaatctgtcggcaccttgatcttggatttcccagcttccagaagtgggagaaataaatttctcttgtaaataagataaacagtttatgatattttattatagcagccccaagggactaagacagaaatccagttgtacaccagatggttgtaacacgttcagtggaatgaaaaccttgtgtcttggcagggtgcagtggctcatgcctgtaatcccaacgctttgggaggctgaggtgggagggtcacttgaggccaggtgttcaagaccagcctgggcaacataaggagatgtccagatagccggcaaaacagtgt

SEQ ID NO: 1322 - DNA, 572 bp, Homo sapiens
  MAP TO AL133543.2; EXPRESSED IN BRAIN, SIGNAL = 0.77; EXPRESSED IN HELA, SIGNAL = 1.6; EXPRESSED IN PLACENTA, SIGNAL = 1.1; EXPRESSED IN ADULT LIVER, SIGNAL = 1.6; EXPRESSED IN FETAL LIVER, SIGNAL = 0.88; EXPRESSED IN LUNG, SIGNAL = 0.97; EXPRESSED IN BONE MARROW, SIGNAL = 0.82; SWISSPROT HIT: O97943, EVALUE 2.40e+00; NT HIT: gi13385873, EVALUE 1.00e-23; EST_HUMAN HIT: BF516050.1, EVALUE 8.00e-38
cggagagaaatcaaacctggcaaaatgttaacaatgagctgaaggacggctaaacgaaagctcattgtactatttttaaaacttttctgtagctataagccgttttttctgaggaagtcgaggagggcgaatatctttctggaaaggccagagcaaatgcacgcaagagctgagaaaagattggaaaacgcctctcaaaataacagtcccgcccttcccgggactcttccctataggctgttcaagtcacgtggcgactgtggccccgcccacagctcccagaggcctgcgcgtgcggtctgcagttcggccgcttcctcttggcgggtgggctgcagctatggagggcgagcctccacctgtggaggagcggcggcggctgcaggaggagctgaacgagttcgtggagagcggctgccggacgttggaggaggtgaccgcgtccctgggctgggacctagatagtctggatcccggggaagaggaggcggcggaggtgaggagcgcggccgcggggccctttcggggactatcggcccggggtcttctctggaagaagggagatccgcact

SEQ ID NO: 1323 - DNA, 510 bp, Homo sapiens
  MAP TO CHR22_37.0; EXPRESSED IN FETAL LIVER, SIGNAL = 3.1; EXPRESSED IN BRAIN, SIGNAL = 2.5; EXPRESSED IN ADULT LIVER, SIGNAL = 4.1; SWISSPROT HIT: Q9Y3I1, EVALUE 4.00e-42; NT HIT: gi14778454, EVALUE 0.00e+00; EST_HUMAN HIT: BG939155.1, EVALUE 0.00e+00
attctatcccaaccccttgcaccctaggccatttcctagctcccgccttcctccaggaattatcgggggtgaatatgaccaaagaccaacacttccctatgttggagacccaatcagttcactcattcctggtcctggggagacgcccagccagtttcctccactgagaccacgctttgatccagttggcccacttccaggacctaaccccatcttgccagggcgaggcggccccaatgacagatttccctttagacccagcaggggtcggccaactgatggccggctgtcattcatgtgattgatttgtaatttcatttctggagctccatttgtttttgtttctaaactacagatgtcaactccttggggtgctgatctcgagtgttattttctgattgtggtgttgagagttgcactcccagaaaccttttaagagatacatttatagccctaggggtggtatgacccaaaggttcctctgtgacaaggttggccttgggaatagtt

SEQ ID NO: 1324 - DNA, 568 bp, Homo sapiens
  MAP TO CHR22_229.0; EXPRESSED IN HEART, SIGNAL = 1.2; EXPRESSED IN HELA, SIGNAL = 3.7; EXPRESSED IN BRAIN, SIGNAL = 1.7; EXPRESSED IN LUNG, SIGNAL = 0.95; EXPRESSED IN ADULT LIVER, SIGNAL = 0.99; EXPRESSED IN FETAL LIVER, SIGNAL = 1.4; EXPRESSED IN BONE MARROW, SIGNAL = 1.8; EST_HUMAN HIT: AW247779.1, EVALUE 5.10e-02; SWISSPROT HIT: P18753, EVALUE 4.80e-01; NT HIT: X83972.1, EVALUE 1.40e-01
tgacagtcttggtgagcctgtgaaattgccagaccccagatttcaccccagaagcaggagttggtgggctgagaagcccaggctggggattctgtggcctcctctcaggtgacccagctgctgtatgcgaccctgggggggaaagaactctgtgtctttggaggtaaccgaagacagaataaaggcttggaggtggtagtggatgctgccagttgcctaactaatagctactctccctgattttggtcagagttgcgatatgcccatttagagcactggttctcccagcctcctttgcagttagaggtggcctgatggcactgttacggtaaaaaagatgtgagtgacagtcactagggatggcttttagaaaagctttgtaaaaggaccagagccagctgccattttccttttttggaactttgtgttataaaaaaattcctgcctggaatgcagaggtagtgttttggtcttagcacctattttgtgaccatggggatcaaagtcacaggcagaggatgatggagtgacaggagggagggagccttggcactgatgacattgttgg

SEQ ID NO: 1325 - DNA, 561 bp, Homo sapiens
  MAP TO AL135909.3; EXPRESSED IN PLACENTA, SIGNAL = 0.73; EXPRESSED IN LUNG, SIGNAL = 0.7; EXPRESSED IN BONE MARROW, SIGNAL = 0.54; EXPRESSED IN BRAIN, SIGNAL = 0.45; EXPRESSED IN FETAL LIVER, SIGNAL = 0.61; NT HIT: AL163300.2, EVALUE 9.00e-03; EST_HUMAN HIT: AJ003656.1, EVALUE 5.00e-02; SWISSPROT HIT: O67270, EVALUE 9.20e+00
tggcagttgattctctgagcttttttctttctgacaaataaatgttcatttcacctttagttttgaaagacatttctgttgaatatagatttctgtctttatagtttttttttcccctttcagtattttaaagatgtcactctattgtcttctggctcggaaatttctgataagaagtttcctttactttttatatttgttccactgtttgtaatatgtcttttaacctctgactaccctcagtattttccctttatctttggttttcacgcatttcactatgatgtgtctaggtatgtgtgtgcgtggtttatttttgttttgttgttttttggttcttggaagtgggaggtatttatcttaggattctgtgagagtcttggatttgtggtttgatgacttttattatttttgaaaaattttcagcatctttcccttcaaatatcttttcttctccattgtctctttcttattctggactccaattacatatatgttaaaccatttgaaattgtgccatatctttttttctaaacttctagcattttcatttggctctca

SEQ ID NO: 1326 - DNA, 568 bp, Homo sapiens
  MAP TO CHR22_149.0; EXPRESSED IN BONE MARROW, SIGNAL = 0.62; EXPRESSED IN BRAIN, SIGNAL = 0.43; EXPRESSED IN LUNG, SIGNAL = 0.52; EXPRESSED IN PLACENTA, SIGNAL = 0.53; EXPRESSED IN ADULT LIVER, SIGNAL = 0.57; EXPRESSED IN HELA, SIGNAL = 0.58; EXPRESSED IN FETAL LIVER, SIGNAL = 0.59; NT HIT: AF389851.1, EVALUE 1.40e-01; EST_HUMAN HIT: AW843795.1, EVALUE 5.00e-67; SWISSPROT HIT: P29169, EVALUE 3.20e+00
tggcatccaatgtgctactctcctggtcaggcggcccctcccttctggccctctgtcccctcgtgggttccatttctctgtgatctctcaatctgtgactccaactaccacccaatgggttgggtctggtcctcttgtcaagctccctccctgtgaacagaggggactaagttgaatttataagcatggcattccctccatttgggggcaccagtggttcccccatgcaactaaggctgaagctcaagctcctccccagggcaggtgtcaatcatctctctcacctcatccatcacctgccctggcaacctcagcactgcgaccatgtggctgccctgaacatgccgtcacattcatgcacctgcacctccttcagctcacttagcatcgagtgcacgccaggcagcactgcaggtatgggggatgcagaagtgaacaacaaagactcttttcttcacccagtctacatcctggtgctgacgatgagggtagacaatgtgcaagaagagtaagtaagttataaagtgtttcattggacaatgaattctgtggggaaaaatcaagcgta

SEQ ID NO: 1327 - DNA, 564 bp, Homo sapiens
  MAP TO CHR22_152.0; EXPRESSED IN PLACENTA, SIGNAL = 1.2; EXPRESSED IN LUNG, SIGNAL = 1.2; EXPRESSED IN BRAIN, SIGNAL = 0.4; EXPRESSED IN ADULT LIVER, SIGNAL = 0.69; EXPRESSED IN HELA, SIGNAL = 1.2; EXPRESSED IN FETAL LIVER, SIGNAL = 0.48; NT HIT: gi14861872, EVALUE 0.00e+00; EST_HUMAN HIT: BF983020.1, EVALUE 1.00e-122; SWISSPROT HIT: P31792, EVALUE 2.00e-10
tgacttcaaaaggccattccactatcctatcaatctacctgcttcacgacgatggggaacatggtaaaaccagtgaattccatgagcatgagcccactgccacacctctttagcagtaaagtgagtgctttggtcagaggcaatgctgtgtggaataccatgagggtggataaggcattctgtgaacccacggatggtagtcttggcagaagcatcgtgtgcaggataggcaaacccatatccagagtaagtgtctattccggtgaggacaaacctctgccatttccatgatggaagaggtccagtataatcaacctgccaccaggtagctggctgatcaccccgaggcatggtgccacatcgagggctcagtgttggtctctgctactggcgaattgggtactcagcagtggccatatccaggtcagccttggtgagtggaagtccatgttgctgagcccatgtgtaacctccatccctgccaccatggccactttgttcatgggtccattgggcaatgacaggggtggctggggaaagaggccgagtggtgtccacagaatg

SEQ ID NO: 1328 - DNA, 548 bp, Homo sapiens
  MAP TO CHR22_41.0; EXPRESSED IN BONE MARROW, SIGNAL = 0.72; EXPRESSED IN LUNG, SIGNAL =   1; EXPRESSED IN ADULT LIVER, SIGNAL = 0.97; EXPRESSED IN HELA, SIGNAL = 0.87; EXPRESSED IN BRAIN, SIGNAL = 0.82; EXPRESSED IN FETAL LIVER, SIGNAL = 0.8; SWISSPROT HIT: O00472, EVALUE 5.20e+00; NT HIT: AF257772.1, EVALUE 2.10e+00
agcctaggaaggttgaagggagaaaatcaccttaagttggaaatttgtgtctggctggaacttgggagaagagctgtagatggagatccagatctgggagttgccgcagacactgttggtgtcctcacccatatccctgcagccttgccttcgtagggcttgctgggatgacttccaacagtctaagggctttgctgttgtctgtggcctattctgcttacctgcatgcaagttagaagtgcctgagaattaccatcctccaggagcaacctcaactaaagattgacaggagttggtaaataaatggctcagaaccctggctcctcgagcgggataacttcaacaagcatgttctgcgttgcttcccagcattctccagcaggattaggctccagctgcccacgggagtttctgagttgattatgtacccttgattggctgtctttccttcctgttcacttctgcatcctcctttctggtgtttcctgggaccacaaataaactacttgtcctcaaaactttggctgaggatctctccttgtggtgga

SEQ ID NO: 1329 - DNA, 593 bp, Homo sapiens
  MAP TO CHR22_233.0; EXPRESSED IN HELA, SIGNAL = 2.9; EXPRESSED IN BRAIN, SIGNAL = 1.9; EXPRESSED IN BONE MARROW, SIGNAL = 1.5; EXPRESSED IN LUNG, SIGNAL = 1.9; EXPRESSED IN ADULT LIVER, SIGNAL = 2.4; SWISSPROT HIT: P34682, EVALUE 4.40e+00; NT HIT: AJ276410.1, EVALUE 8.80e+00; EST_HUMAN HIT: BE835556.1, EVALUE 5.30e-02
gtgttagaggctcagcaggctacgtgcaccgcctaaggcacgtgattctttgcagaatcaaaaagtccagggaaagcaatgaaaaagactctgctcaatgagagattttcattgagtattatttttttagacaagaacattggagagaatgttttgaaaaacacatttaactttggttatggggaagatataacaggatactaaaaagtccatatgggaaaggtgggccttcattaatgtctctttaattagccttcattaatttccccttaattagcctttgttaattttgtcattagtaaatctgcccatccatttattcactcattcacctgctgccttccgagggccaggcttctgcaggctgtggacagccaccccagggctgtggccgggtgtgttgtgggtctccagcttctcccagacctcacgactctggaagctgaggtgagccctgaagaggcaacagcagaagcccacagcagaggagacggcagcttgggccaggacggtggccctgggcacggaggagggatggacatagggagcttgcagatgcaggatgcaggaagggcagaaggaacagagccaag

SEQ ID NO: 1330 - DNA, 538 bp, Homo sapiens
  MAP TO CHR22_183_2.0; EXPRESSED IN FETAL LIVER, SIGNAL = 0.82; EXPRESSED IN LUNG, SIGNAL = 0.84; EXPRESSED IN BONE MARROW, SIGNAL = 0.88; EXPRESSED IN PLACENTA, SIGNAL = 0.86; EXPRESSED IN HELA, SIGNAL = 0.7; EXPRESSED IN BRAIN, SIGNAL = 0.73; SWISSPROT HIT: Q64176, EVALUE 3.00e-02; NT HIT: gi14777098, EVALUE 5.10e-01; EST_HUMAN HIT: BG682900.1, EVALUE 1.90e-01
tggctaagatgttggggaagacatttccagaaagaaaaaatcctgggggacggcccccagaaaattatagggagatgggaattttctacctggtcctgaagagcaggcaggaatggaaacaacaactgatcaacattcccagactctgaaaggcaggtgaatggcacagctcaccatggtacagttccatccacacacacctgggaatgccctctccatgaggaaacagaggcagaggaggcagccagtcagtagacaacatggatctccttggccatcaacctcgctgggctgtcgtcctgaagcggggtgctcagagactcacctctatgatactgagctgtgatcagcttagggatcacaaagaacacatctccaagcaagtccagaagactgtctcggatttcagtcagggagtgcttgtcatggaagtattcaccagccacaaggtgcaaataattgggcaggatgtgctgtaaaaaaatcatagtcataggagatccaggtcaaccacaatggccaacacgttaactctgca

SEQ ID NO: 1331 - DNA, 585 bp, Homo sapiens
  MAP TO AC020588.4; EXPRESSED IN BRAIN, SIGNAL = 0.91; EXPRESSED IN HELA, SIGNAL = 0.53; EXPRESSED IN PLACENTA, SIGNAL = 1.1; EXPRESSED IN FETAL LIVER, SIGNAL = 0.78; EXPRESSED IN LUNG, SIGNAL = 1.8; EXPRESSED IN ADULT LIVER, SIGNAL = 0.99; EXPRESSED IN BONE MARROW, SIGNAL = 0.8; EST_HUMAN HIT: BG571860.1, EVALUE 4.00e-09; SWISSPROT HIT: Q9M291, EVALUE 8.00e-04; NT HIT: Z14152.1, EVALUE 5.60e-01
acaataacaaggaatgcgccaaaaagcgcctcagagtctcccttccgaagtccctcttggaggcccccgaggcccccgtctactaagactgaccgaggtcttatccaagaaccatctcttgggcggcctccaatctcctcaaggcggatgggaggcgctgttggctgaatggggccaacggatgcaggtccctttaagggtggaggaaaggagggcaatgacttttctataggggaaggaaaaggctccggtctgtcctcatcctcactagcaaaaatctcttctttagcccccatagaagggaatgaagagtggggaggagtctctccctgttgtcttggttcctgtttttccttctcctttaaatctcctgaattcccttcaggcggagaagatgggcagcctgactcaccgcaatccggcagaaaaagaggctacaacgcggagcgtaccagcgctcaggtggtcaaaatagttaaaatggccttgctcatatcctctttccgggcagcggactacctgcacccataaataattctaaggttccttgatcaggaaacagagggcattcctgccgaattaaaa

SEQ ID NO: 1332 - DNA, 560 bp, Homo sapiens
  MAP TO CHR22_168.0; EXPRESSED IN PLACENTA, SIGNAL =   2; EXPRESSED IN ADULT LIVER, SIGNAL = 1.8; EXPRESSED IN BONE MARROW, SIGNAL = 1.6; EXPRESSED IN BRAIN, SIGNAL = 1.3; NT HIT: gi14777617, EVALUE 0.00e+00; SWISSPROT HIT: Q03519, EVALUE 3.10e+00
tcagtgttgctgggaaacagggccccaaggctgggagcacagtgtttaaagggcatctacccaagaagggagcacagggcaaggaggagctgcaggggggcttggctgccaaagtgaattctgaggagagagctattgctgcctacgatatgcaggctgcacagaacacaagtggaatcagcaggcaggagaggcagctaacgacgcagcccgtttcttatttctgttttctcacaagcgatgaaagtggaaaagagggtgagcaggtggcccacacatgtgcctccagtgctgcggcccctccggggaccatcagccaggccccggggagggagccagccacagtgtgtccggctcttctctgaagggaagagagccttgaatagactgaagcgaagacggttctgcaaggacaaggcagaccgaaggcattggttttttttttcagataaggagaattagactcccaagtagacaccagagtcactgtttggttggtgggtgatagtggggtcacagtggctgcctgtgctcccccagggtgagcgtgactgtgctaa

SEQ ID NO: 1333 - DNA, 570 bp, Homo sapiens
  MAP TO CHR22_170.0; EXPRESSED IN HELA, SIGNAL = 0.97; EXPRESSED IN BRAIN, SIGNAL = 1.1; EXPRESSED IN LUNG, SIGNAL = 0.93; EXPRESSED IN PLACENTA, SIGNAL =   1; EXPRESSED IN BONE MARROW, SIGNAL = 0.81; SWISSPROT HIT: P34294, EVALUE 5.50e+00; NT HIT: AF339161.1, EVALUE 8.50e+00; EST_HUMAN HIT: AW161561.1, EVALUE 2.00e-01
aacttcagtgctggagaggctgagcagcgatgccacacaggtggcccactcaacagctcactgcaggtggccacttacccctcccgttccctgcctcccaggctctcctgtcccacaccttgctcctggccctgctgcaggggagtccagtttagactcaggtgcatgggtctagttgctgcattatttccttaggttttggacatggggaagtctccatttttggtgcttaagtggcagagctttgcctgggctcagatcctgtctcctccttacgtggctcctcgtcgtcttcggggcttcttcgtctgggtcacagcctctccaacactcacgttgccatcccagctccctcttgcttgcctttgtctggatggctttgccacatgttcctggattagttgattatacatttccgaatgtcctgtaaatatcacctgatcatacatgtgcgctttagttgttttactcttactctgagaatcttgttttaactggtggatgtttcttacctgcacttgctgctgtgatccacgtctgaccctagtcccttgacgtcctcctgtgtca

SEQ ID NO: 1334 - DNA, 538 bp, Homo sapiens
  MAP TO CHR22_184_2.0; EXPRESSED IN BONE MARROW, SIGNAL = 2.2; EXPRESSED IN BRAIN, SIGNAL = 2.3; EXPRESSED IN PLACENTA, SIGNAL =   4; EXPRESSED IN ADULT LIVER, SIGNAL = 3.7; EXPRESSED IN FETAL LIVER, SIGNAL =   2; EXPRESSED IN LUNG, SIGNAL = 3.4; SWISSPROT HIT: P51852, EVALUE 6.60e+00; NT HIT: AL163227.2, EVALUE 2.00e-31; EST_HUMAN HIT: BE512633.1, EVALUE 7.00e-35
gcagagccttcatggagaacctctgctagggcagtgtggaaagaaaatatggggttggagcccccacacagagttcccacagaggcactacctagtggagctttgagaagagggctaccctccttcaggatggtagatccactgacagcttgcaccatgcccctggaaaagtggcagacactcaatgccagcccatgaaagcagtcagggtgggcatcaggggtgtagatgaaccccgcaaagccacaggggtggagctgtccaaggctgtgggaacccacctcttgcatcagcatgacctggatgtgagatatggtgtaaaaggagattatttcagagctttaagatttaatgattgccctgctggatttcagacttgcatggggcctgtttcttctttgtttgggccaatttctcccactggaatgtgagcatttatccaatgcctgtacccacattgtatcttggaaataactaacttgcttttgattttacaggctcctaggcagaagggacttcccttgtcgcaaatgagact

SEQ ID NO: 1335 - DNA, 592 bp, Homo sapiens
  MAP TO AC012661.4; EXPRESSED IN BONE MARROW, SIGNAL = 0.62; EXPRESSED IN BRAIN, SIGNAL = 0.64; EXPRESSED IN LUNG, SIGNAL = 0.7; SWISSPROT HIT: O43830, EVALUE 1.00e-108; NT HIT: gi11422701, EVALUE 0.00e+00; EST_HUMAN HIT: BG435830.1, EVALUE 6.00e-14
tttttccccagcatgagttctctgatggacagtgaggaatgacttacagcgaaaggttttcccacattcattgcattcgtagggtttttcccctgtgtgagtccattgatggatagtgaggaatgacttacggtgaaacgttttcccacattcattgcattcatagggtttttcccctgtgtgagttctctgatgtaacctgaggtttgacttattgataaagggttttccacactcattacattcatacggtttttcccctgtgtgtgttctctgatggacagtaagccttgacttatggctaaatgcttcttcacaatggtcacatgcatagggcttttcccctgtgtgagttctatgatgtattgtgaggtatgacttctggctaaaggtttttccacattcactacactgatagggcttttcccctgagtgagttctgtgatgtaaagtgagaagtgacttacagtgaaaagtttttccacattcaatacatttgtagggtttatcccctgtgtgagttctctcatgtaaagtgaggaatgacttacggcgaaaggttttaccacattcattgcatccatagggcttt

SEQ ID NO: 1336 - DNA, 585 bp, Homo sapiens
  MAP TO CHR22_140.0; EXPRESSED IN BONE MARROW, SIGNAL = 0.72; EXPRESSED IN HELA, SIGNAL = 6.5; EXPRESSED IN BRAIN, SIGNAL = 0.52; EXPRESSED IN LUNG, SIGNAL = 0.6; EXPRESSED IN FETAL LIVER, SIGNAL = 0.61; EXPRESSED IN PLACENTA, SIGNAL = 0.81; EXPRESSED IN ADULT LIVER, SIGNAL = 0.66; SWISSPROT HIT: P47238, EVALUE 8.50e-01; NT HIT: gi7662343, EVALUE 1.40e-01; EST_HUMAN HIT: BF874631.1, EVALUE 1.00e-106
acgcttccacctatgaccacctgtggcttattcccattttctaggggagcccctgaggctcagaaagggggagatgatttgctcaaggccatgctggtggaaaatgaaaaagctgggtttgaacccagggctctatcccacccatggtggtcaacctctctggcttttcttgcaccacggcactccaaaacctcctccacccatgctggaggcctctctcctggctgcccatggtcactgcacagccctgtgcacagagcctgtctctggtgctgggctggagggagttgaagtttttgaagcttccagtactggaaatgttggtggtgagcagggcaccctgaccccggctttaaaaataggaagcctgaaatagctctttctgggcctcccctttgctgtggcctttgaagccccgagtgtgcagggctgagagtccctgcgtcctgtggctgccctggacaggctctgcgaggaatccaggctggaagccaggcccaggtgggagccacagtccaccacaatagtggcttcctaaaaccaaatctttgctccccatctcgagcaggggagttgattggtgat

SEQ ID NO: 1337 - DNA, 554 bp, Homo sapiens
  MAP TO AC016692.4; EXPRESSED IN LUNG, SIGNAL = 8.5; EXPRESSED IN ADULT LIVER, SIGNAL = 8.2; EXPRESSED IN PLACENTA, SIGNAL = 9.4; EXPRESSED IN BRAIN, SIGNAL = 7.7; EXPRESSED IN HELA, SIGNAL = 4.6; EXPRESSED IN FETAL LIVER, SIGNAL = 6.6; EXPRESSED IN BONE MARROW, SIGNAL = 6.4; EXPRESSED IN HEART, SIGNAL = 7.1; SWISSPROT HIT: Q12774, EVALUE 3.50e-01; NT HIT: gi16157429, EVALUE 4.00e-79; EST_HUMAN HIT: AW292766.1, EVALUE 0.00e+00
tattcctggacacagcagccacccttgataagaacacgaagccttgacttagggatttctaatgattgtcatctgagatcttttccttttcttttttacaactctttgatttcagggctcctgtatcaggaataccgagataaatcgactctccaagaaatcgaaaccaggaggcaacaggatgcagaaatagaagacaataccaatgggtccccggccagtgaggacaccccggaggaggaagaagaagaggaggaggaggaggagccggccagcccaccagagaggaagactctgccccagatctgcctgctcagtaacccccactcaaggttcaacctctggcaggatcttcccgagatccggagcagcggggtgcttgagatcctacagcccgaggagattaagctgcaggaggtaacaggcgccgaggggcggggctcccccacagcacaccggggtggccctcactgctgggggtgaggcttcctctggggggtgaggttccctggctggttcaccagaggaatcgctggcagggttgtccatctaga

SEQ ID NO: 1338 - DNA, 577 bp, Homo sapiens
  MAP TO CHR22_78.0; EXPRESSED IN FETAL LIVER, SIGNAL = 0.86; EXPRESSED IN BONE MARROW, SIGNAL = 0.83; EXPRESSED IN BRAIN, SIGNAL = 0.69; EXPRESSED IN HELA, SIGNAL = 2.7; EXPRESSED IN LUNG, SIGNAL = 0.78; EXPRESSED IN ADULT LIVER, SIGNAL = 0.86; SWISSPROT HIT: P70459, EVALUE 2.20e-01
aggacaccagctctgacacccacctctgtctgactcaccctggatcaggtggaaggctctggcctgtcccgagcccctcctgctgctgtaacaaggaagcggagatgaacacaaagacaaaagcggcccctgccccctgggcacagtggactcgtggaaaagaccccttgtttccttctttgtcagaagcccaggaaagagcagctctttcagtttccaggactgattgctcagagtgttctaagggatgtctcttcctgaagagaaattctcctcctgaaaattacccatcacagtactttgcggtcttttctcatttctcatctcagacccttaatagccttgccagcgccaaaggcctccgtgtgactgtcagcggctattacccttgtcacctcgaacgctgccggtccccagctctgcaaaggcccagcaaagctctcgcccccgtctccagccctctccaaatgctcctgagcagcggcattgaggatctcatttcagcgagtgatgcctggcctgtgcgggggggaccctgggccggggcagggagcctggagaagggagatgtgaccca

SEQ ID NO: 1339 - DNA, 596 bp, Homo sapiens
  MAP TO AC015819.4; EXPRESSED IN BRAIN, SIGNAL = 0.76; EXPRESSED IN PLACENTA, SIGNAL = 1.1; EXPRESSED IN LUNG, SIGNAL = 0.93; EXPRESSED IN ADULT LIVER, SIGNAL = 0.94; EXPRESSED IN HELA, SIGNAL = 0.52; EXPRESSED IN FETAL LIVER, SIGNAL = 0.67; NT HIT: U78096.1, EVALUE 8.90e+00; EST_HUMAN HIT: AW514529.1, EVALUE 2.10e-01; SWISSPROT HIT: P07897, EVALUE 2.00e+00
tgaggagggaaaaccatctctcttcttttatagaaaatcaaattgactttagaaaggctagggatttgtccacatttctataaccagtagttaacagaactagctctcggactagggttcttctctgtgtacctcgttgtccaggtcgttagccactcccagcgagcctcgcctaagcctgcgctgcccctcacatacctcaggtgagtgctgcaaatgttcctgccgctgctcactgcaactgaagttaccagaggaaaaaaaaaagtcatcacatcttttttaaaagtacctgggccatccaaatcattcctgccaaaaactattctaaaatttaataagatcagcaagttaaaagtttaatttttattatgtttacaatatatgacatattggttttatgtccaatttttaattccatatcaaattgtatgtagtttatgtttagagttcatttaggttcagcatgtaagttgttatgaccttttataggtcttaaaacatgatttcagttcattcttaactttgtgttacctgctcaacatccaataaatggatgttaataaccaactatgtgccatagtgcccaaaaccta

SEQ ID NO: 1340 - DNA, 523 bp, Homo sapiens
  MAP TO AC015896.4; EXPRESSED IN HELA, SIGNAL = 0.76; EXPRESSED IN BRAIN, SIGNAL = 0.64; EXPRESSED IN LUNG, SIGNAL = 0.56; EXPRESSED IN FETAL LIVER, SIGNAL = 0.65; EXPRESSED IN BONE MARROW, SIGNAL = 0.59; SWISSPROT HIT: P57791, EVALUE 9.60e-01
agctcagtgctctttccagcatcttcctgtaatacccttagaggtcttctaatcgtgtagtgctttctgttgcccactagccaaggagcagagtgaagtgagacccaaaccagaaagtaaacctgaaatgcaggcagagagggccaatccccacatgcacagagcagaagtgcagaaaaggggggcagaggacacaactcttgtgagcaccctggacagctgttttgcatttagccatcggcaacgccatgaggctgagatgtgtctcagttttatagaggatggcaaagctcaagaggttatgcactagcagaggtcccacagcagggttcacacccaggtctacctaactctgcaggccaggaggcttccaaccacactacacagcctggagaaagaactgcacatgaagaatgagctgtggaggaggctgccatcgccatgcccatagagggcagccaggtgtggttggggaaacggtggagtgaggtcagagcctcagagaacagcaatagaggcaggc

SEQ ID NO: 1341 - DNA, 546 bp, Homo sapiens
  MAP TO AC016687.2; EXPRESSED IN HELA, SIGNAL = 0.91; EXPRESSED IN FETAL LIVER, SIGNAL = 1.6; EXPRESSED IN HEART, SIGNAL = 1.8; EXPRESSED IN PLACENTA, SIGNAL = 2.2; EXPRESSED IN BRAIN, SIGNAL = 1.9; EXPRESSED IN LUNG, SIGNAL =   2; EXPRESSED IN ADULT LIVER, SIGNAL = 1.9; SWISSPROT HIT: Q11102, EVALUE 2.00e-01; NT HIT: AF003530.2, EVALUE 1.00e-41; EST_HUMAN HIT: BF732379.1, EVALUE 3.00e-37
tgctggatcatacccaaagcttcaacaccaaaaacctcactaagatacccctctctgaaaccagagacaagcagccagcttcaaataaaggccctgcagaaaggcttggcctagtgaaaatacccaaaaaaatttattgactgtattcaatctattttgcagttaaaggaatacccacatgcagagatgaaaaaaaaaaataatgcaagaactccagtaactcaaatgcccagagtgtcatatgttctccaaatgaccacactagttctcagacaacagttcttaaccagaccaaactggctggaatgacagacatagaactcagaatatggacaggaacaaagatcgtcgagattcaggaggatggcaaaaccctatccaaggagaataagaatcacaataaagtgacacaagagctggaggccaatatagcaggtataaaaaagtacttaatgggtctgacagagctgaataacacaatacaagaatttcccaatacaatcacaagtattaacagtagaataagccaggctgagggagagatct

SEQ ID NO: 1342 - DNA, 518 bp, Homo sapiens
  MAP TO AL138842.2; EXPRESSED IN BONE MARROW, SIGNAL = 2.3; EXPRESSED IN BRAIN, SIGNAL = 2.1; EXPRESSED IN HELA, SIGNAL = 1.8; EXPRESSED IN HEART, SIGNAL = 1.6; EXPRESSED IN FETAL LIVER, SIGNAL = 4.2; EXPRESSED IN LUNG, SIGNAL = 2.9; SWISSPROT HIT: Q00174, EVALUE 1.60e+00; NT HIT: M26850.1, EVALUE 3.00e-33; EST_HUMAN HIT: BG777785.1, EVALUE 3.00e-15
gttattgtttggacgccagcggccgaacccatcagacgggctaggcgcgcacgtgcagttaccaaaatacagatgtttactgtgggagggacagaccatactggtgcagacctaggacacaaaagtggtcaaaactcttttcctgtgttccctactttgctcggtttccaggcctactcagtctaaaaagctgaagagaaaaactgacactgcgttggccgggaatcgaacccgggtcaactgcttggaaggcagctatgctcaccactataccaccaacgcatctgaaatacacttgattcctttagagtatcagaactaaataatcaggtttgtcttcccgtttatttctaggctaagcaatttagactgcaggaaaaacctacaagaggaaaattaaaaggaagctctctggaatttctcctattaaaaattctgtagtagtatcttgtttcacagctttaagaaaagtcaattctagtttcctggacatttattccacacatgcgcaaaattac

SEQ ID NO: 1343 - DNA, 591 bp, Homo sapiens
  MAP TO AC016763.5; EXPRESSED IN LUNG, SIGNAL = 0.46; EXPRESSED IN BRAIN, SIGNAL = 0.37; SWISSPROT HIT: P43572, EVALUE 8.00e-04; NT HIT: gi15295397, EVALUE 1.00e-114; EST_HUMAN HIT: AU128276.1, EVALUE 1.00e-108
tctttttgcaaacattgtagccaatgacattttgtatttttcatttagcttgtaacacttcaagaagcaaaactgctgctaaacgaagatgattaccttattaaagctgtatatgactactgggtgagaaaacgtaaaaactgcagggggccatccctcattcctcagataaaacaagagaaaagagatggctctaccaacaatgacccttatgttgcctttcggagaagaacagagaaaatgcaaactcgaaaggtaatgtgcaaattaggtttcattgaaggtagcttaatagtattcaagatcaatctttttttttctaataacttgaataattttaacataatggtagctaatggcattgatgactttctataagaaatcctacttttcgtctgatccgtggtcagacacattatccattgcgccactggcccaccacaagaaatcctacttttcagtagcttctattggccagttgtttacgctgtttatctgctacctatgccttttataaatttactgatcataccattttatgcttgcagttgaagtgataagaggaatttagtgtccttatgcaccttggaa

SEQ ID NO: 1344 - DNA, 507 bp, Homo sapiens
  MAP TO AC021011.2; EXPRESSED IN FETAL LIVER, SIGNAL = 0.77; EXPRESSED IN PLACENTA, SIGNAL = 1.1; EXPRESSED IN ADULT LIVER, SIGNAL = 0.97; EXPRESSED IN BONE MARROW, SIGNAL = 0.85; EXPRESSED IN LUNG, SIGNAL = 0.99; EXPRESSED IN BRAIN, SIGNAL = 0.98; NT HIT: Z32687.2, EVALUE 1.90e+00
gaacaccgggaaaacaaaaggatattttgtgtctctctcccaactctaacattagccctaactctgagacaatgaggtttctgaagcctaccatgtatataatggcttcaggagtagctttcactacaacttaattaagcttgagtgaggctatgagatcaatgttcccttggtagtggcatgagcaataggtaattcctatcatggtcagtttcactgctgtatcttcaaacacactctaagagtattttgaggttagaatgacatttactttgcaagttcactttttcttttcttttttttttttttctttttacagctactctcatcttgtaaagaaagcgaaggctaacattgaatttccaaggttttggaatgacctgtgtcagaactcttctggcatgaaatattatgcattattcgtaatgcccaaaaccttcaaaattcaacaagcatgatttaatttcaggtcagtagataaaattagtatgacatttttggcattgc

SEQ ID NO: 1345 - DNA, 551 bp, Homo sapiens
  MAP TO AF235095.1; EXPRESSED IN HELA, SIGNAL = 0.78; EXPRESSED IN PLACENTA, SIGNAL = 0.8; EXPRESSED IN FETAL LIVER, SIGNAL =   1; EXPRESSED IN ADULT LIVER, SIGNAL = 0.93; EXPRESSED IN BONE MARROW, SIGNAL = 0.72; EXPRESSED IN BRAIN, SIGNAL = 0.56; SWISSPROT HIT: Q9NV58, EVALUE 6.00e-26; EST_HUMAN HIT: BI869381.1, EVALUE 2.00e-87; NT HIT: AJ242975.1, EVALUE 2.00e-87
gatacccttcctccccactccaccccaagtacagttcggaggcctggcacttcaaaagaaaaaagtttgcatctctctctttttccccttatgtgcattacctgaaaggctgggaaccttgaatttgcttaacaactgggtaaatctacttttggcaaatgttccagccaactcttcagaaccctggcgcttttctctgtatgactctcttgaaaagactttctaaaactcatgtttctgtgagttattttgttgttgttgtttgtaatgactgatttaatttctctttaggtatcggtgttcctattatgttagcttatgtctatggcgtagttccaatttctctttgtcgaagcggaggttgtggagtctcagcaggcaatggaaaaggagttaggattgaatttgatgatgaaaatgatataaatgttggtggaactaacacagctgtaggtaagtcctttaagcaaaggaagaaaatgtgcttattaacagtgtaagtagtggggaggccagagataacatgcaactcagaatttccattgccatcc

SEQ ID NO: 1346 - DNA, 593 bp, Homo sapiens
  MAP TO AC013816.3; EXPRESSED IN FETAL LIVER, SIGNAL = 0.56; EXPRESSED IN PLACENTA, SIGNAL = 0.51; EXPRESSED IN BONE MARROW, SIGNAL = 0.43; EXPRESSED IN LUNG, SIGNAL = 0.46; EXPRESSED IN ADULT LIVER, SIGNAL = 0.36; EXPRESSED IN BRAIN, SIGNAL = 0.56; SWISSPROT HIT: Q00083, EVALUE 5.80e+00; EST_HUMAN HIT: BG539472.1, EVALUE 8.30e-01; NT HIT: AJ314911.1, EVALUE 2.20e+00
atggctcaggttccatcttgagcagtgattccttagggctaagttttgtcttccctatgggtctttcaacatgcagatactctagtaatgggttgcatgacattggatatatttagcaggttacttcttctttgctaggggagagaagaaggagggggaaagcactgagaaacaaggaaaaggggatcattactcaaaatgtcaagaacccgaaaagaggtaattatgggaggaggatgttttcaatcagattcacctattttccatgttgcctggagcaggccctggtccccaagagataagtgaagttgttaagggactttgccatgtttcttagagatgtattcaggaatatgttcctcattaatcacaaaaatatcaacactgaagggaaataaattgtcttagaattaagatatcatctacctaaatgaccttctcttttaaatgttgacaattgaagaagaatctagtatttcagtactaaatcagtctgggtgatattgaattacactcttaacatagggaagaagtcctcttattttcctctttggtagaggaaaacctttctctctaacttctccccaccctgg

SEQ ID NO: 1347 - DNA, 510 bp, Homo sapiens
  MAP TO AC016078.3; EXPRESSED IN BONE MARROW, SIGNAL = 0.57; EXPRESSED IN BRAIN, SIGNAL = 0.58; EXPRESSED IN FETAL LIVER, SIGNAL = 0.71; EXPRESSED IN PLACENTA, SIGNAL = 0.54; EXPRESSED IN ADULT LIVER, SIGNAL = 0.71; NT HIT: gi14752597, EVALUE 1.00e-20; SWISSPROT HIT: Q9Y490, EVALUE 4.00e-23; EST_HUMAN HIT: AA548965.1, EVALUE 2.00e-26
ggaggagaagagaggggaagagaaagaaaaataaaagatcatttactctaagaatccaggtttgtttttatgtccaatgaggtccaagttacagctgggcttgaaatccaccaaactcacaaattttctcaaaggctaaagggtgggagccattcagatgtcctccctgagcctgaatatacagcaaatgcagctgcacaaggtccctggaatctacaaagtgatcagagtaaggaagtttccatctaagctgcaatgtttcattttcatcgaccacttgttttctgagtgtatagctgtaatccagctaattttggtcatcctctatgtgaagtttggccttcagcttctccatttccttctcatatcataacagtgtcctgtttatttggtttttgtttttgttttgggtgtatttacccttcctctttcttttcttcaataggtaataggattaagagtaatctttacagtttattatttctattctgctgcaaatggtaaacacga

SEQ ID NO: 1348 - DNA, 561 bp, Homo sapiens
  MAP TO CHR21_64.0; EXPRESSED IN LUNG, SIGNAL = 0.87; EXPRESSED IN PLACENTA, SIGNAL = 0.93; EXPRESSED IN FETAL LIVER, SIGNAL = 1.8; EXPRESSED IN BONE MARROW, SIGNAL = 1.9; EXPRESSED IN HELA, SIGNAL = 3.5; EXPRESSED IN BRAIN, SIGNAL = 1.7; EXPRESSED IN HEART, SIGNAL = 1.4; NT HIT: AF260522.1, EVALUE 5.30e-01; SWISSPROT HIT: Q89892, EVALUE 8.10e-01
ttcatgtgcaaagatctgcctgaagaattgtcttttgtgttctgaagtccaggagacatggcctctcaaacccagaggggaagttcactcccggagcttctgtgaagtcccaagtcctttctgggaaagacgagagatgaatccagccctagcatttgccgtgatcagtgtctctgcacaggcgcccacctaggagagcctcccagggtgtccaccacccaccctaacagtgaacagcagatacgctgctccttcaaatcccaccctggtggcggctcctcagggaccctgagtcacgccatgatgctgggaggcggccgggcagcgtcagaggcagggcctgccagcctgctgcaggccagccaggcctgccaagagtctgccccgggcaaccccgatgatgcatcctgcgagtctgtgcccatgccgggcagacgaaggaatgtggcccagatggctgccctgcctctgccaggtggcttggttaagcctcccttgggaatgcccaggagcaaggtgacttgacatttttgcctgtacccaaggctgggaccaatttta

SEQ ID NO: 1349 - DNA, 515 bp, Homo sapiens
  MAP TO AL138752.2; EXPRESSED IN BONE MARROW, SIGNAL = 3.9; EXPRESSED IN BRAIN, SIGNAL = 3.1; EXPRESSED IN PLACENTA, SIGNAL = 3.6; EXPRESSED IN LUNG, SIGNAL =   4; EXPRESSED IN ADULT LIVER, SIGNAL = 4.2; EXPRESSED IN FETAL LIVER, SIGNAL = 4.4; SWISSPROT HIT: O15162, EVALUE 3.60e+00; EST_HUMAN HIT: BI087329.1, EVALUE 0.00e+00; NT HIT: gi13907843, EVALUE 1.90e+00
agaggagaaggtcctcaggggccaggggctcctcaggcttcctttgttactccattgcttgcttctctgccctcaggagcagctgcagaggacagtcttcattaagctcaagcatatgacaaaggggcagaacagaaaagaaaaacagcttattaggtataggcttttcatgataaattgcttgtattagttttgaaactaagcacctattggataggcattatactatttctatttagatatggtagatcaaggagctatgaaagttcctgttttgctttctaggtttgaaagttttctgtttgattctgactgtgatcttcaacccttccaaaatgtccttgtgttataatttcacttatttcattgccaaaagatgaagggacttgaatcttgttatagttgttccatcctgttaacaagttttcattttgtgtgtggatcaaattctggttagcttggtttctttgaattactggtgccatctcagcaaaggcctgtggttatttttcccc

SEQ ID NO: 1350 - DNA, 562 bp, Homo sapiens
  MAP TO AC024195.2; EXPRESSED IN BONE MARROW, SIGNAL = 0.99; EXPRESSED IN PLACENTA, SIGNAL = 1.1; EXPRESSED IN BRAIN, SIGNAL = 2.6; EXPRESSED IN LUNG, SIGNAL = 1.1; EXPRESSED IN FETAL LIVER, SIGNAL = 1.1; SWISSPROT HIT: O95167, EVALUE 5.00e-03; EST_HUMAN HIT: BG661219.1, EVALUE 2.00e-13; NT HIT: AL163278.2, EVALUE 1.00e-14
ttttgcagacaaactgcaccaacaaatcctgtgacctttttggtatagtgcacccttagcacctcttgacaaataaaaattgtatatacttatggtgtgcaccatgatgtttttatacatgtctacattgtggtgagtaaatcaagctttttaacatatgcataacctcacacacttatcattttttgtggtgagaacacttaaaatatactctcttaacaattttcatgtgtaaaatatattattttttttcacatttttatagggggctgtaggaagggggcctcctcactgtcgagtgaggtggtcacagtttctttggcagctccaagctgggcactgggggtcctggaggtggctctgtatgtcagcatgttcctaccaccttggaagggcactagatagtttcagggcgtcacctggttggtcatgatgttgtacttggtaggggctgagtattggcccccatggtgaaggacatgactggcaccagctccatggcccaggcatttttgaggaaggcatgagtcctagaggggtaggtgagtgggggtcacctcta

SEQ ID NO: 1351 - DNA, 552 bp, Homo sapiens
  MAP TO CHR22_117.0; EXPRESSED IN FETAL LIVER, SIGNAL = 0.93; EXPRESSED IN BRAIN, SIGNAL = 0.9; SWISSPROT HIT: P01708, EVALUE 1.00e-48; EST_HUMAN HIT: AA405128.1, EVALUE 0.00e+00; NT HIT: X57825.1, EVALUE 0.00e+00
tcctgttggatttcatggtgggaaaggagaggagctgagagagaagaattctcaaggccgtgctgcaggaagccccttgcacagggtgaggaagcatcttcagagcaaaagggagcctgagagcccagggtgggttttggtctcagttccccaggaacttggaccactgtggaaagtgtagctgcctgcatatgagcagcagtaataatcagcctcatcctcagcctggagcccagagatggtcagggaggccgtgttgccagacttggagccagagaagcgatcagggacccctgagggccgcttactgacatcataaatcatgagtttgggggctttgcctgggtgctgttggtaccaggagacatagttataaccaccaacatcactgctggttccagtgcaggagatggtgactgactgtccaggagacccggacactgagcgaggctgagtcagggcagactgagcccaggatcctggaaagagggagaaacacactctagtgagtcagtgctgggcccaggtgagcctgaggagcaggagaccaag

SEQ ID NO: 1352 - DNA, 551 bp, Homo sapiens
  MAP TO AC016672.4; EXPRESSED IN PLACENTA, SIGNAL = 8.3; EXPRESSED IN FETAL LIVER, SIGNAL =   5; EXPRESSED IN LUNG, SIGNAL = 6.9; EXPRESSED IN ADULT LIVER, SIGNAL = 6.6; EXPRESSED IN BONE MARROW, SIGNAL = 5.6; EXPRESSED IN HELA, SIGNAL = 2.3; EXPRESSED IN BRAIN, SIGNAL = 6.6; EXPRESSED IN HEART, SIGNAL = 6.4; SWISSPROT HIT: P34576, EVALUE 3.00e+00; EST_HUMAN HIT: AA404234.1, EVALUE 8.00e-04
ttcccaagtctcactcctggagggaggggcacaggcatgagcagcctatcgggccccatgtcatgcagctatgttctctgctgctggtgagcttggcatcgaaagaaaacatagcaggaatgattttgtctgggttggggatttgggggagtttagactataaatagtgaggaggatataaaaagccttaagaggatttttggaagccctaaatccaccacatagaccaaagcaagttaacaggaaccacttcggttttagtgaggtctaaatgtgactcagcatagtgccctcccctccactgttcccttccagctgtcgtggttcacgtgtccgctgtcaccacaacccttgccagcatctgccaaaccaagggcacgtgtgtcaggaggtctgctgccagcatgccagctgccaggtgctgcctagccttgaattacggcctggctcactccctaagggaaggcatcattggcagcctcttctgcagcagagaaaacggaagcataggagggtaggtgcctggtccagggtcacacagccagcaagta

SEQ ID NO: 1353 - DNA, 566 bp, Homo sapiens
  MAP TO AL121830.11; EXPRESSED IN PLACENTA, SIGNAL = 1.3; EXPRESSED IN FETAL LIVER, SIGNAL = 1.4; EXPRESSED IN ADULT LIVER, SIGNAL = 1.2; EXPRESSED IN BONE MARROW, SIGNAL =   1; EXPRESSED IN BRAIN, SIGNAL = 1.1; EXPRESSED IN HELA, SIGNAL = 1.2; SWISSPROT HIT: O15360, EVALUE 2.40e+00; NT HIT: M74041.1, EVALUE 2.00e-03
caaaatctcaggagcaacccttaatgtgtcccttatatccacaggtactcttcacatggagagtcaaatccaaccaaagatgaaattcctcacctgtaactatttgcatgattttcacgggcctgcctggcccaggcactattcttttcccagtgactggaacattaatgggaacactgatgggtgtaagaaatgtgttaacataaaaatgttttattttcccttcttgactttcataaataaggcccgtttcaatacggggacgcttgaagcaaagaaagatcaaaatgaatctcagtgttccttcaacggcggccaaacatctcttcttgtgtgagaatgtcacagtgaagatgtctcagtttcttagtctctattagaaatttaaaattattattatttttaaaggcttcagtccaatttctcagagacttcacctgaaaatggaggcactgaaaaagccatgaggagctgaaaacaagcagagtattttgagaagcccagaaaatgtttcctagcccttctcacaccgtgcgtcagtgcagggcacggcactaaattcaggt

SEQ ID NO: 1354 - DNA, 585 bp, Homo sapiens
  MAP TO AC011977.3; EXPRESSED IN BRAIN, SIGNAL = 0.67; EXPRESSED IN PLACENTA, SIGNAL = 0.92; EXPRESSED IN LUNG, SIGNAL = 0.6; EXPRESSED IN FETAL LIVER, SIGNAL = 0.67; EXPRESSED IN BONE MARROW, SIGNAL = 0.44; SWISSPROT HIT: P46531, EVALUE 5.70e+00; NT HIT: AL163210.2, EVALUE 1.00e-45; EST_HUMAN HIT: AA701022.1, EVALUE 3.00e-22
atgcctcaaatgaggaccacttgactggtaagaggaaaatgcctcaaatgagcacacacacaacctcagtaaacacagtgcacatgcagcccctcccaagtgctggcaggccactgtacatgcagacagcccaccccaagggaagaatcagggaagaagaaatgcaaacctcagaatcatgccaatgtataaaaccccaggtcaagggctgaacactgcactcagatctttcaagatgcctgcttggccctcttccaagtgcactttacttcctttcgttcgttctctaaaacttttaaataaactttcactgctgctctaaaacttgccctagtctctcgctctgcactatgccccttagccaaattctttccactgaggaggcaagaactgagtttgctgcagacctgttggattcactgctgctaacaggtagaggctttctattctgcttttcatcaactcctccaccacaactatacatcttcctcctagtaagttaatgtgtgttcaggaatgggaaactcagcctctaatgtcaaatgtctattttaaggctataaatccctcaagaaaccaaatgct

SEQ ID NO: 1355 - DNA, 542 bp, Homo sapiens
  MAP TO CHR22_182.0; EXPRESSED IN BRAIN, SIGNAL = 0.54; EXPRESSED IN BONE MARROW, SIGNAL = 0.55; EXPRESSED IN PLACENTA, SIGNAL = 0.39; EXPRESSED IN ADULT LIVER, SIGNAL = 0.53; SWISSPROT HIT: Q12967, EVALUE 2.00e-03; NT HIT: gi14736676, EVALUE 4.00e-11; EST_HUMAN HIT: AW904288.1, EVALUE 7.00e-35
attcccttaaattccacccggtcatttctgtgcttggaaaacccagtgaaaaatgactggtgtggtgaccttttctccttttccagatcctgctccacgtcctgggcaacacgcattaacaatgccggccctggagccagcaccaccactgctggcggacctggggcctgctctggagccagagtcacctgcagccctgggtccaccaggatatctacattcagcaccagggccagcaccagcaccaggggaagggccccctccagggacagtgctggagccacagtcagccccagagtcctcctgtccctgtcgtgggtctgtaaagaaccaacccagtgaggagctgcctgacatgacgaccttccctcccaggctgctggcagagcagctgaccctcatggatgcggtgagcagctgagctttgcaggctgtgtctctggcaccagctgtctcagaccagcctctccctgaggagcagccaatgccctcggtccaatttcagccccacttcttaccaaccgtgggatctggatgagttt

SEQ ID NO: 1356 - DNA, 527 bp, Homo sapiens
  MAP TO AC011980.3; EXPRESSED IN FETAL LIVER, SIGNAL = 2.1; EXPRESSED IN HELA, SIGNAL = 1.3; EXPRESSED IN LUNG, SIGNAL = 1.7; EXPRESSED IN BRAIN, SIGNAL = 1.8; EXPRESSED IN HEART, SIGNAL = 1.3; EXPRESSED IN PLACENTA, SIGNAL = 1.8; EXPRESSED IN ADULT LIVER, SIGNAL = 2.4; EST_HUMAN HIT: BF848408.1, EVALUE 1.90e-01; SWISSPROT HIT: P77268, EVALUE 5.00e-02; NT HIT: AF009227.1, EVALUE 0.00e+00
acagaccaaaccagccactcaccagtctcagtgttttcatgctcggtgtcggtgagtgtgagattggaattggcccggctggacaggcaggagctgcgccctgaccgtgtgctccggcacccacagacgcacggggtgctcaggggacagcaccgtgtcagcctccatgtcggcatcagagccagcccccatggagtagccgcagtgggggaggccaatgtctgtccggtacagggtcccgtgagggggcgttacttcttccagccccagctcccgcagggtgaagttggcacctgggaggaaacacaggtgaacttggttagggcactgagatgaggtctgcgtctgcctctgcctgaagcctggccttcttaccccagggctcactgtcgttctttgaacttgctgtggcattctatgcccatgcctttgttcaagtgattgcctctgcctggagggctttttctgccccctcttcatcagcctgaaccctccatttcccttaagcctcaactcaaatggcacct

SEQ ID NO: 1357 - DNA, 565 bp, Homo sapiens
  MAP TO AC023152.3; EXPRESSED IN LUNG, SIGNAL = 6.3; EXPRESSED IN BRAIN, SIGNAL = 7.1; EXPRESSED IN ADULT LIVER, SIGNAL = 6.6; EXPRESSED IN FETAL LIVER, SIGNAL = 6.2; EXPRESSED IN BONE MARROW, SIGNAL = 6.2; EST_HUMAN HIT: BG772465.1, EVALUE 0.00e+00; SWISSPROT HIT: Q99321, EVALUE 9.40e-02; NT HIT: gi15314336, EVALUE 0.00e+00
ccagcttcatctctccctccgctccccgggctcgggggcagacggcagacggaggcgcctctctctccccgcccctctcctcggccctttctcttcccagcacctcggctgctgcccggcagcggcagcagctgcgtcggcggcccacacagcagcgagaggcgagaggaggctgcctcgaggatgaagtgcaaacccaaccagacacggacctacgaccccgaggggttcaagaagcgggcggcgtgcctgtgcttccggagcgagcgcgaggacgaggtcctgttagtgagtagcagccggtacccggaccgctggatcgtgccgggcggggcatggagcccgaggaggagccgggcggtgcggcggtccgagaggtgtacgaagaggcgggagtcaaggggaagttaggccggctcctgggcgtcttcgaacagaaccaggaccccaagcacagaacgtacgtgtatgtactgactgtcacggagctgctggaggattgggaagattcggttagcattgggaggaagcgagagtggttcaaagtcgaagatgccatcaaggt

SEQ ID NO: 1358 - DNA, 509 bp, Homo sapiens
  MAP TO AL137840.3; EXPRESSED IN FETAL LIVER, SIGNAL =   2; EXPRESSED IN ADULT LIVER, SIGNAL =   2; EXPRESSED IN BONE MARROW, SIGNAL =   2; EXPRESSED IN BRAIN, SIGNAL =   2; EXPRESSED IN HELA, SIGNAL = 1.1; EXPRESSED IN HEART, SIGNAL = 1.6; EXPRESSED IN LUNG, SIGNAL = 2.3; EXPRESSED IN PLACENTA, SIGNAL = 2.3; EST_HUMAN HIT: BF701630.1, EVALUE 1.00e-05; SWISSPROT HIT: P08547, EVALUE 2.40e-01; NT HIT: AL163284.2, EVALUE 3.10e-02
aatcatggccttcagtctgccagaacttcagtgaataaacatccttactgggtatcctagtcttgtttcaaatcaggggtgtatgttcatagcaaatgtagtctcccacaacatggtttttaccagtgtgtagggttgggggaggagtgggtacacatgtgctggaagttgttctgagtgtttacatgcagaatactatctaacaccaacatgtacaccagtgtgggcattgttacattttgtaatggagattgtgtccagtgcaaaagaaaaacaaaaggcatttagtgtggaaggggagaagtaaaagtatcctttgtcaaagaccacatgagagcctgtgtagaaaagtcgatctaaaaaaaaaaaaaaaaaaaggctttgacaataattgagattagcaagattgcaggatagaagatcaacacacaaatcaattgtatgtttatatgttagaagttatatattagaagtttatatattagaacagtcagtgtttcagccaatgg

SEQ ID NO: 1359 - DNA, 535 bp, Homo sapiens
  MAP TO CHR22_122.0; EXPRESSED IN BONE MARROW, SIGNAL = 0.41; EXPRESSED IN PLACENTA, SIGNAL = 0.52; EXPRESSED IN LUNG, SIGNAL = 0.45; EXPRESSED IN ADULT LIVER, SIGNAL = 0.53; EXPRESSED IN BRAIN, SIGNAL = 0.45; EXPRESSED IN FETAL LIVER, SIGNAL = 0.5; EST_HUMAN HIT: AA777415.1, EVALUE 1.20e-02; NT HIT: AF004877.1, EVALUE 7.90e+00
tggaaggtgtcattgctttgttcctcatttgtgacaaggagattgcatagcatttaccatggggactcagtgggacgaaggatgtgaatgtgccccaagtgccttcaagggccatgccaacaggaggacgtttcatttgatgaagacacatcttgggagctgtcctggatcccggaggatgaattctgatttctccttcctttgcagaaacatcttccaagagcctgccatcagctctgccatcagccctgccatcagctctgccatcagctctgccagtactgacaaggactcccttggaggcacttccccttagaggcccagatcactggtatttgtaatcagcctatatttagcagatgacaattacactgactggggaggcacatttgaattcaccactcagttggcaagaagaggagaggccgtcactcacccctctgtgagtgagctctggtgaattcctgggagctaaagctttctaaactgtcttttcatcatctctaaaagcatcacgttctaatgaggtccccag

SEQ ID NO: 1360 - DNA, 593 bp, Homo sapiens
  MAP TO CHR22_179.0; EXPRESSED IN FETAL LIVER, SIGNAL = 0.92; EXPRESSED IN BONE MARROW, SIGNAL = 0.82; EXPRESSED IN HELA, SIGNAL = 0.83; EXPRESSED IN BRAIN, SIGNAL =   1; EXPRESSED IN PLACENTA, SIGNAL = 0.92; EXPRESSED IN LUNG, SIGNAL = 0.79; EXPRESSED IN ADULT LIVER, SIGNAL = 0.92; SWISSPROT HIT: O44783, EVALUE 9.00e-03; EST_HUMAN HIT: BI755477.1, EVALUE 2.00e-69
tccactgcccactacctctcacccaggaagccggctcccacgacgaccacgttgcggcctcgggccagcctcaccacgcgattggcatcctctggcgtccggatagtgaacacgttctccacttctttgcctttgcagctcagagtcttggggctgagacatggccgtgtcagtgagggcctcctggcagccccagccccgtccaggccagtgccctgcctagtgtccgatgggtaaaaaggagaccctcccacctgctccctggtgccagcagcagcttgctgtactccagcttgaagccatccttgaacacgaccttcttagttctcacgtccactgtgaccacctgcaatccccaccaggcagagcatgagcttgggcatggggctgggcctcgccgcccactccccggtcctgcagtacacccacagcccagccacagcctctgagaagctcccattaaaacagatcctgccacctgggcttcattctttacgcttcagacatcaccttcccctcaaacctctccttaccctcccaagtcccaccagtatctcctatccagccctgatcgttcatctccacacaccgtg

SEQ ID NO: 1361 - DNA, 556 bp, Homo sapiens
  MAP TO AC012360.2; EXPRESSED IN BRAIN, SIGNAL = 0.41; EXPRESSED IN FETAL LIVER, SIGNAL = 0.41; EXPRESSED IN BONE MARROW, SIGNAL = 0.41; EXPRESSED IN ADULT LIVER, SIGNAL = 0.32; NT HIT: AF273253.1, EVALUE 2.10e+00; SWISSPROT HIT: Q03214, EVALUE 5.30e+00; EST_HUMAN HIT: BE782729.1, EVALUE 3.10e+00
tgttcaaaacctccccaaacccatatgattaacataaaataactacttccatattctacatcactattaatttccagagaaaaacactgaagaactgtgtgggctgcctttgaggatgaagcagatgtctgccaagatctgtttccattctgaggagcacaagctaaacatcagcctcttcactcctcatttacacccttaccctgagtcgatccatcaagaccctccactgagagggacaaattataatgatctttgtatgaggcagtttgaacttgccttcctgttgcttgtaaactaagtcgcaacccaagctactgagaaatctctgcacgtcggatatttttctcctaattgataagaaagtgctcaaaaatagaactgtcatctgacaaatcctggaactaattgccttacacgtagcaggctgctaaatgtgaccagcattctcccctccattcggtggttcccaaggaaacgaggttaatgcattcatgactaacgtttgccttgtcaatcctagttcactgcggtaggcatagagcatgaggggaaa

SEQ ID NO: 1362 - DNA, 501 bp, Homo sapiens
  MAP TO AL137796.1; EXPRESSED IN PLACENTA, SIGNAL =   3; EXPRESSED IN LUNG, SIGNAL = 2.7; EXPRESSED IN ADULT LIVER, SIGNAL = 2.7; EXPRESSED IN BONE MARROW, SIGNAL = 3.2; EXPRESSED IN BRAIN, SIGNAL = 2.8; EXPRESSED IN HELA, SIGNAL =   2; EXPRESSED IN FETAL LIVER, SIGNAL = 3.1; EXPRESSED IN HEART, SIGNAL = 2.2; EST_HUMAN HIT: BG116464.1, EVALUE 1.80e-01
ccctcgggttactcacaaagagggtggtgagagcacagtgaaatagggtagggtgggaaatgggatgggagtgctagagaaatgacaccaatagtaaaactgctgcagacattcaaaggagccagaaaccttcccggaggaggtggtgcttgcagaggtcctggatgggatttgggcaagattggtggttcttttcagcagagaatcacaggatttaggcatttctgagacttctgtctctgttttcttctccatcagcaagcaggctgctctgtttctcacctccacgctcttgctcctactgctgcttctgcctggaatgtgggcagtttgtgagcttggaggatccattgcatccattcttcaagacttagctcatgtcttttgctctggattttctgactggctcactcccctccagaaagaaaagtccttttctcccttgtacctctactattcttagagcatgtatcgctccacacgtggctctttatggcactt

SEQ ID NO: 1363 - DNA, 516 bp, Homo sapiens
  MAP TO AC016709.4; EXPRESSED IN BONE MARROW, SIGNAL = 0.72; EXPRESSED IN PLACENTA, SIGNAL = 0.94; EXPRESSED IN ADULT LIVER, SIGNAL = 0.79; EXPRESSED IN BRAIN, SIGNAL = 0.83; EXPRESSED IN LUNG, SIGNAL = 0.86; EXPRESSED IN FETAL LIVER, SIGNAL = 0.6; SWISSPROT HIT: P57842, EVALUE 8.20e+00; EST_HUMAN HIT: AI580039.1, EVALUE 7.20e-01; NT HIT: AE007644.1, EVALUE 7.70e+00
ctttgtgggcttattggtggcatgacttgcatcctcatacctgagaaacttgagccataagtcacataatctttgtagctcactgttgctggatttattcactaaacatcaaaattaggtaaaggagtatcaaaaagcacaaaaatagcctacctgaatgtcaaatacattcctccctacctcctcttgataatcaggttcagttctctctgacaagatgaagaattccctttttgcctgccggacccttggcactaagtccttgaaatacctaaacaaaagcggtagtttttcttgctgtatttcccacaatagaaaagtttcccctctagaataaaaaatctccaaacccacaagaatcacttcagtacttcactcatgcctcttccctagtctgtccattgctctctccatctgaaatgggaaaactcttaagggatctttcaattgcaccatccaaagctatttgctgaatatgtaacacaagtcagattttccttctgcctaatcctgcct

SEQ ID NO: 1364 - DNA, 591 bp, Homo sapiens
  MAP TO AL137793.1; EXPRESSED IN BONE MARROW, SIGNAL = 2.9; EXPRESSED IN BRAIN, SIGNAL = 2.8; EXPRESSED IN HELA, SIGNAL = 1.9; EXPRESSED IN HEART, SIGNAL = 2.6; EXPRESSED IN FETAL LIVER, SIGNAL = 2.9; EXPRESSED IN LUNG, SIGNAL = 3.3; SWISSPROT HIT: Q07821, EVALUE 1.00e-23; NT HIT: gi14736236, EVALUE 0.00e+00; EST_HUMAN HIT: AU132569.1, EVALUE 0.00e+00
cctccaagaaagaaaagcccaggaatgcgcccaccgtgtccatggggacaggctgaggcggccgggctccgaggcaccagggctccaggacggcgaagatgtcagcttccttagtctgggcaactaaaaaaactaaaaaactagaaaaactaggaaaactaaaaaaactagaaagaggaaactgcagcccaacggggctgccttcaccctgacaccctcagcagtaaacaagataaaacaacttcttaaagataagcctgagcatgtaggtgtaaacgctggtgtctgaatcaggggctgtaatggcctttcttatactgtagaatatacaaagacaaaaggagattctgatgaagaagttattcaagatggagtcagagtattcatcgaaaagaaagcccagctaacacttttaggaacagaaatggactatgttgaagacaaattatccagtgagtttttgttcaataacccaaacatcaaaggaacttgtggctgtcgagaaacctttaatatttgaaatctcaggactcttctggccataggctccaggaaagctcgtggaagccttggggctcactgaagaaatca

SEQ ID NO: 1365 - DNA, 526 bp, Homo sapiens
  MAP TO AC019196.4; EXPRESSED IN PLACENTA, SIGNAL = 0.78; EXPRESSED IN BRAIN, SIGNAL = 0.65; EXPRESSED IN ADULT LIVER, SIGNAL = 0.55; EXPRESSED IN FETAL LIVER, SIGNAL = 0.66; SWISSPROT HIT: P30848, EVALUE 4.90e+00; NT HIT: AL139074.2, EVALUE 7.80e+00
ctgtcctgaccaacctttccctccattttacctgaatccttaagggagtccacatctttcctattctgacctcccggatgtgggtcttcatcactagttgtgtgtgtgcgtgcacatgtgtgtgcacatgtgtcctggagtggggaagaggcatgtattatttctagaattctaaaagaacaagtaaccaaatgctttaaatttatagctttgtccatgttgccctgttcctctaggattttaaaatacaggctcattatattgaccaattttcacaatactaacagcaattttgaaagttgtctggtcatttttttttaaggaaacctcaactaaggtaaatacttctataattatgtcatttacacttggcttattttctaacttaactataaaaatgaacataaaattaccttctactatcttgtctaaatctttatctttctctcctaaatatgctgtcaatattgtgagggccattgcccattagaatatgataagcagtcgattttcttcccgcagaaca

SEQ ID NO: 1366 - DNA, 599 bp, Homo sapiens
  MAP TO AL138784.1; EXPRESSED IN ADULT LIVER, SIGNAL = 3.6; EXPRESSED IN FETAL LIVER, SIGNAL = 3.5; EXPRESSED IN PLACENTA, SIGNAL = 3.9; EXPRESSED IN LUNG, SIGNAL = 3.5; EXPRESSED IN BONE MARROW, SIGNAL = 3.5; EXPRESSED IN HELA, SIGNAL = 1.9; EXPRESSED IN BRAIN, SIGNAL = 3.7; EXPRESSED IN HEART, SIGNAL =   3; SWISSPROT HIT: Q9Y5V3, EVALUE 1.30e-01; NT HIT: gi14733822, EVALUE 0.00e+00; EST_HUMAN HIT: AL041979.1, EVALUE 0.00e+00
ccatgcgtgacatcagctacctgcacagggaccttggggacgtctgcctggggtgcatctgtcctggccacggtggaggagagtctggccagcttggcttccacctcggcaaacgggtcctgcaggcctagtaacccctgcaggggcacctcctgcggctcctcttgcgggaggtagttctgttcccccagcaggtgcccagcggcctcctgcccgaggcactcatccaggaagtatctgctcctggactcctcagtgggcatggagacctccacgttggagggctcctcaggcccagggaaagcctcggacacagaggtttcttcgagcgaggatgactcactggagcccagagaaatctcagatttggagggttccaccttgggcagctccgcaaacctggaggaaacctgagtcttggagacatcgtcactgggcagagtgtcagtcgtggagaagaccttgggtttcaccactgtctcatactgaaaagcaggcgggtactcagcgctgctggcaaactcagccctggacatgacctcagccttgtagaggactcccacctgcaggacagcctctgcaaaatggagaacttcctt

SEQ ID NO: 1367 - DNA, 562 bp, Homo sapiens
  MAP TO AC015845.4; EXPRESSED IN LUNG, SIGNAL = 0.47; EXPRESSED IN BRAIN, SIGNAL = 0.38; EXPRESSED IN PLACENTA, SIGNAL = 0.52; EXPRESSED IN FETAL LIVER, SIGNAL = 0.51; EXPRESSED IN BONE MARROW, SIGNAL = 0.59; SWISSPROT HIT: Q56313, EVALUE 4.10e+00; EST_HUMAN HIT: AA491841.1, EVALUE 2.00e-01
gaaggcttcagcaagactggacaaacccagggacctctgctaggaaacatgactaagcttgtccttctgaatgaaagaggaagggctattagcattgatgaggtccacagggaattcagtgttatacaggaatattttttgtatatgacagagaaaaatgtagaaaacagactgattgattgacagacaacctaattttttaatctggacatctttaataaattctgtaatgcaggattatcaatcttatctcacctggatttctacccttcacaaagagatggccttgattttagaggccagagtaagtgccttctttatcaaaaggctcactgtcaatgtccaagttgagcggccctgggtcagtcctcaggaacaaaatttcatcaactttttatggtaagagagtttttctgactagttacacataggtaatcactctctttacataaaaccttcctggatttgaagtgcaagcaaaatgcaaatgccactttcatctggatgcggtaatgcggctccaagaagctaaagtcactgtcgcaagtttcacattggcaga

SEQ ID NO: 1368 - DNA, 521 bp, Homo sapiens
  MAP TO AC019287.3; EXPRESSED IN FETAL LIVER, SIGNAL = 0.42; EXPRESSED IN PLACENTA, SIGNAL = 0.64; EXPRESSED IN LUNG, SIGNAL = 0.52; EXPRESSED IN BONE MARROW, SIGNAL = 0.45; EXPRESSED IN ADULT LIVER, SIGNAL = 0.6; EXPRESSED IN BRAIN, SIGNAL = 0.52; NT HIT: U88155.1, EVALUE 1.30e-01; SWISSPROT HIT: O78704, EVALUE 4.30e-01; EST_HUMAN HIT: BF570968.1, EVALUE 7.30e-01
ggcattccaagcataactggaacaaattcaaatgaacatcagatttccatttaaatccaattttactcactttctccttcctctgtttcaagtctcagaaccctctcctttcttataactgagctcatttctcaagagtcaaggaactcacttgggtcaacttcctacctggggcaccaaccatcttcaagagcttcatctgtgcctgcataccaaagagatgcttacacaagagccttggcaatgagtcctgaagtgcttcgtgaatgtaaatgacctgaaacaaggggactgcagataagtagggaggccaggtttccatgattccaaccattccaacctttctatgcatcgcctgaaacctacacaggtggcaaccagaccccatctgactgtgtagccgctctgctgtccttcctgcgtgagagctgtttcatcagcagtatgacaataatgttggacatctatttaggttctgctttgagaaaatgaaaagggtttcacagtttgcaaaggatcca

SEQ ID NO: 1369 - DNA, 590 bp, Homo sapiens
  MAP TO CHR22_128.0; EXPRESSED IN BRAIN, SIGNAL = 0.73; EXPRESSED IN FETAL LIVER, SIGNAL = 0.74; EXPRESSED IN PLACENTA, SIGNAL = 0.81; EXPRESSED IN LUNG, SIGNAL = 0.64; EXPRESSED IN BONE MARROW, SIGNAL = 0.79; EST_HUMAN HIT: BF922065.1, EVALUE 1.30e-02
tgtctgcaggagcatgaaactgggcaaattactttgtttcccctggcctgttttctcatccataaaatgaaatatagtagcatttactcctcctaaggtaatgtgcaaattaaatacttacagctgacacttaatgaggactttctgtgtcccaagccttcacaagcctcgtcccatttaagcctctcaacagctctatggatttgggaccattatcatccctgctttaccgaggagactgacggggatcttaatagatgaggaaaatgaaggtcacatgtgaggaagtggaggcgccagcatcagacccaggtgctctgggttcagatccagctcctaacctctctgctgcagctgcagcactttgacctgaccactgtcgggctctacgtccccttaacggctcactttcagctgctcagtgaagggcttcgtggtcaatgcatctataccgtccctgggttccatctgcttgtccctattcactggtttttattttgcattatctgtgtatctacaaaccactgcagagcccctccttgggacaaactggtagggtgagggtgggaggagaacacgaggaggcagag

SEQ ID NO: 1370 - DNA, 519 bp, Homo sapiens
  MAP TO AC020588.4; EXPRESSED IN BONE MARROW, SIGNAL = 0.43; EXPRESSED IN BRAIN, SIGNAL = 0.55; EXPRESSED IN FETAL LIVER, SIGNAL = 0.38; EXPRESSED IN PLACENTA, SIGNAL = 0.5; EXPRESSED IN LUNG, SIGNAL = 0.57; EXPRESSED IN ADULT LIVER, SIGNAL = 0.59; EST_HUMAN HIT: AW817170.1, EVALUE 1.20e-02; NT HIT: AY057715.1, EVALUE 8.00e-03; SWISSPROT HIT: O77755, EVALUE 7.20e-01
caatgcatggaaacaagtgccctctccgaggttcttaccagcaaatggtgctttcgtgcagacgagaggaaggtgacccctctggccagaccaattagaagaaggcaccacttctgagctgtctcagtcttacggaaagcacatggtgcctttttctttgcacccctcctaggccgtggccttttctgccgggccattgtggcaggggctgctctttagcccccactccctctgggtcaggtgcctccatgaaggacacaaaccatacaactgcaggccctggccaggtggtctcattttaccaggtacctcttttcctgcagcagtgtttagcatgtcagttgctgaagggaaaacaaattaatcctgttatcctctaacccatttgtgttctttgtgctctacttgtggctcatattgatgaaaactctctgaaacattcttctttggtatttctcattcacaggaggggttaaataaatttggctaaaagttaaaggaaaaggaccagggaaaagg

SEQ ID NO: 1371 - DNA, 526 bp, Homo sapiens
  MAP TO AL133406.3; EXPRESSED IN BONE MARROW, SIGNAL = 1.3; EXPRESSED IN BRAIN, SIGNAL = 1.5; EXPRESSED IN HELA, SIGNAL = 0.91; EXPRESSED IN FETAL LIVER, SIGNAL = 1.3; EXPRESSED IN LUNG, SIGNAL = 1.5; EXPRESSED IN HEART, SIGNAL = 1.3; EXPRESSED IN PLACENTA, SIGNAL = 1.8; EXPRESSED IN ADULT LIVER, SIGNAL = 1.5; EST_HUMAN HIT: AW945728.1, EVALUE 1.90e-01; NT HIT: gi7305618, EVALUE 3.20e-02; SWISSPROT HIT: O75665, EVALUE 2.20e+00
ctggtcctctggaaaaatgccaatcacagcgccaacacctgaatgtcctggggaaataactcagtgctacctgtattaacttccatcattttctctggagttttagggtggttatgttttgatgctgatttggttttcaggttaacctcagtttgactctccatagaggtgactggaagctctttcctctgatgtttctcaaagcctttcatactttggaactggaagacactataatattgtgtcaattagatgtaaatcagtttctaaatcatatattaccattatgatattttgtttataatttctagattatttggcattaataacctccacaaatggccaccaagtcattttctcttgcacagtaaacaagagcttccttagtcacttacttggcattgaacgaaccctccttgcccgtgcctccccctgcctgcttctcagtgctgcggtcacgtggctgcaggaggccctgagctcctgagcagagcaaagcctgtaaggtggatgcagggcatattct

SEQ ID NO: 1372 - DNA, 541 bp, Homo sapiens
  MAP TO AL133330.5; EXPRESSED IN BRAIN, SIGNAL = 0.79; EXPRESSED IN PLACENTA, SIGNAL = 0.92; EXPRESSED IN LUNG, SIGNAL = 1.7; EXPRESSED IN FETAL LIVER, SIGNAL = 0.65; EXPRESSED IN ADULT LIVER, SIGNAL = 0.76; EST_HUMAN HIT: AL047291.1, EVALUE 0.00e+00; NT HIT: L05424.1, EVALUE 0.00e+00; SWISSPROT HIT: P16070, EVALUE 4.00e-33
gggccctaatttcagaaagcaatgctgtttttacaaattggacctgactttaaagaacaaaacacaaaaaacaaaaagagtagaaaattttatgctaaaaaagattcgcaatgaaacaatcagtagcacattgcatctgttaagtgtcccagctccctgtaatggttatgtttccaacggttgtttctttccaagataatggtgtaggtgttacaccccaatcttcatgtccacattctgcaggttccttgtctcatcagctgtcataaactggtctggagtttctgacgactccttgttcaccaaatgcaccatttcctgagacttgctggcctctccgttgagtccacttggctttctgtcctccacagctccattgccactgttgatcactagctttttcttctgcccacacctaataatttaaaaaatgtaccatatcagaaagattgcagtgactcaggcatcagatcatcatccttactgagcaccatcattgatgatcactatggtttatgatggctttagtgtgtgccaagca

SEQ ID NO: 1373 - DNA, 572 bp, Homo sapiens
  MAP TO AL136371.1; EXPRESSED IN FETAL LIVER, SIGNAL = 0.53; EXPRESSED IN BRAIN, SIGNAL = 0.53; EXPRESSED IN PLACENTA, SIGNAL = 0.54; EXPRESSED IN LUNG, SIGNAL = 0.47; EST_HUMAN HIT: AI240164.1, EVALUE 2.00e-01; NT HIT: gi15594346, EVALUE 8.50e+00; SWISSPROT HIT: P11046, EVALUE 7.20e+00
ttgccactctttttctttttcctttgatggacagtcagaaaaagaacattatcacaaccaggacaaaactgtgacttatggcagggtaaagaatcaaacgtttaggaaaaagagcttatggaaagcttcaggctctcagaatttgcagcagcagttccaacttgcagatggcaataattttagtaactgctgccaccacttggccccagacaatcacaagaacacaggagacagccttggataaaatttattgagttcggtgaatttattccagaaacttcttattatccttaatgtctgttttgtttggcaaatatgacctatttagtagtcaaatacattagcaaaaagttccacactttctctattttattttcttaatggctacaaagctgtctctgtagttgaattcctgaaagatgggtatcgataaactctatattctccctatattgatatatttcaaagagttttaaaagcatatttcaatcttattaaaattttaatactatttaaatatcgtgtactttttagaatgctgaaagtgtttagaacttttccctccatgtgtt

SEQ ID NO: 1374 - DNA, 537 bp, Homo sapiens
  MAP TO CHR22_24.0; EXPRESSED IN HELA, SIGNAL = 9.7; EXPRESSED IN BRAIN, SIGNAL = 3.4; EXPRESSED IN LUNG, SIGNAL = 5.7; EXPRESSED IN ADULT LIVER, SIGNAL = 9.2; EXPRESSED IN FETAL LIVER, SIGNAL = 5.5; EXPRESSED IN BONE MARROW, SIGNAL = 4.2; EXPRESSED IN HEART, SIGNAL = 3.2; SWISSPROT HIT: P05783, EVALUE 2.00e-64; EST_HUMAN HIT: AI478751.1, EVALUE 0.00e+00; NT HIT: gi4557887, EVALUE 0.00e+00
tttttactggcctcctgctccccaaagggtaccctgcttctgctggctcaattcctcagaactttggtgtcgttggtctcaaacaccactttgccgtccactatcctgcaggtggtggtcttttggatggtttgcatggagttgctgctgtctagggcctcaccaagattgaagtcctccccatcttccagcaggcggtggtaggtggtgatctcagcctccagattgacctggatgttccaggcctcgtactcctgggcctggcgctgtccctctgcccaggtctgtgccagctccgactccaggtacagtaggaccctgttgagctgctccatctgcgtggtatagcaggcctccacctcccttaggctgttctccaagctgatcttcagatttctcatcaagtccaggccaatctccaaggactggactggacatctcagctctgtgagtgttatctcagcagctctgatctcggtggactgcgtgatgaccactgtggtgctctcctcaatctgctgggatcagtacctgtcc

SEQ ID NO: 1375 - DNA, 568 bp, Homo sapiens
  MAP TO AC018432.4; EXPRESSED IN FETAL LIVER, SIGNAL = 0.62; EXPRESSED IN PLACENTA, SIGNAL = 0.92; EXPRESSED IN LUNG, SIGNAL = 0.8; EXPRESSED IN ADULT LIVER, SIGNAL = 0.69; EXPRESSED IN BONE MARROW, SIGNAL = 0.66; EXPRESSED IN BRAIN, SIGNAL = 0.65; SWISSPROT HIT: Q00547, EVALUE 1.60e-01; NT HIT: gi9627074, EVALUE 5.40e-01
actgcatcaaggcaaaaagggggtagatgaaacatatgctttcctgactatgacacctgacattaacaagtatagcaaggtagaaacagaaaaagacacgctaagagaaaaaagactcagttctactcaagtaaagcaagatacatctccacatgaagatagtattacttcacgtgacattaaagaaacccttcttcaagatgaagagcaagaagaaaggaaacaggaggcattgttaaaagtaattccacagcacctgcaacatttcatgttccgttcaggtcaggggaaggatcttgactttcacaaattagaaaaccaaggaagtaggaaaattctgtttgttaccaaacaagatgtcccacagcaacttcagcctgcagagccaatacaaagagaggagacaaagaaatgcctccagacccaaaatggcacaatatgtacagtaaattcaaaacttcttcctctaaaatcagaggactcagtaaatggtgaagttttaactggtgcaataaaacgtggtgtaccaactgataggaaatgtatgggggaacagcacaattcaggt

SEQ ID NO: 1376 - DNA, 553 bp, Homo sapiens
  MAP TO CHR21_70.0; EXPRESSED IN HEART, SIGNAL = 1.3; EXPRESSED IN BRAIN, SIGNAL = 1.4; EXPRESSED IN HELA, SIGNAL = 4.1; EXPRESSED IN FETAL LIVER, SIGNAL = 1.3; EXPRESSED IN BONE MARROW, SIGNAL = 1.5; SWISSPROT HIT: O14771, EVALUE 4.00e-02; EST_HUMAN HIT: AA228964.1, EVALUE 2.00e-01; NT HIT: AF010322.1, EVALUE 2.10e+00
gctagacccccacctactcccgccccaacacctttaagaagaaagatgccctcaaagaaggggggtgtccaaaaagggcaggacaagagctccccaggccacatcgctttgggacgtggggcgggggctgcaggctctacacagcttcaggtttctcagggctccaccatacatcggttccaaaggcccctctgcacaaggagactgtctcctgcatgtatgagttatcttcttgctttgcctaacagggtattatagcttcgatgtctttcgtcactggcacagaggttttctaacatccgtcttcgtggcctcctggtccggtggcaagcatcccaagctccgcttcacagatgaaaaagctgagaggttaattaaaccgtttgttgtcccacgcagagtcagctttggggctgggagccaccacaggacctggctccccacgacaccggctgagcccggaagcagctgaaggttccaggaccctcggggcagctcccaggccggcgaggaagaagccagggtgaaatttgcggaatggatttgtttccac

SEQ ID NO: 1377 - DNA, 598 bp, Homo sapiens
  MAP TO CHR22_40.0; EXPRESSED IN BRAIN, SIGNAL = 0.48; EXPRESSED IN PLACENTA, SIGNAL = 0.5; EXPRESSED IN BONE MARROW, SIGNAL = 0.45; SWISSPROT HIT: Q03211, EVALUE 3.90e-01; EST_HUMAN HIT: AA194724.1, EVALUE 2.10e-01; NT HIT: AL163246.2, EVALUE 1.40e-01
gaagccccagtaaatcctcctgtcactgacggcctggctggttgtacctaccttggtggaactccaggacctgggcctcagtcttagggttgccacggtgcacagcctcttggtcagggtgctttgggtcgaaggtgccctcctgagggcaaagtaccttcctgcccagcctgagaatggagtgggggctgaatgtgaaccctggcccactcacttctcagttgagagacctcaggcagttcctttgttttttgactttcagcctcaatttcctcttccctaaaattggccttccagctgccctgtgcctacagccagctcactcccaggtatcctttgaaagcaccctccaccacctcttgcaggcagccttccccattctcccctcccttacaggatttagctacccctcccacgtgctcggacagcccttaggcataatcccaaaacgcacccaggaattactcattcatcctgctacctctcccttcagactgtcttactccaccctgcaccctgaatgcaggtacctggacctggcatggaccaggcaacgggatctgtggactaacccatttccaacttaggaaaggcacca

SEQ ID NO: 1378 - DNA, 532 bp, Homo sapiens
  MAP TO AL133499.1; EXPRESSED IN HELA, SIGNAL = 0.86; EXPRESSED IN BRAIN, SIGNAL = 1.2; EXPRESSED IN FETAL LIVER, SIGNAL = 1.4; EXPRESSED IN LUNG, SIGNAL = 1.5; EXPRESSED IN BONE MARROW, SIGNAL = 1.3; EXPRESSED IN PLACENTA, SIGNAL = 1.6; EXPRESSED IN ADULT LIVER, SIGNAL = 1.6; NT HIT: AL163301.2, EVALUE 0.00e+00; SWISSPROT HIT: P51774, EVALUE 3.80e+00
aggaggaggagctggaagactccagatcgagtttaaccgtgggctaggctgcgaaatttggatgcaggccagtggacctcagaaatccatctgttcatctttctgctaaactgatttggatttctgcttttttaatcctttgcaaaattaatttgtctttaatatgaaaatcagtgttttatttttagtaagagaaaataattctattttatttatttggaacaatttaaaagaccctagagatcaacatccttcctctttcatttcctagaggagggtgtagaggagcagagtgtgtgacaggcacagtgggactgacctttgcttctgggcctggattaccatgtctggagagtgatgctttggaggaagtatgggtcacttcgctcctgggccgtcggttcagaaggtgcagccttgcccggagctgaggtccagtgctagcagcacattccctttccttgccctgagcctgcatggcagccttcttcatcaactggaatctctgttgaggatggagaaaaatctgtgg

SEQ ID NO: 1379 - DNA, 522 bp, Homo sapiens
  MAP TO AC018671.5; EXPRESSED IN BRAIN, SIGNAL = 2.2; EXPRESSED IN PLACENTA, SIGNAL = 2.8; EXPRESSED IN LUNG, SIGNAL = 2.2; EXPRESSED IN ADULT LIVER, SIGNAL = 2.5; EXPRESSED IN FETAL LIVER, SIGNAL = 1.8; EXPRESSED IN BONE MARROW, SIGNAL = 1.9; EXPRESSED IN HEART, SIGNAL = 2.1; NT HIT: AB013139.1, EVALUE 2.00e-12; SWISSPROT HIT: P56477, EVALUE 2.10e+00; EST_HUMAN HIT: T39750.1, EVALUE 5.00e-05
gtgtgaaaggtggcagtgtggtgttgtggaaacctgagttcttatcatgcctgattattagttaatgacatttacttccccaattcttgaggaatgtaaaaatatcttaagaagttcattttcttttatcttagccatttccagtaaaattgtgctaggacaactaaggtgtgtcttaacatacataaactgcatggatctgagtttcttcatctgtaaaaatgagatgcttatactatgttactctctaaagccagctctggtatttgttcttttgtttttgtttttttctctattatattttcatttgtcctctagctcaggggtccccagtccccgcgctgcaaaccagtactggtccatggccagttaggaaccaggccatgcagcaggtggtgcggagccagtgtgcgagtgttaccacctgagctctgcatcctgtcagatccactgtggcactgggttctcataggagcacaaacctattgtgaactgtgcatgtgagggatgtaggtcgcacat

SEQ ID NO: 1380 - DNA, 565 bp, Homo sapiens
  MAP TO AL137019.1; EXPRESSED IN HEART, SIGNAL = 1.2; EXPRESSED IN FETAL LIVER, SIGNAL = 0.99; EXPRESSED IN BONE MARROW, SIGNAL = 1.1; EXPRESSED IN BRAIN, SIGNAL = 1.1; EST_HUMAN HIT: BF755071.1, EVALUE 5.10e-02; SWISSPROT HIT: Q05152, EVALUE 9.20e+00
gccagcaggcttcataagagattctatccatagggggcgcttgtggggagggatgtgctccttcctgtctgcttcctactcctgcgagtcaccccagccttggtgcttcatctgggcagcagcagctcttcctgtagcagtagctgaatgcgagtcagaattttccaacactggcagacccagctgcatggtgtccacctcagacatatcagcactagtcagctgatgacccctcctcagagtctgggtctggcccctcccagctcatctgcagagatcagagacaccagcactgaccacagggaatcctatgcagaaatatgagtttcattcgaaaggaatccccctctaaactcctaaattttggtatttccaaacatattcttttgttctctcagcctgaagagtgacagttgcttcctgcagttgcttcccctttgacaccttagcatcccttcttatactttcagtatcctagttaacagtattagcctttcttaacaattctttgtataatctctgttcaaacaatttgtgtggcttctgtctcctggatggatcctga

SEQ ID NO: 1381 - DNA, 590 bp, Homo sapiens
  MAP TO AL136309.3; EXPRESSED IN BRAIN, SIGNAL = 0.59; EXPRESSED IN FETAL LIVER, SIGNAL = 0.57; SWISSPROT HIT: P87207, EVALUE 3.90e-01; EST_HUMAN HIT: Z21377.1, EVALUE 6.00e-85; NT HIT: gi13812105, EVALUE 1.40e-01
tggctgtctcacttttggtgtagctttggaggaagagggtcgttcagtaactgctggagtacagaaagtcgtttgtagtcttggcctctctttttgaatagtcatatgttgtaatcgttctagttccagtaaacgagttatcaagtgttcaacagaggtttctgcagggtccactgtcactttccaattgtcagatttggagagggctaaattgtgcaagtctagagcactgaaaggaggagggagaaaatcaggatatggaaatacttcatttggctcctcggtgaaaggttcctcaacattttttattgtttctggcttcaagttcaggtccacctttttaaaatagctgagtaaagtatcatttgtcttctcattttctgataaatcactttcatctgtgaaattttcttccacactgctgtttccatgtttcaaattccaatttggagcaggtaatgtttcaccatcattgttttctatagttgaacatgaactaacatgaatctcatttctgttcttaaaaaagtctccatcagcatagggccagcagagacctaatggcattggcagtccagggtaaggaccaa

SEQ ID NO: 1382 - DNA, 578 bp, Homo sapiens
  MAP TO AL136317.2; EXPRESSED IN LUNG, SIGNAL = 3.7; EXPRESSED IN ADULT LIVER, SIGNAL = 4.1; EXPRESSED IN PLACENTA, SIGNAL = 3.9; EXPRESSED IN BONE MARROW, SIGNAL = 3.5; EXPRESSED IN BRAIN, SIGNAL = 3.3; EXPRESSED IN HELA, SIGNAL =   2; EXPRESSED IN FETAL LIVER, SIGNAL = 3.8; SWISSPROT HIT: O14520, EVALUE 2.00e-25; EST_HUMAN HIT: AI792403.1, EVALUE 0.00e+00; NT HIT: gi14736665, EVALUE 1.00e-108
aatgaggtcagtggtccaggatgagtacccctccccctgccctccacccctcaggacggagccagcagggagtccctccggatagacaggacaagaactctggatggagactgtaccaagatgtgtctctgctggtgggcttgggtctggggcactgccgaggtcctgtggcttggggaggggcccaggtgagcttccacagcatctgctcctcaggagtggctgaccgggatgctccagctgtgtctcttcgccatcgtggaccaggagaacaacccagcactgccaggaacacacgcactggtgataggcatcctcgtggtcatcatcagggtgtaccatggcatgaacacaggatatgccatcaatccgtcccgggacctgcccccccgcatcttcaccttcattgctggttggggcaaactggtcttcaggtactgcccctgcccaggcccattcctttgagattttctgtggggcccctgtgtgttgaggtgtggggggtgatgtgaggggcagcacaggagggtcctgcagagcccccaggtggcctggggagcaggagtgagtcccaacat

SEQ ID NO: 1383 - DNA, 568 bp, Homo sapiens
  MAP TO CHR21_72.0; EXPRESSED IN LUNG, SIGNAL = 0.83; EXPRESSED IN BRAIN, SIGNAL = 1.2; EXPRESSED IN ADULT LIVER, SIGNAL = 0.74; EXPRESSED IN HELA, SIGNAL = 3.5; EXPRESSED IN FETAL LIVER, SIGNAL = 1.2; EXPRESSED IN BONE MARROW, SIGNAL = 1.5; SWISSPROT HIT: P78559, EVALUE 2.80e-01; EST_HUMAN HIT: BF977602.1, EVALUE 3.00e-03
tgcagtttatttccgggttcttggcggtgttctgaatagtaaacgttgccacctaaatgaagaccctttgagatatcactgcgtctctactgttcctgatggtggactttctcctccagcgtctgctgacagtaacagtggagctttccccagcacccaagagcccggggctcaccgtggtcccctcctgtgcagccagcacacaaggccctcccgtgccaccacctcgcaggggccaggtctgctcggcccactacaccagagcccttgggtgcggggtgggcgggacagagaagaggaaggggggaaggagggagctgacagccgtttctcagttccccattatggacttggatttggatcactgaaatccatatggaactaagaagttatctttatcccacaactcaaaactcctgtctagagcatcagaaatgatgtgcttttggcatcctgaaatgtctttctcctccgccaactgctgtctgctgagagctagccttgctctcggaagggcggcttgggcagggcaaagggagaattccagggtttgggagcatctgctgat

SEQ ID NO: 1384 - DNA, 597 bp, Homo sapiens
  MAP TO AC013689.4; EXPRESSED IN FETAL LIVER, SIGNAL = 1.3; EXPRESSED IN BONE MARROW, SIGNAL = 1.3; EXPRESSED IN HEART, SIGNAL = 1.2; EXPRESSED IN PLACENTA, SIGNAL = 1.5; EXPRESSED IN BRAIN, SIGNAL = 1.4; EXPRESSED IN LUNG, SIGNAL = 1.3; EXPRESSED IN ADULT LIVER, SIGNAL = 1.5; NT HIT: X72737.1, EVALUE 0.00e+00; SWISSPROT HIT: P15848, EVALUE 1.00e-32; EST_HUMAN HIT: BE786803.1, EVALUE 3.00e-99
atgtacggatttctcccacgcctaataaatcacaccctagaggtgggctccaggaatcttcctttttaacaagcttcccaggctgattctgggatactgtataatttgaaaaggacttccctagaatttattagatttttccctaaacaacaatggccttttcctacatttgtctgaaaagacattagtgtaacaagattttgctatcagtaaatagaagcaaaacttaccttctctggtggatggttagttatgagggctatagcccttttggtgaatatgtttgttgaatacatatttttatatcctgttgcaacttcttcgccatctcgaaaatcaagagcacatcgtgtgacattcagagcgtcaattaatgtacagcgttcatgggaataataatcttcactacccaggagatatcctgcaagaatggaagacgaaaatagtcagcatagcataaaacttgttaaacaaactaatgtttcagcatttaattgcctaatgcaattgattacccgtgacgaggctaatcaaatgacaaggctaatcagcaccatttctcaacatgtctatatctggtggcagaaggcattaaaa

SEQ ID NO: 1385 - DNA, 522 bp, Homo sapiens
  MAP TO AL133552.2; EXPRESSED IN FETAL LIVER, SIGNAL = 4.3; EXPRESSED IN HEART, SIGNAL =   4; EXPRESSED IN LUNG, SIGNAL = 5.7; EXPRESSED IN BONE MARROW, SIGNAL = 5.1; EXPRESSED IN PLACENTA, SIGNAL = 6.1; EXPRESSED IN ADULT LIVER, SIGNAL =   5; EXPRESSED IN HELA, SIGNAL = 4.4; EXPRESSED IN BRAIN, SIGNAL =   5; NT HIT: U77356.1, EVALUE 5.00e-01; SWISSPROT HIT: Q99JB6, EVALUE 2.10e+00; EST_HUMAN HIT: BE974800.1, EVALUE 7.30e-01
cttgagaaacaggctctgggacgggagagctgcggtgccgaaggaaagaggaaaggttcccatgcggggccacagactgagtttcctagacgtggatctaaagcactgccgagtcccaaagcatcctgtgaaccccgaaatggtgcgccaagatggccacacagtctgtgagcctcgccacgggagcgggatttccttcctcactgtgaattctcttctttcctactacgcagcttgggcaaaaaagacattttacgacactggaatcaagaaaccgactccaagttgtattcaaagcatccactttgtgctctgcgttttgccacgttccagttgtatgtgagctgcagggccgcggagcgtggtgcaggggacggggttcatggagcttatgacggtttccccagtggcattcagagcgcagcctggggcctcagctccgtcttcccctccccagcctcgggcgtcaatgaaggcagcgctggcctgttgcaatcagacttcctctagctcatttcaccc

SEQ ID NO: 1386 - DNA, 595 bp, Homo sapiens
  MAP TO AL160314.1; EXPRESSED IN FETAL LIVER, SIGNAL = 2.6; EXPRESSED IN BONE MARROW, SIGNAL = 1.8; EXPRESSED IN PLACENTA, SIGNAL =   2; EXPRESSED IN LUNG, SIGNAL = 2.6; EXPRESSED IN ADULT LIVER, SIGNAL = 3.8; EXPRESSED IN BRAIN, SIGNAL = 1.1; NT HIT: U84212.1, EVALUE 0.00e+00; SWISSPROT HIT: Q29036, EVALUE 1.00e-19; EST_HUMAN HIT: AA379770.1, EVALUE 0.00e+00
tctcataacttcaaggggcggtggtctgatatagagtactatgaaaacaaaagcagcacaccaaagtaacacattattattatgatcacttatagaaccattacccgctaggatgaaactccccacacaagagatgaagcccgagagaaaagagttgaaggggaaggtccccacgaggagacagtaaccgaactgcagcgccccggtcagcagtatatacagcaggtacgcgtccagcaacttcagacgctgcggagtggagctcaagtactcttctaagaaccgcgaaatgacagacactaccgacgccgacataactgcacgcaaggtactccagtccgcgccccaaactcttggaggacccgtcgaccacaccggatgtgctgtttgcgcatgcgcaccctcgtgacctaactccgccctccccggtgtgccaatttgcgcaggcgctgaggccggccagggcgcgtaacaactaatgcgcagacgcggactgcatcaacagactcaactacaactcagaaaagttaatgcgtctgcgcaatggccctatcaatgagctggggacgtgtactctttctgttctgtttccgcc

SEQ ID NO: 1387 - DNA, 569 bp, Homo sapiens
  MAP TO AC016672.4; EXPRESSED IN BRAIN, SIGNAL =   1; EXPRESSED IN HELA, SIGNAL = 0.58; EXPRESSED IN FETAL LIVER, SIGNAL = 0.81; EXPRESSED IN BONE MARROW, SIGNAL = 0.9; EXPRESSED IN PLACENTA, SIGNAL = 1.1; EXPRESSED IN LUNG, SIGNAL = 0.95; EXPRESSED IN ADULT LIVER, SIGNAL = 0.7; EST_HUMAN HIT: AI420975.1, EVALUE 0.00e+00; SWISSPROT HIT: P81408, EVALUE 2.40e+00
agtcttctcaacgctggcaccttttgatcatctcttctcaatcaagttgtgaatgtcctggttcttggtatatggattttttattgtctcctggacatgttggatattatgtcataagaactaattgttttttcttttaaattcttcttctttttgggtatagtctgcaggcccaggtggggcttcatgttcagctcactgttggacttcattgacatcaccctgaaaaaggtggatttttgaggagcgtgagaagaagagcatgagaagtgctgaattacactgtgttgttgcagatgagcgtccctaaccacagcagtccttgaagaagaaagatggtctgataggaactgcttattcaggaacacattgcaaaatctgtgggtgtccttcgggatctgagggcctcactcctacaactgcaaggaattgaattcttctaacagtgtgatgaggttggaagaagactccaagatccagaaaggaacacagtcccaccaacacctgtgttgtaacctggtgacaccctgaaacagagaatccagctaagcgatgcccaaaatattcat

SEQ ID NO: 1388 - DNA, 594 bp, Homo sapiens
  MAP TO AL160237.1; EXPRESSED IN FETAL LIVER, SIGNAL = 0.81; EXPRESSED IN PLACENTA, SIGNAL = 0.89; EXPRESSED IN LUNG, SIGNAL = 0.92; EXPRESSED IN ADULT LIVER, SIGNAL = 1.1; EXPRESSED IN BONE MARROW, SIGNAL = 0.66; EXPRESSED IN BRAIN, SIGNAL = 0.62; EXPRESSED IN HELA, SIGNAL = 0.76; EST_HUMAN HIT: T26456.1, EVALUE 3.00e-03; NT HIT: gi11466048, EVALUE 5.70e-01
atgctccttttggcatcttcggaaatgatttcattgtttttgtctcttgtaatttatgaatataataaatttctttataataagctatattttcctttcagaaataaaaactcctttgtcatatattattctttaacatactgttgaatgtagtcgtactgacattttactttttcaagctatattcactactgaaatttgtgtataatattcttttcatttgttttctttgtcaggcttcagtatgagtgttaatataaataataatgttcctcactaaaggttgctcactacatgtgggtatattgaatggactctggctgctgtggtgtttcacactcagtctcccgctcatcagttgcctaaggaccccaagcacacacatcattaatattcctttgacccttggtaagataaggcagaagaaataccatcagatcattagcatcagcttaggaccataggctttaaaatgcttctagtagaaataccttacggacagaaaatagcaaattggttttggaaaatcagcttagtaatatcccattgctaaaaataatgaccaattgaatagaaaccctcccagtaaaatgg

SEQ ID NO: 1389 - DNA, 530 bp, Homo sapiens
  MAP TO CHR21_74.0; EXPRESSED IN BRAIN, SIGNAL = 1.1; EXPRESSED IN ADULT LIVER, SIGNAL = 0.57; EXPRESSED IN HELA, SIGNAL = 2.6; EXPRESSED IN FETAL LIVER, SIGNAL = 0.94; EXPRESSED IN BONE MARROW, SIGNAL = 1.2; SWISSPROT HIT: O43918, EVALUE 2.00e-22; NT HIT: AB006684.1, EVALUE 0.00e+00; EST_HUMAN HIT: BG330062.1, EVALUE 1.90e-01
gggaactccacctgtctctgctagaccccaccctggggcctacacgactgccaaggcaggtcctgctgggcgggtgagccaggaccagccggcatctcctcccaggcggctccaagaagtgcatccaggttggcggggagttctacactcccagcaagttcgaagactccggcagtgggaagaacaaggcccgcagcagcagtggcccgaagcctctggttcgagccaagggagcccagggcgctgcccccgtaagcacctgaccttccctggggagcctggctcttgatgccccccgccccaggaacagcgttgcctctgggggagtggctctgctgggggctgggggctgctgccgagagacgcctggtgccacagccatgtgcaccctcgctgctgaggctgcccccattgctgacgcccctcttccttgcagggtggaggtgaggctaggctgggccagcagggcagcgttcccgcccctctggccctccccagtgacccccagctccaccaggtaatgccctaga

SEQ ID NO: 1390 - DNA, 504 bp, Homo sapiens
  MAP TO AC012348.4; EXPRESSED IN BONE MARROW, SIGNAL = 0.58; EXPRESSED IN PLACENTA, SIGNAL = 0.63; EXPRESSED IN LUNG, SIGNAL = 0.64; EXPRESSED IN BRAIN, SIGNAL = 0.62; EXPRESSED IN FETAL LIVER, SIGNAL = 0.47; SWISSPROT HIT: P04540, EVALUE 2.70e+00; EST_HUMAN HIT: BE148312.1, EVALUE 2.00e-04
tagcaggtgggaaacaatgcacctaataatatagcttaaaaatacataaaattaacagaataatgagaagacatcgattttaatttttttcagaaacttacagataaagtagagggagaagtatttcaacagtaattgcctagcttgattgaaataacagcctcacactaatatttagattctgagagatttttatataattatctatcaaacaaatacagaatatatacttattcgtcaaaaaaagaaatatttataaaacctgaccatgtactggtcacaccaggaattttgtaaattgatacatttagtacacatccatggatatacatccatgacacacttactaagcatgagtaaagatttacttcccaatcctggatcccctacaaaaaaaaaaaaaaaaaagaaagaaagaaaacaccaaaaactactcactgcaaatttagaaatacacttcaaatttattttttgcttaaatgcagaaccactatggaaattttc

SEQ ID NO: 1391 - DNA, 514 bp, Homo sapiens
  MAP TO AL133515.2; EXPRESSED IN FETAL LIVER, SIGNAL = 0.52; EXPRESSED IN BRAIN, SIGNAL = 0.72; EXPRESSED IN PLACENTA, SIGNAL = 0.78; EXPRESSED IN LUNG, SIGNAL = 0.65; EXPRESSED IN ADULT LIVER, SIGNAL = 0.59; NT HIT: AF156100.1, EVALUE 0.00e+00; SWISSPROT HIT: P34886, EVALUE 2.10e+00; EST_HUMAN HIT: AA227235.1, EVALUE 1.80e-01
ccatcaatttggtgatgcagtaataatatgaagacattattttttatttgatagtccgttatttacctatgggacaacatcaccctcttaaactgtcaatatttcaatgttgaataaaatgatgtctcacctgggacaatactagaaaaggaaacacttgatactctctggaagaggtaatcatctttatcatagcctgttactttgagaaagaaagcttcatttggtggtacaaagtcagaaatattccatatgccataaggttttcgatgtgggtaatatttaacaggaatagtcttaagagaacttcctgagatactcaaaagttcaagaagatctattctagctggagtggaaattccagaagtattgagcagtacataggtaggtattcctacaagagaaagattttgttatcatttacaagaaacaagcaattgaagttatatatcaaataagtatttgcatgataataatatatgagtaccataaggatgcctacaatttctggatc

SEQ ID NO: 1392 - DNA, 567 bp, Homo sapiens
  MAP TO AC025170.2; EXPRESSED IN BONE MARROW, SIGNAL = 0.57; EXPRESSED IN BRAIN, SIGNAL = 0.46; EXPRESSED IN PLACENTA, SIGNAL = 0.72; EXPRESSED IN LUNG, SIGNAL = 0.63; NT HIT: X69907.1, EVALUE 3.00e-24; SWISSPROT HIT: P03430, EVALUE 9.30e+00; EST_HUMAN HIT: AI081623.1, EVALUE 2.00e-13
gacgagtggcaaaggagatggagagaagacagaaatgagatacagtcatcacttgctattccctagggattggttccaggaccactcctgatgtcttcccctccccctccgccaaagtaaataccaaaattgaggatgctcaattcgcttatataaaatggtatagtatttgcatataacctacagacatcctcccatggtactttaaataatctctagattacttataatacctaacataatgtaaatatatgtatgtaaatggttgttatattttattgttttttatttgtattatttttcacttttaaaatttacttttttgaatatttttgatccacggttggctaaatctgctgatgtgggacctgaggatatagggggccaactgtatgttttggaggtataattggtgggacttgatgataggatttggactgtatctgaggtgaaggagagaaaagtgtgaaggactccaggtttcaggtttctcgcttgagcaactgagtggatgacagcatcagatattgaggagaacactggaagaggagcaggttttgaaagtgg

SEQ ID NO: 1393 - DNA, 553 bp, Homo sapiens
  MAP TO AL160231.1; EXPRESSED IN FETAL LIVER, SIGNAL = 0.59; EXPRESSED IN PLACENTA, SIGNAL = 0.64; EXPRESSED IN LUNG, SIGNAL = 0.61; EXPRESSED IN ADULT LIVER, SIGNAL = 0.74; EXPRESSED IN BONE MARROW, SIGNAL = 0.43; EXPRESSED IN BRAIN, SIGNAL = 0.42; NT HIT: AJ006345.1, EVALUE 3.00e-21; SWISSPROT HIT: P08548, EVALUE 3.00e-31; EST_HUMAN HIT: AA102558.1, EVALUE 6.00e-14
ggtttttgtggagtctttggagttttttatgtataggatattgtcatctgcaaatagagataattttactttttcacttccgacttgtatgccttttatttctttttcttatttgattgttcttgctactacttccagtacaatgttgagtagaagtggtgagagtgggcattcttgccttgtactgaatcttagtgggaaagcattcagtttttcctcactgactataatgttagctgtgggtttttcataaatggcctttattatgttgaggaattgtcctctatacctaaaagatcaagagtttttatcaagaaaggatgttagactttgcaaaatgcttttctgtgtcagttgagatgatcacatggttttaatcttatttttttaatgtggtgtatcacattgatttgcataggttaaaccagcctttcttgccagggataaatcctacttggtcacgatgtataatctttttgatatgttgttcgattcaattcagtttgctaatattttgttaagggtttttgaatcaatgttcatcagactggcc

SEQ ID NO: 1394 - DNA, 577 bp, Homo sapiens
  MAP TO CHR22_174.0; EXPRESSED IN BRAIN, SIGNAL = 0.87; EXPRESSED IN LUNG, SIGNAL = 0.87; EXPRESSED IN ADULT LIVER, SIGNAL = 0.97; EXPRESSED IN PLACENTA, SIGNAL =   1; EXPRESSED IN FETAL LIVER, SIGNAL = 0.83; EXPRESSED IN BONE MARROW, SIGNAL = 0.67; EST_HUMAN HIT: BI668901.1, EVALUE 2.00e-53; NT HIT: AB051431.1, EVALUE 2.00e-81; SWISSPROT HIT: P07720, EVALUE 1.10e-02
tctgtgtctcccaccagatgggaggctccccaggggcagagatgaggtctgactcatcttctgtccccatcactgcccagcatggggcctggcgcacagcaggtgcttagccagaatgtgctgagtggatcagcgctctcggcggtgatggtggagaactcagggcgacagcctgtggaggcatcaaggagatgctcctggcattgtgcagggtgtgccctggctggggatcacgtcatgtccagggagttggagcctggactttgggttcctgcacccctgaggtcaaacgaggggttggtctcctcctggccatgtggcgcctgggcaccccccttccccactgtgagctttttctgcagctttttctgcagggggttaatcatacctgcctcccacgtggtgagagggagagtgcatgaaaacacttaacttggtacctgccctgtggtcagcctgagatgcgtccctgagtatttttgttacaggaatgaattctgtaagaaccaaccctgactggcattttcaaatccccagtgctccctgagacacagaggggctgtaccctgtgcttagc

SEQ ID NO: 1395 - DNA, 567 bp, Homo sapiens
  MAP TO AL136140.2; EXPRESSED IN BONE MARROW, SIGNAL = 2.2; EXPRESSED IN HELA, SIGNAL = 1.2; EXPRESSED IN BRAIN, SIGNAL = 2.2; EXPRESSED IN HEART, SIGNAL = 2.1; EXPRESSED IN LUNG, SIGNAL = 2.5; EXPRESSED IN ADULT LIVER, SIGNAL = 2.5; EXPRESSED IN PLACENTA, SIGNAL = 2.7; EXPRESSED IN FETAL LIVER, SIGNAL = 2.3; EST_HUMAN HIT: AA725801.1, EVALUE 8.00e-04; SWISSPROT HIT: Q05973, EVALUE 7.10e+00; NT HIT: X73259.1, EVALUE 5.40e-01
tggtagggtaagcagatggcagcaccagacagtgtggcaggaggaggtgctgaaaggagggaagtgggagtagggtcctaaagccaaacctatatacaattttaactttgcaagggcctaggttcatccgtgctgacatagtgaatggtgaaaacaccctaccacatgaaaacagcttgggaaagaggcttggtggtctagacaacaaggttctgctcctggctcttattagtgagcttgaactgtctgatgctccctaccaagcaggtgggcttcagtggaaggctgtgcagccatgagtgaagatcacatggagtcggggactaaaggtgccaagtgggccaaaccaatcatcagtatttctagaagcctatcctcaggacctgtgcttcccagtgggctctatgggaaaccccaatacaagggatattagaaggtgataaaagagtttgagtgtgggaaatactggatgaaatagaatgaaacaaatttcttcattgcagaacttctcagagcctttcataggtgctgtgaatctccaagaaggcaggcagtgtttcccaaatt

SEQ ID NO: 1396 - DNA, 528 bp, Homo sapiens
  MAP TO AL137918.1; EXPRESSED IN FETAL LIVER, SIGNAL = 0.53; EXPRESSED IN BRAIN, SIGNAL = 0.54; EXPRESSED IN LUNG, SIGNAL = 0.48; EXPRESSED IN ADULT LIVER, SIGNAL = 0.61; EST_HUMAN HIT: BE181010.1, EVALUE 7.40e-01; SWISSPROT HIT: P03376, EVALUE 4.30e-01; NT HIT: gi4502354, EVALUE 3.20e-02
caaaactccacagaatggggagacccagggaaaagccaaggatggatagttccagtggtatccagaggttattggttaatgacaggaaatgcataggattcggccaagtatccagtgtgagcagtatccaggagaaaagttcgggtcccagtcaaaggagtgattgggcgtttgtaggaatagactgaaaagcagggccaacttctctcaggaattactggcattccctcattattgataccctcgaaggacttgaggaaacccacaaagtcttcagcaggatgctgatctacaggcaagaaaaccaattacaacaccttcagcatcccagcagtggttacctttataccaagctcctgccactggctggcagctagcaagaatcatgtttacttgttaaagcttatgaatttatttaaacaaccacagcaaagacctggccaggacaaagaccaataatatgttgccagaactacctataatctacttcctataatcttaatccactcattccagtttccatcccag

SEQ ID NO: 1397 - DNA, 507 bp, Homo sapiens
  MAP TO CHR22_176.0; EXPRESSED IN PLACENTA, SIGNAL = 0.84; EXPRESSED IN BRAIN, SIGNAL = 0.83; EXPRESSED IN FETAL LIVER, SIGNAL = 0.87; EXPRESSED IN BONE MARROW, SIGNAL = 0.88; SWISSPROT HIT: P53673, EVALUE 2.00e-25; NT HIT: gi13647975, EVALUE 1.00e-130; EST_HUMAN HIT: AW950473.1, EVALUE 1.00e-130
gaacgagtcagattgccctcataattaagatgagccatgaaggacaaatacaacttgtctaggaaaagaaaggctgggatggtgcttctggcaaagggaatggcatgatcaaaggccctgtggtaggggagagagcatggcacattgtgagcactgaagaaaggccaggatggctggaattgtgtgcgtgtgcatagatccctttgcccctgtgttgatcaccatgctggtgtctctgtagagtaactgtctgccttttctcttttccagctgggtttgctcccagtttccgggctaccgaggatttcagtatgtgctggaatgcgatcaccattccggtgactacaaacatttccgggagtggggctctcatgccccgaccttccaggtgcagagcatccgcaggatccagcagtgaacaggggtgcggcacggaggagcgcatgcgtgcttatctgcaatggaggcgctctggaggctgtggtgtgttctctccttctgcctccc

SEQ ID NO: 1398 - DNA, 596 bp, Homo sapiens
  MAP TO AL137800.2; EXPRESSED IN PLACENTA, SIGNAL = 0.79; EXPRESSED IN LUNG, SIGNAL = 0.79; EXPRESSED IN ADULT LIVER, SIGNAL = 0.63; EXPRESSED IN BONE MARROW, SIGNAL = 0.69; EXPRESSED IN BRAIN, SIGNAL = 0.62; SWISSPROT HIT: Q9YW06, EVALUE 2.00e+00; NT HIT: gi15671982, EVALUE 8.90e+00; EST_HUMAN HIT: AW291775.1, EVALUE 0.00e+00
atccttggtgaagagttgggaataggattaattgcggaaaaaatatatataaatgccataggacacttttagcacaaaagtagttgtttacctcccattctcctcctttaatctcagtgcttttactatttggtttcttttttggcattttacaaaagggaagaaatggaaaacataccccttcttggtcattgggtaacagcaccatttcggtaacagtcatacttgatgacaagtatgatgatattttaaggacatgaacatgggtgaaatcaatgtgtagatggtacaaattaaccgaattctttttaaagcatttcctgtggatcccaggatcatgaggacataacagaagaataaggtctgaatcttgttcaccagtttgctctcagcctaattgggaagtaaggttaagcacctgaaaattatgtcatacaaaaaaaaagagaattaacgtcatacaatttagcatttgactgtaaatgcagttagtcaatgttgggagaacaacaaaatcagggtggatcagagtatttaaagtgagacattaatttgaactaatcctttggaggggcagaaaggacaaacggtccaag

SEQ ID NO: 1399 - DNA, 511 bp, Homo sapiens
  MAP TO AL160168.1; EXPRESSED IN BONE MARROW, SIGNAL = 2.7; EXPRESSED IN BRAIN, SIGNAL = 2.4; EXPRESSED IN PLACENTA, SIGNAL = 3.2; EXPRESSED IN LUNG, SIGNAL = 3.2; EXPRESSED IN ADULT LIVER, SIGNAL = 3.4; EXPRESSED IN FETAL LIVER, SIGNAL = 2.5; SWISSPROT HIT: P44287, EVALUE 4.70e+00; NT HIT: AJ229042.1, EVALUE 5.00e-04; EST_HUMAN HIT: BE620700.1, EVALUE 6.00e-20
cctttgaccaacagcagtcctagaactttagggtaaattacttgtcttctcatctgtaggctgctctccttctcttgctgtctcctaccttttctgctgcctctccaacctcttcagctccagcacgtatctcctgctgtgactcactcaagataccagtatcccagccagaagctctggtttgatctagagcaaatgaaaaggcagagaaccggaatgaaacaataggatacaaatctagactctgccacttaccatcaaaatttagcaagtgatatagtttggaggtttgccccttccaaatctcatgttgaaaggtgattcccaatgctggaaggaggtcccaatgggaggtgattgggttatgagggcagatcactcataaatcatttggcaccatccccttggtaataagtgagtttttgctcagttagttcacatgagagctgcttgtttaaaagcctgggacctccccattcctcactttcttgctcctgctctcaccatgtga

SEQ ID NO: 1400 - DNA, 527 bp, Homo sapiens
  MAP TO AC025745.1; EXPRESSED IN PLACENTA, SIGNAL =  14; EXPRESSED IN BRAIN, SIGNAL = 0.42; EXPRESSED IN LUNG, SIGNAL = 0.46; EST_HUMAN HIT: AU140105.1, EVALUE 1.00e-91; NT HIT: U37067.1, EVALUE 0.00e+00; SWISSPROT HIT: P03355, EVALUE 2.00e-24
tcccaaacatttcctccaagcctctcaccaaccctagtgacaaactattcatagatggctcctcttctgggcccaccggctcccccaaaattgctggatatgcagttctttctcttgaccgagtaattgaagccaaacccctacccccaggaaccgcctcaaaaaagcagaactcatagctctcaccagggccctaaccctttccaaaggcaaataagtcaacacttacacagactgcaaatatacctaccatattcttcattcccatgccgccatctggcaagagagatgattccttactgccaaaggaaccctcatcactaacggcccccttatttaccaactccttcaggccgcacacctcccagctaaaacgggagttatacactgtagagggcatcacacagggtcagatgagatctccagaggaaacagaaaggccgatgaggtagcaaaagaagcctccttttcttctgtccctgcccctctcctcattaccctggcaatccaacccaagtactctccca

SEQ ID NO: 1401 - DNA, 547 bp, Homo sapiens
  MAP TO CHR22_26.0; EXPRESSED IN HEART, SIGNAL = 1.9; EXPRESSED IN PLACENTA, SIGNAL = 2.8; EXPRESSED IN FETAL LIVER, SIGNAL = 1.7; EXPRESSED IN LUNG, SIGNAL = 2.2; EXPRESSED IN BONE MARROW, SIGNAL = 1.9; EXPRESSED IN BRAIN, SIGNAL = 2.1; EST_HUMAN HIT: AA479120.1, EVALUE 4.00e-15; NT HIT: D14547.1, EVALUE 1.00e-17
tcaattccttctggtcctggtctacagggaatgaagtttcctcaaagcaattaatatagccctgcatgaatgcaacattctccgttgcaaagctcctacgttatttactgttaataatttcagctgacccttgaacaacacggatttgaacggtgtgggtccacatatacgcggacttttcttccatctctgccacccctgagtcagcaagaccacaccctcctcctcctcctcctcctcttcagcccactcaacacgaagacaatgaagatggagacctttatgatgatccacttccacttaatgaagagtaaatacattttctctttcttaggattttcttaatagcattttctgtcctctagcttgtgttgtaagattacagcatataacacacaccacatactaaatatgtttcatcagctatgttatcagtaagacttccagtcagcagtgggttattagtagttaggtttttgaggagtcaaaagttatacacggacttttgcttgcacgggggttggcacccgtaaccctgtgtcgttct

SEQ ID NO: 1402 - DNA, 518 bp, Homo sapiens
  MAP TO AL137802.2; EXPRESSED IN FETAL LIVER, SIGNAL = 0.69; EXPRESSED IN BONE MARROW, SIGNAL = 0.67; EXPRESSED IN LUNG, SIGNAL = 0.83; EXPRESSED IN PLACENTA, SIGNAL = 0.68; EXPRESSED IN BRAIN, SIGNAL = 0.62; EST_HUMAN HIT: AI630987.1, EVALUE 1.00e-115; SWISSPROT HIT: O66845, EVALUE 1.60e+00
gcaaccagttagtggccttcccttcttcaccagcatgtgaattaattgataaagatcagaatatttgggctcaaaggtttcaacagttaagtcaaattttctgccaaagcctacaggatcttggagcctgctttagaaacagaagagtgaaatgtatttaagtttagatcagggaagtcctttataatattcttaattcacgttttggtgaagtggtatacacaacggtaggctcccctcttcctgtgggtttgggttttaccttgaaaggggctgtcagaacagaagtttcagggaggggtccagacccctggggactttccttaggtgatggtgatggaagaagaggcaaggcaggacaggaaggctcaggtaagaaagactatgcaggtgcaggggcaggaggagaaggagcagctggaagtgaaagagacaaagcctcctcaatatttctcaattcagaaaacatgacagtttacctccttcagcttacttcctggatggaggcaattttctca

SEQ ID NO: 1403 - DNA, 568 bp, Homo sapiens
  MAP TO AL136103.2; EXPRESSED IN FETAL LIVER, SIGNAL = 0.54; EXPRESSED IN PLACENTA, SIGNAL = 0.67; EXPRESSED IN BONE MARROW, SIGNAL = 0.56; EXPRESSED IN LUNG, SIGNAL = 0.62; EXPRESSED IN ADULT LIVER, SIGNAL = 0.57; EXPRESSED IN BRAIN, SIGNAL = 0.6; EST_HUMAN HIT: AA809301.1, EVALUE 3.20e+00; NT HIT: AF045799.1, EVALUE 1.40e-01
agcaagggcttaagaaagggcaaatggctggtaacaatcagacacagcagcagtcaggcacaggccagagccagctgtggaaacagagtgtcacaagtcaccctggccagcatgacttaccctggtaagcttgctggaaagcatgaatttgtcaagagggtttgctttggggaaaaaaacaggggccagcagaacctcaaactaaaaggccatggatttggaagcttgggaaagaatctgtacaggagaagttagtgcccattccccaaacctagggctaaataagttgcagaggaaagatgttgaataacccaggaccaatcagagaagatgtaggtgccgaacacatatatgccagagagttatttgagatcagttaccctaatctttcacttgacagaagatgaagctgagacccagaaatgggaaaagactcataaacttcacacggtgccggagccagaacctaaacctgaatgccaagtgactgtactttccatcaccccactttgttcttttcacggagaatcattcagaaaataaagcatgttgatgagaagcgcgtaca

SEQ ID NO: 1404 - DNA, 592 bp, Homo sapiens
  MAP TO AL133402.2; EXPRESSED IN BONE MARROW, SIGNAL = 0.64; EXPRESSED IN PLACENTA, SIGNAL = 0.74; EXPRESSED IN LUNG, SIGNAL = 0.78; EXPRESSED IN ADULT LIVER, SIGNAL = 0.67; EXPRESSED IN BRAIN, SIGNAL = 0.76; SWISSPROT HIT: Q03172, EVALUE 3.30e+00; NT HIT: M13792.1, EVALUE 2.00e-03; EST_HUMAN HIT: AI628119.1, EVALUE 6.00e-05
gcaggggtgagtttacatggtccaaatgcccctttctggtatgtcctctaaaatatgtttagcaagaaaaaagggaaaaaccaatattaatcaaacatcctcctgccaaccattgattaaaatcatcaagataacttgggaaataaataatattcccattttacagatgaagaaactgagggtcacagggttagacaatttgtccagtttaagcttgctctttagggtgaagttgggaatcaaacccaagacactgactccaaccctgtgtctgccactgacttacagctgcatcctttaccaggtgagatgtcttccctcaacacacatggccgttccacccaggaaaatctgaggcatccaggtgctgtctctcactcactcaattgatgaaactttgtgagttcataaaaaaaggagcaacaagaattttttccacacttttccacatttttattccatgagtagtttcataagtagcttattgactgtgagacctggaatctcataaaaagtccataaaaatccatctgatgatagtgggctatgtctttaggagtaagcccctacttgagttggggaatggttcctt

SEQ ID NO: 1405 - DNA, 573 bp, Homo sapiens
  MAP TO AL137798.1; EXPRESSED IN BONE MARROW, SIGNAL = 0.88; EXPRESSED IN PLACENTA, SIGNAL = 1.1; EXPRESSED IN LUNG, SIGNAL = 0.97; EXPRESSED IN BRAIN, SIGNAL = 0.89; SWISSPROT HIT: P26927, EVALUE 7.00e-47; NT HIT: U28054.1, EVALUE 0.00e+00; EST_HUMAN HIT: AL558014.1, EVALUE 2.00e-69
acaagttcccgaacgatcaccagtgggacaaacaccttccctccgtcccggcctgggaccttcccccagcacacactatagtgatgctctgggccctcaggtacatgcccacgctccggaatggcctggaagagaacttctgccgtaaccctgatggcgaccccggaggtccttggtgccacacaacagaccctgccgtgcgcttccagagctgcggcatcaaatcctgccgggtgggtaagcggcgccgggtcaagctgggagagtggagggacaagcccacgcccatccacgaacccactggctctttgtctccagccgcgtgtgtctggtgcaatggcgaggaataccgcggcgcggtagaccgcaccgagtcagggcgcgagtgccagcgctgggatcttcagcacccgcaccagcaccccttcgagccgggcaagtacgcgtaggcggtatcggcgccctgggggccgggctagggaaggtccaggactccaggggcagggctccgtgtagggcaactgggcggggccagataagccagagtcccagggtcttcttcacgccccatta

SEQ ID NO: 1406 - DNA, 568 bp, Homo sapiens
  MAP TO AC020582.3; EXPRESSED IN BRAIN, SIGNAL = 0.33; EXPRESSED IN ADULT LIVER, SIGNAL = 0.49; SWISSPROT HIT: Q21313, EVALUE 1.10e+00; NT HIT: gi14769400, EVALUE 4.00e-88; EST_HUMAN HIT: BE000485.1, EVALUE 1.00e-85
acccaccccagatctattccttgcaatctttggcagagacttaactcccaagctgaatgagccccagggttgatctaggataacatttcctatgcatgaatgcaactcagcagctaagcagagccaggacagtaggcgccctcactgccatagtgcaactggacagcaatccagcagcattcaatgttgctgcagcaatttggtgtgaaatcccaaggccctcaagggttctgagaaatcctttcaaaactatctttgtgtatcaagttacaaggatagcctggctttgggattcttggcactggccacccttaccttttggtcttcaatgtattcaatgtcggctgtgttgtagccatcccgctggctctgatggagcaccctgaagcgcctcttgcctatgctgtcaaccactgagcggccatcagcaaagaattgaacatttctgatctctaggatgcagccatattctgcaaacctgtttattgagaatggagtcgagagactagatccttgatgagttctgtttccctgggctggcacccagccatttctgtagccccatgct

SEQ ID NO: 1407 - DNA, 583 bp, Homo sapiens
  MAP TO CHR22_97.0; EXPRESSED IN BRAIN, SIGNAL = 1.1; EXPRESSED IN HELA, SIGNAL =  12; EXPRESSED IN FETAL LIVER, SIGNAL = 0.86; EXPRESSED IN PLACENTA, SIGNAL =   1; SWISSPROT HIT: P44557, EVALUE 4.30e+00; NT HIT: AE001162.1, EVALUE 5.60e-01; EST_HUMAN HIT: BG033637.1, EVALUE 3.20e+00
tgcctggattgaaacaactgtctcttacaagcttcgttcaatttgtatctccttcatttctacacaaagcaataagaattatcttccacaaatagctgttttcagtaataaggaagctcagttctgtgactaagctaaacattccttctgttctccaaggcctacaatggttcctagttgctactcatatcaaactgagtttattagctcatttatgaattgctctgagtactctcagctatctacccctactgttttacatattcaaatttatatttttattccatttagtcagacaactctgtattaccatgcttaatctgtgtcttgcttgtattctttaccattattgtagaaatgatttgtggtcccgagcatttattctctccatcttccttaataacagaatctcttaactttcatctgggcacatgatatttctcaacctcctttgtagctaggagtgtcagtgggactaagtactaaacaataatatgtgacttgttaaaaaaaaaaaaaagaagaaagaaaaaaaagggaagagacattcatattttcaatctcccttcctttctcctggcta

SEQ ID NO: 1408 - DNA, 509 bp, Homo sapiens
  MAP TO AL133266.3; EXPRESSED IN BRAIN, SIGNAL = 0.86; EXPRESSED IN HELA, SIGNAL = 0.53; EXPRESSED IN FETAL LIVER, SIGNAL = 0.78; EXPRESSED IN PLACENTA, SIGNAL = 0.95; EXPRESSED IN LUNG, SIGNAL = 0.87; EXPRESSED IN ADULT LIVER, SIGNAL = 0.77; EXPRESSED IN BONE MARROW, SIGNAL = 0.76; EST_HUMAN HIT: BF874415.1, EVALUE 3.00e-74; SWISSPROT HIT: P11198, EVALUE 4.70e+00; NT HIT: gi14759941, EVALUE 2.00e-77
ttccttgccagtcacacaagcaaatattaaagataaccccaaatctaagcattagcatttttgtaaggctacttcacgtcttagtctacctacctgaatattctggcaatattggtacagacgtccttgtcacccttgtactgttccattgccgtgcagagctggggaagggcactgatgtttaggaacttacttcttactaatgatgaatcaaccaagtttctcaatgtagcagtcacctaggataaaagcatgcttgtgccattttttttgaactgaaaaaatataaccacacgaaacagcatagtacaattcatttcataaatttccttatatcagtagctaagcaaagctcccgctatgcatctcccaccagggaatgtgagcctaggcacaagtagcaacaaatgaaaacaaagaaagcctaatttggttgaaaggtaaagaatgaaatattaatcttagtaagcaattggtataccccaaacccagggttaaacaaaccatca

SEQ ID NO: 1409 - DNA, 593 bp, Homo sapiens
  MAP TO AC023123.3; EXPRESSED IN BONE MARROW, SIGNAL = 0.43; EXPRESSED IN PLACENTA, SIGNAL = 0.4; EXPRESSED IN BRAIN, SIGNAL = 0.4; EXPRESSED IN HELA, SIGNAL = 0.6; EXPRESSED IN ADULT LIVER, SIGNAL = 0.43; EXPRESSED IN FETAL LIVER, SIGNAL = 0.43; EST_HUMAN HIT: T19046.1, EVALUE 2.00e-94; SWISSPROT HIT: P34735, EVALUE 3.40e+00; NT HIT: gi14770724, EVALUE 6.00e-78
catgcccagaggctttttaggatgttgttttagtcagtgttttgtaagtgatttttaattaggttactttcattatgtttataaccaaaatacttttgaacaaggcaaaaaaatgttcagtgcatttttattttgataaatttacttacaagtactggaacttacttaatcacttcttcatcagagataacagtttcaattttctgctgggggtctgcaagcaaggcctctaaaccacgaacagcaccttccttgaagagcaccaagggttctgtcccttgcactgaaagtatcctatatacttctgctgacaactggaagaacataaaaaattttaatttttattctaaaacaatttatacctaatataaggatatttagagaaggcttctttttaagtgactgctttattttcattttgaattaattttgctttataattatgtatggttccaaaatctaacctacaacacaaaacacatttagaagtcttaactttttctcttatcctctctacctagtccctgctttaatctgtaaattcatttttggtttacccgttgtgactactagaggttaggctaaaacctggg

SEQ ID NO: 1410 - DNA, 531 bp, Homo sapiens
  MAP TO AL139152.1; EXPRESSED IN BRAIN, SIGNAL = 6.7; EXPRESSED IN FETAL LIVER, SIGNAL =  10; EXPRESSED IN LUNG, SIGNAL =  19; EXPRESSED IN ADULT LIVER, SIGNAL =  21; EXPRESSED IN BONE MARROW, SIGNAL = 9.2; SWISSPROT HIT: P52633, EVALUE 2.50e-01; NT HIT: gi16157256, EVALUE 0.00e+00; EST_HUMAN HIT: BI003400.1, EVALUE 0.00e+00
ttgttttctacctggccctgttctatcccaacataaaggcaataatttgttacctcattaatggatctgtcctttttcttttctaaccacttccttatgttagccatgaaatctagctggggctgtgtggtttctgattccccctggcttattctttactttttcccactttccaggctcagcagggagctgctggctgagaaagagcctgaagtcttgcaggactcactggatagatggtattcgactccttcagtttatcttggactgactgacccatgccagccctacagaagtgccttttacgtattggagcaacagcgtgttggcttggctgttgacatggatggtgagtacctttctatgaaggtgataaggatccactgagtcttctggttagggtcatattcctactgcaagtggcccttactgagctgagagatgtcattgccacagggaggacctataggcacatgtaggttgagtgaaactctagttccacttggaagcccagacaagggatgggtcagt

SEQ ID NO: 1411 - DNA, 581 bp, Homo sapiens
  MAP TO AC019277.4; EXPRESSED IN BRAIN, SIGNAL = 0.39; EXPRESSED IN FETAL LIVER, SIGNAL = 0.45; SWISSPROT HIT: P44488, EVALUE 1.90e+00; NT HIT: AE007684.1, EVALUE 5.50e-01
agaaatggcgtcaaagttgcctgtcagaaatttcacaaaatgctaacagccatactgagccactcctttctgttttctcaggagcccaagtaccttctctgtccttggagtggtctcgtctgctcctaatttagccattttccttcaaaccaattttccttctctgtattttacttcactcattttttcacagtcttcctccagggaacaaactcacgatgcaattgctagtcagcagccaacactttctcccagcagtagccctaagcaggctgcacatgctcaacctactccaggcccaactataactactgggaaagagagcagtgaggtaattcagatgactgataccttaaagaacaagattatttggaaccatttaggagagtgtgggaagcaaggacaaccttctttttttctgcaactgcaacacattaatgcaaatgctgaagatgctttcagtttataaaagcaccctatagacctgtacttcttttatttctgagaaattcaaaccaccaagcagttatcaaaatgttttaacagcagaaacctttatttggtcccctatatcgccacta

SEQ ID NO: 1412 - DNA, 513 bp, Homo sapiens
  MAP TO CHR22_115.0; EXPRESSED IN BONE MARROW, SIGNAL = 0.5; EXPRESSED IN PLACENTA, SIGNAL = 0.48; EXPRESSED IN LUNG, SIGNAL = 0.54; EXPRESSED IN BRAIN, SIGNAL = 0.54; SWISSPROT HIT: Q63515, EVALUE 7.00e-03; NT HIT: gi15318159, EVALUE 1.00e-106; EST_HUMAN HIT: BG819730.1, EVALUE 1.00e-106
cacaacaactccacagggtggagaagacagagattcttactcctattttagatttttttaaatgaggtcccaaggagtcaactgggtggccccagggttctcaacacgtcagctggaaccaggacacgtaatttggtacctgttttctttggggcttttctaaacagcacaggggacccatcttctgaaatatagcaccgtggggtagtccctgcatcatctgaactgctgcctctctttcccttcctcagcgtttgagaaaggccactgctatgagccctacatccagaatgggaacttcactacatccgacccgacctataacattgggactatagtggagttcacctgcgaccccggccactccctggagcagggcccggccatcatcgaatgcatcaatgtgcgggacccatactggaatgacacagagcccctgtgcagaggtgagcggatccacaacgctcttcccacggcaccccagggatctccaccctttggatgagaagacca

SEQ ID NO: 1413 - DNA, 567 bp, Homo sapiens
  MAP TO CHR22_174.0; EXPRESSED IN HEART, SIGNAL = 1.3; EXPRESSED IN BRAIN, SIGNAL = 1.2; EXPRESSED IN HELA, SIGNAL = 1.1; EXPRESSED IN FETAL LIVER, SIGNAL = 1.5; EXPRESSED IN BONE MARROW, SIGNAL = 1.1; EXPRESSED IN ADULT LIVER, SIGNAL = 1.1; EXPRESSED IN LUNG, SIGNAL = 1.1; EXPRESSED IN PLACENTA, SIGNAL = 1.3; SWISSPROT HIT: Q92558, EVALUE 9.40e-02; NT HIT: gi16165974, EVALUE 2.00e-10; EST_HUMAN HIT: BF765460.1, EVALUE 4.00e-15
gacacaatggtgccactcacgcctggctcaggccccagaaggaggagggtgccctcagagaagactcctccttgccctggctgcacgtctactgctgccacagaggtccacagtacagcacccgcagcttcctacccagcccaggctggccctgcagtgctcctactcgccttcccaggccccagacttgctactgctgccaccactagcaccgatgccaatacaaccaccactgctgccgccctcaatgaaccggcccaccctacagggctcccaccacctggccaccgctgcagcactgccctggccctggcagcagccagccgccctcctacctctctggcactctgcagtctccatcgctgccaccacgccaaccacagcgaggcaagccgtggtgtccctggctccagcctccagcatgtgcaggtggctactccttctcctggcacggagcaactggatgggcaaagccagaaaagcctagaacaggatgcagagtagtagtgtgagagacttagtcatgttggccactgggtggcaggggctctcaaacccaccttccaa

SEQ ID NO: 1414 - DNA, 546 bp, Homo sapiens
  MAP TO AC016714.2; EXPRESSED IN PLACENTA, SIGNAL = 0.61; EXPRESSED IN BONE MARROW, SIGNAL = 0.58; EXPRESSED IN LUNG, SIGNAL = 0.64; EXPRESSED IN ADULT LIVER, SIGNAL = 0.67; EXPRESSED IN BRAIN, SIGNAL = 0.65; EXPRESSED IN HELA, SIGNAL = 0.67; EXPRESSED IN FETAL LIVER, SIGNAL = 0.69; SWISSPROT HIT: P14817, EVALUE 3.90e+00
tcagatccacggtgtgaaactgagacacaaacttgtttgcctcttaggatggcaaatacatatacttctttggattgcattaagtgtggtaacacaggatatgtgcgcatcacaattaatgacagtggcatagcaggtttgagatatcctgaatgtgagtactaactgcttttctttctcactatttaatcttatttttttctcttaactgccttgtgtaacctttgctgcatcttctctctcttttgacttccttaataacagtgaacctaatattgcagactttagtccttattttttccttctcttcattttgaagttcagtatcagttacatttgataacacctacatctgtgtccctagatcaaagttttctactgagatccagtatgttatctttaatcctcgacatctcgaagttcaacttgtgctagatgagtcataattgcacctttaatgtacaaccaattgtaccatcattcacaggaacactgaaactcaacagccaaggtgtcatcattgcttccttttcctttgctccctct

SEQ ID NO: 1415 - DNA, 552 bp, Homo sapiens
  MAP TO AC015957.3; EXPRESSED IN PLACENTA, SIGNAL = 1.1; EXPRESSED IN HELA, SIGNAL = 0.78; EXPRESSED IN BRAIN, SIGNAL =   1; EXPRESSED IN LUNG, SIGNAL = 1.4; EXPRESSED IN ADULT LIVER, SIGNAL =   1; EXPRESSED IN FETAL LIVER, SIGNAL = 0.97; EST_HUMAN HIT: AL589249.1, EVALUE 1.00e-101; NT HIT: gi15305591, EVALUE 0.00e+00; SWISSPROT HIT: P28828, EVALUE 5.00e-51
cttgtcctgagagctggaccaggagagccagtgccaccctcccctggcctggtcaggagcacactaatctcatattctgtatctgggtcaaggtgtccaattttatagctcgtggaatcgactggctgccggtcattccagctcccactggccgtgcagtactccacctctcgggccacaatgggcccatccccattgatggagttggcgttgagctgtatccacaggtaggtggctcctacagaggcgagctgaggtggggcaataggaacgggtggttctgaaagacaaaccagaaagctgtctttcagatgctttgtcttcagtcttaaaagagctaaacatgcatcaattattaaaatgtagaagataataaaatttcaggaataaattgatgagaaaaattttgtttgggttaacaagaaaaagtatgttgaaaaagattttcatagcattcaaagttgtgaaataaaccatctttaaacacataagcttattcaagtaggcataaccctaatttgttttaggacaccaaccaccgtgcatagcata

SEQ ID NO: 1416 - DNA, 597 bp, Homo sapiens
  MAP TO AC024066.3; EXPRESSED IN BONE MARROW, SIGNAL = 0.45; EXPRESSED IN BRAIN, SIGNAL = 0.61; EXPRESSED IN FETAL LIVER, SIGNAL = 0.49; EXPRESSED IN LUNG, SIGNAL = 0.45; EXPRESSED IN ADULT LIVER, SIGNAL = 0.56; SWISSPROT HIT: Q11114, EVALUE 4.40e+00; EST_HUMAN HIT: H46192.1, EVALUE 5.40e-02; NT HIT: AF332859.1, EVALUE 5.70e-01
gtgcatgacagttagtgccgagtgttttcagctatctacaatcacagcttagtgatggcattatttatacttaattcatatcaaaaccttagttattcaaatagtgttcataacagaagacaacatcttctgatctactaagggaaaaatgggatactcactgcatctttatcttcttctcttttttgcttaggatgcccagtggctgactatacttgccacaaacaactccaagatggttaatatgaacagatattccgaaaggagtttgccacttttctgtatccacaaagaaaatgtacattccttacagatctttctatgtgagcacttcagaaataacaaaggcatcttaaaattgaagaagcacaatagaagagaaaaactacccaccctatcctccaccctcaacaatagaattttaaatattttttaattgtaattacaatggataattattgaggatgatgatatactgatatatttctgccaaatgtatgatgagaatcattgattgtgttttcctgtttattgttgtggataataacaggaaattttcattgagtccaataaatctctggggaagatggaattgtg

SEQ ID NO: 1417 - DNA, 515 bp, Homo sapiens
  MAP TO AB017653.1; EXPRESSED IN BONE MARROW, SIGNAL =   2; EXPRESSED IN LUNG, SIGNAL = 2.7; EXPRESSED IN HEART, SIGNAL =   2; EXPRESSED IN ADULT LIVER, SIGNAL = 3.1; EXPRESSED IN HELA, SIGNAL =   2; EXPRESSED IN BRAIN, SIGNAL = 2.1; EXPRESSED IN FETAL LIVER, SIGNAL = 2.1; EXPRESSED IN PLACENTA, SIGNAL = 2.9; SWISSPROT HIT: Q9TVD0, EVALUE 1.60e+00; NT HIT: AL163227.2, EVALUE 7.60e+00
gtaagatgcccagaaggtgctctgcacaaagtatagcaagtattagtttattttccctctccacacaaaataacactggagactttttaaaaagaaattaaatctcctgtctatcccaggagtagaagaggaccgagaacagttggcagaaacacctgctgaaggactgggtaaggcagtgggaagaagtgggtagcaatgtactagaagggtctatcagtgggatttggaaaattccatatctaatatttattgtatagttctatgacctgtgaatctgaaacctcaaaagagctgattgttgttgacattggcaccactgcaatagtcagagctgggcactggctggctgagccagatcaggaattcatgcacaagtggggtcagatggtcagcaaaggtgagtatcttcctccgtgcccccacagcaccctgcacgtttctttattgttgcccctttctagtgttcaattctctgtagaactgccttcccaccaccccagaccatgagttct

SEQ ID NO: 1418 - DNA, 574 bp, Homo sapiens
  MAP TO CHR22_176.0; EXPRESSED IN FETAL LIVER, SIGNAL = 1.9; EXPRESSED IN PLACENTA, SIGNAL = 1.7; EXPRESSED IN LUNG, SIGNAL =   2; EXPRESSED IN ADULT LIVER, SIGNAL =   2; EXPRESSED IN BONE MARROW, SIGNAL = 1.6; EXPRESSED IN BRAIN, SIGNAL =   2; SWISSPROT HIT: P32082, EVALUE 1.10e+00; NT HIT: gi14777956, EVALUE 0.00e+00; EST_HUMAN HIT: AW793463.1, EVALUE 0.00e+00
aaccacaaggcacagagtccgatattgtcactgtcgactattagtgactgttgtaaataaacagcggaaaggacccaagttacatttatgttcagcctctgaacaaaatgttacctttttcacagcaaggaatattgtgtactaagcactttcatgaacataaaggcgatgctttaaatcatcactgctaaccacagaaaccagggcaccaaagctgctgggcttggaatgcatttccccttatccttacccagcttgggcactatgtttttgaccatgaatgcttcccaggagccaggagtgaagacatccttccagggctggaggatgagcttggcagaggagtcgctggggtgccacttctgcagggcgctggacagcttactacggatgggggaatagagtggctccagccgtgcctgcataaggggcagccatgggtggatccaagagtggatgggaacagtgtctgtgagcgggttccagttttccacctgcgaagtggggaggagaaacagttcatgtcgcctgtggggcagtcacataacacccctgtgtggctaaaggcaagagc

SEQ ID NO: 1419 - DNA, 500 bp, Homo sapiens
  MAP TO CHR22_123.0; EXPRESSED IN HELA, SIGNAL = 1.3; EXPRESSED IN LUNG, SIGNAL = 1.7; EXPRESSED IN ADULT LIVER, SIGNAL = 1.5; EXPRESSED IN BRAIN, SIGNAL = 1.4; EXPRESSED IN PLACENTA, SIGNAL = 1.5; EXPRESSED IN HEART, SIGNAL = 1.4; EXPRESSED IN FETAL LIVER, SIGNAL = 1.6; EXPRESSED IN BONE MARROW, SIGNAL = 1.6; SWISSPROT HIT: P56272, EVALUE 4.60e+00; EST_HUMAN HIT: BG753947.1, EVALUE 1.00e-103
tcctccaaggagtgatcctgacttcccaggcagagaatttctgcaataagcattaggcctcccctgtccccagatccctgcccagaacccaaacacgggtggagcctccacagggcttcccacccagcctcctgcttccacagaacaggattcactctggccagaggaggaaattctttgaacttctttgaagtccatgatggtgatgatgatgatgacggtgacggtgatggtgatgagaataatggtgatggtgatgatggagaggaggaggaatctctggctctcctgctgatgtctttctctgaccagtacagtctctggaaggcaggatcatgtgttttcccaccctctgccaaagatgggagcagcctgggctggaatgcaaggtggcaggagcataccacagctctgtcactacgatggcaacagccccatccctgtccctcacaatggccctgagtgtggccctggttgtccctgcctgtgtccttccttgt

SEQ ID NO: 1420 - DNA, 584 bp, Homo sapiens
  MAP TO AL136304.2; EXPRESSED IN FETAL LIVER, SIGNAL = 1.8; EXPRESSED IN PLACENTA, SIGNAL = 2.4; EXPRESSED IN LUNG, SIGNAL = 1.9; EXPRESSED IN ADULT LIVER, SIGNAL =   2; EXPRESSED IN BONE MARROW, SIGNAL = 1.6; EXPRESSED IN BRAIN, SIGNAL = 1.5; EXPRESSED IN HEART, SIGNAL = 1.6; EXPRESSED IN HELA, SIGNAL = 1.3; SWISSPROT HIT: Q14999, EVALUE 1.00e-75; NT HIT: gi14781548, EVALUE 0.00e+00; EST_HUMAN HIT: AU134324.1, EVALUE 1.00e-85
agagaggggcttaaactgggacaaggtggatataggccaaaggttgtatcccacaggtcccaggaagggtgctcttctccctggtgaagcggtatttgcatgtcacctcgctcctggatcagctgaacgacagtgctgcggagccaggagcccagaacacctctgctcctgaggagttgagtggggagaggggtcaactggagctggagttcagtatggccatgggcaccctgatctcggagctggtgcaagccatgcgctgggaccaggcctcagacagaccaaggagctcagcacggtcccccggttccatcttccagcctcagctggcagatgtgagcccagggctccccgctgcccaggctcagccctccttcaggaggtcaagacgttttcgccctcgttctgagttcgcaagtggcaatacctatgctttgtatgtgcgggacacactgcagccggggatgcgagtgcggatgctggatgattatgaggagatcagtgccggggatgagggcgagtttcggcagagcaacaacggtgtgcctcctgtgcaggtgagtggcacatggtggtgggatact

SEQ ID NO: 1421 - DNA, 500 bp, Homo sapiens
  MAP TO AC011734.4; EXPRESSED IN FETAL LIVER, SIGNAL = 0.59; EXPRESSED IN LUNG, SIGNAL = 0.56; EXPRESSED IN ADULT LIVER, SIGNAL = 1.1; EXPRESSED IN BONE MARROW, SIGNAL = 0.52; EXPRESSED IN BRAIN, SIGNAL = 0.52; SWISSPROT HIT: P41997, EVALUE 1.00e-03; NT HIT: gi5730038, EVALUE 7.00e-74; EST_HUMAN HIT: AA535990.1, EVALUE 4.00e-73
aattgtggtttcagaccgtgaattttaaatcattataactaggctcaaaaacatctttattattcaaattatgaaccatggcaattaacacatttttgccaacaagaaataagtttgtttattcctgtagcataaaagtctgtgccttggaattcaacgaactgttggaaagcattttgtgcatcttgctggttgtggaagtgttttccctgaaaaaaactggtgagatgctagaagtggtggttggtgggcgacaggtcaggtaatgtggcagctgaggcaaaatttctagcccaattcgttcaacttttgaagtgttgattgtgtgatgtgtgatcgggcattgttgtggagaagaattgggcccttttctgttgaccgatgccggctgtaggcgttgcagttttcattgcatttcattcatttgctgagcatacatctcagatgtaatgctttcgctgggattcagaaagcttcagaggaagagaatggcagcagac

SEQ ID NO: 1422 - DNA, 540 bp, Homo sapiens
  MAP TO AL136231.3; EXPRESSED IN FETAL LIVER, SIGNAL = 1.1; EXPRESSED IN LUNG, SIGNAL = 1.2; EXPRESSED IN ADULT LIVER, SIGNAL = 1.8; EXPRESSED IN BONE MARROW, SIGNAL = 0.99; EXPRESSED IN BRAIN, SIGNAL = 1.1; EXPRESSED IN PLACENTA, SIGNAL = 1.3; SWISSPROT HIT: Q10765, EVALUE 6.60e+00; NT HIT: gi16180592, EVALUE 2.00e-87; EST_HUMAN HIT: R53914.1, EVALUE 2.00e-87
caccaaaacatggcatgaagtaagattcaacagttatcttctgaggcaggaatatttaaaatagtagcacatattaaaaaaaaaaaagagtggggcaaaataacaaaaattatgtgaattaataggcttataaaacaaatatttacttttccaacttacctgtggtaaggattctaataaacctatagatccaacaccagaatggggaacatgattctgaactgtcataggttgaaaactttgtgattgagaataaagtcttactcttgacttgaaagcttcaagttcatttttgaatgcttcaaaataaccttcttcctctgcctagaaaaaacaaaaaaaaaaacaaagactgtgttcttcaagatttctagacatagtaaattccagaaagcatataacaggtttgaagtggaggaagtaatgacaaggtgaatagtctaaatatagaaaccaccacgatccctgtcacatttgtgaaaactacctgatttataggaacattaataattggtttgctccatttccttctgcttcagc

SEQ ID NO: 1423 - DNA, 560 bp, Homo sapiens
  MAP TO AL096794.3; EXPRESSED IN FETAL LIVER, SIGNAL = 0.88; EXPRESSED IN BONE MARROW, SIGNAL = 0.89; EXPRESSED IN PLACENTA, SIGNAL =   1; EXPRESSED IN BRAIN, SIGNAL =   1; EXPRESSED IN LUNG, SIGNAL = 0.96; EXPRESSED IN ADULT LIVER, SIGNAL = 0.88; EXPRESSED IN HELA, SIGNAL = 0.78; SWISSPROT HIT: Q9XSQ5, EVALUE 7.00e+00
gctacaggtgcaaagttcccagttacctcaattattcacatgatgcttgcatctttgatggatggcataacctgttcagaaatcagggtgagctctgctcaggccacccttacaaatgaaggtaagtttgaagggaaaaacagtgggaaggaccttctatggtggcttctccctttctctgtttcaaaggggaggcccaggaaaagatcttttgccaacatcatcctgaacctctactcagccattgttagaatgacagaattgaaaaagaaaaaaagatgtcgtgatggctagactgggaagggctccagctccccgccactggctgcagatgccatctagctgtgtctgtggaaagatcacctaggtgccccagtgaaagatcacccaggcatcaatgtctgggagccctgttctgagaaaaggtgccacaagggcggctttcttcaccagtgctctggaagcactattttgtctctgattcaattcctttcaatggatactaattgaataactactatgcacattgtgaggtgacaagggaatagcactggacttgg

SEQ ID NO: 1424 - DNA, 592 bp, Homo sapiens
  MAP TO CHR22_177.0; EXPRESSED IN BONE MARROW, SIGNAL = 0.76; EXPRESSED IN BRAIN, SIGNAL = 0.69; EXPRESSED IN HELA, SIGNAL = 0.85; EXPRESSED IN PLACENTA, SIGNAL = 0.89; EXPRESSED IN LUNG, SIGNAL = 0.96; EXPRESSED IN ADULT LIVER, SIGNAL = 0.84; EXPRESSED IN FETAL LIVER, SIGNAL = 0.74; SWISSPROT HIT: P17600, EVALUE 3.90e-01; EST_HUMAN HIT: AW340904.1, EVALUE 4.00e-83
gagtgaggtgaggaaggtgccagggactaaggaccaggtggcctccagcagctgaggaaggcagagcaggaggccctccccagggcctcccggagcagccccgcccacgcccctgaatgcagggctcctgccctccagaacagtaagaatgaatccgtgctgcgttaagcccctcgtgtgtggaaatgttacagcggccacaggagactcgtgcaggggtgagcgagcgtgcccagccctgctgtcacggagcccacactctctctgcagaagcagcatccctccagtgcacgcacagacgcccatgacccgcagccagcccggccaggcagccttgtctcccctcaacagcacagacttcgaagtcacggggaacggcgtgtgctttaaaccacagcgaggtttctattgcatgcggctcgtcttcaggccacttttctaactgtgggccagacatttctgggcagatgtttgttcctcactgactcacattccacacctagttcagctcgcccacctccaagctgtccgggtgggacgcgggaaaccctctgctcctgcgcttagcgttcgcaaaggtaaacacatcgca

SEQ ID NO: 1425 - DNA, 521 bp, Homo sapiens
  MAP TO AL137067.3; EXPRESSED IN BONE MARROW, SIGNAL =  18; EXPRESSED IN BRAIN, SIGNAL =  24; EXPRESSED IN HELA, SIGNAL = 1.8; EXPRESSED IN PLACENTA, SIGNAL =  32; EXPRESSED IN FETAL LIVER, SIGNAL =  21; EXPRESSED IN LUNG, SIGNAL =  35; EXPRESSED IN ADULT LIVER, SIGNAL =  38; EXPRESSED IN HEART, SIGNAL =  32; NT HIT: AJ414148.1, EVALUE 3.20e-02
atggaaatcccttagccctgaagatcttcagtgatattaggaagattctctctttcccatcacatatggatttagggttaaagtcactccacttaaatattatggcaacagagaggcgctcaggacctggagacctccaagctgctgctgacttttgagtttcacaacgttgagaaggtagggggtattattttcaatacatctcttctagagaaggatgaaataaaatgtgtgtgtgtgtgtgtgtgtgtgtgtgtgtgtgtgtgtgtgtgttggggggtgattcaggagaatctgaaataggacagcctgatactgaattgatcatcattgttgctgtaacaaattagccacaattaacacaattaactttagtggcttaaaaacaagcctccactgtgtttggaggaaactagcaggcaatgggattggttagtatccaagatcattgttaagtgtcagagcaggcaagagcccatccctgatggaagcctgaaatgtggggtgagaatgactcatgg

SEQ ID NO: 1426 - DNA, 537 bp, Homo sapiens
  MAP TO AL133476.4; EXPRESSED IN FETAL LIVER, SIGNAL = 1.5; EXPRESSED IN BONE MARROW, SIGNAL = 1.3; EXPRESSED IN BRAIN, SIGNAL = 0.75; EXPRESSED IN PLACENTA, SIGNAL = 1.5; EXPRESSED IN LUNG, SIGNAL = 2.1; SWISSPROT HIT: P16406, EVALUE 8.60e+00; EST_HUMAN HIT: AL548270.1, EVALUE 1.00e-115; NT HIT: gi14739639, EVALUE 0.00e+00
ttttggatcttctcgccaacaactactggattttcttttctgattttctcagcggcatcagctttgtaattttaagagcaattgtgtagatctgagtaacagtgtacaccacagtaaacatttctacaccgcattcaaacctagtaagtcccactttcttcctgcacatgaaacagagattctttttttgttttggtttttcaagagacttgctttgctcttcagatggctgctgtgccatgtctgatactgaagcctgcagatcttctgtttcaggtactgcttgtccacagatgtactgtccaattgagaagatgctacagattctgataaaagtgactgatttgatacagggcttggctgcatagatgaagatgtagagtctaatgttgactgggcttctgggacactgccatctgtgcattgaactggtaaagattcagaggttgcaggttggcttattctaccattactactattcagtctttgaagatgttctttatagcatactgaacacgtgccatttgtacgagggtt

SEQ ID NO: 1427 - DNA, 567 bp, Homo sapiens
  MAP TO AC020550.2; EXPRESSED IN BONE MARROW, SIGNAL = 0.43; EXPRESSED IN BRAIN, SIGNAL = 0.52; EXPRESSED IN FETAL LIVER, SIGNAL = 0.41; SWISSPROT HIT: P23723, EVALUE 3.20e+00; EST_HUMAN HIT: BI823032.1, EVALUE 2.00e-75
aatgtcgctgctaaaagaggaatgaaatttgttggattcatatcacagcattattctccatctaaattctgcaatggaaccaaccatgatggagatatagaatcgatgctacatgtgagacacggttcagatgaaaactgtagaagttggaatgaagggacgttaagtgggcagtcatctgaaagcggaattgaggaagaacttcatcatgaaagtggacagtatcaaatggaacaaaatggcagccctacttcctctaaatcaagaaagggagaaggtaatagacaagattagtagaaagagaatatactatagtttaagcaaaataagtttttgaggttttttttagaaatatgagtcaaagtaaattgctaaagattataatgactaaatgaactaataaaaacctcatgatttttaaaagttattacagctagcaataaggcagggcagttttttagacagttgtctctggcagaacataaaatgccatccacataatgaaactttgtgttgaagattggtttctatttagtcatccaaaactccctcataaattggaggctg

SEQ ID NO: 1428 - DNA, 527 bp, Homo sapiens
  MAP TO AC017050.4; EXPRESSED IN BRAIN, SIGNAL = 5.9; EXPRESSED IN ADULT LIVER, SIGNAL =  16; EXPRESSED IN LUNG, SIGNAL =  18; EXPRESSED IN FETAL LIVER, SIGNAL =  17; EXPRESSED IN BONE MARROW, SIGNAL =  15; NT HIT: gi14763084, EVALUE 0.00e+00; SWISSPROT HIT: P49312, EVALUE 2.00e-40; EST_HUMAN HIT: AL540495.1, EVALUE 0.00e+00
ccatattcaacaccaccacggctgccactaaagccaccacaaccactgaagtttcctacatgaccaaatttgtcattcccaccaaaaccacctccacaaccaccacaaaagtttccaaaacgactttgacctctttggctggtgaagcactagccatctcttgctttgacagggctttcctaactttacagctgtggccattcatagtatggtgtttttgaatgccaatcttatctacggactcatggttgtcaaaggttgcaaaggcaaaggcccttttcttgccactgcctcggtcagtcatgatttcaatcacttcaatttttccatactactcaaaataatttcttaggtgatttcttcagtgtcttctttaatgctgtcagcatatatctttttcacagttaagtgggcacctggtctttgagaatcttctcttgagacagctctttggttccacaactcttccatccaccttgtgtggccttgcattcatggctgcatccacctcctccacagtggcatat

SEQ ID NO: 1429 - DNA, 556 bp, Homo sapiens
  MAP TO AL138893.2; EXPRESSED IN BRAIN, SIGNAL = 4.3; EXPRESSED IN FETAL LIVER, SIGNAL =   4; EXPRESSED IN BONE MARROW, SIGNAL = 3.9; EXPRESSED IN HEART, SIGNAL = 3.9; EXPRESSED IN PLACENTA, SIGNAL = 4.2; EXPRESSED IN LUNG, SIGNAL = 4.3; EXPRESSED IN ADULT LIVER, SIGNAL =   5; SWISSPROT HIT: Q61362, EVALUE 3.10e+00; EST_HUMAN HIT: AW390310.1, EVALUE 7.80e-01
caatgaatcagggatcagcctccactcacctatcttctctgtccacaatattttacaattcttttcttttgttgggatgcaaagcttgaggaaagggtaagcaaaaggaactgaaattcattccattccaaaaacaacctgtattctggctgaaaacatacataagagtctaagcttaacacataggaagacaagaaaaggtacaacaaatcccagaaggttcctgaaaaggaagaggcttacaggagaagctgtctgggcaagtgtgtatttgctcagatttggggaaatgtatataaacctgggacaaaaaataaagggagtacttttcagcctagtctttttgactcctatgtcaatccctaccatctgaaatctggttcagattttcattaggccctttcaacttcaaggaaagaaacaaccgtcaggtaaccaaaaataaaaaaggcttatgaaacacatactggaaggacggaaattcagaaagctctttaagtagctgaaccaagtctgtacttcagtaaatactatttccagctccacttaaagcagc

SEQ ID NO: 1430 - DNA, 535 bp, Homo sapiens
  MAP TO AL034373.13; EXPRESSED IN BONE MARROW, SIGNAL = 1.9; EXPRESSED IN PLACENTA, SIGNAL = 1.7; EXPRESSED IN BRAIN, SIGNAL = 1.9; EXPRESSED IN FETAL LIVER, SIGNAL = 1.6; EXPRESSED IN HEART, SIGNAL = 1.5; NT HIT: AF111167.2, EVALUE 2.00e-03; EST_HUMAN HIT: AV720225.1, EVALUE 3.00e-09
acatgaccctgttccaaagctgcttccacattttcagatatttgttatagcaacaagccctcttccagtaccaattttctcttttactctgttttctgcagctattacagactatcacagactagataatttattaaaaatagaggtatatttgcctcacaattctggaggctgggaatttcaagatggaggggctgcatctggttaagggccttcctgctgcaacttaacactgtggaaggcaacaaatggtagagaaagtgagagtgcaagagacaaagagggataaaggggaccaaactccattataattgatctaatttattcatgaaggcagagctttcatgacctaataaccgcttaaagtttccacctcttaatactgttacaatggcagttaagttaccatatgagttttggaggagacattcaaacagtggttaatattactaactctaatttggcctcctgagataaataactcaatttgaaataaccaaatagtggtaaatggagctactgggcctggagttaa

SEQ ID NO: 1431 - DNA, 542 bp, Homo sapiens
  MAP TO AL121957.3; EXPRESSED IN BRAIN, SIGNAL = 0.52; EXPRESSED IN PLACENTA, SIGNAL = 0.58; EXPRESSED IN HELA, SIGNAL = 0.72; EXPRESSED IN FETAL LIVER, SIGNAL = 0.55; NT HIT: gi16162600, EVALUE 0.00e+00; SWISSPROT HIT: P33485, EVALUE 5.90e-01; EST_HUMAN HIT: BI465307.1, EVALUE 0.00e+00
atgagtgcgagtgtgtcagcgggagaggggtagctcacctggctgtggtaagcagagggtgctgagtgcccaccagcttccgcacctgcatagcgatgttgctgagctcgtcgctcagcaggcagcgaaggctcatgaaggacgtggggtaccccacgatcttctccgcctctgacactacctgattccagtgggccggggacttggaggaccgaccacgccaagagcccaccgaggagatggtgtcgagggacggggaccaccacaggcgacgcggggaacccgaggctccaagataacgtggcaagtgcaacagcagctgccgaaagttcatggtttgagtctggaagggtctgggacctgggggtatccagaagtgccgcgggaaacaaaccaggggcagaggaggaacttacagtaactaaaaggaagcggcaattcttgaccctcagagtaaggtggcttcctggagcagtgaccagaaacgaactttaactgctgctttctgcagcccaggctgggcaaacaacagtcccagctca

SEQ ID NO: 1432 - DNA, 528 bp, Homo sapiens
  MAP TO AC011950.4; EXPRESSED IN BONE MARROW, SIGNAL = 1.4; EXPRESSED IN LUNG, SIGNAL = 1.8; EXPRESSED IN HELA, SIGNAL =   1; EXPRESSED IN FETAL LIVER, SIGNAL = 1.3; EXPRESSED IN PLACENTA, SIGNAL = 1.6; EXPRESSED IN ADULT LIVER, SIGNAL = 1.5; EXPRESSED IN BRAIN, SIGNAL = 1.7; EXPRESSED IN HEART, SIGNAL = 1.6; EST_HUMAN HIT: BE169211.1, EVALUE 4.70e-02; NT HIT: S80050.1, EVALUE 2.00e-03; SWISSPROT HIT: Q9ZJM4, EVALUE 3.70e+00
ctggctcaaggttttccaagaagaccttgtaatcaagaagtcagccagggattcagtccctcgggatgtctgatcagggagggtgtgcttttacgctaactcatgtggttgttggcaggctccacttcctcgatgaagactgaccaccaacacaagcacagctctcccaaagacaaacagaaatcatacgttctagaccagttgttctcaaaatgtggtccctggacagcagaaacagcatcatcactgggtaactaattcctgggccacatcttgcaattactatacacaaacctctaggtataggcaccagcaatctatgttttcacaggttgccatatgattcaatgcatgccaaattcgagaatcactggtctggaaccaaaaaaggagtaacatgaaacttatcatcttagtggctttccataatcccctttcagactcccagaaataagaattgatcccattacccagtcaagtgtttatggctttagctaccaagctctagggggaagccctggtaaatac

SEQ ID NO: 1433 - DNA, 585 bp, Homo sapiens
  MAP TO AL121939.3; EXPRESSED IN PLACENTA, SIGNAL =   1; EXPRESSED IN HELA, SIGNAL = 1.2; EXPRESSED IN BRAIN, SIGNAL = 2.3; EXPRESSED IN FETAL LIVER, SIGNAL = 1.6; EXPRESSED IN BONE MARROW, SIGNAL = 1.8; EXPRESSED IN HEART, SIGNAL = 1.4; SWISSPROT HIT: Q05140, EVALUE 2.00e-14; EST_HUMAN HIT: AA258526.1, EVALUE 4.00e-52; NT HIT: gi14750326, EVALUE 3.00e-52
cacccaccttagcgactctctccctcacagtacagcctcacattatccctaattaaaattacaaattatgcttcctcatagtcctggattcctcaaatattgtcagaagtacataaaagcaataaatgtcaggatagtgccctagtgagttccactcatgctctgaaccactctccattcttcctcctcagcctcctgctgggacaggcatgcccatgatgcctcagcagccggtcatgtttgcacagcccatgatgaggcccccctttggagctgccgctgtacctggcacgcaggtcagtttcttcaatgtccacaaatcagtgacattaactaataagtgtaaaacattggtgtagcaaactgtttaaaaagtgtttttacctaatgtaatcctcatacctgttgcttcagaagtaaagggagcttggaagacagatctgcaaaagtgagatttgggggggaaaaagtgatggaaataactcactgtctaaagatccctccattctcttcctacttaattcatattggttcctgagaacatccagatattcagggcatccaaggcatgtgtcccagagaaat

SEQ ID NO: 1434 - DNA, 531 bp, Homo sapiens
  MAP TO AC020698.2; EXPRESSED IN FETAL LIVER, SIGNAL = 0.64; EXPRESSED IN BONE MARROW, SIGNAL = 0.66; EXPRESSED IN BRAIN, SIGNAL = 0.75; SWISSPROT HIT: P12304, EVALUE 6.50e+00; EST_HUMAN HIT: BG828432.1, EVALUE 7.40e-01; NT HIT: AF298624.1, EVALUE 2.00e+00
tgcctgcataagcatcagacgacctcatgtcataatcatcgttcagcttctctgagcacatagcaagaaaaaccacatcgttggcacagtgggaatgggggacaagctggggaaagttttccacttctggaaatgcatgcagaggagtccagagggaggggatgagaagcaccgcctgccctggctgcagcagcattgaagccatcatcaccagttctatgaaaactttcaaggtcaacaatgagcaaatgaactggtatttttgtgttttgggctacaacatttctataaccctaaaaattaccttgagctaaatacaggaagaaaggaaaagcgctcatggatacactagcaaaaaacttcaagagtaatctgtgtggtcaccttttctacctcaaagagcactcaccatgaaatagaaccgataaacccacgttcagggtgtccaccatgaaatagaaccgataaacccacgttcagggtgtccaccatgaaatagaactgataaacccacgttcagggtgtccacta

SEQ ID NO: 1435 - DNA, 597 bp, Homo sapiens
  MAP TO AL138895.4; EXPRESSED IN FETAL LIVER, SIGNAL = 2.1; EXPRESSED IN BONE MARROW, SIGNAL = 1.7; EXPRESSED IN BRAIN, SIGNAL = 1.9; EXPRESSED IN HEART, SIGNAL = 1.8; EXPRESSED IN PLACENTA, SIGNAL = 1.8; EXPRESSED IN LUNG, SIGNAL = 2.1; EXPRESSED IN ADULT LIVER, SIGNAL = 2.2; NT HIT: gi16160466, EVALUE 0.00e+00; SWISSPROT HIT: Q63622, EVALUE 3.90e-01; EST_HUMAN HIT: AI908402.1, EVALUE 0.00e+00
gtctgccttgtcctgctctcttcctctcccagttctggtccagtgggctgggatggaggggggatgtcttcctgccaccctggccatgcagccccaaccccgcaaggagcttgatgaagccaacggtggaaagggactgggaccaggggctgggcagtggtgggaggccctcaggccttggcctctagagcatcacattgaactcagtgaccagaaagtcaatgtagtcacggtccttagtcttgaaggcctcggcgataatgcgggcggcctcccggtgctccttgccccgaagcgtcagcccattcacttccagaatcacgtggcccaccttgagctgcccacagttgtgagctgagccgcctctctgcagggaggagacacagggcatggggtgcccaagggttagacaggcctggctttgaccaccaactgggtcagtcccaacactgccaagcaggcagctacaatctgagtgtccacttctcggattaggaaagctgaggcccggaagagcaaaggtgacataagcctaggtctgcccttgagtgccgtgttacccatgggagtcgcaaaaccctggagatgctgagaaag

SEQ ID NO: 1436 - DNA, 578 bp, Homo sapiens
  MAP TO AL121994.3; EXPRESSED IN BRAIN, SIGNAL = 0.8; EXPRESSED IN HELA, SIGNAL = 1.3; EXPRESSED IN BONE MARROW, SIGNAL = 0.86; NT HIT: gi15208634, EVALUE 8.60e+00; EST_HUMAN HIT: BF877206.1, EVALUE 5.20e-02
gcaggcaaaggtaagctgtcttagagcaaatgcagagactcccacctggcagctgaatccatagtttactccttcccatcgggtcctctttcctccctatttccagcctcttgtctttggggactggacagatatctgttccaaacttgagggtcttatagcacccagagatgtgacctaaggtgaaaggtgaaatccggagcttggagtccttttctctaagggaattatcttcaagcatcctctggatggaacagagacctaatgaagtattttctcaatgaccccaaggccaagaacctcagaacaggcagaaggaggttgttctctccagcataaagaaaggaactgtggtagatttcctgggtcctattcatttgcgacatttaacagactttatgtctggaccatatgtattcccaagttcaagccgaatgcactgaatctctcagctgggaagaaccgtggtgtcctggttcaaggatctattttcctgattgagacagacaggcaaaaaataacctaaggccacaaagttaatactatttccatgtttctgggcttctagcctaggccta

SEQ ID NO: 1437 - DNA, 590 bp, Homo sapiens
  MAP TO AL136303.3; EXPRESSED IN HEART, SIGNAL =   6; EXPRESSED IN PLACENTA, SIGNAL = 7.9; EXPRESSED IN LUNG, SIGNAL = 7.3; EXPRESSED IN ADULT LIVER, SIGNAL = 6.7; EXPRESSED IN FETAL LIVER, SIGNAL =   6; EXPRESSED IN BONE MARROW, SIGNAL = 6.9; EXPRESSED IN BRAIN, SIGNAL = 7.4; NT HIT: gi14756250, EVALUE 1.00e-121; SWISSPROT HIT: O35261, EVALUE 2.00e-35; EST_HUMAN HIT: BF906041.1, EVALUE 0.00e+00
ctctttaaggatgccgttgctggatgctcatcaaatataaatccttttatctctgacagtatctaaacaaagtctctttgtaaagagacttcaaacttctggcttagaagctgaggagggaagagagaatgagagagaagaaaacagtaggagagaaaagaaaagaacgtgtgggcgtggatgtgaaagtgaggaactaagaaaccaggcagtttgaaacgaccccctcagagccggggcatggggaggactcctactcacatccattggacgttgtttttagacttcttcttaatgaggtggatgccttccagaacgttggtgatatcataaatccttctcttttgcacttttagcacttctgctgccttgttcaaatccaataccccatcgggtgactggctcaggagctgaatgaacttcttggtgagcagaccaagagacgtatcataccgcgttttttctgagggagattttggagcttaaagaaaaacaaaaaccgagcgggtgggggatagggggaaaggtaaagaaatgaagggtgtctttgcagtcaagcaagctctctttcccactgcagccaaagtatt

SEQ ID NO: 1438 - DNA, 588 bp, Homo sapiens
  MAP TO AC025179.2; EXPRESSED IN ADULT LIVER, SIGNAL = 0.46; EXPRESSED IN BRAIN, SIGNAL = 0.41; EXPRESSED IN BONE MARROW, SIGNAL = 0.52; EST_HUMAN HIT: AW177024.1, EVALUE 2.10e-01
aatgtggcctcaccattagcatttactcaaggagaacatgtctaaaaataagctcaagtctctggataagattggggattttaaagaaactattaaaaaatgctaatatgaagtgctgtaaatcaaacccataaatgtcttaagtttaatagttttaaattaattgtcttctaaaataggaacattactttttaagcaagttgaacacaaagaatggcaaaatccttcacaatgaacatcgcagtcaatgtgttagaaggtatgataagtgataagaagatctgaacaaaatgatttatatgtatgaaagagaaatttttggcctttaatcttggaaatggtaaatacccattttagaacaagagatacagtctgactcagagaatctgagtacattttcttatcactctgttaaaaccacccacaaacaagagacagcttttctttgctcaaatcataatagcttctctttaaacttgtgaaactgacagttgactctaataaaatacaatcagtataatttcccactgcttaatatgaaaacatgaaatctgattgattaattcactgatgatttttgaacctcaa

SEQ ID NO: 1439 - DNA, 563 bp, Homo sapiens
  MAP TO AL096771.11; EXPRESSED IN FETAL LIVER, SIGNAL = 1.1; EXPRESSED IN PLACENTA, SIGNAL = 1.2; EXPRESSED IN LUNG, SIGNAL = 1.3; EXPRESSED IN BONE MARROW, SIGNAL = 1.1; EXPRESSED IN ADULT LIVER, SIGNAL = 1.4; EXPRESSED IN HELA, SIGNAL = 0.58; EXPRESSED IN BRAIN, SIGNAL = 1.1
tttcaagggcagcttgagtcaatttagctgtgaatcaattcaattctgataagctttggcatatcagaacaagacccaaatgtctcatcttattagtatgctatcttttggtatgcatgctgttgttattcacagcactttgttttgttgtcatattcattttccttgttgccttatccatagctcatgttttccccctgcaagaccaccaagaaattatcttaggaaaatcaatagaaggcctgacttttggtatagaagccagcaaaacctggagatgtagggaagaaaattatgtcggagaaacacaaaagagggattggtggaccaattctctaacttctgatgaatataactaagatattattatttcctgatagttatcatagattataaggaacctctatttctctaaaaccagaataattagctctgaaattatagaatataaatatcatctgattattctggtgctttagttgtctttatagaagtaatatgtgacagacatgagagttgatctgaaatgaatttcttgagtccccaagtgcctcagaagcttt

SEQ ID NO: 1440 - DNA, 567 bp, Homo sapiens
  MAP TO AC012544.3; EXPRESSED IN BONE MARROW, SIGNAL = 5.9; EXPRESSED IN ADULT LIVER, SIGNAL =   7; EXPRESSED IN HELA, SIGNAL = 2.4; EXPRESSED IN BRAIN, SIGNAL = 6.5; EXPRESSED IN HEART, SIGNAL = 6.9; EXPRESSED IN FETAL LIVER, SIGNAL = 5.2; EXPRESSED IN LUNG, SIGNAL = 7.8; EST_HUMAN HIT: AI904786.1, EVALUE 0.00e+00; NT HIT: AF095703.1, EVALUE 2.00e-13; SWISSPROT HIT: Q61035, EVALUE 9.30e+00
tacggtttgaatgtgtcccctccaaaatttaggtgttgccaatgtcatagcattggtgtggtgtttggcaggggattaggccatgaggcctctttcctcatgagtgggattaaggtccttatgaaagaggcttcatggggagttggctcgtttgccttctgccttcctccaggtgaggacacagcatccctccccactgtgggacgcagcaatgcgactgagagcagcgctatccaaacaaccaaatctgctgatgccttgatcttggacctctcagctccagaactgtgagaaaattgatttctgttctttctaaattacccagtcttgaatattttgttacaacagcataaatggaccaagataaaggaagatgaactatttggatgagcaagacaaaaataacaatacatccttgccagagccgtgttgttctccccagtcacgtcattcttcaggccacctcaattacacgacagaatattgaatataatctctttatcttacaaataagaaaccgaggcacagcgatgttatgtgaaaaacagaaggccacctgataaccaa

SEQ ID NO: 1441 - DNA, 535 bp, Homo sapiens
  MAP TO AL139150.1; EXPRESSED IN BONE MARROW, SIGNAL = 0.57; EXPRESSED IN BRAIN, SIGNAL = 0.48; EXPRESSED IN FETAL LIVER, SIGNAL = 0.51; EXPRESSED IN LUNG, SIGNAL = 0.58; EXPRESSED IN ADULT LIVER, SIGNAL = 0.8; EST_HUMAN HIT: AL526959.1, EVALUE 1.90e-01; NT HIT: AF364606.1, EVALUE 1.30e-01
cagggagctggttgtttttcttctcacttcttcctccctcctctccacttagattgatgctaaatcatcctcttttgtctcttaggggagagaggaagaaggcaaagtagcagtaagcaacgaaacgatagctcaagttctcatgctaggaggaaatgggtgaaaattaagtaccataaagagccttgccagagtactaataataatcacacatgatgtttctgcagtactgtgtctttttcagttttaatacactgttctctttggtctcatggaaatcctgccaagcaagtagttaaggtattattatccgattttcctgcaactcccctagatgtatcctatactcaagctataatgaattatttgcgcttcccccattttgtctctttaagcctttgcagatgttgggatacctttcccctagttctgcctgggaaactcccattcaccttgtaagacctaactcaaaggtctatcttctttgaatcttcctttgccctactggagtaaatctgattactgcctcccttgg

SEQ ID NO: 1442 - DNA, 557 bp, Homo sapiens
  MAP TO AC020721.4; EXPRESSED IN FETAL LIVER, SIGNAL = 0.39; EXPRESSED IN ADULT LIVER, SIGNAL = 0.49; EXPRESSED IN LUNG, SIGNAL = 0.47; EXPRESSED IN BONE MARROW, SIGNAL = 0.4; EXPRESSED IN BRAIN, SIGNAL = 0.43; EST_HUMAN HIT: AA677328.1, EVALUE 7.80e-01; SWISSPROT HIT: P51721, EVALUE 2.40e+00
tccgtcattcccttcagttcatctatgcccccactaaagacaagcttaccttctgcagctctggccactagcaatatgtctaaggttttttttttatggaccattccattaagttacctgctatgtccattgtgacttttggcgccttcaaatgaggccttatttgcatacctgatgaactgaagaatttcaaacactatacgtaaaccaggcgggctgcaaagaaactggaaagagaggagttaagagtgtggtttggcaggagactacatctgaggacttgataatgaaaaactgtagagagcttttaatgatgaaattcagaagatttgaaaggagatgaagtcaggagaatgtcctgtggcattactccaatcttttcaccctttctcttgctccaagttagcttaaatatttcaagcaattattttatgatccccattacaacttcttttagttacattatatatatttttggccagatagtttgggagagttgtttgtcattcataagcaagagattgtgattttaaaactgggtttggaatttggctttt

SEQ ID NO: 1443 - DNA, 573 bp, Homo sapiens
  MAP TO AC016714.2; EXPRESSED IN HELA, SIGNAL = 7.8; EXPRESSED IN FETAL LIVER, SIGNAL =  19; EXPRESSED IN HEART, SIGNAL =  17; EXPRESSED IN BONE MARROW, SIGNAL =  22; EXPRESSED IN PLACENTA, SIGNAL =  22; EXPRESSED IN BRAIN, SIGNAL =  16; EXPRESSED IN ADULT LIVER, SIGNAL =  26; EST_HUMAN HIT: BE561912.1, EVALUE 6.00e-11; SWISSPROT HIT: P39188, EVALUE 3.00e-08; NT HIT: U80017.1, EVALUE 2.00e-13
gtggggtcttgctatgttgcccaggctggtcttgaactcctggcctcaggtgattctaccacctctgccttccaaaacactgaaattacaggcatgagccacagcacccagcctgatgcatttgtgaaagtcaccacaactggtgcaaaattatggcaaatggatgtggttaataagagggtaggattcaaagataattctttatatctaggaaaaggctagagaaaagctatgtatgcgagaaatactggtagtcttattagataaaaataattaagacttccctctataggacaagaagtatcaaacccagcaaatctcttaggtattacaaattgtaaatatgatttctgaaaatgaatttaggaatgataacatgtttagaaaaagaactgaaatgcaaatagtaataatggattatgtgacttatatccacagctagtaacctttgattttaagagacataaaattaaacttcattttaattccttatatattcatacttccaccaattataaactttgatgacctagttttgtcacataactcattcccccaggaaaacaaaaacaa

SEQ ID NO: 1444 - DNA, 571 bp, Homo sapiens
  MAP TO AC012360.2; EXPRESSED IN BONE MARROW, SIGNAL =   3; EXPRESSED IN LUNG, SIGNAL = 3.3; EXPRESSED IN HELA, SIGNAL = 1.6; EXPRESSED IN PLACENTA, SIGNAL = 3.4; EXPRESSED IN ADULT LIVER, SIGNAL = 3.3; EXPRESSED IN BRAIN, SIGNAL =   3; EXPRESSED IN FETAL LIVER, SIGNAL = 2.9; EXPRESSED IN HEART, SIGNAL = 2.5; SWISSPROT HIT: Q07468, EVALUE 2.50e-02; NT HIT: gi14743325, EVALUE 0.00e+00; EST_HUMAN HIT: BG030857.1, EVALUE 0.00e+00
gactgaccaggaagcagctcgtgggggccagcacttaccttatcgtaggtgtagattaagttttcggacctggccaggccgagagccacctgcatggtcctcctggcatggatgctgtccctcatggcccccatcaggaatgggcagaggagctgcactgaccaggtgtcaggcagcatctgcagcacctgggctgcatcaaattcggtggcgtggcggttcagcaggtccacggcagccacggccagctcgtgggcagtggggccagcatgcaggtagatggccagcagcgtgtgaaagagttgctggcggtggggtgggtctcggccctcggagcaccacaggcagtagtcctcggccgctgcaaagtcctgcagctcgtgcaccaggatatgcagcgccttctcatgctcgcccagcttcccgtgcaggatggcgctctccatgggcaggccagctccctgcagcctctctgcaagacagaacctgcagctcagaaagaaaggggctcgccgccacccgcccagcgactggcctccttgctgctctgggcttcaggaggggaaaagtc

SEQ ID NO: 1445 - DNA, 566 bp, Homo sapiens
  MAP TO AL139177.1; EXPRESSED IN BRAIN, SIGNAL = 0.43; EXPRESSED IN PLACENTA, SIGNAL = 0.53; EXPRESSED IN LUNG, SIGNAL = 0.46; EXPRESSED IN ADULT LIVER, SIGNAL = 0.44; EXPRESSED IN BONE MARROW, SIGNAL = 0.47; NT HIT: AL161580.2, EVALUE 8.40e+00; SWISSPROT HIT: P46939, EVALUE 4.10e+00; EST_HUMAN HIT: BF376527.1, EVALUE 2.00e-57
aaagcctcacaacaaatccgacagctggatagggctggaattattatgccaattttacaaattaaaaagccagagaaattaaattcttgttcaatgtcatagagtcggctgcactctttacaccgtatcactgagtacattcagcagatccacaataaaatttgaataaaaaaattctatacttgaatacttacgtttaataacctcaggggaacaatatagaatactgggaaattctttttaagttacagtaactcagtatataattacagtgaaggaaacatcttgatttcaaacaagataggcagttaacaataatgtcctacatttgatggttgaaaagattcccaccttgtgttttgaaatgagttcaccggggctctctctttgccccagtaactgctgagccctcatcatatatgattcaagttccttctgggattcttccatcttcagcctgatgtccaaatctggtgaaacgtcagttaagttcttcaacgctgcaatgagttttaccacattgatcttgaagacaaaaaaattctccaattaacacggggaccaat

SEQ ID NO: 1446 - DNA, 511 bp, Homo sapiens
  MAP TO CHR21_9.0; EXPRESSED IN HELA, SIGNAL = 0.66; EXPRESSED IN BRAIN, SIGNAL = 1.3; EXPRESSED IN BONE MARROW, SIGNAL = 0.99; EXPRESSED IN ADULT LIVER, SIGNAL = 1.4; EST_HUMAN HIT: AV746904.1, EVALUE 1.00e-30; NT HIT: U62293.1, EVALUE 1.00e-04; SWISSPROT HIT: Q9PL67, EVALUE 4.70e+00
catcaacccagaagaccaccgaaagtaacaatgtgaagagatcagagatctcaagttaataattttttaaaaagtgttaataattagcctttcaggtatattctctttatagtcttgcctatgcttgctgttgttaccttcgttctattgtataccacaggttaaaaatggtgatttcagaatgattagtatatttcacttatttctgtaatctttggcacaaaattctttccttttaactcctctttgtgtaatacacatatttgatccacacatacttaactttgtaaaacttgttttttcttgcctagaggccatcaaactccaagctatcaaacaaccggagcctcagacaatggttcccttttgctggggacctctgggaggaatctgactgctgttctgcctaaaacaacaccccctgtcaccaaaaagcctgacaccatgacccaaagtgagaacttatatcattgttttcctgctctaatgttgccttttccaaaaccactca

SEQ ID NO: 1447 - DNA, 521 bp, Homo sapiens
  MAP TO AL135926.3; EXPRESSED IN FETAL LIVER, SIGNAL = 0.4; EXPRESSED IN BONE MARROW, SIGNAL = 0.45; EXPRESSED IN BRAIN, SIGNAL = 0.47; EXPRESSED IN PLACENTA, SIGNAL = 0.54; EXPRESSED IN LUNG, SIGNAL = 0.47; EXPRESSED IN ADULT LIVER, SIGNAL = 0.51; EST_HUMAN HIT: BF064176.1, EVALUE 7.30e-01; NT HIT: gi15668172, EVALUE 2.00e+00; SWISSPROT HIT: P58147, EVALUE 6.30e+00
tgctggtgatggattcaaagatgaaagagatataagatgtaaagcctgatgtattttcacaaggaacatttacttggtgagacagacaaatgagtagaagaatattatgccatatgataagtaatataaaaatgcacatggttcttgagggatcacgtagctttgggaaaactaattgactttttttttttggaaggttattaataaataaaactaaaaactaagcaggagacacagagactcacctgagcagcagcacggggcaaagatggcatgtggaactttcttggaattgcaaatatttcagtctggctggggcatagaatatgaagactaagtggagagatataattgggaaagttgacaaagagctcaaaaatgtctttgtatactgtcaaacgagtttggattttattattcaatgttaaaattctagccattttcatccattcatcttttattttaccttacaatccttcaataactaaaaaataatcatactcctccaatggctatgttga

SEQ ID NO: 1448 - DNA, 599 bp, Homo sapiens
  MAP TO AC022117.2; EXPRESSED IN BRAIN, SIGNAL = 0.49; EXPRESSED IN HELA, SIGNAL =  12; EXPRESSED IN FETAL LIVER, SIGNAL = 3.4; EXPRESSED IN BONE MARROW, SIGNAL = 0.7; EXPRESSED IN ADULT LIVER, SIGNAL =  11; EST_HUMAN HIT: BG252086.1, EVALUE 0.00e+00; SWISSPROT HIT: P05783, EVALUE 2.00e-88; NT HIT: gi4557887, EVALUE 0.00e+00
ggaccccaggtcagagactgatgccattacttccagaccatccagaacctgaggattcagatcttcgcaaatactgtggacaatgcctgcatagttctgcagattgacaatgcccgtcttgccgctgatgactttagagtcaagtatgagacagagctggccatgcgccagtctgtggagaacgacatccacgggctccgcaatgtcattgatgacactgtcactcggctgcagctggagacagagatcgaggctgtcaaggaggagctgctcttcatgaagaagaaccacaaagaggaagcaaaaagcctacaagcccagattgccagctctgggttgatggtggaggtagatgcccccaaatctcaggacctcgccaaggtcatggcagacatccgggcccaatatgacgagctggctcagaagaacggagaggagctggacaagcattggcctcagcagattgaagagagcaccacagtggtcaccactcagtccgccgaggttggagctgctgagacgacgctcacggagctgagacgtacagtgcagttcttggagatgacctggactccatgagaaatctgaaggccagcttg

SEQ ID NO: 1449 - DNA, 598 bp, Homo sapiens
  MAP TO AC008432.2; EXPRESSED IN HELA, SIGNAL = 1.2; EXPRESSED IN FETAL LIVER, SIGNAL = 2.5; EXPRESSED IN HEART, SIGNAL = 1.5; EXPRESSED IN LUNG, SIGNAL = 1.7; EXPRESSED IN ADULT LIVER, SIGNAL =   2; EXPRESSED IN BONE MARROW, SIGNAL = 2.8; EXPRESSED IN BRAIN, SIGNAL = 2.1; EST_HUMAN HIT: AW995263.1, EVALUE 3.00e-65; SWISSPROT HIT: Q92351, EVALUE 1.00e-01; NT HIT: AL163201.2, EVALUE 5.00e-57
agccttcccaagaaggaaagctacaaataagcacagacagtgaagaccacaataaatacctaactcttcaatgcccagacaccaaacaatatctactagcatcaaaaccatccaggaaaatactacctcatcaaatgaactaaataaggcaccagggaccaatcctggagaaacagagaaatacaaccttttagaaatggctgtgttgaggaaactcaaagaaattcaagataacacagagaaggaattcagaattctatcagataaatttaacaaagacatgaaagtaattttaaataatcaagcagaaattctggagctgaaaactgctattgtcctactaaagaatgcatcagagtgttttaatagcagaatggatcaagcagaagaaagaatcagtgagcttgaagacaggctatttgaaaatacagtgagaggagacaaaaaagaataaaaaataataaagcacgcctataagatctagaaaacagtctcaaaagggcaaatctaagagttattggccataaagaggtgatagagcagagataggggtagaaaatttatacaaagggataataacagagaacctcccaaaccc

SEQ ID NO: 1450 - DNA, 544 bp, Homo sapiens
  MAP TO AC023120.3; EXPRESSED IN FETAL LIVER, SIGNAL = 0.45; EXPRESSED IN BRAIN, SIGNAL = 0.48; EXPRESSED IN PLACENTA, SIGNAL = 0.5; EXPRESSED IN LUNG, SIGNAL = 0.45; EST_HUMAN HIT: AW578808.1, EVALUE 1.00e-76; SWISSPROT HIT: P46821, EVALUE 3.00e-02; NT HIT: gi15300386, EVALUE 0.00e+00
ttgactgaaatgcctaggtagaagtaatacacttaatgaaatatcatctgactcatggaaataggaaaattatgaaatgtgcattcaagttagtttaagaagaacttaggtattataaaaagattttacaactctgcattttttcttaaattctcaggaaatatgttattttcagtggtaactaagatatttctataacccattttgtctgtttttatatagatttaaagctttaaaagaacaaaggctaagagaaacaaagccagaagttggattggtgaatattaagggatatggatctctggaaattcagggttcagacccttcaggatgggaggattgttcttttgacaacagaataaaagccatagaggaatgtaaatctgtaatagagagtaatcgaattagccgtgaaagttcagtggactgcttgaaggagtcaccaaacaagcagcaggagagagcccaaagccagagtggtgtggacttgcaggaagatgtgcttgtaagagagagacccagatccttggaggatctccatcag

SEQ ID NO: 1451 - DNA, 588 bp, Homo sapiens
  MAP TO AL138889.2; EXPRESSED IN BRAIN, SIGNAL = 0.54; EXPRESSED IN PLACENTA, SIGNAL = 0.62; EXPRESSED IN ADULT LIVER, SIGNAL = 0.66; EXPRESSED IN FETAL LIVER, SIGNAL = 0.54; EXPRESSED IN BONE MARROW, SIGNAL = 0.5; SWISSPROT HIT: O76511, EVALUE 2.50e+00; NT HIT: gi14768431, EVALUE 1.40e-01; EST_HUMAN HIT: BI911651.1, EVALUE 2.10e-01
caacgacaggagaagaagccagaaaaaacaaaggggaggctgggaagcggagaaagcaccagcacctgcccacagggaggagtggggacgggcagggggaaaactgggtcgaccccaaatttcaaccccggaagtgcccagagctccactctggcaggggcagggacctgggagagccaccttcctccacatccctagctctctcttgagcctgaagaatatgtgtcacctgcctaatgaggcacagcaggtggaatggggttacgaggtgtcaatgaagccattccccaccatgcacagcaaccatatgtggcaggtctgtggcaggaactggcccgtgatccctgtcaccccacagtccacctcctggggagcctgaggccactgctgttcattccccagtggctgctgtcagccggcacgcccagccccatctggctcgagaactgtcaaagatctcctacatcgcacgccagctgaacacggcctgcagactgaacgtactgtcccacacacttgcactgccatttttcagatgtctaaagatgctcttgtgattaataaaatgcaaatgcatccaaaacgttg

SEQ ID NO: 1452 - DNA, 554 bp, Homo sapiens
  MAP TO AL138740.2; EXPRESSED IN BRAIN, SIGNAL = 0.61; EXPRESSED IN FETAL LIVER, SIGNAL = 0.47; EXPRESSED IN BONE MARROW, SIGNAL = 0.54; EXPRESSED IN PLACENTA, SIGNAL = 0.5; EXPRESSED IN ADULT LIVER, SIGNAL = 0.66; SWISSPROT HIT: P11369, EVALUE 1.20e-01; NT HIT: AL161494.2, EVALUE 3.40e-02; EST_HUMAN HIT: AW117473.1, EVALUE 5.00e-02
tggacgtgggagtaaaggagaggagagggccacattcagatagatggctacatcccccaaactcttctgctttctctgagaggacttaaaaatactctttattcatcgttaataagagaaaaactgtaacctacgaattatcttggatttttccatatctgaatgactgtattggtttttttcctccaacctattgatggaatgaattgtatcagcatttttgctgatacagaacaatactgccactcctggaataaaccccaaccaagtcattttatcagtcaggatgctttcacctaaaaataatgaaaagcccaactcacatcaattgaaacaataaagaaatatatcgatgtatttaactagaacacaaaaagtaaggcaggttcatgactggttgttccagggcttaacaggctcctgtgacctcaacatcagctttgtcctaaggtgcaaattccttgtagtcataggatggctttcagtagcagctggagctatatggttcctcccttacttctagcagaagatggtcatttcaggaagctttccca

SEQ ID NO: 1453 - DNA, 570 bp, Homo sapiens
  MAP TO AL122013.3; EXPRESSED IN BONE MARROW, SIGNAL =  15; EXPRESSED IN BRAIN, SIGNAL =   2; EXPRESSED IN HELA, SIGNAL =  49; EXPRESSED IN LUNG, SIGNAL =  18; EXPRESSED IN ADULT LIVER, SIGNAL =  18; SWISSPROT HIT: O76732, EVALUE 5.00e-55; NT HIT: gi13654754, EVALUE 0.00e+00; EST_HUMAN HIT: BE733684.1, EVALUE 0.00e+00
agtggtgaatcccctgtttgagaaaaggcttaagaattttggcattggacaggatatccagccccaaagagacctcacccgctttgtgaaatggccccactatatcaggttgcagcggcagagagccatcctctgtaagtggatgtaagtgcctcctgccattaaccagttcacccaggccctggaccaccaaacagctactcagctgcttaagctggcccacaagtacaggccagagacaaagcaagagaagaagcagaggctgttggcccaggccaagaagaaagctaccagcaaagggacatccccactaagagaccacctgtccttcgagcaggagttaacatggtcaccaccttggtggagaacaagaaagctcagctggtgatgactgcacacgatgtcgatcccatcgagctggctgtcttctgcctgcctgccccatgttgtaaaaagggggtcccttactgcattatcaaggggaaggcaagactgggacatctagtccacaggaagacctgcaccactgttgtcttcacaaaggttaactcggaagacaaaggagctttg

SEQ ID NO: 1454 - DNA, 526 bp, Homo sapiens
  MAP TO AL139014.1; EXPRESSED IN BONE MARROW, SIGNAL = 0.74; EXPRESSED IN PLACENTA, SIGNAL = 0.9; EXPRESSED IN ADULT LIVER, SIGNAL = 0.83; EXPRESSED IN HELA, SIGNAL = 0.52; EXPRESSED IN BRAIN, SIGNAL = 0.75; EXPRESSED IN FETAL LIVER, SIGNAL = 0.76; EST_HUMAN HIT: Z41225.1, EVALUE 7.40e-01; SWISSPROT HIT: Q55724, EVALUE 2.80e+00
atccctcagggtccatatccaataaaacactatcttctttcagtgttgacctttgaacatttcttatacttaccgtttcgtctccagccccatcttcaccaccagaattcaggtccttatcctctttctcttgatccttatcttctttcacaacaaactcctggtcagtctacagaccttcagtctccttccttccctatatggtcattcctttacataaagtcttttaattgttctccgtgacccataggacagatcccatctctctgggagggcagagaaggttttcctagtctttcctgcctcactcccatctttctcataccatacttcatgctctggcaatatcaagctgcctggagttctttggatataccatgtagttttacaccttcactcctggggacatagtaatttttcttctattttgccctctaatgtcttctcccccttttttctgtagctaatttctaatctttctttaagtcagtgcaagtgtcttccctgtgaaaagcctttgctgacc

SEQ ID NO: 1455 - DNA, 538 bp, Homo sapiens
  MAP TO AL136113.1; EXPRESSED IN BONE MARROW, SIGNAL = 0.51; EXPRESSED IN BRAIN, SIGNAL = 0.53; EXPRESSED IN FETAL LIVER, SIGNAL = 0.51; EXPRESSED IN PLACENTA, SIGNAL = 0.59; SWISSPROT HIT: P25689, EVALUE 2.00e-10; EST_HUMAN HIT: BG291313.1, EVALUE 4.80e-02; NT HIT: S94095.1, EVALUE 6.00e-47
gatttgcgttcttttcaggctgggcctttttttattttgccttacctcaaaatctggtaataaaaatgatttgcctgactcaatccccagggttgttgcaaaatgaattatttcatttttatatttttaagacaaaaagtagataattctttaatataattcaaagtcacaatattcatttctatctcagatttaaaagccttaaaaagtctctacagttttcctccatgttagtaaacagcattgtttagaagaaatgaagaaaaaagaaaacaaagccaccctgaagttgctactatataatcaaagcatgaaaaatagtttcttaccacttctcagctgttcaacttcacagaagtgtgttccagtgggagtgtgaataaatgcatggacatgcttaactccattctgaaaattagggaaacaaattatttccaggaaaatttcagttcatgccataaagccaatttctttaattaaactgagagcacaaataagtgagttaacctttccaagatgcttccaagggatttcttcc

SEQ ID NO: 1456 - DNA, 597 bp, Homo sapiens
  MAP TO AJ239319.2; EXPRESSED IN FETAL LIVER, SIGNAL = 0.69; EXPRESSED IN LUNG, SIGNAL = 0.73; EXPRESSED IN ADULT LIVER, SIGNAL = 0.6; EXPRESSED IN BONE MARROW, SIGNAL = 0.67; EXPRESSED IN BRAIN, SIGNAL = 0.5; SWISSPROT HIT: P21675, EVALUE 7.00e-28; EST_HUMAN HIT: BG980422.1, EVALUE 7.00e-94; NT HIT: gi14759179, EVALUE 5.00e-94
tgaaatcacggatgcagaacccatacatggatatggagggccgactgtactattctttgaactttacagtatgtttgaaaattttgattatgaaattggaaaataggtaaaatgtttttggtgtgtttgtctcagattgaacaacgtcattgtgtgtagtagtgtcctgtcaggagctagatggtattttctttgttctggacagatgagagaacaagagaggcaagcttcaggtggtggagagatgttttttatgcgcacacctcaggacctcacaggcaaagatggtgatcttattcttgcagaatatagtgaggaaaatggacccttaatgatgcaggttggcatggcaaccaagataaagaactattataaacgggtgagtctctgctcagaaaatttttttcccatacataattctgcttatgcttccataaacttttatgtacaaactttttgttattaacatagctgtagtgagacaaactgcaaacttacatacaaattttttattattaacgtagctgtagttagagatctactggtaatctgtgaacatataccataaatttcttgggagaaaggagtggtaccttt

SEQ ID NO: 1457 - DNA, 540 bp, Homo sapiens
  MAP TO AL136478.2; EXPRESSED IN BONE MARROW, SIGNAL = 2.3; EXPRESSED IN HELA, SIGNAL = 1.5; EXPRESSED IN BRAIN, SIGNAL = 2.5; EXPRESSED IN HEART, SIGNAL = 2.4; EXPRESSED IN FETAL LIVER, SIGNAL = 2.1; EXPRESSED IN PLACENTA, SIGNAL = 2.9; EXPRESSED IN LUNG, SIGNAL = 3.1; EXPRESSED IN ADULT LIVER, SIGNAL = 2.7; SWISSPROT HIT: P19811, EVALUE 3.90e+00; EST_HUMAN HIT: BF185367.1, EVALUE 1.20e-02
ccgaaagaaaacagtcctgctcccccaatccccgatgtgggattccccatccacatatggaaaacctggataaaattagcatgactcagtagttgttgttgatcaccctggagttatctaagcagatattcttcttcattgtatcatcattaggttaatagtaaccttatatttgaatacatctgtgtgccaggaagacctttttctcaagatcttaagcatcattgtcatggaggagagtaaagtgtcagaaaggtcaatgacatgtattttatcaaaattatcatttaatactctcaacaacactttgcagtatcacatctttttacagacattggtacttacccagcagaacctcagtcacttgtttaagatgatgcagctggtggtagagtgggcttgaattcgagtctcactgacaccaaggcccatgctcttgttctgggattctgacctaattctattgttgttacagaatatgaattacatagacactgagagcttagatattgtaaatatccaggaaagggggagaagagt

SEQ ID NO: 1458 - DNA, 578 bp, Homo sapiens
  MAP TO AC011585.3; EXPRESSED IN PLACENTA, SIGNAL = 0.71; EXPRESSED IN BONE MARROW, SIGNAL = 0.72; EXPRESSED IN LUNG, SIGNAL = 0.76; EXPRESSED IN ADULT LIVER, SIGNAL = 0.64; EXPRESSED IN HELA, SIGNAL = 0.55; EXPRESSED IN BRAIN, SIGNAL = 0.64; EXPRESSED IN FETAL LIVER, SIGNAL = 0.58; NT HIT: gi9964314, EVALUE 1.40e-01; SWISSPROT HIT: P15444, EVALUE 1.40e+00
cattcctccagctctgcttcttggcatatttttgatttttcattttagatgagttgttcgagtttcaattggagagataatgccatttaagatgaggataactccgtgatgcctcagatgatttcattgcagcctttgcctagactgcaacatggccaataatgccacgccttgcatatgggtggccgttgtggcacttcagacattctctagtaacaggacctcgatgctgagagacaaaatctgcatcctcacctgtcagataaggtgacaatgtcttttcgcaaagcatgtattggcatctttctgcacaagtggtcttaatttgggtcttcatggtggaatatttattgtctctctgttatgcaaggagacagcccaaagagtgagtgtggtcaccagaccatgctctacacgttagaacaaaggaccccagaagcacatctgccccagactcaaccagatgggctttgctgtccagacaacataggtggagacctcacatttcgaggtgagttcctcaaacatctatttaacccccaatatgcaccaaccacagagctgtttgtggcacagaa

SEQ ID NO: 1459 - DNA, 539 bp, Homo sapiens
  MAP TO AC021635.3; EXPRESSED IN FETAL LIVER, SIGNAL = 2.1; EXPRESSED IN HEART, SIGNAL = 1.8; EXPRESSED IN PLACENTA, SIGNAL = 2.8; EXPRESSED IN LUNG, SIGNAL = 2.6; EXPRESSED IN BONE MARROW, SIGNAL = 1.9; EXPRESSED IN ADULT LIVER, SIGNAL = 2.9; EXPRESSED IN HELA, SIGNAL = 0.76; EXPRESSED IN BRAIN, SIGNAL = 1.6; NT HIT: gi15893298, EVALUE 2.00e+00; SWISSPROT HIT: Q9PRB3, EVALUE 3.90e+00
atgttgattcctctgcctggggaatgccagtgactatatacaaagtcaaatgaagagtccaaaaagaacaagagagtaaccacagagaacagtgcaaggaaattggacatggagttgaaataaaaaggatattaagaaagaccaggaaagagctagaggtaagtaaaataatatgacaggacacacagtggggccacaaaaaggaggagaagcaactggattcaagatcaggaaaaaataaacatgtataaaacttactttaaggacagtaatttttgtatttatttcagccttaccaatatagaaagtcatgtacaccattgaaaagcagagaatgatattagtcagcatattgctaaaaacgtcagccaatatacactgaatgatttttgcacaccaatatccaaatattatgcttcccaaaatgtcatagctgagttcaatgcctacatgtaaatctaaaaaaaagaaagaaaaaataagaaataaaaacttgagctataacttttgtctctttcactgatggcatttgggtcttt

SEQ ID NO: 1460 - DNA, 545 bp, Homo sapiens
  MAP TO U82695.2; EXPRESSED IN BONE MARROW, SIGNAL = 3.1; EXPRESSED IN HELA, SIGNAL = 2.5; EXPRESSED IN BRAIN, SIGNAL =   3; EXPRESSED IN FETAL LIVER, SIGNAL = 4.1; EXPRESSED IN PLACENTA, SIGNAL = 4.8; EXPRESSED IN HEART, SIGNAL = 3.1; EXPRESSED IN ADULT LIVER, SIGNAL = 5.5; SWISSPROT HIT: P08489, EVALUE 5.00e-05; NT HIT: U82695.2, EVALUE 0.00e+00
aggcctgggtaaagaggaagggcgatgggctttctagcagctgacagccccttggggaaaggaggcaaggcccccagcccacactggctccttccgcaggtcagctgcagcccatccctggcatcggccacccagacaagcctgaggctgggaagctggaccagttgcgggatcagcccaccccgaagcagggagctcaaggaacccccacccagtccccctccactggctggaaagcgcttcccaggccagggctggccctgaggaaggagtcacccccagtgaccttggagcaggagcagggtcacaacaagggcctggtcgctgagtgggctcagccccaggccacagctgccatgagggctggggcagggaagcccgaggccttgaagctgaggccctggcaggccggcagggaccctcaagctcaagagggggcagcagtcaccgaggaggaccagggccagaggacaggaggccgggaagacaagggaaggggcctgaaacccaggaggccccccaaaggtgagaactggccaggacag

SEQ ID NO: 1461 - DNA, 548 bp, Homo sapiens
  MAP TO AC011225.5; EXPRESSED IN BONE MARROW, SIGNAL = 2.8; EXPRESSED IN BRAIN, SIGNAL = 2.5; EXPRESSED IN HELA, SIGNAL = 1.4; EXPRESSED IN HEART, SIGNAL = 2.4; EXPRESSED IN FETAL LIVER, SIGNAL = 2.8; EXPRESSED IN PLACENTA, SIGNAL = 3.6; EXPRESSED IN ADULT LIVER, SIGNAL = 3.2; SWISSPROT HIT: O87172, EVALUE 6.80e+00; EST_HUMAN HIT: AI039865.1, EVALUE 7.70e-01
accaagggcttgaatgtgagagttcagcctttctttctcccttattcaggttcctctggaagctgtctccctccttgctggaattctctaagccttcctcatgcctttcttggagagccttctcaatctatcaatctttggcaatggttgcctgctgcctttctctgggagttgggggagggggtccaagccccctcatgccctttccttcctcaaagcccttttctgtgtggtgaattagaatcctttcaagccccatatgttccttccctcaaacactgaggccgaaaagtgagttaatttttcctcccaggatgagaactccctcttatatgttccccatttccaacagtattatctcatttccttacaccagtcaaactcagaagaagtggtttttcattctccctacagcctcttcaactaccagatccttcagagcagccagcacaactatcgcttcagcttagttccttatcctgtccctagatggatgaaagcaatggttgctagtagggtctggctgctgcccatctctccctgatgta

SEQ ID NO: 1462 - DNA, 581 bp, Homo sapiens
  MAP TO AL137025.2; EXPRESSED IN HEART, SIGNAL = 3.3; EXPRESSED IN PLACENTA, SIGNAL = 4.2; EXPRESSED IN LUNG, SIGNAL = 4.1; EXPRESSED IN FETAL LIVER, SIGNAL = 3.5; EXPRESSED IN ADULT LIVER, SIGNAL = 3.6; EXPRESSED IN BONE MARROW, SIGNAL = 3.7; EXPRESSED IN BRAIN, SIGNAL = 3.7; EST_HUMAN HIT: BF083059.1, EVALUE 0.00e+00; NT HIT: gi14747760, EVALUE 0.00e+00
gaactgaagtgccttgcctctgtgatgcaggttgttggagaccttatgcttcgaatccagcgtattcaagactttactcccaagcttctgttagtcagaaagcggttacttggtttggaacctgaaggccctatgtaagttagtgttttacatttttttaatccaaaaatttcagtgaacttaatgatcggctgctatcttgaattgatttattgtctgttttttccttaccagtattgaccacatcacactgctagagggtgtgattgtgttagaagagttctgtaaggagctggcggcaatcgcatttgtaaaatatcatgcttcctccacaccataaataacatctttcatgtaactgggggaacagaactactgtgtacatttcaccaaaaaagactcagttccacccagccacaagaggataaaaagcctttttaaacgcagtattgctgtaaactggacagaaccattaagaacctattgagtggacattcttggtgaaatgttgtataatgttgttttcattggctttatcataatggttctatatatacaattgcacattgttgaatccagga

SEQ ID NO: 1463 - DNA, 542 bp, Homo sapiens
  MAP TO AL138974.1; EXPRESSED IN BRAIN, SIGNAL = 0.62; EXPRESSED IN PLACENTA, SIGNAL = 0.58; EXPRESSED IN FETAL LIVER, SIGNAL = 0.58; EXPRESSED IN BONE MARROW, SIGNAL = 0.62; SWISSPROT HIT: O96433, EVALUE 1.30e+00; EST_HUMAN HIT: AA824302.1, EVALUE 5.00e-08; NT HIT: AF181628.1, EVALUE 2.00e+00
acgcttaaacgcaaaagaggtaacacaatgaagtttgcggataggttaacctatgcccagctacagcttctattgctacaggaaaagaagagaacagatgtttgaataataactattagtcttagccacagagcaaataatggacatttcttcattacataccatgatgttctcttgtttttgtgggttcactctttacttctaatgtgctttcctcacaattccatttgtcaaatttgatgtagcctttaaagcccagcttaaatttcatcacctttctgaaactttctgtggtagagataataacattgatcaaatattatacctatttgtccatatttgtcaaccatcttgcagtgggtggtaggggctcgaggagggtgacaactacgtttctggccagtggcctctgagatgaagtgatgtagactcttctactgccatgatgaatatggaatcttctgttctaaatgaggaaactatgaaagggtggaaccttttttattctggattcttgagtgacgacccaacttgagctgaat

SEQ ID NO: 1464 - DNA, 561 bp, Homo sapiens
  MAP TO AC018692.5; EXPRESSED IN LUNG, SIGNAL = 8.1; EXPRESSED IN BONE MARROW, SIGNAL = 5.8; EXPRESSED IN ADULT LIVER, SIGNAL = 7.7; EXPRESSED IN BRAIN, SIGNAL = 2.7; EXPRESSED IN HELA, SIGNAL = 3.1; EXPRESSED IN FETAL LIVER, SIGNAL = 4.8; SWISSPROT HIT: Q06033, EVALUE 3.10e+00; EST_HUMAN HIT: AW246964.1, EVALUE 1.00e-126; NT HIT: L78810.1, EVALUE 8.00e-68
tctgatgctcggatgtgttctgagtttcttccttctggtgggttcatggtctcactggcttcaggagtgaagctgcagaccttcacggtgagtgttacagctcttaaggtggtgcgtctgcagttgctcattcctcctggtgggttcttgatctcactggcctcaggagagaagctggagaccttcgcagtgagtgttacagctcataaaggcagtgtgcccccaaacagtgagcagcagcaagagttattgcaaagagcgaaagaacaaagcttccacagtgtggaagcagaccccagcaggttgccactgctggcttgggcagcctgcttttattcctttatctggccccacccacatcttgctgattggtccattttacagacagctgattgatctgttttacagagagctgattggcccattttgacagggtgctgattggtgcatttgcaatccctgagctagacacaaaagttctccgagtccccactagattagctagacacagagcactgattggtgcattcacaaaccttgagctagacacagggcgttgat

SEQ ID NO: 1465 - DNA, 546 bp, Homo sapiens
  MAP TO AC011636.3; EXPRESSED IN BRAIN, SIGNAL = 3.4; EXPRESSED IN HEART, SIGNAL = 3.3; EXPRESSED IN FETAL LIVER, SIGNAL = 3.2; EXPRESSED IN LUNG, SIGNAL = 3.8; EXPRESSED IN BONE MARROW, SIGNAL = 3.7; EXPRESSED IN HELA, SIGNAL = 2.1; EXPRESSED IN ADULT LIVER, SIGNAL = 3.6; EXPRESSED IN PLACENTA, SIGNAL = 3.8; NT HIT: AF093271.1, EVALUE 1.30e-01; SWISSPROT HIT: O70228, EVALUE 7.80e-01; EST_HUMAN HIT: BE935704.1, EVALUE 3.00e+00
tcctcttcctccctctcctccacagggagggccaggggccaggtctcaggtcacaggctcactgggaggctggagggaaatatcttagacttggggtgtcagcatcaggagtgagcagcccaggagaggtaggcaggattggagtcatggcagagaaaatgtatttgttctctgctcacatacccagatcatggagaaagggacaaaagaagagagagaggaaatggaggcacattaataataaaagactcactgaatagatgggggtggaaaatcagctttggtgagggtctttggcgctttctgtataggtctggtctgtggagacatcaacagcttcaaaaggggaccatgctcagaattgcacatcagataatgggaaggtaggagattgccacagctggaccaaggccatgcccggctccatcgtccttgtctcctttgtgtcctcccacagtcagaggggaggtctctgctcctcctttcttgggattcctgggctgctaatcagccactgtcctcacctcaagtctcactccacagcca

SEQ ID NO: 1466 - DNA, 557 bp, Homo sapiens
  MAP TO AC020582.3; EXPRESSED IN PLACENTA, SIGNAL = 0.85; EXPRESSED IN LUNG, SIGNAL = 0.89; EXPRESSED IN ADULT LIVER, SIGNAL = 0.93; EXPRESSED IN FETAL LIVER, SIGNAL = 0.83; EXPRESSED IN HELA, SIGNAL = 0.75; EXPRESSED IN BRAIN, SIGNAL = 0.78; EST_HUMAN HIT: BF688900.1, EVALUE 2.00e-01; NT HIT: gi16164027, EVALUE 1.30e-01; SWISSPROT HIT: Q9UDV7, EVALUE 1.10e-02
ctgtcagggaaaggaagcaggttgggaggggtatccgtgaagcccccccacacacacacaacccagtcccagcccgagagccctgggagccccgcctgggttccttgccttctcccaggagcctcccaaaggtggtgaattcggtttctgagggtgcttggtgttctgtgccaagagtgactcagagcagcgggtcccaccggcgcagaagttgggcagcgctcgctggacagtgaggaactcgcggagaagatgcgcttgccggctcagccctgggagggagatgccccgctaactcccctctttacctctctacccccaacgccagaactagcgctggggcaggcggtaggcgcccagctggagacacaccaggccggcccctggagccactggccggatgggcgcggcagggatgtacccggcctgctggggtcggtgggtactctgggggcgtgggagagtggcagggggaagacgcgagctgagagcgctattcaggagaaagtccgcgaatcccggcacagcccagtggcagaccgaatagcctccaggtt

SEQ ID NO: 1467 - DNA, 574 bp, Homo sapiens
  MAP TO AC016169.3; EXPRESSED IN BONE MARROW, SIGNAL = 0.98; EXPRESSED IN BRAIN, SIGNAL = 0.95; EXPRESSED IN LUNG, SIGNAL = 1.2; EXPRESSED IN PLACENTA, SIGNAL = 1.1; EXPRESSED IN ADULT LIVER, SIGNAL = 1.2; EXPRESSED IN FETAL LIVER, SIGNAL = 1.1; EST_HUMAN HIT: BF992849.1, EVALUE 8.10e-01; NT HIT: AL163282.2, EVALUE 8.50e+00; SWISSPROT HIT: P51142, EVALUE 4.20e+00
ggatgtggcggttaattacgaccttcagatgattgcattggaggtatgggtaatgataaaaatggcaaattgttgtatgagattggaatcactggctcagagtatcaactgacctatcagttgtgatgttctagctgctaccacctcagcttcatgggtagtttggtgaccttcctcttcttcacccctctagtgataacaagattgtaaagtgcatggtataaaaatataagagctgtacctagagatatgttacatagtgagttccatgtatttaagtatagacattatcttaaagagggaagcaaatattcatttttaatacttaattttaacagtatttaatacagtagatacatatctactacatacaaagcatgtgccaagctctgcaatgatgttatttaacatcatcaattccatcaaatggaattcactgccttgaattaaaataagaaatacagatataaatgctatagttgcttagagaaagaaaaaattcactgtggactggaatggctgcagacaactacttagatgaaaagctggaacttggactgggacttcaaaccaa

SEQ ID NO: 1468 - DNA, 556 bp, Homo sapiens
  MAP TO AL137071.3; EXPRESSED IN HEART, SIGNAL = 2.5; EXPRESSED IN PLACENTA, SIGNAL = 1.7; EXPRESSED IN HELA, SIGNAL = 3.8; EXPRESSED IN BRAIN, SIGNAL = 2.2; EXPRESSED IN ADULT LIVER, SIGNAL = 1.9; EXPRESSED IN LUNG, SIGNAL = 1.5; EXPRESSED IN FETAL LIVER, SIGNAL = 1.9; EXPRESSED IN BONE MARROW, SIGNAL =   2; SWISSPROT HIT: P26436, EVALUE 1.00e-03; NT HIT: gi9910339, EVALUE 2.10e+00; EST_HUMAN HIT: AI689999.1, EVALUE 0.00e+00
agtggttaaatggcagtggggagggagagagggtagagaaaaatcctgaaagatttttttttaaaaggcttgttgtcacgctcttgtatagccagaatgggaggtgagaatttggctttggagagtttgtctttgttcctgctgttttatgtccctcatgtttccttttataattgttttctcaggtttgcaccttctgctccatctcctcaccacatcagcccccggagagttccagctccttcttcaatactgcaaagaacacagcctccctatacccagcagccatcaggttcacacctgaagtcctatcagccagaaacaaactcttcttttcaaccaaatggtatccatgtccatggtaagcaagaagctggcagtcccttgagttttgaaaagtgacattgtgctgttgcttttcatcttagttacctgtcgtggatttcagatgctctgttctacaccaggcttaggctttcatgacttgcctctaaaatttcacacttgataggcatgaaatcctatggtattttcctgactttggcctgatgatggt

SEQ ID NO: 1469 - DNA, 521 bp, Homo sapiens
  MAP TO AC013341.3; EXPRESSED IN LUNG, SIGNAL = 0.49; EXPRESSED IN ADULT LIVER, SIGNAL = 0.5; EXPRESSED IN BRAIN, SIGNAL = 0.5; NT HIT: AF224669.1, EVALUE 1.00e-26; EST_HUMAN HIT: AW971754.1, EVALUE 9.00e-19
catttgtggggatagtgatgctagtgtaaataaacctactgtgctgccagtggtgtaaaagcataatacatataattacgcacagtgcataatagtaatgagaaatgactggtgtatgtatttaccgtactatactttttattgttattttagagtatatttcttctacttagatatattttttagagttgactataaaacagcctcaggcaagtccttcaggagatattcaagaagacaacattgttctcacaggagctgaccactccatgcctgttactgcccctaaagacctttcagtggaacaacatgtggaggtggaagacagtgagattgatgatcctgaccttgcctactattctacaggctaatgcatgtttgtgtcttcatttttaacgaaaacatttaaaaaataaaaaacagtaaaacattttttaaatagtaaaaagcttatagaacaagaatataaagaaagaaaatgcttttgtacagttttatgatgtgtttgtgttttaagcgaa

SEQ ID NO: 1470 - DNA, 588 bp, Homo sapiens
  MAP TO AC018671.5; EXPRESSED IN BONE MARROW, SIGNAL = 0.67; EXPRESSED IN BRAIN, SIGNAL = 0.66; EXPRESSED IN HELA, SIGNAL = 0.6; EXPRESSED IN LUNG, SIGNAL = 0.73; EXPRESSED IN FETAL LIVER, SIGNAL = 0.65; EXPRESSED IN ADULT LIVER, SIGNAL = 0.73; SWISSPROT HIT: Q00269, EVALUE 7.50e+00; NT HIT: AJ276005.1, EVALUE 0.00e+00; EST_HUMAN HIT: BI831847.1, EVALUE 0.00e+00
attgggttaacactggaggctctaagatggcggcagtggcaacctgcggtagtgttgccgcgagtactgggtctgcagtggcgacagccagcaagagcaacgtcaccagtttccagaggaggggtcctagagccagcgtgaccaacgacagcggccctcgactggtgtccattgcgggcacgcgaccgtcggtgcggaatggacagctgctggtatcaaccgggctcccagccctagaccagctcttaggtcggttcagagcggagatctgggctcagccgaggggaaacttagggaggggacctgtcggggaagccactttgaccccacatctctttctgacccctaaaccttcggaggaggagagaatagcctggtctgattgagatggaggggaatacgggttgtgtggagacttctgagcgctgttaactaaacatgttttagtgccctcgctctctatttcattccctgccctccaaccccttttcatattacggaggaattcgtacatgctttttaccctgaaatgctttctagtcaagggaagacattaatttatggagatggtttggctttcattcagga

SEQ ID NO: 1471 - DNA, 568 bp, Homo sapiens
  MAP TO AL078623.28; EXPRESSED IN HELA, SIGNAL = 0.54; EXPRESSED IN FETAL LIVER, SIGNAL = 0.87; EXPRESSED IN PLACENTA, SIGNAL = 1.2; EXPRESSED IN BRAIN, SIGNAL = 0.95; EXPRESSED IN ADULT LIVER, SIGNAL = 1.1; SWISSPROT HIT: P16720, EVALUE 7.10e+00; NT HIT: AJ310932.1, EVALUE 3.50e-02; EST_HUMAN HIT: BI670135.1, EVALUE 5.10e-02
aaaccaggcacgtaatgaggcaagagcaaaaggctgggggatgcaactgtggaataaaatttgcagttcaggagcaaattttgcaattatgagagtccagtcaccaactgggcttgggtgtccttgaacatatcatagtctttgaccaaaggagcaagaaattctaacatctttaccattaccctcatttctcaaaggggattaacctgacctccccgttgattgttatttcaagaaaccaggctctaagaggtaaatcactgaaaacattttgtgctcacagaaagaatgaaaaggaagtgtttgtaagtagtaagagttgtagtaataatggcaacaattgcaacagtaatgatgatagtaataatagttgaaataattataaaaattacatttaatgagagcttaccatatgctttcgctgtgttgcatgcttattttagacaattcacttcatcttcacaactctgcttcactcattttgcagaagaagaaagtaagtctcagaggtaagtcatttgttgaaagacatagaattagcaggggctggagccaagattggaatcaa

SEQ ID NO: 1472 - DNA, 527 bp, Homo sapiens
  MAP TO AL137068.1; EXPRESSED IN HELA, SIGNAL =   6; EXPRESSED IN BRAIN, SIGNAL = 2.4; EXPRESSED IN FETAL LIVER, SIGNAL = 2.4; EXPRESSED IN BONE MARROW, SIGNAL = 2.4; EXPRESSED IN PLACENTA, SIGNAL = 2.5; EXPRESSED IN ADULT LIVER, SIGNAL = 3.2; EXPRESSED IN LUNG, SIGNAL = 2.5; SWISSPROT HIT: P45897, EVALUE 2.20e+00; NT HIT: AL163213.2, EVALUE 2.00e-12; EST_HUMAN HIT: AI733767.1, EVALUE 1.00e-08
ttcaagagtggtaggctggcactaggcaggtgggttattctaagtaaaacccagtatttgtccctctgactgctttttggctcaagcccgcagtctcacgttttaatcctttaggagaaaggctctactaaaaggccaactgaaatccaaaaagaactacttcagtaactctccatgggatatagaggagaaaggcactggaggcttcggtgccagcagtttaaagactgactggagagagggcggaggtggagcaagatggctgaatagaaccccccccgagatagttctccacacaggaacaccaaatagaacaactatccacgcaagacagcaccttcataaaagccataaaatcaggtgagtgatcacagtgcctacttttaccgtaatgataaggaaagaggcattgaagatagggtgggggtaggggggaagatctccctgtattgcctataccacccctcctccaaccacaggctgcacagcaggaaagagaatccgtgtgcttggaggagagagagcaa

SEQ ID NO: 1473 - DNA, 518 bp, Homo sapiens
  MAP TO AL136105.2; EXPRESSED IN FETAL LIVER, SIGNAL = 0.74; EXPRESSED IN BONE MARROW, SIGNAL = 0.77; EXPRESSED IN ADULT LIVER, SIGNAL = 1.3; EXPRESSED IN LUNG, SIGNAL = 1.1; EXPRESSED IN HELA, SIGNAL =   1; EXPRESSED IN BRAIN, SIGNAL = 0.9; NT HIT: gi14741621, EVALUE 0.00e+00; EST_HUMAN HIT: BG826844.1, EVALUE 0.00e+00; SWISSPROT HIT: O88935, EVALUE 3.20e-01
atggtgatttaggagccgtgacatccgaatgccatcctccactggcgagaccctcagagcagccacgcctctagcgactgccccgccacccgaggccgggggtcgcgcgactcacccaaagactggtgtttcaggcgctccacggagcaggttgtttgtcagcagctaagtgccgtcagggttcccggctctggcgtccgtgggcggctacgggaagcgacaggagtcagtcctcgttcacttcccggctcgcgcgcctcactgctgtggtctccccaccctccccgcgccccgccttctgtgtctggggcgtccctggcggctctgctgggttttggacagggacccgccgctgatcgccacccagctcggcctcctgcacagcctctggagccttggaccgcgactggcttgctgtgggacgagcacagagggataaggacaaagaatgtgtcctgggtggatctggctgcctttgcccggaaggcggagtggggtgggaggtggtaggaaaatgg

SEQ ID NO: 1474 - DNA, 547 bp, Homo sapiens
  MAP TO AC012348.4; EXPRESSED IN LUNG, SIGNAL = 0.58; EXPRESSED IN BONE MARROW, SIGNAL = 0.55; EXPRESSED IN BRAIN, SIGNAL = 0.47; EXPRESSED IN ADULT LIVER, SIGNAL = 0.45; EXPRESSED IN FETAL LIVER, SIGNAL = 0.58; NT HIT: AL163280.2, EVALUE 5.20e-01; EST_HUMAN HIT: BG995468.1, EVALUE 1.00e-05; SWISSPROT HIT: Q90722, EVALUE 8.80e+00
tggctgagctatgagcagtgcactttctcatgcactttgtgtggaagaacatataaatatttctgagcagtggccatcgtcctaacaaattgctcagggacttcgaggggaaaaagactggatgatctgagaaaagtagttctgaatagaggcatttggatagacatatgagagtgaacacaaagcaaaaaggtttttgtaccacctattaatgcccaccaaaaagcatctatccctgaagagatactaaaaaaagaaatagataatatgagttggtgaattgatttagccagccttcattgtcaactaccccaggcatgtgatggcattataggatattatggaggtgacattgccccaaagcatggactcccacttaccaaggctgatatagctatggctacctctgaatacccaaccttccagcaacagagaccagtgataaatttccaacatgacacgttcctcatggaatactcctggaaggtccagaggttcacagggatggatacctaaactaaatatgggtttgccttttctgtcccag

SEQ ID NO: 1475 - DNA, 508 bp, Homo sapiens
  MAP TO AC016683.4; EXPRESSED IN PLACENTA, SIGNAL = 2.5; EXPRESSED IN ADULT LIVER, SIGNAL = 2.5; EXPRESSED IN HELA, SIGNAL =   1; EXPRESSED IN FETAL LIVER, SIGNAL =   2; EXPRESSED IN LUNG, SIGNAL = 2.3; EXPRESSED IN BONE MARROW, SIGNAL =   2; EXPRESSED IN BRAIN, SIGNAL = 1.5; EXPRESSED IN HEART, SIGNAL = 2.6; NT HIT: AJ006345.1, EVALUE 7.50e+00; EST_HUMAN HIT: AA299819.1, EVALUE 1.00e-113; SWISSPROT HIT: Q10914, EVALUE 3.60e+00
gcttctgtgtctgggaggagtaaggcggtgctgggcaaggaagaaatgaaacatcatcagcatcctttcccaaataccctctcaccccattccaaccgccgtcttccagacttgccccaaacctatctaaccggaccacaagcctagaaccagaaggcctgggtctctctctgagctgctgctttgttcttacacctgggtggggaagggggcagtgggtacccaaggcctgaaaacagactacaggctgcccctccctgcacatctggctggtcccctccttcccatcttgatagccccctgcacccagggtggaccagcccagctcctcaaccacaggttggaggactagaaaagggagagaagggtccagggtggggagagtgggaaatggcaagcagaggaaaggagagggccagggacatcacctggctgtgagttctaggactgctgggggaggtgacagtgatacaggctttaggaacaggcctcacctccatgatcccta

SEQ ID NO: 1476 - DNA, 510 bp, Homo sapiens
  MAP TO AL137019.1; EXPRESSED IN BRAIN, SIGNAL = 0.95; EXPRESSED IN PLACENTA, SIGNAL = 1.1; EXPRESSED IN BONE MARROW, SIGNAL = 0.87; EXPRESSED IN LUNG, SIGNAL = 1.1; EXPRESSED IN ADULT LIVER, SIGNAL =   1; EST_HUMAN HIT: BI011981.1, EVALUE 7.10e-01; SWISSPROT HIT: P21217, EVALUE 8.10e+00
tgtgaagatttgcaggatgcaatataaaatgcactgcccctctaggtagggtgaataatattcctagtttcccatggttatcaaaattgagtaccacgctattcgaatttgctataacgttttgttattttgttctcccaaaaataagcaaataagcatttgtaatcctttcccaggtttcaggacttgaaagaattccagctgactgaccgaatgtttaatcttcatgaaaccaacaagatggtggcttttggagtcaggcctgggagaaaattctagctcttttgcttgcattgcctgtgagacctaagacaagtctctgataatctatgtcttcattttatgggacttttgggaataatactgctttcttctagtattgtaaagaataattgggttagaataagtgcatacccttgccatccatgtagaaggtatttgttgattcccaatttatgcctagtaccctgccaagtgatacaactgtaagcaaaacatggctcctacttg

SEQ ID NO: 1477 - DNA, 508 bp, Homo sapiens
  MAP TO AL121836.9; EXPRESSED IN BONE MARROW, SIGNAL = 7.3; EXPRESSED IN HELA, SIGNAL = 4.6; EXPRESSED IN BRAIN, SIGNAL = 6.6; EXPRESSED IN HEART, SIGNAL = 5.9; EXPRESSED IN PLACENTA, SIGNAL = 8.8; EXPRESSED IN ADULT LIVER, SIGNAL = 6.7; EXPRESSED IN FETAL LIVER, SIGNAL = 6.5; EXPRESSED IN LUNG, SIGNAL = 8.2; SWISSPROT HIT: P22670, EVALUE 7.00e-07; NT HIT: U67467.1, EVALUE 7.50e+00; EST_HUMAN HIT: BI464579.1, EVALUE 2.00e-63
atgcctgcaaaacaaatgtctcaatattctctaagagaacttgcacagatgaattcattttcatgctatctgcctgacatgactttagttataagtcactatagccaatacgtgtcatttacctttccaaaggtggccgcacaggctggctctaatttctctttcctacagaaatctaagtagtgtgcataaagaatgcaccgtggtaagcaaactccttcacatacaatgtaattctcttcaagcctaagaaaaaggaacaaaaattaggtcaaatattttatttccttttccttcaactttctcattgacttattacccattttgaatatggactctataaatgaggtaatgagtagacataagtagacttcgtttattctggatattttttaaaaatcaaattataaggattaatgttaaaagtacaaaaccccagtgaaaaatctgctagtacagttaaaatatcatggctaacataaaaccatgcctggtccacatcacaaat

SEQ ID NO: 1478 - DNA, 511 bp, Homo sapiens
  MAP TO AL136975.1; EXPRESSED IN HEART, SIGNAL = 1.8; EXPRESSED IN PLACENTA, SIGNAL = 2.1; EXPRESSED IN ADULT LIVER, SIGNAL = 2.1; EXPRESSED IN FETAL LIVER, SIGNAL = 1.6; EXPRESSED IN LUNG, SIGNAL = 2.2; EXPRESSED IN BONE MARROW, SIGNAL = 1.8; EXPRESSED IN HELA, SIGNAL = 1.4; EXPRESSED IN BRAIN, SIGNAL = 1.8; SWISSPROT HIT: Q42868, EVALUE 7.10e-01; NT HIT: gi15616630, EVALUE 1.90e+00; EST_HUMAN HIT: AA416570.1, EVALUE 1.80e-01
tgagctcccagaatccactctgactctccttgtaatcagtgttctattctgcaatctgaaaaatttaaatcagatcacattacgtctcttgcttaccactcttcaagggcttcctattgtgttcattataaggataaaaccccatatcaagcttcttcaaagtctcatatattttggacctaatataatatgttaaatattttgaatataggaggtgaaaagaaaaaatatttgttaaatttaacaataagttttcaaggattccaaagagtttgtctttgagattcaaacaaaatattttgaatcacatctcattcatgggggaacatccttatcttcataattccctaatctctccagagattggaggtaaatggaagatgttcaaggatgttaggctttttggttgtgtatttgtttggtggttctatctacaaaagaactttcgacttgaatgtaaatttagtttttgtattatatatgactctggagcagcactttctcttccatg

SEQ ID NO: 1479 - DNA, 589 bp, Homo sapiens
  MAP TO CHR22_166.0; EXPRESSED IN FETAL LIVER, SIGNAL = 0.63; EXPRESSED IN BONE MARROW, SIGNAL = 0.72; EXPRESSED IN ADULT LIVER, SIGNAL = 0.63; EXPRESSED IN BRAIN, SIGNAL = 0.7; SWISSPROT HIT: P32927, EVALUE 6.00e-27; NT HIT: gi11418060, EVALUE 6.00e-84; EST_HUMAN HIT: BF987799.1, EVALUE 1.00e-36
tgctctctccaagcttcctcctgtccctggggccccagcagaagccacagcccaccctaagctctcctccctcccgtgtgccctccctctccctgccctcagctctgctgtgctcctcagggaggaagagtgctccccagtgctgagggaggggctcggcagcctccacaccaggcaccactgccagattcccgtgcccgaccccgcgacccacggccaatacatcgtctctgttcagccaaggagggcagagaaacacataaagagctcagtgaacagtgagtttgctcctagcccgctgtggggatggtctgggaccagcacaccctcattgtgtaacccgaatcagttcagggttcctcctggccccgtcttcatgtttgtcactttcaaagagatgcagtccagtgaccaaaagtgaacagagaagcaatgaaaccacgacggcagtggccaaaaacaggagcagatctttaaaacctctgatctcttgtccttttcttctgcttccctctcccatcctgcagctctctaaatctccactgctagccacaccctcctggtcctgtcaccaaaaccttccctttca

SEQ ID NO: 1480 - DNA, 535 bp, Homo sapiens
  MAP TO CHR22_166.0; EXPRESSED IN BRAIN, SIGNAL = 0.54; EST_HUMAN HIT: BI829995.1, EVALUE 0.00e+00; SWISSPROT HIT: O00268, EVALUE 3.90e-02; NT HIT: U07000.1, EVALUE 1.30e-01
aacagtgcacagtgtttggcacacagcagatgctcaggagatactgctttctagtggtattattatagggactctgtactcaagagtgagtttatcttatgtcctcattataagactctgcatcaccctcctggcccctgctatgacacctgctcctcggagaccagctggtccaccacattgctcccaaacttgtggcgaatgttgttaggaatgatgctgcccttctggttcgtgggcgtgctcctctggtcctgagcccccaagctgggaccgtcatccgtcccctggcatggctgagccccctctcccgaggtggccctgttctctctcgaggaggatcgagagcccgcattcttcagggacctggactgtgggtccatgcccagagaatccctgctggcagcagtcgggggtggagggggaatctccttcaagtggcactgccctagggagctgccttgagcgctggctcccaggggcaggggctgtggggatgacagaccctggttcttgaacttggaggtgtccaagg

SEQ ID NO: 1481 - DNA, 573 bp, Homo sapiens
  MAP TO AL138886.1; EXPRESSED IN BONE MARROW, SIGNAL = 0.68; EXPRESSED IN BRAIN, SIGNAL = 0.67; EXPRESSED IN LUNG, SIGNAL = 0.73; EXPRESSED IN FETAL LIVER, SIGNAL = 0.99; EXPRESSED IN ADULT LIVER, SIGNAL = 0.92; NT HIT: gi5174520, EVALUE 7.00e-59; EST_HUMAN HIT: BI964041.1, EVALUE 1.00e-58; SWISSPROT HIT: P33908, EVALUE 2.00e-16
atccagcattaccctctccctttcttagttatggtcaatttacatatattttatctaggcaaagtattttatcaaatatttttctgatcttttcaggtaacatcaaaggagcaactatagtagatgccctggatacactttttattatggaaatgaaacatgaatttgaagaagcaaaatcatgggttgaagaaaatttagattttaatgtggtaagttaaataagaatttctaattcagtccttaaatttcagttaacatggataaattctgtagtgggccctattattgtattataatgtaccctaacaaaaatattgcaactttaggtagtacaaatactattatcttatactatattcttaaattgtcctcactacacaaatgtgtgtctttgttttttggcaaatgaagagtaagagaaaagaagttagtatttattgagacctacatgtgcctagtattcttgttcagtcccactgcaactctatgagatgggcattaatttcacacctttgtatattaaacatcttaacctcagaggcttactccagattgcacagctggttgtgt

SEQ ID NO: 1482 - DNA, 539 bp, Homo sapiens
  MAP TO CHR22_172.0; EXPRESSED IN BRAIN, SIGNAL = 0.38; SWISSPROT HIT: P22059, EVALUE 5.00e-22; NT HIT: AF288742.1, EVALUE 0.00e+00; EST_HUMAN HIT: AI419969.1, EVALUE 0.00e+00
cttggtaccacgtctgttcgtaatgaccgtaacaactctattttcttccacagatgactctggggacgacgacgaggctaccaccccagccgacaagagcgagctgcaccacaccctgaagaatctttccctgaagttagatgacctcagcacgtgcaatgacctcatcgccaagcacggcgctgcactccagcgctccctgacagagctggacggcctcaagatcccatctgagagtggggagaagctgaaggtggtgaatgagcgggccaccctcttccgcatcacatccaatgctatgatcaacgtgagtacccacccccaccgccctggcacggggctccctggctccagccccggggtccctcggtgggtgaccagggtcagcttgaagggtcagcgttccatttcctgtggttccacggtgtttcccaaagccagcgccccccagctagcttccgagttcttaaatcatctccttcactcggccgtcgttgggcaaggacattcttcctaattgtctggaggaaacgagttgg

SEQ ID NO: 1483 - DNA, 585 bp, Homo sapiens
  MAP TO AL138837.1; EXPRESSED IN LUNG, SIGNAL = 8.3; EXPRESSED IN ADULT LIVER, SIGNAL =   9; EXPRESSED IN HEART, SIGNAL = 5.8; EXPRESSED IN BONE MARROW, SIGNAL = 6.7; EXPRESSED IN PLACENTA, SIGNAL = 8.4; EXPRESSED IN BRAIN, SIGNAL = 5.3; EXPRESSED IN HELA, SIGNAL = 4.5; EXPRESSED IN FETAL LIVER, SIGNAL = 6.6; SWISSPROT HIT: O14771, EVALUE 9.00e-41; NT HIT: gi15296967, EVALUE 0.00e+00; EST_HUMAN HIT: BE780719.1, EVALUE 0.00e+00
gcttctgcatccttttgctcacactctatcctttgtctttctgccttagagccttggggagcagtcccttttctaggagcctcttgaaggactcaccgtagatgcaggaagacattggatgaggtcagcatagctgaagtgaggtgtctgggttagacaatggctatggccctggaattgcaagcccaggcatctccgcagccagagcctgaagaactcctgattgtgaaactggaagaggactcttggggatcagaatccaaactctgggagaaggaccgtggctctgtctctggcccagaggcctcccgccagcgcttcaggcaattccaatacagggatgcagctggaccccacgaggccttcagccagctctgggctctctgctgtcgttggctgaggccggagatccgtctcaaagagcagatcctggagctgctcgtgctggagcagttcctgactatcttgcctagggaggtccagacctgggtgcaggcacgccaccctgagagtggtgaggaggctgtggccttggtggaggattggcaccgagagaccaggactgcaggacagtcggtgagacaa

SEQ ID NO: 1484 - DNA, 560 bp, Homo sapiens
  MAP TO CHR22_173.0; EXPRESSED IN PLACENTA, SIGNAL = 0.55; EXPRESSED IN ADULT LIVER, SIGNAL = 0.79; EXPRESSED IN BRAIN, SIGNAL = 0.43; EXPRESSED IN FETAL LIVER, SIGNAL = 0.58; EST_HUMAN HIT: BF902114.1, EVALUE 1.00e-73; SWISSPROT HIT: gi12644096, EVALUE 1.60e-01; NT HIT: AF237772.1, EVALUE 8.00e-74
caagaatgggctctccagacccatgttccctgaagcaccaggcaggctcagcctcctggagggtccctgaggtgctctctggtctgtccccggccaggggtcctcaccaccctctcctgcctccagagaggctggcggcgctcaagctggaagcagaggacatcgccctgacagccacaagccagaagcacaagctcacagtggtgctggaggccgtgaaccggagtctgcagctggaggagtggcaggccaagtggagcgtggagagtacgtgggccacaacctggctacccctggggagtgtggggccgctggggtccttctgcttcaggcttctcacccaccaggaaggcgcactcatccttctcccagcaggggtacaacctgggagtcaggaaggaggtagaagcctcaggcagccacagtcaggcatctggctgagcagccaacagcccagcacacatctgtgccctagagggtgttactgctgcaaagtgcagcccaaggatagcaaacagtctctgtttgctatctgaatgacagccactgttgagttccaa

SEQ ID NO: 1485 - DNA, 593 bp, Homo sapiens
  MAP TO AL137795.2; EXPRESSED IN PLACENTA, SIGNAL =  18; EXPRESSED IN BONE MARROW, SIGNAL =  16; EXPRESSED IN LUNG, SIGNAL =  20; EXPRESSED IN ADULT LIVER, SIGNAL =  20; EXPRESSED IN HELA, SIGNAL = 7.2; EXPRESSED IN BRAIN, SIGNAL =  14; EXPRESSED IN HEART, SIGNAL =  14; EXPRESSED IN FETAL LIVER, SIGNAL =  15; NT HIT: AB043547.1, EVALUE 3.00e-12; EST_HUMAN HIT: AI061294.1, EVALUE 2.00e-23; SWISSPROT HIT: P39188, EVALUE 8.00e-08
actgcactgttgtgagtgccacatggcaaggaacagcagatgcctctaggagctgagagtgtcccagctgccagccatcaaggaagccggagcctcaggcccacactgcaaggaactgaactgtgtccacaatgacatggacttggaagaggatcccaggatccagaaaggaatgcagcacaaccaacacctcaactgcagccctgtgaggccctaaggggagaatgcagacaagccatgccagactcctgacctagagaacccaggagataaacagatggtgtgtcgagcctgtgctagggctgtagccatttgttacatgacatagatagtcaacgtgtacttttttttttttgagacagggtcttcctcttttgcggactggagtacagtaatgcaatcacagctcactgcagccttggactcctgggctcaagcaatcttcctacgtcagcctcccaggtagctgggactacccgcatgcactaccacaccctcctaaatttttatgcttttcgtagagatgtggttttatccaccatgttgcccaggctggtcttggactcctgggctcaagtgatctgcctgggatt

SEQ ID NO: 1486 - DNA, 570 bp, Homo sapiens
  MAP TO AL138784.1; EXPRESSED IN FETAL LIVER, SIGNAL = 3.9; EXPRESSED IN PLACENTA, SIGNAL = 5.3; EXPRESSED IN ADULT LIVER, SIGNAL = 5.3; EXPRESSED IN BONE MARROW, SIGNAL = 3.9; EXPRESSED IN HEART, SIGNAL = 4.6; EXPRESSED IN BRAIN, SIGNAL = 3.7; NT HIT: D89060.1, EVALUE 0.00e+00; EST_HUMAN HIT: H96437.1, EVALUE 2.00e-44; SWISSPROT HIT: P39656, EVALUE 7.00e-11
ctctcgaagagggtcacctgcacagaccgaagagacacctagctgagcccttacaggggggccttgggccaagtgtccttggcttccttgtgactccctctctgtcagccccagtgccctgcagcttcatccagctgggctcagccccagatggacccctggacagcagtgtggtattctgcctccaggagtcagattctgaactgagaaaacggttccctcactgactccccagctaaggcccacccagtgaatgctaatttggcagcttctgtttgtaatgctctccaactccctggagaagtggaaagcaccagaacctcccaggtcggactcaccaatgtcggagctggcagctaccagcacactgcctccaccgtcaataaaggcactgatggtctccacgttgatgttgcctccaaaatctgaaagcaggcaccagacacagtgacccagaggtctcctctccctgctcctctgacactggcagggaggggacatgaagggcagagcagccacgatcactcacagagcagcaccctctgggggccacaatgagggagaggcttc

SEQ ID NO: 1487 - DNA, 515 bp, Homo sapiens
  MAP TO AL137790.1; EXPRESSED IN BONE MARROW, SIGNAL = 0.88; EXPRESSED IN BRAIN, SIGNAL = 1.2; EXPRESSED IN HELA, SIGNAL = 0.77; EXPRESSED IN FETAL LIVER, SIGNAL = 0.72; EXPRESSED IN PLACENTA, SIGNAL = 0.91; EXPRESSED IN LUNG, SIGNAL = 0.87; EXPRESSED IN ADULT LIVER, SIGNAL = 0.93; NT HIT: S68944.1, EVALUE 6.00e-90; EST_HUMAN HIT: AU123498.1, EVALUE 1.00e-27; SWISSPROT HIT: P31662, EVALUE 2.00e-30
ctgttgaggctgagaaagggggtgtgcacatgaataaaaccatcccctctgtgtctcttttcttcctcctgccttggtcttctgccatagctggacaagatgctggacccccaggtgtggcgggaggcagctacccaggtcttctttgccttgggcctgggctttggtggtgtcattgccttctccagctacaataagcaggacaacaactgccacttcgatgccgccctggtgtccttcatcaacttcttcacgtcagtgttggccaccctcgtggtgtttgctgtgctgggcttcaaggccaacatcatgaatgagaagtgtgtggtcgagtaggtggcatctctcctcctgtccctccttctccctgtctaccttacctgggagtgggcaggggtgggggcgcaggtgtgcatggggagagagggtcccctccactcagactgaggaatggagatcagaggagcactctctgtccccagctccgggccacagggacaagctcagagatgcct

SEQ ID NO: 1488 - DNA, 541 bp, Homo sapiens
  MAP TO CHR22_119.0; EXPRESSED IN PLACENTA, SIGNAL = 0.6; EXPRESSED IN LUNG, SIGNAL = 0.47; EXPRESSED IN BRAIN, SIGNAL = 0.34; NT HIT: gi15644634, EVALUE 2.00e+00; EST_HUMAN HIT: BE273626.1, EVALUE 1.90e-01
gtcaccagcatgaccacttggcttttaaatagtctaaagtgttatagtgaatgttggagttatttatgtattatacctttctgctgaaggttgtcctgactttaaatggatatagtagtgctcttcccctgatgaggacaaattagaattagagatctccttgttgaaagaaatcaatcagactgcaggtaactcttgagtcacctattactgttagaagtgaaagcagacagcatgaaatgagaacctctctcctgtgctgactttgcagcatcatagagtccttgggaagcgcacgcatctggtatctgtccctgttcaccctgcaagccctccccacccttgaccaccgacttcctgggagctgctgaaggcgtcgggggaggtggggtgaggaggcaggtcaggatggccatggtaactaatgccattggagcaagtgctaccagatgcccagacactggtgtgtacagcataagagcgctccttgactcctcagggcctgctgggtcttgtctgttctaaatcgccagaagctcca

SEQ ID NO: 1489 - DNA, 508 bp, Homo sapiens
  MAP TO AL138995.1; EXPRESSED IN PLACENTA, SIGNAL = 2.5; EXPRESSED IN FETAL LIVER, SIGNAL = 2.1; EXPRESSED IN LUNG, SIGNAL = 2.8; EXPRESSED IN ADULT LIVER, SIGNAL = 2.8; EXPRESSED IN HEART, SIGNAL = 1.8; EXPRESSED IN BONE MARROW, SIGNAL = 2.1; EXPRESSED IN HELA, SIGNAL = 1.1; EXPRESSED IN BRAIN, SIGNAL = 1.8; NT HIT: gi14752612, EVALUE 1.20e-01; EST_HUMAN HIT: AW291737.1, EVALUE 1.80e-01
tgggataaaaaggtggcttgtagagtagggctgctgaccagagcacctccatgtggcctccccatgtggctcagcctcctcacaagcatggtggcctcagggctccaaatgcatgtgttctggtagaccagatagaagctgaatgttgtgttgtaactcatagagttacttccaccatgctgtattgaacaaaggtgtgaaaagcccacgcagattcaaggtgaggggacaccacctgttgatggagaagcggcaggtcacactgtaaaagataaacgtgagatgggagttattgcttcaggtgacacatatatattttacccaggatgcaggtaacaacaatggtaataatgatagtaactaaatcttacagtgctcactatgtgctggacactgttccacaccattcacctatattcattcaattcagcctcggtggaaactgggatacaaacaggctaagtaactagcccagttatacagctagagagcagtgaaaccaggcttc

SEQ ID NO: 1490 - DNA, 526 bp, Homo sapiens
  MAP TO AL138843.2; EXPRESSED IN FETAL LIVER, SIGNAL = 0.44; EXPRESSED IN BONE MARROW, SIGNAL = 0.65; EXPRESSED IN BRAIN, SIGNAL = 0.53; EXPRESSED IN PLACENTA, SIGNAL = 0.72; EXPRESSED IN LUNG, SIGNAL = 0.65; EXPRESSED IN ADULT LIVER, SIGNAL = 0.65; SWISSPROT HIT: Q9UL18, EVALUE 3.00e-30; NT HIT: gi14733037, EVALUE 2.00e-99; EST_HUMAN HIT: BE883091.1, EVALUE 2.00e-93
aagtacttgaggaaaaatgcagtcttaagatatccttaccatacactggtgtcttccccggcaggatgacgataataagctgtaggccagaatatgtgttcttgagatgccggaacatgggctctacgctgtctgccccctgtgcatatttgcagaagcatggctggccctggatgggcatccctgcatccttagaaatcttacgcagctggtctgtgaaacccctggaaggagaaaccactaaatataaaacctttgtctagtcatgaattcctacaaagtagtaatgggaagtttgggaagggaatggaaggatgaagcaaagatttgtgtgcttcatatatgagaggtcaccagactactgatgttaagcgtaatggtctgtcagtaatccattttgcaaatgaagaacattctatacagttatacggcattctgtagtttacaaggagcattactaatagtatatgctggttaagagctcagctctagagttagtatggagagttccattcccagttctgct

SEQ ID NO: 1491 - DNA, 519 bp, Homo sapiens
  MAP TO CHR22_74.0; EXPRESSED IN LUNG, SIGNAL = 0.45; EXPRESSED IN ADULT LIVER, SIGNAL = 0.66; EXPRESSED IN HELA, SIGNAL =   1; EXPRESSED IN BRAIN, SIGNAL = 0.39; NT HIT: AL163210.2, EVALUE 6.00e-19; EST_HUMAN HIT: AW854023.1, EVALUE 4.00e-21; SWISSPROT HIT: O83112, EVALUE 8.20e+00
attggattttggtcacgagcacttaatcattctctaacaagtttcaaacattccttcgtcttcctgtcttcttctgagccctccaaattcttccaattgctgctcattacccagttccaaagccacttccacatcttcaggtatctttataacaaaactgcactccttcataccaattttctgttttaggccatttgtacgactagaaaggcatacatgaggttgagtaatttgtaaataaaagaggtttatttggctcacaggttcttcaggttgtatgagaagcatggcatcagcagacatgtgtgaagcatggcatcatacttctgatgagggcttcagaaagcttctactcattgaaggtgaaaggaagcaggcatcacatggcgggaggagaaggaagagagagaagggtgagggaggggccaggctctttttagcaatcatttcttgcaggaactaatacagtgagaattcacccattactatgatgatggcaccaagccattcatgaggaat

SEQ ID NO: 1492 - DNA, 552 bp, Homo sapiens
  MAP TO CHR22_121.0; EXPRESSED IN FETAL LIVER, SIGNAL = 0.77; EXPRESSED IN BONE MARROW, SIGNAL = 0.84; EXPRESSED IN HELA, SIGNAL = 1.2; EXPRESSED IN BRAIN, SIGNAL = 0.53; EXPRESSED IN LUNG, SIGNAL =   1; EXPRESSED IN ADULT LIVER, SIGNAL = 0.78; NT HIT: gi14779316, EVALUE 0.00e+00; EST_HUMAN HIT: BE743542.1, EVALUE 0.00e+00; SWISSPROT HIT: Q9Z319, EVALUE 7.90e-01
tggcaccttgcctctaaatctacctttgttactagctttctgggaattcatgacaaaagccacaactcacctggatggttttggtgagcttcagagcaggggtcactgtcccaatgggtgggtttatgaaggcagcaggggaactcctcttcaagctgatcttctcccgggcatcagcaacctggcggggcttctggggcaccgtggtctgctgcttgcgagagttcaacatctctctggcatcctgcactttccctttgattcgaaatcgggcatctttctgcaaaagcttctcccgggcatccttgactcccagtttgagccgggcatctgagaggccaatcttctgccgggcatcaaatctctgctggaaggtggctgtgcgtgttgactggctgagaaggccttgctggatcccaactcgagatcggacacctccaactcccggtctggcattaagcctgtaaatataaattgcaatcaatattaagtggatctgggtatctacagcagtctatgaaagcggaactgtggtaacactggggacagagg

SEQ ID NO: 1493 - DNA, 566 bp, Homo sapiens
  MAP TO AL136382.1; EXPRESSED IN FETAL LIVER, SIGNAL =   1; EXPRESSED IN LUNG, SIGNAL = 0.63; EXPRESSED IN ADULT LIVER, SIGNAL = 0.71; EXPRESSED IN BONE MARROW, SIGNAL = 0.8; EXPRESSED IN BRAIN, SIGNAL = 0.88; NT HIT: AE001183.1, EVALUE 3.50e-02; EST_HUMAN HIT: BF824909.1, EVALUE 1.00e-27; SWISSPROT HIT: P45286, EVALUE 3.20e+00
ggtgagaaaagaagaccttgctacttcctataacgtatatcacttagattcctatttcctccactcactctgaatgaccacagccaacaggactggcaatttcaagtcctgcatttgaaaccaatcgagtctttccacctggaacaaaacagacttgagatttgtgagcctagctttgtcccattggtctaaaggagactgaaactcaacatcaagatgagaaaagttacaactttgtaaacctacaaagggaaagaatctttttggcttaggcaatctgttgccttctgtaatatataatacacaagctttaattactatacactgtactgcataacactatgtatctcccacaaagacagatcagtacgtagcaaacagattggctcctgagaaaatatgctaagacctacaatggataaaattctcttttcaggccacaacattttagacctacatagaaagaagggtttagaaagggtaaaagagatttggatgtatctcaagtttccatcagaaaaataatcttttaaaataacaattcagaaccttaaagcctggaatgc

SEQ ID NO: 1494 - DNA, 566 bp, Homo sapiens
  MAP TO CHR22_177.0; EXPRESSED IN PLACENTA, SIGNAL =   2; EXPRESSED IN HELA, SIGNAL = 0.8; EXPRESSED IN BRAIN, SIGNAL = 1.2; EXPRESSED IN ADULT LIVER, SIGNAL = 1.9; EXPRESSED IN LUNG, SIGNAL = 1.6; EXPRESSED IN BONE MARROW, SIGNAL =   1; NT HIT: gi11418322, EVALUE 1.00e-94; EST_HUMAN HIT: AW369712.1, EVALUE 3.00e-77; SWISSPROT HIT: Q16983, EVALUE 4.00e-10
acactcatgcactcactcgctcttccctccatccctcccatgtgtagacgtggaacttttgtctgttaagtgctgcagaaataaccctgaacagacctggacccagctctcaatgagctcacacctcacagaagacgtcgccccaggtgtctgcgagtgcccctgtgcatgcactcgcagtgtgcagggccgaggcctcctctgctgggggctggacaagcattggggctgggcagggaagagaaaggagggcagcgttcctgcacagctggggtctgttggaaatctgtggttttatgcagggccactctgtgcatcctcacctgtgacaatggccgggatgccccagcccacgacgtagtagaaccgcatgggccccgtgtcgatgttgcgcacctcggtcagcatgcggtagacatgcaggctctccacgagggtccaggcaaaggtgctcatgtagatgtagtggaggaggatggcaaccactgtgcacagaaactgcgcagggaggggccgctcagcaagggcccctgcatcccaggctgaggtcagacaggcatgagtga

SEQ ID NO: 1495 - DNA, 596 bp, Homo sapiens
  MAP TO AC015819.4; EXPRESSED IN BONE MARROW, SIGNAL = 0.59; EXPRESSED IN BRAIN, SIGNAL = 0.7; EXPRESSED IN LUNG, SIGNAL = 0.63; EXPRESSED IN FETAL LIVER, SIGNAL = 0.59; SWISSPROT HIT: Q90421, EVALUE 3.40e+00; NT HIT: AF197760.1, EVALUE 1.40e-01; EST_HUMAN HIT: AW815742.1, EVALUE 8.40e-01
tgttgctaaggggtggaaagcactgaagatgttttgcagtatgtgactggcccatgtgtgtgtgtggtcactgtgaatttaaatgggcaccaaaatgcagaaacactgcctgctggattcaatgactaggacggtgttttcaccgacttggtggaaatggggtggtccatagattggctggagcaactgcagcctgagaacacaaaggtggtcatcatcctgccttcccatgagaaggtgggtgcttcagacaaagcctgacatgaaaatacatgcacacatttcattcactgaacccttgccatgtgcaaagcaagcactgcaggggaatgcgaaggtcagagacacacctggcctcagggagctcaccgtcttggaggtgtgcaggtcagaggcacacctggcctcagggcgctcacagtcatccaggcgagaaggtcagaggcacacctggcctcagggtgctcaccatcattgaagtgtgaaggtcagagacacacctggcctcagggagctcaccatcattgaggtgtgcaggtcagaggcacatctggcctcagagagctcaccatcgtccaggtgagaaggtcagaggc

SEQ ID NO: 1496 - DNA, 558 bp, Homo sapiens
  MAP TO AC020588.4; EXPRESSED IN FETAL LIVER, SIGNAL = 0.56; EXPRESSED IN BONE MARROW, SIGNAL = 0.74; EXPRESSED IN BRAIN, SIGNAL = 0.45; EXPRESSED IN LUNG, SIGNAL = 0.99; NT HIT: AJ278581.1, EVALUE 0.00e+00; EST_HUMAN HIT: AA663213.1, EVALUE 0.00e+00; SWISSPROT HIT: P03332, EVALUE 2.00e-06
ttccctgagttttggtggacatcattgaataattcatgggcttttttctaattctccttagtccttctagaacacaggtcaacagatgtttatgactccaatccccatgatctgcatcaaggtcccagtggggatccatactggggatggcttgctgaccagtagggaatttgtccctttcttcggctgtcattctatcatttacttgactaagataccaggtatctccaaactctcgggctgcagctaaagccacattcttttcataaaaggccagggtttgatctaacagtagcatgacatctctccaagcgaggtcaaaggtttgccctagaccctgtaggacatctatgtgcctatcaggatcatctgaaaacttccccaggtctgccttgatctgctttaaatcagagagggagaaggggacatgtacccgggttgggccaaattcccctgcccctatagcttgaaggggacataatcgatagcccaggggtttttgtggacctttggagatttctttgcttatttccttctgggcaggggagattagaggag

SEQ ID NO: 1497 - DNA, 519 bp, Homo sapiens
  MAP TO CHR22_137.0; EXPRESSED IN HELA, SIGNAL = 1.7; EXPRESSED IN BRAIN, SIGNAL = 0.73; EXPRESSED IN FETAL LIVER, SIGNAL = 0.6; EXPRESSED IN BONE MARROW, SIGNAL = 0.68; EXPRESSED IN LUNG, SIGNAL = 0.59; NT HIT: AJ297258.1, EVALUE 0.00e+00; EST_HUMAN HIT: AI291129.1, EVALUE 0.00e+00; SWISSPROT HIT: Q51130, EVALUE 9.50e-01
aatccaggcaggaaatgttggacttacaatgatcactttaacttacagctatctattttacaagaaatgttaagattattaggaactttcacggaacatcaaataaagtaagaatctgtaacattataaacatgaagatcctggttcaaatcagggaatgcaataattctgtatctactcaccattcttccgctcactaagtggaggcaaattgggattcctgccagggtggaggcctagggtcagctcgggctgcaaggagagctcctgcagttcattggcaacagcttcactctggggactgggtgccgcagataaggacacgagcactggttcatcatcattttcgccggcccctcctccgtccagcccattcacagcaatgacggaagggggcaggcacaccacactggagaaatccactttggctttcgtgatggcaatctggaaatggaagaaaaaatggaaagtttagatggtaccatgataatatggtttggtggtgtcctcacccaaatc

SEQ ID NO: 1498 - DNA, 573 bp, Homo sapiens
  MAP TO AC018415.3; EXPRESSED IN BRAIN, SIGNAL = 1.1; EXPRESSED IN LUNG, SIGNAL = 0.99; EXPRESSED IN ADULT LIVER, SIGNAL = 1.1; EXPRESSED IN HELA, SIGNAL = 0.58; EXPRESSED IN FETAL LIVER, SIGNAL =   1; EXPRESSED IN BONE MARROW, SIGNAL = 0.93; NT HIT: AB007953.1, EVALUE 3.00e-15; EST_HUMAN HIT: BF904772.1, EVALUE 9.00e-13; SWISSPROT HIT: P08547, EVALUE 5.00e-26
atcagggtgatgttggcttctttctaaagcgaattgaatataatatagaattggtttgtataaattactaccttttcaatttttttgaatagtttgagaagaatatgtgttagttctcctttaaaaggttgtgaaatagagctttgatgtgatcctgtgtaaggctgttcttcttgggagattttatactactaattcaatctcattgcttctgattattctgttcagcttttctgtttcttcttgattcgatcttggtaggttatatgggttgaggaatttattcatttcctctaagttttctaatttgttggcagatacttgaccaaaatagcctctaatgatactttgtatttctgtagtatcagttgtaatgtctcctttattatttctgtttttgtaaatttgggtcttctctccttttcttttcttaaaaacgggaagacatccatgttcatggattgtgtattagtccattctcacaccactataaagaataccacctaagactgggtaattataaaggaaagcaggttaattaattcacaattctgcaggcttaacaggaagcat

SEQ ID NO: 1499 - DNA, 528 bp, Homo sapiens
  MAP TO AC013816.3; EXPRESSED IN BRAIN, SIGNAL = 0.57; EXPRESSED IN FETAL LIVER, SIGNAL = 0.54; EXPRESSED IN LUNG, SIGNAL = 0.56; EXPRESSED IN ADULT LIVER, SIGNAL = 0.52; NT HIT: AL163207.2, EVALUE 2.00e-09; EST_HUMAN HIT: BI053806.1, EVALUE 1.00e-05; SWISSPROT HIT: P48733, EVALUE 6.40e+00
tgcagtatctgctcctgtggagctaatagtctaagcattggagattgatgttaatcaaaacatcttccaagcaattaagaatgccaaaccatgctaagtgccacgaatgaaatatatagaggaaagtgataaagggtaacagagagagtacatttaggttaatggaggaaggctactccaggaggtaacatttaaatggagacatgaaggatgagaagaagctggccatgcaaaaaggcatgctgtcacaggagaggaagaatgttttagatacccaatacagtagtggccccttatccatgaggtacatgttctcagactccctgtggatgcatgaaaacatggatagtaccaaaccctgtatatactatgttttttccatctgataactgagatggctactaaagtgactaatgggcaggtagtgtctacagcatggatccactgcacaaaaggatgcatcatatcttaggcaggatggggcaggaaggcatgagatttcatcacactcctcaaagcagtgtgcaa

SEQ ID NO: 1500 - DNA, 574 bp, Homo sapiens
  MAP TO CHR21_15.0; EXPRESSED IN BRAIN, SIGNAL = 1.7; EXPRESSED IN LUNG, SIGNAL = 1.1; EXPRESSED IN ADULT LIVER, SIGNAL = 1.2; EXPRESSED IN HELA, SIGNAL = 3.2; EXPRESSED IN PLACENTA, SIGNAL = 0.99; EXPRESSED IN FETAL LIVER, SIGNAL = 1.6; EXPRESSED IN BONE MARROW, SIGNAL = 1.7; NT HIT: gi14277708, EVALUE 4.00e-88; EST_HUMAN HIT: AI174899.1, EVALUE 0.00e+00; SWISSPROT HIT: P46653, EVALUE 4.80e-01
atctagggctgtgcaggatgtactttgtcaataaaatatttacagggagtatgcttggtaaaagtcatcgccattctccattctcgataaaccaggggcacaatgcactgcggaaagccgcagggacctctggcctagaaagccaggtattgtccaaggtttctccccatgtgatagcctgcgatatggcctggtgggatgggaaagacctgaccatctcccagcccgacatctgtgaagggtctgtgctgaggaggattagtaaaagagaaaggcctcttgcagttgagataagaggaaggcctctgtctcctgcctttccctgggaacggaatgtctcggtataaaacccgattgtacatttggtcaatcctgagatagaaaaaccgccctgtggcgggaggtgacatgttggcagcaatgctgctctgttattctttactccactgagatgtttgggtggagagaagcataaatctggcctgcgtacacatccaggcatagtaccttcccttgaacttattttctcacatgtttccttgctcacatgttttctttcttctccccaccatca

SEQ ID NO: 1501 - DNA, 532 bp, Homo sapiens
  MAP TO CHR22_80.0; EXPRESSED IN HELA, SIGNAL = 2.9; EXPRESSED IN BRAIN, SIGNAL = 0.82; EXPRESSED IN LUNG, SIGNAL = 0.77; EXPRESSED IN FETAL LIVER, SIGNAL = 0.79; EXPRESSED IN PLACENTA, SIGNAL = 0.79; EXPRESSED IN BONE MARROW, SIGNAL = 0.61; EST_HUMAN HIT: BI831784.1, EVALUE 1.00e-109; SWISSPROT HIT: Q14166, EVALUE 1.00e-34; NT HIT: D63487.1, EVALUE 1.00e-109
ggaagccacaggagaaagtgagttgcttgctctggccggcccctcacccggcctgatggcacagggcagcggaggtctgtgcccatgcctgtcctccccctccccggggcccagctacccactcaccccatgggccagctggtaggtctggttgaacttccacatctcctccagcaccagggccacagcctctgtactgggcagctcaccgtggaactcaatgcccatcaggttggccatgcggtgcagcagcccgggcacctgctgcagctgctggcgcgcgtgctccacacggcacgtccaggcgtggtcgatgaggaagatgctgcgggcacaggccacaatgtgaggctgccgggtgggcatggggcaaagggaagtcgggggagcaagaggcccagggctgtgttgggaccagggcccaagcttccttagatttggtctactgggtgccatagttatgcctagttttggactccagtgggcctgggtcaggtgctggcgctgctgctcactccctgtgtgatcctga

SEQ ID NO: 1502 - DNA, 546 bp, Homo sapiens
  MAP TO AL160192.1; EXPRESSED IN BRAIN, SIGNAL = 0.64; EXPRESSED IN PLACENTA, SIGNAL = 0.71; EXPRESSED IN LUNG, SIGNAL = 0.62; EXPRESSED IN ADULT LIVER, SIGNAL = 0.64; EXPRESSED IN FETAL LIVER, SIGNAL = 0.64; EXPRESSED IN BONE MARROW, SIGNAL = 0.56; EST_HUMAN HIT: BG477725.1, EVALUE 7.70e-01; SWISSPROT HIT: P26675, EVALUE 3.00e+00
ttctcagtctccgtgtggtggcaagattgttcagccagttccaagacccatgtcataagaaagattgagtatcttagtcccagcagacatagatgtgtgttcagagtctgaccagacagcttgggtcagttgcccacctctgaggcaaactacagcctcatgcactggatcagatgtggggatggagcccaccccgactgtgttggctgaggatagggcagagctattgagagaagggggaatgggtgctgggggagataagcaacaaagatccaatcagttaagaaactggaagagtaaggagaattcttccccaattgaacttatagttcatctttttgtacgtttgcaagtcaaggatggaggaataacttcataatgatctctgaatgtaagcaatattatggggatgagggcctgtcattttccatctccacttaggatagcactaaccaatgtggtgacaggagagcattgtgaattaatgaagagctcagggaggcagtgggagacttttcacttaacggggccattctaagcaatgaa

SEQ ID NO: 1503 - DNA, 581 bp, Homo sapiens
  MAP TO AC008424.3; EXPRESSED IN LUNG, SIGNAL = 0.59; EXPRESSED IN BRAIN, SIGNAL = 0.64; EXPRESSED IN PLACENTA, SIGNAL = 0.57; EXPRESSED IN ADULT LIVER, SIGNAL = 0.62; EST_HUMAN HIT: BF057630.1, EVALUE 8.00e-04; NT HIT: gi15296457, EVALUE 0.00e+00; SWISSPROT HIT: Q92187, EVALUE 2.00e-53
tcggaagcatcttcagaaaagaagtgcatattgtttgtttcaaaatgtgctttattgctttacacactttcctgttgtcagttttagagctcctctattatgtagcacatttaatgttttgaattctaatggcattctgtgagggcttgcattggaaaagtacctatattttaagtcatcataataatgatatttgaccgcttttccatttaaatccttagggaagggccagaatccatacaggtgaatttcatcacagaatcttgtggcaagtgtatacatgagaagacctgtgctgggtcttttgataggaactttgttggtcagccagtaactggaaaaacaaaaaacaaaatcaagaagagaagaatttagacacacatagagcatatcctatagcaagtatataatgcagaaaacttaaaaggtatctttatgaataatattttaaagaattactgaagaaatatttttaagcatttagaaaatttgatgcttttattttatttcttctttatcctttattttctttcttattcttgaggtcatataaatacccaagggacctggaatgtaggtga

SEQ ID NO: 1504 - DNA, 566 bp, Homo sapiens
  MAP TO AL138996.1; EXPRESSED IN BRAIN, SIGNAL = 0.64; EXPRESSED IN FETAL LIVER, SIGNAL = 0.44; NT HIT: AF099810.1, EVALUE 2.10e+00; SWISSPROT HIT: P46974, EVALUE 4.10e+00; EST_HUMAN HIT: AI499585.1, EVALUE 1.00e-05
agagctgcccattgattgtcttattctggcccaaacccatgattttctcataactcaaagcagtcttttttaaataaatgaaagccttctggaaagtttctctgattgaccgaaaaggatgtttgcacatctgtagtagtgatgcatttatatcctcatacatatttatttggatctgacttcgattctttccttagaacagattcctggaaaggcacacaaattaacgacttttagagctggcattgtggataagagctggggctcctgagtagaatggacctgggtgtttccagtcttggttctgccacttctctgttgtgggatcttgatcaggttactttacctctctaagcctcagtttcttcaatgataaaatggaagtcctggaaatactcacctgagggtggttgttagaattaaatttgtgatgtggaggtgcatgtaaagcctttagcccagagcctggtatgtagtacatgctcagtgatgttcacttttaaacattctgtttgctaccacttttgggaaaagcatcaaacacatgttccagtgacgggtattgg

SEQ ID NO: 1505 - DNA, 533 bp, Homo sapiens
  MAP TO CHR22_82.0; EXPRESSED IN LUNG, SIGNAL = 0.62; EXPRESSED IN HELA, SIGNAL = 1.8; EXPRESSED IN BRAIN, SIGNAL = 0.4; EXPRESSED IN FETAL LIVER, SIGNAL = 0.44; EXPRESSED IN BONE MARROW, SIGNAL = 0.48; EST_HUMAN HIT: AI797073.1, EVALUE 3.00e+00; NT HIT: AJ277662.1, EVALUE 1.30e-01; SWISSPROT HIT: O96433, EVALUE 7.50e-01
gccttgtcctaccttacccctcatccccatcagctcttggtctccttacctccaggcaccttctctcccactccaccctccaattcctccaggctgatctttccaaagcaaaaatccaggtgagtcacttctgataatggctctccactcccttctggagaaagtccaactcctctgctctgggtacaaagagctccatgttcttgcttcatccttgtctctgacctcacctgctgggcacccgtctctccccaaaccctacaacgcacacggttccccaagagggcctccagcttcatgcctcagggcctttgcatatgcttccctttgtctggaattctcttccctggctaacatcaggtatttccctgcaaggtcctggaaacccttcctaggcagcagacctggagctcctccaggccacctcctcagtcctccctgatctccaatgcagggcaggaccctggacagagatgaatgctggaatgggaagcacaggtgcaaaaccaaaggcttccttctgcatctccagg

SEQ ID NO: 1506 - DNA, 520 bp, Homo sapiens
  MAP TO CHR22_179.0; EXPRESSED IN BONE MARROW, SIGNAL = 0.67; EXPRESSED IN BRAIN, SIGNAL = 0.62; NT HIT: M58600.1, EVALUE 0.00e+00; EST_HUMAN HIT: AV655617.1, EVALUE 1.00e-121; SWISSPROT HIT: P05546, EVALUE 5.00e-50
aacagagtggccctgtatggaagttcttgggtacttgtacataattctccctttttaaaaaaatgatccattttccagtattcccagacacccccagcatctgggagctcaaaagaacaaacacacagtgtgaaatacctgtttgtcatgcttttttgccatctctccaccacccggggtgtcagttgcgcttcgagggtcttcatcccagacatcttgtgtgggaccacaattagcatgctgatgccccccacgtattccagctggaggatgtcgcagtccagctcctggtcatttgctgcgaggaagttccccttggtctgcatcatggaaaccttaactacctctctctcattcagccggaagttgtggttgtgtgtcatttccactgggaatttattcacccaggatcctgtaaaggccacaggaagaggctgttatgagaaggttcctttagggaaatcgtctcacccttgagagtgaatctgatttccctggaggcctcattcagatagcctgc

SEQ ID NO: 1507 - DNA, 542 bp, Homo sapiens
  MAP TO CHR22_135.0; EXPRESSED IN LUNG, SIGNAL = 0.5; EXPRESSED IN BRAIN, SIGNAL = 0.45; EXPRESSED IN PLACENTA, SIGNAL = 0.65; EXPRESSED IN ADULT LIVER, SIGNAL = 0.56; EXPRESSED IN BONE MARROW, SIGNAL = 0.59; EST_HUMAN HIT: R13695.1, EVALUE 7.60e-01; NT HIT: X91498.1, EVALUE 8.10e+00; SWISSPROT HIT: Q06475, EVALUE 3.00e+00
gacacactgtcacccgaatgcccacttgacagcaggcactaagattatggagccggcagagtgtgggggtgccaaggaggttccccgggttaccctgtgttttagtgctattaacatgattggaaattgataataacgatgctggtgacaccatcagtgctgatgtcttccacttctgcttcgcactgggccctggcctgggtgctttctatcctttcatgaatgcttgcaatggccttgaatgagagggtccctggtttacagcagaggagaccagtgtcctttgggatgaagtgacctgcccaagaacaaggtgaagtaactgttaagctcaccttgtaagctcacctaagtaactgcccacggtcacacagcttggacggtcccatccagcacaaggagtggcaccaaaactcatccttcttcccagcatccccaagtgctgacttgttatgaatttgctaattaaaccctcctatctggtgtgctctcgtgctgcatcaggcagatgaatggcagaatccaaatcgttcaagccatct

SEQ ID NO: 1508 - DNA, 598 bp, Homo sapiens
  MAP TO CHR22_103.0; EXPRESSED IN ADULT LIVER, SIGNAL = 0.54; EXPRESSED IN HELA, SIGNAL = 5.1; EXPRESSED IN BRAIN, SIGNAL = 0.45; NT HIT: gi7524970, EVALUE 9.00e-03; EST_HUMAN HIT: AW938620.1, EVALUE 5.40e-02; SWISSPROT HIT: Q05815, EVALUE 1.70e-01
accgaacaggaagtcaccaccaaaaacaacacagagcaatcttcagaaagcatattcgttccttcagagaacagagaccatttcaaaatgagatgtctccaccttaaactataaaataacatcaataataataaaaaggagagcagaacgcaagccagagagagggaggaggaggaaaccccccagctgcgaagggcttggcttttgtgctgcagactcctctccacaaccccgcaatcctcaccgaggccccggccagccacacactccccggtgctaagccaacagccaggctcccgggagatgcagagacccagacccagaccccaggaagcttccatgacttctatttcggagcaaaagtactgctcgcggtcaccaggacggttactaacttgctggggattgtctccaacatcgtaactccactcatttttatctgaccgtgtgccccggagtaacagtccacacctcacttttcttattggtgccattacgctgtcatttctccccctacacgtgccagtgttggagttaaggtcacgaagctgggcacccaatggtccagaactggaccacggcttctctactcaccagg

SEQ ID NO: 1509 - DNA, 503 bp, Homo sapiens
  MAP TO CHR21_61.0; EXPRESSED IN LUNG, SIGNAL = 1.2; EXPRESSED IN FETAL LIVER, SIGNAL = 1.2; EXPRESSED IN ADULT LIVER, SIGNAL = 0.76; EXPRESSED IN HELA, SIGNAL = 3.5; EXPRESSED IN BRAIN, SIGNAL = 1.3; NT HIT: AL163285.2, EVALUE 0.00e+00; EST_HUMAN HIT: BI761763.1, EVALUE 1.00e-122; SWISSPROT HIT: O15393, EVALUE 2.00e-41
ctttgacccagcaggaagagagtggaaaggcatgaagacaggctggctccggaagacggaggagaagggtcagaccaggagaggtggcgacagtggtgttgggagcagagagcccactggggaggtagacccgggaccccgggtttattacaggaaataaacacaaagagaatcctacttgaggtgcacactgtcccggatggggatttgggctgcgtgcagacgacggggttggaagcctgcgtcaggaccctcggggcgtactggggcacgggggacgggtagtactgagccggatgcacctcgtagacagtggggaccacagtgggctgtgcgggataggggttttccggttggtatccatggttttcatagtaaggtccaatagctggtggtgacccctaaacagttgaaaagaagatgaataatataaaactcttatttgcactaaagggttacatacaaactatcacatcataccacagctataccaatgatctttt

SEQ ID NO: 1510 - DNA, 524 bp, Homo sapiens
  MAP TO CHR21_2.0; EXPRESSED IN BONE MARROW, SIGNAL = 3.3; EXPRESSED IN HELA, SIGNAL = 3.4; EXPRESSED IN LUNG, SIGNAL = 3.4; EXPRESSED IN BRAIN, SIGNAL = 2.9; SWISSPROT HIT: P55200, EVALUE 9.00e-04; NT HIT: AL163201.2, EVALUE 0.00e+00; EST_HUMAN HIT: AI138404.1, EVALUE 0.00e+00
ttgataacatttccctccgcaacaatctctggcaatgatccctcagattttaaagattatgtattattaccttttaatacaagtagaataacactcagggaatttacaacatttgttattttcagtaaacacattggttgaagtttaaaagtctatgcgtagtaaacttacatctttcaggagcttggtcaatgtgttctggacaaagcaggaagatgtgactgaaatcctgaaaggtgtcggctcctgcagcacaaggataatgatacatctgggtacatttctcttcacagcatttgatagtggctccaaagtgcttacaaaatgcacatcgctgaaaggggtaaaggagagaaatctctttataaaaccttgaaaaggaatattcaaatataagctgggaaggtataaaaaactctgtacatcacaagtaaacaaatggaacctgcaaaatattaaacaaaggattcgttagaaataataaaatctacattactcaatttagtgcttcgtgtgctaccaac

SEQ ID NO: 1511 - DNA, 590 bp, Homo sapiens
  MAP TO AL136109.1; EXPRESSED IN ADULT LIVER, SIGNAL = 0.58; EXPRESSED IN PLACENTA, SIGNAL = 0.59; EXPRESSED IN LUNG, SIGNAL = 0.58; EXPRESSED IN BONE MARROW, SIGNAL = 0.53; EXPRESSED IN BRAIN, SIGNAL = 0.48; SWISSPROT HIT: P06442, EVALUE 5.70e+00; NT HIT: AB017602.1, EVALUE 2.00e-03; EST_HUMAN HIT: BF809888.1, EVALUE 8.30e-01
ttgcccaaataattggatgactgataaaccagtaggcacagagaagacctgaagggattgaggaaaaagtaggcagaaactagaaagaatgatgctacacttgaaaatagcactgtattactgaatctgttgcctttcaacagagtgcattccccaactatgcagtgtaggcagcaggaagctgcagctctacaaggttgaagtactagtgaaggttagaagctctgtagaacagctggaaattagtaaaattccgagaagcaagaaaaccacagggcaaaattggactacaatctccacaaatctctgggtaacaaccaacttactcagacactgggagacccccaacaagccaagccaaaaaagcagcaatggaaagctagaagaaaacagagatggccgtggctgcatacatcaggggagaccaagtttgcagtctgggcccaggtaagttaactatctaccttaaaaaaaagacctgcaactctaagaacattaactgaatcattcattaaaacataccataatgtgcagtttcaggcaaaaaatacatgatatgcaaagaaagaggaaaatgtgacccagactca

SEQ ID NO: 1512 - DNA, 559 bp, Homo sapiens
  MAP TO CHR22_206.0; EXPRESSED IN HELA, SIGNAL = 1.2; EXPRESSED IN LUNG, SIGNAL = 1.3; EXPRESSED IN ADULT LIVER, SIGNAL = 1.2; EXPRESSED IN BRAIN, SIGNAL = 1.2; EXPRESSED IN PLACENTA, SIGNAL = 1.4; EXPRESSED IN FETAL LIVER, SIGNAL = 1.3; EXPRESSED IN BONE MARROW, SIGNAL = 1.3; NT HIT: gi13648116, EVALUE 1.00e-121; EST_HUMAN HIT: BE269427.1, EVALUE 1.00e-106; SWISSPROT HIT: P15265, EVALUE 1.80e+00
tactcatggggagatggaccttcacacaccaactccacagagagtttactgagagtgctttcattatctcctttctctcaccaccaccctgtgttttccttgcccccttagcttaattgagtccctgaagttctggaggacccgcttcctgctgctgccagcctgtgtcaccgccaccaagcgcatcacggagggggaggcccactgcgacatctatggggacaggccccgtgcagacgaggacgagtggcaactcctggatggttttgtccgctttgtggagggcttgaatcgcattcgcaggcggcatcgctcggatcgcatgatgcgggtaagggctccttagactcagggagtgcgcctggtgtgagatgcagggcctgccacctcctctattaggggcctctcatcatcagcctacttatttactcctcagctgcccagtgtttaccttaaatccaaaacagtgttttctcctccaccgcggggtaaaggaggaagggatagagtgcaggcagtgactgggtggtgttctgtggcatagagccattcccttcca

SEQ ID NO: 1513 - DNA, 596 bp, Homo sapiens
  MAP TO CHR22_138.0; EXPRESSED IN HELA, SIGNAL = 3.3; EXPRESSED IN BRAIN, SIGNAL = 0.29; EXPRESSED IN PLACENTA, SIGNAL = 0.36; SWISSPROT HIT: P10220, EVALUE 3.00e-01
cccataactccctatcagcgctggccgacgcctaaccatcccagctagcacccaggagtgggcccagcttccagtggggagggtgctggccaacgtgctgaccgaggtggcggacacaggaaaccagcccatcccccagcgctccctctgcaggcctcagccctgctcccatgcagagacctgtggggaggtggaggcccaggtcccagcgcagagcaaccgggaacagccaggttggtggctggagagggtgctggtgccagaagcctccagggccacccctgctccccatttcaccccatgcccatcccatgccccagaatggtcacttcggctgcggcaggaggggtgggaggggctttaaacctatgagatagggtgtggggtcacaatcttcagctatagtgggctgctctgggtcactggtaattgaagagacgcctgcggagtaagcaagcaagtgtcctctcaaggcctttctgcaagcacagagcagcccgagactggagcctggtccaccccagcgctgtcctcagactgatggtcagtgccacgtgactcatctagggtctgatacatccctgtggagagagctc

SEQ ID NO: 1514 - DNA, 590 bp, Homo sapiens
  MAP TO AL096764.11; EXPRESSED IN BONE MARROW, SIGNAL = 0.64; EXPRESSED IN BRAIN, SIGNAL = 0.54; EXPRESSED IN FETAL LIVER, SIGNAL = 0.64; EXPRESSED IN PLACENTA, SIGNAL = 0.8; EXPRESSED IN ADULT LIVER, SIGNAL = 0.53; EST_HUMAN HIT: BE250305.1, EVALUE 4.00e-98; SWISSPROT HIT: P10383, EVALUE 2.00e-03
tacctgcaccctgctttttccctcttgccacgctttttttcctctccctcttacccccaccctgtacaaaatgcataaaggatggaaaaactactgcagccagaagtctttgaatgaggcatcaatggatgaatatttaggcagcttagggctgtttcgaaagctgactgccaaggatgcctcttgcctctttcgggccatttcggagcaggtaaaaggaaaacatatcttccctgtactgagttttcagagtttgagacatgggatggtcctgtagtttgccagaagaaacaaaaaaattcccctgctttctagtgaaaacatcgggcctgtcaaggtcctagagagaagctgcctgctcttattagcttggtgcatgcctttgctgaatagtctatattgctgaacctttgctatcttttctgtttttttaaatgccagtttgtaatgtaggaggggtaagataaggaggctaaagacaactttgaaatatatcttgatcctttgtaagcatcccctgcttcctctaattttaatgcctaagaaaaaaattataggctgtgcacataaggagtagaaaaggggatggg

SEQ ID NO: 1515 - DNA, 585 bp, Homo sapiens
  MAP TO AL160191.1; EXPRESSED IN BRAIN, SIGNAL = 0.47; EXPRESSED IN FETAL LIVER, SIGNAL = 0.71; EXPRESSED IN PLACENTA, SIGNAL = 0.58; EXPRESSED IN LUNG, SIGNAL = 0.76; EXPRESSED IN BONE MARROW, SIGNAL = 0.56; EXPRESSED IN ADULT LIVER, SIGNAL = 0.78; SWISSPROT HIT: Q9UKF2, EVALUE 1.00e-49; NT HIT: U22058.1, EVALUE 3.00e-12; EST_HUMAN HIT: AA187886.1, EVALUE 2.10e-01
tagtgtgctcagctcaaccgggaatgtggctgacaccgctacagtgcaacattccacagaaaacatcatcttcttcacatggaaaaggtctacttccccctcgccgtagaataaccccacagtttccaaatcagttaccaatcctattcaatttttgatagcacgctggggaaccgtctttcacttggtagccaaaaagggcttgacactgcatatcacggtcactgcagtttcctcttatacaaacagatactgctgaacatggggttccatcctggatgtagatgtcatttggacactcttcctttttcccatcacagtattttggtagatcacatataccacccaagtctctgcaaaccactccaggggcagcatatttacacttatggcagcaaagtcctgtattgcaaacactgccaagagaaagggtacaagaggtctcacaacatctatcactggcacaatctttaagggagccacagtcacattcttccctctgatttttgatattgtctccacaacgaggagctacgtatggaaaattaggtatggaaaatttggagcactcaaacaaggatccca

SEQ ID NO: 1516 - DNA, 551 bp, Homo sapiens
  MAP TO AF168787.1; EXPRESSED IN PLACENTA, SIGNAL = 0.85; EXPRESSED IN FETAL LIVER, SIGNAL = 0.81; EXPRESSED IN LUNG, SIGNAL = 0.97; EXPRESSED IN ADULT LIVER, SIGNAL = 0.73; EXPRESSED IN BONE MARROW, SIGNAL = 0.78; EXPRESSED IN BRAIN, SIGNAL = 0.89; SWISSPROT HIT: Q93086, EVALUE 1.00e-21; NT HIT: gi14774362, EVALUE 1.00e-72; EST_HUMAN HIT: BI911331.1, EVALUE 0.00e+00
aaggactcagaaccgcacagcaggtgccaggtctggctctcactgactgcccgtggtctgagcgctgccacagcctgcctgtgtgccacagccagttctgaaaacactgagtccctgggggcaggtgactttgcagggccaccctcgcccgctgccacggcctgcctgtgtgccacagccagttctgaaaacactgagtccctgggggcaggtgactttgcagggccaccctcgcccgctgccacggcctgcctgtgtgccacagccagttctgaaaacactgagtccctgggggcaggtgactttgcagggccaccctcgccccacgagtccccgtccacaccctcctcgtcacagagccaggcccagcgcccccaggccctcagggagggctccctgcgtgcaccccacccacctccagggctatatcctggaagtcgctcccggcccagcggatcacggagcccagtcggaagatggggcagtagtggttcttggggccaaagtggcatgatttcaggaaagatctgtccttgacgtccatcacattg

SEQ ID NO: 1517 - DNA, 582 bp, Homo sapiens
  MAP TO AL138743.1; EXPRESSED IN BRAIN, SIGNAL = 0.43; EXPRESSED IN HELA, SIGNAL = 1.7; EST_HUMAN HIT: BI462070.1, EVALUE 1.00e-120; SWISSPROT HIT: O35777, EVALUE 7.00e-07; NT HIT: gi14757726, EVALUE 3.00e-73
agttgtacttggcaaatccttcttaatctaaaagatgttatgttgtggttaaatagaatattgtacctattctatcctattttaggttatattatagactagtttgattgggataacataaaaaggatcatttttccgaaagtaaccacaataattttgattgctttcatttcagattttattttgacccatataattagtaaaaaaattttatactttaacatgtttttctctcctttccattagattagagtgattagacccccaaattatgctggtccccttatgttgggattgcttttggctgttattggtggacttgtgtatcttcgaagaagtaatatggaatttctctttaataaaactggatgggcttttgcagctttggtgagtgaatttcagaagacaaaaaattatttgaataaaattcctaatagtgtatttttaggtaagcttttatttatgtgagaagtagcattttatttcttacctgaggaaaatagttttatatattttaattttctgtcttaaaatcagtttgtttcattcattatctcataaggatggccagaacttcaagga

SEQ ID NO: 1518 - DNA, 600 bp, Homo sapiens
  MAP TO AC021685.3; EXPRESSED IN LUNG, SIGNAL = 1.3; EXPRESSED IN PLACENTA, SIGNAL = 1.3; EXPRESSED IN HELA, SIGNAL = 0.97; EXPRESSED IN BRAIN, SIGNAL = 1.4; EXPRESSED IN FETAL LIVER, SIGNAL = 1.6; NT HIT: U42335.1, EVALUE 1.50e-01; EST_HUMAN HIT: AA128599.1, EVALUE 2.00e-75; SWISSPROT HIT: Q28983, EVALUE 2.00e+00
gtaaccacagcggaatggacatgcagagagaagcagagatgtaagactgagaaggaggtgtttgtttgttcactgtggtactctattctgttgttccagtttattcctgactgtattctgaccttgaatgtaaagagatgacacctgaatccttataataaaccatttttcttttgtgtttcctcgagttaactagtgttgatttttactacctgcaaagaggagtcctaggattcattttcaatttgtggttacttggtgagcgatttaagttacttctttaagttcgaatttcattcaccttgaaacagatttgatattattttaatatctgttgatagtacaaatatggataatgcaagtagtattctgtttagctctcattcatcatggctactccaatgtggagggtagccatgttggaaacttggatgggagcaaaaggccaggtgagtcgcaggctagctcgttttgggaagaataagttccaaagtccccagtattttctcaactcagtcaaccaaaaatgaccctgaaaaattcctgaaactgcagcctatgacctagaagtccaagccaactacaggacccagacccatg

SEQ ID NO: 1519 - DNA, 547 bp, Homo sapiens
  MAP TO AL137068.1; EXPRESSED IN BRAIN, SIGNAL = 0.4; EXPRESSED IN HELA, SIGNAL = 0.52; EXPRESSED IN FETAL LIVER, SIGNAL = 0.43; EST_HUMAN HIT: BG213649.1, EVALUE 0.00e+00; SWISSPROT HIT: P15909, EVALUE 3.00e+00
gcaattctgtgatatgtttgccactaataaaatgaataatgtcatttgactgcttggagatcacttattaaaccataaatctattattttgcttttagtatgctgaaattgataaagccccagatgaaagcccttacattggcaaatccagatacaagagaaatatgtttgccacagagagttatattattgacagtgctcaggcagtacagatcaagaagatggagccagatgaacaacttagaaatgatcacatgaacttgagaggccacacaccactggacacgcaactggaagacaaagaaaaaaaaataagtgcaggttaaaaaaagttattttaaattctttaaaaaaaaatatgaaaacattgaatatgtaggccaattttgttttataagtcttttaattgaacatgttgatggtattgtttccatgaaaagtctaaaacaaaagtagtgattatcaagcagatttatcgagcatttattttgtaatgattcctgttatggttaagaatggagtttttggcagtaatttgatggcagca

SEQ ID NO: 1520 - DNA, 527 bp, Homo sapiens
  MAP TO CHR22_134.0; EXPRESSED IN LUNG, SIGNAL = 0.98; EXPRESSED IN FETAL LIVER, SIGNAL = 0.97; EXPRESSED IN BONE MARROW, SIGNAL = 0.89; EXPRESSED IN BRAIN, SIGNAL = 1.1; EXPRESSED IN HELA, SIGNAL = 1.2; EST_HUMAN HIT: BG494777.1, EVALUE 2.90e+00; SWISSPROT HIT: P70404, EVALUE 2.20e+00
gtaaaggagggtttcctgggaggggcccagcaaactagaaatggagtggctcgcgagtgagctattgtaagctcagaaacctggacaccgcctgtcgcctctgtgatttttatttctcttgtttattttctttttggctttccttaacttttaggaaagttcctttggtacattcccactagtcccaactgtgttcaggagacaggaagacttggtgttttccatgcttgggccagagggaggtgaggaggagacttactactactgcgggccagggcagccagaagcagcagacgggcacccagcccctcaggtgcgccagttaggagggcttcccagtcagctgcagacgctctgtgacctcccaacagcggctgcctccctctgcaggcccctgtgaaaagggaggacgtcagaagaccacccctttcatgattccggaggcagggcagaatggcagtcatctttgttgcattggcaaattcattcctttagcccagttttattcgatttatttggccaaggag

SEQ ID NO: 1521 - DNA, 513 bp, Homo sapiens
  MAP TO CHR22_173.0; EXPRESSED IN BRAIN, SIGNAL = 0.7; EXPRESSED IN LUNG, SIGNAL = 0.89; EXPRESSED IN FETAL LIVER, SIGNAL = 0.78; EXPRESSED IN PLACENTA, SIGNAL = 0.78; NT HIT: gi15319070, EVALUE 8.00e-74; EST_HUMAN HIT: BI762557.1, EVALUE 1.00e-73; SWISSPROT HIT: P25439, EVALUE 4.80e+00
tccagctttttctgaccctcttctcttgtgcttctcattgcagaaaaactggcagggtgcaagctgaatgtggctgaggtgacacagtccgaaatagggcagaaacagaagctgcagacggtgctggaagcagtacatgacctgctgcggccccgaggctgggcgctccggtggagcgtggactgtgagttccacgccacagggggagggactgtctggagggagcccgtcctctcgacattcgtcatccacatttgtcatccacattcatcatcatcccatctggccttgcatcttaaaattgggttcatctccctgctctgtaagaggtagaacattgcaggggagaagaacaggagaagggttagggagatcctagaaaagggacctggtcaggccacaattctccatcctccccatgctgcagaggagagaggcaatgtttatggatgggtggatcagagggactttgagagagagaagcagccttggggggttcttgttgggactcaa

SEQ ID NO: 1522 - DNA, 502 bp, Homo sapiens
  MAP TO AL035367.1; EXPRESSED IN BONE MARROW, SIGNAL = 3.3; EXPRESSED IN BRAIN, SIGNAL = 3.1; EXPRESSED IN HELA, SIGNAL = 2.3; EXPRESSED IN FETAL LIVER, SIGNAL = 3.1; EXPRESSED IN HEART, SIGNAL = 2.7; EXPRESSED IN PLACENTA, SIGNAL = 3.8; EXPRESSED IN LUNG, SIGNAL = 3.9; EXPRESSED IN ADULT LIVER, SIGNAL = 3.3; NT HIT: gi14781949, EVALUE 4.80e-01; EST_HUMAN HIT: AA937720.1, EVALUE 2.00e-59
tcttggtcacagtgtctgggaccgacctcagattttatacaaaaagctggggacatagtcaaacctgagcatggggtggctggtccctggagattcctgcatgtagtgcagcttcagcagctcagccaggtactgaccaccctaacatcctcattcaccagacccagggtcagctttaggaagctcatctggcggctggctaccagctcctctgtctccttgtcgtgggtaggcaggtgcaggtggtggcagaaggtgtagaggaaggccttggagcagagctgggtgagcatgctctggacatgcaggtagtaggtgctgccccgcttgatctgtgtgcggtggtctgccaggcggggcaccagggtgcctctgtaaagggggcagcgcagggttttgttgtcaaggtccaggatgctcgtgtagcggctgtagcggctcagggcatggagggtaccggcaccggcaggggaggccactctgaaacagacaggccaaggtc

SEQ ID NO: 1523 - DNA, 547 bp, Homo sapiens
  MAP TO CHR22_117.0; EXPRESSED IN FETAL LIVER, SIGNAL = 1.3; EXPRESSED IN BRAIN, SIGNAL = 1.6; EXPRESSED IN PLACENTA, SIGNAL = 1.6; EXPRESSED IN LUNG, SIGNAL = 3.9; EXPRESSED IN ADULT LIVER, SIGNAL = 2.4; SWISSPROT HIT: P01708, EVALUE 2.00e-32; NT HIT: X57825.1, EVALUE 0.00e+00; EST_HUMAN HIT: BE268403.1, EVALUE 0.00e+00
tggttaagtggcactgcttgtatatgagcagcactaataatcagcctcgtcctcagcctggagtccagagatggtcatggaggccgtattgccagacttggagccagagaaacgatcagggacccctgagggctgagtattgacattgtagatcatgggtttggggactgtgcctgggtgctgttggtaccaggagacatagtcataactcccaacatcactgctggttccagtgcaggagatggtgactgactgtccaggagacccggacacggagggaggctgaatcagggcagactgggcccaagagcctggaaagagggagaaacacactctagtgagtcagtgctgggcccaggtgagcctgaggagcaggagaccaaggatcagcccaagggtccccgaggccccttccctggaggcgtcacctgtgccctgagtgaggaggtgaggaggagcagagcccaggccatggtggagacgtccccagagcgctgcctcctgagaccccagcactgggcctgcccccagccttgtcttaccctga

SEQ ID NO: 1524 - DNA, 570 bp, Homo sapiens
  MAP TO AL136317.2; EXPRESSED IN BONE MARROW, SIGNAL = 3.8; EXPRESSED IN HEART, SIGNAL = 2.4; EXPRESSED IN BRAIN, SIGNAL = 2.8; EXPRESSED IN HELA, SIGNAL = 2.6; EXPRESSED IN PLACENTA, SIGNAL = 4.7; EXPRESSED IN LUNG, SIGNAL = 5.9; EXPRESSED IN FETAL LIVER, SIGNAL = 3.6; SWISSPROT HIT: Q24546, EVALUE 4.20e+00; NT HIT: L78810.1, EVALUE 5.00e-69; EST_HUMAN HIT: BE167244.1, EVALUE 2.00e-72
ttgggcaattacaggatgtgggtaagtgaaatgcctgatggttatgttacaaaagatatgaaggatgaactgggactattctattaacgtgtccagaattggtgggttcttggtctcactgacttcaagaatgaagctgcagaccctagtggtgagtgttacagttcttaaagatggtgtgtccggaatttgttctgacgttcagacgtgttcggagtttcttccttctggtgggtttgtggtcttgctggcttcaggagtgaagctgcagaccttcgcggtgagtgttacagctcttaaggcagcacgtctggagttattcattcctctcagtgggttcctggtctcaccggcctcaggagtgaagctgcagaccttcccggtggttgtcacagctcataaaggcagtgtggacccaaagagtgtgcagcaagatttactgcaaacagcaaaaacacaaaccctccacaccacggaaacggacccaagccggttatcactgtcccttgtggcagcctgcttttattccctcacctgaccccacccacatcctgctgattggtccatttt

SEQ ID NO: 1525 - DNA, 533 bp, Homo sapiens
  MAP TO AC022525.3; EXPRESSED IN FETAL LIVER, SIGNAL = 0.68; EXPRESSED IN BONE MARROW, SIGNAL = 0.76; EXPRESSED IN BRAIN, SIGNAL = 0.97; EXPRESSED IN PLACENTA, SIGNAL = 0.93; EXPRESSED IN LUNG, SIGNAL = 1.1; EST_HUMAN HIT: BE793406.1, EVALUE 0.00e+00; SWISSPROT HIT: Q9UPE1, EVALUE 2.00e-51; NT HIT: gi4507220, EVALUE 0.00e+00
tggccaagtactcccaagaccatgcagacatgtatcccattcatgcctgaaatcttgaagtcaacgagctggatcaccatgtctttgtttgggtcactgggataactttctcgaacacatttgagcaattttatttcatccaaggctgtgtctgtatcacgctgagcactttttacaactttcattgcaacaaatcttttcccctacatatcccagcacagccagacagtagagaagtgcccccatccaagctttctaataacatgataccggccattgaagaggtctgcaattttcactggatgatagccacctttgcagtagtccgcagggtcctcttgctcatcatctgatccaggatctcctcctttggctctggtggtgtggggtctgccaaaggtggcggtggtggtggtggaggtggaggagaaagaactaaaggagctttctgttgaggctccagctttgtagggtgtttctctcttttcggcctccgcttttgggcctgaatgggcaacactttcctggagctc

SEQ ID NO: 1526 - DNA, 547 bp, Homo sapiens
  MAP TO CHR22_98.0; EXPRESSED IN LUNG, SIGNAL = 1.1; EXPRESSED IN ADULT LIVER, SIGNAL = 1.2; EXPRESSED IN HELA, SIGNAL = 3.4; EXPRESSED IN BRAIN, SIGNAL =   1; EXPRESSED IN FETAL LIVER, SIGNAL =   1; EXPRESSED IN BONE MARROW, SIGNAL = 1.2; EST_HUMAN HIT: T95788.1, EVALUE 0.00e+00; SWISSPROT HIT: P32825, EVALUE 3.90e+00; NT HIT: AF034077.2, EVALUE 5.20e-01
cctttttggaccttgagctgagcaaaaaattacttagttgctgaaagcaggtcagtgtagaggacttcctctactcctgctttgacttcatctgcaagagagctgagaactgagtgaggcatttctgcttcttgagacttctcttggtgtggcagggcttcctgtccaggaggggctccattgcctcatgccctgggtataaacagtcccagagggctttggaatcagcctgggtcaattctggaggaaaaataaggcctaataagcatggctcttttcccaaaatgtagccacaggggtctaagcagctgattgtggggtccagggccaccaggagtcttggctggcctagcatatcttgatttgttaagaaggtggatatgaattcagtctagagaagataacgtgcctattgtgcagaatgcagggctttttgttcaaggctgtctccatttggaagtagaatgacaaagcagtgtagatttacacagagcatctctgagtctgttacaacccttaagttttatggtttcgagccaggacagta

SEQ ID NO: 1527 - DNA, 529 bp, Homo sapiens
  MAP TO AL133499.1; EXPRESSED IN BRAIN, SIGNAL = 1.5; EXPRESSED IN PLACENTA, SIGNAL = 1.8; EXPRESSED IN LUNG, SIGNAL = 2.2; EXPRESSED IN HELA, SIGNAL = 1.2; EXPRESSED IN FETAL LIVER, SIGNAL = 1.7; EXPRESSED IN BONE MARROW, SIGNAL = 1.6; EXPRESSED IN HEART, SIGNAL = 1.5; SWISSPROT HIT: Q9PKB3, EVALUE 6.40e+00; NT HIT: AL163301.2, EVALUE 0.00e+00
tagctccgtgacgtttctccaaccttcttttcctgtatcatttaggattgattctgggtgaaggtcacagcatgactcacagtatcttacacaccttggatgtatatacgcacttcttatgtcgtaagtaatccagagggaggagtttgctagagctagtccagagttcagccatcttagggctctgggtgagtatcgctgcagtacagcagcagcagctttagacaccacttctgtgtttaaggcaggaacaactgagaaggagcaggccgtggagctcttgtctattccttttgtcagagacattgtggaagccctcagcatattttcacctgtctttcaccagaactgtgtctttctccttggcaagaagtgtgttttgtggccagctttagtcacaaaagagacagaaaatgagcctttcatttttgtggcacccttggtagaggggtaggggaaagggcttcaggacgagcactggatcagcttaccaagcctgaaaccacgccccctgctggtcatcctagag

SEQ ID NO: 1528 - DNA, 530 bp, Homo sapiens
  MAP TO AL138499.1; EXPRESSED IN BRAIN, SIGNAL = 0.64; EXPRESSED IN FETAL LIVER, SIGNAL = 0.85; EXPRESSED IN BONE MARROW, SIGNAL = 0.75; EXPRESSED IN PLACENTA, SIGNAL = 1.1; EXPRESSED IN LUNG, SIGNAL = 1.3; NT HIT: gi15300835, EVALUE 1.00e-91; EST_HUMAN HIT: BE698736.1, EVALUE 1.00e-91; SWISSPROT HIT: P35503, EVALUE 1.70e+00
gactgttgagctggtacggcttcattagaatgagtgttttgacttgttaaatgacgaaataggaatttaaaaccaatttgagctaccagtaaatgtttcaaaagaactgcatttatcattaaattatgcttgcatgtcatttactctgttttgtaaaaattctaattatgattttgttgaacttaaattgcagtcttcgtagatgaaccccttattcatgcaactacttatattcctttgatggataatgctgactcaagtcctgtggtagataagagagaggttattgatttgcttaaacctgaccaagtagaagggatccagaaatctgggactaaaaaactgaagaccgaaactgacaaaggtaatatatgggatttatagtctttgttgtactataaaaacacatttctgagttctgatggagtcatagatttcattttctcatagaaacaatgcatttcaaaagaatcaaatccttgtggtagaagacttattggtagtcttttagtccagcctcctcagttttg

SEQ ID NO: 1529 - DNA, 579 bp, Homo sapiens
  MAP TO AC019196.4; EXPRESSED IN BRAIN, SIGNAL = 0.32; EXPRESSED IN PLACENTA, SIGNAL = 0.37; EXPRESSED IN LUNG, SIGNAL = 0.5; SWISSPROT HIT: P57350, EVALUE 2.50e+00
ttggaacatcctaaggcaaagtaagaataagtactaagtccaaataaccgtgattcatgactctgaaaggacaagagaataggaagaacaaagtcatgctttgaattaattgcttttgtgggatctcagcagctggatgagtgtgctacctggctcttttaaagtggaaaatgacaaccacaagaaaattatccttaatttgcttatgagaagacatgaaattgcagattgaaaatggtgcttttgaatttggtgaggttacaaggaacgtcaggatgatgctaaagacagagaaaatagagaaaggggcaggaagaaaccaactgtcatctagctaaaatcacgtaattttgtaactgaaaaatgctttagaacatatcaacttcaatgcctttattttgcaaatgacagagctgagttcaagactctaatctgattccccagactcccggttcactggcctatagtcactctatcattttcctttctttcttgttctggggtttttgcaggtgccttgtgcaagacgcttagaaatcgttgctggaggatgggttttccaaaacctggctctcaatc

SEQ ID NO: 1530 - DNA, 570 bp, Homo sapiens
  MAP TO CHR22_70.0; EXPRESSED IN PLACENTA, SIGNAL = 0.35; EXPRESSED IN BRAIN, SIGNAL = 0.38; NT HIT: AF323957.1, EVALUE 1.40e-01; EST_HUMAN HIT: AW365954.1, EVALUE 8.00e-01; SWISSPROT HIT: P24258, EVALUE 1.10e+00
aagaagtttccaagagaggcgctttccctgattctcagacagaacacacgtgtagttatttagttgagttagaagatggggtctgtccttcttgcacacactccggatcctggggtgttgtccacatgtagactctcccactcctgcttgatcaaacaccagcaccccgtcgttgggggctggacattgaggggaaatggccttaggttctcgcacagatccgtccactgtcctaggagctgtggagtctttgcgagggtacgggagctccccgtcaagcagacgttgttgtggactcactggagactcggggcctcccagggcctgaggctgcggctccccaaggccgtcctcagcttcccatcgatcccattcgtggagcacagtgggtgtttgatgacaaatcacaacttctgcacccctgtggatgtgttcagaggatccagaactctgtcctcctgctccaggttgtggccagcagtctgggctccctagaccagcagctggcaggaatgccagccctgccactctccagcctcaggaatgacctgaccttagaacccagggctt

SEQ ID NO: 1531 - DNA, 528 bp, Homo sapiens
  MAP TO AL136162.4; EXPRESSED IN LUNG, SIGNAL = 7.4; EXPRESSED IN ADULT LIVER, SIGNAL = 6.6; EXPRESSED IN HELA, SIGNAL = 3.6; EXPRESSED IN PLACENTA, SIGNAL = 7.4; EXPRESSED IN BONE MARROW, SIGNAL = 7.2; EXPRESSED IN BRAIN, SIGNAL = 6.7; EXPRESSED IN FETAL LIVER, SIGNAL = 6.7; EXPRESSED IN HEART, SIGNAL = 5.4; NT HIT: gi13242399, EVALUE 2.00e+00; EST_HUMAN HIT: AW884256.1, EVALUE 1.00e-58
cacacactccacatcccaaggtaagcaagtagggaaattcctatatgccagagtgtgctttatctaagttacatggaacatgacaggatgttagagaggaaattatacccactcaagcaccacccactgaataaaaataacagaattagtaaacatctccctctttcatctactttccaaaaacgcttcaagggtccaccactaccacgaaagtaagtttcacagccacccttggaaatttacaaaaaaaaaaaaaaaaaaaaaaaatcactacatactcccaagtaaaacagattatcatgtacttccttaaaattcaagagaattttgcattcaacgccctgtctgtctgaaagggtggctcccactaactctcaggtccgggtcctctccgcaggatcagcagcaccgagcttaatagtctggagctatttattaagtaaaaggtcctcccaggtaaatctaaaagtagcatacaacaaaaccaatgtcttgtaatgtaagtccagggcaccgaagttattctca

SEQ ID NO: 1532 - DNA, 575 bp, Homo sapiens
  MAP TO AL136140.2; EXPRESSED IN BONE MARROW, SIGNAL = 1.3; EXPRESSED IN BRAIN, SIGNAL = 1.2; EXPRESSED IN HELA, SIGNAL = 0.97; EXPRESSED IN HEART, SIGNAL = 1.2; EXPRESSED IN FETAL LIVER, SIGNAL = 1.3; EXPRESSED IN PLACENTA, SIGNAL = 1.6; EXPRESSED IN LUNG, SIGNAL = 1.3; SWISSPROT HIT: Q15942, EVALUE 1.50e-02; NT HIT: gi14731327, EVALUE 1.40e-01; EST_HUMAN HIT: BE706684.1, EVALUE 2.00e-01
ttaggaccccatggtcagagcacaggtagcagaaaagcacacactgggccaggccgagggggcacagccaggctgacagggcctggaagggagataccaccgccaagaaggtcccgatacctgcacgtgcctcctccacagcccagacgcttatctaaaatatcttttaggacaagaaccaaacccctaagcctggtgagccgaggacctggcggtgtctggctggccggggtgggggctatgtaggcagaagcagatgctggtggaagttcacccaggccccctttgccaggtggccagggacagcatcggccacttccacagggggccatgaaatggtgtcagcttctgacagatgctggatggacattcagcctaagcatggaagccaaaatgaaagaattcgccaggtcctcaattcattgggtaaaatcagctcttgtagcagccaggcagctggcaggctagatgctgtgctcagggctactattacagagagaagccccagccctccagggcctgtggaagaaagcaaccagcccagcagcagacaggcctttctgcaagtcactgca

SEQ ID NO: 1533 - DNA, 500 bp, Homo sapiens
  MAP TO AL121836.9; EXPRESSED IN BRAIN, SIGNAL = 0.5; EXPRESSED IN PLACENTA, SIGNAL = 0.37; SWISSPROT HIT: Q09796, EVALUE 6.00e+00; NT HIT: AL163203.2, EVALUE 7.40e+00; EST_HUMAN HIT: AA398241.1, EVALUE 1.80e-01
  unsure 349
agcgtggtaaaatggtttgccatgcagattgagaacaaactacactgtcttcacaggtggtacacaaaaatcacaagacaagtcaaagggatggccattagttcaaaaaatattagagcagatactgtgccctgaccactgtgctagttgtcagtacaatgatgaacaaaacagacattgaaaatctgatcaggaatatccatatttccaaattcctccatagtctatggccttctgatgcctgctgtcatggaaaagtgactacactgaccagcactgaggtacattttacttgcagtttttaaaacccatttgatattcacattttaaaaaaattgctacattttangactaaataaatcctaactaatacagatgtgtaacttttttcttacgacttttaaggatagaatgttttattatgcaatttatttgtttcttattgttataaatgattatattatttggcccccttattcctgtccccagtcattaggaca

SEQ ID NO: 1534 - DNA, 544 bp, Homo sapiens
  MAP TO AC018464.4; EXPRESSED IN HELA, SIGNAL = 0.65; EXPRESSED IN BRAIN, SIGNAL = 0.63; EXPRESSED IN PLACENTA, SIGNAL = 0.53; EXPRESSED IN LUNG, SIGNAL = 0.49; EXPRESSED IN FETAL LIVER, SIGNAL = 0.55; EST_HUMAN HIT: AI752674.1, EVALUE 8.00e-75; SWISSPROT HIT: P13299, EVALUE 6.70e+00; NT HIT: gi11466048, EVALUE 8.10e+00
tttcttaccagcatgtctttggattattaactgataactcatatatacagtatctgcgtatatgttgtcaatttttccagcttcacaaatctgttatcattcatttatttattaaaaataattaaaatgatgcatccctttacataaaggaacttttatttaaacatttttatttttatttaaatgtatttatttaaatgtgtaaacatttatttaaacattttaaatgtttaaaattttatggttttactttataattttgcttgtatttatctttaaataatttcagattgtgctaaaacttatttcaagagtctgacatgtttcagtgtaaacttaattcatttatcactttgtttttagtgggagattttgataagatctggcgagaacactgtgaggatgaagaaactctttgtgaatatgccgttgcaatgaaaaatttggcagataatcattgggcaaaaacttgtgagggcgaaggtcgtattgaatggtgttgtaggtaagtacttttatgaattaacgtttttggtttcaaatg

SEQ ID NO: 1535 - DNA, 563 bp, Homo sapiens
  MAP TO CHR22_102.0; EXPRESSED IN BRAIN, SIGNAL = 0.89; EXPRESSED IN FETAL LIVER, SIGNAL = 0.94; EXPRESSED IN BONE MARROW, SIGNAL = 0.77; EXPRESSED IN LUNG, SIGNAL = 0.81; EXPRESSED IN PLACENTA, SIGNAL =   1; EST_HUMAN HIT: H83758.1, EVALUE 5.10e-02; SWISSPROT HIT: P16379, EVALUE 3.10e+00
gtgaggagccctgagtcttgacccacaggagagggggtgaccccagcagccctttagagacccccttgccctttcagggtgctgaaggtttcctgcggtttgtgggcaggcctctgacaaggtcctgatgcaggtcacagtcagcttgtttggacttcgctgccgccaccttcgggggtctcatgtatctgctacctggacaaatggccttgcgcatgccgtcttgccagcgttggggacccagtggtggttgtgatgaagactgggtagtgagggtctgtattaacgaattcatgcatagctgagacaaaagagtggaagttactttttatgggatgccactgggggaccctggaatcccagctcagtagtgacccccattcagccatgagcaagatctcctgcccccatcattcctggactttcccaggagtcgctggccagtgtctgcctcaggtatgactgtgtgcaagcttctttgtctctgggtcttggaagcttaggcctgggtggcatcaaactcattgcctccttctcccaagagccctttatcagaacaccca

SEQ ID NO: 1536 - DNA, 587 bp, Homo sapiens
  MAP TO AL136381.1; EXPRESSED IN BONE MARROW, SIGNAL = 1.5; EXPRESSED IN PLACENTA, SIGNAL = 0.95; EXPRESSED IN HELA, SIGNAL = 2.8; EXPRESSED IN BRAIN, SIGNAL = 1.4; EXPRESSED IN FETAL LIVER, SIGNAL = 1.7; EXPRESSED IN HEART, SIGNAL = 1.3; NT HIT: AL163210.2, EVALUE 3.00e-12; EST_HUMAN HIT: BG537992.1, EVALUE 6.00e-79; SWISSPROT HIT: P52166, EVALUE 2.50e+00
aagtgccacacaatatccaccaaaaagaatgaaagatacccaagtaagatacactactgtgaaatttcagaatcccggggaaaaaaagataaaatcttaaaagtttttagagatctagcagatctaacagatcatgattaaatattaaaaatcaagggagacacagaattctcgactgtaatactgaggctaaataataattacacaactcaaaattaatgaaagtaatttccaacctattaggttggtacaaaagttatcacagtttttgcaatcaaaagtaatggcaaaaccgctattacttttgcaccaacctaaaagaattctatactccaagtatgatagtagaatatacatattttcagacatatatcatctctaaaactttatttcattcacccttttctcagcatgaaaatgaaggatatgattcaccagcatgaggaggtaaagcaagaagatggagtgatccaagactcaagtgatccaatgtagaagagagttctcaagatgatagtaaaacaaagtctcaagatgaaagctgtgtagcagctatataaattggagcagaaagatgtaaggcccca

SEQ ID NO: 1537 - DNA, 532 bp, Homo sapiens
  MAP TO CHR22_4.0; EXPRESSED IN BONE MARROW, SIGNAL = 0.87; EXPRESSED IN LUNG, SIGNAL = 0.99; EXPRESSED IN PLACENTA, SIGNAL = 1.2; EXPRESSED IN BRAIN, SIGNAL = 1.1; EXPRESSED IN HELA, SIGNAL = 0.56; EXPRESSED IN FETAL LIVER, SIGNAL = 1.5; NT HIT: gi12545411, EVALUE 5.10e-01; EST_HUMAN HIT: AI887040.1, EVALUE 1.20e-02
cacggatttacagcgtacaggatctcagataagttgatctttaaaataaagttttatgccatgtcttataattcttttccaggttaaagccaattcacaaggagactggtcaagagaaataagagaattacccttacttaatgcaatgccactacatagttggctcatactctatagcaggagcagtcacagagaagccatgtccttaaagggtcatctacagagtgtcacagcccccatgggcataactatgaaaccagcagaaatgtaagtagagcagaaattcccatttgaaaatcgattgttagcaatcttaaagtataataactaaaatattaaattgtaggaattggtcactgtatcaaaaccttagagtttgtaaagtctaatctctagtcaaaaaatattaaaacagactttgtgatatatggtttacggctattaagatacatgttgtagaaggtatgagaattaagaacttgatgtgaatggatgggagaatattaagaattctcacgcatgtttccaaaaa

SEQ ID NO: 1538 - DNA, 580 bp, Homo sapiens
  MAP TO CHR22_163.0; EXPRESSED IN HELA, SIGNAL = 0.5; EXPRESSED IN FETAL LIVER, SIGNAL = 1.1; EXPRESSED IN PLACENTA, SIGNAL = 1.2; EXPRESSED IN ADULT LIVER, SIGNAL = 1.3; EXPRESSED IN LUNG, SIGNAL = 1.1; EXPRESSED IN BONE MARROW, SIGNAL = 0.97; EXPRESSED IN BRAIN, SIGNAL = 1.1; SWISSPROT HIT: P54259, EVALUE 1.10e+00; NT HIT: AF211855.1, EVALUE 9.00e-03; EST_HUMAN HIT: BG286087.1, EVALUE 2.10e-01
gttagtgctctgccccactccttgggcactggaagtcagggggttggagtgtggttcaggtcctcatgacactgtccttggtgctaaggactctggaggagggatgtgcacctagccagggctcagagatttcctgggaggaggaggaattggctgtggagaaagagagacagcagaaggattcttttactgatgtgctggcaagagggcttgtggccaggtgagctaggaggggcccgcagagggcggcatcccaccttcagcatctgcggatgctcactgtggcagacacatatgacagagggaagagccagcaagggaagttactcagtgagcagcagcagatgatgacaattgcaaggggccttatcctggggcctgtcaggaggaggcactggggagactgggctccacgttgaagtcaggcttgggaaactggggcccaggggatgaagcgaatggggcagcagagtcttgagcctcctgcaaagaggcaggggtcaggggtggggggaaatgggcagggcctgggaagcagctctgacatgcatctacttgctgaaatcagaggaaggctccc

SEQ ID NO: 1539 - DNA, 511 bp, Homo sapiens
  MAP TO AL132875.5; EXPRESSED IN HELA, SIGNAL = 2.3; EXPRESSED IN HEART, SIGNAL = 2.3; EXPRESSED IN FETAL LIVER, SIGNAL = 1.6; EXPRESSED IN PLACENTA, SIGNAL = 1.1; EXPRESSED IN BONE MARROW, SIGNAL = 1.9; EXPRESSED IN BRAIN, SIGNAL = 2.1; NT HIT: AF325420.1, EVALUE 3.00e-05; EST_HUMAN HIT: BI031781.1, EVALUE 1.20e-02
ggccttaaatgaggtcagccatataaagtagtatgagtactcaataaatattggttgctagtgtttttgttattattcaaagctgactccgattcaggcacaatcatcaaagaattgacagtatagtaaagataagtaaaaagattagtataataaagtgtaataagtgatgataaatgtctctttacttactgtatgaccttggcaaatgaattaatctcactgcctctgcctccagaacccaatacatgtagcaataatgatggtattgacaatattaacctccacaacaaccttaatgacaacatgaaggcagagatctgatggggtgcactgaaaacagaagaatctcttcattttgaccggagatgtctgtggcttactagaaaaggtaatggctaaaaggtatgccataaataaatattaacaaattcatttgttcattcaacaaacattcactgagtatctatgtatgttgaatttgctgtgtacttcaggtgctatccttgcc

SEQ ID NO: 1540 - DNA, 594 bp, Homo sapiens
  MAP TO CHR22_163.0; EXPRESSED IN PLACENTA, SIGNAL = 0.48; EXPRESSED IN BRAIN, SIGNAL = 0.37; SWISSPROT HIT: P08548, EVALUE 3.00e-20; NT HIT: gi13937343, EVALUE 5.00e-20; EST_HUMAN HIT: AI379748.1, EVALUE 1.00e-18
cagctgggatgttgatagggtttgcactgaatctataaagcaatttggagagaactgtcatcttaataatattgtctccgatctataaatatggaatgtattttatttacatattctttactttcctttaacaatgttttgtaattttcagtataaaaatctggcacttcttttgataaatttattcctaggtattttattctttttgatgctattgtaaatggaattgctttcagaagttccttttcagattgctcatagctagtttatagaaatataactgatttttgtatgttaatcttatatttctgcaaccttataaattcatttattagttctagcagtatgtgtgaatgcacacatgcacaaattccttagaattttctacacacaagattgtatcgtctgtgtacaaagacagttttacttcttccttttcaatcttgatgccttttatttctttttctttctcgattggactgtccagaactctagcacagtgttgactagaagcagtgagagctgacattctcgtgctgtccctgatcttaggaggaaggagttcagtcttttaccattaactgtgctgctggc

SEQ ID NO: 1541 - DNA, 504 bp, Homo sapiens
  MAP TO CHR22_182.0; EXPRESSED IN BONE MARROW, SIGNAL =  50; EXPRESSED IN BRAIN, SIGNAL = 0.63; EXPRESSED IN HELA, SIGNAL = 0.62; EXPRESSED IN FETAL LIVER, SIGNAL = 0.82; EXPRESSED IN PLACENTA, SIGNAL = 0.77; EST_HUMAN HIT: AA398569.1, EVALUE 0.00e+00; SWISSPROT HIT: P15814, EVALUE 1.00e-42; NT HIT: gi14777722, EVALUE 0.00e+00
gagcaggatttctggctgacaaagatatttattgagggtttactgggtacagcgagaagggctgaatggcttgggatgcagagagagacccctcccctgggatcctgcagctccaggcccctgtgggtggggtgggggctggaacctatgaacattctgcaggggccactgacttctccacggtgctcccttcttgcataacctggcagctgtagcttctgcgggacctccactgctcgggcgtcaggctcaggtagctgctggccacgtacttgttgttgctctgtttggagggcgtggtcttctccacgctctgggtgatgagggtaccatctgccttccaggtcaccatcaagattcccggataaagttattcatgagacacaccagtgtggccttgttggcttggggctcctcacaggacggcaggaacagaatgaccgacggggtagtcttgggctgacctgtgtggacagaggagggggtgagagatggcagagggag

SEQ ID NO: 1542 - DNA, 574 bp, Homo sapiens
  MAP TO AC017044.2; EXPRESSED IN BRAIN, SIGNAL = 0.48; EXPRESSED IN LUNG, SIGNAL = 0.75; EXPRESSED IN ADULT LIVER, SIGNAL = 0.62; EXPRESSED IN FETAL LIVER, SIGNAL = 0.58; EXPRESSED IN BONE MARROW, SIGNAL = 0.52; SWISSPROT HIT: P51234, EVALUE 6.30e-01; NT HIT: AE004011.1, EVALUE 5.50e-01
tcattctgcaagaaactgccaaatctatgctctggatgaagaaattatctagatatcttaggcagaagtaaaatcatattatacatgactccacctcctctttccaaccccactgaacctggaatgtaagtttaacccaaggaaaatcaatacacctgatttccagtgacttctgagatgatttccaatgattgttctgccccacactggatttcctctcaggaatatgaggagatttttgagatggaaagtctttctgtggtcacaggagtaaacacaaaagagggacagacaccaactgatgaaacagggtgcaatgacaaacagatcgaggactgctataagaaaggattcctcactcagtagaaacaggaacaggatgaggtacattcaaattctaaaaaacaagattctgattttttctattaagttaatcaaaaccaaaaactaaaatgattcaaagaataaatacatcataggacagaagaaccaagtaaaaacatgtttctccaacataaccaggcaaatttaaataaagtatctctatgctaatagtatttcaatgtggcgggtg

SEQ ID NO: 1543 - DNA, 548 bp, Homo sapiens
  MAP TO AL137846.1; EXPRESSED IN BRAIN, SIGNAL = 0.95; EXPRESSED IN LUNG, SIGNAL = 1.5; EXPRESSED IN ADULT LIVER, SIGNAL = 2.8; EXPRESSED IN FETAL LIVER, SIGNAL = 1.5; EXPRESSED IN BONE MARROW, SIGNAL = 1.2; EXPRESSED IN PLACENTA, SIGNAL = 1.4; EST_HUMAN HIT: D56024.1, EVALUE 8.00e-75; SWISSPROT HIT: P40306, EVALUE 4.00e-06; NT HIT: gi14744287, EVALUE 5.00e-75
ttgggtttgtgtttatggggaggagagagtagtttcacaagacaacttgatagttcctccagctataactttcttaccgtgaacaaaaaagtttctcttatccagtaatatccctatgctccaggaaatgactcaactggtgacatgtgatttactcatgaaaaaaatcaggccccagaaattcaaatgcaccatcaaaaaccatttaaaatggctctttaatataacaactgatttccggaacaaaatgtgtatttctgaatgtgtttttgctactttccaggcttctcttggctgaaaaaatctaagatatgagaagaagatactagtaggaatccccattctggaaacttacctgaaaagcatctgcttcagcatccgattggctgtcacaactctgggaagacggccagtggagagggagtggagctccaggttggaagaaatgagctgggttgtcatgtctgtgtctgcagctgtcccagcaccacaacaactgaaaaatccaattagaaacttagctgaaatccaattaccagagggctcaa

SEQ ID NO: 1544 - DNA, 543 bp, Homo sapiens
  MAP TO AL160313.1; EXPRESSED IN PLACENTA, SIGNAL = 0.99; EXPRESSED IN LUNG, SIGNAL = 0.83; EXPRESSED IN HELA, SIGNAL = 0.67; EXPRESSED IN BRAIN, SIGNAL =   1; EXPRESSED IN ADULT LIVER, SIGNAL = 0.7; NT HIT: M12379.1, EVALUE 5.20e-01; SWISSPROT HIT: P21580, EVALUE 2.30e+00
catgccactgacttgacctgtagccttggacaagccggcggacaccctagagtcccaaggtcatcctgctggtaggacaggtggggacaggctgacctttaaggcccacttgtcccatcccatgaggctctgagggcccacgccatcctccctgttgagaccaggagttggcttggggcagttctcagcagctgggctgtcacctctcacctgtgggcgtgattacacagagggaggctccctagctccctgtcccgcccgcctcacttccagcaaggccaccctctgcaggactgaggcctgtttgttctcatcagtaaccaaacattgacctcatcctggcactggctctcccctgaccttcaagtctgttcttgctcatacctttcttaaagaaacacagtcttgtgggcaggcaccagacctgaggcccccatgggcctatgtccatctgtgcccacctgtgctgccagaagggtccttggaagctctcaactcccttgtacagagaggtgctctggggcccagagagggaaagaaacc

SEQ ID NO: 1545 - DNA, 512 bp, Homo sapiens
  MAP TO CHR22_165.0; EXPRESSED IN FETAL LIVER, SIGNAL = 0.59; EXPRESSED IN BONE MARROW, SIGNAL = 0.56; EXPRESSED IN BRAIN, SIGNAL = 0.59; EXPRESSED IN PLACENTA, SIGNAL = 0.58; EXPRESSED IN ADULT LIVER, SIGNAL = 0.6; NT HIT: gi9630747, EVALUE 1.90e+00; EST_HUMAN HIT: AA679504.1, EVALUE 1.00e-116; SWISSPROT HIT: Q06577, EVALUE 6.00e-24
cttaccacggggatgttcacctggcatgtaccacttcaatgttaccacggggatgttcacctggcatgtaccacttcaatctttccacagggatgttcacctgccatgtactacttcaatcttaccacggggatgatgttcacctggcatgtaccacttcaatcttaccgtgaggatgttcacctggcacgtaccactttggcttcaacgttgagccgttccaacatgctgtaaaattagggctcatgaagaacagtacccaagtcctcgagaaggaagccaacgccgaggacaattataggcatgtgtttggaactgtcgtcttgcagctgatgatgggagatagggtctggctaaaatcaaagctagaagcaaaagagaatgagaaagggttgattcaaagtgtgttctgtggttatttgttctatgcaatgatactggctaagagtaaccacacacttcaattcctcaagtgggtctaaatttcagagcgaaactcccccttctccagt

SEQ ID NO: 1546 - DNA, 593 bp, Homo sapiens
  MAP TO AL133553.2; EXPRESSED IN BONE MARROW, SIGNAL = 3.6; EXPRESSED IN HEART, SIGNAL = 2.5; EXPRESSED IN BRAIN, SIGNAL = 3.2; EXPRESSED IN PLACENTA, SIGNAL = 2.6; EXPRESSED IN HELA, SIGNAL = 2.7; SWISSPROT HIT: Q10599, EVALUE 4.40e+00; NT HIT: gi15791399, EVALUE 5.70e-01; EST_HUMAN HIT: AI375687.1, EVALUE 2.10e-01
cacttgacttccaaggctcccctgagggctgtattcgttcccatccagctagaaacagaaaagaacatggaagatatcatggaagcttttctggccagtgctggaagtggcatatatcacttcttcccttattcaattggctagagtcagacacatggaaacgcttagctacaagagtgactaggaatggcagtcttcttttcagaaaggccttatttaatgatcagtgagtagtctttggtatatcaacatatatagattgtgttgaatatacagaaatagatggcaaacagtgatttggtaacatgcaatctaatattttccccaaagatttttgttctctgatcattcctttcaaaattgcttgcacattcttaggaattatttttatagccatttagcagtttatttcttccactgagtctttcccaacaggaactatttcttaaaaatcagggagtactcagtcttcatcaggaagatgtggaatggggttgttcttacccactgcttggcagagaagacattccgcttaactgtgctatctgcttgccaaggttaccacatcaggaaggtcagagagcctgttccag

SEQ ID NO: 1547 - DNA, 564 bp, Homo sapiens
  MAP TO AL133543.2; EXPRESSED IN PLACENTA, SIGNAL = 0.91; EXPRESSED IN BRAIN, SIGNAL = 0.79; EXPRESSED IN HELA, SIGNAL = 0.78; EXPRESSED IN FETAL LIVER, SIGNAL = 0.86; SWISSPROT HIT: P15924, EVALUE 3.00e-42; NT HIT: J05211.1, EVALUE 0.00e+00; EST_HUMAN HIT: AI951766.1, EVALUE 0.00e+00
gcatttccagaaggcgatagaagataaaagcagaagcttaaatgaaagcaaaatagaaattgagaggctgcagtctctcacagagaacctgaccaaggagcacttgatgttagaagaagaactgcggaacctgaggctggagtacgatgacctgaggagaggacgaagcgaagcggacagtgataaaaatgcaaccatcttggaactaaggagccagctgcagatcagcaacaaccggaccctggaactgcaggggctgattaatgatttacagagagagagggaaaatttgagacaggaaattgagaaattccaaaagcaggctttagaggtattcacaaatacttgatcacagcttcactgtttctcaaattattcatcacattattatctcatctgaactgtgctctttctgcttaaatagatgcttatagaaaatctaatttttctttttattgctctactacttcctgtcataatccaggtaactgctttaaaataatttcaatgctgtgtgccctgctgttctttaattgcatcaaatgctgatctctgggtagcctg

SEQ ID NO: 1548 - DNA, 572 bp, Homo sapiens
  MAP TO AC013614.4; EXPRESSED IN BONE MARROW, SIGNAL = 1.1; EXPRESSED IN PLACENTA, SIGNAL = 1.7; EXPRESSED IN BRAIN, SIGNAL = 1.5; EXPRESSED IN LUNG, SIGNAL = 1.5; EXPRESSED IN ADULT LIVER, SIGNAL = 1.5; EXPRESSED IN FETAL LIVER, SIGNAL = 1.3; SWISSPROT HIT: Q04727, EVALUE 4.20e+00; NT HIT: AJ291762.1, EVALUE 3.50e-02; EST_HUMAN HIT: BG396192.1, EVALUE 2.00e-01
ggatagcaggggtgtttgtgtatacaaagtgtcagtgtaagcatatgtacgtgtgtgtgtgtgtgtgtgtgtgtgtgtggataaattctccagctattagagttagggaagcttagacacacatcagcacaatccatcaatttccagacattatctctcatgataatttcctgccaaatctttgagttgcaattaagaaagtagataatttgaaacattttcctctgcatgttgagatggattataatcctaatttgataaagactcttaatgactcattagccacccttggcttctcctcaggtcagccaacttcccaggcgctggaggcagctggcagcagaaaggcagtgacgctcaggtcattacatgttattgcttcagcagcactaaaagaaaaagacacaacaaagacacaaccgcaccacagccctggaattctcttttcttcagctcctggatttgggcatcaattttttttttcttggctttgaacaaagcctctaatttcccgacaaccaaaatgctgtctccagggtatgtgcaccctgccagagtggcagacaatgcat

SEQ ID NO: 1549 - DNA, 593 bp, Homo sapiens
  MAP TO AL138842.2; EXPRESSED IN PLACENTA, SIGNAL = 7.5; EXPRESSED IN BONE MARROW, SIGNAL = 5.9; EXPRESSED IN BRAIN, SIGNAL = 5.2; EXPRESSED IN LUNG, SIGNAL = 6.9; EXPRESSED IN ADULT LIVER, SIGNAL = 7.2; EXPRESSED IN HEART, SIGNAL = 5.9; EXPRESSED IN FETAL LIVER, SIGNAL =   6; SWISSPROT HIT: P76552, EVALUE 5.80e+00; NT HIT: J00318.1, EVALUE 1.00e-108; EST_HUMAN HIT: BI762786.1, EVALUE 1.00e-108
gctccgcaatacaggctaaggaccagcttctttggaagagaacagatgagggaagcaggagagaaaaaagggagaggcagacgtcacttccccttgccggctccggcagcgggttggtcggctgagcggcagaaaggcagacggggactgggaaaggcactgtcggtgacatcacggatagggcgacttctatgtagatgagccagcgcaggggctgctgcttcgccacatgctgcttcgccacgaaggagttcccgtgccgtgggagcgggttcaggaccgctggtcggacctgagagtcccagctgtgtgtcagggctaggagggctgggggggagggggggtgtgcgcggggcaagtgaccgtgcgtgtaaagggtgaagcgtgtgaggctgccggcggggcggaggtgcaataactcatacttacctggcaggagagataccctggtcacgaaggtggtttttccagagcgagtcttatccattgcactccggatctgctgacccctgcagtttccccaaatgtgggaaacttgactgtataatttgtggcagtggtagactgcattcgcgctttcccctgtatttttg

SEQ ID NO: 1550 - DNA, 575 bp, Homo sapiens
  MAP TO AC019325.3; EXPRESSED IN HELA, SIGNAL = 0.75; EXPRESSED IN FETAL LIVER, SIGNAL = 1.5; EXPRESSED IN BONE MARROW, SIGNAL = 1.3; EXPRESSED IN PLACENTA, SIGNAL = 1.6; EXPRESSED IN BRAIN, SIGNAL = 1.2; EXPRESSED IN LUNG, SIGNAL = 1.5; EXPRESSED IN ADULT LIVER, SIGNAL = 1.3; EST_HUMAN HIT: BI828821.1, EVALUE 4.00e-89; SWISSPROT HIT: P21851, EVALUE 7.00e-26; NT HIT: gi14785746, EVALUE 3.00e-89
tgagaccctgtctccctgtctcaaaaaacaaaacaaaagaacatctgatgaatttttataaaggttttaaggtctaggtcttaaaaaataattgaagggaaatttaagtcattaaaatcttctgacttaaaacctattcattctcttgactaaaagcttttacagtttggtggtttggtttagggtcccttgtttgtggttttgcctttagccttcactgttaaattagttcttagttttgccctcaataaccatagttcattttttttcatcaggtatgaaagtatcatcgccactctgtgtgagaacttagactcgctggatgagccagatgctcgagcagctatgatttggattgtgggagaatatgctgaaagaattgacaatgcagatgagttactagaaagcttcctggagggttttcacgatgaaagcacccaggtaagttcttgtctcttgtctatcctagtagttttagatgtctttggggagatttcagagaaagcaaaggttataggcagtttcttctgtgtctgtatttacatatagtatgttcatttttctcccaacaggga

SEQ ID NO: 1551 - DNA, 582 bp, Homo sapiens
  MAP TO AL137843.1; EXPRESSED IN BRAIN, SIGNAL = 2.6; EXPRESSED IN FETAL LIVER, SIGNAL = 4.3; EXPRESSED IN PLACENTA, SIGNAL = 5.6; EXPRESSED IN BONE MARROW, SIGNAL = 3.7; EXPRESSED IN LUNG, SIGNAL = 6.3; EXPRESSED IN ADULT LIVER, SIGNAL = 6.4; EST_HUMAN HIT: BG684455.1, EVALUE 0.00e+00; SWISSPROT HIT: P12956, EVALUE 9.00e-85; NT HIT: S38729.1, EVALUE 0.00e+00
ttgctgatgtgggtcttcagctcctcttctgaatactccgcttgggccttttgcttctggaaccttcattattgcattttctcttggtaattttcccttcaggattataatctggtgagtagacaagttccttaaactcattcaccatggagcccagtcttttattcatttcttcaaccttgggtaatataaggtccactgcttgttcctccatcaaatacaagatcaagggctccaggttcccgaagtgctgctgcagcacggggttctcaaagctgtcacttctgtatgtgaagcagagcttctgaatgatagccttcatgttgtccacctgctctggagttgccatgactttttcagtaaagggcaccttccttttatcatcagcaaagggtaaaaagaccagctggaaacctggagtagtcacctgaattttctggtcatccaactcctcttcctgtgacaccaaagccaccaaataaggggggatgttcctgcggggtgtgtatctgcacaatgctatgaccaccttctccagacacttaatgagcagagcactgaacagggttgaactcccattca

SEQ ID NO: 1552 - DNA, 560 bp, Homo sapiens
  MAP TO CHR22_184_1.0; EXPRESSED IN HELA, SIGNAL = 0.64; EXPRESSED IN FETAL LIVER, SIGNAL = 0.97; EXPRESSED IN LUNG, SIGNAL = 0.98; EXPRESSED IN PLACENTA, SIGNAL =   1; EXPRESSED IN BONE MARROW, SIGNAL = 1.1; EXPRESSED IN BRAIN, SIGNAL = 0.95; SWISSPROT HIT: P54817, EVALUE 5.30e+00
acacaggctgtctaccaggcaggatttacatactcagacttacaccttctcttctcctccattcaagacagggggggcatgcagaagccttgatctccgagtggtctgtggccgtgaggtggagagatacaactgctttgtcgaggacccaagggaaaaccgagccgtggctgtctgagtcttatcaaaggaaaaacggtaacagtacttttattttcttttaatgagtaatgtaggggaaaaaacttgtaagtaagaattcgaaactaaatttgccaaatatgctgagagttgatccttggagaaactttatctttactgcatagtcaaacacatcaactttgggggcacctggcaattactatgtggcatagattcaatttgttcttgtgtagacaatattatctggcacagggaacaggaaacctccacacatattttagtaaacacaatcccagatcgtgaggaagggtttctgggggctcctcatcgacacagccagcatcctgttttgctttgcagccagtgaagaggcagggcccatccaaatctcccagttg

SEQ ID NO: 1553 - DNA, 518 bp, Homo sapiens
  MAP TO AL137799.2; EXPRESSED IN FETAL LIVER, SIGNAL = 3.5; EXPRESSED IN PLACENTA, SIGNAL = 3.9; EXPRESSED IN LUNG, SIGNAL = 4.3; EXPRESSED IN BONE MARROW, SIGNAL = 3.9; EXPRESSED IN HEART, SIGNAL = 2.9; EXPRESSED IN ADULT LIVER, SIGNAL = 4.3; EXPRESSED IN BRAIN, SIGNAL = 4.3; SWISSPROT HIT: O18835, EVALUE 6.30e+00; NT HIT: gi16159294, EVALUE 0.00e+00; EST_HUMAN HIT: BI754903.1, EVALUE 0.00e+00
ccctctcacacttctctggcaggcaggcaggatgcaaaagcaggagtgggcactagctggatccaagtttgcccctaggctctgaggtgggggtcaggtagtagggggtagagtcaagactgggaaaaccaataagcctgtcctctctcttttaggctgccacagagcccaaattccctgctgttcgactggctttgcagaattttgacatgacttacagtgtgcagtttggagatctttggccatcaatccgtgtcagtctcctctcagagcagaagtatggtgcactggtcaataactttgctgcctgggatcatgtaagtgctaagctggagcagctgagtgccaaggattttgtgaatgaagccatctcccactgggaactgcagtctgagggtggccaatctgcagccccatcccctgcctcctgggcctgcagtccgaaccttcgatgcttcacttttgacagaggggatatcagtcgcttccctcctgccaggtaggatctggagccatga

SEQ ID NO: 1554 - DNA, 532 bp, Homo sapiens
  MAP TO AL133408.3; EXPRESSED IN HELA, SIGNAL = 1.1; EXPRESSED IN BRAIN, SIGNAL = 0.82; EXPRESSED IN FETAL LIVER, SIGNAL = 0.94; EXPRESSED IN PLACENTA, SIGNAL = 0.48; SWISSPROT HIT: Q56592, EVALUE 3.80e+00; NT HIT: AJ400877.1, EVALUE 1.00e-13; EST_HUMAN HIT: AW516674.1, EVALUE 2.00e-13
caggatttctgttcatcctgcagtcaatgtcaaggagatgagaatttatgaatatgatgattcagatgatttcagatttgagactaattcccacataaatcattctcccctctcatcttttgtaggtaaaagtaagccatagaatagtttgtaggatcattagataacaagttaggtagggaactattttgtatttaatgatttccctgttaaaattcacttttcaactatttacttaagtattcaaataataaatcaactatccatttagaatgatcaggaaggatcaatttagagatttttttattgtaaattgacaaattgtcattacgattacaatatttatgaggtacaaagtgatgttatatgtatacaaagtagaattattaaaccaagctaattgacattcttcacttcacataattacacttttttgtggtgagcacgtttgaaatttgctgtcttagcaattttgaagtgtagactacactgttattaactgtagtcattatgctgtgcagtgtatcccaaa

SEQ ID NO: 1555 - DNA, 512 bp, Homo sapiens
  MAP TO AL138783.2; EXPRESSED IN BRAIN, SIGNAL = 0.62; EXPRESSED IN PLACENTA, SIGNAL = 0.81; EXPRESSED IN LUNG, SIGNAL = 0.61; EXPRESSED IN FETAL LIVER, SIGNAL = 0.71; EXPRESSED IN BONE MARROW, SIGNAL = 0.67; SWISSPROT HIT: Q15431, EVALUE 3.00e-28; NT HIT: gi14720251, EVALUE 1.00e-100; EST_HUMAN HIT: AI820982.1, EVALUE 1.80e-01
aacagtatggctggtttggctaggaaggctccatggaggagctggaactataggtgggatttggagaacagtgaattgaaataagagtagtgggtgggcattccagggtaggaaggaggaataataggaaaatatgagggtgggaaaggggcagtgaatgtatagaagcagataagttcagcttttttggttaaggcctttggatcattgctcttgttttatactttatttcatttagagtactcaaaaggctttagaggaagatttacagatagcaacaaaaacaatttgtcagctaactgaagaaaaagaaactcaaatggaagaatctaataaagctagagctgctcattcgtttgtggttactgaatttgaaactactgtctgcagcttggaagaattattgagaacagaacagcaaaggtaaaatatttattatttttaatacacaaaataagtgaataaaaacaatttacttttaatattcaatgccattttctttgcattgccaa

SEQ ID NO: 1556 - DNA, 550 bp, Homo sapiens
  MAP TO CHR22_161.0; EXPRESSED IN BONE MARROW, SIGNAL = 0.5; EXPRESSED IN BRAIN, SIGNAL = 0.46; EXPRESSED IN LUNG, SIGNAL = 0.51; EXPRESSED IN ADULT LIVER, SIGNAL = 0.45; EXPRESSED IN FETAL LIVER, SIGNAL = 0.45; EXPRESSED IN PLACENTA, SIGNAL = 0.55; SWISSPROT HIT: P42695, EVALUE 5.20e+00; NT HIT: AL163207.2, EVALUE 2.00e-03
caatctggagacaccatttttgaagtctgtttttcttttagctttcattaagcacagagaatttagaattttttatttttcacttgtaatagcaatgacaggaaaattggcagaggaagacatttcaccattattaaatgaatcagaagatgaatgcagacagattgagagcagctctctagatgctaatgatgatggtgaaattgatcatatcagcgaattcgcagactgtgcaccttcagtggaagatagcttagatgaattttcttaaaatcaagcatcaacgagtgaatagtattctaaggatatgaagggaatatggtttctcatccaattagtcattcaaaaggatgggctttatcacacaatattttatgacaagaatgtggaccatccccttttgttaaacagataagtgacagtattctttcatcttttaagacgtttatggaccaaatttggtacacttagtaaatggataattgctaaaagcaatcaagagataattggaaggaaatagaggcagagatgaaaatacccattggcttgg

SEQ ID NO: 1557 - DNA, 511 bp, Homo sapiens
  MAP TO AL137797.1; EXPRESSED IN BONE MARROW, SIGNAL = 1.1; EXPRESSED IN BRAIN, SIGNAL = 1.7; EXPRESSED IN PLACENTA, SIGNAL =   2; EXPRESSED IN LUNG, SIGNAL = 2.2; EXPRESSED IN ADULT LIVER, SIGNAL = 2.1; SWISSPROT HIT: O00519, EVALUE 1.00e-08; NT HIT: AB027132.1, EVALUE 5.00e-04; EST_HUMAN HIT: BI756183.1, EVALUE 2.00e-78
gctaatcctgcccctaatcctgccacctcgatttcctcacttgtacacagtcaatagtaatccacacctcacagagtggagaggattcaagggatcagcaatgtgatgaggccagcacagtgcctggcactgagtgaggcttctgcaatgcagattccgtccttccctccaccctggggagagcatgaggccattgtcaagatgacccctgacacaaattggctagtccgagcccagagcgctgaagttcccagaaggaccgggagggggcgcccacccacattcttccccacctgagtctgcgctgacgatttcctgggcttatctggatcttcctgcagaaagtcagtcttatgtgaccctgtacaacctcctggactttcccgcgggcgtggtgcctgtcactatcgtgacactacaggacgaggaggaactggccttctacaaggggtgctacggagatagttctgacaaaaatttctcagaggtcagtttccttctccgagcctct

SEQ ID NO: 1558 - DNA, 596 bp, Homo sapiens
  MAP TO AC018586.3; EXPRESSED IN BRAIN, SIGNAL = 1.7; EXPRESSED IN PLACENTA, SIGNAL = 4.3; EXPRESSED IN ADULT LIVER, SIGNAL = 3.5; EXPRESSED IN LUNG, SIGNAL = 3.9; EXPRESSED IN FETAL LIVER, SIGNAL = 2.2; EXPRESSED IN BONE MARROW, SIGNAL = 2.2; EST_HUMAN HIT: BI524093.1, EVALUE 3.00e-71; NT HIT: AL163249.2, EVALUE 4.00e-73; SWISSPROT HIT: P08393, EVALUE 3.90e-01
tttttcccagcactgtttcctaagttgtcagcatagaggtcctacatatattttattaaatttgttcctaagtatattatgttttctggtgcttttgcaaactgaattttttttaaaaaaatggtttatattaatacagaaatacaattcatttttgtatattgaacttaactcttgtgactgttctattcatttattagttctaccagttgctgtgtagatggtgttgagaggtgacagcgtgctggcagccctcgcagccttcgctcgctctcagtgcctcctctgcctgggctcccactatggcagcacttaaggagcccttcagcccaccactgcactgtgggagccccttcttgggctggccgaggccggagccggctccctcagcttgtggggaggtgtagacagagaggcgcaggtgggaaccggggctgcacacggtgcttgcaggccagcacaagttccaggtggacatgggcttggtgggcccaccctcggagcagccagccagccctgctggcctcgggcagtgagggacttagcacctgggccagcagctgctgtgctctacttctcactgggccttagctgtc

SEQ ID NO: 1559 - DNA, 530 bp, Homo sapiens
  MAP TO AL138788.1; EXPRESSED IN BRAIN, SIGNAL = 0.93; EXPRESSED IN PLACENTA, SIGNAL = 1.2; EXPRESSED IN HELA, SIGNAL = 0.68; EXPRESSED IN LUNG, SIGNAL = 1.2; EXPRESSED IN FETAL LIVER, SIGNAL = 0.84; EXPRESSED IN BONE MARROW, SIGNAL = 0.91; EST_HUMAN HIT: AW103198.1, EVALUE 2.00e-81
catcaggaattgtgtgtggctgagtttacttcagtggggacagagcagaaatactctctgatattctgttagaaaaaattgatattgctgattaactcagtcatggctaaacccacaggaaactgagatctctgctcctcttacctcttctgttgttcttcttgatattgttgctttactttagcttcattttgtgttgcttcttttatcttttcctctagctgctgcttctctgaaatacaagtgtctgtgagacagactttatgagcatgttctaatttccgctgcaggtccaaaatcttgaatgaaaaaacatttacaagtaaagcattaagaagagtgtgaccttttttcaaattaggggaataacatataaatagcaaacatagcagtgctaacatattaatctgacctgaagtaaaaagagtagctagatttaattttaaaataaattgtttaatttttgcagtatgtaatgcattcatataattcaatgtgtgtatataaaagaagctacaggccagacatgc

SEQ ID NO: 1560 - DNA, 600 bp, Homo sapiens
  MAP TO AL137793.1; EXPRESSED IN BRAIN, SIGNAL = 0.67; EXPRESSED IN LUNG, SIGNAL = 0.69; EXPRESSED IN FETAL LIVER, SIGNAL = 0.76; SWISSPROT HIT: P41990, EVALUE 1.50e+00; EST_HUMAN HIT: AA337718.1, EVALUE 5.40e-02; NT HIT: AF217621.1, EVALUE 2.30e+00
agagtggtttccacggtgacttcagagccagcaagcctctggcggacatgctgagcttctgtgatgccgagcctggggtggcaggtgttcccatgtccaccccaaccctgtctctcctgccatcctgtcaggtgagcaagaggggctgtagggggaaccccccaggcatctctcttatcactcaggcttcttcgggctgagccgataccaggggctgctcaagcatccacacctgccctgcgcctcaccagcactcaccccaccctgaggctcctcataggaaacagaagggggagatcaacatcagacacaaatgctgcatcagcccagagaatgatgagcttagtgtcaagctgagctcgacttctggggagaaagggaaaaagaaaacccaaaaaacctctgacaaaactgaggcacagaggtcacttggagacctaatgttacttcattaatatttccctaatggaaatattagtactgatgaaaatcccccagggagaggggtggggaaatgggtgctttagttggattctcctggtgtccacacccaggtgggtgtgagagagctgcactgggagttgctcagagggaggacag

SEQ ID NO: 1561 - DNA, 580 bp, Homo sapiens
  MAP TO AC009472.2; EXPRESSED IN FETAL LIVER, SIGNAL = 0.65; EXPRESSED IN PLACENTA, SIGNAL = 1.1; EXPRESSED IN BRAIN, SIGNAL = 0.57; EXPRESSED IN ADULT LIVER, SIGNAL = 0.91; EXPRESSED IN LUNG, SIGNAL = 0.64; NT HIT: U22386.1, EVALUE 1.40e-01; SWISSPROT HIT: Q9UPV9, EVALUE 2.50e+00; EST_HUMAN HIT: BE547276.1, EVALUE 1.30e-02
tgactggcacgaaagtcaagaaaaaatagtgtttttgaacaacactatgtaactagaaatctaagtacgttttctctgcaataaatgcatgtgactgacagaagccagttatgagtatgcaggcatccaaaaaaaatgtaaaatgaaagaccatttcaaataagttacaatgttatgtttctgaaattaagcttctggctaaacatgtttgaggaaacagggattttactctacttctgtctcttaaaactcatggaagaaaactctgtctttaatgaaacaaagaaatggccatgccccgaacaaaactactgaacatttctaccaaaaatgctaacgcctggtctcaggtgggcaaggaggctgaagcccacattacagctcaggcaacgtgtcaatttcccattggctctgcaagacaaactagcatcctttcagggcccccaggtaaggttgcacaggtggtgccccgctaaagcatgcctggcccagagggtgaataaaagaggctgggatagagccccttccatggtttctaaacaaagctaagacaaaccacccagagacacccatctgctca

SEQ ID NO: 1562 - DNA, 585 bp, Homo sapiens
  MAP TO AC016683.4; EXPRESSED IN BRAIN, SIGNAL = 4.9; EXPRESSED IN FETAL LIVER, SIGNAL =   4; EXPRESSED IN HEART, SIGNAL = 4.3; EXPRESSED IN PLACENTA, SIGNAL = 5.2; EXPRESSED IN BONE MARROW, SIGNAL = 4.3; EXPRESSED IN HELA, SIGNAL = 3.9; EXPRESSED IN ADULT LIVER, SIGNAL = 4.5; EXPRESSED IN LUNG, SIGNAL = 4.7; SWISSPROT HIT: P19532, EVALUE 1.10e+00; NT HIT: AE001862.1, EVALUE 5.60e-01; EST_HUMAN HIT: AW070398.1, EVALUE 2.00e-29
ggaggaagtgaagggaggagcattaaggaaatgcccgcaggtggaagcaatcccctataaatgcaggggctcttctccgtgctctttcagtgccaacaaggggccctgggaacagatttaattttctattatcaccctggggatacagcccctgtctcctaagcacactgtgtggaaaccaacacattatggatagcactgaatatgtgtttccaatgagaagtaacacctgcaaactcattaggatgattaagatggctcagatcaccaaccttgagcaggatccagtaaaattaaaaaaatccgtcagcaccactaccccgtttcagagcaggaggttgccaggcagaagggaagtgccagcagccagggtcctctggcccaggtgcaactggagcttccaggtgagaacacaaccgccagatggcagacacatggtgatggctgggaggtccaggggctttgcgccttgcatatggggcaggaaaaatgcagtctacggaagtgtgaaccaaatggaaatgtattctcacatttctcttcctttttctgagacatagtggacctcggattctcatgctggtt

SEQ ID NO: 1563 - DNA, 541 bp, Homo sapiens
  MAP TO AC013632.3; EXPRESSED IN PLACENTA, SIGNAL = 1.2; EXPRESSED IN BONE MARROW, SIGNAL =   1; EXPRESSED IN LUNG, SIGNAL = 1.5; EXPRESSED IN ADULT LIVER, SIGNAL = 2.2; EXPRESSED IN HELA, SIGNAL = 0.72; EXPRESSED IN BRAIN, SIGNAL = 1.6; EXPRESSED IN FETAL LIVER, SIGNAL = 1.2; EXPRESSED IN HEART, SIGNAL = 2.9; SWISSPROT HIT: P41312, EVALUE 8.00e-45; NT HIT: X93335.1, EVALUE 6.00e-47; EST_HUMAN HIT: AL598878.1, EVALUE 2.00e-57
ttggattcaccacaccacagaaggtagtcaaaagcagataattcaagcagtatccaacacaattaccttaggtatttacttcaccctcctacaaatctcagaatgcttccaggccccctttactacctttgatggaatctatggctcaacattcttcatagccacaggctttcatggacttcacgttattattggatcaacatttctcactgtctgccacctccgccaactaaaattccattttacatccaaccaccactttggctttgaagccacctcccgatattgacactttgttgatgtagcatgactattcttatacgtctctgtctattgatgaggagcctactcttttagtataaacagtaccattgacttccaatcaattagttttgctaatatctgaaagagagtaattaacctgacactagccctagtaaccaataccttactggtcttattactaacaataattacattttgactcccacaacttaatatttatatagaaaaatccagcccctacgaatgcggatttgac

SEQ ID NO: 1564 - DNA, 579 bp, Homo sapiens
  MAP TO AL137790.1; EXPRESSED IN PLACENTA, SIGNAL =   4; EXPRESSED IN BONE MARROW, SIGNAL = 2.3; EXPRESSED IN LUNG, SIGNAL =   3; EXPRESSED IN ADULT LIVER, SIGNAL = 3.4; EXPRESSED IN BRAIN, SIGNAL = 2.3; EXPRESSED IN FETAL LIVER, SIGNAL = 2.4; EST_HUMAN HIT: BF760371.1, EVALUE 0.00e+00; SWISSPROT HIT: Q63734, EVALUE 9.00e-24; NT HIT: AJ010309.1, EVALUE 1.00e-51
tttaccctctagcgctgctctttcccatgggcagctggatgggagccgtgtgcccttctgagatggagaagacctttctaatccagggactgggagatcaggtacccattctaaaagtgggggtgcatccaaggcagaggagatggcggccacggtctcaggggagggggggacctcaggctcttggtgggggactcgggagactcagctctgtgggggctccccacctgtccagcttgggaagccatacctttccggacactaccatcggcgcaggcatagtccccagtgctgagcaggaagcaggcagctgccttcttgtttctgtctcgagtggtggagcgtcgcagggcccggcgctcctcgggggtcggggaggaggccaggggttgggtgaggccagctccctcctcatcagacagcactgcgttggcatcgccattctgcttagagtctgaagggggcacacagaaaggaggctgcatgaggggcgacctgagccttgctcatgggtcatctggggtctcccagacccagagtgttacttcctcaaccttgggaggggcctagcatctacct

SEQ ID NO: 1565 - DNA, 544 bp, Homo sapiens
  MAP TO AL136377.1; EXPRESSED IN BRAIN, SIGNAL = 0.84; EXPRESSED IN PLACENTA, SIGNAL = 0.88; EXPRESSED IN BONE MARROW, SIGNAL = 0.78; EXPRESSED IN ADULT LIVER, SIGNAL = 0.73; SWISSPROT HIT: P48566, EVALUE 2.00e-01; NT HIT: gi12232372, EVALUE 9.00e-06; EST_HUMAN HIT: BG685491.1, EVALUE 7.00e-35
cctctttggggatctcactgtgctagtggtatacagattcaagttgaaagaccagtggaattgtggttgacagcccagggacaggaacaagcaggagcctggtatgagctaacatttaagttaaaatctgtgactatttacgatatttctttcttttcatcttttctctaggcctactctgtgtatgatgaagacattgggtactgtcaagggcagtcttttcttgctgctgtattactgctgcatgtaagtaatggtccgtgtgataaatagcacagtgctgccaagtttattttactttctactggctttgttcttccttcttatttcccatttatctgatggagattacatatggcatatcttttttaaaatgtacgttaggtgataaagtaagagatatgatgtcaaaaatacgacagtttctcaatggaattagttttgttggctagaaaaggataaattgcttatttggagttatttttaactagaatcctctggaattaaagaagtcggtataactgcccaaatatcaggacctgga

SEQ ID NO: 1566 - DNA, 541 bp, Homo sapiens
  MAP TO AL137068.1; EXPRESSED IN BRAIN, SIGNAL = 0.72; EXPRESSED IN HELA, SIGNAL = 0.52; EXPRESSED IN ADULT LIVER, SIGNAL = 0.48; EXPRESSED IN FETAL LIVER, SIGNAL = 0.62; EXPRESSED IN BONE MARROW, SIGNAL = 0.64; SWISSPROT HIT: P42964, EVALUE 6.60e+00; EST_HUMAN HIT: AI628430.1, EVALUE 0.00e+00; NT HIT: gi13639283, EVALUE 0.00e+00
tcaaggaactttatgcacatggcttttctaaatgaaagttgttccagttaaaatgccaataaaataatttattcagtagcttatagagtcttgagtatctgaaaaatcacaagtttttacagttctagtaatcatagtagttgatatttatagatctttaaatacatggcacatcatacagctcaattccaagtaagtctgaaattttatacaatgatatttgacaccaactcactgtttagatggcaaaccaaaaagatttggagagaagacaaatggaaatcagtgatgcaatgaggacacttaaatctgaggtgaaggatgaaatcagaaccagcttgaagaatcttaatcagtttcttccagaactaccagcagatctagaagctattttggaaagaaacgaaaacctagaaggagaattggaaagcttgaaagagaaccttccatttaccatgaatgagggaccttttgaagaaaaactgaacttttcccaagttcacataatggtaagggtttatcctgctattctctgggttcg

SEQ ID NO: 1567 - DNA, 550 bp, Homo sapiens
  MAP TO AC021252.3; EXPRESSED IN BONE MARROW, SIGNAL = 1.4; EXPRESSED IN BRAIN, SIGNAL = 1.6; EXPRESSED IN HEART, SIGNAL = 1.9; EXPRESSED IN PLACENTA, SIGNAL = 1.9; EXPRESSED IN ADULT LIVER, SIGNAL = 1.6; EXPRESSED IN FETAL LIVER, SIGNAL = 1.3; NT HIT: gi14523048, EVALUE 1.30e-01; SWISSPROT HIT: P51829, EVALUE 6.80e+00; EST_HUMAN HIT: AW881121.1, EVALUE 7.70e-01
ctcccattctgtggatttgcttaattttttttaaatattaaactctgttgctttcttcttagaatttctagcaactctctggcttaaataacactttaacatttctctgtggatgttttcaagaacttcaaacctcttgtgtccataactgaacttcttatcctcctttctatttctagatctacttccttgtaaatcttatctatttagccaattggccagccaagacagaaactaattcctcctaattcttctttcttttcatcactccccttcaaatagcctcctaccccctacccccccagattctgtcaaacacaaagtagtgttgtttaatttctgcctgtattcaggtctttgaaattgtgcattctgctacatctactatgaaagtaggtcatgttttcatcatctctcttctgaactttttcaacagcctaattcacaaccttgtctccatttgggcccttctaaatgcaaacacaaagatgatacttccgtggaacactatagactaacggctacaagcactgggtctgaagccgtactt

SEQ ID NO: 1568 - DNA, 502 bp, Homo sapiens
  MAP TO AL137918.1; EXPRESSED IN FETAL LIVER, SIGNAL = 1.6; EXPRESSED IN PLACENTA, SIGNAL = 1.9; EXPRESSED IN ADULT LIVER, SIGNAL =   2; EXPRESSED IN BONE MARROW, SIGNAL = 1.9; EXPRESSED IN HEART, SIGNAL = 1.8; EXPRESSED IN LUNG, SIGNAL =   2; EXPRESSED IN HELA, SIGNAL = 1.1; EXPRESSED IN BRAIN, SIGNAL = 1.5; NT HIT: AB036770.1, EVALUE 1.20e-01
ccagactccttcagtcccaggataaggaagtgacaatcaaaggtatagcattaggtatcagcagcttttgcaaaacaaggagatgttttcaaaggcaatttcagcagcagtaagaggtgaggccctagacctcagaattcaacaggatggtggagacagcaattggctccagcaacagtgctggtcactttcagtgtcaccagcaatttaggaggtcaccatgggggaaccagagagagcaagagagcaaatgctgtgaacaaaaggcttggtccacagagtacaagagagaggtctcctggagacctctagaactacttggcaggcattatatggaggttgaagttttcaaagaggagattaaaaaaaaaaatttggaccatttctcttgctttgaccagcataatcacagatactacagtttatgttcagattttctttgcaatcaacaaaaaggaggtaagaaattggaaacctttaagcactgacaaccaatgtgtct

SEQ ID NO: 1569 - DNA, 587 bp, Homo sapiens
  MAP TO AC018678.5; EXPRESSED IN ADULT LIVER, SIGNAL = 0.44; EXPRESSED IN BONE MARROW, SIGNAL = 0.42; EXPRESSED IN BRAIN, SIGNAL = 0.5; EST_HUMAN HIT: BG398745.1, EVALUE 5.30e-02; SWISSPROT HIT: P08872, EVALUE 5.70e+00
tggccccacattctttctacaaaactttccaagcaccaagaacaattccttcctggcacatagtagagataagtgaacatgcaacagtgaacacctgagctagaagttttacttgaagatacttggatgtttgcttgttgcatttggaagaaaagtttctgaatcctttcaatttggttatacggtaatataaagaagtgcttgtgattcattttcatctttgaaggggaaagaatcaggaagtaagagagaaaggagacaagaaaagagggagagccggggagggatcatgatttggcgagagtaagagaatgcccaaagccatctgcatgggagcctctgactttttctttcacgaaaactgaaaatagaaatttttccacctttgttactattgccagtaccaagactcttacacttgggtgccagatgtggttttccaggttcttggagctgtcgttgcttaacaaaccagataccctcagaggtttgctcgtatctacagtcacatatttgtgcctgtgataggacttctagtagatgtggcatgttcacaggggcagctgggaacaatgaggcttgggatg

SEQ ID NO: 1570 - DNA, 518 bp, Homo sapiens
  MAP TO AC021609.3; EXPRESSED IN PLACENTA, SIGNAL = 1.2; EXPRESSED IN ADULT LIVER, SIGNAL = 0.87; EXPRESSED IN LUNG, SIGNAL = 0.94; EXPRESSED IN BONE MARROW, SIGNAL = 0.96; EXPRESSED IN BRAIN, SIGNAL = 1.3; EXPRESSED IN FETAL LIVER, SIGNAL = 1.3; EST_HUMAN HIT: AI032498.1, EVALUE 1.80e-01
aaaaagggccttcacaaagagtttgagaagcccttatttataacctagtagccatttaatcaatagtcttgagtattttaaaactgctccttcaaacccaggaaattgccccaggaactggtgggggcaaggctcttattcagtgatcctgtcccctcggattccccaaagcagctgatcttaacaaggcaatcctgtgtcttccatgagtcactcaaagtaaagatgatgataacacccatcttggagaattctcacgaagattaagtaacaaaagagttcagaacagcctagtccatgagaagcttgtaaattctgctattattatgataaactaaagtcctttgtaagttttggtttttggaacagctctgtttctaaaattatgcttgaaaaccactgttataattaaagttatcaaccagttcagcctaatcgaatgagagagcagaataaggaaccacttataagagggtgtgtatgtatcaatgggtatatgtggattgtttggtgtgtgg

SEQ ID NO: 1571 - DNA, 566 bp, Homo sapiens
  MAP TO AC015855.4; EXPRESSED IN BONE MARROW, SIGNAL = 2.4; EXPRESSED IN BRAIN, SIGNAL = 2.9; EXPRESSED IN HELA, SIGNAL = 3.6; EXPRESSED IN ADULT LIVER, SIGNAL = 1.9; EXPRESSED IN FETAL LIVER, SIGNAL = 2.5; EXPRESSED IN LUNG, SIGNAL = 1.7; EST_HUMAN HIT: BI029636.1, EVALUE 5.10e-02; SWISSPROT HIT: O42280, EVALUE 6.00e-35; NT HIT: AB063483.1, EVALUE 0.00e+00
ccaggcttcaaagagacagctttcctgtacgcggtgtcctctgccgccctcacccacaccctggcccgggcctgcagcgctgggcgcatggagcgctgcacctgtgatgactctccggggctggagagccggcaggcctggcagtggggcgtgtgcggtgacaacctcaagtacagcaccaagtttctgagcaacttcctggggtccaagagaggaaacaaggacctgcgggcacgggcagacgcccacaatacccacgtgggcatcaaggtgagcatgtccctggctgcccgcagtgccttcccaccagggtacacagctggggagcatggcttgaaggaggccagcaccccactccccaaaatacatgaagagccgtgaacttcataaaggcaggatgaacttcacgtcttcaaccagcattcccttggcatctactctgggctgtgactgggtgccaggaacacagcggaagcatggaagggtcatgagtgtcattggtggaagcagtggtcaccagtgggagccaggcttaggactaggtctggtgaagcagggacatgttt

SEQ ID NO: 1572 - DNA, 573 bp, Homo sapiens
  MAP TO AC018586.3; EXPRESSED IN BRAIN, SIGNAL = 0.4; EXPRESSED IN PLACENTA, SIGNAL = 0.36; NT HIT: gi15594346, EVALUE 8.50e+00
atctaacagacaaacgccgcttcccctaaacaataaaaaagcaacctaggtgttaacgaagttctggcagcttgtctgtgcaggctactcaacaaggcagacaaccttcagaaggaagatactcgctgtcaggttcatccagctataattggagtatatattgactttggtcagtttggcaaagagaatatcaacttacaaagtgctagctacgatggagatgcgataactggagatcattgttaagatgtctgccactttcaaaaagatttgtctttagaagctaataggaattttaaattgctacagcaattgcatgtcaacatgagctatttattggctgttaaccataaatgtataatatattaatgtgtttgaatatactctttctgtcattaaattcaattaaaattgaataattataaacatataagtccctagagcctaaaatcaccaattttcaaggaaaaaaaagaagataagaaattattcatattcaatcacattttgccatcaaatttatttttcagatgaaatatttgcaacaaataaagacttaaaattgggtgccgt

SEQ ID NO: 1573 - DNA, 599 bp, Homo sapiens
  MAP TO AC020698.2; EXPRESSED IN FETAL LIVER, SIGNAL = 3.9; EXPRESSED IN BONE MARROW, SIGNAL = 4.9; EXPRESSED IN BRAIN, SIGNAL = 4.2; EXPRESSED IN HEART, SIGNAL = 3.7; EXPRESSED IN HELA, SIGNAL = 3.4; EXPRESSED IN ADULT LIVER, SIGNAL = 5.1; SWISSPROT HIT: P19275, EVALUE 3.00e-19
ctccctcacccttcactctgcggatcccatctatgcagcgactactcccattcaacctgcgtctgccctgctgaccctcggtggtgtgggtgggctgtggctgaccctcggtggtgtgggtgggctgtggctgaccctcactggtgtagctgggctgtggctgaccctcactggtgtaggtgggctgtggctgaccctcggtggtgtaggtgggctgtggctgaccctcaccggtgtgggtgggctgtggctgaccctcactggtgtagctgggctgtggctggccctcactggtgtaggtgggctgtggctgaccctcggtggtgtaggtgggctgtggctgaccctcactggtgtgggtgggctgtggctggccctcactggtgtgggtgggctgtggctcgccctcactggtgtgggtgggctgtggctgaccctcggtggtgtgggtgggctgtggctgaccctcggtggtgtgggtgagctgtggctgaccctcactggtgtgggtgggctgtggctgaccctcggtggtgtagctgggctgtggctgaccctcactggtgtgggtgggctgtggctgaccctcggtggtatag

SEQ ID NO: 1574 - DNA, 505 bp, Homo sapiens
  MAP TO AL138843.2; EXPRESSED IN BRAIN, SIGNAL = 0.72; EXPRESSED IN ADULT LIVER, SIGNAL = 1.1; EXPRESSED IN BONE MARROW, SIGNAL = 0.77; SWISSPROT HIT: P12926, EVALUE 4.10e-01; EST_HUMAN HIT: AI732644.1, EVALUE 1.80e-01
agatttttccacccccaaactaggatcataaatacctaagaattagaccaaaatctaggtgctagcaaaaagttgaaatttttaaaaagtggactagataattctctgcccaggtccctccccaaaccctccatccaaccaaaaaaacacttttggctttaataaatatttaacctataaacttggctttaccttcactataacatcaactttattatgctttctagtcattttttcagtcatttctttgggcccctgagcagttgaagttaagatcgagtccatgctcttcgggcagcagttgaatccttgttctgtacatcttgtattttctgtgatagagtggtgatatgagttgattgcatagttaccgcaaaataatgtaagtgacttcatgatatcagaggtggtaactaagcagcaactccactggaaaccatggcatttagatgatcacatattaatggtaggtaatgcactaacctcctgacaatgctagctgtgc

SEQ ID NO: 1575 - DNA, 600 bp, Homo sapiens
  MAP TO CHR22_82.0; EXPRESSED IN BRAIN, SIGNAL = 0.28; EXPRESSED IN HELA, SIGNAL = 0.56; EXPRESSED IN ADULT LIVER, SIGNAL = 0.43; NT HIT: AJ251973.1, EVALUE 5.70e-01; SWISSPROT HIT: P01132, EVALUE 1.50e+00; EST_HUMAN HIT: H55107.1, EVALUE 6.00e-48
gggaacccctttgttctctgtgtattgatgaattatgacatttaaggcacttagaacagggcctggctctcaacaaatgactctgccattcttattactcttctcgtcttgggctccagttcacgtcggggtccaggctggggtgtgtggccaggtctggccctcccaggccttggggctgttgggatccccatgaagcctgagctcacaggtctgggttcggttcctaccaggcagatgctcgtgcggcgtcagatgggcgctcaccacagctggcattaattgaccatgtgaccagctggcagctgctgcctgtgctgtgttccaggggccccagccaggaagggctggactcgccatcctccccaactggtgttatgaagtatgaagatcgttatcgttctgagcacctactacgtgcccggccctttaacgatagtaagggcaatcctaatcataaaagccacagcatcaaacattgtcactgtttgtttttcccagcattcttatggggagacttgtgcccattttatggacgagtaaattgaggccgagggacgttgctgggaaaacatggaaggtgcttgggttcaacttggt

SEQ ID NO: 1576 - DNA, 580 bp, Homo sapiens
  MAP TO AL132656.3; EXPRESSED IN FETAL LIVER, SIGNAL = 1.1; EXPRESSED IN BONE MARROW, SIGNAL = 1.1; EXPRESSED IN BRAIN, SIGNAL = 0.92; EXPRESSED IN HELA, SIGNAL = 1.1; EXPRESSED IN PLACENTA, SIGNAL = 1.4; EXPRESSED IN ADULT LIVER, SIGNAL = 1.5; SWISSPROT HIT: P09951, EVALUE 8.40e-01; NT HIT: gi14739129, EVALUE 1.00e-127; EST_HUMAN HIT: AW802348.1, EVALUE 5.00e-67
gcatattggtggctccaaacttcctcccaagcgatgctgtctcagatgtgcccctcctgcctcctccgggggcgctgcggttcaggtggtcctgacccagctgggacccacttcacatccccaagccctgccctcccctgtgtggtgcgagcaggaggagcggccctcaccacgcccgtcctcctccctctctgcctcagtgtaccttcccagcaaggccggccccaaggccccgactgcctgcctgccaccacccaggccccagaggccagtgaccaaggcccgccggccaccaccccggccccaccggcgagcagagaccaaggcccgcctgccaccacccaggccccagagaccagcagagaccaaggtccctgaggagatccccccagaagtggtgcaggagtatgtggacatcatggaggagctgctggggccttccctcggggccacgggggagcccgagaaacaacgggaagagggcaaagtgaagcagccacaggaagaggactggacgcccccagacccgggcctcctgagctacattgacaagctgtgttcccagaaagacttcgtcacc

SEQ ID NO: 1577 - DNA, 531 bp, Homo sapiens
  MAP TO AL136084.2; EXPRESSED IN PLACENTA, SIGNAL = 2.2; EXPRESSED IN HELA, SIGNAL =   1; EXPRESSED IN BRAIN, SIGNAL = 1.8; EXPRESSED IN ADULT LIVER, SIGNAL = 2.4; EXPRESSED IN HEART, SIGNAL = 1.6; EXPRESSED IN FETAL LIVER, SIGNAL = 1.8; EXPRESSED IN BONE MARROW, SIGNAL =   2; NT HIT: gi16161089, EVALUE 0.00e+00; SWISSPROT HIT: O08912, EVALUE 6.60e-02; EST_HUMAN HIT: BG687328.1, EVALUE 0.00e+00
agggtatgacacatgcccagagcagccagcaggtggcaccatcggtcctgtgagaggcaagcgggacgcagcctgtacaagcctggtgctgtgtccccgggacagtcttgagttgctgcgttacacggaagacacttacccctcaataaatatttctgaaatggtaaaaatcagaccctgatctctttaaaacatgtctttaggaaaaagagacttttctgatgacttgcctgtcattctgttatcttttgtaggatggatctttatttcacgaacagtccaagaaatgtgtccaggctgcgaggaaggagtcgagtgacagtttcgttccactcttacgagactgcaccaactcggatcatcagaaatggttcttcaaagagcgcatgttatgaagcctcgtgtatcaaggagcccatcgaaggagactgtggagccaggactctgcccaacaaagacttagctaagcagtgaccagaacccaccaaaaactaggctgcattgctttgaagaggcaatcattttgccatt

SEQ ID NO: 1578 - DNA, 541 bp, Homo sapiens
  MAP TO AL035367.1; EXPRESSED IN FETAL LIVER, SIGNAL = 2.2; EXPRESSED IN PLACENTA, SIGNAL = 1.7; EXPRESSED IN BRAIN, SIGNAL = 1.3; EXPRESSED IN HEART, SIGNAL = 1.2; EST_HUMAN HIT: BE395814.1, EVALUE 1.00e-118; NT HIT: L23928.1, EVALUE 1.00e-118; SWISSPROT HIT: P34896, EVALUE 6.00e-31
ggttgcctttagcacagaggtgctttttgagggcattctccatttttgctctgagactttaagggaagaaatctctgggctttcagatctgcacatctagaggccactgtgaagccaactcagctggccggtggacatctctgatgcagctgtgtcacctttcctgtctcaggaaccagctgctactcccgaaacctggaatatgcccggctacggaagattgcagatgagaacggggcgtatctcatggcggacatggctcacatcagcgggctggtggcggctggcgtggtgccctccccatttgaacactgccatgtggtgaccaccaccactcacaagaccctgcgaggctgccgagctggcatgatcttctacaggaaaggtgagctcccgaatgttgggtacagatgggtaccatggtttacatttctcctgtgggggttcagattcagttgagggagctgggaaaaactctgacctgggatccttggaaaatattaagatcccagtcccttaaagagctgcttaggaaggagca

SEQ ID NO: 1579 - DNA, 565 bp, Homo sapiens
  MAP TO AL136366.3; EXPRESSED IN HELA, SIGNAL = 0.67; EXPRESSED IN BRAIN, SIGNAL = 0.87; EXPRESSED IN FETAL LIVER, SIGNAL = 0.76; EXPRESSED IN BONE MARROW, SIGNAL = 0.97; EXPRESSED IN PLACENTA, SIGNAL = 1.2; EXPRESSED IN ADULT LIVER, SIGNAL = 1.2; SWISSPROT HIT: P54948, EVALUE 1.40e+00; NT HIT: AE001159.1, EVALUE 1.40e-01
cagtttgggaggttttgctcttactccatagtttttggtctcacgttagatcagtcagaaaggaacacgcttgatactctctccctcctgcctcatgtctgtgattcattagaaaaacttaaaaacttcccctatactaggacaagctttcctaagaaaataattgataagagcatatgtttgttggatgaattcttcctagaacaaacgtctggccaagaatagaaaatccagccagtcttagaaggtataagaatctatttctgaactccttcagatgaactcatcattatggaaaagatggaagctaagtaatatttctaagattttacaactgtcatgcttattcctcctggtctacctgcagggatcttatcccacagggcagggaaaacttttgtactaccatctttcttctacaaatcaacaggaacacagacagaatagccatggtctggccacacttggtggtgagtggagtctcctggggtgtgggaagacacattatcctcagagcctttagcattctcagcaaaattggactggggtccaagaatgagagggt

SEQ ID NO: 1580 - DNA, 580 bp, Homo sapiens
  MAP TO AL136362.1; EXPRESSED IN FETAL LIVER, SIGNAL = 2.8; EXPRESSED IN PLACENTA, SIGNAL =   5; EXPRESSED IN LUNG, SIGNAL = 4.5; EXPRESSED IN ADULT LIVER, SIGNAL = 5.4; EXPRESSED IN BONE MARROW, SIGNAL = 2.7; EXPRESSED IN BRAIN, SIGNAL = 2.7; EST_HUMAN HIT: BG778878.1, EVALUE 0.00e+00; SWISSPROT HIT: P21414, EVALUE 7.00e-11; NT HIT: AL163284.2, EVALUE 0.00e+00
ctgtattgaggtgggaaggctaaactgaggaattatgtctgacagaacggaagaaatgactgcggaggccttctcagaccctgtaggaaaggcctttacttattcagtgaaagtgtctatttagactaagaggtattttagtttcctgactcgggcatgttgagtaaagctaatttgccagtcctgggtgggggcaaatccttgagcttgatgtgtagggaagggagggggcctgaataatccctgaggagtagtagaatagcagatggaacactgggaagttatttccttgaggatagatttccatgatggaaaggaaatgagaggttctgagaggcgggctagtggcttgtactatagcatagcctgcctttgctggtatgtggcgattaggcctggtggaactgccatcaataaatcaagtgtgatcagggtgaggaacaggaaagaaggaaatatggggaaatggggtgaatatcaggtggatcagagagatacaatcgtgggggtcaggtgtggtatcaggaataatgtgggaggccagattgaagtcccggccaggaacaacggtaattgtggg

SEQ ID NO: 1581 - DNA, 548 bp, Homo sapiens
  MAP TO CHR22_145.0; EXPRESSED IN FETAL LIVER, SIGNAL = 0.47; EXPRESSED IN PLACENTA, SIGNAL = 0.61; EXPRESSED IN BONE MARROW, SIGNAL = 0.44; EXPRESSED IN BRAIN, SIGNAL = 0.5; EXPRESSED IN HELA, SIGNAL = 1.6; SWISSPROT HIT: P27465, EVALUE 4.00e-25; NT HIT: gi14778392, EVALUE 3.00e-79; EST_HUMAN HIT: AA297086.1, EVALUE 0.00e+00
tccaaatgctgagctgactgggccccacggtcccctgcccacaaccagcctgcataaagcagtcaactcctggcctcaatgaccctgatctggagcctggtcccccaacaccaagaagctgagagcctctatatgaagcccacagaggcagctccccccacgctggccccgggctgacctgggaagtggcgccggtgggacacagtccagtcggtgggggagtggaagcagtggtagtccccaggggccaggtagatgacacagtgatagagctcattcccttcccgggtgaccagctggttcttgaaggagtcacacgacgcggctgtggagtaggagcagacgtgggggccaccaacacagtgagcacccagcacggagcccgagtgtggtctgcacatggattctcagggaggccccacatgccagcctcagttccttccccagcattcccctccctcccggtccagccacacagcagcagggctgcctagccccgcctgtgcagtgacccacctggtgggaagggcaggtcctctgtgcacata

SEQ ID NO: 1582 - DNA, 570 bp, Homo sapiens
  MAP TO AC023112.3; EXPRESSED IN LUNG, SIGNAL = 5.3; EXPRESSED IN ADULT LIVER, SIGNAL = 6.3; EXPRESSED IN BRAIN, SIGNAL = 3.9; NT HIT: AL163246.2, EVALUE 3.00e-67; SWISSPROT HIT: Q58872, EVALUE 7.10e+00; EST_HUMAN HIT: BF038897.1, EVALUE 6.00e-51
tctcacaagcggtgaatcaggagtgccaaatgcatttattttgcataagtctaaacagtttccgcctaggacttatcagtattctccatactattagaagcagagtccttagcattttggggtctaatcatattaagcaaccaactccagaaaccccaaaaccaatgaaagaactccatccttaatattctgttcctctacaaccactcctggtaccaaaatctgtattcctcagagttccctagagggacagaactaataggtagatacatacatataaaggggagtttattaagtattaacttacacgatcacaagttcccagaataggctgtctgcaagcttgaggagccaggagagccaggtccgagtctcaaaactgaagaacttggagtcctggagtccaatgtttgagggcaggaagcgtccagcatgggagaaagatgtaggctgggaggctaggctagtctcttgcttcatgtttttctgcctgctttatatttgctgatggctgattagatggtgcccacccaattaagggtgagtctgccttctccagcccactgactc

SEQ ID NO: 1583 - DNA, 558 bp, Homo sapiens
  MAP TO AC020721.4; EXPRESSED IN BONE MARROW, SIGNAL = 0.46; EXPRESSED IN BRAIN, SIGNAL = 0.55; EXPRESSED IN FETAL LIVER, SIGNAL = 0.51; EXPRESSED IN PLACENTA, SIGNAL = 0.46; EXPRESSED IN LUNG, SIGNAL = 0.52; EXPRESSED IN ADULT LIVER, SIGNAL = 0.54; NT HIT: AF145298.1, EVALUE 5.30e-01; SWISSPROT HIT: O22342, EVALUE 7.00e-02
ggagagaagtgagtgcgaccacgatgatgatgatctagagtattttctctctagttctttatttttcactcgtttgtgcatatataactaatatttatctaattggcaatagagtttcccaaagattagcagggctggccccagacccagtagataaatcaatgcattctctggttcctgcagcttcccaagcctctcatccactgccaactgccctctccaaacccagtgcaaaggcttcagcacctgaagggaataaagaggttgtatgaaccaaccccaaatggcagccttacacagagtttggagttctcaatactcaccttggtatcttaggctatctttgagcaactacttcatattagaaagtatatccttatttagaacagaagtgtatatattcttttaatatttattgggcaaatgctatattccagtcacaattatgacttcaggggatacagaggctctcgtgagattatttagctcagaaagaaaagagttatttcagttctcctctctaacgcggtgctcagtccccctttgaggtcttgcata

SEQ ID NO: 1584 - DNA, 531 bp, Homo sapiens
  MAP TO CHR22_88.0; EXPRESSED IN BRAIN, SIGNAL = 0.3; EXPRESSED IN HELA, SIGNAL = 0.52; EST_HUMAN HIT: AA250907.1, EVALUE 2.00e-87; SWISSPROT HIT: P35626, EVALUE 2.00e-24; NT HIT: gi14777914, EVALUE 1.00e-87
tgggttgattgtagctgatccaggactgaaagtgaagtgctcatcagttctgtttgtggatgatgattgcttgagttgtcattagcagagatttatgataactaagaacctgcctcgaaatgattactgctgccatctagtcatcttcctatatagagttatgatagagtcaccatggatgtggcgccgcggactcttacctttgtaagtatgttaaatcataaatatcttgatttcttaaaataatcagctacttgattgcgaccaagaactctacaagaacttccctttggtcatctctgaacgctggcagcaagaagtaacggaaacagtttatgaagcagtaaatgcagacacagataaaatcgaggccaggaagagagctaaaaataagcaacttggccacgaagaaggtaaaatagctcacgtgtctcaaaacatttctaatgcagtaaattttcaaaatttcttgtaaagctgaaaaagtatttgggtcgtaaggtattttgcagtcgagaagaaagcaatgcc

SEQ ID NO: 1585 - DNA, 571 bp, Homo sapiens
  MAP TO AC011881.5; EXPRESSED IN BRAIN, SIGNAL = 0.51; EXPRESSED IN ADULT LIVER, SIGNAL = 0.49; SWISSPROT HIT: Q92269, EVALUE 7.30e-02; NT HIT: AL163204.2, EVALUE 1.00e-117; EST_HUMAN HIT: BF999602.1, EVALUE 0.00e+00
tgcaagaaatgctccatctgtgatgtcaagtctctcacttgagttaattggatggaagtggtgaatttcagccaaagtggccaaagaaatcctgttcctgtgataatgacgccatcagcctctgcacctctgtcttcccatctgccacatgttgcctgttctccgtgactttggtaatagcttccttgtgtatgaggatgatgtccaggatgttggtctggtatccctgagacagcactaacaggtccatggctgggtctaggtccttcctggactgattggcaaagagctcactgatgttcttgaaggcatctctggtgaagtggatggtctagtcaagttccaaggcctggctgaggctgaagaaaaactggccaccttctgatgctctttctaaaagcctgtcactgtcatctgcttgcttgtcaactcattggctgtgaggttgagctgagtggcctgtgtccatcttcttggggaagaatttgaagccatcagtcttgctctcccatccctaaaggttgatggtcaccacctgggggtgtgctgagggtcagaaagaagccagcac

SEQ ID NO: 1586 - DNA, 535 bp, Homo sapiens
  MAP TO CHR22_96.0; EXPRESSED IN PLACENTA, SIGNAL = 0.82; EXPRESSED IN LUNG, SIGNAL = 1.2; EXPRESSED IN BONE MARROW, SIGNAL = 0.61; EXPRESSED IN HELA, SIGNAL = 0.57; EXPRESSED IN BRAIN, SIGNAL = 0.86; NT HIT: AF012918.1, EVALUE 3.00e-05; EST_HUMAN HIT: BE067314.1, EVALUE 7.50e-01
aatggccaaggtccaaatgttaaattcattgttcttgctgattcaacagctctgtaatttctagtttccaaatggtccacatttggcaaaacgcaattcaatttagaaaacagtaaatgtgtgtttgctacctgtagaatcctgtggacacaagtcaatatcagatttcccataagtatatcatggctcaaaactttgataccaagaaaggaaaatgattctaacatgatgatggtaatgatagtgatgagaatggtaacaataatggtggcatttatggcagtggtgatgacataggtgttaataataaagatgatatgatgataatgatgatgataatgataactataacaataatggtggtggtgatcatggtggtgatggtagaaatgatggtaatggtgatgataatgatgattgtggtgatgattacagtgataataatgatgggggtgatggtgatgacaatggtgatgatgatgatggtcatgattataacgataatggtaatgatggtgatggtggtgatggtgac

SEQ ID NO: 1587 - DNA, 507 bp, Homo sapiens
  MAP TO AC017050.4; EXPRESSED IN LUNG, SIGNAL = 0.5; EXPRESSED IN ADULT LIVER, SIGNAL = 0.45; EXPRESSED IN BRAIN, SIGNAL = 0.46; SWISSPROT HIT: Q9VG40, EVALUE 6.10e+00; NT HIT: AL163247.2, EVALUE 1.00e-32; EST_HUMAN HIT: BG548371.1, EVALUE 3.00e-46
atctccatgtcctccagctcactgacacacgtgagggtctatttttgcatatgtaaggaggatagacattattttatctcacttgacatataggatccttcaaaatcaccaccttgttcatcattatcactgaacatagctgcaggccagaggttgtgccaggtatgcacaactgtgtcttcagttagaactatgttccaacagttggcaatagcatacatggcatccttcatgctaaactccttttgaaaaccttccacattcatgcctctgttcactgctgctagcatgctgttcaagaaagtgtttttatatttactctttattgatttaaggataccctggtcacatgactgaatgagtgaagtaacatttggggaaaagtacatggcatacacagtgttttttgatgagaatttcagctggaggatgaacagagcagttgtcaaggaataacagtctcgtagttgtcatttactccagcttccctgtagtgagcaccagcaa

SEQ ID NO: 1588 - DNA, 567 bp, Homo sapiens
  MAP TO AC021685.3; EXPRESSED IN FETAL LIVER, SIGNAL = 0.8; EXPRESSED IN BONE MARROW, SIGNAL = 0.72; EXPRESSED IN PLACENTA, SIGNAL = 0.94; EXPRESSED IN BRAIN, SIGNAL = 0.95; EXPRESSED IN ADULT LIVER, SIGNAL = 0.88; NT HIT: gi14773638, EVALUE 8.40e+00; EST_HUMAN HIT: AU145452.1, EVALUE 1.00e-05; SWISSPROT HIT: Q09843, EVALUE 8.20e-01
gtcaaagcccacttgtctcctttttttctttttgaaattttactggactgtgaaatgcagaagtctgataatagtataccagggcatgctactttattactcttcctagtaaatatgcaaggtgatggatatgctattcggcctattttgatcactccacaatgtacacttgtattaaaacatcacattatatcccataaatacatacaattatttgtcaattaaaacaaatacaatttttaaaattatattatgctgaaatagatgaggattccaaattaggctagttctaaaagaatgcaatatgatgcaaactattcttattatatatggactaacaattccaaaaagggtattttcaactttttaatagaatgtagtggtggtagtttccgcagagctgtgaagtttggtggtgtcaagttatgcgctagtaacaagctaaatatcgatagaatagaagagactccagtaacagtggttaactatcaccaggtaagtcagcacccagtggaagcatgcctagcaaaaagcagcaacatttaatgatggctttctgcagtgaca

SEQ ID NO: 1589 - DNA, 541 bp, Homo sapiens
  MAP TO CHR22_180.0; EXPRESSED IN BONE MARROW, SIGNAL = 0.81; EXPRESSED IN BRAIN, SIGNAL = 0.55; EXPRESSED IN LUNG, SIGNAL = 5.6; EXPRESSED IN ADULT LIVER, SIGNAL = 7.8; NT HIT: gi4557887, EVALUE 0.00e+00; EST_HUMAN HIT: BG026356.1, EVALUE 0.00e+00; SWISSPROT HIT: P05783, EVALUE 3.00e-68
aacgaggagaccatgcaaagcctgaacgactgctggcctcctacccggacagagtgaggcacctggagaccaagaaccggaagctggagagcaaaatctgggagcacctggagaagaagggaccccaggtcagagactggagccattacttcaagaccatcaggaaccagagggctcagagcttggcaattactgtagacaatgcctgcattgttctgcagatcaacaacacccatcttgctgctgatgactttagagtcaagtatgagacagagctggccatgtgccagtctgtggagagcaacatccatggactctgtaaggtcaatgatgacaccaacgtcactcggctgcagctggagacagagatcaaggctctcaaggaggagctgctcttcatgaagaagaaccacgaagaggaagtaaaaggcctacaagcccagattgctagctctgggttgaccatggaggtagatccccaaatctcagcacctcgccaagatcatggcagccatccgggcccaatatgacgagctggctt

SEQ ID NO: 1590 - DNA, 533 bp, Homo sapiens
  MAP TO AL138832.2; EXPRESSED IN LUNG, SIGNAL = 1.8; EXPRESSED IN HEART, SIGNAL = 1.5; EXPRESSED IN PLACENTA, SIGNAL = 1.7; EXPRESSED IN ADULT LIVER, SIGNAL = 1.9; EXPRESSED IN BRAIN, SIGNAL = 1.8; EXPRESSED IN FETAL LIVER, SIGNAL = 1.5; EXPRESSED IN BONE MARROW, SIGNAL = 1.4; SWISSPROT HIT: P33441, EVALUE 2.00e-01
gtagcgagatgcaggaggactcgccgcctacacatcctgcctcccgggcccgcgcggctctgcgcgctcattggctcgccctgcaggaagatgaacgctactacttctgtttccttttgatgctgctctgacaccccggtgggggaaatgtttcctcaggagctggcgcagaaaattaagggctaccaggagcagatcgcttctttgaattccaagtgcaagatgctgacgatgaaagccaagcacgccaccatgctgctgacggtgaccgaggtcgaggggctggcggaagggacagaggacctggatggggagctcctccccacgccttcggcccacccctctgtggtcatggtaaggatccagtgggtccccgcggctttgctctttgactggagcctggcgagtggctccatgttccctctccgtggctgatttcagggaccagccttcgatcttgcagattcagagggaggaacagattccttaagtctctttgactaccgttgggccgggccaatctttgacactgt

SEQ ID NO: 1591 - DNA, 577 bp, Homo sapiens
  MAP TO AL138839.1; EXPRESSED IN BONE MARROW, SIGNAL = 1.2; EXPRESSED IN BRAIN, SIGNAL =   1; EXPRESSED IN FETAL LIVER, SIGNAL =   1; EXPRESSED IN ADULT LIVER, SIGNAL = 1.2; SWISSPROT HIT: P37643, EVALUE 1.90e+00; NT HIT: U53930.1, EVALUE 9.00e-03; EST_HUMAN HIT: BF509509.1, EVALUE 5.20e-02
gcctcagcatccttatctgcagcatggtgaaatatagcatcttaacttggagttactagaaagaaaggagataaattatgtaaaatgcctagcacagagtaggaacgtaatataataatagtagttttcttctttcccaattccttggtgttacttcctggagccctcttagctgctggttttaaaactgtttctgctatgttagttgagccctgcctgaccctgtgaacattgcccgactccctagactcaggcattgccaacttggacttacaatctctggcctaggcatgcagccttcaggatccttgctgcctgacttgacttctaccccgacatatgttcacctgttcctctccactagctatccagtcttaccagaacttcatgcctcttatgcattgccagtccggatttggtgatcttgagatctgtggtggacacaatgatgcaccatccagattctcctttgaagacgacatattgccccagttcctgggagtgtactcggcagacagccttcagctgtaagccctcttcagggattgcttcatatacggagaggtacacagccaat

SEQ ID NO: 1592 - DNA, 518 bp, Homo sapiens
  MAP TO AC023108.2; EXPRESSED IN BRAIN, SIGNAL = 0.34; EXPRESSED IN FETAL LIVER, SIGNAL = 0.39; EXPRESSED IN PLACENTA, SIGNAL = 0.32; EXPRESSED IN ADULT LIVER, SIGNAL = 0.31; SWISSPROT HIT: P08548, EVALUE 3.00e-15; NT HIT: gi14741165, EVALUE 8.00e-06; EST_HUMAN HIT: AW901793.1, EVALUE 5.00e-14
tttggcggtgtatagggaagtgattgacttttatatattaattttgtatattgcaaccttgttataactgcttatttaaccaaggacttttttgactcttgaattttctatacagaccattgtaacctctacaaacaaagacagtttttctttctttctttccaatgtgtatgccctttatttacttttcctgtcttattgcattaacttggaattccattatgatgaaaaggaatggtgagaggggacatcctagtcttgttcctgatcttagtaggaaaagttcaagtttatcgccattaagtatgatattaactgtaggtttgttgttgatattctttatcaagctgatgaggttatcttctagttttagttttctgagaggtttttttagtcattaattaatgttagattttgtgaaatgctttttctgtatctattgatattgattttcactgtaatgtatctgtttgatatttttcgttttgtatttttcttgcttgagatttgctgatctt

SEQ ID NO: 1593 - DNA, 563 bp, Homo sapiens
  MAP TO AC018709.5; EXPRESSED IN BRAIN, SIGNAL = 0.39; EXPRESSED IN PLACENTA, SIGNAL = 0.41; EXPRESSED IN ADULT LIVER, SIGNAL = 0.45; SWISSPROT HIT: P25737, EVALUE 7.00e+00; NT HIT: AL163282.2, EVALUE 4.00e-05; EST_HUMAN HIT: BE892266.1, EVALUE 1.30e-02
tgccgggaagttatcttgagtttcatctcaagaataattgtcttcttctcatcagaagcaggaaacacagaggagtgtctgtagaaatgaagagatgggaaaacacgatatccaaaaaactgcaggcaatacagtccactgtgcagtattggctgttaccccgatggtcatggggctgcctggaagctgcggctcgctgcccctgcccagcagcaggagggagtattggacagcacgtccccagccccggaaaagatcaaaagtcaaaagtggaagtatggtttctactgaatgtgtatcactttggcagcaccgtaaagtcaaaaaattaagtcaaaccacggtaagtcagggaacatctgtctagctgtaggacaattcttgaagaactaattgcagtgctcccagcatggtgcaaatatgagggtaacattcagtttaattaaatgtcaaatcataggatggaaaatgacagtatctttgtccaaaaagcagatgcagaagcagcataatccacagaaattttcaatttcatttgctacccagcggctcaaatccattat

SEQ ID NO: 1594 - DNA, 520 bp, Homo sapiens
  MAP TO CHR22_0.0; EXPRESSED IN FETAL LIVER, SIGNAL = 0.85; EXPRESSED IN BONE MARROW, SIGNAL = 0.91; EXPRESSED IN BRAIN, SIGNAL = 0.88; EXPRESSED IN ADULT LIVER, SIGNAL = 0.98; EXPRESSED IN PLACENTA, SIGNAL =   1; NT HIT: AF034922.1, EVALUE 5.00e-04; SWISSPROT HIT: O79553, EVALUE 8.20e+00; EST_HUMAN HIT: BE858933.1, EVALUE 3.00e-03
  unsure 75
  unsure 86
  unsure 146
  unsure 169
  unsure 190
  unsure 266
agccacaggtccataacaggagtcacaaagcccattagtgcagagtgcactgtaggcgacgtgctgttagtgtgngcggtgcgtgngcgctgttcacacctgccattgtatctaagggaggggtggggcaaaacgggggctgcacngccattgtggtcttggaactcanctgtgaggagagggcacgtanggagagcatccggtgactgtggaggaggagcgagggggaacggcgacagtcaacgcttcctgagtcaggctggganagtgtggactttggcttgtacactctgggaaatgtgggagggtttagttattaactgcaatgccagctgctggctgttttacaacatgctctttgtccatggagtaggcataatgacaattatctctgctccatagaggaggtaactggggctcacataggttaagcaacttgcccacggtcccacagttgggaagtaccaggtctgggttcatactgacctgatcagatttgggttttggaaagggcatacga

SEQ ID NO: 1595 - DNA, 561 bp, Homo sapiens
  MAP TO AL121993.2; EXPRESSED IN FETAL LIVER, SIGNAL = 0.78; EXPRESSED IN BRAIN, SIGNAL = 0.68; NT HIT: gi8923142, EVALUE 5.00e-75; EST_HUMAN HIT: BE930290.1, EVALUE 3.00e-99
cctggagagagaaaacctggtagttgatccaagaactttttccagtatatgaagaattgttttagaggatagagactgattgttctcctctatcacttagaataagacagaaaggaattgtactgtagcacttatgagaattattaaacactgggatgattcactttcctggagctctttttaaagagaatggatattcatcactctgagttatccatttatgatgactagggcatagagtaggttaattttctattttgttttgttttgttttttcttggtctctgtgaaatagactactgttcaaaatgatcttcacctttattccccttttatcttttaggctctcttatatttcattcatgtaatggatcacattgctgtgaaggagtatgtattagtgtattttcacaccctgaccagcgaatacaatcacctggactccgacttcctgaagaaactctacgatgttgttgatgtcaagttagttatttttgcaaattatgaaggggaaatagtttctttcttttctaatattaagcagtggcaaacattgctttg

SEQ ID NO: 1596 - DNA, 565 bp, Homo sapiens
  MAP TO CHR22_24.0; EXPRESSED IN BRAIN, SIGNAL = 5.1; EXPRESSED IN FETAL LIVER, SIGNAL =   5; EXPRESSED IN LUNG, SIGNAL = 4.8; EXPRESSED IN HEART, SIGNAL = 4.6; EXPRESSED IN BONE MARROW, SIGNAL = 5.5; EXPRESSED IN PLACENTA, SIGNAL = 4.6; EXPRESSED IN HELA, SIGNAL = 4.4; EST_HUMAN HIT: BF882652.1, EVALUE 1.00e-128; SWISSPROT HIT: P53675, EVALUE 5.00e-34; NT HIT: gi14776991, EVALUE 1.00e-110
ctgggggagaagtaagaccctaagtgtgaagccacctggaggacctagattcccctatacttatggttattgttgaagatagaagcagttgccttggtagaggactttttgtctatgacagagcagtgtggaatttccactggcagatttttgtttttacatacaaggaagttgagtgaagggatcccctgtgattacaacacaatgacctatttttccatttattattagggaatcctgcgtaccagagagacggtccagaaattccagagtatacccgctcagtctggccaggcttctccattgctgcagtacttcggaatcctgctcgaccagggtcagctcaataaacttgaatccttagaactttgccatctggttcttcagcaggggcgtaagcaactcctagagaagtggctgaaagaagataaggtagaaacacttgtgagctcgtagcccccccgcacagcttgaaaacttggtccaggctccctacctgcctcctaactttgccttgtcccttggcataccacagctggagtgctcagaggagctcggagacttg

SEQ ID NO: 1597 - DNA, 533 bp, Homo sapiens
  MAP TO AC016692.4; EXPRESSED IN BRAIN, SIGNAL = 1.5; EXPRESSED IN PLACENTA, SIGNAL =   2; EXPRESSED IN ADULT LIVER, SIGNAL = 1.9; EXPRESSED IN BONE MARROW, SIGNAL = 1.8; NT HIT: gi16157415, EVALUE 3.00e-76; EST_HUMAN HIT: AV645667.1, EVALUE 5.00e-76; SWISSPROT HIT: Q09237, EVALUE 2.90e+00
aatccccaaattacttcagccttagtcaagtaactgtttcagtcagtataacattcagtgaaattaaacatgtggtatggatgttgtgattatagtgtttttttcatttctatagggtagataaaagaatatttaaacacaattgctgcatacttaccaagtgtctgtcattaatgtttgattaggtataaagatacattaaaaatggaaactgatttttgtaagttctctttcattatttcattgttacccttatcttctcccctcccgttttgcagttcccacatttgtttctttcctgaaagaagtagaatctccttatgaggtccatgattatatcagggcctatttaggagatacttctgaggccaaggagtttgccaagcagttccttgagcgccgtgccaaacagaaagccaaccagcagcgtcacgagcagcagctgccacagcagcagcagcagcagccgccacagcagccgccacagcagccacaacagcaggtataaagtagtgtggtgtatgcggtacctc

SEQ ID NO: 1598 - DNA, 587 bp, Homo sapiens
  MAP TO AL136377.1; EXPRESSED IN BRAIN, SIGNAL = 0.53; EXPRESSED IN FETAL LIVER, SIGNAL = 0.41; SWISSPROT HIT: Q10496, EVALUE 1.00e-05; NT HIT: AB019493.1, EVALUE 9.00e-77; EST_HUMAN HIT: BG756260.1, EVALUE 1.00e-76
tttaaccctgaatggggatgctatgacttgaccctggagtcaagatactcattacactacagatgctctggtagaatgagaattttgcaagaatcaagaacagtcaagtgagcaagagatggtctttcttagttgtttataataagtctgtttttattttcctcaattatctgtcatatccctaattctcatctgctgtcatcacttctgtgcagttatacaagacaaccaatactagaatagagttacagcgatcatagaaagctgtttgtaagttgcagttgtggcaggaacttcattgttctgctgcaagcttctcattgctcctaaattttccactttgacttttaggaacagctaccggacctgcatagccatttttctgatctgaacctggaagctcatatgtatgcatcccagtggtttctcactctttttactgccaagttcccactctgcatggtgttccacatcattgacttactgctttgtgaggtagagtgactcccatctttcactaagccaaaatagaaagtagtttctactaaaaatggttacagttttcttccttttgtttttgcctgtga

SEQ ID NO: 1599 - DNA, 594 bp, Homo sapiens
  MAP TO CHR22_217.0; EXPRESSED IN BONE MARROW, SIGNAL = 1.9; EXPRESSED IN HELA, SIGNAL = 4.8; EXPRESSED IN BRAIN, SIGNAL = 1.9; EXPRESSED IN LUNG, SIGNAL =   1; EXPRESSED IN FETAL LIVER, SIGNAL = 1.9; EXPRESSED IN HEART, SIGNAL = 1.3; EXPRESSED IN PLACENTA, SIGNAL = 1.1; SWISSPROT HIT: P37370, EVALUE 1.20e-02; NT HIT: AF226992.1, EVALUE 1.40e-01; EST_HUMAN HIT: BI023064.1, EVALUE 5.40e-02
tcacttcagccttgtcatgcatgcaaatgtttttccccttttcctccttccctgacaccttccccctctgtagcctcctcgtcctcctcaggagggtaagggacagactaagcttctgccttcaggtgaaaagatgcaggagctgaccctcctgggcacctcgtccgcgctggtgccaggcacagcgcctgacatgtcgccttctgaaatctccccacagacctaagtcctgccaccttcttcctgggctggggacctgcagctttgctttcccgcgacctcccaggccgcggcccctcgggctcctctgcttgtaagccaagcagtggcctcccctgatgtcctggtccctgctcactgcctctctcaaacccgcttccccctcccctaccccaagagcccttcaacccttcccaaggcttctaatgtcagctctgggctgaccacacccaaaccaccgtacccagctgcctccggggcccttccctggcacctgaaactcactcgtccatgtccacctccacggctggactcatctcccacggccccttccccctcctcccctgcttctctcccagttcccagacacagtga

SEQ ID NO: 1600 - DNA, 521 bp, Homo sapiens
  MAP TO CHR22_8.0; EXPRESSED IN LUNG, SIGNAL = 0.46; EXPRESSED IN ADULT LIVER, SIGNAL = 0.49; EXPRESSED IN BRAIN, SIGNAL = 0.58; SWISSPROT HIT: P49767, EVALUE 6.40e-02; NT HIT: AF069317.1, EVALUE 5.00e-01; EST_HUMAN HIT: BE934889.1, EVALUE 7.30e-01
cacagaggagctgacagcaggcatagctatcatagctacttgtgccacctttggatcttaagcaagacacatgtgtagactgatcctatgtttgttggcacgtgaaaaaatataaagcaagggacacttgcaattgtcagcgtggttctaagtggccacagtattcagcaagtcttgcggaaggttcaggctctggaggccatagcagaagagaagaccagagcgggtcctgcccttgtgtcctttacctcccgcaccatcagcaccactcctctgtgcctggatgcctcttccgtgcttgtaagctttgcgaattcctgcagatgcttaagtgccatctcaaatactctctacctagagagtagtcattccccctcttatgatctggaaagacttgttcatacatcgattagggtgttttccacactggtctgtaagcctaccctacacatctgccccacttccagtctgtgggcatctaacacactgggattccatggtgctatgcgttctcagcacag

SEQ ID NO: 1601 - DNA, 536 bp, Homo sapiens
  MAP TO CHR22_52.0; EXPRESSED IN FETAL LIVER, SIGNAL = 4.9; EXPRESSED IN BONE MARROW, SIGNAL = 5.2; EXPRESSED IN PLACENTA, SIGNAL = 4.4; EXPRESSED IN LUNG, SIGNAL = 4.5; EXPRESSED IN ADULT LIVER, SIGNAL = 4.9; EXPRESSED IN BRAIN, SIGNAL = 4.5; EXPRESSED IN HELA, SIGNAL = 3.5; EST_HUMAN HIT: AU186155.1, EVALUE 7.50e-01; SWISSPROT HIT: P46804, EVALUE 9.90e-01; NT HIT: U07000.1, EVALUE 0.00e+00
gtgtttcgaggttctcctgcagtcactactgggcctcctgggaggtggcccattgctacctgctgagcctgggcaagtctggcatcgaggagaggcccaggtatgagccctctgcagggtcagccaccccagccccagacccccactgtggctcctataatctcattgcccttttcagccacatcccatggctccagggctgtgctctttggggaacagtgactttgggctgcattccaggtagctccctgatgctgaacggtggccggcaggtgctccagcttcctggcatcctggcccaagcacacctgggggccgtgagccacaggtgctgcccaagagaatgccctccttagccttcccaaaatgacaggatcaaaggatcccgcaggcacagtttctttccaggcctgggttctgagggctggtgggtggcgctcatttgtttaggtgaattaacttcacagttagataaccaatccccactgctgggtgacttcccacgtggttgcctctctgtctactcggagccttgg

SEQ ID NO: 1602 - DNA, 512 bp, Homo sapiens
  MAP TO CHR22_11.0; EXPRESSED IN FETAL LIVER, SIGNAL = 0.92; EXPRESSED IN BONE MARROW, SIGNAL = 0.81; EXPRESSED IN LUNG, SIGNAL = 0.86; EXPRESSED IN BRAIN, SIGNAL = 0.81; EST_HUMAN HIT: BF311649.1, EVALUE 0.00e+00; SWISSPROT HIT: Q13516, EVALUE 7.00e-03; NT HIT: gi14779016, EVALUE 0.00e+00
tgcactcagcagatgtttcctgagcacatctgtgccaggcactgtgccagcacttgccctccatgccaggcccttctttctggggctgaggcagctgtggactgagcaggcatgggcagagctcacgtgcctctctctcttgccttggcagatacattctgcccgccccggcccaagccagtggccaggaagggccaggtagacttgaagaagtcacgactccgcatgtccctgcaggagaaacttcttacttactaccggaaccgggcagccatccctgctggagagcaggctcgggccaagcaagctgctgtggacatatgtgccgagctccggagcttcctgcgggccaagttgcctgacatgccgcttcgggacatgtacttgagtggcagcctctacgatgacctgcaggtaacaaggtggttctcatggtgggtggggtttgagtgctgagcaccatagtgttgttggcacagatcagtgtcccaggcttgccagaaagactgagg

SEQ ID NO: 1603 - DNA, 555 bp, Homo sapiens
  MAP TO CHR22_12.0; EXPRESSED IN BONE MARROW, SIGNAL = 1.7; EXPRESSED IN BRAIN, SIGNAL = 1.8; EXPRESSED IN LUNG, SIGNAL = 1.8; EXPRESSED IN FETAL LIVER, SIGNAL = 1.9; EXPRESSED IN PLACENTA, SIGNAL = 2.1; EXPRESSED IN ADULT LIVER, SIGNAL = 1.8; SWISSPROT HIT: Q10779, EVALUE 5.30e-02; NT HIT: AJ310932.1, EVALUE 0.00e+00
taccctccttggttttgcaggtggagaagggaattgcaattttttgagcaccttttctgggccaggcactctgctgggtatctcacatgtaaccatctcatctccttcttgcaaccctatgaagaggtgttgggggttttaagattccgtttcacagacaaactgagtctcaaaaaggccgtgtacctggctttgtgcgacaaactgggaatagcagaaacaggaattggacccagatccagtttgggccaacacccatgttattgcccagttccttttctccctgcctcaggtgccaactcagggttcttgacctcccctgggaagagactttggtcactacccatgtccaagcaaagatagaagaatccatgggattggattttgtgcaccggccagccttcggggagctgatagtagaagatgcttttcctggcaaagctccctgtgtgcccacctggattgcaccagcagcatgcatctcagctgcacctgcaaatatcccccctaggtcaggcaggatttagagagtccagccagcatccattaaccact

SEQ ID NO: 1604 - DNA, 511 bp, Homo sapiens
  MAP TO CHR22_54.0; EXPRESSED IN LUNG, SIGNAL = 0.97; EXPRESSED IN BONE MARROW, SIGNAL = 0.96; EXPRESSED IN PLACENTA, SIGNAL =   1; EXPRESSED IN BRAIN, SIGNAL = 0.88; EXPRESSED IN HELA, SIGNAL = 1.2; EXPRESSED IN FETAL LIVER, SIGNAL =   1; SWISSPROT HIT: P16256, EVALUE 3.60e+00; EST_HUMAN HIT: BI519931.1, EVALUE 4.60e-02
atgtagggcactcatcggagaaaaagtcaattaccctctggcatccgctgcttggttacagcagtcactgcctatccatggactaattcaaccagtaaaacatttaatgaccatctacttaaggcagatgcttgcacaaagatcaatcagacccagacccagacccaaacccagagctccatgcctggagccatcggaacctgcacaaagacggtgcggcttttggagggaatctcttctaatccccaaattgatgacctctggaagaatgtgagggaactccgcgatctctgctctgtaagaacatgggcctctgtgccttggttcctggctggtgcctgcctcagacttgctgcctgggttcccccgtgtccccactgctgcctctgcatctcactggcatttctcaagggcccaccctggcccaggcctcttctaggagctttccacgcactctctgattcctcctccccacagagtgctgctgggtgctgagtggatggatggaggt

SEQ ID NO: 1605 - DNA, 505 bp, Homo sapiens
  MAP TO CHR22_171.0; EXPRESSED IN PLACENTA, SIGNAL = 2.2; EXPRESSED IN LUNG, SIGNAL = 2.1; EXPRESSED IN HELA, SIGNAL = 2.3; EXPRESSED IN BRAIN, SIGNAL =   2; EXPRESSED IN FETAL LIVER, SIGNAL = 2.1; EXPRESSED IN BONE MARROW, SIGNAL = 2.2; EXPRESSED IN HEART, SIGNAL = 1.9; SWISSPROT HIT: O18964, EVALUE 6.20e-02; NT HIT: gi14779734, EVALUE 0.00e+00; EST_HUMAN HIT: AI347059.1, EVALUE 0.00e+00
cagagcacagagcacaggagcacgacgaggatggtgcaaggcacccgccaaatcctctgggctccgtgactaaagctgagggaggaagtagccatcagggtccctttggtgccgtctggtctcggcactccttggagctgatcactctcttgctccctgcctaggcccctctccagaaggcccgatgcccctgggtgggggcgaggacgaggatgcagaggaggcagtagagcttcctgaggcctcggcccccaaggccgctctggagcccaaggagtccaggagcccgcagcaggtgggacccacatggaggcctgcagaacctgagctgtgaactggcaaccctggctctggggccgagtcaccttgcacaaggaggacagtggtatggccttggccccagaccactggtctggggcagaagcccacctgtcttgcagcccgtcctgcaaccagcccttttgaagagcagcttctgtgttcctcccctctctgagcagaactg

SEQ ID NO: 1606 - DNA, 599 bp, Homo sapiens
  MAP TO CHR22_113.0; EXPRESSED IN HEART, SIGNAL = 1.7; EXPRESSED IN HELA, SIGNAL = 1.5; EXPRESSED IN ADULT LIVER, SIGNAL =   1; EXPRESSED IN LUNG, SIGNAL = 0.97; EXPRESSED IN PLACENTA, SIGNAL = 1.2; EXPRESSED IN BONE MARROW, SIGNAL =   1; EXPRESSED IN BRAIN, SIGNAL = 0.98; EXPRESSED IN FETAL LIVER, SIGNAL = 1.1; SWISSPROT HIT: P08686, EVALUE 2.60e+00; NT HIT: AJ400877.1, EVALUE 1.40e-01; EST_HUMAN HIT: BF951469.1, EVALUE 8.00e-72
gagcctggagatagctgtggtctcctaagtggtctccctctcctgcagaagctggagtgatactggtagcctggacatcagaccatgcctgtcccctgctcagaacccacccgtggtggtctcatctcagaggaaagcagaggctcccaagtcctggtccccaccccttctgccacctgccttcccctcgtctgcttatcacagggcgtcctggctgttatgaacctgccagcttcagatgctttgcactggcggttccctctgcctgaatgctcttccaggatatatgcacctcccaagcactccctcacctcctttaggtctctgcttcaatgtcacctttgccacaaggactttctgaccaccctgttgcaaactgaagccctccccgggcgcccatctctcctccctgtttcctctttgttctttgcgctcatcgctatgcaatgggacacaacagtgagcatggatcgtggcaatcgctctgcaatgggatgcgacagtgaacacggattgtggcgaatgcctgctgaatgctcactgggttcggggcaggtgcgaattgctgtccgactctaactcccttaatcctcatggca

SEQ ID NO: 1607 - DNA, 530 bp, Homo sapiens
  MAP TO AL138752.2; EXPRESSED IN LUNG, SIGNAL = 0.62; EXPRESSED IN BONE MARROW, SIGNAL = 0.65; EXPRESSED IN HELA, SIGNAL = 0.6; EXPRESSED IN BRAIN, SIGNAL = 0.73; SWISSPROT HIT: P26140, EVALUE 4.90e+00; NT HIT: AL161595.2, EVALUE 1.30e-01
tgaagtcttggggtttttggcatgatttgtgagatgaaattatgtgatagcagaaggaaggcctcctgcacttcatgtttacagtagagtcctacagatgggcaggggtagatgataaatagggaggagggatacttgagtggaataaatcatatatgactcagctgatcagtgaacgtttctgtgtcttgatgatttgtttccctgtgtaaacttgaaaactgctaggacctggattatgaacactcagatgacaagaacttcctgtttaaaaccgaaagccaacttaatgataatccctaggagagttcccacaggtgtcaagaaaaatataagaactataattatatatatatgtaattatatatagggattataattataatttattataatcctttattataatttaattttgttcaggaagtatttatcagttcaataagaagaaagaattacacatattataaaagagaaggcaaaattttttgcaagtgatcttttacatggtggaaactaaaacgttcacc

SEQ ID NO: 1608 - DNA, 534 bp, Homo sapiens
  MAP TO CHR22_164.0; EXPRESSED IN FETAL LIVER, SIGNAL = 0.81; EXPRESSED IN PLACENTA, SIGNAL =   1; EXPRESSED IN LUNG, SIGNAL = 1.4; EXPRESSED IN BONE MARROW, SIGNAL = 0.79; EXPRESSED IN BRAIN, SIGNAL = 0.66; EST_HUMAN HIT: BG768732.1, EVALUE 1.00e-107; NT HIT: AF139493.1, EVALUE 9.00e-43; SWISSPROT HIT: Q01115, EVALUE 2.30e-02
ttttgacaatgaagccagggcactggggaagggcctgcagtgactcacaagtgaaactagcaagaacttttccagacttaaaaaacaaaaaagaccgcccacagcctgcaggttggaagccctcctcccctggatgctgggggagcccacctaccagccttgaagctcagctcatcatgctcctgcccctcatagtcatacagggcccggactcgcacttccgtccccgaggtggcgtcgtcgtcgaatggattcgagtccccattggcatccgtggaggagaaggggttgttagactcatcgtctgaccagtcggtgggatagctctgggtcttctcgtagctgctcacactgcaagaaaggggaggccacagggccctcagcacagggcggcagagggtgtgaggcccccgccccgcaaggggagggcactggagccttggggctcagggctgagggctccttccgaaggagcacaggtggagccagtgctagtgtgagttcatgccatccacactcatcctgagccatcaa

SEQ ID NO: 1609 - DNA, 599 bp, Homo sapiens
  MAP TO CHR22_182.0; EXPRESSED IN BONE MARROW, SIGNAL = 0.69; EXPRESSED IN BRAIN, SIGNAL = 0.47; EXPRESSED IN FETAL LIVER, SIGNAL = 0.5; EXPRESSED IN PLACENTA, SIGNAL = 0.55; EXPRESSED IN LUNG, SIGNAL = 0.62; EXPRESSED IN ADULT LIVER, SIGNAL = 0.55; EST_HUMAN HIT: AA827701.1, EVALUE 3.00e-53; SWISSPROT HIT: P08855, EVALUE 6.70e-01
atgttggagctgttatgcccggggcacagtcttagcccataggcccagtcgcagctctgggaaagggagagatgggagggagagacagaggaccccgatttggaggaaggtaagagatctcacaggctcacctttgcccctctccacagctggctgctcggtgctggtgaacacctcttgcaggctggtgaacctcaccgcccacctgaggcagaaagcagggttgcccccagatggtgaggagacagggaggagaaggaggggctgaggggtcccaggcaggggtgccagccctgcccagtctctctccatgtcctcccagcgaccattgctctcctggctgaggatggcaacctagtgagcctggaggaggacctgaaggaaggggcttcccgggcccagaccatgggcaactccctactgaaggagcgagccatatatgtcctcgttcggatcatcagtaaggtggcccaaggttctctcccctgcagctatggtagaatgtaagaggggggcatagcagaccatagaccacccaaggccctgtccggcctcccacctcggctggggacctagccccaatccatccctacccaatg

SEQ ID NO: 1610 - DNA, 557 bp, Homo sapiens
  MAP TO AL135909.3; EXPRESSED IN HELA, SIGNAL = 1.6; EXPRESSED IN BONE MARROW, SIGNAL = 1.5; EXPRESSED IN BRAIN, SIGNAL = 1.8; EXPRESSED IN HEART, SIGNAL = 1.7; SWISSPROT HIT: P08547, EVALUE 5.00e-04; EST_HUMAN HIT: C16593.1, EVALUE 3.00e-06; NT HIT: AJ006345.1, EVALUE 2.00e-03
ttcaagattggactcagggcaaagatgtaccctcttaatgttgtaatagaagtcctagcctatgaaatagggcaagaaaatgaaataaagaatataatgtttgttgatgtagaaaattctaaggaacgtataagcaaccactagaactaataagcaaatttaacaatattacaggatacatggccaatactccacaatcgtccttttatgtactagcagcaaacaattgaaaaatttttaaaaatccacttacaatagcaattagaaatatgtaaaatacttacaaataaattaaataaaaccatacaaaatttctacactaaaaattacaaaacattgttgagataaattaaggaaaacccaaataaatgaagatatatactatgttcatggattagaagacccaagtgaacatgagaaagaaaaagacaattgaaagatttaccctatctgaattcaaaatgtgctaaagttaatcaagatagtatatggtattggcataaggtctaacaaatatcaatggaacagaatagagagctcggaaacagactcacact

SEQ ID NO: 1611 - DNA, 599 bp, Homo sapiens
  MAP TO CHR22_167.0; EXPRESSED IN FETAL LIVER, SIGNAL = 1.5; EXPRESSED IN BONE MARROW, SIGNAL = 1.5; EXPRESSED IN BRAIN, SIGNAL = 1.3; EXPRESSED IN PLACENTA, SIGNAL = 1.3; EXPRESSED IN LUNG, SIGNAL = 1.4; NT HIT: gi14779414, EVALUE 0.00e+00; SWISSPROT HIT: Q14166, EVALUE 2.00e-26; EST_HUMAN HIT: BF970051.1, EVALUE 0.00e+00
agtgcacagatggtggtgaggggtgagggcagggcgtggggtggtgctcagccctggggacaccatcactgtcctgctctgacccacaggtgagaggaggatgctgtgctcccggagtgtggcgccgggaggatggctcggcaggacagaggcctggggctgaggctatgcccagggccggtgtggggagggacatgggggcctttgcagaagcagctcagagaactgaggttggaatcctgccccaagcacaggttttggggacagcgagtgcctagacaaggcaggtaacgtggcagccaccgggctggtccagaaacaaggtgctgaagacgtcgttgaagaaggtggggtggtacctgcaggctcgctcacagtcggggttgaagttcacctccaggatctgcggctgcatcacccgccttcctgatggcaaagagcgcagcagagtgtgaaggctcgttggcctccactctgcagggacagtggcctggggatccagcaaaggctgggaggccatgaacctgggccctgattcccaggggatgagcaggacaaggccgggcctagaacttgggtctcttgactttgctggggag

SEQ ID NO: 1612 - DNA, 504 bp, Homo sapiens
  MAP TO AC021260.4; EXPRESSED IN BRAIN, SIGNAL = 2.1; EXPRESSED IN HEART, SIGNAL = 2.2; EXPRESSED IN FETAL LIVER, SIGNAL = 1.8; EXPRESSED IN PLACENTA, SIGNAL =   3; EXPRESSED IN LUNG, SIGNAL = 2.2; EXPRESSED IN BONE MARROW, SIGNAL = 1.8; SWISSPROT HIT: P35415, EVALUE 6.20e-02; EST_HUMAN HIT: AL599865.1, EVALUE 0.00e+00
tggggtcctgaatgaaagagaaatgaacccataggaatttctacatataagtaaatcagtcattaatataactttatattatcaatgctcacactggagttcataaaataacacatctttatattaaaatttcattaagcaattccatgagataaaattaaaatatttcgaatatgacttaaaaagagcaaagtcacctctacttgtgatgccaaatgtgctttctccttgtcttttctctccatgcaccgtttcacttcctctaactcagatgccattgcgctgaagttcagctgcactctcaaatctgacatttgcttctccaggtcctgtttttcccgctcaaccccttaaaagataaaatgtaaggctcaagggttgttctttattcacagaagaatgtactttcaaatagtactgagccctgatgtttcaatattctagctatcataatccatttattgacagttactcaacagactttgccagcctgttgtttcaagt

SEQ ID NO: 1613 - DNA, 586 bp, Homo sapiens
  MAP TO AL133515.2; EXPRESSED IN FETAL LIVER, SIGNAL = 0.93; EXPRESSED IN PLACENTA, SIGNAL = 0.34; EXPRESSED IN HELA, SIGNAL = 1.1; EXPRESSED IN BRAIN, SIGNAL = 1.2; NT HIT: gi15296873, EVALUE 2.00e-93; EST_HUMAN HIT: BG769562.1, EVALUE 2.10e-01
caccttccttagccacttctgaatttattgaatttattcatgaagttggcattaacttgacaaaaacaagtgtgtgaaaagtattttaccctctatgtattttgtattttattatgtgatgtttgatatatctcacctaaaggattgcgaatttcaatcattggagaaggcccactcaaagacacagtgacctctttcaggctgggatcaaaaggaattctccaagtatttacagcctgttccaaatgatctgtggataaaaggtgaactttggaggcctgtactgcttcttctacccattttaatacctataagagagaaagagaagtgtaagtgatatcagaaaacattcgcagttttatatcattgctgtttcaggtcctttgggtgatcaaatgactccggcacatcctggactggtgtgaaatttatttcggtcattactgaagataggactctttctaattctggttagtgtacattcaaaacaaaatgctggtttaacccatgttcaaatttcaagttttctatcttgaataatacatttaaaatgagactatagtgtacaaaaccagtgaggggagac

SEQ ID NO: 1614 - DNA, 546 bp, Homo sapiens
  MAP TO CHR22_184_2.0; EXPRESSED IN BRAIN, SIGNAL = 1.1; EXPRESSED IN HELA, SIGNAL = 0.61; EXPRESSED IN FETAL LIVER, SIGNAL = 1.1; EXPRESSED IN PLACENTA, SIGNAL = 1.2; EXPRESSED IN LUNG, SIGNAL = 0.95; EXPRESSED IN ADULT LIVER, SIGNAL = 0.98; EXPRESSED IN BONE MARROW, SIGNAL = 1.1; NT HIT: AL163213.2, EVALUE 8.00e-03; EST_HUMAN HIT: BF335817.1, EVALUE 1.20e-02
gcccattttgaagactggaggatgtagaactgatgcccagaaaaataaaatggcttgaaaaaattcacacagagagttacaggcagatcttgtattagaacccagtgtattaatcagctactgctgcataataaacatccatcaatctcagcaatgtaaaacctccattatggattcctaggcacctacctgtgaattagctgggccatgatggccaagatactcttctcagggcaagagaagccccaagacagctctaccgccaaagcacatttcaagccttttcttacatcatctactaacttcccattgcccaaagcaaatcacaaggccaagcccctcagtaatggggtcagggagtatgccacattcagggaggatgactcagcccagggtgttcttgtgggaatggtgagagatagagagagaatataaatgcctgcagtacaggcaggtaacatgcaagggtgtaagtgggccaagacgaaaggcaataaggagaggtagggcgtgtggaactgtgagaccatgccttcaactccaact

SEQ ID NO: 1615 - DNA, 600 bp, Homo sapiens
  MAP TO AC011731.4; EXPRESSED IN BONE MARROW, SIGNAL = 1.1; EXPRESSED IN BRAIN, SIGNAL = 1.2; EXPRESSED IN HELA, SIGNAL =   1; EXPRESSED IN PLACENTA, SIGNAL = 1.3; EXPRESSED IN LUNG, SIGNAL = 1.3; EXPRESSED IN ADULT LIVER, SIGNAL = 1.2; EST_HUMAN HIT: AW844871.1, EVALUE 1.00e-122; SWISSPROT HIT: O59950, EVALUE 3.40e+00; NT HIT: AL161515.2, EVALUE 8.90e+00
tgagaaggtatgtcaggcagctactattatttttcctccaaattaataagtgtaaggtacctgtttaatcagctggaggttagaaaaaaaataatataaatatttttcatggaaacaaacaagacaaaacaacaacaacaaaagtaagttgaaagccatatgtgttaaggtcactcttagcatttttaccttacatgacaagcagagaccaggaaaagacaaggacatgaatttaaggtactcaagttccaaatacacgaatccattgctagttgtttctttttctctcttttctcaacaagttggggaacacatgcagaggcaacaacagccaccgactgagttgactatattctccatggggctgagtatggacaaggcgtatttcccggacgccatgggcagggggtctccatcaatgacgtggatattcaacactacagggcctggctccctgcttgcggaggactcatgggtcaccctgaatggcccaaactctctgatacctggcagagtggtaaggtatttgaaacatctattaggaacagaaatatttatagttagtcattattttcttaaaccttcttggtgggttcagaa

SEQ ID NO: 1616 - DNA, 571 bp, Homo sapiens
  MAP TO CHR22_235.0; EXPRESSED IN BRAIN, SIGNAL = 1.3; EXPRESSED IN HELA, SIGNAL = 3.6; EXPRESSED IN FETAL LIVER, SIGNAL = 1.3; EXPRESSED IN BONE MARROW, SIGNAL = 1.5; EXPRESSED IN LUNG, SIGNAL = 1.1; EXPRESSED IN ADULT LIVER, SIGNAL =   1; EST_HUMAN HIT: W27511.1, EVALUE 2.00e-01; SWISSPROT HIT: P97737, EVALUE 1.10e+00; NT HIT: Z29555.2, EVALUE 2.20e+00
acttgggtgttgccaaattccctattaaaaatatgttagggacatcctcatccatggatctttgtgcagctctccaaggaggtctttctgtttgggagacttgacaagtttccaaggaagaaagaagttcggcccgtggtgaggtgcacaggcttgggagcaagctttccagagccttgctgcttcatccacaaaccgggacaggaagctgacgtctcccccaagggctggcatgaggacccattgattgtgttcacgcagactgcttgtaacagtgtctgctgtacaggagacatgatcgtgattattgttaccatgattaatgtcgtgcgcaggcctctcctgggtgccggggattcagctgcgatgaacaggacaaagtccagatctcatgggaccggcatgggggtgatctcagggaggacaacagagaaaatggaagccaagaaccgggaacagggattccgacagatctgggtttctgatcttgtggtttgggagccttcacatggatactcgcaggagtgggaaggccggggctgggacaggtggtggggatctagctgcagag

SEQ ID NO: 1617 - DNA, 571 bp, Homo sapiens
  MAP TO CHR22_48.0; EXPRESSED IN PLACENTA, SIGNAL = 0.92; EXPRESSED IN BONE MARROW, SIGNAL = 0.96; EXPRESSED IN LUNG, SIGNAL = 1.1; EXPRESSED IN ADULT LIVER, SIGNAL = 1.1; EXPRESSED IN HELA, SIGNAL = 0.56; EXPRESSED IN BRAIN, SIGNAL = 1.2; EXPRESSED IN FETAL LIVER, SIGNAL = 0.9; SWISSPROT HIT: P15747, EVALUE 1.90e+00; NT HIT: U25838.1, EVALUE 2.00e-03
tcatcaccatcatcaccaccatcatcttcaccatcaccatcatcatcattgccatcatcaccatcattacgtcatcaccagcatcatcatcaccatcaccatcattctgtcatcaccatcatcattactatcaccatcatttcatcaccgtcatcattaccatcatcaccatcatcatcactatcaccagcatcatttcatcaccatcaccaccaccatcatcatcactatcaccatcatttcctcaccatcatcaccatcaacaaactgtacagcaggatgggtccatggtggggctgagtgttggaagtttagtctgaaggcctctgcttctcccacgttggaccttgttgagctgccaagggccctgtccatgcctgctcctgaggcagcctcttctgtccagcccccagggaggttggttggagtggaagacactggctgagtctgagtcaggggcaccgaggtgacagtggccattgttattagtcatatcttacactttcacctataaggaagaaaatgccaacaaaacgcggtactggagaatggttccacctgtgtgggaaac

SEQ ID NO: 1618 - DNA, 545 bp, Homo sapiens
  MAP TO CHR21_13.0; EXPRESSED IN HELA, SIGNAL = 3.2; EXPRESSED IN FETAL LIVER, SIGNAL = 1.1; EXPRESSED IN PLACENTA, SIGNAL = 0.66; EXPRESSED IN LUNG, SIGNAL = 0.72; EXPRESSED IN BONE MARROW, SIGNAL = 1.2; EXPRESSED IN ADULT LIVER, SIGNAL = 0.77; EXPRESSED IN BRAIN, SIGNAL = 1.2; EST_HUMAN HIT: BF219079.1, EVALUE 1.00e-70; SWISSPROT HIT: P98073, EVALUE 9.00e-22; NT HIT: Y19126.1, EVALUE 0.00e+00
agcatgattccacttcctccctggtatattgctagaattttaatttcatagcttaatgattcaaagaaatcaaataatgttcacacatacctaggatatcaacgctgttcaaatcaatatggaaagtgaccagttggctggatttatttgcttcaaggccttgaatcagttcttcttttacattttcatctgacacccactgggcaaagaaaaggtcaaatacgactataatgctgccatttctgcaaagcaaaagaggatataagaggaaaaagtcagccatcttccactgatttgtgttcaattcatgttaaatgtctttgaaattctctatagttatcatcttgctaattctcattatacctgtgtaaggtagtcacttcaaatcttatctttatttcatgagggaaagaaaaagtgaattgaaagactaaatgcttttttgagaagagaaactccaaagtagatgcaaaattgaaatctgagttttctgagttccacgttcaagtactcatccccaggccaggatgttcctgagacccttg

SEQ ID NO: 1619 - DNA, 567 bp, Homo sapiens
  MAP TO CHR22_139.0; EXPRESSED IN BRAIN, SIGNAL = 0.91; EXPRESSED IN HELA, SIGNAL = 1.7; EXPRESSED IN FETAL LIVER, SIGNAL = 0.88; EXPRESSED IN BONE MARROW, SIGNAL = 1.2; EXPRESSED IN PLACENTA, SIGNAL = 0.94; EXPRESSED IN LUNG, SIGNAL = 1.1; EXPRESSED IN ADULT LIVER, SIGNAL = 0.9; SWISSPROT HIT: P54258, EVALUE 6.00e-04; NT HIT: D50610.1, EVALUE 1.40e-01; EST_HUMAN HIT: BF913045.1, EVALUE 4.00e-18
caactgggtcttcacccttgccctggctccaaagctcccactataataatataacatgtaccatttagtgaacacttcctgtatctgccccagggctaacacctcctctcactttattttccacaatctatgtggtaggtagtacagttatcctactgtatagaagaggaaagtaaggactgaaaggtcagcattcttgcctgagcttacatgggccaggaggttccaaagcgagtagcctgggcccagactcacacacaggtgcctctcctttaccatcaggaagcgtgcctcttctttaccatcactcacacacaggtgcctctcctttaccatcaggaagcgtgcctcttctttaccatcactcacacacaggtgcctctcctttaccatcaggaagcgtgcctcttctttaccatcactcacacacaggtgcctctcctttaccatcaggaagcgtgcctcttctttaccatcactcacacacaggtgcctctcctttaccatcaggaagcgtgcctcttctttaccatccatcactcacacacaggtgcctctcctttacca

SEQ ID NO: 1620 - DNA, 586 bp, Homo sapiens
  MAP TO AC022247.2; EXPRESSED IN PLACENTA, SIGNAL = 0.59; EXPRESSED IN LUNG, SIGNAL = 0.54; EXPRESSED IN ADULT LIVER, SIGNAL = 0.49; EXPRESSED IN BONE MARROW, SIGNAL = 0.5; EXPRESSED IN BRAIN, SIGNAL = 0.66; EST_HUMAN HIT: BI767641.1, EVALUE 3.00e-96; SWISSPROT HIT: P39968, EVALUE 1.10e-02; NT HIT: gi15594346, EVALUE 8.70e+00
agtagctgcgcagtttccacatattagatttcctgtttcaaaagaagtacattttatttgaatgccattctattctttaaaaacaaatacatttccaaaatactttttcacaggagacaatgacttacaaaatgtgaaaattgaaagattatctacattaagcttccattatttttttctctgaatgataaataccagtaacaagaagatctgatgatgcaaaactggtgcatttttaaaagcttttttctatttttaatgggaaaataaattctaaaatgagctttcatcagaacgctttttagaaattaatcttacctgcaccaagttgtaaatgcattccatagagttcttctttacatccgggtcagggctactcagtagtctgatgagtggctctaatcccccatgttcaaatatttgcactttactggtgtactctgcagacatgtttgctagacaaagactagcaaactcatggataactacttcttctgtgtatcaaaaataaataacacaagtatgccaactgcttattattcagccactactttaaaatatgctttggaaaccaaagctccacaaa

SEQ ID NO: 1621 - DNA, 508 bp, Homo sapiens
  MAP TO AL135783.6; EXPRESSED IN FETAL LIVER, SIGNAL = 0.7; EXPRESSED IN PLACENTA, SIGNAL =   1; EXPRESSED IN LUNG, SIGNAL = 1.1; EXPRESSED IN BRAIN, SIGNAL = 0.7; SWISSPROT HIT: P29965, EVALUE 2.00e-68; NT HIT: D31797.1, EVALUE 0.00e+00
tgcttcacctcaccacaaactttccctttctttgtaacagtgttacagtgggctgaaaaaggatactacaccatgagcaacaacttggtaaccctggaaaatgggaaacagctgaccgttaaaagacaaggactctattatatctatgcccaagtcaccttctgttccaatcgggaagcttcgagtcaagctccatttatagccagcctctgcctaaagtcccccggtagattcgagagaatcttactcagagctgcaaatacccacagttccgccaaaccttgcgggcaacaatccattcacttgggaggagtatttgaattgcaaccaggtgcttcggtgtttgtcaatgtgactgatccaagccaagtgagccatggcactggcttcacgtcctttggcttactcaaactctgaacagtgtcaccttgcaggctgtggtggagctgacgctgggagtcttcataatacagcacagcggttaagcccaccccctgttaactgccta

SEQ ID NO: 1622 - DNA, 561 bp, Homo sapiens
  MAP TO AL133499.1; EXPRESSED IN BONE MARROW, SIGNAL = 0.44; EXPRESSED IN BRAIN, SIGNAL = 0.46; EXPRESSED IN FETAL LIVER, SIGNAL = 0.42; EXPRESSED IN LUNG, SIGNAL = 0.77; EST_HUMAN HIT: N88044.1, EVALUE 6.00e-91; SWISSPROT HIT: P78563, EVALUE 2.00e-26; NT HIT: AL163301.2, EVALUE 0.00e+00
aatgacgatggttggctttccagaaatgtcacaaagtgagtcctcaataggaggttgtttgcgtgtatacatttgcccacttaaaaaataggtggtaagaatatgcatgaagatgagcttgaaaagtctgttggcccctgaaaagttaagtcactgagaataagagtcagacttcaggagcacagttaggcaaacattactgtgaattacagaaaatagtgtctctttttttttttttcaggcacagatgttaaagatgccaaggtgataagtgtttctacaggaacaaaatgtattaatggtgaatacatgagtgatcgtggccttgcattaaatgactgccatgcagaaataatatctcggagatccttgctcagatttctttatacacaacttgagctttacttaaagtaagtttagtaaacaaataaggacaggaagctctttttaaaaaatattcctctattagaaaacattgcaaaacctttcattgtttctgtaatcatggaaaatctctcaaaatcataactttaattagtaacaataaggctgcatcccatt

SEQ ID NO: 1623 - DNA, 523 bp, Homo sapiens
  MAP TO AL136311.2; EXPRESSED IN FETAL LIVER, SIGNAL = 0.78; EXPRESSED IN LUNG, SIGNAL = 0.67; EXPRESSED IN BONE MARROW, SIGNAL = 0.74; EXPRESSED IN BRAIN, SIGNAL = 0.4; EXPRESSED IN PLACENTA, SIGNAL = 0.63; EST_HUMAN HIT: AA322998.1, EVALUE 4.00e-89; NT HIT: gi14783253, EVALUE 5.00e-69
catttctgcattgaacggtggtgacatctgtaaaaaccacttatgcttacacttatagaataatgccattcaaagaatttttacacacattgcttttgattttgcctaatatccatgtgagttttaagatgagttgacagattcagggaagttggtccactttctcaagactttaaagcaacaagatgttgatgcttatgctaggatggagttcttccacattctgatctagtactttgcctctagaaaaatttttttctagtatgtgttttttcttgataaaatttttggcctttcctctcctgtttgattatcatttttgccttttctaaaattaataggaggaaacaccaattggaagcctccgctcaactgtaagatttataactacctgaacaggattggatgcttcttccttcatcctcgctgtagtaaaagaaaagatgctgctgattttgccatatgtatgcatgtgagtcattgttttattcaaaatctaatgtgaatctcagacccacttgca

SEQ ID NO: 1624 - DNA, 586 bp, Homo sapiens
  MAP TO CHR21_21.0; EXPRESSED IN BONE MARROW, SIGNAL = 1.7; EXPRESSED IN BRAIN, SIGNAL = 1.3; EXPRESSED IN PLACENTA, SIGNAL = 0.86; EXPRESSED IN HELA, SIGNAL = 3.9; EXPRESSED IN LUNG, SIGNAL =   1; EXPRESSED IN FETAL LIVER, SIGNAL = 1.3; EXPRESSED IN ADULT LIVER, SIGNAL = 0.8; EST_HUMAN HIT: BF435195.1, EVALUE 2.10e-01; NT HIT: AL161495.2, EVALUE 3.60e-02
gacctgaacccacattggtccctaagcactgatacttctccattacctcagtgcttgacttcttgtgcagttagtcatgttcatagtaaagctccaccattgtttgataattgctttaatctgctgcttatttcgttggaaaggtttcccagttacgtttgttccttgtatgctgtagagaatgaaagactttgcaagttttattagtttgttaggtagaaggataatgcattttctaagtatatgggtattcgttggaattaacagctttattaatgatttgcaaggataatgacacagataaattcggagtcccaacattttctttaaaataagaagttgaaaaacaagatgattccacttaactgttggcagttgttatatcatgacttaaaaaacaaatcaagtgattttcaatgaagaaggaaataatgttaattttgggataggaaactgattcctttagtggcactgtaggtgagttagtgtatgtatgtgtctatctttgtgtttcttcctgaggacgattttaaactgatactggcagcatggggtagattcgaataggtgactgattaagcctgcg

SEQ ID NO: 1625 - DNA, 598 bp, Homo sapiens
  MAP TO CHR22_193.0; EXPRESSED IN BRAIN, SIGNAL = 0.7; EXPRESSED IN LUNG, SIGNAL = 0.75; EXPRESSED IN ADULT LIVER, SIGNAL = 0.61; EXPRESSED IN HELA, SIGNAL = 0.63; EXPRESSED IN FETAL LIVER, SIGNAL = 0.67; EXPRESSED IN BONE MARROW, SIGNAL = 0.77; EST_HUMAN HIT: AA194724.1, EVALUE 2.10e-01; SWISSPROT HIT: Q03211, EVALUE 3.90e-01; NT HIT: AJ277661.1, EVALUE 2.30e+00
tggtgcctttcctaagttggaaatgggttagtccacaaatcccgttgcctggtccatgccaggtccaggtacctgcattcagggtgcagggtggagtaagacagtctgaagggagaggtagcaggatgaatgagtaattcctgggtgcgttttgggattatgcctaagggctgtccgagcacgtgggaggggtagctaaatcctgtaagggaggggagaatggggaaggctgcctgcaagaggtggtggagggtgctttcaaaggatacctgggagtgagctggctgtaggcacagggcagctggaaggccaattttagggaagaggaaattgaggctgaaagtcaaaaaacaaaggaactgcctgaggtctctcaactgagaagtgagtgggccagggttcacattcagcccccactccattctcaggccgggcaggaaggtactttgccctcaggagggcaccttcgacccaaagcaccctgaccaagaggctgtgcaccgtggcaaccctaagactgaggcccaggtcctggagttccaccaaggtaggtacaaccagccaggccgtcagtgacaggaggatttactggggcttc

SEQ ID NO: 1626 - DNA, 548 bp, Homo sapiens
  MAP TO AL133492.1; EXPRESSED IN BRAIN, SIGNAL = 0.9; EXPRESSED IN HEART, SIGNAL = 1.1; EXPRESSED IN PLACENTA, SIGNAL = 1.3; EXPRESSED IN FETAL LIVER, SIGNAL = 0.85; EXPRESSED IN LUNG, SIGNAL = 1.2; EXPRESSED IN ADULT LIVER, SIGNAL = 1.2; EXPRESSED IN BONE MARROW, SIGNAL = 1.1; NT HIT: AL163303.2, EVALUE 0.00e+00; EST_HUMAN HIT: AI174893.1, EVALUE 4.90e-02
gaaatattttggggcaaggctgacattttctgcttcagttgtgactaagtacatcacataccttagtcagaggagaaacactctatatcttagatacatggcatctaactgggtgcctcaaatgatgaaatattgagtacttcctgtaaacttggactttctaggttcctcttctaaagacaccatcaccgtgacctctgcaatgtcagtgtctgaagataggcgacgacttttcagaatttggcactgccgtgagagctgctgttttcccaacatgttcagactaagacggggaccttttttttttctttaattgctatttcttaatattttttctgattttagaatggtgttagatttacagaattatgatgaggatggtacagagaatctttgtaaaccccacatccagtttaacatcttacatcagtaagggacatttgtcatagttaatggaccaatatcagccattattattaactaaagtccatacttcagatttcttcagttttcccgtaatgtccttttctgttccaggatcctagcca

SEQ ID NO: 1627 - DNA, 558 bp, Homo sapiens
  MAP TO AL136180.1; EXPRESSED IN FETAL LIVER, SIGNAL = 4.9; EXPRESSED IN BONE MARROW, SIGNAL = 5.5; EXPRESSED IN BRAIN, SIGNAL =   4; EXPRESSED IN PLACENTA, SIGNAL = 7.3; EXPRESSED IN LUNG, SIGNAL = 7.9; EXPRESSED IN ADULT LIVER, SIGNAL = 7.8; NT HIT: AF289203.1, EVALUE 0.00e+00; EST_HUMAN HIT: BG740164.1, EVALUE 3.00e-99
ctggagttgctcattcctcccagtgggttcgtggtctcgctggcttcaggagtgaagttacagaccttcgcagtgagtgttatagctcataaaggtggtgtggacccaaagagtgagcagcagcaagatttattgtgaaaagcgaaagagcgaagcttccacagcatggaaggggacccaagagggttgccgctgctggctcgggtggcctgcttttatgccattatctggctgcacccacatcctactgattggtccattttacagagatctgattggtccattttgacagggtgctgattggtgcatttacaaacctttagctagacacagagtgctgattggtgcgtttacaatcctttagctagacacaaaagttctccaagtccccgctagattagctggacacagagcgctgattggtgcatttacaaacctttagctagacacagagtgctgattggtgcgtttacaatcctttagctagacagaaaagttctccaagtccccactcgtcccagaagcccagccagcttcacttctcactggcactcacca

SEQ ID NO: 1628 - DNA, 573 bp, Homo sapiens
  MAP TO AL137178.3; EXPRESSED IN PLACENTA, SIGNAL = 0.57; EXPRESSED IN BONE MARROW, SIGNAL = 0.46; EXPRESSED IN ADULT LIVER, SIGNAL = 0.63; EXPRESSED IN LUNG, SIGNAL = 0.55; EXPRESSED IN BRAIN, SIGNAL = 0.44; EXPRESSED IN FETAL LIVER, SIGNAL = 0.48; SWISSPROT HIT: P22003, EVALUE 9.00e-15; EST_HUMAN HIT: BI044083.1, EVALUE 0.00e+00; NT HIT: gi13643569, EVALUE 1.00e-106
ttgatttgcagcatacgaccccataactctctgtgcataactgctgctcgggtttattcttacctccaacactggacattctggaggagtcctgatgagagctggatttattgcggttttgattttttcgtttgttggctgctctcacggatcgaagaagtacctcactcgccttgaagaaggccaccatgaatggttgttttgactgaggtccctgtcttcccacaagaccagcagattttacgttgatactgcgtcctagaacgtaatacaaaagcacttggtttatgaaaaagaaagaacaattacctgatgtgaatgaattctgagggtactttgaaaaggggaaaagttttaaaacattatcagaatgccttccttacaggccaagattcttataaatattgaggcttactattacagacaattatccatctatggtgttacatcttgcatcattcttccaccacagaataccctccagctgctttcactcactgagagcttctcagaccttgaagtcaagaatactataaattggaagatttgactactcattcgcctggaaatgtc

SEQ ID NO: 1629 - DNA, 591 bp, Homo sapiens
  MAP TO AL138478.1; EXPRESSED IN BRAIN, SIGNAL = 1.7; EXPRESSED IN PLACENTA, SIGNAL = 2.1; EXPRESSED IN LUNG, SIGNAL = 2.1; EXPRESSED IN ADULT LIVER, SIGNAL = 2.3; EXPRESSED IN FETAL LIVER, SIGNAL = 1.7; EXPRESSED IN BONE MARROW, SIGNAL = 1.8; SWISSPROT HIT: Q00939, EVALUE 2.90e-01; EST_HUMAN HIT: BE151592.1, EVALUE 8.30e-01; NT HIT: AF099810.1, EVALUE 2.20e+00
cctccagaaacagaagcaggagaggtgggcggaagtgaagccatcctttccctctgaccctgcagaccctcgcgcagccacggatcagaagcaggaggctgctgagggcctggctcagctctgaagctgtgcagcatgtccaaggggctctcctggcatgccacagagcaccgaggagtcctcatgggtcccttccaaagtatattttgaaccattctgattctcttcactgccactatccccattccagtcacagtcacagtcacctctccaggacaatgcactggcctcctaacatccctccctgcttcttacctccaccttccacccatcactccaccctctcgtctggagcccactctccaaatagcaggcagcagcgtggccttcctgaacacaagtgactccagcatcacacacatcaccctcccctggtttcccctttttctcctaaatcctgcatgatggagccacagcttccctctctggcccatcctgccccatcccctgtctcctgagcgctcaccctttggccacagtggcctttatgcggcccctcaaagtgaatactccttcttcccaggaccctta

SEQ ID NO: 1630 - DNA, 563 bp, Homo sapiens
  MAP TO CHR22_198.0; EXPRESSED IN BRAIN, SIGNAL = 0.46; EXPRESSED IN BONE MARROW, SIGNAL = 0.44; EXPRESSED IN PLACENTA, SIGNAL = 0.54; EXPRESSED IN LUNG, SIGNAL = 0.52; SWISSPROT HIT: Q06205, EVALUE 1.80e+00; NT HIT: AF224669.1, EVALUE 2.00e-06; EST_HUMAN HIT: AW833902.1, EVALUE 7.00e-26
gagccatcattttatgtgcttgtaacttttcctatctctctttattttgtttttagcatgaatgtaaccctgaatagtcacatttgcaatatttgctctttttaaaaaatacagttttaggattcaaatgctttcccaatgtgtctctttttgtcatcggccttttgttttttccccctttgaattgtcctgcttttccggattgaatcaatacataccttacgtgcattgattgatgttttatgtctccttaaaacatatacaaccaagctgtgatgcagccacgttgggcacatgttgtcaggaccccctggggctgtgtcatgggtcatggtcctcacattaggctcaggataagtctcttcaaatattttacagagtttggcttttttgtcaacagttcttaccagtggtccccattgttttgcatgtgttttcttgcaacttaaagtgagggtgttttcatctttatcattgtgctgcttgtgttctatcttgtgcttctttcttcccttcactcttctcactatagaggttgattgggatggtacgggttggatttg

SEQ ID NO: 1631 - DNA, 514 bp, Homo sapiens
  MAP TO AL133269.6; EXPRESSED IN BONE MARROW, SIGNAL = 4.6; EXPRESSED IN HELA, SIGNAL = 4.8; EXPRESSED IN BRAIN, SIGNAL = 3.6; EXPRESSED IN FETAL LIVER, SIGNAL = 3.4; EXPRESSED IN PLACENTA, SIGNAL = 4.5; EXPRESSED IN LUNG, SIGNAL = 4.2; EXPRESSED IN ADULT LIVER, SIGNAL = 3.9; NT HIT: gi13129105, EVALUE 8.00e-74; EST_HUMAN HIT: BG121943.1, EVALUE 3.00e-83; SWISSPROT HIT: Q92212, EVALUE 5.50e-01
ttttgcattttgagctgtggttcgatagtcctggctggctttgacgggcttccacctccatggctgccttctccatctgggcaagccggatctgccggaggagttttctaggcttcttcccctacagagtaatgttggcacgtgcactggatgcctgcttcttgaggtggtgccgcgtgatcagcgcttgatctatcacagcttcgaccacccagtgcctcagacgctgcttgcggttcaacaccggcctgcgctgatcagctttttcttcagctcggttcggcgccagttgatttttccccccgggatcccccacagttgctcggcgacgccaatatgcggtccgtacttccgcctggggtttgttgtattggtgtggttttcacttcccgaggacatggttgtggggcttgctgttgtggtgcagtcgctgaatcccaaagacatggttacttccctgactacctatcttgcctcaggaatgtctatgctatgcctgtcccaccactgtatt

SEQ ID NO: 1632 - DNA, 521 bp, Homo sapiens
  MAP TO CHR22_86.0; EXPRESSED IN BRAIN, SIGNAL = 0.4; EXPRESSED IN HELA, SIGNAL = 0.88; EXPRESSED IN ADULT LIVER, SIGNAL = 0.45; EXPRESSED IN PLACENTA, SIGNAL = 0.36; NT HIT: gi11427757, EVALUE 1.00e-111; EST_HUMAN HIT: AU125898.1, EVALUE 1.00e-111; SWISSPROT HIT: P10569, EVALUE 1.90e-01
tttccactctctcaggagcctgcccagctgctcctggaagtgcgtctgggaggtgctgaacctgaccttcttcctgcacacagccctgggctccctggacctcttcttgagctttcacttggaccttaacaagtccttgatggctgtgtccaggtccttgtcactgtccagggaactgcttttgtcttcggagctcttcttcttgtctaggtgccttgcctcgtctgtcttaccctggccctgtgacgtgcgagtgtcaccgggcaccctagcggcgccctctcctcccggggcctcgctggctgtgccctggatggaaaggtcccaccctagcggcgccctcccatcccggggcctcgctggctgtgccctggatggaaaggtcccgcccctcatggccgggcccggctctcccctggctgcggtcggcatcctggccaaccctctttccccaccacccgcatgttcttgggagtggatggcctcacttggcagccgcctctatgcttccttttgcagcc

SEQ ID NO: 1633 - DNA, 594 bp, Homo sapiens
  MAP TO CHR21_34.0; EXPRESSED IN BONE MARROW, SIGNAL = 1.4; EXPRESSED IN BRAIN, SIGNAL = 1.4; EXPRESSED IN HELA, SIGNAL = 2.9; EXPRESSED IN FETAL LIVER, SIGNAL = 1.4; EXPRESSED IN PLACENTA, SIGNAL = 0.77; EXPRESSED IN LUNG, SIGNAL = 0.86; EXPRESSED IN ADULT LIVER, SIGNAL = 0.9; EST_HUMAN HIT: N51283.1, EVALUE 1.40e-02
cacttgttccacaaagcacgcctcctgtcagtccccagccagccatttctctcttgccaagtctagctgatgggggctctattacagaaggcttctgaactggttatgcaaattgactactagatccacacaatttaacctaactgagtactcaggaacttcaataaagaaaataaccagaaaaaaagagcctattctgggaattactaaaaaaaagagaaggaaaacattaacttgaaatcttccatttatctctctatttttcactttgattctaataaatgatattctttagagctagtcattctgccatagggtgtagctgctcataaatgagactttgaaatgccagttgtttgttatgaaatgttagttatttaacttgttccttcacaaaatgcagatcaccaatgacgaggacttttattccgcaattcaactccagttcaaggagaatatctaacacataaaaacatgtacctattcaagtgtatttaaatttaaataaaatttaaaataatgcttatgctatccatgcatgtcagaatatctcatttaattcaactactgctagcagtggtgacagcaacgttt

SEQ ID NO: 1634 - DNA, 586 bp, Homo sapiens
  MAP TO AL136113.1; EXPRESSED IN PLACENTA, SIGNAL = 3.4; EXPRESSED IN BONE MARROW, SIGNAL = 2.5; EXPRESSED IN LUNG, SIGNAL = 2.7; EXPRESSED IN ADULT LIVER, SIGNAL = 3.9; EXPRESSED IN BRAIN, SIGNAL = 2.6; EXPRESSED IN HELA, SIGNAL = 1.5; EXPRESSED IN FETAL LIVER, SIGNAL = 2.4; NT HIT: AL163248.2, EVALUE 5.60e-01; EST_HUMAN HIT: BE501049.1, EVALUE 2.10e-01; SWISSPROT HIT: O83478, EVALUE 1.50e+00
aatgacaaaggccgactgacatccactggcaaaatcaatctgtctgcttgattgtttagtgtctcatccatggttgatgctcttcggtggacattaagatgcaaagcaaaaatcttcacatttcatgtccacccacacaggtccctttacaagctcctttcctctgaccaatctcctaatctttctcattccaagtgtctaaccaaccaaccaagccaattgccactgcccacaagtttgtatatattattacctagaaacacattacacacaaagtagatgattctttggtgtatttcctaaaactgtattcattgggaggattttccttcaccactgtcataagaaccaccttctccttaatggccatagtgtgagaggcactggagaaacagcagtgggtaacatggggatctgggccacctgctcatgtgcctttcttgtgccctctagccctacctctacctactcctggctctctcatttccatattgctatggattgctgctgggcctgccagaccctaatacttggtgggtttgatagaaaccagcttatgatgagcagctctggccacaaaatctgt

SEQ ID NO: 1635 - DNA, 503 bp, Homo sapiens
  MAP TO AL137784.2; EXPRESSED IN ADULT LIVER, SIGNAL = 2.4; EXPRESSED IN LUNG, SIGNAL = 1.8; EXPRESSED IN HELA, SIGNAL = 1.2; EXPRESSED IN BRAIN, SIGNAL = 1.3; EXPRESSED IN FETAL LIVER, SIGNAL = 1.2; NT HIT: gi14784850, EVALUE 5.00e-04; EST_HUMAN HIT: AL603428.1, EVALUE 5.00e-05
ctcaagtagcctctggtgccagaagtcctgctccatttaatttatcatatacaatccctagcctaacagtacaaatacattatcatagggatcagtaaatggtgagcatagtatcattataagagtattaataagtaacatttctgagtatatcctatgtcttgagtgctctgctgagcacttgtgaagtaggtgtttttattactcatattttacagatgaggaaactggagaatagaaaggttacccttgctcaagttcatgtgtctaagtgtcagaagaaggatttgaatctaggcactctgactgcagagcccactctctcaactactatgatgtcccgtggtaacttaatcatttgcatagagaagaacagatatgtgacatcaattaagccccttaatgcagtgaggtcaagtgtaaatggcctggactttaagcccagaattatgtgagaggaattctgtctccattgtttactgtgtgaccccaataagcttctt

SEQ ID NO: 1636 - DNA, 541 bp, Homo sapiens
  MAP TO CHR21_57.0; EXPRESSED IN BRAIN, SIGNAL = 0.29; NT HIT: AB063285.1, EVALUE 0.00e+00; SWISSPROT HIT: P54258, EVALUE 1.50e-01; EST_HUMAN HIT: BF793771.1, EVALUE 1.90e-01
aaacacctgggcaaacaaaggaacctgaaggtaacgaattccttcctacagaagggcagctccacccggccacttgggcccttgattttaccccaggtaccgtcgccttcggggtaatgacaaggaagaatgccctgccctgccagctggcctgaaaaccagtgtgcctttcaccaccctgacgccctgtgtgtcaccttcctctttccctctctcggctcccacctctcttcagagccttccctgcaccccgccctgccagagatcaaccaacacgccagagctcgtttgccgggatgcttagcaccagcttaactcttcactcagtgggacaaggggcctctttctttcaggcagggctttgctccatgacacgctgggtttatggcccccgtgaacgaaacctggttcggaatccaattctacaacagattttcgttcaaatggttattttccatcccttgcccccaattccattttctacccatctctcccggctctctgcctgtgggggctgaccccttgagacctgggtggattc

SEQ ID NO: 1637 - DNA, 501 bp, Homo sapiens
  MAP TO AC018608.4; EXPRESSED IN PLACENTA, SIGNAL = 0.59; EXPRESSED IN BONE MARROW, SIGNAL = 0.45; EXPRESSED IN BRAIN, SIGNAL = 0.43; EXPRESSED IN FETAL LIVER, SIGNAL = 0.44; SWISSPROT HIT: O51568, EVALUE 6.00e+00; EST_HUMAN HIT: BE905178.1, EVALUE 2.80e+00
tctgggaaatataacaacaaatcgttttttcttcaagcagcatccttataatgaaaattgtgtcatgaaaacaaataattagcaagttagtagtgtccttcagttattactgatctcaaagcaatatacttatttaaaattttaaaaatgcttacagaataattattttacattgagctctgataattctctggagatgtacaaagaagaagtaactattatccttgagtaatatataagttctactgggaattgcgaagaaatgaacacatcctttgatgagcaatataataaaaatatgcacacgtttctatgggtacacagataaaagaggaactttctccacgtagagtatgtgcatgtcaatttcatggagaacatgatatttgcattgagtttcaaataatgtatagacatgtccctggcagataaaatagaaaaaagtcatttcagagagagaaaatataactcaaaatgaaggcattccttgtggtgggagtt

SEQ ID NO: 1638 - DNA, 532 bp, Homo sapiens
  MAP TO AL035367.1; EXPRESSED IN PLACENTA, SIGNAL = 3.4; EXPRESSED IN LUNG, SIGNAL = 3.1; EXPRESSED IN BONE MARROW, SIGNAL = 2.5; EXPRESSED IN BRAIN, SIGNAL = 2.6; EXPRESSED IN HEART, SIGNAL = 2.6; SWISSPROT HIT: P08111, EVALUE 1.70e-02; EST_HUMAN HIT: AL521136.1, EVALUE 2.00e-84; NT HIT: gi14775759, EVALUE 4.00e-88
accacagtgctgctatcacgcccccagcataggctctccagctgctgcgggcaggcaggggcaggcaggcaggcaggcatgagccatggtgggcatgcacaaggggcccaggctgaggggacacaggcctcacctacatacctggttccccaggaagatgtggtccacacactgcgaggcctggttccagatgaccagcaggccccggctgtagccaatgagaatctttgtggggtcccgcaggtgtccctggagtgactccacggggcccagtgccttcccacagcggtagtcgtctggcacgctgtggaggaaggcaggtgagccagcagaacttcccgggcacacagtgggtgctgggaagcccaccggcctcttacctgcgcagaacctcgcctggggcaagcgtctgcccctcgagcagggtcagggtggtaacatccaggaagaagacactgctgccctcagtgcccagggctgctatgtcgccggcagccaccagcaggaccactgtgactcgggtaaggctgag

SEQ ID NO: 1639 - DNA, 501 bp, Homo sapiens
  MAP TO AL136081.1; EXPRESSED IN BONE MARROW, SIGNAL = 1.8; EXPRESSED IN BRAIN, SIGNAL = 1.2; EXPRESSED IN HELA, SIGNAL = 1.1; EXPRESSED IN FETAL LIVER, SIGNAL = 1.4; EXPRESSED IN LUNG, SIGNAL = 1.7; EST_HUMAN HIT: AA693642.1, EVALUE 4.00e-33; SWISSPROT HIT: P08547, EVALUE 4.00e-12; NT HIT: AF288742.1, EVALUE 1.00e-10
cttctaggggctgctgtctggccactagagccaggcagtcacctaactgctcttacactgcatacctgtgtctgagtactcatttcgtccatcagccagggtctgcaggacagacccggcaaaaaagaacaaaatcggggtatgtacatttcctgatttccaaatttctgcaaagccattacaatcattacagtcattacaatcatgtggtactggtacaaggctagatatagatattaatggaattaaatcaagagttcagaaataaacccttacatttatggttaactgattttcaacaagcatactataatccaatggggacagaacagtctttttaacaaatggttctcgaacagctgggtatctatatgcaaataaatgcagttagaccaggacctctcaccataaacaaaacattaactcaaaatggatcatagtcctaaatgtaagagctaaaactataatctcttagaaaaatgcatgggagcaaatctttgt

SEQ ID NO: 1640 - DNA, 501 bp, Homo sapiens
  MAP TO CHR22_79.0; EXPRESSED IN ADULT LIVER, SIGNAL = 0.34; EXPRESSED IN BRAIN, SIGNAL = 0.32; EST_HUMAN HIT: BI031562.1, EVALUE 4.50e-02; SWISSPROT HIT: P07299, EVALUE 3.50e+00
actgcaggcaagcctcttaccttctctggttctctgtttatatatatataagtgataaatataaattatgaatacttacagggatttattattatggtgattaaatgaagaaagcttatgtccacgggggtttatcaaccacctcccagtgccttgcttagtgtgttaggaatagcaggcagctggcagcaggtccataaattaagtaattaaacgaatatttattgagcactttctaaatgttaagcactggtgagccaaacagacacagtccgccttgggactcacagtctggtagggagatggacactttcttgattatcactggctagatgtaaactgcacctgtgacaagaggtcacataatgggaacatggaacatggtgtcatgagcagaaacctgacatagctgggggtcaaggaatgcctccctgaggccatcatcactgaaatggatggtctctgcaacagatacctaaaggaggacaaatgggccaaata

SEQ ID NO: 1641 - DNA, 523 bp, Homo sapiens
  MAP TO AL035367.1; EXPRESSED IN FETAL LIVER, SIGNAL =  16; EXPRESSED IN ADULT LIVER, SIGNAL =  22; EXPRESSED IN BONE MARROW, SIGNAL =  20; EXPRESSED IN HEART, SIGNAL =  16; EXPRESSED IN HELA, SIGNAL = 8.2; EXPRESSED IN BRAIN, SIGNAL =  14; EXPRESSED IN PLACENTA, SIGNAL =  23; EXPRESSED IN LUNG, SIGNAL =  21; EST_HUMAN HIT: AU125151.1, EVALUE 0.00e+00; SWISSPROT HIT: Q13472, EVALUE 2.00e-72; NT HIT: gi11427857, EVALUE 0.00e+00
gcagccctcactggactaaggagaagctggcatctggttgttaatgttttttctcatcttctggcctcactaggttaaagttaaagtttaagcgcggtagccttcccccgaccatgcctctggagtttgtttgctgcatcggcggatgcgacgacaccctgagggagatcctggacctgagattttcagggggcccccccagggctagccagccctctggccgcctgcaggctaaccagtccctgaacaggatggacaacagccagcacccccagcctgctgacagcagacagactgggtcctcaaaggctctggcccagaccctcccaccacccacggctgctggtgaaagcaattctgtgacctgcaactgtggccaggaggctgtgctgctcactgtccgtaaggagggccccaaccggggccggcagttctttaagtgcaacggaggtagctgcaacttcttcctgtgggcagacagccccaatccgggagcaggagggcctcctgccttggcatatag

SEQ ID NO: 1642 - DNA, 559 bp, Homo sapiens
  MAP TO AC016665.2; EXPRESSED IN BRAIN, SIGNAL = 0.5; EXPRESSED IN PLACENTA, SIGNAL = 0.73; EXPRESSED IN ADULT LIVER, SIGNAL = 0.66; EXPRESSED IN FETAL LIVER, SIGNAL = 0.51; SWISSPROT HIT: P38935, EVALUE 6.90e+00; EST_HUMAN HIT: W32193.1, EVALUE 2.00e-01
aacatcctcttgcagatgggatccaacaaatctatcagccaaaaaccttttacagtcccacaaatgctcacaagccttccccaccttaaccagtgtcaaaatgctgcagaggtgaaggaagggagcaccacctacctgggaaccccaggcttactttgattgtgtccctccctttctcagaatacttcggtgggccccagttgctttccaatcagatttaaatttctcattgtgagctttaaattccacccatctcttgtatctaattgccctcatctctcacttcattcatttctaccttgtcttgtggtattcacccccctgcccagaaaacctaccacggcccagctgaacaaatcccaggcattcctgcggaatctcaaagtccattaaaagaagaaaaatgccctgaacaagagggataatggccttaaccatactctcttctggtccgaccacgcttgggaaattatgtcccattccaggaaggacattctaagaggggtttggaaaacaggtggccattcagaaaagaggctccagtttggtgaggggataa

SEQ ID NO: 1643 - DNA, 522 bp, Homo sapiens
  MAP TO AL136099.2; EXPRESSED IN HEART, SIGNAL = 2.1; EXPRESSED IN PLACENTA, SIGNAL = 2.6; EXPRESSED IN FETAL LIVER, SIGNAL = 1.8; EXPRESSED IN LUNG, SIGNAL = 2.7; EXPRESSED IN ADULT LIVER, SIGNAL = 2.6; EXPRESSED IN BRAIN, SIGNAL = 2.2; SWISSPROT HIT: Q9ZBQ6, EVALUE 2.10e+00; EST_HUMAN HIT: BE174467.1, EVALUE 1.80e-01; NT HIT: AY054664.1, EVALUE 5.00e-01
agaaggcctctttctctggcacagggtaccttctccaggactgcagcagcatggcagcatagccaatggcacaggttgggcatctcaatcttgtcctgggtcaggccttagcagctgtggaaccttagtaagttacttgttacttggtctttccaagctctgatgttggcttcacatggagcttcgtggggctcaattaccaagtgacctgcactgattaagtgctcaataaatgtttgtgatgaggagggtaatgatggtgatgaagatgattgatgatgaggatgatggtgaggagagggaggatgaggataatgatggtgatgaagatcatgaggaggaaagtgatgaagacgatgaggatgatggtgaggaggaagagggtgatggtaatgaagatgatgaagatgatggggagaaggaggatgatggtattggagataatgagaataatggggaggaggaggatgatggtgatgaagatgatgatgaggatggtggggaggaggaggatggtgatga

SEQ ID NO: 1644 - DNA, 583 bp, Homo sapiens
  MAP TO CHR22_75.0; EXPRESSED IN FETAL LIVER, SIGNAL = 0.5; EXPRESSED IN PLACENTA, SIGNAL = 0.53; EXPRESSED IN ADULT LIVER, SIGNAL = 0.51; EXPRESSED IN BONE MARROW, SIGNAL = 0.67; EXPRESSED IN BRAIN, SIGNAL = 0.4; EXPRESSED IN HELA, SIGNAL = 0.77; EST_HUMAN HIT: AA443137.1, EVALUE 3.00e-06; SWISSPROT HIT: Q28343, EVALUE 3.00e-04; NT HIT: AL163248.2, EVALUE 1.00e-04
catgtggaaactcaatccccaatgcaatggtattgggaggtggggcctaatgggggtgtttaggtcttgagggtggagcctcaaggatggattagtgttgctataaaaagaggtcgagggagtggtttgctcactttcaatcttccactgtgtgaggacacagcgttcctcccactcccccttcccccttccatcttctgcagtgtgaggacacagcaagtgggccctcaccagacaccagatgctggtgccttgatccgtgtgaggacacagcaagagggccctcaccagacaccagatgctggcgccttgatccgtgtgagggcacagcaagagggccctcaccagacaccagattctggtgccttgatccatgtgagggcgcagcaagagggccctcaccagacaccagatgctggcgccttgatccgtgtgagggcgcagcaagaaggccctcaccagacaccagatgctagtgccttgatcctggactttccagcatccagactgtgagaaatatatttttgttctttacaaattatgcaattctttataaattatagcagcacaaaatggaaaaaga

SEQ ID NO: 1645 - DNA, 525 bp, Homo sapiens
  MAP TO AL139253.1; EXPRESSED IN PLACENTA, SIGNAL = 2.9; EXPRESSED IN LUNG, SIGNAL =   3; EXPRESSED IN ADULT LIVER, SIGNAL = 2.8; EXPRESSED IN FETAL LIVER, SIGNAL = 2.4; EXPRESSED IN BONE MARROW, SIGNAL = 2.7; EXPRESSED IN HELA, SIGNAL = 2.2; EXPRESSED IN BRAIN, SIGNAL = 2.8; EXPRESSED IN HEART, SIGNAL = 2.5; EST_HUMAN HIT: AW805820.1, EVALUE 3.00e-03; SWISSPROT HIT: P20126, EVALUE 7.00e-03; NT HIT: gi9910155, EVALUE 2.00e-03
gtcactcagccaaccctagccccctggaaagggctgggagtggggaaacccaggtttgagtcttaccatcgctgcctcctggccaagtgagcccagattgtcagaatcagaggctgatgctgcccgcagacagggcccctcctctctcttgtcattcagcctaatgtcaccttccccatctccatcccccatggaaacccaggtcactgtcacagcacctggtcttactgccctctggggcttatcactgcctggttgcccttcctcctagtctcctgtctgtaacttccacgaggactataactccacgaaggaaggcggtgccaatgtgggtcccatttgtccccacacctccagcccctggaacagtacaggttataggtgctcagggaatactgttgaatggatgaagccaagcccgcttggcaatcgttcagtccagcaaccgccccttccccactattacgaagatgggggtagagttgaggaccacatgggggaggggcttgctgagggtcacacaga

SEQ ID NO: 1646 - DNA, 570 bp, Homo sapiens
  MAP TO CHR21_50.0; EXPRESSED IN BRAIN, SIGNAL = 0.4; EST_HUMAN HIT: AI288919.1, EVALUE 3.20e+00; NT HIT: M95718.1, EVALUE 3.00e-33
aaagccagcagagtttgagcattatagataaatggaggagagtagcaggatatgaaatcagagagatacgtaagggccagaacttctcagcacaatgaaaggcctttagagatatttttgcaggggcacgctatgttctgattcactgaggcatataaaaggccctctgcggagaagtgtccatactgaagtcacctacactccttcctacccaaggatgacctcaacaaccaacaccatgtgtggcagctactacagaaactacaatggtggccatggctatgggtgctgtggctacggaggcctgggctgtggttatggcggctgtggctatgggtgctgtggctacggaggcctgggctttggctatggaggcctggactgtggctatggaggcctgggctgtggctatggctccttctgtggctgtggctacagaggcctggactgtggctatggctgtggctatggctatgtctcccactccttctgtggctgtggctataggtgcggctctggctatggctccagctttggctactactattgaggacaccatgggagactctc

SEQ ID NO: 1647 - DNA, 508 bp, Homo sapiens
  MAP TO AL137145.3; EXPRESSED IN FETAL LIVER, SIGNAL = 0.58; EXPRESSED IN BONE MARROW, SIGNAL = 0.52; EXPRESSED IN PLACENTA, SIGNAL = 0.61; EXPRESSED IN LUNG, SIGNAL = 0.6; EXPRESSED IN ADULT LIVER, SIGNAL = 0.69; EXPRESSED IN BRAIN, SIGNAL = 0.62; SWISSPROT HIT: P55704, EVALUE 3.20e-01; EST_HUMAN HIT: BF314647.1, EVALUE 4.60e-02; NT HIT: AF332579.1, EVALUE 4.80e-01
gactgaggaatcagcttgcctataaaaacactcaatcaaaagatctgttgaagatattatattccatcatacatagtaaatgttcagaaaacattatctgttgtttctttattttgtttctttgttcatttggttattaccaaattctcactcttcccactctgccacattacctcctcaaactgcctgtgtctttacaaagtcccctgagagtttgctgatttttgcttattgtgcatcaaatgaagttgtttgacatgtcctgcattctgtaggtgatgacttggctacccagagaagtgtcacattcacctgaggtcccagagctggcccctggcaaacgggaaatttacatcccagtcccagttcccaagcattcacttcgcatcaccacccttgtaggaaccagtgtatgtacaggccctggactgggtacagttatagagctcagctcccgtgatgactgtgagcatctactgtcaattccagcattggatcttccagcagt

SEQ ID NO: 1648 - DNA, 576 bp, Homo sapiens
  MAP TO AL136140.2; EXPRESSED IN BONE MARROW, SIGNAL = 1.1; EXPRESSED IN PLACENTA, SIGNAL = 1.4; EXPRESSED IN BRAIN, SIGNAL = 0.98; EXPRESSED IN FETAL LIVER, SIGNAL = 1.2; NT HIT: gi14758617, EVALUE 1.00e-117; SWISSPROT HIT: Q9PWD5, EVALUE 5.50e+00; EST_HUMAN HIT: BF035463.1, EVALUE 1.00e-117
caaggggacaaatcacaagggctaagtattccatttcacagtgtatctacatattggaaacagaaaatgagtaagggaaggcctttgtatctacaacttgcctggtctatccatctacacagaggcaattctagattagaaagtcaaacactttaggctctcatttttaaaagcctgacagtaccaacttcagagacagtctacataggagaagtaaaagaggacagccctgataattctttgcagcactctttttaaacaacagttcaatatataacgttacctctagcctccggggaatagcagaatcttcatgtttcttgagttcttcaaaagtgcgtaactccaagtgagcctgttcaatttggtcccataagtcattcaactgtttcatgagccccatagcacgagactggtaacccccaagcaaaattttcatcttcttttccatctttgcagccctcttggcttctgtcgtcatgtgacccctgtttatctggagagcaggggaagatcacatcagcatacatgagaaaagcaggctattaaataacagggctaaaaaggtaccatgcg

SEQ ID NO: 1649 - DNA, 523 bp, Homo sapiens
  MAP TO AL137008.1; EXPRESSED IN PLACENTA, SIGNAL = 1.1; EXPRESSED IN BONE MARROW, SIGNAL = 0.81; EXPRESSED IN BRAIN, SIGNAL = 1.3; SWISSPROT HIT: O94833, EVALUE 3.00e-16; EST_HUMAN HIT: BE893321.1, EVALUE 1.00e-103; NT HIT: gi14759704, EVALUE 1.00e-103
tgcaattattttactaagttggaggaaattcagagaaatttctgtttctctgacaggtgctggcctgggcaaagcaacatcagcagagattagcaagtgctctggctgggcttattgccaaacaggaattgttggaagctttgctggcttggttgcaatgggctgaaactacacttactgataaggataaagaagtcatcccccaggagatcgaagaggtgaaagcactcattgcagaacaccaggtaaaataaatataatcctaactcctgttaaccattatctcagatattttctttctttcactgctgtacttctcaaaacattgctttgttctcgttattttcacttcttcagactcctcagctccttacaactgtgtttccaactctgcaactgccctaaaacctctctttacaggaaccctctgtgacctttgcaaaactttccttctttgtcctctgtggggttacactcgtggtattgtctcacgttcactcctgccctcccttttgccttctaa

SEQ ID NO: 1650 - DNA, 548 bp, Homo sapiens
  MAP TO CHR22_151.0; EXPRESSED IN HELA, SIGNAL = 0.92; EXPRESSED IN BRAIN, SIGNAL = 0.38; SWISSPROT HIT: Q00587, EVALUE 2.00e-01; EST_HUMAN HIT: BI460234.1, EVALUE 0.00e+00; NT HIT: L37531.1, EVALUE 5.20e-01
gaaagacaccgagacggaagattgggaagctggaaattaccccccagcttcggtgtttgggctgtatcttgcttttccacttccctaaatcaccctcgtggtgcgagcgtgctcgcagcagatgctccctaattgtctcttgtattgaccgtaaaaccctaagggcaggaatactctctctccttctatttcaacacccaaactaaaacctctcacctgagtgtaagggcgtgctgaccttcttaagcagagagctcttccatcagggggctccctaagggcatctctgttcctagcggcgaagccctcaccccactttgctctgcttagcctgagacacgcaactttctccagcctttactcttcgctgaattctcacggcgggcttgcgggtacgttcaggagcgaggttgggggcccggcccgctgggcgctgttcacaggtagcttggaccagagcaggggcttcatcattacctgcggggacaggtgggacacatgcatttccggggtcatcccagacctcctggaggatgctgattgatgct

SEQ ID NO: 1651 - DNA, 542 bp, Homo sapiens
  MAP TO AC020699.2; EXPRESSED IN BRAIN, SIGNAL = 0.65; EXPRESSED IN PLACENTA, SIGNAL = 0.72; EXPRESSED IN LUNG, SIGNAL = 0.51; EXPRESSED IN ADULT LIVER, SIGNAL = 0.63; SWISSPROT HIT: O44001, EVALUE 5.10e+00; EST_HUMAN HIT: BG993492.1, EVALUE 1.20e-02; NT HIT: gi15616630, EVALUE 8.10e+00
tccaagaaaaagaaaaccagaaacattcacattcaacattgattttcaaagtattttggttattttgattaatattgtcttttcaggctataaaaagaatgcatttctttcatattttatttctttagaattcatatttcatgtttgctgtaatgaaatgctgcatgctgttttattttatgctaaacagtttaatgttagtaaattgtttcctttaacaaataaaattaattttaaagtgtcaacaactttacaaatctgtaataatctatggttttcacagtagaagagtagatcatttggcaagaccacatactattttatcattaaatgattttagattttaaaaattatgtgttcccaagtggattttctatcagttatttttaaaattatgtttatatttttcttattaatttctccaatctcagggtcatgaactggcagtttgagtgcattaacaatgtgatggctaatatttgtggcctaatctctttaaccagcactgtgaacaaagaatgagctgccacattttcagagaa

SEQ ID NO: 1652 - DNA, 514 bp, Homo sapiens
  MAP TO AC013614.4; EXPRESSED IN BRAIN, SIGNAL = 1.7; EXPRESSED IN ADULT LIVER, SIGNAL = 5.9; EXPRESSED IN BONE MARROW, SIGNAL = 1.8; SWISSPROT HIT: P05783, EVALUE 7.00e-37; EST_HUMAN HIT: AI478751.1, EVALUE 4.00e-95; NT HIT: gi4557887, EVALUE 3.00e-95
ctggtcccagaagactgaggaacacaccacagtggtcaccacgcagtccaccaaaataggagctgctgagacaacattcatggagctgagatgtatagttcagtcctaagagatcaacctagactcaatgagaaatctgaaggccagcctggagaacagcctgaggtgggtggaggcccgctatgccatgcaaatggagcagctcagtggggctgtgctgcacctagattcagagctggcacaggcccaggcagaagggcagcaccaggcccagaagtatgaggccctgctgaacatcaaggtcaagcgggaggctgagattgccgctactactactactgccgcctgctggaagatggggaggacttcaattgtggcgatgccctggacaacagcaactctatgcaaaccatccaaaagactgtccaggatagcggatgacaaagtggtgtctgagatcaacaacaccaaagttctgaggcgctgagccagcagaagcagggtacactttggg

SEQ ID NO: 1653 - DNA, 559 bp, Homo sapiens
  MAP TO CHR22_85.0; EXPRESSED IN BRAIN, SIGNAL = 0.32; EXPRESSED IN ADULT LIVER, SIGNAL = 0.32; NT HIT: gi15808065, EVALUE 2.10e+00; SWISSPROT HIT: P00788, EVALUE 4.00e+00; EST_HUMAN HIT: BG538342.1, EVALUE 5.00e-02
gacctgcactgatggatgtggcatgctcagaggtggagcagattcaggctgttgtcaacaatggttttgaactcaccatcatgttctaagttaaatattcctccgtgcatcatccacctgaatggttgttctgtgatccctggaacaagaagatagagctccaaatggcacaaccagataagcatcacccacccccgctcaagaattctgttcgaagtgtgcttattcccacctgggcacacaatgtacccatacaataaagcttgctgaagttgcaaacctgcccgaacatggggctctcctacgtgaccatgcacctaaagggctccaatccctctgccaatcaccctaagaagtttccaacctgctccatttggctgagaatcctttactggctccccatcaccagtgtgaattaagtcgcacccccttagccttcctccagagccttctctgaattgacccagcctggatttcacctgtcagtcattctttgatatccttgtctgtgagtcccttatcctgaatatgctgagcccctactgaatacgccctccca

SEQ ID NO: 1654 - DNA, 535 bp, Homo sapiens
  MAP TO CHR22_183_2.0; EXPRESSED IN BONE MARROW, SIGNAL = 0.61; EXPRESSED IN HELA, SIGNAL = 0.77; EXPRESSED IN BRAIN, SIGNAL = 0.57; EXPRESSED IN PLACENTA, SIGNAL = 0.72; EXPRESSED IN FETAL LIVER, SIGNAL = 0.61; NT HIT: U07000.1, EVALUE 0.00e+00; SWISSPROT HIT: Q9QYV0, EVALUE 2.90e+00; EST_HUMAN HIT: BG400008.1, EVALUE 4.80e-02
ggactcctgagggtagaggcctgtgaatgttacccctctctttctgcgctgcctgggacagagggtggacctccctgaagctctgttttctcattaaggacctgcctacagcctgttgtggggattgggtcaaataattcaggcgatgtgctcgtgcagtgcgctggtcccagcgtggggaaggcttgctgcgacagcctctcctcctgtccctgtaccctcggcacagcgcccaaccctgtgaggtaccaggcaggggtgacttacctagacatgcccattcagcagccccttgagcaagaaggaccgacccttgcctttcagatgcagaccaagatgcagaaaggcacccttctcaggccgcaggtgtccaggcaggtgtcagaggtgcagcccgtgcacaccggggaccctatccatcctgtctagttgggaggactaggagttccacatgtgggaccctcagttcctgctgccttcagaaccaggcccaacccttgctgtgacctcgagggctgccacttttcagagtgca

SEQ ID NO: 1655 - DNA, 568 bp, Homo sapiens
  MAP TO CHR22_199.0; EXPRESSED IN HELA, SIGNAL = 1.1; EXPRESSED IN BRAIN, SIGNAL = 1.6; EST_HUMAN HIT: BG987997.1, EVALUE 1.00e-118; NT HIT: gi14732839, EVALUE 5.00e-35
cctggtttttgaaggtctgcgggggttcctgagatgcatgactttcagttctaaaactgacagtcccaagtaaattgttttggggtgcctgagactgagagatttcctggaatgcaggattctagtgctaaacctaagaaagtcctgggcaaaccaaaacaagttttggtcaccctcttgtgtccggaattcgttccttccggtgggttcttggtctcgctgacttcaagaatgaagccgcaaaccctcgtggtaagagttacagttcataaaggcggctcttctggagttgctggttcctccaggtgggctcgtggtctcagtggcttcaggagtgaagccgcagaccttcgtggcgagtgttacagctcatgaaggtagtgccaacccccaggtgtgcagcagcagaattttctgtgaggagccaaggaacaaagcttccacaccgtcggaggggacccaagctggttgccggtgcgggctcgggtggcctgcttttattcccttatttggccccacccacatcctgctgattggtccattttacagaatgctgattggtccgttt

SEQ ID NO: 1656 - DNA, 532 bp, Homo sapiens
  MAP TO AC011803.4; EXPRESSED IN BONE MARROW, SIGNAL = 0.46; EXPRESSED IN BRAIN, SIGNAL = 0.51; EXPRESSED IN PLACENTA, SIGNAL = 0.56; EXPRESSED IN ADULT LIVER, SIGNAL = 0.37; SWISSPROT HIT: O95255, EVALUE 3.80e+00; EST_HUMAN HIT: BE313939.1, EVALUE 7.50e-01; NT HIT: gi15309905, EVALUE 1.30e-01
ccctctttctgtggctgttcagtcttttgttgaagagctccagtcctaacaaattccctcctcaaatattgaactaaaagctacttgcttgtaacttcttgccattgtcaaaacaaatccttttccattatgagagcttctcagggccaaaagaatgtggaaggggccacataaccagacacccaagggaggctgaatcatgagcttgactgctatagaagcctgaatctcgggatagggctggacagggttccaggacaggtgctacacggattctgtgttagctggtcactgcacctgtcccagttgtggtactacctaaggttcttagaggaagtagatcatttaaagacagagacagaagagtaaaagggcttggctatggaatttcttattgagtctatgattgtcacctggcctgggaggaaaaagaatgcagcaacccctcagggagaagacactttagtagtcgtgaaggccaagaatgaaaaagaaatgtctaaagtgggtgagggctcagttttatagggcc

SEQ ID NO: 1657 - DNA, 516 bp, Homo sapiens
  MAP TO AC025758.1; EXPRESSED IN BONE MARROW, SIGNAL = 0.5; EXPRESSED IN PLACENTA, SIGNAL = 0.63; EXPRESSED IN BRAIN, SIGNAL = 0.48; EXPRESSED IN FETAL LIVER, SIGNAL = 0.57; SWISSPROT HIT: P57538, EVALUE 5.50e-01; EST_HUMAN HIT: BG476299.1, EVALUE 1.80e-01; NT HIT: AF030554.1, EVALUE 4.90e-01
aaaaatgtgcttccctgagcctttctcataaaactacttgtgggacacgtttctcctaaaactagggaggaaaaaaaaagaaaaacaaaaacacacaaaaggaaaactatggcatgcagaaaacaataaatccaacacaagagaaggagaaaaggcatatccaggatggtgttgaaggaaaaattttgggtgataactgtgagacgggagtgggaggcaaacaattgaagcaggtaagaaagctccaggatagctgtgttcaagatgaaactgataacacaccgtatgcatttcaatgtcttgaaatatttcagacaattggtagagagtttgggttgaattaataataagtacatagaagcctaagcaagtaaaaaacatgataaagtcttaattccagaccaaaaaaaaaaggcttttagtaaaggccaattatagcatacgtaatccaatgaagcacctagaaaatcctctgtgttaaaatttcttagttaagcaatttgacccatttcagaa

SEQ ID NO: 1658 - DNA, 534 bp, Homo sapiens
  MAP TO CHR22_162.0; EXPRESSED IN BONE MARROW, SIGNAL = 0.97; EXPRESSED IN BRAIN, SIGNAL = 0.94; EXPRESSED IN PLACENTA, SIGNAL = 1.3; EXPRESSED IN FETAL LIVER, SIGNAL = 0.96; EXPRESSED IN LUNG, SIGNAL =   1; NT HIT: U65487.1, EVALUE 9.00e-09; SWISSPROT HIT: Q06806, EVALUE 3.10e+00; EST_HUMAN HIT: AW863221.1, EVALUE 2.00e-10
cactcaggggaagcagaaagcttcttggctctgccggccagagggagggcctggaaggggagcccaggggaggtggaatagtggggaggcgaggggtggtggggtacatggttaggctctgactcaggagccaggcagacctctgcttgagccatggctcctctgctggccagctgtgtggccttggacaagttactcaacctctctgagccttggtttcctcatgtgtctaacagtaatgacagtggtgcctaccccactggggtaatggagacatcattactgttaagttatctgctagtaggtgaaagaaggcatgaggggagcacctgtcccccaccagccccagattgttggaagcttctggtggggaaggggcagcttgagcccctggaggaggagaaggccccagacccagcctcactaggcagcagaagccggggtgccaggacactccgaggaccccaatgctcccagccgtactggaggtggagctgggtgggacctcccttttcagccagttatccttcaggc

SEQ ID NO: 1659 - DNA, 538 bp, Homo sapiens
  MAP TO AC013624.4; EXPRESSED IN HELA, SIGNAL = 0.59; EXPRESSED IN BRAIN, SIGNAL = 0.88; EXPRESSED IN PLACENTA, SIGNAL = 0.81; EXPRESSED IN ADULT LIVER, SIGNAL = 0.79; NT HIT: AB022091.1, EVALUE 8.00e+00; EST_HUMAN HIT: R09781.1, EVALUE 7.50e-01
cggcttttcttcagcatttctgctgtcctttctgtcactctttgatttgagctgaattagcaatgccatcctggctaaagttggtattgcaaaagactttggtagagtgcaagataccacatatgcccaagtcaaacaacctaagcagcagctacattttaaaccctgactctgcagtccagtttcttagaactgttctatgggagtgaaaactaaagaggacttccatcttcccctgaccctgctggccttcgcagctggaatgtgctgggaatcacttctggcactgaaaaggttaattgtctcctgctgcgaagtagaaactgagaaaagggtcctgggcaggggaggaattatggtaaatgaggttttctttatagtactgctcattctcaacatgctgaaagggcattagttcacagtcactttctctggaattaccaaatctgctcaggaagccttcattaggatattaaacaagacttaataagtgaaagtgatttgcatcgctgataatcgtgggcattaatcaagacgg

SEQ ID NO: 1660 - DNA, 589 bp, Homo sapiens
  MAP TO CHR22_164.0; EXPRESSED IN BRAIN, SIGNAL = 0.55; EXPRESSED IN PLACENTA, SIGNAL = 0.84; EXPRESSED IN LUNG, SIGNAL = 0.67; EXPRESSED IN FETAL LIVER, SIGNAL = 0.59; EXPRESSED IN BONE MARROW, SIGNAL = 0.61; EST_HUMAN HIT: AV728480.1, EVALUE 2.00e-47; NT HIT: gi8922676, EVALUE 2.00e-47; SWISSPROT HIT: P35354, EVALUE 5.70e+00
ctctgaaaggggcacttctggatgagctgacatggagatggccctctgacttggatccagagctaggaatcttcaacttggcatcagcaatgtccacaaagttgtgcttggtgagtttgagacagtgaatgttgagaagagggcccagagctccctgtgccttgggatggctatgcacctgctccaatgccaactggtaatacaaagccctggaaaaagtcttttgtatgcggtaatacacaagggccaagcccccagtaccgaacacattgccgaaaaggaccattttttccttgaggcactggcatcctgctgcctggatacttttgccacctcacagcacaactctcttgaaaatcatcaaaggcaagttgttctgtaagcgacagaagcaccatgctgcagagagcatgaggagcccttccgggcgtgggatggtggcggtaaatcttgatctccattttaaagaaaactaaggaattactgaattaagtatgacagataagaagtggccactgcttagtaattccttagtggaaatgcccacaatggggactggatcccatgcagtctgttcccagagccactc

SEQ ID NO: 1661 - DNA, 600 bp, Homo sapiens
  MAP TO AC022091.2; EXPRESSED IN BRAIN, SIGNAL = 0.51; EXPRESSED IN FETAL LIVER, SIGNAL = 0.51; EXPRESSED IN PLACENTA, SIGNAL = 0.62; EXPRESSED IN ADULT LIVER, SIGNAL = 0.61; SWISSPROT HIT: P02458, EVALUE 5.20e-01; EST_HUMAN HIT: AL137953.1, EVALUE 9.00e-04; NT HIT: Y11107.3, EVALUE 4.00e-05
tgcacctctgattggatttggtaaaggagggctgtctgtgggaggagcgggcaggctgaatggattcgggagtgaggggccggctggaaacccacaatccactcactggccaaataaccttgacaaatcacaaaacctttctttttgaggctcagtttcctcatctgtaaaatgggaataatggtactccctaactcacagcctgtgaggataaaataaaacaacatgatgaaaaatgataacactgaaaccgaatgcctcgcacattagaagtgctcagtaagcagcaacttgagtaatgaacatgattgcacccggcccctgaggagtttgcacacggtgaccacctgccacgactgagggattcccagcgccttctttggcagctgtgagcgcgcctgagaccccgtctggggaacccgcaggggttgggggcaggtttgtctgtcccagagccccaggctggtgatgacgcctcctggggataaacctcatctctctgttgtttaccccatgtgcggtgactttgtcattatcgttcctcctgcgttttttctttgagttatttatttttctgtgaggaaggaatgtggggaattt

SEQ ID NO: 1662 - DNA, 545 bp, Homo sapiens
  MAP TO AC021635.3; EXPRESSED IN BONE MARROW, SIGNAL = 0.41; EXPRESSED IN BRAIN, SIGNAL = 0.49; EXPRESSED IN LUNG, SIGNAL = 0.52; EXPRESSED IN ADULT LIVER, SIGNAL = 0.51; NT HIT: AL163208.2, EVALUE 5.20e-01; SWISSPROT HIT: P57078, EVALUE 1.00e-02; EST_HUMAN HIT: BI829303.1, EVALUE 2.00e-90
tttgctaaccccttgtgagcttccttacctgcccagtccaggaattcaacacactcagtctgagaatatctagcagcaacatctcgagccctttcttcccggaagttcaaagcttctatatcaacatccagttctaccagtgctttcaaagtttccaaacgaccccaggctgcagcacaatgtaagagtgtgtaccctaacaaatggaatgaagatggtgagatcaaacagactacattgttttaggctaatttatgtagtggaagatcataatggtgatcaagtattgaacaattactgtgggccaggcactattctaactgtcttacatatagaaaactcatttagttttataaaaccactatgatgtcagaactactacagttctcattttatagacaaggaaactaaagtccaggtggattaagaaacttgcccaaggaaacatccctggcaaacagtaaatgatggatgccagcatagactgtctgaaggctgagctcttcaacatcatgggaggaagatggcaatctccctagcagtca

SEQ ID NO: 1663 - DNA, 598 bp, Homo sapiens
  MAP TO CHR22_180.0; EXPRESSED IN HELA, SIGNAL = 0.59; EXPRESSED IN LUNG, SIGNAL = 0.78; EXPRESSED IN FETAL LIVER, SIGNAL = 0.72; EXPRESSED IN BONE MARROW, SIGNAL = 0.74; EXPRESSED IN BRAIN, SIGNAL = 0.65; NT HIT: gi8922317, EVALUE 7.00e-56; SWISSPROT HIT: P17600, EVALUE 6.70e-01; EST_HUMAN HIT: BI520035.1, EVALUE 1.00e-55
tgtgagctgttgggtgagaggaaatgtcagaggaggccaggggagccggagaggtggccagtgggttggagccaccccaggtagggcttcattagggcctctccgggatttccagccattgtgagccaaggggccatttggtcctgaaggaggcattcatttgttcacttattccttcgtcagcattcacacccgcactcatcatgggcagggagaagaccagaaaggcttttctgagctacagctgctcctgatcccagttgacccccgggaccctctgttaccggtggagggtgtccaggttcttggcgctttgaacaaagaattgaacaaaacacacaaacaaagcaaggaaagaattaaggaacaaaagcagagatttattgaaaacgaaagcacactccccagggtgggagcaggcaagcagctcaagggccaggttacagaattttctggggttgaaataccctctagaggtttcccattacttggtgtacaccctatgtaaatgaagtagtggcccgcaatcagtgtgattggttgcagaaagcgaccaatcagaacctggaagtgaagcaccctatgcaaacatccgatt

SEQ ID NO: 1664 - DNA, 516 bp, Homo sapiens
  MAP TO CHR22_135.0; EXPRESSED IN BRAIN, SIGNAL = 0.6; EXPRESSED IN LUNG, SIGNAL = 0.55; EXPRESSED IN ADULT LIVER, SIGNAL = 0.49; EXPRESSED IN BONE MARROW, SIGNAL = 0.59; NT HIT: gi13994235, EVALUE 3.10e-02; SWISSPROT HIT: Q9Z1S5, EVALUE 3.20e-01; EST_HUMAN HIT: BF513155.1, EVALUE 0.00e+00
tccacccacctactttctgctccgcccatgtgcagccactttgaggtctgtcatgaatataaagtgtgtgacatatttttatttcctggctctcttgttcatacgtatctttatttaattcccagcatgtgtcatgttatgtgtgttctcagcttatgtttttacgtttagaagagtttcgcctgttttctgcagggatgagacacttcgggccaacttcaatgttctaattccgagtttggaaatcaacttttggactgaaagctgagcttgtctgagatttgtcagggcccctggtggttggaaaagtgttctgaatccaataaaaggaaagcggtgatttacactatgtttccctttgtattttgggtacattttacatattgggcaattttgactggaggtagttgggaaggtatttgcttgaatgtgtgcacatgcgtgcatgtgtgtacatgagtgcatatgtgtgtatgtgtcatgtaattgtggatttgcatgtgtctttgcaccttg

SEQ ID NO: 1665 - DNA, 556 bp, Homo sapiens
  MAP TO AC012360.2; EXPRESSED IN PLACENTA, SIGNAL = 0.46; EXPRESSED IN LUNG, SIGNAL = 0.48; EXPRESSED IN ADULT LIVER, SIGNAL = 0.51; EXPRESSED IN BRAIN, SIGNAL = 0.5; SWISSPROT HIT: P56447, EVALUE 7.90e-01; EST_HUMAN HIT: BG828430.1, EVALUE 1.00e-106; NT HIT: gi4759259, EVALUE 1.00e-106
tgcatccttaaaggtttggctaaaacagcacctccttcaggaagccctccctgatatctctaggaaatactttctcctctgctctcacaatgggccttattccatcgtgatcaagcttttatactgccatagctatttgtttaaatgtctgtctccccactaactgtgcagcccctgaagcacagagactgtattggagtcatctgtgtatcttttatgcttagcgcaaggcccagttcctaaatgatatttaccgaagaaatatcataaaagagttaagtaaatttcactaagacttctatgtgaatgagtaccttcaaagtcctgtaggatatggccctccttaaagggcagcgtctgcttctgttgctgatccaacatgctgtggactgtgatgaattcgtcatcgagcgctatgacgtatggaaaggacacagccgccccaatcacattctccgaccagtgcacgggggcgcgctgggatatccctgcgactgtggcaaacatgcctagaagtaagaagaaagagttaggtaggcttccaaataagcatggt

SEQ ID NO: 1666 - DNA, 517 bp, Homo sapiens
  MAP TO CHR22_128.0; EXPRESSED IN FETAL LIVER, SIGNAL = 0.62; EXPRESSED IN PLACENTA, SIGNAL = 0.76; EXPRESSED IN ADULT LIVER, SIGNAL = 0.96; EXPRESSED IN BRAIN, SIGNAL = 0.56; EXPRESSED IN LUNG, SIGNAL = 0.72; SWISSPROT HIT: P08547, EVALUE 4.00e-44; EST_HUMAN HIT: AW875415.1, EVALUE 3.00e-34; NT HIT: AF003528.1, EVALUE 3.00e-67
tgagaagaaaaccaaacaatggaatggaaaaaatactaaaaatcacaattcaagaaattaaagaggaagtcctagccagaggaatcaggcaagagaaagaaagaaaaggcatccacatacgaaatgaagaagtcaaactatctctctttgctgacaatatgattctatacctagaaaaccctacagactctgccaaaaggctactagaactgataaatcatttaaacaaggtttcagtacacaaaatcaatgtacaaaaatcagtggcatttctatacatcaataatgtccaggctgagagtcaaatcaagaatacaatcccacgtgcaatagccacaaagaaaataaaatacctgagaatacagctaaccaaggaggtgaaagatctctacaagaagaagcacaaaacagtgctgaaagaaactagagatgacacaaataagtggaaaaaatattctatgcttacggattgaaagaatcagtatcattaaaatggccatactgcccaaagcaatga

SEQ ID NO: 1667 - DNA, 576 bp, Homo sapiens
  MAP TO AC021722.4; EXPRESSED IN ADULT LIVER, SIGNAL = 0.38; EXPRESSED IN BRAIN, SIGNAL = 0.3; NT HIT: U14189.1, EVALUE 5.50e-01; EST_HUMAN HIT: AA830056.1, EVALUE 8.10e-01
ttgggagctgaatggaagtcagtttatccaaagaacgtttatttctcatgttgcatacacttacacctatgaacatcatcatatcactgaatagaatccatacaaagtagtacgagatatcaatggctttatgaagggcaaaaagcaagtgcttatttgaagctatttcaatatataactgtgatttccacgtagtggcctcattttaatagtacattaaataattttgcacttatttatgactttacaacatgaattatttaaagcctatcattaacatttctagaagttaggaaatttatacctactatcacaattaaactacagcaggaagtcattcttgatgcaagaataagaagcccacatactattcgagaatcagtggttactattttcatgaagaaaagtagatgtattataaaatacagtaggaggagaatcagactacccaaaggtaatttagcttgcaggtagtatgaatgctttgtattttggaaattatgtataggtttggagggttaaagaaaaacatgaagaaatgaatatagatgaccagcttcccagagaaactgcctg

SEQ ID NO: 1668 - DNA, 545 bp, Homo sapiens
  MAP TO AL136379.2; EXPRESSED IN BONE MARROW, SIGNAL = 7.3; EXPRESSED IN LUNG, SIGNAL = 7.7; EXPRESSED IN ADULT LIVER, SIGNAL = 5.3; EXPRESSED IN PLACENTA, SIGNAL = 4.5; EXPRESSED IN HELA, SIGNAL = 3.5; EXPRESSED IN BRAIN, SIGNAL = 3.2; EXPRESSED IN FETAL LIVER, SIGNAL = 3.6; NT HIT: gi14745563, EVALUE 3.00e-18; SWISSPROT HIT: Q05606, EVALUE 8.80e+00; EST_HUMAN HIT: AW079052.1, EVALUE 0.00e+00
agttggagtcggagtcatggtggtggtgcctgggcctggggagaccaatggcagtcagtcactcggaaggagtcaaccaggcccccacccccaagaggcagatatggaccagggcatacctctcaggagatgtgggagaggaggtggcctcagctggccgcctgtgctctttgtctttcttcttcttctctttcttgtgtttcctctttttctttttcttcttctccttcttgcttttcctgtggctctcacaactacaaggaggatacaaggtgtgcctcagaccctagtcttgcaagccaagagagtgaacacaagcaggccccatccagatgaagccaccacccacaagtgcgtctttaaatcagttaaatcaaactacaaattccactcctcagttacgtagtcacgtggccagtggctacgtgggttagaaacagatgcaatatccccatctccacagcacgcccctgccccaccccagccgtgcccttggcaggttgacaccttcctacctgcacccaccaggccactcttagggtcag

SEQ ID NO: 1669 - DNA, 505 bp, Homo sapiens
  MAP TO AL137003.1; EXPRESSED IN BRAIN, SIGNAL = 1.9; EXPRESSED IN HELA, SIGNAL = 1.9; EXPRESSED IN FETAL LIVER, SIGNAL = 1.9; EXPRESSED IN BONE MARROW, SIGNAL = 1.8; EXPRESSED IN LUNG, SIGNAL = 2.5; EXPRESSED IN ADULT LIVER, SIGNAL = 2.6; SWISSPROT HIT: P53842, EVALUE 4.60e+00; EST_HUMAN HIT: BF958801.1, EVALUE 1.00e-122; NT HIT: Y13631.1, EVALUE 4.80e-01
gtgtgcaaagacattcgctgcggctttacaacagtaaacaattagaaacaactcgaatgtccaaaaatgataggaaacttaaaaattaagataaaacaacctgatagaatgttatgtgatccttgcaaatgagaactgtatagctgaagttactaagaatgtttatgctaaatgggaaacacaaaactgaaaaaaagatataagttacatcatcaagaactaaaaaacaacacataaaaatgaacttgatttatggactggaatggtggaatcaaagggaacttttgcttttattggctttcctttattattgtaaggtttgggcaatacatgtttaaaaacatggtatttttatcagtcatgtgtagtaaacactcttttctgtagagcagagctacctgcggaaaacgtcactgccaggttagtggagggtgcttagtccttcccaagagctacctgcagaaaacgtcactgacaggttagtggagggtgcttagtccttccc

SEQ ID NO: 1670 - DNA, 556 bp, Homo sapiens
  MAP TO AL136231.3; EXPRESSED IN BONE MARROW, SIGNAL = 1.8; EXPRESSED IN BRAIN, SIGNAL = 2.2; EXPRESSED IN HELA, SIGNAL =   2; EXPRESSED IN LUNG, SIGNAL = 2.3; EXPRESSED IN ADULT LIVER, SIGNAL = 3.2; EXPRESSED IN PLACENTA, SIGNAL = 2.5; SWISSPROT HIT: P06494, EVALUE 5.30e+00; EST_HUMAN HIT: BI668843.1, EVALUE 0.00e+00; NT HIT: gi14741851, EVALUE 0.00e+00
tcttctttcattatggcccagtaaaagctcataccttattaaaaacatccttgctaatggcatccgtgctccacagacacatcttctctctttgtactagagcttcttctttctgtcgccactcttcttcccgttgcctcagttctgatactgctgtttgtgctttggcatgctcctgatccaaggactcagaattatgcagtgctaagctaccaagtttctgttgagcttcagcaagattccatttgcacgccacagagctcttcacaaactctttctgcttttggcaagccaattcaattccatggctatacatctggataaaaacaatatttgtaagaaatgaagaaagcaatggatgtttgtgcagcacagttcaatttttcttaattcaaaggatttctgtacaatattttggtatatagtatatcctgtgttctaggtctgcagtcatgtttttatatcttagtccttgtttcatcaactaacttctaaacttctttgttaatttaggcctatcccctgacaactaacagcaacaaaaagcctggcaact

SEQ ID NO: 1671 - DNA, 591 bp, Homo sapiens
  MAP TO AL133547.3; EXPRESSED IN HELA, SIGNAL = 0.86; EXPRESSED IN BRAIN, SIGNAL = 0.99; EXPRESSED IN PLACENTA, SIGNAL = 1.2; EXPRESSED IN ADULT LIVER, SIGNAL = 0.83; EXPRESSED IN FETAL LIVER, SIGNAL = 1.1; EXPRESSED IN BONE MARROW, SIGNAL =   1; NT HIT: gi13640691, EVALUE 4.00e-39; SWISSPROT HIT: Q14641, EVALUE 2.00e-10; EST_HUMAN HIT: H60640.1, EVALUE 2.00e-35
acttgctgtcatattgccccatgcctgagaagacattcaccaccaccccaggagggtggctgctggaatctggacgtcccaaaggtgagagccctggactaccaaacaatcagaatgaggcctgaaaaaacaggctccagatctcattgactgcctgtagtcaactcagactctactgtggctagtgcctacaagtttgtggtttttcattgtaatgtgcttttattaaaagggtctcaccagaaatctcatgggaagttgggggtagaggagaagctgcaggaaaaacagaagaacagcctcaccttggaggctcttggtgcctttcccacctggcagccagagatacagggtggagaaaacagggaatcctcagagaaggtgactattctcaaacaccagcaggaggtgaggtgtactcccagacccccaggaaagctgggcaggccagaaaacaggtgtgattgcaatgagatgcctgggccaggcatcttcaattaagaagaaaggggacaaacagtgaggtgatgagctgattatcatttctgtttatgcacctattggcctaggggcagcacactgagacctctg

SEQ ID NO: 1672 - DNA, 534 bp, Homo sapiens
  MAP TO AC009802.13; EXPRESSED IN BRAIN, SIGNAL = 0.65; EXPRESSED IN PLACENTA, SIGNAL = 0.7; EXPRESSED IN LUNG, SIGNAL = 0.72; EXPRESSED IN ADULT LIVER, SIGNAL = 0.65; NT HIT: gi11425214, EVALUE 2.00e-83; SWISSPROT HIT: P48595, EVALUE 3.00e-22; EST_HUMAN HIT: BE148535.1, EVALUE 2.00e-38
gctatgtgtgtgatgaccccaggctggagctgtctatacattgcctaacctttctgaggaacagtaatattaattttatagagtgttgtaaagtttaaataatattgtgaaggtgaagtgcctagaactcaaggtacattggtgacctttctctataggaattaaataatagggagaacattcttcctgaggacaattgggagaaaccttggccaagcagttcttttcttagtaaacactggaaacaccctcacatcagacacactgatgttatttacctgttccagcccattaatgtcttctggcagtagtataagcaggctgaggtcacggcttttgtagtagagttgaaggcccactgcttttggcttttctatgtgaaaaatgtgaagctttttcttcataaacatcatttgcactggtttgcttgtagtctaaaaaaaacaaaaaaacaaaaaaacaggtaacaaggtcattgaagaagtattccaccaactccttaattctctaccatcattggctctcagttggtga

SEQ ID NO: 1673 - DNA, 590 bp, Homo sapiens
  MAP TO CHR21_9.0; EXPRESSED IN HELA, SIGNAL = 0.64; EXPRESSED IN BRAIN, SIGNAL = 0.32; NT HIT: AF360364.1, EVALUE 2.20e+00; SWISSPROT HIT: O78687, EVALUE 9.80e+00; EST_HUMAN HIT: BG497791.1, EVALUE 3.30e+00
tgagaatcaggaatggacaggattatccaaatgtcaataaaagcaaagagtgtataacagaaagtaatttgttttgttaaagggagtattaaagatcctcatgcacgtgtaaaactaataaacttcttatgcctttcttttactaaaaaaccttacttacaccaacttgaccatcatctgctgtgactttttttttttttttggaaataatggtaatccctggtaactagaggtaaagaatgactacatatgattataatgacaggtatagcaactacttttaaggcaccatgtagaattcttttagcttcatctggcttttattccagcacctggacaacggtcctgcataagctatgtccagcatcctgtaggtaacttttgaccacactttgtctcaggtctgtgttgtgtgcctcctccctccttactctggacttttccaggtaggatcccactgggatctgcttgatgtccatattttcacaacctgagggtaaataagagttaactccccatgtgggcacacagtaagcaatcaaggacagaagccagtagatgtatgctccccacccaaaccttgcctacat

SEQ ID NO: 1674 - DNA, 588 bp, Homo sapiens
  MAP TO AL133396.1; EXPRESSED IN BONE MARROW, SIGNAL = 0.85; EXPRESSED IN PLACENTA, SIGNAL = 1.2; EXPRESSED IN ADULT LIVER, SIGNAL = 1.2; EXPRESSED IN HELA, SIGNAL = 0.95; EXPRESSED IN BRAIN, SIGNAL =   1; EXPRESSED IN FETAL LIVER, SIGNAL = 0.94; EST_HUMAN HIT: BI461341.1, EVALUE 0.00e+00; NT HIT: X03793.1, EVALUE 5.60e-01
aaaccagggttggggtttagccaggtgagtgaggaccagagagttgagggtgtgtgttaagtgagtgattatacacgtgaatcataaaatttaagcctgaaaagtagagaaaggagggatggtgaaaaggcaataggaactgttgtaggttctggtttcttttatatagttaggtagtaatgacttcttattacctagtcagcactttcaatagaaatcaacaactgttttgggaccatcactaggcaaggcactgtgttaaatgatgtagcacaaaaaaagaccatctgtgccattcaggagaggtaagcatgcaattcaaggagacaaagtattccaagtactatactaaaaagcaaaagattctgaaaagagtctagtatcttcagctgaccattcaaaaatttccacaatgtgttgctaagccattttttgttcttatctccctactcccctaaacaaatccactgtgagtccatcatcattttatgagcatcgttttcctttttcccttctctgcaccttttgcatgctggtaatgttcttcctagaatgcttacttgtatgacctcctccagcaaaactcac

SEQ ID NO: 1675 - DNA, 524 bp, Homo sapiens
  MAP TO AL139158.1; EXPRESSED IN BRAIN, SIGNAL = 0.55; EXPRESSED IN FETAL LIVER, SIGNAL = 0.5; EXPRESSED IN BONE MARROW, SIGNAL = 0.52; EXPRESSED IN PLACENTA, SIGNAL = 0.65; EST_HUMAN HIT: R85463.1, EVALUE 7.30e-01; NT HIT: K00470.1, EVALUE 5.00e-01; SWISSPROT HIT: O55127, EVALUE 1.70e+00
atgtgggtgcctcctacaagtctctgtgactgtcctggcacttgggcctctctgacttcctttgctgtctccccggagctatgcacttggaattgtccttactgggcccaggtctctcctgcccccccagactgggagctgcttgagctcagtatctgggtgtgattcttctggtgccttcagtacctggcccaggaatgagtgcagagagtacttgctgaatgagccgctagtgggggtaaccatgtggcacagcacctggcacctggcacacatgcctgtgcacaatgcccagtaaggggcagctgtgcttatcagagcctgggctccatcttccagcacattttgatgagtgcctttcatatgccagtccctgttccaggagctggggtttatcgtggtaaataaaaccgacagaaactttgtcctcttggacaaagcttatgttctggtaggggagacatctaataaacaagataaagaatgaaaaggtaaagcatttagggatatgtgctcaggggaaa

SEQ ID NO: 1676 - DNA, 566 bp, Homo sapiens
  MAP TO AL035697.19; EXPRESSED IN BONE MARROW, SIGNAL =   1; EXPRESSED IN HELA, SIGNAL = 0.59; EXPRESSED IN BRAIN, SIGNAL = 0.96; EXPRESSED IN FETAL LIVER, SIGNAL =   1; EXPRESSED IN PLACENTA, SIGNAL = 1.1; EXPRESSED IN LUNG, SIGNAL = 1.1; EXPRESSED IN ADULT LIVER, SIGNAL =   1; EST_HUMAN HIT: AL521707.1, EVALUE 4.00e-58; NT HIT: AL163303.2, EVALUE 7.00e-22; SWISSPROT HIT: P74933, EVALUE 1.80e+00
tcatccctcctggatgactctgagggcttcaagacttcaatgtaggaaataactcagatgtattggaaaccacagaagaactggaaatacaagtggagcctgaagatgtgactcaattgcagcaatctcatgataaaacatgaactgatcaggagttgcttcttatggatgcgcaaagattttttttttttaagttggaatctacttctggtgaagacactgggaacattgttgaaatgacaataaaggattttgaaaattacataaacttagttgatcaagcagtagctttgagaaagtttgagaggatcgactccaattttgaaagttgttctactgtgggtaaaatgctatcaaacagcatcacatgctacagagacatctttcatgaaaaaagagtccagtgatgtggcaaacatcaccgttgtcttagaaattgccacagccacgtcaagcttcagcagccgcaaccctgatcagtcagcagccatcaacatgaaggtaagaccctctcccagcaaaaagataaggatttgctttattgcagtgggctggaactgaatctg

SEQ ID NO: 1677 - DNA, 578 bp, Homo sapiens
  MAP TO AL139144.1; EXPRESSED IN FETAL LIVER, SIGNAL = 0.97; EXPRESSED IN PLACENTA, SIGNAL = 1.1; EXPRESSED IN ADULT LIVER, SIGNAL = 0.87; EXPRESSED IN HELA, SIGNAL = 0.75; EXPRESSED IN BRAIN, SIGNAL =   1; EST_HUMAN HIT: AI806600.1, EVALUE 1.30e-02; NT HIT: AY017475.1, EVALUE 5.00e-23; SWISSPROT HIT: Q15113, EVALUE 8.00e-08
atggtgagtgctagggcttgaaaaccagactactcatgtaagcctcttctctctgtgcccacagctgatgatgcctgtggtgggaccctgcggggccagagtggcatcatctccagcccccacttcccctcggagtaccataacaatgccgactgcacatggaccatcctggctgagctgggggacaccatcgccctggtgtttattgacttccagctggaggatggttacgactttctggaagtcactgggacagaaggctcctccctctggtaagcacaacatcaccttcctttcctaccctattctctgcaactgtgaattactgggatgcttgcagtctcctcagtgcctggacctgcagccagaggcctcttagccacttccttatacctactgttagagtcctttcatctcatcctaatgaaaaagcactgcatatttttagagctggggtaatttttatagtgattttgatatctgatttgaaacatgttcttgctgaagatttttatgatgggtcttggttgaataacttgcattaagactaaaaatgttctggtctcaggatgtggaca

SEQ ID NO: 1678 - DNA, 517 bp, Homo sapiens
  MAP TO AL133285.3; EXPRESSED IN BRAIN, SIGNAL = 0.36; SWISSPROT HIT: P11260, EVALUE 2.00e-12; EST_HUMAN HIT: AW854887.1, EVALUE 8.00e-13; NT HIT: AL163201.2, EVALUE 3.00e-08
atgggatatgcaaagcaaccaaacttacaacttattgggactcctgagagagaataaaaagtaaggaacctggaaaacatttgaggaaataattcaataaattttttctaatcttcttaaacaggtgaacattcagataagaaaaatccagagaacgcctatgagatactatataaaatgaaaatcaccaaagcatatagtcatcatactatccaaggtcaagatttaaaaacattttaaatgcagctagagaaaagggtcaaattacctataaaggcaaaccaatcagactcataacagacttctcattagaaaccctacaagccagaaaagattggttggagccctgttttcagcctccttagattcttagccagccaagcattttatattctgccaaaccaggcttcacaaatgaaggaaaaataacatatttcccagacaagcaatgactgaaagaatttgtcacactaaactagacctacaaaaaaatgctcacaggagttctaaacatgaa

SEQ ID NO: 1679 - DNA, 574 bp, Homo sapiens
  MAP TO CHR21_16.0; EXPRESSED IN BRAIN, SIGNAL = 1.4; EXPRESSED IN HELA, SIGNAL = 3.3; EXPRESSED IN FETAL LIVER, SIGNAL = 1.2; EXPRESSED IN BONE MARROW, SIGNAL = 1.4; EXPRESSED IN PLACENTA, SIGNAL = 0.76; EXPRESSED IN LUNG, SIGNAL = 0.81; EXPRESSED IN ADULT LIVER, SIGNAL = 0.8; SWISSPROT HIT: P31641, EVALUE 2.00e-72; NT HIT: gi14731339, EVALUE 1.00e-103; EST_HUMAN HIT: AI032334.1, EVALUE 0.00e+00
gttcctcatctccatgtgggaaagcgaagagatggtcaccaaggagaagctgcagtgtctgaaagatttccacaaggacatcctgaagccctcgctggggaagagccagagagcgcggtctgaggacaaggccgagggaaaacctccgcagaggcagaagtggtctcgtctagcaagatcgacttggtgatctccgtggctggcggcttcgtgggcctggtcaacgtctggcgcttcccatacctctgatacaataatggtaaggtgaatttctcatactttcctgtttggagcggcctgcctgtgtttttcttggagatcatcacaggccagtacacctctgaagggggcatcacatactgggagaagatctggcacttgttctctggcatcggctctgcctccatcgtaattgtgcccttcccgaacgtccactacatcgtcatcgtggcctgggctacagactacctgttccagtccttccagaaggagctgcccagggcacactgcaaccacagctggaacacgcccccctgcatggaggacaccatgcgcacgaacgagagtgtctgga

SEQ ID NO: 1680 - DNA, 591 bp, Homo sapiens
  MAP TO CHR22_78.0; EXPRESSED IN PLACENTA, SIGNAL = 0.43; EXPRESSED IN ADULT LIVER, SIGNAL = 0.35; EXPRESSED IN HELA, SIGNAL = 0.56; EXPRESSED IN BRAIN, SIGNAL = 0.34; SWISSPROT HIT: P38092, EVALUE 1.10e+00; NT HIT: AF309926.1, EVALUE 1.40e-01; EST_HUMAN HIT: AL562863.1, EVALUE 5.30e-02
ctcacgggaaggagactctgcgggcaggctgtgcgctcagctctcagccacccggtgcctcggatggagaggactgtgtgtcctggttgcctgggacagtcccatgatgccagtcaccctggcataattagccatcgctccctctttctctaagtgttgtggcgtggatgagaaattgtgatatttaccagttccatctctgactgtccattgctccgcctgcaatggtagatgattctgctgcccagcttgtcatcctggtcttgggggggctccgaggagtcctctctgagcacgagctttgggagttggaccctctccactctgtccctaagcaggaccatatgaacccctcccctctgtgggacatagaaggagcagaggttcagggtgtgggtgccagacccagtcctgctgcctgctagctgctcacctgtcacctcgggcaagctcttcactgctctgagccttagctttctgatctgcaaaatggacaggatatgagttcctatgcatgacaagcagaatttctaaacatggaccttgtattatcttcttttggctgctgttgcaaaataccccaaacaaccg

SEQ ID NO: 1681 - DNA, 580 bp, Homo sapiens
  MAP TO CHR21_20.0; EXPRESSED IN HELA, SIGNAL = 2.8; EXPRESSED IN FETAL LIVER, SIGNAL =   1; EXPRESSED IN PLACENTA, SIGNAL = 0.5; EXPRESSED IN LUNG, SIGNAL = 0.66; EXPRESSED IN ADULT LIVER, SIGNAL = 0.7; EXPRESSED IN BONE MARROW, SIGNAL = 1.1; EXPRESSED IN BRAIN, SIGNAL = 1.1; SWISSPROT HIT: P07548, EVALUE 8.40e-01; EST_HUMAN HIT: BE698666.1, EVALUE 2.10e-01
ttggtgacaataggagcacggtaattcattctttttaaaaaaaaaaaattttcccatagcatgcttcttcttcagaaaaactaagagatggctgatgattaggcacagagtgaggttgttttgtaaaagaccaatctgagggcagtgaattatggagtcaaaaaatgccagcaaaatgataaatgaagagaaatacaagaaggtaaggtctataggaaccattctattaccatcacctcacacagtatgtgatatgttttcggtacctaattaatgaaaccttaagctatataaagttataatccaatatttccatgtttagaaatttataccataaaaatgcttacacaattatacaaatatgtgactacagagatataagtaaaaacattatttgtaacaataaaatgccaaaaataaatatacaccataatgtggaatattattaagtagacattaaagtgaatatgaatctacaggttaaagaaaattatgatctttcctaaaccatcatgaagactagtttatgcaattatacaaaagaataagacaatagaaatggctggatatggaattggtt

SEQ ID NO: 1682 - DNA, 515 bp, Homo sapiens
  MAP TO CHR22_191.0; EXPRESSED IN BONE MARROW, SIGNAL = 0.72; EXPRESSED IN HELA, SIGNAL = 0.56; EXPRESSED IN BRAIN, SIGNAL = 0.77; EXPRESSED IN FETAL LIVER, SIGNAL = 0.67; EXPRESSED IN PLACENTA, SIGNAL = 0.93; EXPRESSED IN LUNG, SIGNAL = 1.4; EXPRESSED IN ADULT LIVER, SIGNAL = 0.73; SWISSPROT HIT: P04275, EVALUE 7.00e-29; NT HIT: M60676.1, EVALUE 0.00e+00; EST_HUMAN HIT: AW963013.1, EVALUE 0.00e+00
tcaggctcattgtgttctgcagaaggccagcagcactgcattattcaactcttcttgctggaatgcagattagaaactaagaatcttgccttcccactcattccctctttgagaccattgagctacatttctccttctacctggaccccccttatccttaaattgaccatcagaacatttgcacccagactaagagccagagtttctgacacctggccataggcctgggccacctgaggctgcctttgcaggtggaccccgagccatacctggatgtctgcatttacgacacctgctcctgtgagtccattggggactgcgcctgcttctgcgacaccattgctgcctatgcccacgtgtgtgcccagcatggcaaggtggtgacctggaggacggccacattgtgccatgagtcctgacaccctcatgttctcagatgccctcccttcttcccatgtgtctatgcttgaagaccttgtgagtgcagggggatatcttcatgggcgagagaagac

SEQ ID NO: 1683 - DNA, 504 bp, Homo sapiens
  MAP TO CHR22_85.0; EXPRESSED IN BRAIN, SIGNAL = 0.34; EXPRESSED IN HELA, SIGNAL = 5.3; EXPRESSED IN PLACENTA, SIGNAL = 0.44; NT HIT: gi5032308, EVALUE 4.80e-01; EST_HUMAN HIT: BF346425.1, EVALUE 7.00e-01; SWISSPROT HIT: P27918, EVALUE 1.80e-01
ggaaggagttgacggttttgagcaacagggagacccgggagccggtggagcaaagatcacaaggaatgggtgggaggtggacacggcactgggggctttctgagccacagtcagggttattctgggctctctcctcagtatactgtgaaaccgctggagtgcgaagcacaggggtgaggctccagccggcttgtactgccacattcgcgtcgtcgtcattctcctcaccacggtggcctccaccgatgcagggcctgtgaatgtcacctccaccccagccgaacatccctgcaatggcttcatccatcctgacaaatagtaacaagccactagcacttcttgccccacacctgtttccccaggagacagcatggcttctcaggagcgtgtgctccttcagagcggctctgtctgctctctcgcagggcgctcccagcacccagagctgcgacctgtccttaaccaagggatccgctgagcccccggctcctcttctgtgtttgc

SEQ ID NO: 1684 - DNA, 556 bp, Homo sapiens
  MAP TO CHR22_203.0; EXPRESSED IN BRAIN, SIGNAL = 1.3; EXPRESSED IN HELA, SIGNAL = 0.88; EXPRESSED IN FETAL LIVER, SIGNAL = 0.97; EXPRESSED IN PLACENTA, SIGNAL = 1.1; EXPRESSED IN BONE MARROW, SIGNAL = 1.1; EXPRESSED IN LUNG, SIGNAL =   1; NT HIT: AB051438.1, EVALUE 0.00e+00; EST_HUMAN HIT: AA287871.1, EVALUE 0.00e+00; SWISSPROT HIT: P08548, EVALUE 3.00e-06
tgctttcttaatttcttgtttcagctagtttactatcaatatatagaaatgctactgatttttgtatgttgatttatatcctgcaactttattaatttcatgtatcaccctaagaagcttttggtagagtcttatttttttccgtgtataagatcacattgtctttaaacagggacagtttgactgtctcctttccaattcagatgtcctttatttctttctctcacctaattgtcctggctaagactttcactatgtgaaatatgattggtgagaataggcatccttttcctgttccagtaaaatctttttcttgttcacagtaaaatctttcacgttttccacactcagtatgatcttagctgtagatttgtcctttatgtccttctgtgttaaggcatatattttctatactaaattgttgagaggttttttgtcatgtaagaatatttaattttgccaaacgcttttattgtgtttattaatttaatcatatggttttcagtatatatccaaaggaaagaaaatcagtatatcaaagagttacctgcacccc

SEQ ID NO: 1685 - DNA, 594 bp, Homo sapiens
  MAP TO AL136231.3; EXPRESSED IN HELA, SIGNAL = 2.4; EXPRESSED IN BRAIN, SIGNAL = 2.8; EXPRESSED IN LUNG, SIGNAL = 2.2; EXPRESSED IN ADULT LIVER, SIGNAL = 2.1; EXPRESSED IN FETAL LIVER, SIGNAL = 2.2; EXPRESSED IN BONE MARROW, SIGNAL = 2.4; EXPRESSED IN HEART, SIGNAL = 2.5; SWISSPROT HIT: Q9UIJ7, EVALUE 3.00e-28; NT HIT: gi14741869, EVALUE 2.00e-93; EST_HUMAN HIT: AU136907.1, EVALUE 3.00e-93
gcaagaggactcagggacagtctgctatgtgacagttccacaacaactactcaccacagttttgggagggttgaattcaatgttatagactcggccactggcgggatgaatccagcgagcagtaaggcgttgtttaatgacctcaaagggcacattcaggttaatcactgtgtcgatctgataagctctatctagggcttctgcctgtggaagtgtccttggaaaacctttataaagtaaaaaagaaaaagaagaagaaaaaagaaaggaagtatggggtgggggtggggcgggtggagaaagaagaaagaaaaagaaagaattaatgttggacaatctgaacaaaaggaatgaggctcaccaggcaggccgatcacagctgcggtgcaactgtgatggttacctgtcaacttgactggggcatgagtgcccagatatttggcaaatattatgctgggtatatctgtcaggctgcttttgttatgaaattatcatgtaaataggcagactgataaagtacattgcccttcttaatatgggtgggccttatctaatcaattttaaggcctgagtagaacaaaaggctgaccctca

SEQ ID NO: 1686 - DNA, 579 bp, Homo sapiens
  MAP TO CHR21_7.0; EXPRESSED IN BONE MARROW, SIGNAL = 1.6; EXPRESSED IN BRAIN, SIGNAL = 1.6; EXPRESSED IN HELA, SIGNAL = 3.4; EXPRESSED IN PLACENTA, SIGNAL = 0.86; EXPRESSED IN FETAL LIVER, SIGNAL = 1.3; EXPRESSED IN LUNG, SIGNAL = 0.91; EXPRESSED IN ADULT LIVER, SIGNAL = 0.92; SWISSPROT HIT: Q9UQL6, EVALUE 4.30e+00; NT HIT: AY004223.1, EVALUE 5.50e-01
atccaggatgagactgtgccggagcctgtttccacaactgcatttggagatccgtcttattgattagcgggggaaaggggtggggatcaggagtgtgaggtgaggggaggaccaactgacgactggctcaatgaagcacaagacattttcttccggaaagatgtcaaacaactgagaaacagccagagaggaagtagaaaggtggaaaaatgaggagaccctggaagaaatgaaggcatttcctatgagacagccttggggcttttttcttttctttctttttttttgcttccatcatctgacctgcaaaggctagagtgacagcgtcatgcaaatgctgcagtccagcaggtctgggagagggtggatgctagactgtgagttaatgttaatgatgagcgcagtgaaaataccagccgctgccaccccctgctcacagaagcgctctgagtcagcatcagatgctttgcctcgcctctcgctgtgtatctgtatgcctgtgtgcgcgcgcgtgctcgctcgggcatccgtgtctagccgaggggagggggtggcgtgtgagtgcgtggagggtaaaag

SEQ ID NO: 1687 - DNA, 560 bp, Homo sapiens
  MAP TO CHR21_55.0; EXPRESSED IN BRAIN, SIGNAL = 0.33; SWISSPROT HIT: Q04857, EVALUE 1.80e+00; NT HIT: gi15529987, EVALUE 5.30e-01
tcagaaaattccagggttgctgtcgtgtggctcagtgatgtcatggaaggagctttttctgcttggctagtcacagtaagttagattttcatctttaaactcatgacctcatgatcagaagatgtctctaaagctgtagatgcaacaacatttcaaacaggaacacatagggtgacgagccaactccctttgcccaaggctgaggggttactagaaagtcccaagttaactgggacaagttggttaccctatggccaccttttgttagggaagaacatcttccccagaaattccagcatgttctccttggtctgttgatccagaactaggtcatatcctcaccactagaccaatgactggcaaggaggcccaggatccccctgctgtgattcatcccctggggctagagaagaccctcccctgggcttgcccaacactgaaacagaatggagattctattggccaggaagaaggtgaggaacccagacattcgccagagtgctcatgaaaacaattaatttcccagttagccaaatcttaccaaccaagcagattgtgtg

SEQ ID NO: 1688 - DNA, 541 bp, Homo sapiens
  MAP TO AL138726.2; EXPRESSED IN BONE MARROW, SIGNAL = 0.55; EXPRESSED IN BRAIN, SIGNAL = 0.6; EXPRESSED IN PLACENTA, SIGNAL = 0.7; EXPRESSED IN FETAL LIVER, SIGNAL = 0.57; EXPRESSED IN LUNG, SIGNAL = 0.69; EXPRESSED IN ADULT LIVER, SIGNAL = 0.8; SWISSPROT HIT: Q14916, EVALUE 4.00e-29; EST_HUMAN HIT: N73241.1, EVALUE 2.00e-84; NT HIT: AF362492.1, EVALUE 0.00e+00
ctcctggcaaggtagatgaagacttgagcttctttttcaaatatagtatcatatcagtacaattccatatctacacaaattagttagcaagacaggcttttaaacatttgactgtggggaaaattattgatgtacctttatattatccaggagcttctttgtggaggtgttgggcaaaccatgtggatctgtgctattcaccatgactaccattgtgaggttcaggcacgcacgctgtgctgttattataacattacaacagtgcacaaggaaagacaatccatagcgaaaggaacagaaacctggaactacaaagtaaaacagaaagtcgcaattgctgacagagctgagataaaaacatactttaactataggagggacattcagaaatttggagccctagatattaatttaaaattttattgtacttaatgacctttgataattattatataataagaagatgtgagactgatataataataccatattctccttaaaattgtatttccagctagaagttccaagaaaatcaagccaa

SEQ ID NO: 1689 - DNA, 596 bp, Homo sapiens
  MAP TO CHR21_66.0; EXPRESSED IN PLACENTA, SIGNAL = 0.75; EXPRESSED IN BONE MARROW, SIGNAL = 1.4; EXPRESSED IN LUNG, SIGNAL = 0.87; EXPRESSED IN ADULT LIVER, SIGNAL = 0.96; EXPRESSED IN BRAIN, SIGNAL = 1.5; EXPRESSED IN HELA, SIGNAL = 3.8; EXPRESSED IN FETAL LIVER, SIGNAL = 1.4; SWISSPROT HIT: P01042, EVALUE 5.10e-01; EST_HUMAN HIT: BE160507.1, EVALUE 9.00e-81; NT HIT: M24943.1, EVALUE 1.40e-01
ctctgcctcccaacaagaagcacccactcaggcccctctgcctcccgacacatgagctttcctctctgcccagggtttgtttcacaagggccgtgtcatcctaagctctgtgcaaaaagcctggtgttcagcgtcacgggtcccagtgacttctgtaactgggcagcagccttgtctgcagagggggagaccgaggcaggggcagcaagtaacatgctcacacagccagtcaccaaactccagggcgatggctttcccctcctcccacctcccagacaagtgtctccaaccctggccctgcttgctggttctgtggacagtttggtgggtgggtggtcccctgccccagggatatttttaaattgaggtatgatttacacttactaagtatacaaatcttcagtgtacagtttggcagatctgtacatgcccataggggtagtcatcctctaggttaagggatggaccctttctggctcccagacagctccccatcccctgtcccacattgtccccctttaggtaaccgtgactctcacctctagccgcatggattcgttgcccatgcttggacttcctatgagtggaatgctgca

SEQ ID NO: 1690 - DNA, 550 bp, Homo sapiens
  MAP TO AC020588.4; EXPRESSED IN BRAIN, SIGNAL = 0.37; EXPRESSED IN FETAL LIVER, SIGNAL = 0.44; EST_HUMAN HIT: BG674453.1, EVALUE 0.00e+00; NT HIT: K03021.1, EVALUE 6.00e-10; SWISSPROT HIT: P18200, EVALUE 5.20e+00
tggcctagtgatatttggggtcccaagatttattagtgagttccatttggcttagtggtttgggggtcctgagatttattttcctttttcaatagtttctactgaatgcatatgacttctccaccaccgtaaagtcaaaccctggtaaattggggaccatctgtatgttccgctttctccaagtgtctctacatgtcccttggcagggctataccatgtccatcatatacatcctacctatttctgttaaggtctatcataggtgtgttaagcaatgattgcaaatgggattttctaccacttctagttaatttttaattgatatttcctataggaaagctgttttttatgtttactttgtaatcaaccacttactgaattaccttatctctgatggtttctcagttgattctcttttgtttaatacacatcatctgaaaatcatttgacctcccactttccaaattgtatacttcatttctctcccttgctaattacattggccagtgcttccacaatactgttaaattgtcagatacggtgggaatgc

SEQ ID NO: 1691 - DNA, 542 bp, Homo sapiens
  MAP TO AL137118.3; EXPRESSED IN PLACENTA, SIGNAL = 0.61; EXPRESSED IN BRAIN, SIGNAL = 0.61; EXPRESSED IN ADULT LIVER, SIGNAL = 0.6; EXPRESSED IN FETAL LIVER, SIGNAL = 0.53; EXPRESSED IN BONE MARROW, SIGNAL = 0.5; NT HIT: X15215.1, EVALUE 2.00e+00; SWISSPROT HIT: O74431, EVALUE 2.30e+00
aggttggggttggttttaggccccacagggggctacatgggaatgggaaatgggagtgatagatggttgtcaagcagccacagttgtagggagagtataatcacagaagccagaggcattgatactgagagcatcttattccccagaaagctaaaggaaaaaaatatatatacaaacatccttcctagaaacctcatatagctaaaggctaccagcaaaaagcagggccagcccacattcaaaattccatttagttcgacactttctcttgagaaacctttaaaatattttgattgtgcattcctgccaatataaaatacatttgactacaccacactgcaacatttcactagactgcaaaaaaaaaaaaaaaaaaaagaaaagaaaagaaaagaaagaaagaaaagaaaatcgtctgctagatgtgactataaaaattagccagaccaatgaagtatgcgacaggaagctgagaaatatatgaagacgcaaattcaagggaaactgggaaattatttggcagcataatttccacggcctta

SEQ ID NO: 1692 - DNA, 571 bp, Homo sapiens
  MAP TO CHR21_71.0; EXPRESSED IN PLACENTA, SIGNAL = 0.86; EXPRESSED IN BRAIN, SIGNAL =   2; EXPRESSED IN LUNG, SIGNAL = 0.91; EXPRESSED IN ADULT LIVER, SIGNAL = 0.94; EXPRESSED IN HELA, SIGNAL = 5.5; EXPRESSED IN FETAL LIVER, SIGNAL = 1.3; EXPRESSED IN BONE MARROW, SIGNAL = 1.6; EST_HUMAN HIT: BG055443.1, EVALUE 0.00e+00; NT HIT: gi14780641, EVALUE 0.00e+00; SWISSPROT HIT: P54583, EVALUE 2.40e+00
agaacgcagtgtcaggtgtgggactccttctgcccctgcagtgggtgttacgggcggtgtgccctggcgagcaagctttgattcttggttctttgagctcgtttcagaggctgagtccccacatcagctttagttcttggacttccctgtattaagcaagaattaggagaatggctgtccctgcaggcgcctcccgtaaatcctgagctctctggcgcaatctgaaacttctcttctgttttctttggctgtatcagccgaaccaggagaggcctgggctgcgactaaggagaaagaaatcgggggtttctgagagcagatggtgcctttgtgggtgcagggcttttgtggaaattgtcagcctctacgggcagagtccggcatcccctccccagactgcctgctgtcaaaccacggagcagctggagcctgccctgtccacggcccgtttccacccgggcatgttcgtctctcctgacttcggcagaggcccctggtggccttcagtttcagtttctcatccaggaaggtaaccttgggcattggcagtgggtttccctatggcttggat

SEQ ID NO: 1693 - DNA, 534 bp, Homo sapiens
  MAP TO AL136099.2; EXPRESSED IN BRAIN, SIGNAL = 0.58; EXPRESSED IN FETAL LIVER, SIGNAL = 0.49; EXPRESSED IN BONE MARROW, SIGNAL = 0.48; EXPRESSED IN PLACENTA, SIGNAL = 0.59; EXPRESSED IN ADULT LIVER, SIGNAL = 0.52; EXPRESSED IN LUNG, SIGNAL = 0.58; NT HIT: AF111425.1, EVALUE 7.90e+00; SWISSPROT HIT: P16110, EVALUE 9.90e-01
ctggaaagaaaatcggttgcccctcttgccaagcaaaacacctctcctctcctgagtcatgctcctgaggtgtcgggaggccgggaccgagtccagtcattatcctccccctagcaccgccttccccccactgatgagggcagaggggtctcacagcttctccttgttcctctgcttctccccactcctgagcctctccccatttctccgcctctcccctgttccatctggcagcaccatgacatggtggaaataatgctgggactggagacaggtggtagcccccaggcctctctctgtgtggatagcctggagccctggttgtgggcagagaatagactggggccagactcagcacaggtgtgaggctcaaggcaacgggccttgggaagtaagcagggagggcatcatggtggtggctaccagcctgggctggcatggagagcttggtcactgcatctgaacctgtctttaacacagaactatctcgacatccatggtgctaccttagaaaccagcctttgctagaacagg

SEQ ID NO: 1694 - DNA, 599 bp, Homo sapiens
  MAP TO CHR21_73.0; EXPRESSED IN BRAIN, SIGNAL = 1.3; EXPRESSED IN HELA, SIGNAL = 3.4; EXPRESSED IN FETAL LIVER, SIGNAL = 0.99; EXPRESSED IN PLACENTA, SIGNAL = 0.59; EXPRESSED IN BONE MARROW, SIGNAL = 1.3; EXPRESSED IN LUNG, SIGNAL = 0.8; EXPRESSED IN ADULT LIVER, SIGNAL = 0.71; SWISSPROT HIT: gi115267, EVALUE 1.50e-02
aggagggatgtgcagatgaggggacaggtgaggggcagggcagggcctcccttaacccaccccctatggccctggcacagaggttccagtacctgcgctccaggggcagggcctcccttaacctgccccccatggcccaggcacagaggttccagtacctgggctccaggcagagtgtatctagcaccccagagaccgaggcgggctgtaccgttggctgctgggagcgagagccctggctgggtaggcaggggacggggaggggagagcatgaggggaccctcccagcagcctctgcatgcgggcagccggcctgccaccctgggcaagcgggaggggctgccttgccaagggaccctcacagatgaggtgtgagggacagagacccccgacggctgctggaggcacccacggggctccctggagcctccctgtggtcctgggtccccttacccgattgttgcaggaggggccagcacagggcaggtgcctgaagagcaggtgccggaagagctaccgcagcccaggcagcaggggaggaagtcagtctccctcgggggggtttccagacaggggccgcttttgttgagggcacagaa

SEQ ID NO: 1695 - DNA, 509 bp, Homo sapiens
  MAP TO AL023656.8; EXPRESSED IN HEART, SIGNAL = 3.6; EXPRESSED IN PLACENTA, SIGNAL = 2.1; EXPRESSED IN BONE MARROW, SIGNAL = 1.4; EXPRESSED IN LUNG, SIGNAL = 1.9; EXPRESSED IN ADULT LIVER, SIGNAL = 1.9; EXPRESSED IN HELA, SIGNAL = 1.6; EXPRESSED IN BRAIN, SIGNAL =   2; EXPRESSED IN FETAL LIVER, SIGNAL = 1.8; SWISSPROT HIT: Q9P2N7, EVALUE 2.00e-04; EST_HUMAN HIT: BI915330.1, EVALUE 1.00e-107; NT HIT: AB067487.1, EVALUE 1.00e-107
ttatgaggcactcgttgctgttttctgacatggaggtctcctactaacagaatacacttaaatttcttttttcagaataagtggataagccgtagccccatgctgcagagaagggtctaccattccatggctgctgtacaaaggaagctttatgttcttggaggcaatgacctagactacaataatgaccggatccttgtgcgccatatagattcttacaacatagacactgaccagtggacacgttgtaatttcaacctgctgactggcaagtacctttgattaagtaaatcaggaaaagtagattcaagaagtcaccaaacttgtttcatagacatctttagggcatcactaaatattaagtgcatagttgtagaagaacctgcatttattaaccagaaaggtgtgtatcatttatgttctaacagaactggactcatttaggtagctgagcatctagtttctcagggcctatattactaccattatgcacatcctcatatggctga

SEQ ID NO: 1696 - DNA, 541 bp, Homo sapiens
  MAP TO CHR22_185_2.0; EXPRESSED IN PLACENTA, SIGNAL = 0.61; EXPRESSED IN BRAIN, SIGNAL = 0.46; EXPRESSED IN LUNG, SIGNAL = 0.59; EXPRESSED IN BONE MARROW, SIGNAL = 0.53; SWISSPROT HIT: P57284, EVALUE 3.90e+00; EST_HUMAN HIT: AU185625.1, EVALUE 1.90e-01; NT HIT: gi7524759, EVALUE 2.00e+00
aggcatgtaggaccgatgactttcctgaggccacacaaatagaaggcttctgtgagcaccactgtaggtttttagggtgtaaggtgcacccacagggttcaactctccctcttttgctttccttttcctcttcactcagacgttcttcatctgataggtaaattctggaaatctgattccacttggtataccagaggtaaggatgattatatgtacaagggtagccctaagataatgacagtttctccctctctctccctccctctctgtctctctccctctctcttttctttctgtccttctctgtctctcttattcaaacttaaatgttgtcattctttcagtcatgagcagaacagccatctggtggtaactggggttttggtctatggaattggagtggatccctctttccaaggcttcaggtgaattctgctttcttttctgttaaatttaccagagagctcttcatgtggtttttgggcagaagctcaactaatagtaacattttgctgagttttcccatttgtcattgtccctt

SEQ ID NO: 1697 - DNA, 588 bp, Homo sapiens
  MAP TO AL138967.2; EXPRESSED IN HELA, SIGNAL =   3; EXPRESSED IN FETAL LIVER, SIGNAL = 2.4; EXPRESSED IN ADULT LIVER, SIGNAL = 3.7; EXPRESSED IN LUNG, SIGNAL = 2.6; EXPRESSED IN BONE MARROW, SIGNAL = 2.4; EXPRESSED IN BRAIN, SIGNAL =   3; SWISSPROT HIT: P33459, EVALUE 2.00e-02; EST_HUMAN HIT: AW340174.1, EVALUE 1.00e-116; NT HIT: AL163284.2, EVALUE 0.00e+00
tggttttcttcctggtggagttactcaaaccttcattcctgaaggttgtgggccatttgtagtcctgcctggattgggcttttgtagtttctcattgaccttaatcacagggcatggtaatactaagagacaccccaagggatctcctgtattctacgcatactcttccttacctccattgtggagtattagactgatttcttcttgatagttcaggttgatcaccccagccaatactgtaactctcttcttagcctgttggcttagaggtaggaggagcccaaagtggccagtgacaatattaacttccagtttaatggaatcattgttgtttctcctggtagcagtgttcctccctctggaactaagacctctaggctagcagaaaataatgtcgcaggaacagaaagtgaaaattttgctagtgaatcactaggggtaatggtgagcggtgccactttcacttccatcccttgattcctggacccatgaatcctggctatagaagaaacagtaccatatattgcatgctgattcagagcatacacgaccttctggagaactttgccccagacctgcaaagaattg

SEQ ID NO: 1698 - DNA, 580 bp, Homo sapiens
  MAP TO AL050339.4; EXPRESSED IN BONE MARROW, SIGNAL = 1.5; EXPRESSED IN HELA, SIGNAL = 1.2; EXPRESSED IN BRAIN, SIGNAL = 1.4; EXPRESSED IN HEART, SIGNAL = 1.6; EXPRESSED IN FETAL LIVER, SIGNAL = 1.6; EXPRESSED IN PLACENTA, SIGNAL = 1.7; EXPRESSED IN ADULT LIVER, SIGNAL = 1.6; EXPRESSED IN LUNG, SIGNAL = 1.6; SWISSPROT HIT: Q9GZK3, EVALUE 4.00e-66; EST_HUMAN HIT: BF838729.1, EVALUE 2.00e-04; NT HIT: AJ302568.1, EVALUE 4.00e-11
actgcctgagcaatgaacacataagtgcccaggatgagggtgagtggcatcaggagaagcaaagcgcctagtacattgagctccatttcattcacacgaatatcaatacaggctagtttcaaaagggctggaacttcacagaagaaatggtccaacaccctctgtccacatcttggggccaccactgtgagagtggactggacaagggagttagcaaagccactgatccaagtgccagcagccatgtggatacagcgtctatggttcatgatgactgggtagtgaaggggcttgcatatggcagcgtaacggtcaaaggccatgatggctagaagtatgcattcagtagaacccagggccaaaaatatatagagttgggcaacacaacccccatagctaatggtcttttctggtccccggaggttgaccagcatctgtgggacagtgctggtggtatagcagaggtccagaaaggatagattagagacaaaaaagtacatgggactgtcaagctggggatccagatgggaaactaggataatggagatatttccaaatagggaaaagatgtaggccacca

SEQ ID NO: 1699 - DNA, 591 bp, Homo sapiens
  MAP TO AL138781.2; EXPRESSED IN PLACENTA, SIGNAL = 1.2; EXPRESSED IN ADULT LIVER, SIGNAL = 1.1; EXPRESSED IN FETAL LIVER, SIGNAL = 0.93; EXPRESSED IN LUNG, SIGNAL = 1.2; EXPRESSED IN BONE MARROW, SIGNAL =   1; EXPRESSED IN BRAIN, SIGNAL =   1; EXPRESSED IN HELA, SIGNAL = 0.69; SWISSPROT HIT: P11994, EVALUE 5.80e-02; EST_HUMAN HIT: BE735689.1, EVALUE 8.30e-01
catgggcctcagctctactctatgggcctcctgcatgggcctccagggaaggctctaagactgtggaattcagagcaattgctgtctccaaggaagcctgtaaaactctggaattcagagcaattcctcctgacagccaggtgggccaagaacctggaggactccaggggcgaactgacagctgcatttcctgctctccaaagggaagcattttgtcctcagagggatgtctctaagtgtccaccaggtgcacctgtgcccggctgcagagtagcacctgctccaggtgagtttcgggctctttgagctgtccaggcctcaggaaaccacagatgggaggaatggatgatctcggtcttcagtaatgaacccagcagggttcacggccgcctctcctgttatccgagggggctggaggcagtgcctgtgtctgccccagcccatggcctgacaggccacgctggccgctcacctgcacctcctggggtgcgtcaggcgctgggtgtgagcagtggagtgaaaaacctgctcagccacagcgcgtcgacctcaccagggctgcggcacaccagaaagaaggacttccacccc

SEQ ID NO: 1700 - DNA, 510 bp, Homo sapiens
  MAP TO AL136109.1; EXPRESSED IN FETAL LIVER, SIGNAL = 0.65; EXPRESSED IN BONE MARROW, SIGNAL = 0.67; EXPRESSED IN PLACENTA, SIGNAL = 0.72; EXPRESSED IN LUNG, SIGNAL = 0.78; EXPRESSED IN ADULT LIVER, SIGNAL = 0.69; EXPRESSED IN HELA, SIGNAL = 0.78; EXPRESSED IN BRAIN, SIGNAL = 0.62; NT HIT: gi14738240, EVALUE 0.00e+00; SWISSPROT HIT: P51501, EVALUE 1.90e-01; EST_HUMAN HIT: AA132883.1, EVALUE 0.00e+00
aaactgggatccccaaaaagagttcattcaatttcttatgactaatgaggaaacagtagataaagctccacctcattctaaaataggtctagaaaaaaaaagcaaagcgaaaaatggatgtaagcaagataactcgttataccgaggattgctttagtgattctaattgtgtacccaataaatcaaaaatgcaagaagtagactttctagaacaaaatgaagagctacaagcagtagactcacagaaatatgcattatcaaaagtgaagcctgaatcaactgatgaagacttagaatctgtggatgccttccaacatctaatttataacccagataagtgtggagaagagagttcacctgttcatactagcacttttctttcaaataccttaaaaaagaaatgtgaagagagtgattctgagtcacctgctactttcagtaccgaagagccatcattctacccctgtacaaagtgcaatgtgaattttagggagaagaagcacctccaca

SEQ ID NO: 1701 - DNA, 533 bp, Homo sapiens
  MAP TO AC022215.2; EXPRESSED IN PLACENTA, SIGNAL = 1.4; EXPRESSED IN LUNG, SIGNAL = 1.4; EXPRESSED IN ADULT LIVER, SIGNAL = 1.4; EXPRESSED IN BONE MARROW, SIGNAL = 1.2; EXPRESSED IN BRAIN, SIGNAL = 1.4; EXPRESSED IN FETAL LIVER, SIGNAL = 1.1; NT HIT: AF275346.1, EVALUE 2.00e+00; SWISSPROT HIT: Q9Z794, EVALUE 2.90e+00; EST_HUMAN HIT: AA828627.1, EVALUE 0.00e+00
cctagggccactttctttccagtagttggaaggtgctaggatggctaacacagcccaggtgttcagagggaattcactacagggggattagcacaagagcacggaaatatagaaaagtgctaaggcagtctcttagtgacctggcccttctggctggctcagtccttgattctgctcttttgtgaaatctaccaagtcctggccccttggccatgcctgtgggcacactcccttggagtctgggccagggacagaagcagctaaggagacaggataatatgagtgacacagaaatggaggggcacaggtgaggacagtgggtgtcctagagtgcccacagtttgctagttcatctataagcacccggggtgaggcctgttgtggctgccatttgggaaccatggtggttgggtgcaaatgacccacccatgacccaaggaagcagtggtttgaaaaccacagataaagatcagaatgagaccttctctccagaaagattttatctgctgcttcctctggtatctgggcctgtc

SEQ ID NO: 1702 - DNA, 511 bp, Homo sapiens
  MAP TO AL138722.2; EXPRESSED IN PLACENTA, SIGNAL = 0.47; EXPRESSED IN BRAIN, SIGNAL = 0.51; EST_HUMAN HIT: AA287162.1, EVALUE 1.00e-124; NT HIT: gi14758009, EVALUE 0.00e+00; SWISSPROT HIT: P47050, EVALUE 1.60e+00
ttccagctagtctttccatcgttgatacataattgccaaagtagccaagttgaactccctacttttaggattcttgagtcactactttggattcttcaaaggtccttcgattctatgcaatctgggatgatacagacagcatgtatggtgaatgtcggacctacatcattcattactatcttatggatgatacggtggaaattcgagaggtccacgaacggaatgatgggagagatcctttcccactcctaatgaaccgccagcgtgtgcccaaagttttggtggaaaatgcaagtatgtttgattcagtttattctctgttacttgggatgtttttaggttcttaaaggagttacttaatcagtatgcaaaattcgtttatacttggaagcctctagctatttttgcttagatgctcagaaaatggcttcccacagctttcctcctttacttgccccttggtccaggcgtgcccccaagacagtctggtacccaggtcaaggaaacaaaa

SEQ ID NO: 1703 - DNA, 533 bp, Homo sapiens
  MAP TO AC011799.5; EXPRESSED IN PLACENTA, SIGNAL = 0.49; EXPRESSED IN BRAIN, SIGNAL = 0.58; EST_HUMAN HIT: AI252805.1, EVALUE 4.00e-55; NT HIT: gi13357558, EVALUE 7.90e+00
cccagccccttttattattttcaataccaccagaattttattttaacttttctctcacctcctgcccccatctttatgaacattgacctacatctttcctctcagaaacataaatgaagtgttaataagttaaaaggggttaaaggtagagatgatctctccttttccacagagggggcagctcggctttcatgggtaagttctgtggtccatccaaaatgacagctatgcacattctggagcaacagaaaaagcagcaaaaattgtcctcatattgtgattacaaccatacgtacaaatatgcctcggggaaaaaatactcaaaagaagtgcagtaattttgttttggtggcaaggttaagttctttaaaaataatggatcatatcacctttataattatattttgttaaacaataaaaataattgttttatttgataaacaatctcatctagatgtcttatctgtaaatttttactctagttaaagaaacatttctttgtcataaatgctaggtttcttgctgcatcaggt

SEQ ID NO: 1704 - DNA, 514 bp, Homo sapiens
  MAP TO AL138996.1; EXPRESSED IN PLACENTA, SIGNAL = 1.3; EXPRESSED IN LUNG, SIGNAL = 1.5; EXPRESSED IN ADULT LIVER, SIGNAL = 1.9; EXPRESSED IN BRAIN, SIGNAL = 1.2; EXPRESSED IN FETAL LIVER, SIGNAL = 1.2; EXPRESSED IN HEART, SIGNAL = 1.2; NT HIT: gi14752820, EVALUE 1.00e-81; EST_HUMAN HIT: BE161764.1, EVALUE 1.00e-122; SWISSPROT HIT: P24723, EVALUE 4.00e-24
cgagtcaaaggtttctgatgccttctgtacttttgatttcatgtagcaattcaaggctgtgtgaaatgaactacaggagatccaggtgctgctctgcccaggggatctaatcccaccagaccggttgcactgcaccctgacccatggtcaggatgtttcctggaatacatccacttgacagtgtcctctctatgccacagccttaggcaatatgctgctgatggagctctaggttaattgctacaccacattgggccctctcttgtgtttgtatccaggatcgtctgttttttgtgatggagtttgtgaatgggggtgacttgatgttccacattcagaagtctcgtcgttttgatgaagcacgagctcgcttctatgctgcagaaatcatttcggctctcatgttcctccatgataaaggaatcatctataggtgagttttggttgctgccctgtcttctaattcactgcctcttccctctcctggtatgatccatccttccacttctcatga

SEQ ID NO: 1705 - DNA, 594 bp, Homo sapiens
  MAP TO CHR22_129.0; EXPRESSED IN HELA, SIGNAL = 2.3; EXPRESSED IN BRAIN, SIGNAL = 1.8; EXPRESSED IN FETAL LIVER, SIGNAL = 1.6; EXPRESSED IN BONE MARROW, SIGNAL = 1.6; EXPRESSED IN HEART, SIGNAL = 2.2; EXPRESSED IN ADULT LIVER, SIGNAL = 1.9; NT HIT: gi11034850, EVALUE 1.00e-106; SWISSPROT HIT: Q09830, EVALUE 5.00e-07; EST_HUMAN HIT: BG386563.1, EVALUE 1.00e-106
ggatgtgaaagtgaggcaggccaaggaaagcagcccagggaaggcctgggttccagcatgcgtgccccccaagaggcttttgctaattggtctccctagggtaggggcaccttttctaatctgcacaaagacctgggtagaaggcccttgtccctgtgccctggccaggtggccgcctgcctcctgctgttcctggaggaggaggacgccttctggatgatgtctgccatcatcgaggacctgctccccgcctcctacttcagcaccaccctgctgggtgtccagactgaccagcgggtcctgcgccacctcattgtccagtacctgcctcgcctggacaagctgctccaggagcatgacattggtaaggcgcccctgagccactggctcccattctgcagcttggaggactcaggcgggtggccgagtggggatagggcacagccccccaaccatggtctttgtcgctcttttgttctctggtgttccctgccccctcccctcctttgctcttaagcagggaggaccttgctgcagttccggggagggaggtttccaccacctcctccccagcggctttggctcctgtgttta

SEQ ID NO: 1706 - DNA, 597 bp, Homo sapiens
  MAP TO CHR22_114.0; EXPRESSED IN FETAL LIVER, SIGNAL = 1.3; EXPRESSED IN PLACENTA, SIGNAL = 1.7; EXPRESSED IN BONE MARROW, SIGNAL = 0.99; EXPRESSED IN BRAIN, SIGNAL = 0.93; NT HIT: AF115557.1, EVALUE 0.00e+00; SWISSPROT HIT: P53814, EVALUE 2.00e-13; EST_HUMAN HIT: BI032187.1, EVALUE 0.00e+00
aagtggggatcagagactgcccttagcatgccagtgccagtgcttgcgcaggtgtgcctacaggaagccatgccccaccactctgctttgcatgccctgccctgggcacttgccagcctggccctcagtggtgggggtggcgttcaaagcctagggagccttggttgcatcctgtgggtcccttacaggtgccagagcgagaggaacaggaacagcaggcagaggtttcaaagccaacccccacccctgaaggcaccagccaggatgtgaccacagtgacactcctgctgcgagccccacctgggagcacatccagctcacctgcctcacccagcagttcacccacccctgcctctcctgagcctccattggagcctgccgaggcccagtgccttacagctgaggttccaggcagcccagagccaccccccagcccacccaagaccaccagccctgagcctcaggagtctccaacgctccccagcactgagggccaggtggtcaacaaggtgagtctggatgaggggcagggatgccaggcaagtgagcaggtctgggagtcaggccttgctcaggccctgttcttctcccttgcag

SEQ ID NO: 1707 - DNA, 600 bp, Homo sapiens
  MAP TO AL139253.1; EXPRESSED IN BONE MARROW, SIGNAL = 1.3; EXPRESSED IN BRAIN, SIGNAL = 1.6; EXPRESSED IN ADULT LIVER, SIGNAL = 1.7; EXPRESSED IN HELA, SIGNAL =   1; EST_HUMAN HIT: BI964027.1, EVALUE 1.00e-118; SWISSPROT HIT: P48608, EVALUE 3.50e-02
ctgtcaccctgactgaaggtctaggaactgtgaggcctgaacaggaccccgccaagtctccaggaagtcccctcctgctgagagggttgtcaagcggggatgtggctgcacctgagcccatcatgggggagcccggccaagccagtgaggagttccagccattggcgaggccctggcgggccacactggctgcagaggagctggtttctcaccgttctcccggagagccccaggaaacgtgctctggaacggaggtggagaggccacgccagacagggcctggtctccccagggagggggccagggggcacatggacctttcatcctcagaaccaagccaggacatagaggggccgggactctccatcctgccagcgagggatgccacattctccaccccaagtgtgaggcagccagaccccagtgcctggctgagttcaggacctgaactcaccgggatgcccagggtgaggctggcagtgcccctggcagttcttcctatggaacctctgccaccagaacctgttcgcccagcagctcttctgacacccgaagcctcatctgtgggagggccagaccaggcccgatacctggagtcag

SEQ ID NO: 1708 - DNA, 535 bp, Homo sapiens
  MAP TO AL137016.5; EXPRESSED IN BONE MARROW, SIGNAL = 0.41; EXPRESSED IN PLACENTA, SIGNAL = 0.44; EXPRESSED IN BRAIN, SIGNAL = 0.46; EST_HUMAN HIT: BF055452.1, EVALUE 1.00e-05; SWISSPROT HIT: P08548, EVALUE 3.00e-18; NT HIT: AF238296.1, EVALUE 1.00e-07
aaagctgagaggaaaatgcgtggtaataaatgcttgcttacaaataagaaaaggtctcaaatcaacaatcaaagttcctacctcaagaaactagaaactgaagaacaaaataaacccaaagccagcagaaggaaaaaataataatgataaaagcataaatctaggaaattggagaaaatagagaaaattcataaaatgaaaagatgtttccctgaaaaaaaatcaataaaattgatgatcttgtaccaagactaacaaaataaagactgaaaacacaaatagtcaatatcaagaatgaaatgaaaaatgttactacagatcatgcagccatggaaaaaataataagggactactataaacaactttacactcataaatttaacgacttggaagagatgcatcaactcctccaaaaccacaaactaccagaattcagccaagatgaaatagaccatatgatattgatattaggataggcaaatatatcaatagaaccgaatagagaagttggcaaactttctcacggagggctaga

SEQ ID NO: 1709 - DNA, 587 bp, Homo sapiens
  MAP TO AC016687.2; EXPRESSED IN BRAIN, SIGNAL = 0.46; EST_HUMAN HIT: BF962444.1, EVALUE 6.00e-11; SWISSPROT HIT: P08547, EVALUE 2.00e-12; NT HIT: AL163301.2, EVALUE 1.00e-08
gaacaaaaacaatacagtggcgcaaaatagtattttcaacaaatggtgttgaaatagctagacatctacatacaaaaataaataaatctttacacagaccttatacccttcagagaaatcaactcaaaataaaagacctaaatgtaacatgcaaacctatgaaactcttagaagataatgtaaaagaaaatctagatgaccttgtgtttggcaatgacttctagaaacaaaaacaaaggcacaatccatgaaataaaaaattaatgagctggacttaattagaattaaacatttttgttcttcaaaacaagaatgaaaacaaaatactttcaaaagaacaaaaagaaaagccagtgacttgtagaaaatatttacaaaaggcttatctcataaataattatctaaaatatacaaaaatcttatatactcaacagtaaaaagtaaactgattaacaaatacatcaaagaccttaatagatacctcgcctaagatatacagatgacgaataaacacatgaaaaactgcttgatgtatgttatcagaaaaatgtaaattaaaacaatagcaagatacccctacacaccca

SEQ ID NO: 1710 - DNA, 592 bp, Homo sapiens
  MAP TO AC016729.5; EXPRESSED IN BRAIN, SIGNAL = 0.44; EXPRESSED IN PLACENTA, SIGNAL = 0.51; EXPRESSED IN FETAL LIVER, SIGNAL = 0.52; EXPRESSED IN ADULT LIVER, SIGNAL = 0.69; EXPRESSED IN BONE MARROW, SIGNAL = 0.58; NT HIT: gi14737421, EVALUE 2.00e-07; EST_HUMAN HIT: AA100678.1, EVALUE 1.00e-12; SWISSPROT HIT: P08547, EVALUE 2.00e-03
tccacatcctttgtctggtggatttgaatttggtgtctatttgaacttttgtccatttttattttcattgggttgtttgtcttattaatgagttgtatgtgttctttatacattctagatacaagtccattgctgtatatataaagtatattctcctagtctatggtttgccttttcattttaacagtgattctttttttttttttttttttgtaatatcaacttttactttagattcaagaggtccatgttgaggttggttacatggatatattgtatgatgctgaggtgtggggtatgaatgatgccctcactcagacagtgagcacagtgcccaacaggtagtttttcagcacttggctccttccctttctcccctccctgttagtcctcagtgtctattgttcccattttcatgtccatgcttgcccatgctagctcccacttagaagtgagaacatgcagtattttattttcttaacagtgactcttgaagagcaaaagtttatgatatcagtgaagtccaattgttgatattttttcttttagagtttatgctttttgtattcaaggaatctttgccaaacccaag

SEQ ID NO: 1711 - DNA, 510 bp, Homo sapiens
  MAP TO AC021011.2; EXPRESSED IN BONE MARROW, SIGNAL = 0.53; EXPRESSED IN BRAIN, SIGNAL = 0.46; EXPRESSED IN PLACENTA, SIGNAL = 0.44; EXPRESSED IN FETAL LIVER, SIGNAL = 0.57; NT HIT: gi9626041, EVALUE 1.90e+00; EST_HUMAN HIT: AI187923.1, EVALUE 7.00e-04; SWISSPROT HIT: Q03177, EVALUE 4.70e+00
tcatgcaaaggcacaaaaagatttcacatcaggagaacattatagaacagagagcttagtgagtatcaggtttcgtggcacgtaatttaagaatttatgagaaagatagtgttgcactcagatgggctaagtaacaaataaccccaaagcttagtaattggaaatgacagagtttatatgttgctcttgctattagtccatcaaggactctggaggatgttatgtgtccataatgttcctgttacactcttcatcaagggctcacctcagcactcagggactgcgccagggtaccggagcggcccccgtgtctcatgttatcagttgacatgacagagagaaaactgagagttctacaaggtttaccaccaacaactggagacatgacctagaagggacacacatgactaacactcatgacttatccaaagctagtcacttggccctacacacccacaagagtgctagaagctgtgattctgtaagtgtccagagggcagaccttcagaa

SEQ ID NO: 1712 - DNA, 559 bp, Homo sapiens
  MAP TO AC012580.3; EXPRESSED IN PLACENTA, SIGNAL = 0.54; EXPRESSED IN BRAIN, SIGNAL = 0.31; EXPRESSED IN FETAL LIVER, SIGNAL = 0.42; NT HIT: gi13376272, EVALUE 9.00e-06; EST_HUMAN HIT: BF765359.1, EVALUE 2.00e-10
ccacacagatttatttcttacagtcctagaggttgtagaggttgggaagtgtgaggtgaaggtgccagcatactcgatgtctggtatggggctgctttctggttcatggaatggtgccttcgcaccgttccctcacacagtggaaggagcaaggaagtacactaatcccattcatgagggcagagccatcatgacccaatgacctcctaaagacaccaccttctaatagcaccaccttggtgattaagatttaacatacagatttgggaaaacaaattcagaccatggcattctgcccctgcccctccaaaattcatgtttttctcacgtgcaaaatacattaattccacctcaatagccccaaaagtcttaactcaatccagtaccaactcaaacgtttaaagtccatagtctcatctaaatgccatctaaatcagatatagggaagactcaaatgtatgattcatctgaggcaaattcccttccagctgtaagcctgtgaaatcaaacaagttacgtgcttccaaagtattacagtgggaaaggccaaatggacatt

SEQ ID NO: 1713 - DNA, 592 bp, Homo sapiens
  MAP TO CHR22_10.0; EXPRESSED IN PLACENTA, SIGNAL = 1.3; EXPRESSED IN LUNG, SIGNAL = 1.3; EXPRESSED IN ADULT LIVER, SIGNAL = 1.4; EXPRESSED IN HELA, SIGNAL = 0.77; EXPRESSED IN BRAIN, SIGNAL = 0.95; SWISSPROT HIT: P71856, EVALUE 2.60e+00; NT HIT: gi16165347, EVALUE 5.70e-01
cctggacactgagctccttctgctcgggccccctgcccggggccgggcgcccagggattttcctgcttgcaaaaggcctcacgggtgttgtggttttggcaattactgaaaagaaagcctggttattattcttgtcacgtgttgagaaatctctataaagttttacagccgcaaatgtaaaaggggtttttattagtttaacattcttccctatacccttccccctcctcccacccagaatctcaccctccatctcccgcctcctcggggccatagtctcaagacagctgcggccgggagcctggaaatacctgcagagagcaggaggccccaccgcctcccaagtcctcccagttccactggagcctccaagcctcagggtcttgtcctcctttcagctccgatgcccagtgacagagcttcccagcttccttcccttactccacaaatgcattggaaggcctgccctgggccagacgctgctgcaggtgctgagacacagacgagggcagcacagacattgattttctgcaggaaaagagaaagataaacgagaaaacaagtaaacataactacagagcaggttggctcc

SEQ ID NO: 1714 - DNA, 589 bp, Homo sapiens
  MAP TO AL137067.3; EXPRESSED IN FETAL LIVER, SIGNAL = 0.72; EXPRESSED IN PLACENTA, SIGNAL = 0.72; EXPRESSED IN ADULT LIVER, SIGNAL = 1.4; EXPRESSED IN BONE MARROW, SIGNAL = 0.66; EXPRESSED IN LUNG, SIGNAL = 1.1; EXPRESSED IN BRAIN, SIGNAL = 0.77; EST_HUMAN HIT: BI520003.1, EVALUE 0.00e+00; SWISSPROT HIT: P43636, EVALUE 6.00e-35; NT HIT: gi14861835, EVALUE 0.00e+00
aagggtccacccgaattaacagcaatgactgggcactgcatgtacatggcttccagagggacaatgccaaagtgctcattgcttggtgtgtaaagcacacacgtgcagctgtggaggagggagattttctgtttgtctgagaaagacctcaagaaggtcacatactggccaaggtcggactgttggaccattttcttcaattcctgataatgttccacattctccaggactctctcgtcataaccacctgccacgatcagatgaaccctctcccaatcttgggatgtcaatcttccacgcagctgtactagggcttccagtgccaaagtcagatttttcttcctttcgtatctgttgatggagagcagcaggaattttttccccttggggactaggtcatccagcttttcaggaacaactgagtcaaagctggtgacatttagagatggatagaggacatcagggtctatgtgagacagggacttgaatgtttccttaaaaacagcagctgtgaactggctgttgactaagatgcagtctgccatgcctgtggtgtattcctctatccagtcaattggggccctgtata

SEQ ID NO: 1715 - DNA, 571 bp, Homo sapiens
  MAP TO CHR21_57.0; EXPRESSED IN FETAL LIVER, SIGNAL = 0.5; EXPRESSED IN HELA, SIGNAL = 1.2; EXPRESSED IN BRAIN, SIGNAL = 0.54; EST_HUMAN HIT: BF798706.1, EVALUE 0.00e+00; SWISSPROT HIT: Q9YUS3, EVALUE 6.30e-01; NT HIT: AB063285.1, EVALUE 0.00e+00
tgggccttaaggatgaacagaattttaagaagcagagaagagagcaggggtaggggtgtgtgggtggagggagggtgcggggcccagggggacttcatggacagaagaaagagcaggagtgagaatgggcggcccaaggcgagttccggaaggaatgcctgcatcccagcgaggccgccttgggtctggggagggtggtcatgatttgtgtgctgacggtgacatctggttagggaccagttggggtcctagtgaaggccacacaaaaagtgaaatccaaacaacaggggcctatttcaatcaaagtagctgcactgtgtcagctaacttgactatgttaaaaaagaaacccaattcaaaatcaaatgtcccatcacacaggtgaggctgggtagctgactgcagaagagggaaagaacattggtacaagcttcttaaggagaacgggaacacaaattcccccgaccccgttcaccgctgaaggcaagcttcccacttccatcctggcctccagcgcctggcgcacgcagcctctgagcacagcaggccctcaaagaatgctcgctaaggg

SEQ ID NO: 1716 - DNA, 573 bp, Homo sapiens
  MAP TO AJ132411.1; EXPRESSED IN FETAL LIVER, SIGNAL = 1.7; EXPRESSED IN PLACENTA, SIGNAL = 1.5; EXPRESSED IN LUNG, SIGNAL = 1.8; EXPRESSED IN BONE MARROW, SIGNAL = 1.2; EXPRESSED IN BRAIN, SIGNAL = 1.4; EST_HUMAN HIT: BE382347.1, EVALUE 0.00e+00; SWISSPROT HIT: Q15031, EVALUE 4.00e-27; NT HIT: AJ312685.1, EVALUE 0.00e+00
ttcccctaaacaaatgcagccatgccctttacaggcaggaggtttggtattgggccgcctgccactctgaggatgttcctcattgtttatcttggcttttctccttctcagatcaacaataaagcttgtggcaaaattcctgtgccccaacaagttgcccgggaccaggacaaagtccacgaatttgttcttcaaagcgagctgggtgtcaggcttttgcaaggacgaagcatcaagaagtccttcctttccccgagaactgccctcatcaacttcctggtgcaagattgacagccaggaggctgcagctaccacgagggcctctgaggaacctccttccaggcctgggatgagggggcgatgtctgctggcccaggggaagggaaaagacaaatgtcttgactgttgacctcggtcctgtggcagactgcagtcaacagtgtgcctctgtagtgtggcctggtgctggggtgaaggtgagctgggcaaaggagaaatatgagctactgaggagggggttggaaatcctgcccctcaccccccacccacactgcaggtagaggaggccatctg

SEQ ID NO: 1717 - DNA, 572 bp, Homo sapiens
  MAP TO AL133378.4; EXPRESSED IN BRAIN, SIGNAL = 0.63; EXPRESSED IN ADULT LIVER, SIGNAL = 0.77; EXPRESSED IN FETAL LIVER, SIGNAL = 0.64; EXPRESSED IN PLACENTA, SIGNAL = 0.8; EXPRESSED IN LUNG, SIGNAL = 0.77; EXPRESSED IN BONE MARROW, SIGNAL = 0.66; EST_HUMAN HIT: BG326778.1, EVALUE 8.00e-01; SWISSPROT HIT: P36041, EVALUE 9.40e+00; NT HIT: gi9631294, EVALUE 8.50e+00
cctaaattgccacattgcaggatttggaaactgacactaagtctaatcacaaccaaagactggccaactggcccaataatgagacctctgtccacttctatttctccacctccggtcctaatcctactgatgtggccataatgtctgtgaagtaaaggaatggggatagactcagtgttctctgacctgtcttccattctattactctaatatttctaaatttagaatttctttgaaaaagaatgcattacctgataccaagcaaggtaatttcttatttcctttttcaaacacatcagttaagtacagacgtagtgaaatctagtctgatcatcttttcctgaagaactgaataaatatttataactaaataatctagcttttcctggtaaaggagacacaactgggataaaattagatttttcagatgtgaaggctttcaagctcctcctttttagattaagaagttgttgtatgttctaaagagagacattagtaatcgaaaattggtaatgagtctttgtcagatcattactttttctattatgcagacacttgatttggggaaacca

SEQ ID NO: 1718 - DNA, 568 bp, Homo sapiens
  MAP TO AL139152.1; EXPRESSED IN ADULT LIVER, SIGNAL = 0.8; EXPRESSED IN BRAIN, SIGNAL = 0.61; EXPRESSED IN PLACENTA, SIGNAL = 0.83; NT HIT: gi16159759, EVALUE 3.00e-58; EST_HUMAN HIT: AL603304.1, EVALUE 2.00e-87
gtggccctggtaattgtccctgttttttctcccctcttcagtatcataagcatctgcacttaatgaagaataaaaggcataaaaagaatacaatagtaaaagaaataaaaatttcaataaagaataaaagaaaaaacagccactctcttacctctctggatgggcatggaacttcaccagactgctatagagctgtctctctgcttgtaaggcctcattgagccgactccgttcatctactagtccttctagcatcagcagcaactgagaaaagaagagagaagaagcaatacgcaaatggcacagtgagacatgaaaccacagttaatcctgagaaacaagaaaatgcattagcatgtactatgacttaaaaagcccactatcttagtacttaagcttttgatactattttatggtttttgaatcagtgtcatattatcttttttttaatctttaaaacctgtaaggtagaattcaaacatgggagcaaaaagaagaaaaaggagagaagctagaagcacaggaaagcagctaagagaaaagagtaagagggaaacaggacaagcaa

SEQ ID NO: 1719 - DNA, 577 bp, Homo sapiens
  MAP TO AL139149.1; EXPRESSED IN BRAIN, SIGNAL = 0.7; EXPRESSED IN FETAL LIVER, SIGNAL = 0.59; EXPRESSED IN BONE MARROW, SIGNAL = 0.68; EXPRESSED IN PLACENTA, SIGNAL = 0.78; EXPRESSED IN ADULT LIVER, SIGNAL = 0.61; EXPRESSED IN LUNG, SIGNAL = 0.62; EST_HUMAN HIT: BG179085.1, EVALUE 2.10e-01
tgctgtcaaaaccagcattctttttctaggtttatgcagcgaacctatgcaataatccaatatcacctaaatcacttgggcatgctgctgtcaagttgaaaatcatattttacacaatggtgctttccttcaaaacacgagaaaacaataaatttgccttacattatggggagagtcttaagaaatactatcagtgaaagaagtcagggtctgttctagttgcagttataaaactcatcagcatcttaaccattccaagtgtcaaaaatcaagagcaggtagacagctctcctttcagagacaggatgaactttttcactgtgtggttccctttgctttaattaaatgcatctctgatatctctggaattgcaacctttttgaattaaagtgtctctgttcattatttaactctgagtccctgaaaagacagtctcatatgatatgttctctgtaggtactaatttatgattggcgttctgatggagagctgtcggatggccttctttctcccctcctcttctacattgatttattggtaggaggaagctggcaattgcagtggcaactttttccat

SEQ ID NO: 1720 - DNA, 523 bp, Homo sapiens
  MAP TO AL138995.1; EXPRESSED IN BONE MARROW, SIGNAL = 2.2; EXPRESSED IN HELA, SIGNAL = 2.9; EXPRESSED IN BRAIN, SIGNAL = 2.2; EXPRESSED IN FETAL LIVER, SIGNAL = 2.4; EXPRESSED IN PLACENTA, SIGNAL = 1.5; EXPRESSED IN ADULT LIVER, SIGNAL = 1.5; NT HIT: M31914.1, EVALUE 2.00e+00; SWISSPROT HIT: P43954, EVALUE 2.80e+00
cgtcactagccccagacttcatatcgaggatggatgcttctgattaggcaactgagctccagctgcaagaagctgggagacggatgagctgcccttctgggcttctgcagcaggaagcgggctctatctcctatcaagattcacacagtggagagctgtctcaacacaggaagaggagctggttaatcatggactagctagactattattgcagtattccagctgaggtggtgagggcttggactaggatggtgacaaagaaaaagaaactggaaagaactaacctgagagaataatgaaggaagaggcagacttggtgatggattgcatatacatgattagcgatggggaatggaaagagctaactccaggcttctgtcctgaagttgatgaagagagactgtttctgcccacagatgtaagaactgagagaagaggaaactgtagaaagattgtgaagctgtattaatggggacaaagggcttaattgtttttggaattagcggccatggtgaagataact

SEQ ID NO: 1721 - DNA, 584 bp, Homo sapiens
  MAP TO AL138901.1; EXPRESSED IN HELA, SIGNAL =   4; EXPRESSED IN BRAIN, SIGNAL = 3.2; EXPRESSED IN PLACENTA, SIGNAL = 2.4; EXPRESSED IN FETAL LIVER, SIGNAL = 2.7; EXPRESSED IN BONE MARROW, SIGNAL = 3.2; NT HIT: gi14767134, EVALUE 4.00e-45; SWISSPROT HIT: P07688, EVALUE 1.10e+00; EST_HUMAN HIT: BI755628.1, EVALUE 0.00e+00
caactccttgcttgggagactgtggatgcagaggccaaggctcagcacctcacctcccaggaaagcccaggccaccccgcagctccagctgcagtctgcctccctgctcagggaccctgggattggaagctggtacctccactgaggctcctgtgggatgggctcctctttctgcacagcctccttctgcagccctggggaccgagcctccacagctttcacaggctctgtcacagggaaagaggggccatcagccaggggctggcaagagaggtgaggatggaggaggaggaggatggcaaagggaagggaggcgagaggaatgggggctttacctgggctggaaccgttggcgttggcctccttgctgtcctgcttctgctttgaagaggaagagcagtcaggctcaagggacagccggccccagccacttcggactgagttcggccctccccttgcccgggccgcagcggcctccctgacagcctcgctctccgtggccatggatgcctttccgcagcctccttttcacaccctgccccccacgcccagcactgcccttcgggggaattctgaccttggtt

SEQ ID NO: 1722 - DNA, 531 bp, Homo sapiens
  MAP TO CHR21_53.0; EXPRESSED IN HELA, SIGNAL = 0.94; EXPRESSED IN BRAIN, SIGNAL = 0.61; EXPRESSED IN BONE MARROW, SIGNAL = 0.44; EST_HUMAN HIT: BI031726.1, EVALUE 1.00e-124; NT HIT: U53698.1, EVALUE 3.20e-02; SWISSPROT HIT: P24630, EVALUE 9.80e-01
tgtgccccacctcagttcatctatttctctgtgatatttattctatagttgcagaagaatatttctcatatgatacgtatattaagcttactggccagccagtttgggtttctggatagtgaaactgtcctggaagtgtttgctgagcttttcttgctggagaagattcttggcaaagcctggatggaggatggagatgagaaaggtagtgtgagggtggcacacctgttttgtgctaattccagtcttggcagccctggacctgccgggagagggatgacagtgacatgtggcccagtttttgctcagagaaggaaaagtcaccaagaccgaccatgagggcaggagctcttgcttctcctcctagatgagagttagaaggaatttgagagcaaggcttctttcttgggatccaaatacttcttaccttggagttttcctagccgtggctagtgggtcataatgtcagcgacattgccaaatgggagcggaagagtgtcgttgggggaagggtgaagacgctgtcagaga

SEQ ID NO: 1723 - DNA, 584 bp, Homo sapiens
  MAP TO AL137798.1; EXPRESSED IN BRAIN, SIGNAL = 1.1; EXPRESSED IN FETAL LIVER, SIGNAL = 0.99; EXPRESSED IN PLACENTA, SIGNAL = 1.1; EXPRESSED IN LUNG, SIGNAL = 0.96; SWISSPROT HIT: P23961, EVALUE 9.00e-03; EST_HUMAN HIT: AL044388.1, EVALUE 0.00e+00; NT HIT: AF336797.2, EVALUE 2.00e-10
tccctggggactttccttaggtgatggtgatggaagaagaggcaaggcaggacaggaaggctcaggtaagaaagactatgcaggtgcaggggcaggaggagaaggagcagttggaggtgaaagagacaaagcctcctcaatatttctcaaatcagaaaacatgacagtctacctccttcagcttacttcctcaatggaggcaattttctcagttcttttagaaattttagaaatttagacatttctaggtctcattggaattaagtctcctatttaatttgtctggttcaaaaaccaaatttctctctctctctctgtttttttttttttttttttgagacagggtcacccagactggagtgcagtggtgtgatctcggcttactgcactcaccacttgctgcatgacagccaataagtcgagagttgaggtgtaggggcagggaaggtgactttattccagagagccaccaaactgaacagatggtgaagtaacatcctgaagaaccatcttaaattaatactattttccggctccttgtacattagggaagggaggaagaaggaggcgattgaggtgaagag

SEQ ID NO: 1724 - DNA, 567 bp, Homo sapiens
  MAP TO AL138783.2; EXPRESSED IN PLACENTA, SIGNAL = 1.4; EXPRESSED IN FETAL LIVER, SIGNAL = 1.2; EXPRESSED IN BONE MARROW, SIGNAL =   1; EXPRESSED IN HELA, SIGNAL = 1.5; EXPRESSED IN BRAIN, SIGNAL = 1.2; SWISSPROT HIT: Q15431, EVALUE 6.00e-16; EST_HUMAN HIT: BE898582.1, EVALUE 5.10e-02; NT HIT: gi15294355, EVALUE 2.00e-59
gaaaggatgagcaaacagggaacatgcaaggaaatatattgtatgacatttgaaaatttagtaaagaaaaatttcaaaaatataaaaattagaaggaataatgtaatgatcaacctatcacccagcttcaggaattataaaccaatagtcaattttgtttcatgtttttcccccagcccttcatccctttcccctatcattatgttgaataaaattccatattatgtcattacatttgtaaatattttggtatgacttttttttttaaaaaataggcttaagaatactgaattaacttcacactgcaacaagctttcactagaaaacaaagagctcacacaggaaacaagtgatatgaccctagaactcaagaatcagcaagaagatattaatgtgagttgaaaaagaaagtgctggtgacttagttttcttccaattagcaggttagaatagatgacctctaaagaccctttgacctttaaagtctgattgctttagagctaaaactttgttttagcagaaaaatatgcatattggtcttatagggtggtaataggcaacagaggc

SEQ ID NO: 1725 - DNA, 516 bp, Homo sapiens
  MAP TO AL138801.1; EXPRESSED IN FETAL LIVER, SIGNAL =   1; EXPRESSED IN BONE MARROW, SIGNAL = 0.75; EXPRESSED IN BRAIN, SIGNAL = 0.92; EXPRESSED IN PLACENTA, SIGNAL = 0.91; EXPRESSED IN LUNG, SIGNAL = 0.5; EXPRESSED IN ADULT LIVER, SIGNAL = 0.63; EST_HUMAN HIT: AV764446.1, EVALUE 1.80e-01; NT HIT: AF135417.1, EVALUE 4.90e-01
aatgagtcaccagtttcccgagagcccctgtctgaggcatgggtgtagactgaagaatcgctcgcatttcaaaggtgtgggcgggctgccaataattggtgctatcgctcaacatttacttgaatctctaattctgacatgtttgctttttcattttaggctttcgggctggtgctcagagatgaagtggggctgagatatatttgtgaagcattcaaaggctgtaaaagagacagtagcatgagaggcaaatgcagaggagaagaaagtatgtagaatttagagaaagaggacctaactttgaatctggcttatgccaccgagtggctatgaattaatcactcagtttctttgcactttagctgttgcgtccgttaaagagggtgataacaaacttaaaaggtttttgtgagaattaaacagatcacaaagatggaagtgatttgtcaactaaagcatatcagacattgccaattgaatcctaagaagaatataagtttgaattcgtcccaatgg

SEQ ID NO: 1726 - DNA, 533 bp, Homo sapiens
  MAP TO AC013697.3; EXPRESSED IN BONE MARROW, SIGNAL = 0.43; EXPRESSED IN BRAIN, SIGNAL = 0.42; EXPRESSED IN PLACENTA, SIGNAL = 0.49; EXPRESSED IN ADULT LIVER, SIGNAL = 0.5; EST_HUMAN HIT: AI467978.1, EVALUE 7.50e-01
gtctggcctagctcaacacccaagagagtctatccctttattttctcttctgcatagtaaaattcacaattcctttaatcattactttatatgacagagtttcaacataaaatacttttaattctatctttacaatggttttggaatcaagctcttaatactccttgatattattcttaagtttcatttgagttatttcaataacttgagttatttccataacgccctaattgatgttttcaccttctacttctctttccaattcttcttccactaagtcaaggttaacccctgaaatgcgcatgtggtcatgtaacctttcctgctcaaagacctgtaatatacataagctcaaattccttagccttttattcatgactttcttaaacctgattttaaataactttctcaatatcatttccttcaagctttgcatgtgacattatgctatatgggtggtttgcagcaacttaatcatattcactgatttcaagtctttacagctttgtttaagcaattctttttgcctggaa

SEQ ID NO: 1727 - DNA, 505 bp, Homo sapiens
  MAP TO AL135783.6; EXPRESSED IN PLACENTA, SIGNAL = 0.49; EXPRESSED IN BRAIN, SIGNAL = 0.52; EXPRESSED IN LUNG, SIGNAL = 0.48; NT HIT: AF200923.2, EVALUE 7.50e+00; SWISSPROT HIT: Q9PN86, EVALUE 2.70e+00; EST_HUMAN HIT: BG003792.1, EVALUE 2.00e-13
tgccctctgaagagcgataccagagattgtactctgtgagcgaaatagacttcactaaaatagtcaaatcgagttactaaacaaacacataagcaaacaacaaaaacatgtcccagagagtggggaatgaaatcagtatcacagttgtgaaatctaaaattacctaaaatgtcttgttctcaacaacaaaaaacaatatggcacacaaagaaacagcaatgtgtaacttacacaaataagaaacaacagaaattgtcagtaagaggcaaaatgtcagacttaataaagtcttcaaagtagccattataaatatgtgcaaagaacaaaaggaaaccatgcttaaagaagtaaaggaagctatgatgacaatgtctcaccacatagagaacatccataaagatgctgaaattgtaaacaaaaagaaagaagaagaaccaaatgaacattctagagtttaaaagtaaaataactgaaatttaaaatttcattagaggggctcaacagc

SEQ ID NO: 1728 - DNA, 577 bp, Homo sapiens
  MAP TO AL136113.1; EXPRESSED IN BONE MARROW, SIGNAL = 3.1; EXPRESSED IN HELA, SIGNAL = 2.1; EXPRESSED IN BRAIN, SIGNAL = 3.4; EXPRESSED IN HEART, SIGNAL =   3; EXPRESSED IN LUNG, SIGNAL = 2.7; EXPRESSED IN FETAL LIVER, SIGNAL =   3; EXPRESSED IN ADULT LIVER, SIGNAL = 2.6; NT HIT: AF202635.1, EVALUE 3.00e-18; EST_HUMAN HIT: AL039363.2, EVALUE 8.00e-32
cacccagcctaaaagcagtcttgaatgatcagactgcgtctaatattgatttgtgttcttgcaccacctcttctatgtcttcttgctcatcatctggctctggttccattgagttatgttctgttaatttctctagtgtggtgtctattagcttttgaatttctccaggaatcatatcttgaaatccatcacccccaacctttctccccatatccacaatctctttcatgactttctcgattgactctgtcataaatcctgtgaagtcatgctcaacatctgaacacagatttttccagcaggaatgtattgttttgggcttgatggctttcatggcttttcctataacagaaatggcatcttcaacgctgtaatcctttcatgtgttctatcatgtgttccatagcactgacaatcctttccagagagcatcatatgtaatgagtcttaaaggttcttatgaacctgatttagaggctgaatcagagacattatgtttgggggcaggtggacaactttgacacctttggtgttgaactcatgggacttttagtgcccggtggcactatccaatacc

SEQ ID NO: 1729 - DNA, 581 bp, Homo sapiens
  MAP TO AL139022.1; EXPRESSED IN FETAL LIVER, SIGNAL = 1.1; EXPRESSED IN PLACENTA, SIGNAL = 1.1; EXPRESSED IN LUNG, SIGNAL = 1.1; EXPRESSED IN BRAIN, SIGNAL = 0.95; EST_HUMAN HIT: BE616054.1, EVALUE 0.00e+00; NT HIT: X91863.1, EVALUE 0.00e+00; SWISSPROT HIT: P18283, EVALUE 2.00e-66
cactgtccacgcactttgtctttttcctcccctaggagaactgtcagaatgaggagatcctgaacagtctcaagtatgtccgtcctgggggtggataccagcccaccttcacccttgtccaaaaatgtgaggtgaatgggcagaacgagcatcctgtcttcgcctacctgaaggacaagctcccctacccttatgatgacccattttccctcatgaccgatcccaagctcatcatttggagccctgtgcgccgctcagatgtggcctggaactttgagaagttcctcatagggccggagggagagcccttccgacgctacagccgcaccttcccaaccatcaacattgagcctgacatcaagcgcctccttaaagttgccatatagatgtgaactgctcaacacacagatctcctactccatccagtcctgaggagccttaggatgcagcatgccttcaggagacactgctggacctcagcattcccttgatatcagtccccttcactgcagagccttgcctttcccctctgcctgtttccttttcctctcccaaccctctggttggtgattcaacttggg

SEQ ID NO: 1730 - DNA, 534 bp, Homo sapiens
  MAP TO CHR21_41.0; EXPRESSED IN HELA, SIGNAL = 0.59; EXPRESSED IN BRAIN, SIGNAL = 0.34; SWISSPROT HIT: P45931, EVALUE 2.90e+00; EST_HUMAN HIT: BE158609.1, EVALUE 5.00e-05; NT HIT: AK024445.1, EVALUE 3.30e-02
ggatccaccctcctaacctcatctaaacctaattctctgttaaaggccccaccatcctaatgccatcatgttggggatatgggctgcaatatataaattttatggtggcacaaacattcagtccataacaggcaagaaattaaactatccatgcatcagatgtgggccacataggaaagagggtcagcctggagctcttctaggtcctgagagtaccacctggaagggcaatgggccacaataggagagtctgagtctttgtggagcggatgatggaaggccaggaagtggtgcaaggaggaagggaaagcagacacttgtagcagatgccagcaaggcttccaggccagcaggggagaggctgtgtctaagtactggaggctgctattagagaggcccagtggcttaggacagtacttatcaggagctgaacaagaactttcctctttttctctctccccaacaacagctctcacactggtgggcctgcactgggggtggggaggacttctgggtgggaaatgagtgggaaga

SEQ ID NO: 1731 - DNA, 556 bp, Homo sapiens
  MAP TO AL138735.2; EXPRESSED IN LUNG, SIGNAL = 0.68; EXPRESSED IN ADULT LIVER, SIGNAL = 0.71; EXPRESSED IN BONE MARROW, SIGNAL = 0.55; EXPRESSED IN BRAIN, SIGNAL = 0.73; EST_HUMAN HIT: AV694050.1, EVALUE 7.80e-01; NT HIT: Y12091.1, EVALUE 5.30e-01; SWISSPROT HIT: O09100, EVALUE 2.10e-01
gtgaggctcctcattcaagggtccagggggagcctcaccctcatggcaccctgtgtaggctctcggggcccttaggaggctgctgagggcggggaaaggaaggagtgagggaggaggcctggaagccaattaggaagatgtccttgagaggcaagtccatgggagctgcagagaaagtctgtcaggaggacctggttccaaacttgttccaaatcacagcatgccacgatgaagaaaaacagtatgttttaattcataaatgcttctaagaattcagtgttatggaataaagttggaagtgaaattccccctcacctgagattcccactgtctggtgctttgtatgtggacggtgggagggatgatgaaggttggcttctggttactgagaggcctcaggggataaagaggggtcctgccctttctgggtttgctcctcctctggcaatcttcatgctcccctgggaagcccccaaacctgtctggacttgctcaaggcagatatcctgttggtcactggcccccattatctcacagtcccaatttcttgccaaaa

SEQ ID NO: 1732 - DNA, 599 bp, Homo sapiens
  MAP TO AC013613.3; EXPRESSED IN PLACENTA, SIGNAL = 0.34; EXPRESSED IN ADULT LIVER, SIGNAL = 0.49; EXPRESSED IN BRAIN, SIGNAL = 0.3; EXPRESSED IN FETAL LIVER, SIGNAL = 0.38; EST_HUMAN HIT: BG403053.1, EVALUE 2.00e-85; NT HIT: gi16162726, EVALUE 1.00e-85; SWISSPROT HIT: P42685, EVALUE 5.00e-25
ttcagcgctcgtgttcatagaatgttttccttttgtgttaagatgccttgttttatcagttagattgtcagtctctcctttttccttcatttttcatgtagatctgaatcaacctctcttcacctacaggtcataacatataaaccgtatactcctgatgcaccaacacatccagttactaggttgctctggctgaactgattctctttttgataactctgaagatttgtgatactgaggctcttactctactgagaagcaggaggcaatcttgatgattcccaccaggctgctgtgaggataggaatgcctcaataacataaagtgatttctccctcttcttgtttcaggttcaatggatccaaatgacttcctgagggaggcacagataatgaagaacctaagacatccaaagcttatccagctttatgctgtttgcactttagaagatccaatttatattattacagagttgatgagacatggaagtctgcaagaatatctccaaagtaagctaaagacttaatacaaggaaaaaaagaggaatttaatttagctagtcccataagtgtcaatttagcaagccttctgtaaccgaa

SEQ ID NO: 1733 - DNA, 548 bp, Homo sapiens
  MAP TO CHR22_80.0; EXPRESSED IN BRAIN, SIGNAL = 0.29; EXPRESSED IN ADULT LIVER, SIGNAL = 0.48; EST_HUMAN HIT: AW368236.1, EVALUE 3.00e+00; NT HIT: gi12738839, EVALUE 3.00e-36; SWISSPROT HIT: O95967, EVALUE 2.00e-05
ctgctacccacctctaaccgttccctgctaccccttgtctccccagccctgcctcacttgtccttggctgagcccctctgcccaggagtccccatccttgctgaggcctcaggccccccagggttgagggcagggttgggatgcggggtgcagtgtaggtggccgtgcggccaggcgcgtgcctcgggggggaggtggccctggcgggcaggctgcagacctccgcagtgggttgtcccgtagaggatgtagccgcggtgacacaggcactggaagctgcccggggagttgatgcagatgtggtcacaggtccgctcgaaggagcactcgtcgatgtctgcgtggccacagggagacaaagttgggggaggagtttgagggagtggtgggtgggcacggcctgtcactctcagtcactcaaggcacatctgtggacacacagtccctgggcgcaggcgcagcacagcaccgacccacaggaaatgggagactccttgctgctcgactttccattgtgtctccattagccttctgtttctgggttggga

SEQ ID NO: 1734 - DNA, 566 bp, Homo sapiens
  MAP TO AL160314.1; EXPRESSED IN PLACENTA, SIGNAL = 0.54; EXPRESSED IN LUNG, SIGNAL = 0.56; EXPRESSED IN HELA, SIGNAL = 0.72; EXPRESSED IN BRAIN, SIGNAL = 0.69; EXPRESSED IN FETAL LIVER, SIGNAL = 0.62; SWISSPROT HIT: P37831, EVALUE 1.20e-01; NT HIT: gi13937343, EVALUE 3.00e-18; EST_HUMAN HIT: BG993877.1, EVALUE 5.00e-08
tatcgcaagaggtgtgcatcccctctgggatattgttcctaatattcagtgggggagatgatatcactcccaatgttgtagacagtgtacaccccctttgtgatattgttcctaatatcctgggaaaaagagaatgatgttactcccaatatcgcagaaagtgtacacgccccctgtgatattattcctaatattcgggggggagaggattatattactcctaatatcgcagggggtgtacgccaccactgtgatgcatttcctaatatccagggaagaagagaagaatattattcccaatgttgcagggggtgtatacccaccccatgatattgtgcctaatatccagaaggaaacaaaatgatattactcccaatatcgcagggggtgtacacttttcctgtgatattcttcctaatatcacaagggtgagaaaaggaaaagtcccaatactgcagggggtgtacacccccaccgtgatattgttcctaatattcatggggggagaggatgatattacttccaatatcgctaggggtgtacacccccacgttatatttcccgaa

SEQ ID NO: 1735 - DNA, 591 bp, Homo sapiens
  MAP TO AC021609.3; EXPRESSED IN FETAL LIVER, SIGNAL = 2.6; EXPRESSED IN BONE MARROW, SIGNAL = 2.4; EXPRESSED IN BRAIN, SIGNAL = 2.2; EXPRESSED IN HELA, SIGNAL = 1.8; EXPRESSED IN PLACENTA, SIGNAL = 3.2; EXPRESSED IN ADULT LIVER, SIGNAL = 3.2; NT HIT: AF121205.1, EVALUE 0.00e+00; EST_HUMAN HIT: AU132586.1, EVALUE 0.00e+00; SWISSPROT HIT: Q9UPW0, EVALUE 3.30e+00
ggcatttgttttgtttttcgtttgtttttactgtccagtttagaacttgtggttgagccgtggattgctggactctggccagccctcagaaagcattttaggtcaagcagaggacaagaggagataagtggcgcactcccggtggcatcacctgcatcctcgaggacagacctcgtgaagtcagagctgctacacattgaatctcaagtcgagcttctgagattcgatgattcaggaagaaaggattctgaggttttgaagcaaaatgcagtgaacagcaaccaatccaatgttgtaattgaagactttgagtcctcacttacccgttcggtacccccactctcacaagcctctctgaatattcctggtttacccccagaatatttacaggtacatctgcaggagtctcttggccaggtaaggaagtttttctttatgctatagatgctatttaatcatggatgtttgctttgggcttttaaattattattacattagaagagaggtcaacaaactatggcttactggcccaatgtggcccagagcctttcttttgtaaatagattttactggaacacagccatgcctatt

SEQ ID NO: 1736 - DNA, 530 bp, Homo sapiens
  MAP TO AL160237.1; EXPRESSED IN BONE MARROW, SIGNAL = 0.51; EXPRESSED IN PLACENTA, SIGNAL = 0.54; EXPRESSED IN LUNG, SIGNAL = 0.67; EXPRESSED IN HELA, SIGNAL = 0.58; EXPRESSED IN BRAIN, SIGNAL = 0.65; EXPRESSED IN FETAL LIVER, SIGNAL = 0.46; NT HIT: M31548.1, EVALUE 5.00e-01; EST_HUMAN HIT: AW867667.1, EVALUE 1.20e-02; SWISSPROT HIT: P38360, EVALUE 2.20e+00
tcattcccggtgatcctatcctcaccctcctccaagccaccaacttccacagtcatgcgtgagaccttgccattaccaacaacagcattctccccattaccttgaaagaagcatctcactctttcactatggcttctcatctttcagcatcctccctccaatagcccagtttcaaaattcttcaaacctaatggaacctgctcgctctccactgacctgtcactttgcacatccgtcaccccattcgtgtcctcaccttctatataactgagcttaattccaccttccatcatgagagtctcttatctgtatgtgtagttgttcccttgctcttctcttcctctcttggacttttccaggaaaaaaaaacccaaaactggagaaacgtagctctctgtttactctctaatagcacacaagcaaatgatattgactagggaaaaacacacaagcatggtgaagggtctttctttaaattcatgaccactgaccttaggaaggtctttagtgctgcccttcaatcttgcttc

SEQ ID NO: 1737 - DNA, 500 bp, Homo sapiens
  MAP TO AL137790.1; EXPRESSED IN BRAIN, SIGNAL = 0.44; EXPRESSED IN FETAL LIVER, SIGNAL = 0.56; EXPRESSED IN BONE MARROW, SIGNAL = 0.46; EXPRESSED IN PLACENTA, SIGNAL = 0.54; EXPRESSED IN ADULT LIVER, SIGNAL = 0.62; NT HIT: AF210838.1, EVALUE 1.90e+00; EST_HUMAN HIT: AV731370.1, EVALUE 7.00e-01; SWISSPROT HIT: Q55318, EVALUE 5.30e-01
aggggagtatgaatccctgggttggacgcagtgaggcccaggtccccttatatgctggttttggaggtctgggatcttattaagagagatggcaggtctccctggcccactgcccctttcccacttcctgattgctgcttacctcaaagtggtggatgctgcctttgcacttaactttccaggaggccacacctacgtggggcattccctctgcttcctgaattctagtctgagaatcctctttgtctccattatgggctctttcatcactattcaccctattgaaggagatactccttttactcacccaaacattgtagccttaaactcacagtcatgtttgaatacaacacattacatttaataaccatgcaagaaaatcacacacacagtgcaagagggtctaatctgtaccaatcttgattttgcacttgtaatctatccctctctggagtttagttgagagcatgatctttgcagccactcagatcggggttcta

SEQ ID NO: 1738 - DNA, 555 bp, Homo sapiens
  MAP TO AL137800.2; EXPRESSED IN FETAL LIVER, SIGNAL = 0.89; EXPRESSED IN BONE MARROW, SIGNAL = 0.87; EXPRESSED IN BRAIN, SIGNAL = 0.91; EXPRESSED IN PLACENTA, SIGNAL = 0.94; EXPRESSED IN LUNG, SIGNAL = 1.2; EXPRESSED IN ADULT LIVER, SIGNAL = 1.1; SWISSPROT HIT: Q92540, EVALUE 5.00e-30; NT HIT: gi7662023, EVALUE 0.00e+00; EST_HUMAN HIT: AU129066.1, EVALUE 0.00e+00
tgtgatgtgttagaagactccctctacctacctgttaaaaaaaaaatgactttttttgcaattttttgctgtttccttaaaactaaagctgtgttcttctgttttgaagggtttccgcccccaacatatgttatccccccgcctgtggcattttctatgggctcaggttacaccttcccagctggtgtttctgtcccaggaacctttcttcagcctacagctcactctccagcaggaaaccaggtgcaagctgggaaacagtcccacattccttacagccagcaacggccctctggaccagggccaatgaaccagggacctcaacaatcacagccaccttcccagcaaccccttacatctttaccagctcagccaacagcacagtctacaagccagctgcaggttcaagctctaactcagcaacaacaatcccctacaaaagctgtgccggctttggggaaaagcccgcctcaccactctggattccagcaggtaagttacagttgtgtgtactatccagctgaatgaaataaggggaaatgctgaaagattcaa

SEQ ID NO: 1739 - DNA, 524 bp, Homo sapiens
  MAP TO AC017082.3; EXPRESSED IN BRAIN, SIGNAL = 0.41; NT HIT: gi14721097, EVALUE 2.00e-59; SWISSPROT HIT: Q9UHI8, EVALUE 3.30e-01
cgtcttctatgcaagggacagtattatcacatatgcaaatgaatcacctgtccaatacaaaagaatcacatttaaatattaaagtcgcccaaggtcaacagtttggcaaacaagtacaggtaaataactttttataagtaataaaaacatatattttttaatgaacccatttctccactacaaaaatgacctttcccagtcattttgactaaattcaaactagtgagctataaccatactatactggcaccgcttactctaactgaacctaagctgagatgagaagaaatcagtctgttatctatattggacatcatggaactgcagaccaatattaagaaaaacaaagccttggatgtgagatatgaatataaacacagtacctgctcacattggtccatgctgactggcttgccatcactgcacacacagcttagcaggcgggtcctgacgccttgaccacagggtgcgttttcactcagctggcatgtgctccactctacaggcataggatcacccacact

SEQ ID NO: 1740 - DNA, 597 bp, Homo sapiens
  MAP TO AL137798.1; EXPRESSED IN ADULT LIVER, SIGNAL = 1.8; EXPRESSED IN BONE MARROW, SIGNAL = 1.2; EXPRESSED IN LUNG, SIGNAL = 1.7; EXPRESSED IN BRAIN, SIGNAL = 1.2; EST_HUMAN HIT: AW393374.1, EVALUE 1.00e-123; NT HIT: AB017149.1, EVALUE 0.00e+00; SWISSPROT HIT: P48382, EVALUE 2.60e+00
cagtgggtgtcacctaaccccatgggggcactgtcaggggacccgaggcacatttgaagggtcctggcagggaggtgagatgctgctaacctgcgctcaagctcccggcgaacccgtgcgccattctgcaccgcctcttcctgctcttcctccagccggtcccgctggcgctgcagctcctcctgggcaacctgcagcttctcccgctcctgcggcagctcctcggcctgctgctgggccacctgcaggctgtggaccaggttgctcttctcccttcaggacaaggggagcgggagcagaggggatgctggggctgctctctccagggaaggtggctggctgctcctctagccatgagctacatcctcccgtcttccaaggcacctgcctccaggaagccttccctgaccctgcccatagcagactcatttcactcacacactccagcagaagaacctggctttccttctccccagcccgcccacttagagtggatggaggtgctggcgtgatctctaagcactctaccacgtagaagaggccaggctaggctcctgggacacacaggcaattgtgccaccagttctgctaggccat

SEQ ID NO: 1741 - DNA, 587 bp, Homo sapiens
  MAP TO AL137840.3; EXPRESSED IN BRAIN, SIGNAL = 0.32; EXPRESSED IN ADULT LIVER, SIGNAL = 0.43; EXPRESSED IN BONE MARROW, SIGNAL = 0.41; EXPRESSED IN PLACENTA, SIGNAL = 0.42; NT HIT: L38306.1, EVALUE 1.40e-01; SWISSPROT HIT: P38704, EVALUE 5.70e+00
aactcttgatgtgccgcttctgtggcagtgtgcatactacatgttcatcaagattttcttttattcctgagaatataggaagacagcattatccaaaactcccttctcttcatttcttaaatctagaagttactgtgttactgagttttgggcaatgcaacgtgtatgtatggcagtactgtacaccactttcatttttgacttctacagttctctgtaggatcttctacgctgtgctctccagcacttacctctgtccttgtgattggaagtggagaactctgacatggagaagtggtgcccactaggaacagctttggatttgtactgagggggagataaatatttgttatgttaagacacaggttttaggcttattacactgcctaatatttattgccctgattgacataaatgctcaaactttatagactgtgctgtattttgttgtcctatttttgacgactattcagactgatactttgttattaatatttttcccatagtaaattccgaggttaatttggcttctggaaagatatagctcatattgtctattcatgtgttcaatcaggtcacattcccag

SEQ ID NO: 1742 - DNA, 512 bp, Homo sapiens
  MAP TO AL138784.1; EXPRESSED IN FETAL LIVER, SIGNAL = 1.3; EXPRESSED IN BONE MARROW, SIGNAL = 1.2; EXPRESSED IN BRAIN, SIGNAL =   2; EXPRESSED IN LUNG, SIGNAL = 1.6; SWISSPROT HIT: Q09298, EVALUE 7.00e-03; EST_HUMAN HIT: BF350793.1, EVALUE 1.00e-105; NT HIT: gi14733785, EVALUE 3.00e-70
ttggggacagctccaattactagaacatgatttaaattgagccacacagtcctttgcctggggattttgcagcctgtacttactggaggcatttccgtgttcgcacagcaggcccttctgatcagctctcaggccttgctgacctcctgggccaacactgagccattagcccctgtcagctatgtcttgctggtggctttagtagggacataggagggcctctcagagggaaggaggggaggagaaatggtcactttgcttgctccttcccagacggctgcccctggctggtgatcgcagattttggctgctgcctggctgatgagagcatcggcctgcagttgcccttcagcagctggtacgtggatcggggcggaaacggctgtctgatggccccagaggtgagtcccgagtgtgtcatgcgccatcggcagcccttcccccacatgtccactgaatgcaggagactcgatgccttgtgataacccaacacctccatcttttctgaccca

SEQ ID NO: 1743 - DNA, 502 bp, Homo sapiens
  MAP TO AL133499.1; EXPRESSED IN BRAIN, SIGNAL = 0.45; EXPRESSED IN ADULT LIVER, SIGNAL = 0.55; EXPRESSED IN PLACENTA, SIGNAL = 0.46; SWISSPROT HIT: P06798, EVALUE 9.10e-01; EST_HUMAN HIT: BG875363.1, EVALUE 1.80e-01; NT HIT: AL163301.2, EVALUE 0.00e+00
aagattcacggctgtcgttctctcccctctgctcgtggtgttttactgtgactgcgctgaacggttagctgtcacatgtcattctctgggtggtgtgctctgaagtcattgtggtgtgtgggccccttcagcctagttctgcctaactgcggcatgatgaatgggcccgaggcagaggaggaggctccctcgtcggtaggggctgctgttgtcgcagctgccggcacacggaagtgagtcggtgtgctgctgccccgagtgactgagggacagaatgaggctggggccggccggactggcattggcgtgtctgcatggcgtcgtccaccactgggcctttgcacatggggacctttttcagcatcatggggcgtcggtataaaaggaggcgcaagaagcgctctgagaggaaaggtaattcatttagtttttattcttcagtgtgaagcatttgtctttaatgcaatacagaagtgttttctgggatagacggctttgtgaa

SEQ ID NO: 1744 - DNA, 542 bp, Homo sapiens
  MAP TO AL133492.1; EXPRESSED IN PLACENTA, SIGNAL = 0.61; EXPRESSED IN ADULT LIVER, SIGNAL = 0.68; EXPRESSED IN BONE MARROW, SIGNAL = 0.44; EXPRESSED IN BRAIN, SIGNAL = 0.53; NT HIT: AL163303.2, EVALUE 0.00e+00; EST_HUMAN HIT: AA578927.1, EVALUE 4.90e-02
ttggaaagcaacatcttccccctttctcgcccagataatgacatttttgcccaaaaatatgctaaataaactatatggagtaatattgcagaaatatggttttggttttaatttgtaaatcttaatttacaatccgtcactaatgaggctgagcatctttccatgtgcgattggccatttggagctcctctttcatgaagtgcttttcttggttttcagccatttttctattgatgtctgtgttatgtatcagggatgatcaggctggtccgagttgttttcaccacaattttcatggtagaaaaaagtgtagcaaagtatacaaaaatctttagagaaagaaatgatattctcaacagtacatttgcaacctgtaagaacttgggaaaagtgattctcacaagcattgttgaaagagctcctggagatagaaccagaggccaaaagaggaatggagaaggggggaaggtcacagagagtggcggtggcctcccagaggcacagcgcacagcggagtgagaagttagggtgaggacgggatt

SEQ ID NO: 1745 - DNA, 507 bp, Homo sapiens
  MAP TO CHR22_174.0; EXPRESSED IN ADULT LIVER, SIGNAL = 0.57; EXPRESSED IN BRAIN, SIGNAL = 0.61; EST_HUMAN HIT: T27512.1, EVALUE 3.00e-12; NT HIT: gi14778437, EVALUE 1.00e-123; SWISSPROT HIT: P31636, EVALUE 2.00e-33
acgatgtgtgtgcaaaatggaaactaaatgtttttctatgagacaagaaagaacaagcacatgcacacatacagacacacagacagacagacagacagacagacacacatatacatatacttcacctgatttgtgcaccagtaccacaaagctgtaatgggcattccaaatataattcctggccatggaatgtccccagtcacagcatctcggaagatgtggaaggagtccgcccgaggtgtgtagcaactggcactgattgtcaagttgtccccctcgactacggatggggtggcattcacgtacttctcggtaaagctctcataacctccaacttcgttaaatgctaaaaaggcatcagagtaaaatgagatgtcttactgaaatctaagacatccaatgtttatgatgactactttttggtggaggtaaacaagcacctcccatcagcccagtccaatcctcagtgaccctctcccaggtccatgtctttctggtacctccgct

SEQ ID NO: 1746 - DNA, 527 bp, Homo sapiens
  MAP TO CHR22_120.0; EXPRESSED IN BRAIN, SIGNAL = 0.36; EXPRESSED IN FETAL LIVER, SIGNAL = 0.51; EST_HUMAN HIT: BF849161.1, EVALUE 7.40e-01; NT HIT: U53698.1, EVALUE 7.80e+00; SWISSPROT HIT: P03186, EVALUE 3.00e-05
ctctgttctccctgccagtcctctgttcttcatggagctgccaaggggatgcttaccaatctgatttgtgtcttccttgttgataattgacaccggacccctcgtggggatgtgtactccacccaggagggcagagacctgctccatcagcagctgcgtcctccttgcctgggacagtgcctgggcatcagcagccatgtcctccttgcctgggacagcacctgagcagagacctgctccatcagcagccatgtcctccttgcctgggacagtgcctgggcagagacccgctccatcagcagctgcgtcctccttgcctgggacagtgcctgagcagagacccgctccatcagcagccatgtcctctttgcctgggacagtgcctgggcagagacccgttccatcagcagccatgtcccccttgcctgggacagtgcctgggcatcagcagccatgtcctccttgcctgggacagtgcctgggcatcagcagccatgtcctctttgcctgagacagcacctgagcag

SEQ ID NO: 1747 - DNA, 528 bp, Homo sapiens
  MAP TO CHR22_126.0; EXPRESSED IN BRAIN, SIGNAL = 0.33; EXPRESSED IN PLACENTA, SIGNAL = 0.49; EXPRESSED IN ADULT LIVER, SIGNAL = 0.48; EXPRESSED IN FETAL LIVER, SIGNAL = 0.39; SWISSPROT HIT: P16636, EVALUE 3.00e-03; EST_HUMAN HIT: BE882186.1, EVALUE 7.40e-01; NT HIT: Z48053.1, EVALUE 2.00e+00
aggctgcaactcggtacaacggccaggactggagcgcccaagagctgaggggcagggagggcaaggcagaaaggggagcctccccagatgaagtgccccctacccagcggcgcctgggcgcaggcctcctttgtgtcaccgccaccactgaaccttcgcgagtcggcggcaatcgctggtgctgggttccgcagagcccgggctctgtcgccccctcgcggccggagccggtctgggcggcgtcggggaaatcccgaaaagcctgcggggaagaagctgaacgggggcgggacccgggcgcggtgagcccattcattccccgagggctgggaaagtctccaccaggagacggaatccctgggatgtccccaacgctgggccctgcctccctaggcccaggtaacaggcattttctaagacagttcagggacacggaggcaccccgctggaagagccggtgggctcccgggtggggtacgggccgggtgggagtcagtatcaccagcgggcttcgctggattgattgtt

SEQ ID NO: 1748 - DNA, 580 bp, Homo sapiens
  MAP TO CHR22_170.0; EXPRESSED IN LUNG, SIGNAL = 1.6; EXPRESSED IN ADULT LIVER, SIGNAL = 1.4; EXPRESSED IN BONE MARROW, SIGNAL = 1.6; EXPRESSED IN HELA, SIGNAL = 0.89; EXPRESSED IN BRAIN, SIGNAL = 1.4; EXPRESSED IN FETAL LIVER, SIGNAL = 1.5; EXPRESSED IN HEART, SIGNAL = 1.3; SWISSPROT HIT: Q02591, EVALUE 2.20e-01; EST_HUMAN HIT: AU129284.1, EVALUE 8.20e-01
cgaagactggcctcaaagtccaaaccattacccatgccacatggtcactccacagtggtcttgccgtggataggaccatcacagctgggccagggaggccatatgtgcctaagccctggcctgcccacacctgccctggggcctcacctgttctacccgatctcctctgaccaactgaatgaatgaatgaatgaatgtgagaaggagcttggagtgaagcttgctctgagaagggcgaccaatgtagtggcaggaccaggccacccagggctagtggggacagtgggacacagggatgtggggaccaggggagcttcaggtgggtgaagatcaccactgtgaacctcagaagagctgccgaggggaagagggcccagtctgtgccttgtgttcttatgtgggagaatgtgtccacctggggcatgctacgggaagggattcgatgtggtgtaagaaggacttgatgaagattgagctgtctatggctattaaaggctggctcagtactattactgctatactatcattaccatcatcatcaccatcatcatcgtcattaccaccaccgtcattaccatca

SEQ ID NO: 1749 - DNA, 518 bp, Homo sapiens
  MAP TO CHR22_185_2.0; EXPRESSED IN HELA, SIGNAL = 0.5; EXPRESSED IN LUNG, SIGNAL = 0.59; EXPRESSED IN ADULT LIVER, SIGNAL = 0.67; EXPRESSED IN BONE MARROW, SIGNAL = 0.54; EXPRESSED IN BRAIN, SIGNAL = 0.57; SWISSPROT HIT: P35616, EVALUE 6.30e+00
catcactcatgtggggacactacaccatgtagataccccttcaccctgctagttggacatccctgcattgggctgcccccatactttggtatcttttgaggcacccccttccaggccacacctcctcccttttctcctgccctgactctccactataagccgattcctccccaggatgcccctgcccttcttaggcctccacaccctccatagattgtccttcatgaacatgctcttcttcttcctgctcaggctccggctgtccatgcttggcaagctccctaccacccacatagacataaatccccccactggtgctctgagacctctttgtatgaatgactccacacccacttgggatgactctcccctgacgtaacaacttccccacatgcttcagaccctgacatttcacacattcctcttcatggaagccccctcccccctagccctggaaagacttaggaccctgctccaggcagccttcacctgtggcccctgctacgctgcatgtgttt

SEQ ID NO: 1750 - DNA, 570 bp, Homo sapiens
  MAP TO CHR21_38.0; EXPRESSED IN FETAL LIVER, SIGNAL = 2.3; EXPRESSED IN BONE MARROW, SIGNAL = 3.2; EXPRESSED IN BRAIN, SIGNAL = 1.5; EXPRESSED IN LUNG, SIGNAL = 4.9; EXPRESSED IN ADULT LIVER, SIGNAL = 3.9; NT HIT: Y15155.1, EVALUE 6.00e-44; EST_HUMAN HIT: AU139967.1, EVALUE 1.00e-33; SWISSPROT HIT: P87154, EVALUE 8.20e-01
atgagggaatgtgccttgagagacagtgctatccggcccagatactacacttttcccatggtttctgcaacccacagaccaggagattccatcgggtgcctacaccaccagggccctaggtttcaagcacaaaactgggtggccatttggacagacactgtgctagctgcaggaattttttttcgtatctcagtggcacctggaacgccaatgagacagaaccgttcaccccctggaaagtgggttgaagccagggagccgagtggtcttgctcagtggatcccacctccaaggagtccaacaagctaagatccaccggcttgagggagggaagggcgtccaccattactgaggcttgagtaggctgttttcccctcacagtgtagtagaagccactgggaagctcggactgggcagaactcaccacagtgctgcaaagccgctgtagccagacttcctctctggattcctcctctccgggaaggacatttctgaaagaaaaacagcagccccagtcaggggcttatagatgaaactcccatctccctgggacagagcacctggaaggag

SEQ ID NO: 1751 - DNA, 574 bp, Homo sapiens
  MAP TO AC018876.4; EXPRESSED IN BRAIN, SIGNAL = 0.4; NT HIT: AB041645.1, EVALUE 8.50e+00; EST_HUMAN HIT: AA015587.1, EVALUE 3.20e+00
ccatgttgtggttttcgttgtcaccatagcagatgagttaccttggtagtgaagctttagttggccacaggagcagaatgcagggtgctctcagatccaggaagggatgatggggaaagagatgggggatagaaccagagaggcaggtggcatgactggactttctgtctgcatgaatgatgacggcagtgtcactggtgggcttgccaaagtggacaaaatacaagacctgaactataagagttgtggcaattaggccaatagacacaccataaatgttttcaagagtgaccagggttttgctgaaacctgcaagggtttatgaaaggtgaatatttcagcaaattacacagtgatgacttaggtaactgattttatttagaataagactaacattcttcatcacttcaaatgctgtaatttaaaacaaagttttcagccctctctctgtcacacacatgcacacatacatacatgcatttgtccacagcttatgagacaaaacattccctcttagttcttcctcctttgtacaaagcaataaggcttcatatccaatgccaatagattgcct

SEQ ID NO: 1752 - DNA, 529 bp, Homo sapiens
  MAP TO AC013341.3; EXPRESSED IN ADULT LIVER, SIGNAL = 0.4; EXPRESSED IN BRAIN, SIGNAL = 0.41; EST_HUMAN HIT: BE159747.1, EVALUE 2.90e+00; SWISSPROT HIT: P32191, EVALUE 6.40e+00; NT HIT: gi5453757, EVALUE 7.90e+00
caatgtaaaagcatgccgagttcttagtcttgtacaaaaactgatgaatacagattctcatcaacaaaatgtttttcattctcttcccagaattgctcagctaacaaataaccagacaagcaacttactgtcttatggtgagaacatcagccttgtgcttaatttaagttatgacttcatagcaacttgccaaatgtgagataatatcttctcattcctattagttcagtgaaatatctataaaggcacatttgaacccttagaagatggcaaggctcagtccctgaaatgggattatagttccttctttgccagagagttgacggacgggtatcaatcccatacctccagagcacagaatgtgtgcacagcaattacacagggacaaatgtgtttaaagagcacactctggttctgccagctagatcaataagtgacaaccgagagttggaattatcaagacatggtgggtctggaaattgcttttaacctttgccttcatttattactgccaactccttagaggaaa

SEQ ID NO: 1753 - DNA, 580 bp, Homo sapiens
  MAP TO CHR22_162.0; EXPRESSED IN BRAIN, SIGNAL = 1.2; EXPRESSED IN BONE MARROW, SIGNAL = 6.3; EXPRESSED IN LUNG, SIGNAL =  13; NT HIT: AJ238852.1, EVALUE 0.00e+00; EST_HUMAN HIT: BG742971.1, EVALUE 0.00e+00; SWISSPROT HIT: P39023, EVALUE 2.00e-21
agcccactcagtgatgaaggaaatgggacattccacccagggccagaggcccttgccacccctataggggtttaattattctgctacctctcctggtttctagttggactcctcaaccaactgggtcctcagccaccacccactagcctggactcagaatgagggtgttagcttccggctgaaaccagatggctggccaagtctgatcccaggtatttttctgttcgagaggcaaactaaacccaagacagcagctccctgcctgctacagagctgagaaaccatgcacacgctgctccctgctctccagctcccaagctcccaagctagggactgcatggcctcctcccttaccaattcttatagaaacgcctcttgcattcatcactgatgtgctcagcaaagacagtcttgaaggtccggaggcctcgaggggtttccacgtagcccacaatgcccacaaccaccatgggtggtgtctctacaatggtcacagcctccaccacctccttcttgttcacctctgcaaaaaaaaagcagtagtcagacttggcaggagcccaagcaaggggtgtaatgt

SEQ ID NO: 1754 - DNA, 532 bp, Homo sapiens
  MAP TO CHR21_48.0; EXPRESSED IN BRAIN, SIGNAL = 0.29; EXPRESSED IN HELA, SIGNAL = 0.64; SWISSPROT HIT: P93568, EVALUE 6.60e-02; NT HIT: AL163252.2, EVALUE 0.00e+00; EST_HUMAN HIT: AA884271.1, EVALUE 1.00e-73
tgttgaacttgtctgcagggctgggaaagaatagttctgaatttgaggatcaactttgccatattggaagtagtttccttcacttttttacttgctgggtcctatttggtgttcccttacataatttcaggatcttttcccctgtggaagtcaagttgctaccatcagcaatagccaatcctggagtggcaggaattcttgctgtacgtggtgacctagtgaccttaaagttgctatctgactactgggaacctggtaagcagcctccgcactcccagctgtccagtgtcctcactctctggtcttacagtctccaaggccccaggctaagtaggaacccagcctatgaataagtctcccaagggttttctggccccgaggttatccccctgagacaggtgaacaaagccttccctccttccagggttacttgtgaagcaaggagggcctgagtttctctcccaccctctcactccgagcagacattcaggcctggccttgagcctctacaccaggaatcccctccttcttc

SEQ ID NO: 1755 - DNA, 572 bp, Homo sapiens
  MAP TO AC015889.3; EXPRESSED IN PLACENTA, SIGNAL = 0.51; EXPRESSED IN LUNG, SIGNAL = 0.58; EXPRESSED IN BONE MARROW, SIGNAL = 0.53; EXPRESSED IN BRAIN, SIGNAL = 0.58; NT HIT: AJ277661.1, EVALUE 8.50e+00; EST_HUMAN HIT: BE152627.1, EVALUE 8.00e-01; SWISSPROT HIT: P97609, EVALUE 1.10e+00
ttaatcacccgtcagccttcctggaatggatgtcttcaagccctcctgtttggtgttctcaatcaggatgtcctctgactgtcctccccactgaggacagacaacattagtcaggaccagagggattttatggagacatggggtctccacttactagcctgccaacttccccttcccaaactcactgtggaaagtagggccgctgtagaccagtgacacgcagggggttggcttggggagaaagggtaaggagagcgtgaatgccactgctggttgattggaatggctggactggagatttgcaccagaatgagggagttgtgcagatgcagagcagattttgtgcctgacatccacccagttagaagacaaagaatcatggtgccgttttaggcagcaatgtgattcgtggagatctttgtgctcttgctctttcagggtttgggaattctggatcctggccatctcttcttcttttcagagtaacagtggatatattttgattttacctagctagtgttgcagcgaagccttaggataacactaaatgaagcatcctttagccaaagcaa

SEQ ID NO: 1756 - DNA, 587 bp, Homo sapiens
  MAP TO AC013648.3; EXPRESSED IN BONE MARROW, SIGNAL = 0.76; EXPRESSED IN LUNG, SIGNAL = 0.84; EXPRESSED IN BRAIN, SIGNAL = 0.87; NT HIT: AE001672.1, EVALUE 5.60e-01; EST_HUMAN HIT: W93746.1, EVALUE 5.30e-02; SWISSPROT HIT: Q9XAR0, EVALUE 1.10e+00
gaccatgggaaaggctactgggctgtccaaatgctaccgtctctcaggcacctgacctcgggcatctgctcccttctgccgcttcctgagggaactctcggaaaccccgcagcaggcctcactcaggagaggccgagggaagagatgggcagtgccaccagaggcccctctgagaggcgtttcaacagcttcacctgtgctgacaaagcagccgtggtcagcaccgccgttaaggcggccatcagtggcggctggcatgcagcgtgtacacgaattaacacatcaaacagaaaaactgccaaaagcagtaaagcgaataaggatggctgggtgctcctcactcctccaatgccagtgccccatcccctctcagtgccttcgttcacctctgactcctgtgtccacagtgacgttccaaagaagagccccacagagtggacacacagaaagtcctactcacgtcgaatgtgtcatcctctgcccttccttcctaggctcaccctggccatgagatgtgcatggctgctggaatgggcattgcacaacgattctcgagagctcagggccgccatgagtgttctctgggt

SEQ ID NO: 1757 - DNA, 507 bp, Homo sapiens
  MAP TO CHR22_154.0; EXPRESSED IN BONE MARROW, SIGNAL = 0.47; EXPRESSED IN HELA, SIGNAL = 0.92; EXPRESSED IN BRAIN, SIGNAL = 0.47; EXPRESSED IN FETAL LIVER, SIGNAL = 0.47; EXPRESSED IN ADULT LIVER, SIGNAL = 0.53; EST_HUMAN HIT: AI813927.1, EVALUE 3.00e-03; NT HIT: AF324892.1, EVALUE 1.20e-01
gaggggtaagcagaaaacaggaaagcctagaattctggaatccaagaaggaaattggcttggggatattgatcagcagtggcaaggtctcatacttgacctacaggtcaagtatgagagctggaatcaggtctcagatttagcaactttatgattaatgattatttggagggcaatcttggtaagagtgatgggatcagaactctatatccagaagctgaagaaggtagagcaaaatatagtaagcactattaatttctgataaatatttattaagcctattttatgagtggagtaccttcacatttatatcgttgagttctcagtgcatttctagaaatcagggcatgatacccatttcatggatgaggaatatggagctcacagtggtttgggtgacaagttggatcatcagcagtggaagaaaggagacacatgctggaaactgaaggaggagagtgagacatggaattttcatttattgaacacctattgtgtgcaagcctga

SEQ ID NO: 1758 - DNA, 586 bp, Homo sapiens
  MAP TO CHR22_130.0; EXPRESSED IN LUNG, SIGNAL = 0.45; EXPRESSED IN BRAIN, SIGNAL = 0.41; EXPRESSED IN PLACENTA, SIGNAL = 0.39; SWISSPROT HIT: P81274, EVALUE 3.00e-05; EST_HUMAN HIT: AI221148.1, EVALUE 5.30e-02; NT HIT: gi14726710, EVALUE 3.60e-02
aggcgatcacttttcattgcatattattctcattcatgtcatgttactcagctttctttgttccctttctgcactgaaatagagaagcatcactctacctaaggtcttggctacatccaagtcctgctgcatatatccggtgctcttctctgtatttccaagagaccagtaagcactgctcagggcagagaaaacagaacctctcagtttgaggctgcaggtgccaatcttcagtgcggcttctaagacaaccacagaggccccatgatggccagctgtcaggagttcctgcccaaccacagacacgaccacaaagggactcttgtccagtttcattttctgaagctgctgataagtgggctcgagggagtctgaaaataaacaacaataacagcaacataacaggagaatgtaggatgatacaaaaacaatcttttctaatacgctctagaaataaatgtttatcatatcttttgtggcttatttcaagtataaactcttcaacctttattctagcaccacttatctcatatgactagcatcacaaaccccagtccagtaatttccttctcctcactcttgcatg

SEQ ID NO: 1759 - DNA, 500 bp, Homo sapiens
  MAP TO AC009472.2; EXPRESSED IN PLACENTA, SIGNAL = 0.41; EXPRESSED IN BRAIN, SIGNAL = 0.46; SWISSPROT HIT: P29169, EVALUE 3.50e+00; EST_HUMAN HIT: BF952845.1, EVALUE 0.00e+00; NT HIT: AJ009870.1, EVALUE 1.00e-115
ctccattagcagtgcaggtgcttaattcataaccatttaaccaaaccagttactctattcttttaaaattttactctcttgaaattttgatttctgagtctcttgaaaggtaagtgattgaaaagcatatatttcagtaattgaagtaaaacccattaatttagaaaaacagccattatgagtgatttctagtaagaagcacttaacaattttagatattcagtacatttttattatcaggtatgtgacagtagatactgtgatgtattctggagatgtaaaatgtgtaagacatgttcattacacctggggaactgaagatacaaattcaattggtgggctgcagcgtatttttgtatcagatcaagtagcagaacatagagctgaaggtcagggcaagattataaagagctttatatgccaagataacgagtctgaactccaatttgtagacaaagaaaggtagattttaaccagtccaataacacaatcacctttgc

SEQ ID NO: 1760 - DNA, 519 bp, Homo sapiens
  MAP TO AL137859.2; EXPRESSED IN BONE MARROW, SIGNAL = 0.62; EXPRESSED IN BRAIN, SIGNAL = 0.82; EXPRESSED IN LUNG, SIGNAL = 0.89; EXPRESSED IN FETAL LIVER, SIGNAL = 0.69; NT HIT: AF310892.1, EVALUE 4.90e-01; SWISSPROT HIT: P18267, EVALUE 1.70e-02; EST_HUMAN HIT: BG184942.1, EVALUE 2.90e+00
ctcccttcttacctgaggggatatttcataagataacataggctttctctccaggcaagaagagagaacaacctcatcaaggaaaccctgcccttaaaatgggcaccaatctgggccttggggacattccacttagccccacctgggaagcttcagccttcctgggcttccaccccaatgccaccctgtctcaggacagacttggctactgcatttgggatggaaccactgtgaggacagggcaggagctgaggaggctgttagactgggtcattttctggctctattcttggctaagttgcttaacctgtttgactttggtctctctgccagcaaaatgcaaggttgtgtgaaaatggaatgagatcacggatgccaaccttcaagcactgtacctcctacagagtaggtaaacaaatggtggggacagatttcattattactattactaccgttgttgttatgaacaacatcaaactgattcaggtttctccaatctggcagcatgagtgattcaga

SEQ ID NO: 1761 - DNA, 557 bp, Homo sapiens
  MAP TO AL096771.11; EXPRESSED IN BONE MARROW, SIGNAL = 0.68; EXPRESSED IN BRAIN, SIGNAL = 0.81; EXPRESSED IN FETAL LIVER, SIGNAL = 0.53; EXPRESSED IN LUNG, SIGNAL = 0.66; EST_HUMAN HIT: AW835049.1, EVALUE 7.00e-66; NT HIT: gi14757166, EVALUE 9.00e-80; SWISSPROT HIT: Q99715, EVALUE 1.00e-21
tcatcaacattgccaactgctcttggattttcagagtaagacttttgatttaggatgagaatagcttaaaaaacttcaaaaaaatctgatctaaactatgcagagtcagctaatttttttagtgtagaaattttataatggaaacaaattatctttttaggttcatattgtagtgacctcaaaaagtgttaagatttacattgactgctatgaaattatagaaaaagacatcaaggaagctggaaatataacaactgatggttatgaaattcttggaaaactccttaaaggggaaaggaaatcagccgcagtgagtaacacatttttatttctcttggtaccttgtgttaagattgaaatggcatttttctaaacaactccttgagttttattttattctatttttctcagtgagttttaagttgtcaaatttcttggtcagatcaaaacattggaagaagtacattgagaaaatatgtccacagaacataataatgtgctttaactacttgctagaaacaaaataagatgtcaaggcaccagggaacaccatgtag

SEQ ID NO: 1762 - DNA, 517 bp, Homo sapiens
  MAP TO AC011950.4; EXPRESSED IN BRAIN, SIGNAL = 0.3; SWISSPROT HIT: P54097, EVALUE 8.00e-04; EST_HUMAN HIT: BG753756.1, EVALUE 3.00e-89; NT HIT: AF106842.1, EVALUE 4.90e-01
tctgtaacgtggcatggttctgttagctcttaatgtaatggcggagtcttaatacggtagaaattaatttacaagtcccagtaggttggtactttccagtgatgtcctgttttcacgttccctaaaatttagctgtgacaaggaccctcagaccaccgtcattgagaatggccgaagccagcggggccggttttcttttgaagtgttccgatttgtgaaacacaagaatcagaaaatgtccactgtcttcttgcactgcgttaccaagctctgcagagcagatgactgccccttccttatgccggtatgtttttaaggaacttcattttaagttgttgaattgatctaagctgaaaggttatcaaatgtcagaaactaagttctgcatagaaagtggatatgtgttagatcaaatagtttgaagtaggatttattcatttgtctagtaaagatctgctaaatatcctactttgtgccaagcattataccgaggatacagagatgaggtgtgcacaaa

SEQ ID NO: 1763 - DNA, 556 bp, Homo sapiens
  MAP TO AC018876.4; EXPRESSED IN BRAIN, SIGNAL = 0.41; EXPRESSED IN PLACENTA, SIGNAL = 0.32; NT HIT: D14547.1, EVALUE 6.00e-10; SWISSPROT HIT: Q9NSI6, EVALUE 4.00e+00; EST_HUMAN HIT: AW341549.1, EVALUE 3.00e-09
aaaacgaagtggtgattggggaatggcacatgagagtttctgaagtgctgataatgttctatttcttgatttgcatgtcggtgtgttcactttgtgataattcattgcgttgtgtcttatgatttgtgcattttctgctaatatgttgtacttcaactaaaaaaattagaaaactaatactaatactaataggaatagattaacataaacaaaagtagattaaaaattgaggtaacagtgtaattccaattctagtcatcttagtttggtaataaattcttacaatgatcactattttcttttgtggaacaaatatttattatctactggctgccaggtacatatagtggttaaacatagaggccaggtccctggctctgaaagtttacctcatattgccttcctatgatgcatttacatgctcatagttgacccttgaatgtcatgggattgaactgtgctgcaaatttcttatctccaccacgctgagaaagcaagaccaaaccctcctcttcctcctccttagcctactcaacatgaagacaagaaggaagaa

SEQ ID NO: 1764 - DNA, 596 bp, Homo sapiens
  MAP TO AC009472.2; EXPRESSED IN BRAIN, SIGNAL = 0.42; EXPRESSED IN PLACENTA, SIGNAL = 0.44; NT HIT: AE007719.1, EVALUE 3.60e-02; EST_HUMAN HIT: AW468719.1, EVALUE 5.40e-02
gcatggctagggatacatggctcactccttggccagggaagaatagctaggcaagactgatgaaatggggattgtgtagttccccaaagcgcaactggagtacaactaggagatgcagtggatcctcccaacagttagtattcttaaagtacagagaagggagattctggtgagactttacagagaagggacgttctggtgagactttaaaggggcttaagctagacctttaaggatgagtaagaatgaaataaatgaggaggagggaacatttcaggtggtgttaaatgaggagaaaaggcttgtagttaagatagagtcagatgtccccaccagagtcagaagtggcaaaatggagaagaagatgattattccttggaattgtgtcaataggaaagtaaggataatgctaagtttaaagggacagataattctggcagagaaacagcaagtatagagataactaaatagcaaatatttgggaaaagcttaaaggagacatatgtacttttgaaagaaaatccaaaataaaggatatgctggaagaaccttctagacatgagattgagaacccaagtgagggggtgaatcttgag

SEQ ID NO: 1765 - DNA, 536 bp, Homo sapiens
  MAP TO AL136372.1; EXPRESSED IN BONE MARROW, SIGNAL = 0.84; EXPRESSED IN BRAIN, SIGNAL = 0.79; EST_HUMAN HIT: BE888085.1, EVALUE 1.00e-08; NT HIT: AL163283.2, EVALUE 2.00e-43; SWISSPROT HIT: Q28056, EVALUE 6.60e+00
cttggccttggacttctctgcctccataactgtaagaaataagttattttgcttcataaattacatagctttatgtattctgttatgaacatcaagaaatgaacaaagacagaaaattggtactgagaagctgagaataattacctaaaaatgtggaagtggctttggaactaggtaatggacagaaactggaagaatttggaggagcaggctataaaaagcctagatgctgatgagggcttagaagacaagaaggccatgaaaagtttggaactcttcagagattggataaatggttgtgaccagaatgctattagtaatatggacagtaaaagccactctaatgaggtctcagatggaactgagaaacaaggtattgaaatttggagtaaaggccatctttgttaaaaattgttaaaaaaaaaaaaaaaaagttggctaaactatattcatgcctgagggctttggtgaaagccaacttgagagtggtgaactaggttatctgataaaataaatgcccaagtagcaaagcattc

SEQ ID NO: 1766 - DNA, 541 bp, Homo sapiens
  MAP TO CHR21_18.0; EXPRESSED IN FETAL LIVER, SIGNAL = 1.9; EXPRESSED IN ADULT LIVER, SIGNAL =   2; EXPRESSED IN HELA, SIGNAL = 8.4; EXPRESSED IN BRAIN, SIGNAL = 1.9; EST_HUMAN HIT: AL530172.1, EVALUE 9.00e-87; NT HIT: gi13385573, EVALUE 3.00e-30
ccagtgagccctcttaccactgtcatggctgtcccaggttgcaacaaagacagtgtcagaaaagactgtaaaaaatgtggctacccttgtcaccttacttttgaatgccgcaattttctctgagtagaccctaaaagggacatagttttggatgtcagcagtacaagtagtgaagatagagatgaagagaatgaagaactgaataaattgcaggcattacaggaaaaaagaataaatgaagaagaggaaaagaaaaaagaaaaaatcaaattgaaaaaaaagaaaaaggtcttatccagttccactgaagaggacacttcaaaacaaaagaaacgaagatatcagaagaaagaaaagaaaaaaagagtaaatcaataaagggaaacatcacaaaaaggaaagaacaaggagagaaaaaaaaaagcattcttctacccctaaaagttctgaattctccagaaagtaactgagactttggcttaagccattaaatttaaaaatttgtttttaaaacatgtttgccttgccttggaatttgcta

SEQ ID NO: 1767 - DNA, 587 bp, Homo sapiens
  MAP TO AC011803.4; EXPRESSED IN PLACENTA, SIGNAL = 0.47; EXPRESSED IN BONE MARROW, SIGNAL = 0.46; EXPRESSED IN BRAIN, SIGNAL = 0.37; EST_HUMAN HIT: AI732468.1, EVALUE 8.30e-01; NT HIT: gi15920163, EVALUE 5.60e-01
aggggaagtctccatgttcctgagtctggtcaactgttttttgtaccaccaaatgcatttgtcaacatgctaagatcaggttggtatcctggagattggaccgtgctaatcaaacacaggagtatgaagaaggcatttgtataaagaacacggccctaatttgcaaagacagaatccgttagagggtttggattcttgagcacctgctgtaaagcaacatgaaaatccaattcatattcaaaaagtaacttggtaataattggatccaagtcagggagccatgtggtgaaatgaaaggagcatgagctggatttaaatcgtgtccctttcaactactaactctaagacttccgcaacctctctttgcagaagtgttttctctctccaatccttggttttgtcatctggacaatgagcataattatattcacctggaagagctgctataaaattagaaaaggctctagaacgtcgtagtgtgcaagaaattataagtataaaaaatagagtgcttaatactattgtaagccattaataaatacacactttaatatcagaaaacaccaagccctagttgctgggtcata

SEQ ID NO: 1768 - DNA, 567 bp, Homo sapiens
  MAP TO AL138843.2; EXPRESSED IN BRAIN, SIGNAL = 0.68; EXPRESSED IN ADULT LIVER, SIGNAL = 0.32; EXPRESSED IN BONE MARROW, SIGNAL = 0.75; NT HIT: AF003529.1, EVALUE 1.00e-20; SWISSPROT HIT: P08548, EVALUE 6.00e-08; EST_HUMAN HIT: BF844354.1, EVALUE 2.00e-51
tggaaacaacctaagcgaccatcgacagacaaatggataaaaagaatgtggtatatacataaaatggaatattatttagcctttaaaagaaggaagtcttgtcatttgtgacaacatggatgaacctggaggatattatgttaaataaaataagcaagacacagaaagacaaatactgtatgatctcacatgtggaatctaagaaagctcaactcacagaaacagaggttagaatggtagttacccagggctgagggctgaggcaaatggtgagatgttggtcaaagcatagaaactttcagttataagatgagtaagttctggagacctaatgtactgcatggtgactataattattattgtatacttgaaatacgctgagagtaaatttcatgttcttatgtctctcacatacctatgaggtgattgttatattcattaccttgattgtggtaatcatttcacaatgcatatgtattatcaaaaatcacactgtatacctcaaatacatgtaacttttacttgttaatcatacctgaatacattagctggggagaaaataaacca

SEQ ID NO: 1769 - DNA, 599 bp, Homo sapiens
  MAP TO CHR22_124.0; EXPRESSED IN FETAL LIVER, SIGNAL = 0.55; EXPRESSED IN BONE MARROW, SIGNAL = 0.74; EXPRESSED IN BRAIN, SIGNAL = 0.44; EXPRESSED IN ADULT LIVER, SIGNAL = 0.51; EST_HUMAN HIT: BI821626.1, EVALUE 0.00e+00; NT HIT: gi16167005, EVALUE 0.00e+00; SWISSPROT HIT: P74211, EVALUE 3.40e+00
aattgggaaacccctacctgtctgtacctgtaggtcttttctctggggtctggaagaagaatccttcaatatcttgccttctggtaatctgagagcagggcgagaaaaggaagatcagagttccacccttaaatctgtaggttttcactcccccactctcctttgcagtcccgtggagtctccatctgagccctttcctagtccaggcatcccgatgttggtggatggcccatctgagcggccagccctgtgcttcttgctgttggctgtggcaatgtctttcttcggctcagctctatccatagatgaaacacgggcgcatctgttgttgaaagaaaagatgatgcggctgggggggcggctggtgctgaataccaaggaggagctggccaatgagaggctcatgacgctcaaaatcgctgagatgaaggaggccatgaggaccctgatattcccacccagcatgcactttttccaggccaagcatctcattgagagaagtcaagtgtttaatattctaaggatgatgccaaaaggtaaggtttggaaaggggtggcttggggtgctgggaaggtagagggactcatcttggggctat

SEQ ID NO: 1770 - DNA, 528 bp, Homo sapiens
  MAP TO AL136094.1; EXPRESSED IN BONE MARROW, SIGNAL = 2.6; EXPRESSED IN BRAIN, SIGNAL = 2.1; SWISSPROT HIT: Q04860, EVALUE 3.30e-01; NT HIT: gi14861872, EVALUE 1.00e-72; EST_HUMAN HIT: BE463763.1, EVALUE 4.00e-52
aggggtgatggtaagtgctgccacttccacttccaccccttgattcctggacccatgaatcctggctgtgagagaaacagtaccatatattggatgctgattcagagcatacaacgccttctggagaactttgccctagccctgcaaagtgttgtcacctagttggcattgtaattgtgacttcaaaaggccattcatgcagaaccatctgtgaatcaggccctagtcttctcttcctctgtcagctgctccagggaattctccatgaggccatcagtgcaggctgggggagagaaggcagggtggcaggcatggagaccatgggcatttgagccacttcctcatgtaacttacttgtgccttcaggacctgctcgagcctgatcatgtatacaccacttccatttgatgatagaatgctgctgtgcatgacccactttatggctagattggttatgataggcagctcaggttccatggtgacttgatgacccatagtcaaatgttcagtttccaccaaagcctggta

SEQ ID NO: 1771 - DNA, 523 bp, Homo sapiens
  MAP TO AC018432.4; EXPRESSED IN BRAIN, SIGNAL = 0.36; NT HIT: M55169.1, EVALUE 1.00e-114; EST_HUMAN HIT: AA994655.1, EVALUE 0.00e+00; SWISSPROT HIT: P29144, EVALUE 4.00e-36
tcttttaaccagcaatggggcacaagagaggtctgtgaggtaaccccaagaactttgctgaaacaagaagcagaaacgttaccttattgtcaaagagatcagtccatttagtagtttcccaaaatgtttctgccagagaatccaaaggactttctccttcctcctcctttccttctgcatcagtggaaatggctccgtcttgagcctgggtgtgaagaagatggtctgccagggcacaacctttcctacaaagggcatctacgagggtggatttttgtttgtccatgtcactgtacagcaaattaaaaaatatttcagatatcagtaaaatgtctttaaaagtaaattcttatctgaatttaaattcatgtattcttttgcctaagatttataatgcagaaatactgtatatccaggtacgtacaattgtattgtacatcaaatatgatgccttattaataaacatcaaatgagctactatattacacatatagattaaatgagttagggtagctgcacctgg

SEQ ID NO: 1772 - DNA, 500 bp, Homo sapiens
  MAP TO CHR22_152.0; EXPRESSED IN BONE MARROW, SIGNAL = 0.52; EXPRESSED IN BRAIN, SIGNAL = 0.48; EXPRESSED IN FETAL LIVER, SIGNAL = 0.49; NT HIT: gi13648350, EVALUE 0.00e+00; EST_HUMAN HIT: AI092723.1, EVALUE 0.00e+00; SWISSPROT HIT: O73775, EVALUE 2.00e-46
tctctgcccacttttcttgcagccgctgtgagcgcttgccttgccatgagaatcgggagtgctccaagctgcctctgagaataacctactaccacctctctttccccaccaacatccaagcgcccgcggtggttttccgcatgggcccctccagtgctgtccccggggacagcatgcagctggccatcaccggcggcaatgaggagggctttttcaccacccggaaggtgagcccccacagtggggtggtggccctcaccaagcctgtccccgagcccagggacttgctcctgaccgtcaagatggatctctctcgccacggcaccgtcagctcctttgtggccaagcttttcatctttgtgtctgcagagctctgagcactcgcttcgcgtcgcggggtctccctcctgttgctttcctaaccctgccctccggggcgttaataaagtcttagcaagcgtcccacacagtgagcctcgcgtgccttggttttatttggc

SEQ ID NO: 1773 - DNA, 506 bp, Homo sapiens
  MAP TO CHR21_59.0; EXPRESSED IN BRAIN, SIGNAL = 0.39; EXPRESSED IN HELA, SIGNAL = 0.68; EST_HUMAN HIT: H84938.1, EVALUE 1.10e-02; SWISSPROT HIT: P54259, EVALUE 7.10e-01
tatgagacaccttctgggggtgggtgagggaagtgggtgggtggaagtgtgtgccccccttcatctcaagccaagagactgacttctatagggttgattgtgaccttgctccatgtgccctggattttgggaggcctggtggactatgtttgccacctgagcaaagaacccattgatgaggagctgtgggctgtgggcttgcggcagcagaacaaagagaggagcactggacacagtgggtgtgatgtccacttccaccaagaggtggtgctgtccagggaccaggtgtgggcacgtaggagagagacagtggatcttaaagcctgctcaggggacctcctggaaaggtgctgggaccaccaccaggaaagtctgggagagtagaatttgcacaaccatgggctggagctgagcagcagcagggaagcctgcatcaccaccttggggagggcaggtgagcctatgcagcaggatccacagcgatcccacaaggaactcagctgcaa

SEQ ID NO: 1774 - DNA, 584 bp, Homo sapiens
  MAP TO CHR22_136.0; EXPRESSED IN BONE MARROW, SIGNAL = 0.54; EXPRESSED IN HELA, SIGNAL = 1.4; EXPRESSED IN BRAIN, SIGNAL = 0.46; EST_HUMAN HIT: AW975797.1, EVALUE 5.30e-02; NT HIT: AF060868.1, EVALUE 5.60e-01; SWISSPROT HIT: P52666, EVALUE 6.50e-01
tgatgtctcatttccctccccagaagggagagatggcgtggatggccgagcagctctgaccagttgaacatgtgctggcacctgctggaatgtggagctcctaaacagccgaaagggcaggaagctttctgcaacttccagcttaaacaaagtgagtctgcatggaagggcacaactgagtatgccttcattattcactcattcgcatgctcagaaaaaaagcagacgctgaaaacacattcagggaggtgtgcagaggtcacaggtgtcttctctactttaattcctcatttatgaggtgagaaggatgaacacttcgtgagtgccccttctgtgccagacacatattctcagtttttccactcccaggtccatactctgcccttctctgtgccctgggatcacctggcatcccctggtggctggttcctgatcggaagctttggcaacagcttggagggtgggaggaaagagagtgtgtttctccctcgcacactctcgcatgtgggtgggcaacgttcccagcaatggctgtgtcctccacttcagtctctgcttggcagccatctccatggttcaagcct

SEQ ID NO: 1775 - DNA, 570 bp, Homo sapiens
  MAP TO CHR22_88.0; EXPRESSED IN BRAIN, SIGNAL = 0.44; EST_HUMAN HIT: BF357173.1, EVALUE 0.00e+00; NT HIT: AJ271911.1, EVALUE 5.40e-01; SWISSPROT HIT: P49036, EVALUE 1.60e-01
tatggtggtgattgctgctcatgcatttccatttgaacttgaagcattggtgtttctcttagctggcatcctccccagctcttctcacctctcttctggcttggcacatggtgggtctggctcatcagatgatccccttggaggatgctgcaaaactcctcagcaacctgctctgtattctttggctgaagatatcctccactcttggggctcaagtgcatttctctaagtcaatgcagcctttacactttgaagttattagtaattcttctctgacccctcatttttgtcagtttagtaatttttctttaatttctgcttgttgatttgtgaccccaatctctagaaaactcttgtcaggtatcttgaaatgtacattttgtacattgtatttccactttcctgtgtccccaaacagttacccatttcccatgttaaagttctaactgcgtatcctggcattcaaagtatctttacattacttattacctacctctccctgttagttttcactaccttcttacatagaatgtctacgttggccaaacctgactaaccagcattccccaa

SEQ ID NO: 1776 - DNA, 525 bp, Homo sapiens
  MAP TO AL160154.1; EXPRESSED IN BRAIN, SIGNAL = 0.41; EST_HUMAN HIT: BG195587.1, EVALUE 1.90e-01; SWISSPROT HIT: P52633, EVALUE 8.40e+00
atgcttcaggttggaattggctattttgaaatttttactcagtgttttaaattttaaattttaaagtttatacagatgaaacacacccatcccttcaacttattacacccttttcaaaatatttgaatgacatacagtgcagtttcaatacttgttaactgggtataattcaaaccacacttgtcagcagccatgcctttatccaccttaccattttgtactccacacaggagaacactcttacaacctttggaactccagaatgaggtgtcatcaggatgaagaaaatgactaggacctgcagtgggatcaggagtaggacctatgcaagatttctgagaagccgagaaaggtatgcagaagccaagatcagaaattatggattatttaggcattgaagaggagttataggaagtcaggtaaataaaatttttactaaattcagaaggattagtgtactcagtcatttaatcctgtttgaacatttgactcaagccaacctacccccactttgttttcccgtaa

SEQ ID NO: 1777 - DNA, 506 bp, Homo sapiens
  MAP TO CHR19.1; EXPRESSED IN HELA, SIGNAL = 1.9; EXPRESSED IN BRAIN, SIGNAL = 1.8; EXPRESSED IN BONE MARROW, SIGNAL = 1.9; EXPRESSED IN HEART, SIGNAL = 2.2; EXPRESSED IN ADULT LIVER, SIGNAL = 3.4; EXPRESSED IN FETAL LIVER, SIGNAL = 1.7; EXPRESSED IN LUNG, SIGNAL = 2.2; EST_HUMAN HIT: BI091719.1, EVALUE 2.80e+00; SWISSPROT HIT: P53867, EVALUE 2.70e+00; NT HIT: AL161583.2, EVALUE 7.50e+00
cttcagtttccctgcctcaccaaaagtttttggtggacgcctgtattgcatgtctgatcattttcacgctgaacaggtttggtgaatttttattctcttccatattccactggcatcttctgtgtcatgataagctcagagtccacaaggtttcctcagtcagactgggatagatgatccacttcctttattcacccccaattttcagggttctcctgcagaacagggagataagaaagccaaatctgtcttgctgctgacggagaaagatgcgagccatgcggtgggcgtcctgcgctacttggagcgagcggacgccaaggtccccgcagagctgtacgagttcaccgcaggagttctggaagccaaagaagataagaaagccggaaggcctctttgtccatatctgaaggcttttggtttttgcaagtgagccagtaatttgtttcttattaaactgatgtataacctgcagtaaggtgcacagctgttgcaatgtggtgaat

SEQ ID NO: 1778 - DNA, 565 bp, Homo sapiens
  MAP TO CHR7.1; EXPRESSED IN BRAIN, SIGNAL = 1.6; EXPRESSED IN PLACENTA, SIGNAL = 1.4; EXPRESSED IN FETAL LIVER, SIGNAL = 1.9; EXPRESSED IN LUNG, SIGNAL = 1.4; EXPRESSED IN HELA, SIGNAL =   2; EXPRESSED IN HEART, SIGNAL = 1.4; EXPRESSED IN BONE MARROW, SIGNAL = 1.8; EXPRESSED IN ADULT LIVER, SIGNAL = 1.9; NT HIT: gi5729900, EVALUE 1.00e-69; EST_HUMAN HIT: BF217988.1, EVALUE 3.00e-74; SWISSPROT HIT: P12673, EVALUE 2.40e+00
tgagtcaagatttggggctcctgttttgggttaatccaggatacctcctggtcctaggttccccaagttgccttcttctatagctgcatttctcttccccgttatcaccactcgcctatgttcaaatgtgaatgaaaatatttaaatattaaaagacatacacttcacaaccagatcaacagtgccaaccactgtagctcatcaggatatcatttccctctgtttgttggcaattcccaagaattgtgtcagagatgtcaaaaatacaagagcacaaatatcaacctctttcacaggacaatcttctttactcacaattttatatcttgagcttccttatgcataatctccagaatagacttacaagccgcagaggtgccttcaggagtagagaggatagtaatcgacttctcagcagcccccgcattttctttacggtggacatcgattctgatagtgggcgcaagcagagaggaaaacgagagcagtaagcgtgtattcacagtggagtctgtaattaccaaatgcaaagtcatagggcttcagggcaaagcagatgactcac

SEQ ID NO: 1779 - DNA, 536 bp, Homo sapiens
  MAP TO AP002016.2; EXPRESSED IN FETAL LIVER, SIGNAL = 0.92; EXPRESSED IN LUNG, SIGNAL = 1.1; EXPRESSED IN BRAIN, SIGNAL = 0.86; EXPRESSED IN HEART, SIGNAL = 0.78; EXPRESSED IN BONE MARROW, SIGNAL = 0.9; NT HIT: gi16158062, EVALUE 1.00e-105; EST_HUMAN HIT: BG392713.1, EVALUE 1.00e-105; SWISSPROT HIT: Q9UFF9, EVALUE 1.00e-33
tcccaatgtgggtttaatttgcatttccctcatgactaatgatgttgagcatcttttcatgtgcttactggccatctgtacattatctttcaagaaaagtctatcttttgcacatttttagttgggttgtttatcttttcattgttgagctgctgcagttctttaagcaggacttcacttgctgagattccctgttccgtcctctgcttgaccgctctatccaacacccacctggattcagtgaaaacaaaacttaaaattaacgcatttatttagaaatcacttacgtaaggttaaatttgaaattgaactgccaagtattgattccagaaggatactctcccttctcatttgtgaatgtaaggcccagctggataatttttaaaaggtcaacattgcaccgcagaagctgatattggtaatctatggaactacgaaattcaccaattggtcgcaccacaacacctggaaattctgtgtcctggaaaaggaaaaagtctctcatcacaaggtttcacaaaacagtggatgctgaa

SEQ ID NO: 1780 - DNA, 586 bp, Homo sapiens
  MAP TO CHR10.1; EXPRESSED IN PLACENTA, SIGNAL = 2.1; EXPRESSED IN HELA, SIGNAL = 2.1; EXPRESSED IN BRAIN, SIGNAL = 1.7; EXPRESSED IN LUNG, SIGNAL = 1.3; EXPRESSED IN HEART, SIGNAL = 1.7; EXPRESSED IN ADULT LIVER, SIGNAL = 4.1; NT HIT: gi14743475, EVALUE 0.00e+00; EST_HUMAN HIT: BG697814.1, EVALUE 0.00e+00; SWISSPROT HIT: Q09624, EVALUE 5.70e+00
ttaaaccttgtcctgccacagaattattctgtggggggcggggggggcggggaaatgtactttttgaatatgtgtacaccaaaaccaaaaagttaacttttactttttcctttattggcaacttttgatgcatttttcggttttggttcccagagggcattttttacaaatcttgaagctgcacctctgtccagcttgccagcctttttcttgtctgttatttccttgactctgttcatatatactctgattctttccaattcctgttttactggatgttccttaggattaactccttgggttgccaaataaacccaaaacattgaatttaatgtgtatgcagaaaccaaatccacttttgcttgttcaagtggatccaacttctgcaacaactcatttctagaaacagacatcgtggtcttcagcatctcatccacagcaccaatggaattctcaaacgctgacaaatactcgtgaatttctactggatagtcttcattaatttcttcacctgccgttatggctgactcacggccttcgactccagcctcccggaaagcggtcgggcaacgatgacgacaatgac

SEQ ID NO: 1781 - DNA, 527 bp, Homo sapiens
  MAP TO CHR1.1; EXPRESSED IN ADULT LIVER, SIGNAL = 0.83; EXPRESSED IN BONE MARROW, SIGNAL = 1.5; EXPRESSED IN FETAL LIVER, SIGNAL = 1.1; EXPRESSED IN LUNG, SIGNAL = 0.72; EXPRESSED IN BRAIN, SIGNAL = 1.4; EXPRESSED IN HEART, SIGNAL = 0.68; NT HIT: AL163284.2, EVALUE 7.80e+00; EST_HUMAN HIT: BE439632.1, EVALUE 2.90e+00; SWISSPROT HIT: P57518, EVALUE 8.40e+00
cgctcaatagaccagttccctgaatatttactttcttcatttgcttttaataattaagtaccaaaaaaagtggctttgattgtcagcttcactctcggggttaattagatatttccaaataacttgccaaatacttgctttgatcccaagtttggctcctcctttctttccctttccctaaacactgatttctctggagagctcttgttggagaattgactggagctaattattccagataattaagatcgctaagcagagcaatttaattttttctatttctttctttcttgtttttttttttgagaaatgttaatgtctgcataacacaccatcaataaaactccttttaaaaggttaagctggctgagtgcaatattgaattgagaatgactaggatcaaatgaaatccagtaaagatatttagcagagtaatgaagtttattctggaacaaatggcttttccttatcagaatttgcttttatttgatgcagtgctgaaatagggaagaacgaagtcaggccaa

SEQ ID NO: 1782 - DNA, 501 bp, Homo sapiens
  MAP TO CHR17.1; EXPRESSED IN BONE MARROW, SIGNAL = 1.3; EXPRESSED IN ADULT LIVER, SIGNAL = 0.86; EXPRESSED IN PLACENTA, SIGNAL = 1.2; EXPRESSED IN FETAL LIVER, SIGNAL = 1.2; EXPRESSED IN HELA, SIGNAL = 1.1; EXPRESSED IN BRAIN, SIGNAL = 1.1; EXPRESSED IN LUNG, SIGNAL = 0.68; EXPRESSED IN HEART, SIGNAL = 0.62; NT HIT: L41142.1, EVALUE 4.00e-97; EST_HUMAN HIT: BE272275.1, EVALUE 6.00e-97; SWISSPROT HIT: P42229, EVALUE 2.00e-24
taccattgcagctgagcatcattgcaggtgggcagagcccactgtgtcagccacctggttttaagatgaggacacggagaggggaaatgaattccctaagattattcagtgagttagcaagagatgcgaatagagtgggggtctgcagaagccagtgggctgactgctacccagcttggggtggggtgggggcatccagccagaactggtcctgttctcatgagacgggtttgagtggagagcaggctggaggctgtccccagggagcttgaggctgtgagacatgccagctccctctgacatccccctgtctttaccagccctgaccatgtactcgatcaggatggagaattcgacctggatgagaccatggatgtggccaggcacgtggaggaactcttacgccgaccaatggacagtcttgactcccgcctctcgccccctgccggtcttttcacctctgccagaggctccctctcatgaatgtttgaatcccacgct

SEQ ID NO: 1783 - DNA, 593 bp, Homo sapiens
  MAP TO CHR12.1; EXPRESSED IN ADULT LIVER, SIGNAL = 1.2; EXPRESSED IN FETAL LIVER, SIGNAL = 3.1; EXPRESSED IN LUNG, SIGNAL =   3; EXPRESSED IN BONE MARROW, SIGNAL = 3.8; EXPRESSED IN PLACENTA, SIGNAL = 2.7; EXPRESSED IN BRAIN, SIGNAL = 3.7; EXPRESSED IN HELA, SIGNAL = 2.6; EXPRESSED IN HEART, SIGNAL = 2.3; SWISSPROT HIT: P12752, EVALUE 6.70e-01; NT HIT: gi13649851, EVALUE 0.00e+00; EST_HUMAN HIT: AW950323.1, EVALUE 0.00e+00
tcaaaaatcagaagccacccgtgctgtgatcatgcacaagtcttaatttaatgggtaaaaacattaaattattacaacattttttccaataaagcataataaatagaatccatttcttttaaaacgctgtacaagagactggaaaacaagcttccaacagaatatgaataactcataactcattctaccttcttattgatttgggacgctccccccaccccccatgcctgaagcaacgtgcacacttcaggtctctgagcacagccggccaaggccaccagcttctaggctccctggaggtcatgacttcactcttaaatgctctgcccttgggtctcgtctgaggccccagcagcctgaggcgcagaagaaactgaaccgtttaggtggctgtggcctgcaggagcccttctctgtccaacacaccaaaaggagtgagaaaaacaaatgagaaacgtcccccaaacactcacacccccaaaaccaacacctataagccacaaactgtgctcctcccctactgcagcagtgggcaggagaaacaagaagagaaagtgtttcttcccctctcttctgatacataaccccacggg

SEQ ID NO: 1784 - DNA, 590 bp, Homo sapiens
  MAP TO CHR17.1; EXPRESSED IN ADULT LIVER, SIGNAL = 0.63; EXPRESSED IN FETAL LIVER, SIGNAL = 0.41; EXPRESSED IN HELA, SIGNAL = 0.57; EXPRESSED IN BRAIN, SIGNAL = 0.49; EXPRESSED IN HEART, SIGNAL = 0.78; EXPRESSED IN BONE MARROW, SIGNAL = 0.4; EST_HUMAN HIT: BF366857.1, EVALUE 6.00e-88; SWISSPROT HIT: Q10656, EVALUE 1.50e+00
aggaaaactccacccaatcccacaaacatggccagatttagttgccagtatatttttgaaaaatattttagggtagaatatcacacccccaccacactcccccctctactccaccatctccccatgataagaaaaagccaacacctttccatctaagaaaacttggcggaggtccctccccacacacaaagaatggctgcttctacgcacttctatcaggagcgtcgtacaactaacgaactttccaaacaaagaaacagcaagtcagaaataaaatcatgtgctaattgtggttttcctggaatggatgactatataatattctaatcaaaaagctggaatcacatttgcgtttagacaaggcttgttagaaaaatacatgagaataaaaggaggccgtaagaccacgggtgcttctcccaaggccagtcattactgctcagggcaggcagccagcaagtgggaagttgcccaattttggtcaagtccagaactccagggatgcccccttgtgtccactagctctcttaggggcccccaaatcctacttacactacggccacctaacagcattcaggcagctcccatat

SEQ ID NO: 1785 - DNA, 600 bp, Homo sapiens
  MAP TO CHR15.1; EXPRESSED IN BRAIN, SIGNAL = 0.61; EXPRESSED IN HEART, SIGNAL = 0.64; EXPRESSED IN BONE MARROW, SIGNAL = 0.7; EXPRESSED IN ADULT LIVER, SIGNAL = 0.78; EXPRESSED IN FETAL LIVER, SIGNAL = 0.73; SWISSPROT HIT: P56902, EVALUE 5.20e-01; NT HIT: gi15828471, EVALUE 2.30e+00
tggctcgaaaatagaatgggctgccttgaaaagaaatgaagaagtgaatattctctgtgacaggttttgcgcataagccggatgcagggtggtagatcccgagaatagacaggagtttagactggccactgcaaaggatttctaatcttgaaattccatggttctatgatttgcatatgtgtccttccagaaaagctaagataaatcttctcaaatcccctatgcggaagaaaagtaaattggcatcatattttttcattttcattttccttctagaaaactaatcccttccatgttttcccccttccctcaattagttggtagagaatcccatttccatcaagtgcacagaacacatttaaccattttgaaacacttaacatttaacacaaaccacatggccgtaagttttaattagttcccgctatacaaataggtccatttttagaaaaatcaaaatgctcaatgctggtgcttgctctcttcctctccattgtttctctgtttgactagctcagtggcactttcccatcctgccctcttgctgtctgagcccatggcacctgccaataaaagtgatgacaggctttgatgctcaca

SEQ ID NO: 1786 - DNA, 541 bp, Homo sapiens
  MAP TO CHR22.1; EXPRESSED IN BRAIN, SIGNAL = 1.8; EXPRESSED IN PLACENTA, SIGNAL = 1.8; EXPRESSED IN LUNG, SIGNAL =   3; EXPRESSED IN FETAL LIVER, SIGNAL = 1.8; EXPRESSED IN HELA, SIGNAL = 1.9; EXPRESSED IN HEART, SIGNAL = 2.6; EXPRESSED IN BONE MARROW, SIGNAL = 2.1; EXPRESSED IN ADULT LIVER, SIGNAL = 2.6; NT HIT: AB051432.1, EVALUE 0.00e+00; EST_HUMAN HIT: BF345641.1, EVALUE 0.00e+00; SWISSPROT HIT: P74442, EVALUE 1.00e-06
cctctcccaactctcacaggtgcgtgggactcatgaactcaccaatcccgggatcgccgaggtcacgatccggccagatcgcaagatcctggccaccgcaggctgggaccaccgcatccgcgtgttccactggcggacgatgcagccactggccgtgctggccttccacagcgccgctgtccagtgcgtggccttcaccgccgatggcttgctggccgcgggctccaaggatcagcggatcagcctctggtcactctacccacgcgcatgactcacccactcccttcccgggagacgaggagggcgggcagggaggtgggcatcaggccccagccttggcctgaaacctcaagggcctctgaggaccagcaagtcatggcccaaggaccatggagtccccgctgtcttcatgaggttggtatttccttttgtggagtgcctcatcacaggacggtgactctgggggccagccagagccctggccgtccgaggcctgcaggagacgttggcttgggcctgctgtgttgccagctgagggtat

SEQ ID NO: 1787 - DNA, 595 bp, Homo sapiens
  MAP TO AC009789.19; EXPRESSED IN ADULT LIVER, SIGNAL = 1.1; EXPRESSED IN FETAL LIVER, SIGNAL = 1.1; EXPRESSED IN HELA, SIGNAL =   1; EXPRESSED IN BRAIN, SIGNAL = 1.1; EXPRESSED IN BONE MARROW, SIGNAL = 1.2; EXPRESSED IN HEART, SIGNAL = 0.65; NT HIT: AF287350.1, EVALUE 0.00e+00; EST_HUMAN HIT: BE896180.1, EVALUE 7.00e-26; SWISSPROT HIT: P14653, EVALUE 2.00e-52
tccctgggaactttgacaactgtacttgggcagaatggcaaatggaggtccagagccagccccgggaggagggaagcggaaggagaaagaggtgagagaattgacctggcctttctccctgccccgcccctagcgaaggtgtcagagccaggcctgggctcgcccagtggcctccgcaccaacttcaccacaaggcagctgacagaactggaaaaggagttccatttcaacaagtacctgagccgggcccggagggtggagattgccgccaccctggagctcaatgaaacacaggtcaagatttggttccagaaccgacgaatgaagcagaagaagcgcgagcgagagggaggtcgggtccccccagccccaccaggctgccccaaggaggcagctggagatgcctcagaccagtcgacatgcacctccccggaagcctcacccagctctgtcacctcctgaactgaacctagccaccaatggggcttccaggcactggagcgccccagtccagccctatcccaggctctccccaaccccaggcctgggcttcactggcctggggatcctctctagggctgaaatgccagtttag

SEQ ID NO: 1788 - DNA, 591 bp, Homo sapiens
  MAP TO CHR17.1; EXPRESSED IN ADULT LIVER, SIGNAL = 4.1; EXPRESSED IN FETAL LIVER, SIGNAL = 6.6; EXPRESSED IN BONE MARROW, SIGNAL = 7.7; EXPRESSED IN PLACENTA, SIGNAL =   5; EXPRESSED IN LUNG, SIGNAL = 2.9; EXPRESSED IN BRAIN, SIGNAL =   7; EXPRESSED IN HELA, SIGNAL = 4.5; EXPRESSED IN HEART, SIGNAL =   3; NT HIT: AJ277661.1, EVALUE 2.00e-03; EST_HUMAN HIT: BG323918.1, EVALUE 5.30e-02; SWISSPROT HIT: O84087, EVALUE 3.30e+00
cagccttctgagacctacggaatgagctgttttgcatagctctgtgctttgggctgtctggctcattgctatcactgctggtaaatacgtagttttatggtccagtatcctatcctgtttagctccctgtctcacttgctctcaactgttgtgtatctcattggctcccaatttctgaaatgaagattaaaaacaaaactgaaaatgccctggagcagttctgccaactcctggtttttccattcggttcctctgatagccactggtttggggagacttccttttcctgctccagcctgtgggcctgtgcacaatagccgctggcacatagcccatcagataacaaggctggctctctgcaggcacagtgtggattggaaaaagtgaaagtttctggctggaaataaaagctcagaaaacctttgctatttttccccccagaccctcctgggtctgtagtgctggcctcctgtgagctagtcccatcccacctgtaaaaccaggggagagttcagtgcagctgatgaaggaggggacaggtgtcagggggaccatggatattttatcccagggaagtctcaccccagacac

SEQ ID NO: 1789 - DNA, 537 bp, Homo sapiens
  MAP TO CHR19.1; EXPRESSED IN BONE MARROW, SIGNAL = 3.3; EXPRESSED IN ADULT LIVER, SIGNAL = 2.2; EXPRESSED IN LUNG, SIGNAL = 2.6; EXPRESSED IN FETAL LIVER, SIGNAL = 2.2; EXPRESSED IN HELA, SIGNAL = 2.6; EXPRESSED IN BRAIN, SIGNAL =   3; EXPRESSED IN HEART, SIGNAL =   3; SWISSPROT HIT: Q07092, EVALUE 5.10e-02
attcttcaccaaatgcctggcttcctcctgccccacaacctgcctggcccccctccaccaccctctcgccagctgtcatgcccaggcaggcattctggaggtccccgttgtgcccctggcacacaaagctttgaggaccagggggaccagggtggggggctttcccaagctcagcaaaatattcacacacacactccaccctgcccccagccctctgtgagctcccactgcacaatgagcccttgtctcggggctccctctgagcagctgtggcaccggggcatgagacagcccagacaggctggcacagagcgggcgacagcgtcagggcagacctcccccctctgggttgccaggcactgcctctgagcataaaggtgaggtgggggaggcgcaggcagacaggaatggcttcaattaaccaagttagggaaggggatgctcctctgggagctggagctgggtgggggatgggggacccttgggtctgtccccgctgtggagagagatggtctctgacttctctcttgggacccc

SEQ ID NO: 1790 - DNA, 564 bp, Homo sapiens
  MAP TO CHR5.1; EXPRESSED IN HEART, SIGNAL = 0.77; EXPRESSED IN BONE MARROW, SIGNAL = 0.5; EXPRESSED IN FETAL LIVER, SIGNAL = 0.44; EXPRESSED IN BRAIN, SIGNAL = 0.48; EXPRESSED IN LUNG, SIGNAL = 0.65; SWISSPROT HIT: Q9X1M6, EVALUE 7.00e+00; NT HIT: gi12018285, EVALUE 2.00e-03
aggcaacgaacaatgaaaggcaagagggatgactccagggccacaaatactaatgtgatagagatcagcattccttctagactggcacaacaagcaaatccttgaagcagtttccctggagagaagtcatctgtctccttcttttgagctttaaaattatatatctttcatgacactcatcatattctacattgtcatatagatatttgtgtcatgtgacatcttttcttctttgataaagtaaatttttttcatttcgaaaatgtcatacagtgcagggcttatcattatgttaaggatatagtaggtgcttaaagaagctctgttgcatgaatacaaatcttgctctggacagtgagtgccacatgaattcaaggcagaaaagtccatgacctgctcttttgatcatagaatgctcggaaaaagagaagcaattaggttgtattttgaagtgaagagtagatttacataaatagattcagggagggcattccataaagggaaaatggtatgagcaaatatttgaaaggagggtagcaaagatgggggaaagtgggtagaaag

SEQ ID NO: 1791 - DNA, 516 bp, Homo sapiens
  MAP TO CHR14.1; EXPRESSED IN HELA, SIGNAL = 2.6; EXPRESSED IN BRAIN, SIGNAL =   2; EXPRESSED IN HEART, SIGNAL = 1.1; EXPRESSED IN ADULT LIVER, SIGNAL = 1.8; EXPRESSED IN BONE MARROW, SIGNAL = 1.7; EXPRESSED IN FETAL LIVER, SIGNAL = 1.6; SWISSPROT HIT: P04023, EVALUE 1.60e+00; NT HIT: AJ243146.1, EVALUE 1.20e-01; EST_HUMAN HIT: BI818947.1, EVALUE 1.80e-01
taggagtgggttcttccgtgcttggggctcagactcccaccagtggggacacagctgagcggttttgtccaggagtctgactggaaagagcccttgtgctcaataatgcattccccccaaatgaggacatccatcaggtggcggaggcagccctcgccccctcctgggtcaggccaggacgacacatctgtcctaacacgaggcacaggctgcctcccagagccctgcagcttccccagcccgcaggggccttttgtgaggaagcagctcagccagccctgacaggctcagttcctctgcccgcagcctgaatattccatgggcttgaataatgcaggcccccacatcacatcacagcaaaccaattggggctgctggaaaactgcagagagaaaaagtagtgggctgctgattttttccccatctcaagactgctttgaatgagagaaggttcctgctaagccaggaagtggggctgatacctggggcaaaggaagtagggcccagtacctctcc

SEQ ID NO: 1792 - DNA, 596 bp, Homo sapiens
  MAP TO CHR4.1; EXPRESSED IN FETAL LIVER, SIGNAL = 0.92; EXPRESSED IN HELA, SIGNAL = 0.92; EXPRESSED IN LUNG, SIGNAL = 0.72; EXPRESSED IN BRAIN, SIGNAL = 1.2; EXPRESSED IN BONE MARROW, SIGNAL = 1.3; SWISSPROT HIT: P25059, EVALUE 1.00e-05; NT HIT: gi14861872, EVALUE 0.00e+00; EST_HUMAN HIT: BE064410.1, EVALUE 4.00e-80
tggatctctaggggtgttggtgagtcgtgccacttccatttccaccccttgattcctggactcctgaatcttggctatgggagaaacagtaccatatatcggccactgattcagagcatacacagccttctggagcactttgccccagccctgcaaagtattgtcacctagttaccattgtaattgtgacttcaaaagggcattccagcgttctgtcaatccagctgcttcagggtgttaaggaacatgataagaccagtaaattccatgaacgtgagcccattgccgcacttctttacccataagtgagtgccttggtcaaaggcaatgctgtgtgaaatactatgacagtggataaggcattctgtgagtccatggatggtagtcttggcagaagaattgtgtgcaggataggcaaacacatatccagagtaagtgtctattccagtaaggacaaacctctgccctttccatgatggaaaatgtccaatataattaacctgccactaagtagcttgctgatcacctcaaggaatggtgccatatcaagggtttgatgttggtctctattgctgggaaattgggcaatcagcagt

SEQ ID NO: 1793 - DNA, 583 bp, Homo sapiens
  MAP TO CHR6.1; EXPRESSED IN BRAIN, SIGNAL =   4; EXPRESSED IN HEART, SIGNAL =  10; EXPRESSED IN LUNG, SIGNAL = 1.1e+02; SWISSPROT HIT: P30482, EVALUE 1.00e-53; NT HIT: AJ309937.1, EVALUE 0.00e+00; EST_HUMAN HIT: BI012501.1, EVALUE 0.00e+00
tgggacaagaaaacccagaccccacccctcaccccttccctacctgagctcttcctcctacacatcacagcagcgaccacagctccgatgaccacaactgctaggacagccaggccagcaacaatgcccacgatggggacggtggactgggaagacggctctgggaaaggaagggaagatgaggggccctgaccctgctgaagggctcctgctttccctgagaagagatatgacccctcatccccctccttaccccatctcagggtgaggggcttcggcagcccctcatgctgtacatggcatgtgtatctctgctcttctccagaaggcaccaccacagctgcccacttctggaaggttctatctcctgctggtctggtctccacaagctcggtgtcctgagtttggtcctcgccatcccgctgccaggtcagtgtgatctccgcagggtagaagcccagggcccagcacctcagggtgacctcatggtcagagatggggtggtgggtcacatgtgtctttggggggtctgatgggaagagtcagaaaattcaggcgctttgcatctctcatgggacaccct

SEQ ID NO: 1794 - DNA, 549 bp, Homo sapiens
  MAP TO CHR7.1; EXPRESSED IN FETAL LIVER, SIGNAL = 0.49; EXPRESSED IN BRAIN, SIGNAL = 0.46; EXPRESSED IN LUNG, SIGNAL = 0.63; EXPRESSED IN HEART, SIGNAL = 0.72; EXPRESSED IN BONE MARROW, SIGNAL = 0.41; SWISSPROT HIT: Q90827, EVALUE 3.00e-04; NT HIT: gi14746296, EVALUE 1.00e-47
aaagcatgaaaagtcagcccttaaattcaacagttttgtcttggctttagctgtagttgacaaatacatttagtgatgtcttacttttttggaatctcctaccagtgtatccttcacgacagacgcacacattatttctcatgcagtggccaccattcttacagggagggtgacagaaagctaaaagaacacatggcagcaatctgtgaatattacacatcccattactacatatgatacattgcatcatgtgcttgtcatcaatgaggacataaggcagagaaatgtgctattaaaataaaagatcactcattaaacctgtcctttctaaatcatgaaatgcaatgcttatacctataagctactagtgggttagcacaatttgaaatatattggttaagtgttcataacaaattgagtctttcatattacaatgaatatattataaaccttatgtttcactatacaataaagcatggaatgatctagacaaaacccagaaaataagtcaaaacgtagctcaaaataagaatgtgcctgttcttgtgg

SEQ ID NO: 1795 - DNA, 598 bp, Homo sapiens
  MAP TO CHR7.1; EXPRESSED IN HELA, SIGNAL = 0.59; EXPRESSED IN BRAIN, SIGNAL = 1.1; EXPRESSED IN BONE MARROW, SIGNAL = 1.1; EXPRESSED IN FETAL LIVER, SIGNAL = 1.2; SWISSPROT HIT: Q62720, EVALUE 2.00e+00
tgtgctgtaaagggagggagacaaatgaggaggtagctgagaaaggaagtgaagtcaaaggaagctttttcatttgtttggtgatgggcagtgagaagagatgtaacatgttcgtgccaatattacatgaagtccatctcctagtgcaacaaagatcattatggctgaataatctgtaccaagggcaacttccaaaatgatggtccttgactgtggtgcttggggaccagttaactttaaattccttaatacaaacttttttttagttatcttttatttttctcctgcaagtttgtccataatatagtcatttactataatgacagaaaatgttaaactacattatgttgatgtaagataaacacaccaacaggacccaaattcctcaaccttggcagactgggtgaataagaaaaagaggtttcccaggcacagtcctttaatacaaagttaatctcatcctagattccaaggccccctgcaaagaacccatctcttctaggattaacaagaaaagaattattattcaataagaaagtgtcctactgtttgggactgctgactcctgtcactttgcagcaagtacgctcacctcgat

SEQ ID NO: 1796 - DNA, 509 bp, Homo sapiens
  MAP TO CHR12.1; EXPRESSED IN PLACENTA, SIGNAL = 6.8; EXPRESSED IN FETAL LIVER, SIGNAL = 7.5; EXPRESSED IN LUNG, SIGNAL = 6.1; EXPRESSED IN BRAIN, SIGNAL = 8.9; EXPRESSED IN HELA, SIGNAL = 5.1; EXPRESSED IN HEART, SIGNAL = 5.3; EXPRESSED IN BONE MARROW, SIGNAL =  11; EXPRESSED IN ADULT LIVER, SIGNAL =   8; SWISSPROT HIT: Q9Y6Q5, EVALUE 1.00e-44; NT HIT: AF020797.2, EVALUE 1.00e-78; EST_HUMAN HIT: AW363526.1, EVALUE 2.00e-78
tcaccagcaggttgacagactctatgacatcaatgaagacctcgttcttcttatacttgataccctcggagcgccaggacacagcgttggtgacagtgggtggcacccgtgacttgcccgtctccagcttgttgctctgctgagtgatgtacctggagggagggcggcagggacaagcagctggacccagggacacctccgtggacctcctccagttccttacacccacagtccagcccatggctgcctccaggggtccactcactcctgcaggatcttgctgtcggtggtctgcgggaagccaaagtccatgagctcgtccagcaactcgtagacgatgacaaagttgtcccggatgctctcctcctccagctccttgaagtattcgcagaatacctgggggttggaggagagagagacccacaaaagtgtggctatgggttgggcatagtagctcatgcctgtaaccccagcaccttgggaggccaaggcacgaggatcacttaagg

SEQ ID NO: 1797 - DNA, 570 bp, Homo sapiens
  MAP TO CHR12.1; EXPRESSED IN FETAL LIVER, SIGNAL = 0.68; EXPRESSED IN LUNG, SIGNAL = 0.76; EXPRESSED IN HELA, SIGNAL = 0.75; EXPRESSED IN BRAIN, SIGNAL = 0.85; EXPRESSED IN HEART, SIGNAL = 0.72; EXPRESSED IN ADULT LIVER, SIGNAL = 0.65; EXPRESSED IN BONE MARROW, SIGNAL = 0.97; EST_HUMAN HIT: BF892961.1, EVALUE 2.00e-84; NT HIT: gi5032222, EVALUE 1.00e-111; SWISSPROT HIT: P51805, EVALUE 1.00e-09
acatcccgaaactttggaagactcacatcttgttaccactctagtttaaatgctgaaaacacagaaaatgttctagagatagaagtggttagaatctaaacattaaaaaaaaaaaaaaaaaagctcccaacccaacaggccagctccctgccctgccagtgagcttccatggaaactcccatgggtgtccagctaggcctgcagccaatggttcacccagctctctttttcaacaggtgtctgtttgcctccttcctaaccattgcactgcaaaccaagctggtctacctgaccagcatcctagaggtgctgaccagggacttgatggaacagtgtagtaacatgcagccgaaactcatgctgagacgcacggagtccgtcgtcgaaaaactcctcacaaactggatgtccgtctgcctttctggatttctccgggtaagtgtcacatccctcagcaatgtcagaggtaagacaataggcagttatttttagcggactctgatgcctttgccaggataaatcctgaatgctcgatggtgtcagcacttaaccatgtttcgtcttggtcct

SEQ ID NO: 1798 - DNA, 596 bp, Homo sapiens
  MAP TO CHR19.1; EXPRESSED IN PLACENTA, SIGNAL =   4; EXPRESSED IN FETAL LIVER, SIGNAL = 3.5; EXPRESSED IN BRAIN, SIGNAL = 3.9; EXPRESSED IN HEART, SIGNAL = 3.6; EXPRESSED IN BONE MARROW, SIGNAL = 4.5; EXPRESSED IN ADULT LIVER, SIGNAL = 3.7; EXPRESSED IN LUNG, SIGNAL = 3.5; EXPRESSED IN HELA, SIGNAL = 4.4; SWISSPROT HIT: P51871, EVALUE 6.00e-15; EST_HUMAN HIT: BG741060.1, EVALUE 6.00e-42; NT HIT: AB002457.1, EVALUE 1.00e-48
gcagagctggaacttgaacccaggtcacccgaaccccagccttgggccttcatgtcctaatagtaacagcttctgtccctcacaagcttggtcctccttggggatgggtacccgggaaagacgactaggagttggttctgggggagtccatcctggaggttggggacgggaagggactcaggggagccagggctcagttcctgctctgtccccttctctggccaggccaaatggcaacgcctggccttggagggcagtgtccgtctggaaatgtttgagcacatcagcctcatgaccttggacagtctgcagaaatgcatcttcagctttgacagcaattgtcaggagtgagttcttccccaggacctgggatcttggccatggacccacaggagtaggttatggagagaggactgatcagggcatctgaagtgtcttcttggaaaaaatgagtcagaattgagcatggaagtacagggaaggggagagagaaagatcagttctccaggtaggtagaagtgtttgggtaatggcaaggaggctaggatgagcagagcacgtgcaatggccatcaaggggacaccttggaaatgaga

SEQ ID NO: 1799 - DNA, 537 bp, Homo sapiens
  MAP TO CHR19.1; EXPRESSED IN LUNG, SIGNAL = 0.57; EXPRESSED IN BRAIN, SIGNAL = 0.63; EXPRESSED IN ADULT LIVER, SIGNAL =   1; EXPRESSED IN HEART, SIGNAL = 0.67; SWISSPROT HIT: P37198, EVALUE 2.00e-31; EST_HUMAN HIT: AU130320.1, EVALUE 0.00e+00; NT HIT: gi14786927, EVALUE 0.00e+00
tgctttgggagccagagtagctgccgccaccagagtccggagccatgagcgggtttaattttggaggcactggggcccctacaggcgggttcacgtttggcactgcaaagacggcaacaaccacacctgctacagggttttctttctccacctctggcactggagggtttaattttggggctcccttccaaccagccacaagtaccccttccaccggcctgttctcacttgccacccagactccggccacacagacgacaggcttcacttttggaacagcgactcttgcttcggggggaactggattttctttggggatcggtgcttcaaagctcaacttgagcaacacagctgccaccccagccatggcaaaccccagcggctttgggctgggcagcagcaacctcactaatgccatatcgagcaccgtcacctccagccagggcacagcacccaccggctttgtgtttggcccctccaccacctctgtggctccagctaccacatctggaggcttctcattcactggtggaagca

SEQ ID NO: 1800 - DNA, 562 bp, Homo sapiens
  MAP TO CHR17.1; EXPRESSED IN BONE MARROW, SIGNAL = 0.95; EXPRESSED IN HEART, SIGNAL =   1; EXPRESSED IN ADULT LIVER, SIGNAL = 0.79; EXPRESSED IN FETAL LIVER, SIGNAL = 0.8; EXPRESSED IN LUNG, SIGNAL = 1.2; EXPRESSED IN BRAIN, SIGNAL = 0.94; SWISSPROT HIT: O75616, EVALUE 2.00e-48; NT HIT: AB049388.1, EVALUE 0.00e+00; EST_HUMAN HIT: BE206995.1, EVALUE 0.00e+00
tgagcgtctctggttgtgaccagatcgtttccttctcccactcaaactgttatttctctcctgagagatttttcactgctcctccctgtcagggcctcaaaattgttttctataaaatagaatcaaagacagtatccccagaaacctttcaatactaaaaacatgacagttccgagcaaacctatcagggcgctttacctctgttcatggacaccgcggggacgcaaggagtcaccgaactgtcgggctgagagaatccgaggaagtggtccagggcagagccctggccattactgcgagaagccgaggccaagcggggaccagagaaagcggaccccgcgacgcaggacacgcacctccgttggaagcctaagagtgaggaaaaagggatcacccgctccctcgcgacatgagggcccacctgccagactcttaacaccgattgaacaagcctagccccgcgccagctgggggcagccattacagccgcaaggcactgcgggaaccgaccaggagcgctcctacgattgaacagagcggctgacgaaccagcgagtaggag

SEQ ID NO: 1801 - DNA, 559 bp, Homo sapiens
  MAP TO CHR7.1; EXPRESSED IN ADULT LIVER, SIGNAL = 1.6; EXPRESSED IN FETAL LIVER, SIGNAL =   1; EXPRESSED IN LUNG, SIGNAL = 1.4; EXPRESSED IN HELA, SIGNAL = 0.61; EXPRESSED IN BRAIN, SIGNAL = 0.62; EXPRESSED IN HEART, SIGNAL = 1.2; EXPRESSED IN BONE MARROW, SIGNAL = 0.56; SWISSPROT HIT: Q15166, EVALUE 7.00e-34; NT HIT: AF320003.1, EVALUE 1.00e-112; EST_HUMAN HIT: BF059348.1, EVALUE 1.00e-112
tactttcataaggggcaggggtattgctcatttatcttcctttgtagtgtgttaggaaagtgtgtttcaagagttatgtaaaaatttggaatgaggtccttatatccttaagtccacatccctcctttaactgggaagaacctaaagtccaaggaaacaaatggattgcttaggatgacagatttagtgtgaaccctggccacaactgatccctccacacatatattcactacgtaagcctaagtaaggaagtaacttcctcgtaaggaaaggagtccacgaaaatgtcaagggcaaaggatagaaaaatacacaaaagagcttacttctggtctgctgagactgtgatcccattggcactacaaaatcctttggccaccactttaacctcccttgggctgtagaaaagaacataagtccagcgaagatccaagatcatctcaaaaaatgacaggagggagttggtaaaatagtggtctctggtggcatagaactgttctggtccaagaaccacaatgtcattcacactaaagtgaaagggaggtggaaaaagagaccc

SEQ ID NO: 1802 - DNA, 511 bp, Homo sapiens
  MAP TO CHR19.1; EXPRESSED IN ADULT LIVER, SIGNAL = 3.1; EXPRESSED IN PLACENTA, SIGNAL = 3.6; EXPRESSED IN FETAL LIVER, SIGNAL = 2.3; EXPRESSED IN HELA, SIGNAL = 3.7; EXPRESSED IN BRAIN, SIGNAL = 2.6; EXPRESSED IN BONE MARROW, SIGNAL = 2.5; EXPRESSED IN HEART, SIGNAL = 1.2; SWISSPROT HIT: P14056, EVALUE 5.50e-01; NT HIT: U47274.1, EVALUE 4.90e-01
tgctggatatggaagcaatgatactttctcccttccagctctgcactccttataccccactgggatagaaatcctgtctgttggtgtcaggcaggggtctccggctacccctcctctgctggggtggaagatggagaggtcaaaggagcaagcctccttcctggcccttgcaagggcctccagcctggcagccggagggattaaggacaagaggcccctggcgtccgtgagtctggcgtggctgcccaggagcctcccaggggagtcagcgtgggccagagggctggaggctcccagatcaatcagaggtctgaaggtcactggagctgtgaccttcaaattaggatacttgtaacccaggaggctggcacacccccacgggggatggggcgcatggttgaagagaatccatctcccagagaggtgccctagggcccccctttcaccatgaccctgctaacactttacagatgaaaagcatacctctctctcaccccctaatcttatcgca

SEQ ID NO: 1803 - DNA, 522 bp, Homo sapiens
  MAP TO CHR18.1; EXPRESSED IN FETAL LIVER, SIGNAL = 8.9; EXPRESSED IN LUNG, SIGNAL = 4.1; EXPRESSED IN HELA, SIGNAL =  10; EXPRESSED IN BRAIN, SIGNAL = 7.2; EXPRESSED IN BONE MARROW, SIGNAL = 7.3; EXPRESSED IN HEART, SIGNAL = 4.7; EXPRESSED IN PLACENTA, SIGNAL = 9.5; SWISSPROT HIT: P52539, EVALUE 3.20e-01
gtcaagctcttcaggccaagaccccaaggttcccccagcagccctcagacgcccgtccaaacagtctctctctggtctccaagagttcccgtgcataccacatgcatattctatttatatgtttctttgtcctgaacaagatttggccccattgtgtgggagcaacaccagaaaagaaaaacaaaatccatccaccgagagaaaatggagattgtgagagcttggagaaatttacatactttgctcattccattttcctgtgatgtcagagtcaaagaatatgccttttttaaaaaaatcacacacacacacacacacacacacacatttcaaaatgctgggactcacagctctgtcaagtgtattgtcattaaaaggagaaatgtaaacactcttttgcctttccctccacccccttctattccccccatcagcccctaaaaaaaactaacaaattagcccagactccactggacagaattaagggcccgtctgcaaaaggccgtggggtattaatggaga

SEQ ID NO: 1804 - DNA, 506 bp, Homo sapiens
  MAP TO CHR19.1; EXPRESSED IN HEART, SIGNAL = 3.3; EXPRESSED IN BONE MARROW, SIGNAL = 4.4; EXPRESSED IN PLACENTA, SIGNAL = 6.6; EXPRESSED IN FETAL LIVER, SIGNAL = 5.3; EXPRESSED IN HELA, SIGNAL = 6.6; EXPRESSED IN BRAIN, SIGNAL =   6; EXPRESSED IN LUNG, SIGNAL = 3.2; SWISSPROT HIT: P37047, EVALUE 1.60e+00; EST_HUMAN HIT: BI256244.1, EVALUE 1.00e-106; NT HIT: gi14766891, EVALUE 2.00e-83
aaagaatagggatggggtgggtgactttgggcaaggcattccctcctgcctcctggcatttctactgccaccaaagggcatgaccatgtggagtggagatgaaccgacctgctgagcccagcccagtctgtccacccacagagctggagcacataaaatgtctgcttcatgtcactaagcttggggaagtttgtggcacagcaggtgaaaactgccacaccagtttaggggagccagggaagctcaggtcctgctcccacccgccccactggcagggagcagagaggaaggatacatggagaaggtcaccgtgagcaggcaccagaacacagcaatgttagtctccttggctggtcccagcatgtagtagtaggcctctgtgaagaggtacacgccgcccgagtacacagcaaagtccacaaaccactggtactccaggaagaagcgcaggactgtggggggcactctgctcagccctggggcccagctcgctcccctcctaatag

SEQ ID NO: 1805 - DNA, 505 bp, Homo sapiens
  MAP TO CHR5.1; EXPRESSED IN FETAL LIVER, SIGNAL = 0.36; EXPRESSED IN HELA, SIGNAL = 0.4; EXPRESSED IN BRAIN, SIGNAL = 0.46; EST_HUMAN HIT: BI088399.1, EVALUE 1.80e-01; SWISSPROT HIT: P09853, EVALUE 2.70e-02; NT HIT: U33931.1, EVALUE 1.20e-01
acaggtggaggctgtgtaggtcttggggatggagtgcagagccaggttgggacaggaggccagggctctccagctgggcccgctcggtggctttttcctgagctctctgctcaggtgagcaggggacatctggttgcactgcttggctggccaagaaccctgagctgccttctgtggtgacaaaaccaggcgatgtcatcagggccaccagcggaaatacaaccgaggtcatgggcagattaaatctgacacttgtgatgccatggaaagggtggcggaggagcttgtcacagtgactgaggcccaggttcttgcctgtggcgggtaccccagaaaattccactaggcctgtgggggtgagtgatgggaagaaggaggcatgtacctctagttggactggaccctgagggccaggacttccaacaatgtggcccactccatagggatggggtcaggcccacagggatccattagacaggggtccagagacccctcctgaaacctc

SEQ ID NO: 1806 - DNA, 598 bp, Homo sapiens
  MAP TO CHR9.1; EXPRESSED IN FETAL LIVER, SIGNAL =   5; EXPRESSED IN LUNG, SIGNAL = 3.5; EXPRESSED IN HELA, SIGNAL = 7.7; EXPRESSED IN BRAIN, SIGNAL = 4.1; EXPRESSED IN HEART, SIGNAL = 3.1; EXPRESSED IN ADULT LIVER, SIGNAL = 4.1; EXPRESSED IN BONE MARROW, SIGNAL = 5.1; EXPRESSED IN PLACENTA, SIGNAL =   6; EST_HUMAN HIT: BE257019.1, EVALUE 0.00e+00; SWISSPROT HIT: O22212, EVALUE 6.00e-11; NT HIT: gi12734815, EVALUE 0.00e+00
tctacacagttcgtggcagggcgtaaaaaggtaataaattttcaaccgtgagaggggttccccatcacctagggattgggctgccttcctggagtgggggctgacatggaaatccaattctactgagggtctatgcatggtaattggcagaaaacatgatagaactaaacacttcaattcttctcgtttgaggaaaacagctccttagagagagcttgaggttcaagtccttttcccattgtcatctattcagccatccacagcttgaaggtcctgtcatatgagcaagtggctatgagctgcccatcggaagaaatatctaggcccatcactttgccttcgtggccagccagagtcttcagcggggaccagcctgggtgcgtccagatcttggctgtgttatcataggcaccagtaagcaagaagttcccatggatagctacaggagaagagaaggggaattgcttgaggaattcaagtattcaaaagagaagacaaaagcacaaaagtctgcaaaaacatactatttttaaaaaaacttgtttctacagacttaagggaacaaataacagtaaggtcttttggctcattccctgac

SEQ ID NO: 1807 - DNA, 547 bp, Homo sapiens
  MAP TO AC007873.4; EXPRESSED IN BRAIN, SIGNAL = 0.41; EXPRESSED IN HEART, SIGNAL = 0.56; EXPRESSED IN FETAL LIVER, SIGNAL = 0.54; EST_HUMAN HIT: AL121348.1, EVALUE 1.00e-105; SWISSPROT HIT: P27694, EVALUE 6.00e-33; NT HIT: gi4506582, EVALUE 1.00e-105
  unsure 154
  unsure 397
  unsure 504
ggcgtcttcatagctcttgcagatcccgatgatgtctaaaacacatgcacgtgttagcaggaggtggtcaagactcccattccgacgccagcaaatgatgaacggcaagcactgaagcctgacaccaccccgtacactgcaaagaaagctagtncatccctgctcttccttctcatacacgagcttacctacaagtgagtctttcgacttgttctcgaggtcatcaatccccgtgaaatcaaactgaaccgtaggtaaatgatggtcgtcctcacagggcatgacggaagtctcgttattgaaggtcatctcgtagtcatttttaacagctgtgaactgcttgttagcaatcttcagggtgcctttcgagaaataatacacctgcgaaggaggccanagccacagaacctgagactaccatcaaatcggacagaaacccctagtctgccaccacacacccctcccctgggccagcgtcttttcatccgcactccacccccaggncggtgtcagttctaaagtcagcacggccataccttgttcactt

SEQ ID NO: 1808 - DNA, 510 bp, Homo sapiens
  MAP TO CHR7.1; EXPRESSED IN FETAL LIVER, SIGNAL = 2.8; EXPRESSED IN LUNG, SIGNAL = 1.1; EXPRESSED IN HELA, SIGNAL = 1.8; EXPRESSED IN BRAIN, SIGNAL = 2.7; EXPRESSED IN BONE MARROW, SIGNAL =   3; EXPRESSED IN HEART, SIGNAL =   1; EXPRESSED IN ADULT LIVER, SIGNAL = 1.6; EST_HUMAN HIT: BF247882.1, EVALUE 1.80e-01; NT HIT: Z28304.1, EVALUE 4.80e-01
gaaggaaaatgctgtgctccataacataggtactagtcataatatgtaataaaatacaaactgccaataaataaaaccacagaaaagtgttcctctgtatatttctactacccataaataacctaccaaagctgaaatgtaaaaattaacagaaggaaagcaggtcatttaagaaattggataaaataacttgctctcttaagacatgcattcatttgtccacaccctgttgatatttctttggttccaatgggatcctggaggaggtacacacagtgaaagaggaaatgagactctagccctaagagtgccaatcataactgcactgtccataaagatgtttgcatttgcctttcaggaatgtttttgtaaagattagcaactgttaaccggcagtaggctagattctcctcagggaaacaagaatctgtacaaggaattcactgggaacactgttagaacaaatcatttgtcattcaaaaaaaatgcaagaaagggacctaaaaagca

SEQ ID NO: 1809 - DNA, 564 bp, Homo sapiens
  MAP TO CHR4.1; EXPRESSED IN ADULT LIVER, SIGNAL = 0.5; EXPRESSED IN FETAL LIVER, SIGNAL = 0.92; EXPRESSED IN LUNG, SIGNAL = 4.6; EXPRESSED IN HELA, SIGNAL = 0.74; EXPRESSED IN BRAIN, SIGNAL =   1; EXPRESSED IN HEART, SIGNAL = 2.2; EXPRESSED IN BONE MARROW, SIGNAL = 1.2; NT HIT: gi16171180, EVALUE 1.00e-115; SWISSPROT HIT: P32969, EVALUE 6.00e-46; EST_HUMAN HIT: BG481824.1, EVALUE 1.00e-121
aaagcagaggctccagattgacaaatgctgagaagatgggaattggctgccatgcgtgctatctgtagtcatgcacagaagatgatcaagggcgttatactgggcttctgtgacaagatgaggtctctgtgttctcacttccccatcaatgtcattatgcaggagaatagctctattgtagaagtcagaactttcttgagcgaaaaatatatctgcagggttcgggtgagcccaggtgttgcttgttcaatatcccaagcccagaaagatgagttcatccttaaaggaaatgacattgaacttgtttcaaattcagctgctttgactcagcaaaccacaacagctaaaaaccaggatatcagaacattttggatggtatctatgtctctgaaaaagggacagttcagcaggctgatgagtaaaatctaagagttgtacagctacagaaacaagatgtcagataattcctaagacctatttgtgatattttaataatgcaataaaagacagctattgaaaaataaagtagtgatgaggtttcaagacatgaatgatgggatttgc

SEQ ID NO: 1810 - DNA, 591 bp, Homo sapiens
  MAP TO CHR17.1; EXPRESSED IN ADULT LIVER, SIGNAL = 1.5; EXPRESSED IN FETAL LIVER, SIGNAL = 2.3; EXPRESSED IN LUNG, SIGNAL = 1.9; EXPRESSED IN BONE MARROW, SIGNAL = 2.1; EXPRESSED IN PLACENTA, SIGNAL = 1.7; EXPRESSED IN BRAIN, SIGNAL = 2.3; EXPRESSED IN HELA, SIGNAL = 2.5; EXPRESSED IN HEART, SIGNAL = 2.1; EST_HUMAN HIT: AW771930.1, EVALUE 3.00e-53; NT HIT: L04225.1, EVALUE 0.00e+00; SWISSPROT HIT: P35499, EVALUE 5.00e-59
tgaggactcagatggtgtggggggctggagattcaagctactcgacactgttctttctcctaaggctggggctgccttgggtggtggtccctgggcctcattcacccttgccctccctgcttggcagctgcgggtcttcaagctggccaagtcgtggccaacgctgaacatgctcatcaagatcattggcaattcagtgggggcgctgggtaacctgacgctggtgctggctatcatcgtgttcatcttcgccgtggtgggcatgcagctgtttggcaagagctacaaggagtgcgtgtgcaagattgccttggactgcaacctgccgcgctggcacatgcatgatttcttccactccttcctcatcgtcttccgcatcctgtgcggggagtggatcgagaccatgtgggactgcatggaggtggccggccaagccatgtgcctcaccgtcttcctcatggtcatggtcatcggcaatcttgtggtgagtgaggctggctgggtggcccctgccctcacccgggaagcgtacaagatgtacctgatatttgactgttttctatctccccaacacatcctctccaaaatggc

SEQ ID NO: 1811 - DNA, 569 bp, Homo sapiens
  MAP TO CHRX.1; EXPRESSED IN HELA, SIGNAL =   1; EXPRESSED IN BRAIN, SIGNAL = 0.84; EXPRESSED IN FETAL LIVER, SIGNAL = 0.67; EXPRESSED IN LUNG, SIGNAL = 0.94; EXPRESSED IN PLACENTA, SIGNAL = 1.3; EST_HUMAN HIT: BG911281.1, EVALUE 0.00e+00; NT HIT: L44140.1, EVALUE 0.00e+00; SWISSPROT HIT: P51805, EVALUE 9.00e-57
ctggactaccggacttacgccgtgcgcgtgctcttcccgggcatcgaggcccacccggtgctcaaggagctggatgtgagcctctgcctggcctgccccccaccattcccttcagggccgcccccaccctctgagacctcctgctccccacagacgccacccaacgtggagaaggccctgcgcctcttcgggcagctgctgcacagccgcgcgttcgtgcttaccttcatccacacgctggaggcccagagcagcttctccatgcgcgaccgcggcaccgtggcctcgctcaccatggtggccctgcagagccggctcgactatgccacggggctgctcaagcaactgctggccgacctcatcgagaagaacctcgagagcaagaaccaccccaagctgctgctacgcaggtacctgcctcgctctatccaggccacacctttgtcctgcctgggcctgccccctgtccaagccccacccctgccaggcccgagcccccttctcttgccctaggacagagtcagtggctgagaagatgcttaccaactggttcacgttcctgctgcata

SEQ ID NO: 1812 - DNA, 564 bp, Homo sapiens
  MAP TO CHR2.1; EXPRESSED IN HELA, SIGNAL = 2.8; EXPRESSED IN BRAIN, SIGNAL = 2.6; EXPRESSED IN HEART, SIGNAL = 1.8; EXPRESSED IN ADULT LIVER, SIGNAL = 2.3; EXPRESSED IN BONE MARROW, SIGNAL = 2.7; EXPRESSED IN LUNG, SIGNAL = 1.9; EXPRESSED IN PLACENTA, SIGNAL = 2.1; EXPRESSED IN FETAL LIVER, SIGNAL = 2.7; SWISSPROT HIT: Q91289, EVALUE 2.10e-01; EST_HUMAN HIT: BE882304.1, EVALUE 9.00e-87; NT HIT: AF084363.1, EVALUE 8.00e-31
ttctactgcagcgcttctcccaccatctgcacatttggcctccacatgctgagtagcctgtctttgcttcctcatgccatagctgtaactgctacttcggaactgactcttgcctgcctgacacttaagagataccatctatctctggagttcctagccacagaaccactaagaatagcatttgcatggattggggaggttcccttggaccatacttgatcacttggagcttgtaatgagaggccgatgactgggaagccatctggtagagtgtgatgaagtctcctttagggtcatccattctcaaggagccgtcagctgtgccagcgagtagggatgggcagagcagtcgctcttggagatcacatttcagacacactacaataaaaggagattacatttcagacacactacaattggaggaaggattgtgggtaataagttaccttaggctatgccattaagagacaacatctgctacccattccatctctaccaggcaagcaagggataggaggaggcaggagagtggaaagaggaaagcctgactggtttggaaaggga

SEQ ID NO: 1813 - DNA, 552 bp, Homo sapiens
  MAP TO CHR3.1; EXPRESSED IN PLACENTA, SIGNAL = 4.5; EXPRESSED IN FETAL LIVER, SIGNAL = 4.1; EXPRESSED IN LUNG, SIGNAL =   3; EXPRESSED IN BRAIN, SIGNAL = 5.1; EXPRESSED IN HEART, SIGNAL = 3.5; EXPRESSED IN ADULT LIVER, SIGNAL = 6.1; EXPRESSED IN BONE MARROW, SIGNAL = 5.9; SWISSPROT HIT: P54317, EVALUE 9.00e-06; EST_HUMAN HIT: W37913.1, EVALUE 3.00e-65; NT HIT: gi16158400, EVALUE 2.00e-53
tgggagggtctatgatctgcactggaagggtgggtgtgtggtgggtccatgaatgttcctgcagctgagaggaaagaggtccctcatatcagtctcttctcacaggcctggaccccgctggacctgagtacaccagggccagtgtggaagagcgcttggatgctggagatgccctcttcgtggaagccatccacacagacaccgacagtgagctggggtgaccttcctgggatgagggaatgagctcaaggcagcgcctaggaggctggcatctagctctgtggccctgggcagagatgccctgaccctctctgagcttctgttgcacagtgaagagtttaccaaaatgctattgaaagtctcttccagctctgtctctgaccactgaggtgaatggttgtatttttagctactgtaggcaagaggattctcatttatagaccaaaagtatttggttatgagcctcactttctgattcaaatgaatgcagtaataacagtgtgctgagcagtactgggtagggcattgctgcctggctgacttacgggaaag

SEQ ID NO: 1814 - DNA, 587 bp, Homo sapiens
  MAP TO CHR5.1; EXPRESSED IN PLACENTA, SIGNAL = 1.2; EXPRESSED IN FETAL LIVER, SIGNAL =   3; EXPRESSED IN BRAIN, SIGNAL = 0.87; EXPRESSED IN LUNG, SIGNAL =   1; EXPRESSED IN ADULT LIVER, SIGNAL = 2.2; EXPRESSED IN HEART, SIGNAL = 1.6; SWISSPROT HIT: Q13123, EVALUE 9.00e-11; EST_HUMAN HIT: AA280826.1, EVALUE 0.00e+00; NT HIT: gi14728189, EVALUE 6.00e-84
aggggacatgctcaacaaagaaaatagcaagttaaccaattttaatggaaccaagtaattacacaataaaattttatattcatccacaaaaaaacatcttgcaacctttggaaattgtagaaagaaaaccgtggggagcatatccttgtggagcatctctggttgtaactagtgattagtattttggtcttttgacttcaaccctgcaatggaaggagaaatgggtcagtataagatcaatacactaagcaattcccaccagtcccacagaggaagaataatgccgctcacccatcagcttccatcttcttcctcttctcaatgatctgcaaaaacaacaggatagtctatcaccaagctgcccatctaagctcacctgaggcccaaggctgacctctcatttccatggctctccagccccttgcctgttcctgaatctgcaggctaatgtcttctcccagctgaaaccctcccacccaaggggccatcctacttactgcactaatcttcttccactggcgatcaagctctgctttgtcattggtttccttgaagcgcctggttttccgcccttcagacattttgat

SEQ ID NO: 1815 - DNA, 535 bp, Homo sapiens
  MAP TO CHR19.1; EXPRESSED IN PLACENTA, SIGNAL = 3.9; EXPRESSED IN LUNG, SIGNAL = 4.1; EXPRESSED IN HELA, SIGNAL = 6.4; EXPRESSED IN BRAIN, SIGNAL = 3.4; EXPRESSED IN HEART, SIGNAL = 2.5; EXPRESSED IN ADULT LIVER, SIGNAL = 2.3; SWISSPROT HIT: Q00839, EVALUE 5.00e-09; EST_HUMAN HIT: BE793494.1, EVALUE 0.00e+00; NT HIT: gi14786851, EVALUE 0.00e+00
tgttctctttggggcacttccttcctcctagccaacttcacgttgccagatgttggggacttcctggatgaggttctgttcattgagctgcagcgggaggaagcggacaagctagtgaggcagtacaacgaggaaggccgcaaggctgggccaccccctgaaaagcgctttgacaaccgaggtggtggtggcttccggggccgcgggggtggtggtggcttccagcgctatgaaaaccgaggaccccctggaggcaaccgtggcggcttccagaaccgagggggaggcagcggtggaggaggcaactaccgaggaggtgagacatctcacacacagcactctccactttctgttcccaggttggggctgggctttgactgcttattcaatcagcaactgaagttttctgagctccagctgtgagttatactctggtagaaaacttgaaacaagtcagacacggagacctcagaaacgctcccactttcccactccctggacgctggttatgaagccctttgcccatttgcatatc

SEQ ID NO: 1816 - DNA, 548 bp, Homo sapiens
  MAP TO CHR5.1; EXPRESSED IN PLACENTA, SIGNAL = 1.2; EXPRESSED IN FETAL LIVER, SIGNAL = 0.86; EXPRESSED IN LUNG, SIGNAL = 1.5; EXPRESSED IN HELA, SIGNAL = 1.1; EXPRESSED IN BRAIN, SIGNAL = 1.1; EXPRESSED IN HEART, SIGNAL = 1.7; SWISSPROT HIT: Q9Y5E5, EVALUE 9.00e-08; EST_HUMAN HIT: AL119917.1, EVALUE 2.00e-75; NT HIT: gi14861871, EVALUE 0.00e+00
agagatgccctcaagcagagcctcgtggtggccgtccaggaccacggtcagcctcctctgtcagccaccgtcacactcaccgtggctgtggctgacagcatccccgaagtcttggccgacctgggcagccttgagccctccgacggtccttacaactatgacctcacgttgtacctggtggtggcggtggccacagtctcctgcgtcttcctagccttcgtcctcgtactgctggcgctcaggctgcggcgctggcacaagtcacgcctgctgcaggcttcagaaggtggcttggcgaacgtgcccacctcgcactttgtgggcatggacggggtgcaggctttcctgcagacctattcccatgaggtctccctcaccgcggactctcggaagagtcacctgatcttcccccagcccaactatgtagacatgctcatcagccaggagagctgtgagaaaaatgattctttgctaacatccgtagattttcaggaatgtaaagaaaacctgccaagtattcaggtgagcccagcccttcctttatttcc

SEQ ID NO: 1817 - DNA, 505 bp, Homo sapiens
  MAP TO CHR14.1; EXPRESSED IN LUNG, SIGNAL = 1.3; EXPRESSED IN BRAIN, SIGNAL = 0.93; EXPRESSED IN HEART, SIGNAL = 1.1; NT HIT: M99703.1, EVALUE 0.00e+00; SWISSPROT HIT: P27695, EVALUE 9.00e-40; EST_HUMAN HIT: BG575322.1, EVALUE 1.00e-104
ttgtgctgcttgactcgaactccttaggccaagagactgtttaacccgtgcgtatctatgacttagcatatagattattcaataaatgttctgctgaattgataatacgttttccacctttcttttcacttacagtgggtaaaggaagaagccccagatatactgtgccttcaagagaccaaatgttcagagaacaaactaccagctgaacttcaggagctgcctggactctctcatcaatactggtcagctccttcggacaaggaagggtacagtggcgtgggcctgctttcccgccagtgcccactcaaagtttcttacggcataggtgagaccctattgatgcctaatgcctgaactcttcaaaaccaattgctaattctctatctctgccccacctcttgattgctttcccttttcttatagttttttatgctaattctgtttcatttctataggcgatgaggagcatgatcaggaaggccgggtgattgtggctgaattt

SEQ ID NO: 1818 - DNA, 590 bp, Homo sapiens
  MAP TO CHRX.1; EXPRESSED IN FETAL LIVER, SIGNAL = 6.1; EXPRESSED IN LUNG, SIGNAL = 8.7; EXPRESSED IN HELA, SIGNAL = 3.9; EXPRESSED IN BRAIN, SIGNAL = 6.3; EXPRESSED IN HEART, SIGNAL = 7.8; EXPRESSED IN ADULT LIVER, SIGNAL = 4.1; EXPRESSED IN BONE MARROW, SIGNAL = 8.4; EXPRESSED IN PLACENTA, SIGNAL = 4.3; EST_HUMAN HIT: BF926192.1, EVALUE 4.00e-18; NT HIT: AF245699.1, EVALUE 1.00e-08; SWISSPROT HIT: P11369, EVALUE 1.00e-14
cccgcctcatatagttggtgtgagaatgaaattacttagtaaatgtaaggtgtctagaacaatgcatctggcatatattaactgctacctcagtgttgacaaatttctccttctattcttagttggttgagtatttttgtcgtgaaaggatgttggacattgtcaaatgcttcttctgtgtttattgacatgattgtgtgaattttgtcctttattctatgaatatggtatgtagtacattaattgattttcatgcaagttgatacgttcataagtttgtttatgatgtgtctaggtgtagacatttgcattcctaggctaaatctcacttggccttggtataaatcctttttgtatgttgtaggatttagtttgtgattattttgttaaggattattgtatctatattcgtaagagacattgctctgtagttttcttatgatgtctttttctggttttggtatcaggataatactggcctcatagaataagttggacagtgttccttcttctatttttgggaagattttgtgaagattggcattaattttttttctttttttgagacagggtcttgctgtgttgctcag

SEQ ID NO: 1819 - DNA, 558 bp, Homo sapiens
  MAP TO CHR4.1; EXPRESSED IN PLACENTA, SIGNAL =  26; EXPRESSED IN FETAL LIVER, SIGNAL =  35; EXPRESSED IN LUNG, SIGNAL =  36; EXPRESSED IN BRAIN, SIGNAL =  33; EXPRESSED IN HELA, SIGNAL =  16; EXPRESSED IN HEART, SIGNAL =  35; EXPRESSED IN BONE MARROW, SIGNAL =  40; EST_HUMAN HIT: AI394695.1, EVALUE 1.00e-111; NT HIT: gi7710114, EVALUE 2.00e-80; SWISSPROT HIT: P35611, EVALUE 1.00e-23
acggggtctcactatgttgcccaggctggtctccaactcctgggctcagcaatcctcccgcctcagcatcccgaagtagtgtgattacaggcatgagccaccatgcccggccaattgttaaatctaataggcattttcagacttattacatgtttttccaaattaaatgggatatatggaccccttaaaaggaaaaaaaattattttaagaaagtcaaacttagtggtacacctttttttttatattcaacaaaattagttttactgactataaacaacaagggcaattcagaggaaacgtgcagtgcctttcactcagcagctttagaccttgagatgctaccagggcagccactcaccgcagcccctgctggggtgtgaatgtgcacgacgcacttcacgtccgggcgtgcagcataaattgcagagtgtaaggtgaagccggcctgattcactcccagattagtgcttccacgatctactatatctccttgtagattgatcttaacctgaaaataaaaaaataaaaatgtaaaataccaagaggacttcattttt

SEQ ID NO: 1820 - DNA, 593 bp, Homo sapiens
  MAP TO CHR5.1; EXPRESSED IN HEART, SIGNAL =  22; EXPRESSED IN ADULT LIVER, SIGNAL =  23; EXPRESSED IN PLACENTA, SIGNAL =  24; EXPRESSED IN FETAL LIVER, SIGNAL =  30; EXPRESSED IN LUNG, SIGNAL =  21; EXPRESSED IN BRAIN, SIGNAL =  31; SWISSPROT HIT: P39188, EVALUE 7.00e-03; EST_HUMAN HIT: BG481818.1, EVALUE 1.00e-82; NT HIT: gi13386461, EVALUE 1.00e-82
tttggggataatctcatgtaactgtaaagagatctagacttttaaagatatgaaaaagataaaacaaaaaataaagtacctgctgcttctagcaatgcttctagtcgtgcctgtgtctctggatccacagtgcgtaagtctgctccttctgcagtacttgataagaatatctctgatgttgttttaagcactgggttatccagatcttcttggtccaaaataaatgattcaacctgttaatgaaataaagatgcaatatccatgaaactgatatcaatatgattagaataactacaatttaaggtaatatgacttcttaattagaacttaaatataagcagaaaaattattatagaaacaagggagtatgggaatggactttgaaggacattgtgactgtttaccttcagacatgactacaggtataacacacatacactgaagtttcctcaagagcattgtatattctgtgactaatacagagcatgaaaagcaatattaaggccagtcacagtggcccacgcctgtgatcctagcagtttgggagggccagacaggcagatcgcttgagctcaggagtttgacaccagcct

SEQ ID NO: 1821 - DNA, 561 bp, Homo sapiens
  MAP TO CHR19.1; EXPRESSED IN BRAIN, SIGNAL = 1.1; EXPRESSED IN LUNG, SIGNAL = 2.1; EXPRESSED IN BONE MARROW, SIGNAL = 1.6; EXPRESSED IN HEART, SIGNAL = 1.6; EXPRESSED IN ADULT LIVER, SIGNAL = 3.2; EXPRESSED IN PLACENTA, SIGNAL = 2.7; SWISSPROT HIT: Q02435, EVALUE 4.70e-01; EST_HUMAN HIT: BG697757.1, EVALUE 0.00e+00; NT HIT: gi14765970, EVALUE 0.00e+00
ggcaaggtgacaaaaccaactcttgggcctccttcccccagatatcccagaggcatccttcctggaggaagaggatgaagaccccatcccacccagcaccacgaccaccattgccacctcagaacagagcacgggctcatgtgacaccagccccgacaccgtctcgccctccctgagccccggcttcgaggacctgtcccatgtccagcctggctccccagccatcaacggccgcagccagacagatgacgaggagatgacgggcgaatagccctgctgcccggtgccttgagggggtctcagggcagcagcatacaaggtggcagcgggtaaccctgccttgttctgtcatccagggctcctttgctgccccgttctgtcacccagggctcctagggggacaaggctctctcccgaggggtgtggaattcctgggggggtctttaattctggctccttccttcctcagaacatctctattctgcaagacccctctgccatgccagggcacgcccattccagctggagtcgtggggctgggcacaggggaatttttccaga

SEQ ID NO: 1822 - DNA, 594 bp, Homo sapiens
  MAP TO CHR20.1; EXPRESSED IN FETAL LIVER, SIGNAL = 5.5; EXPRESSED IN HELA, SIGNAL =   4; EXPRESSED IN LUNG, SIGNAL = 4.2; EXPRESSED IN BRAIN, SIGNAL = 5.9; EXPRESSED IN HEART, SIGNAL = 4.3; EXPRESSED IN BONE MARROW, SIGNAL = 7.5; EXPRESSED IN PLACENTA, SIGNAL = 6.3; SWISSPROT HIT: P08579, EVALUE 5.00e-27; EST_HUMAN HIT: BG519690.1, EVALUE 3.00e-93; NT HIT: gi11421422, EVALUE 2.00e-93
tgcctcaaaacctcttacctcatcatcttagtgcctgaaataatggtttatcccatttcctatagggatttgaaggcttttaaaaaacaaaaataggtaggaactgacagtgtgtacagtctgtttctactcatagatataatggtttcatataacttttaaaattacatatagccaatgggaatagtatatgtttttataaatattaaaatatataactgtataaataagtgaatggtggggggggcaactcaatgcagtatcattttatgaagacttttgtcattactttattaccaataacttgtttcttttctaatttggacagaattgaagagatccctatatgccctgttttctcagtttggtcatgtggtggacattgtggctttaaagaccatgaagatgagggggcaggcctttgtcatatttaaggaactgggctcatccacaaatgccttgagacagctacaaggatttccattttatggtaaaccaatggtaagccaattccattatttcactttaatcaagaaattaatgatattgatgggacagtagatttgtaaatatgcttgaaactgtggctattgc

SEQ ID NO: 1823 - DNA, 557 bp, Homo sapiens
  MAP TO CHR17.1; EXPRESSED IN HEART, SIGNAL = 2.1; EXPRESSED IN BONE MARROW, SIGNAL = 2.7; EXPRESSED IN PLACENTA, SIGNAL =   3; EXPRESSED IN FETAL LIVER, SIGNAL = 3.7; EXPRESSED IN BRAIN, SIGNAL = 2.7; EXPRESSED IN LUNG, SIGNAL = 1.7; SWISSPROT HIT: Q13829, EVALUE 2.00e-39; EST_HUMAN HIT: AU137738.1, EVALUE 0.00e+00; NT HIT: gi13652878, EVALUE 0.00e+00
accgccacctgttttatgagaggtagcggaggccttatggagcctcagggccagccgctctgacgcatggcttcctcttgaagatgaaaccttgctccaccttcttcctccctaaccccaggtggaattcccagaggcccgaatctatgaggagacactcaacgtcctactctatgagactccccgcgtccccgacaactccttgttggaggccacaagccgtagccgcagccaggcttcccccagtgaagatgaggagacctttgaactgcgggaccgtgtccgccgcatccacgtcaagcgctacagcacttacgatgaccggcagctcggccaccagtctacccatcgcgactgaccagaccctcagggagtcagggcacgggaggccctatctcccatcctgtggaacccgccccattggccaccccatgctgctgctgcctgggtctctgctctagcacccagaggcatgacaggccctgctcagaggtcagagggtctgggcagaggagggaccacattcccctgccttgcccctgagcacttctggagac

SEQ ID NO: 1824 - DNA, 515 bp, Homo sapiens
  MAP TO CHR2.1; EXPRESSED IN HELA, SIGNAL = 0.74; EXPRESSED IN BRAIN, SIGNAL = 0.71; EXPRESSED IN HEART, SIGNAL = 0.49; EXPRESSED IN BONE MARROW, SIGNAL = 0.65; EXPRESSED IN FETAL LIVER, SIGNAL = 0.75; EXPRESSED IN LUNG, SIGNAL = 0.57; SWISSPROT HIT: Q9NVP1, EVALUE 1.00e-25; EST_HUMAN HIT: AW995079.1, EVALUE 0.00e+00; NT HIT: gi13787205, EVALUE 5.00e-81
agtgcaagacaccatcctccttgaggggcttgcggaacagttggggaaataggacataggccaagggatgagctcgaaatagggtaacagttccacaatttgggggttctactgctagtcttcctcaagattccagctctaatggatgtttttatttaattctagggaaagcaaaagcaaaataagcgtacaaccacattcttccagttctgcaatgcagattcgggaacactattgtgtacggatgtggcagcgagaggactagacattcctgaagtcgactggattgttcagtatgaccctccggatgaccctaaggtaactggcatctttggaatatcttcagaatgactctgcattaaaagttcacttattctcccagttcctgacggaaactgcattccacattcaaggtaaagatccctactatacagtgactgcagtatttctctggtattgaaaagtacttaaggcttttcagggctcaaacgggctgtgccagaggattgaaaagg

SEQ ID NO: 1825 - DNA, 525 bp, Homo sapiens
  MAP TO CHR19.1; EXPRESSED IN ADULT LIVER, SIGNAL = 1.2; EXPRESSED IN FETAL LIVER, SIGNAL = 1.4; EXPRESSED IN BONE MARROW, SIGNAL = 1.5; EXPRESSED IN PLACENTA, SIGNAL = 1.5; EXPRESSED IN LUNG, SIGNAL = 1.1; EXPRESSED IN BRAIN, SIGNAL = 1.4; EXPRESSED IN HELA, SIGNAL = 0.91; EXPRESSED IN HEART, SIGNAL = 1.4; NT HIT: gi14769063, EVALUE 8.00e-77; SWISSPROT HIT: Q06527, EVALUE 2.00e-05; EST_HUMAN HIT: BG695989.1, EVALUE 1.00e-76
actcactggcacacatcagcgctgtggccccatccgcatcctgcgcattcacatcagccccacacgccagtagggttgccaccatgtcctgtcggccatggctgatggccagcatgagggctgtctgccccgtctggggagtggggaggaagagggaacaggctggggtaggctcagggaagggaggtcacaggttgactcccaaagtggaagtgactcctggctgagagccacagtgggggcgcccacgcacctgactggccttggcattgacatcacccatgcagaagagtctctggaccacagccatgtcctcctcttcctgcctcacagaggtgagtgcagccagcatgagggccgagtagccggctcggttctggcggttgacctcgcaggcccctgggagagaaaagggggccgtccacggagatgccaacaccgcggcccgacttgatccactcacctccctgcaagcctcgggcacagcacctgcatatggggtggtctcaacgttctccccacaat

SEQ ID NO: 1826 - DNA, 566 bp, Homo sapiens
  MAP TO CHR2.1; EXPRESSED IN LUNG, SIGNAL = 0.66; EXPRESSED IN BRAIN, SIGNAL = 0.89; EXPRESSED IN HEART, SIGNAL =  14; EXPRESSED IN BONE MARROW, SIGNAL =   2; EST_HUMAN HIT: W84308.1, EVALUE 0.00e+00; NT HIT: X92412.1, EVALUE 0.00e+00; SWISSPROT HIT: P11799, EVALUE 8.00e-10
agttccagcagctttatgggaatatctaatatgacacaactggaaagctcaactagtaaaatgcttaaagcaggcataagaggtgagcaataaaattactggtagaggtagacaagccaagtaacatggtgtagtctttagtacacacaattcagtagaaagcaaatctttatttttttcagtgattctaagaccttttttttgtcattgttccataaaggaattccgcctaaaattgaagctcttccatctgatatcagcattgatgaaggcaaagttctaacagtagcctgtgctttcacgggtgagcctaccccagaagtaacatggtcctgtggtggaagaaaaatccacagtcaagaacaggggaggttccacattgaaaacacagatgacctgacaaccctgatcatcatggacgtacagaaacaagatggtggactttataccctgagtttagggaatgaatttggatctgactctgccactgtgaatatacatattcgatccatttaagagggcctgtgcccttatactctacactcattcttaacttttcgcaaacg

SEQ ID NO: 1827 - DNA, 595 bp, Homo sapiens
  MAP TO CHR18.1; EXPRESSED IN BRAIN, SIGNAL = 0.9; EXPRESSED IN LUNG, SIGNAL = 0.7; EXPRESSED IN HEART, SIGNAL = 0.85; EXPRESSED IN BONE MARROW, SIGNAL = 0.93; EXPRESSED IN ADULT LIVER, SIGNAL = 1.1; EXPRESSED IN FETAL LIVER, SIGNAL = 0.7; SWISSPROT HIT: Q9Q1T8, EVALUE 1.50e+00; EST_HUMAN HIT: BF771008.1, EVALUE 1.00e-95; NT HIT: gi14764610, EVALUE 7.00e-96
aaatctccattccctccccttttcttcctggaaattgactacctttccagcagataagaggtcctttagacagtacaccctgggagcttctgactaggtagtactttaagtgcttctgcttctttggctgagtggtgagcttcaagttaatgtggttggaaaattccgtgaaatatcgaaatcctctttctccacagccgatacaatttccagaaaaccctgaagtcaggaaaaccaatgttactaatggccttgtaagttgatacaatacttttacgtattaaacagcatagaaacattcacattctttgacccaaaaatgtctcaatctcaaggaaataattcagagggaaaaaaaccaggtacatgtttctttagcagagttattttataacagtgaaagactggaaataatttaaatgctgctctaaaaggaaaggaaaggttaatctctaaaagattaaggaaatagagtagataaatacagtagataatggttaaggttaaggaaatagagcacataatataatgaaaagcttggttctagaatgtctattatttcttccccacatactccttccttagagaacctgcg

SEQ ID NO: 1828 - DNA, 562 bp, Homo sapiens
  MAP TO CHR19.1; EXPRESSED IN PLACENTA, SIGNAL = 3.9; EXPRESSED IN LUNG, SIGNAL = 1.9; EXPRESSED IN BRAIN, SIGNAL = 3.4; EXPRESSED IN FETAL LIVER, SIGNAL = 3.1; EXPRESSED IN HELA, SIGNAL =   4; EXPRESSED IN HEART, SIGNAL = 2.4; EXPRESSED IN BONE MARROW, SIGNAL = 3.6; EXPRESSED IN ADULT LIVER, SIGNAL = 3.4; SWISSPROT HIT: Q63148, EVALUE 1.10e+00; EST_HUMAN HIT: BI829184.1, EVALUE 1.00e-98; NT HIT: gi16174931, EVALUE 7.00e-99
tttccagccttgtacccaactccagcctgtgccctctgcccctgcagaactcctgtgggcctctgctgctcagccatcccccggaagcctcgcccttgtcctggactccggtgcctcctggcccttgggtccctggacactggctgcctccaggcttctccatgccaccaccagtggtgtgccgcctgctgtaccaagaacctgctgtctctctgcctcccttccctggtaagatgataattcaacattcattcaacatatatttgagtgccaatctgccacatattggagagggaagaggaagaaagcataggtggggagagggaggaaagaaactatgaccttggcccctatacactctgcattcttttattcttattaggctttgaccctggcacctccctccagctgcccactcatgggcccttcaccacctgcccaggatctcacccagtactgacagctcctctttctggagagccccaagggccccctagccagccccgcacgtgagtagggagagaaggatgtgtatcataagcctaagcctgtgctgtgtcca

SEQ ID NO: 1829 - DNA, 514 bp, Homo sapiens
  MAP TO CHR12.1; EXPRESSED IN LUNG, SIGNAL = 1.2; EXPRESSED IN BRAIN, SIGNAL = 2.6; EXPRESSED IN PLACENTA, SIGNAL = 1.9; EXPRESSED IN FETAL LIVER, SIGNAL = 2.4; EXPRESSED IN HELA, SIGNAL = 2.2; EXPRESSED IN HEART, SIGNAL = 0.98; EXPRESSED IN BONE MARROW, SIGNAL = 2.8; EXPRESSED IN ADULT LIVER, SIGNAL = 1.8; SWISSPROT HIT: P17403, EVALUE 3.00e-24; EST_HUMAN HIT: AW963639.1, EVALUE 0.00e+00; NT HIT: gi14767787, EVALUE 0.00e+00
gctaacgctgtgcctacctcccttcttgcctgtctcaaggcagcactgtacgcagcaccctataagtctgacttcctgaaagcgctctccaaggggcagaatgttacggaggaggagtgcctggagaagatccgcctcttcctagtcaactacacggcgaccatcgatgtcatctacgagatgtacacccagatgaacgctgagcttaactacaaggtgtaggcatgcccactgctggacacgtccccgactcgtggccacatggagaaacaggcaaaccagaatcactgtgaatcaagtcggtgaactgcccctggcctgtgtcccccagagcagcccagggtcctgccagagtctgcaggggacagccctcgttttttaagtcttttttttttttttttttggtctattctaaaggaccagtaaataatgatcttacttccaaatctccttggaatttcacgacagcacagactgactttataccttcatttcagcgtggtaaaaaccgatt

SEQ ID NO: 1830 - DNA, 588 bp, Homo sapiens
  MAP TO CHR7.1; EXPRESSED IN BONE MARROW, SIGNAL = 0.63; EXPRESSED IN FETAL LIVER, SIGNAL = 0.74; EXPRESSED IN LUNG, SIGNAL = 0.59; EXPRESSED IN BRAIN, SIGNAL = 0.64; SWISSPROT HIT: P00692, EVALUE 3.30e+00; NT HIT: gi13631241, EVALUE 0.00e+00
atccaaaccactgcatttccactgggctttttatttagcgctgtgcataatttacctgaagttttgtcttccataaacatgtcaaaggcgatcctcccgacagggccggcatctgcaggggagcgctcatgctggggtactggggcgctgctgaaggtgtccagcataacggtcctttggtcagcagagcctgagatgaggacattgtcaatggcccagtcgttctgatccaggccgtcatgtcttggctgccaccagcggaagcgagtggcaatctctttagcatcaggagggagaaggatattcacaaatctataggaaaatgatggggaagggtgtggggaagaacccttgtcaaatatcttctctgagtaaaagatttacaaccagccataagataatgtatgtcacatggtgggtgagggaaggacataagctaaaataattttcaaaaaccacgattaactggcttaattttatgaagtctcagtagtcactaaattgggggaaatagaatgtgaacagattcaagtatcccagaactcccaattggttctgtctctgggcaggctttagagggactgcaca

SEQ ID NO: 1831 - DNA, 578 bp, Homo sapiens
  MAP TO CHR5.1; EXPRESSED IN FETAL LIVER, SIGNAL =   1; EXPRESSED IN HELA, SIGNAL = 0.79; EXPRESSED IN BRAIN, SIGNAL = 0.69; EXPRESSED IN HEART, SIGNAL = 0.58; EXPRESSED IN BONE MARROW, SIGNAL = 0.79; NT HIT: gi15828471, EVALUE 1.40e-01; EST_HUMAN HIT: BI755452.1, EVALUE 1.00e-08; SWISSPROT HIT: Q10948, EVALUE 1.10e+00
aacagccaatgactggttccaatagagcttgacagatattttgtgcctgtcattgctttatgacacagttttaagccacagactaaagatgattgtagctaccactgtcctccttacggttaaaacagctcacacagtattttgccctaatattgtcaagaagcacaattcctttcccagaaaactgctctaattggattcggtagaccttgactggcttgtcactgctgtgttcaaggtgaaggtgaaatctttgaggagcttgttcctgaaaataaaagctgaatatctctgatgaaggccttttaaaagtacatatctttatgcaattattttcatattacttttccacgatctatgttttattatgtgtgacaaatgaccaggaaaaagaaaaaggttgtgggattgatttatactctaaatcctatatatatgcagttatatctttaaacatttatcgacatataaatgtaaaatttgaaaagaaaatatttttattctgattttttaaaaattccaaattcaacatttcataacaggtgagaagttgctgttgaagccacactgctgatgag

SEQ ID NO: 1832 - DNA, 535 bp, Homo sapiens
  MAP TO CHR12.1; EXPRESSED IN BONE MARROW, SIGNAL = 1.2; EXPRESSED IN ADULT LIVER, SIGNAL = 2.1; EXPRESSED IN FETAL LIVER, SIGNAL = 1.1; EXPRESSED IN LUNG, SIGNAL = 3.9; EXPRESSED IN PLACENTA, SIGNAL = 5.4; EXPRESSED IN BRAIN, SIGNAL = 1.2; EXPRESSED IN HELA, SIGNAL = 1.5; EXPRESSED IN HEART, SIGNAL = 3.2; NT HIT: M25865.1, EVALUE 0.00e+00; EST_HUMAN HIT: AW015780.1, EVALUE 0.00e+00; SWISSPROT HIT: P04275, EVALUE 2.00e-26
gtctcagaactcagcccctgcccaccgttgccatctcagccctacgacacagtgcaccagcagccttttgcaagataagagctcagcctttattgtgggctcagaagggcacaagagcagaacatgcagaggactggcagcactctggcctggccatcaggccaaggcaggcagcagcaggcacccatgcagctgcagcagcctcacttgctgcacttcctgggggagcatttgcactccatggcattgagaacctcatggtacacaacagagccattggtgcagtgcagggccacctgcatgggctccgtccgtgtcggagagcagcaggagcactggtcctgcacatcgttgatgtcaatggagtacatggctttgctggcacatttgccctgcaagaaagcagaggaagatgggagcttcacaatggtgggaagtcctggcttaggcagggctctggggcagcctgctttctccctgaccccctccaagcaaggcaggtctgatctcacccagaagcacccaggacagctag

SEQ ID NO: 1833 - DNA, 509 bp, Homo sapiens
  MAP TO CHR6.1; EXPRESSED IN BRAIN, SIGNAL = 0.92; EXPRESSED IN HEART, SIGNAL = 1.6; EXPRESSED IN LUNG, SIGNAL = 2.5; EXPRESSED IN FETAL LIVER, SIGNAL = 0.9; SWISSPROT HIT: P22105, EVALUE 7.00e-60; NT HIT: gi15208634, EVALUE 0.00e+00; EST_HUMAN HIT: AL042665.2, EVALUE 0.00e+00
gtgcttctgtctccaatcccttctcccccacccactccgtgcagggctggctcctgctggtcagacctcagaggagtcaaggccccgcctgtcccagctgtctgtgactgacgtgaccaccagttcactgaggctcaactgggaggccccaccgggggccttcgactccttcctgctccgctttggggttccatcaccaagcactctggagccgcatccgcgtccactgctgcagcgcgagctgatggtgccggggacacggcactcggccgtgctccgggacctgcgttccgggactctgtacagcctgacactgtatgggctgcgaggaccccacaaggccgacagcatccagggaaccgcccgcaccctcagcccaggtaaggacccacacacactctgccccaaagtgggggtctttgtacttcacgggggggacctagtgcctcagccagcggtgggggtgggcgagttggtggtgggcctggaggaatctgcagagcgacttc

SEQ ID NO: 1834 - DNA, 537 bp, Homo sapiens
  MAP TO CHR7.1; EXPRESSED IN LUNG, SIGNAL = 0.63; EXPRESSED IN BRAIN, SIGNAL = 0.44; EXPRESSED IN HEART, SIGNAL = 0.83; SWISSPROT HIT: P53619, EVALUE 2.90e+00; EST_HUMAN HIT: AA638979.1, EVALUE 1.90e-01; NT HIT: AF061282.1, EVALUE 5.10e-01
tgtgattcctgtggaactgcagtgctataaatctgcagttgcctgttagtggatttgcattttactgcaatgtaatacttttcctcacagggaaaagcagtctactctcactaataggggttttaatgatgctctgccaaggtccacgtgcatagcctcaagcaaaaaggctcaggacaggctctgaattccacagcagggttaactacaagggagcttctttgcagtatgataaaacgcggttaacctcagctggatttgcagctagccccaaggagcactcctcaggagcaacacaggtctatgtataacatttcagctctggtccacccagaaacgtgcacttcccatcccacggtgtttgcataatttaggcatgctatagttaagatttgccaaaacttgtagagaaaaatcaaactgtctcagtacaaggaaaccaaactgctaaatcctctatttcctctctccacgctccagcagtttggcagtagaataaatgattgctcaccagtggcaagtttccatggagtcggt

SEQ ID NO: 1835 - DNA, 524 bp, Homo sapiens
  MAP TO CHR5.1; EXPRESSED IN LUNG, SIGNAL = 1.3; EXPRESSED IN HELA, SIGNAL = 1.6; EXPRESSED IN BRAIN, SIGNAL = 1.9; EXPRESSED IN HEART, SIGNAL = 1.8; EXPRESSED IN ADULT LIVER, SIGNAL = 2.8; EXPRESSED IN FETAL LIVER, SIGNAL = 1.4; SWISSPROT HIT: P24503, EVALUE 4.90e+00; EST_HUMAN HIT: BI038020.1, EVALUE 3.00e-99; NT HIT: gi6681088, EVALUE 5.00e-01
ggtccaggacaaccaatcacttccctcctgttggcctgacaggcctttctgaacagcaccagaaaatggccaacttgaactatttaacaaaacaaaaggacacaatcctcccctggccaagtgttaaaagcattccaaaagaaaaggccgaaacagaagctcctcccctccaatctgttcctcatctgtccagggatttattggctctcgcactaaattaatcaattgccaaaagagagctaaaaccacggctccaatgtaaatacttcttggtaacaatccctcagcgtgacacttcagatttcaagtggctgggtggccttccaaacgcctcattaaatagcaactttatagcattaagaggaaaaggctctgggattttctgtacaaatgtataaatcaatcttttcaaagacaaacaacagaacaacccgcaaaacatacgtgataggggagggggctcggggaggagcatcaagaaactgaggaaggagaaactgaagccgacggaggttggtctaaag

SEQ ID NO: 1836 - DNA, 588 bp, Homo sapiens
  MAP TO CHR5.1; EXPRESSED IN FETAL LIVER, SIGNAL = 0.76; EXPRESSED IN LUNG, SIGNAL = 0.58; EXPRESSED IN BRAIN, SIGNAL = 0.75; EXPRESSED IN HEART, SIGNAL = 0.64; EXPRESSED IN ADULT LIVER, SIGNAL = 0.69; EXPRESSED IN BONE MARROW, SIGNAL = 0.81; SWISSPROT HIT: O95235, EVALUE 3.00e-24; EST_HUMAN HIT: BF761623.1, EVALUE 0.00e+00; NT HIT: AF153329.1, EVALUE 1.00e-102
gctgcatctctgttctcacggtggtccttggggtgaggttagagaaggagccgagggatcctgacaccacctccacagcaccggcgggcgaggtgccctactttaggcgtagccttctgcttttggagccagatgtctgtggacttctgttcgcgttcagaaatgccgcctcaaacttctctcaattgttcattaagtgaacttctctcattcccttcccctttgccgataattggaggggaaaagaagtaggaagcgggacacggtgtcctggggcaagggacttattacctaaaattcgcggccccttctgtccctaaaggttcttctccctgcccactttttggtctctttttagacctaggctgcccctgccgtcatgtcgcaagggatcctttctccgccagcgggcttgctgtccgatgacgatgtcgtagtttctcccatgtttgagtccacagctgcagatttggggtctgtggtacgcaagaacctgctatcagactgctctgtcgtctctacctccctagaggacaagcagcaggtaaaggaactggggagtggctggggcggaaagtgatatcctca

SEQ ID NO: 1837 - DNA, 529 bp, Homo sapiens
  MAP TO CHR1.1; EXPRESSED IN BRAIN, SIGNAL = 1.7; EXPRESSED IN LUNG, SIGNAL = 1.5; EXPRESSED IN HEART, SIGNAL = 1.7; EXPRESSED IN ADULT LIVER, SIGNAL = 1.7; EXPRESSED IN BONE MARROW, SIGNAL = 1.7; EXPRESSED IN PLACENTA, SIGNAL = 1.3; EXPRESSED IN FETAL LIVER, SIGNAL = 1.6; SWISSPROT HIT: Q9QUR6, EVALUE 4.90e+00; NT HIT: AE007833.1, EVALUE 5.00e-01
gttgctgcagggaagaaatgtatgagtagtctctccaaacaaccaagcagcctggggatcagaggtccaggacactgggccgcatatgtgatgtgtgttatattggatgctaacatctttgaatgaaaggctgttcctatctggtgcagtcatgagcagaaatgaccaaataaagcttgtgcttgtcttaatctatgttatttgtgaattgtgaattattttgtctctagtctccccaaacagtgggaaaaaccaaggcactaacttcaatttggcaagtaatagtgtcattttgaaacatctgtaacatacctgtttacctttttcaaaattttcactgacaaaatcacactatccctctagtcataatctgaagcactgtgtctccatagtgatgattcaggctcccgttgccatggtgatcattctatgggctaaaacacttccatcagttcttcccctcattctcattaccattgtccgtttctcaatccaggcccttattatgtctttgggatctagcactggg

SEQ ID NO: 1838 - DNA, 567 bp, Homo sapiens
  MAP TO CHR1.1; EXPRESSED IN LUNG, SIGNAL = 2.5; EXPRESSED IN FETAL LIVER, SIGNAL = 1.7; EXPRESSED IN BRAIN, SIGNAL = 2.5; EXPRESSED IN HEART, SIGNAL = 2.3; EXPRESSED IN ADULT LIVER, SIGNAL = 1.9; EST_HUMAN HIT: BI007445.1, EVALUE 0.00e+00; SWISSPROT HIT: Q14814, EVALUE 2.00e-34; NT HIT: gi11421868, EVALUE 1.00e-112
atcacactggacgacagcagactcttggagagggcagggtgggtgtgggctggcagcctggcactggcctgttcacttgaactgcccttccttcctcctcagaccctgggtttgtatgacagaaggagggtttgcatgtgtgtgcgcacaggtgaggggctacaaggggcatgtataccagtgtgtgtgcataggcaggtctgcgtgtacatgcaacgtgggcacgtgtccatgtggatgcaggcgggggtatatcctggtgcctgtgtgtatgggcccacctcgatgatgtcggcgttggtgcggctctcgtgtggctcattgtactccgtgtacttgagcagcaccttgtccatgtcggtgctggcgtactggaacagcttgttggagtggttgaagatgatgagtgcgatctcgcagtcacatagcacgctcagctcatacgccttcttcatcaggccaaacttccgcttggtgaaagtcacctgcagagaaggatgggtgggcggccagatctggctcagttaaggcctgattgggagtcccagcctacagatggctggacat

SEQ ID NO: 1839 - DNA, 514 bp, Homo sapiens
  MAP TO AC027045.2; EXPRESSED IN BONE MARROW, SIGNAL = 0.5; EXPRESSED IN ADULT LIVER, SIGNAL = 0.46; EXPRESSED IN FETAL LIVER, SIGNAL = 0.55; EXPRESSED IN BRAIN, SIGNAL = 0.44; EXPRESSED IN LUNG, SIGNAL = 0.8; EXPRESSED IN HEART, SIGNAL = 0.58; NT HIT: AJ400879.1, EVALUE 1.20e-01; EST_HUMAN HIT: AI091419.1, EVALUE 2.00e-56; SWISSPROT HIT: Q09851, EVALUE 2.00e-03
gaaccctggccaagagtttagatttatcgctgcatattcgtgtcaagatttgttgttgtttttgccctggtccccaagtatgaattatctggcaatatcctccatcccagaatcatctctgcttcttcgtctttttttttttttcagtcatttcattatctttgaatttcaaaatgggtggcttttaaatcgagggctcccaaggtctgcaagagggaggagatctcacacataccctgactctctcattggttcagcagacattcaccccaaagctggtcctgttggacctctcagacatcagctgtgtcccagatgtggcaaaagaagtcctggattgctatggctgtgtggacatcctcatcaacaatgccagtgtgaaggtgaaggggcctgcccataagatttctctggagctcgacaaaaagatcatggatgccaattactttggccccatcacattgaccaaaggtctcgtgagtttgactttcccatgggtatctgggccaccaga

SEQ ID NO: 1840 - DNA, 504 bp, Homo sapiens
  MAP TO CHR5.1; EXPRESSED IN BONE MARROW, SIGNAL = 0.51; EXPRESSED IN FETAL LIVER, SIGNAL = 0.41; EXPRESSED IN LUNG, SIGNAL = 0.69; EXPRESSED IN BRAIN, SIGNAL = 0.63; EXPRESSED IN HEART, SIGNAL = 0.78; NT HIT: gi14728011, EVALUE 0.00e+00; EST_HUMAN HIT: BI465306.1, EVALUE 1.00e-85; SWISSPROT HIT: Q9UN74, EVALUE 2.00e-82
tgcaaaggattcctcagttgtctgcagctgatcttctctgtccctagagtcaggtaaactggggctgaaggccatgaggtcggtcttgggtgggccctcaccagagcacaccctcggcctcctctgctgcgagtatgaccagctccccaccgcactggagcacaccagcgtgggcttgcccggagcgcacgcgccctcggtgggcagcgcagagcaccgcagcgcggtgtacagcagcagcgtgagcaccaaaaggctggacaccgcgcagatggcaatgatcaggtatacgttgacatccaccagcgcagcatcgggacccacagcgcccaccaacgcccgtgaggaggcctttggcgcctgtccactctccacaagtgacaccagcacagtggccgtggccgtcagcgcgggctcgccgtggtccttcaccagtaccagtaggcggtggcgcggagcgtccgtttcgtccagggcacgcgttgtgctgatctcgccagtgta

SEQ ID NO: 1841 - DNA, 543 bp, Homo sapiens
  MAP TO CHR17.1; EXPRESSED IN BONE MARROW, SIGNAL = 1.3; EXPRESSED IN ADULT LIVER, SIGNAL =   1; EXPRESSED IN FETAL LIVER, SIGNAL = 1.3; EXPRESSED IN LUNG, SIGNAL = 1.4; EXPRESSED IN BRAIN, SIGNAL = 1.1; EXPRESSED IN HEART, SIGNAL = 1.3; NT HIT: gi7661933, EVALUE 0.00e+00; EST_HUMAN HIT: BI520366.1, EVALUE 6.00e-51; SWISSPROT HIT: Q14147, EVALUE 3.00e-54
agattttcaatttgggcagggccaggggctggtacccaggctcagggtcctctcctgatcctttctttctcccaccccaggtcggctaccagatccgctttgagagcacacgttcggcggccaccaagattgtattcctgacagtggggctgctcctgcgacaaatccagcgggaacccagcctgccccagtatgaggtcctgattgtggatgaagtccatgagcggcatctccacaacgatttcctcctgggcgtcctccagcgcctgttgcccacgcggcctgacctcaaggtcatcctcatgtcggccaccatcaacatctcgctcttctccagctatttcagcaatgcccctgtggtacaggtgcctgggaggctgttccccatcacggtgagtacttccccctcctcccacatccccagacctccaacctggtctctgtccaaacctggacatgcctcttctctctgctgctgtatctcccatctctttcatttaaagatgttctctttttttaaagctaccattttctgagcattca

SEQ ID NO: 1842 - DNA, 519 bp, Homo sapiens
  MAP TO CHR19.1; EXPRESSED IN HEART, SIGNAL = 2.4; EXPRESSED IN BONE MARROW, SIGNAL = 1.4; EXPRESSED IN ADULT LIVER, SIGNAL = 0.67; EXPRESSED IN LUNG, SIGNAL = 2.6; EXPRESSED IN BRAIN, SIGNAL = 1.5; EXPRESSED IN FETAL LIVER, SIGNAL = 1.9; EXPRESSED IN PLACENTA, SIGNAL = 2.2; EXPRESSED IN HELA, SIGNAL = 2.2; SWISSPROT HIT: Q99961, EVALUE 8.00e-24; NT HIT: gi15305896, EVALUE 2.00e-80; EST_HUMAN HIT: BF525832.1, EVALUE 3.00e-80
ttggtctgtgcagtctcctgcacctctgcagctggaaagctgtgggggccactgtacgtccccggcactcagcacacgcagggcctggacctgccctgcctgtgttgaggtgtggcctccagggacggtgggcgtggcttccagagagcaccactcaccaaagttggactcgccgcccagctccttcccgtggcggatcatgcactcgcccagaagcccctccgactgcgggtagccggggttcttcacctggccccggatcttggacaccgtgttgagcatggtcagcttagcccgcgaggctgggataggatggcccaggtgggtgtgggctgtgaggcctgcactcctctgccctggcagactgcagcccccacatctcctccccacccttgcttcctgtgcctgtggacagcctaggccacacaaagcacagtggaatccccagagggtcccttccctgctcctgctagcctcaaaggagctggcagcgggtggagaggtgaccaagctcctcag

SEQ ID NO: 1843 - DNA, 593 bp, Homo sapiens
  MAP TO CHR20.1; EXPRESSED IN BRAIN, SIGNAL = 1.1; EXPRESSED IN HEART, SIGNAL = 0.95; EXPRESSED IN BONE MARROW, SIGNAL =   1; EXPRESSED IN ADULT LIVER, SIGNAL = 1.2; EXPRESSED IN FETAL LIVER, SIGNAL = 1.1; EXPRESSED IN LUNG, SIGNAL = 1.7; SWISSPROT HIT: Q14624, EVALUE 4.40e+00; NT HIT: gi6981369, EVALUE 1.00e-66; EST_HUMAN HIT: AL041726.1, EVALUE 0.00e+00
cttggagaggagagtggcaggtgggctgcctgctgtgttaagaggacttagtttgtgatgtaaggcactgtcaggaatggggggcgggccagggtgggaagagaagaaatagcagagcctattttggtgaggttttttgtttttaagtcaaagaagactcagtatgctttccctgaggaatgaaaaagggattgaggagttgcctgactcctgggtgggtggggtacaggcagttaggtgctgaatgaagctgccatccttgctgcagcttctaactggtaaaaagatccagggatggagatgggaaggttagaaaggcagccctcacctctgaggacagaggccggggtccaggcccgtgggcgcaaaggtgcctcatagcatagccagcattcagcacacacaaacctactgcccacatttgggctcagggttggccatttgctagttctgctgccctcttaagatctgactgccaaataaatcatcctcatgtcctttttcctttgacttgtatgctctttcgggggctcaggaaagcctgttgcatgggacatgctcactagaaacagtcgccagatgattattctgca

SEQ ID NO: 1844 - DNA, 520 bp, Homo sapiens
  MAP TO CHR11.1; EXPRESSED IN ADULT LIVER, SIGNAL = 0.63; EXPRESSED IN BRAIN, SIGNAL = 1.2; EXPRESSED IN HEART, SIGNAL = 0.53; EXPRESSED IN BONE MARROW, SIGNAL = 1.4; SWISSPROT HIT: Q9CL24, EVALUE 4.80e+00; NT HIT: gi9631294, EVALUE 7.70e+00
ctcagaagctgcctggaatctccaactgttcttgtagttaggagaaggggagtgaaggagaatgttgccaccggatatgccgggcaccacaaacaaacaacaaaaaggattcatgtgttcaatggagctgaattttaattgatactttctcaaacagtggttctgaaccaacatcgctcagcccccaaagatgatgaagggggtgcggtttaacgccacaattagcagacaaccccacaacaaatacagtaaacattaatcatattaaatattgaactcagactttggtacgcttgaagagcaatgggtttttaaaattttattttacagaagacaaagcaatgattgtggaggaattattccgatgtcagtgctgaagggaaataatgtaacattctggaatttatataaaaattacagctttgttgtgtttcacactatatatagtaatttaatcatttgcagctgattaatttcagtgaaggaaaatgtagcattatgcatccctaatggagttcca

SEQ ID NO: 1845 - DNA, 573 bp, Homo sapiens
  MAP TO CHR2.1; EXPRESSED IN LUNG, SIGNAL = 2.5; EXPRESSED IN BRAIN, SIGNAL = 2.1; EXPRESSED IN BONE MARROW, SIGNAL = 1.6; EXPRESSED IN HEART, SIGNAL = 2.3; EXPRESSED IN ADULT LIVER, SIGNAL = 4.6; EXPRESSED IN PLACENTA, SIGNAL = 1.8; EXPRESSED IN FETAL LIVER, SIGNAL = 1.7; EST_HUMAN HIT: BE271043.1, EVALUE 2.00e-01; SWISSPROT HIT: Q06278, EVALUE 3.00e-10; NT HIT: gi13994152, EVALUE 1.00e-04
gctaaaccagcagcaaaacctctggaattactaagttattttctaaaaattagtatcaatagatcttggtaaatttttttcagccttacaagcatttctgaaaattacctgatgataaaacatctttggatatccaactgagattttcttgggtataatgacagttcctctttccttccaataattccacgggttaaattgttctacagtttttttcctgctgtagtatgaagagtttttcatacatttctccagcatcttatcagttcctttggatcaaattcttgcttgtgaattgtcttatcaagcattttgcacatgtttatctctaacctggtggacgaaaatgccaaacttcacaagatccacagtgagtccatagtagacactagctgtggaatattgtagaatcatcaggaaagaacactttgagaataaattaagcatttaagagacaatgcaattttcagaattgaaagactgttcttttatttatttaaagcctttttttttgatgaccagttacttttaggatgggacagggcagaccagtgggcaggggtactttcattc

SEQ ID NO: 1846 - DNA, 583 bp, Homo sapiens
  MAP TO AC002345.1; EXPRESSED IN LUNG, SIGNAL = 3.3; EXPRESSED IN BRAIN, SIGNAL = 1.9; EXPRESSED IN HEART, SIGNAL =   2; EXPRESSED IN ADULT LIVER, SIGNAL = 1.6; EXPRESSED IN BONE MARROW, SIGNAL = 2.2; EXPRESSED IN PLACENTA, SIGNAL = 2.7; NT HIT: AF118569.1, EVALUE 0.00e+00; EST_HUMAN HIT: BF312177.1, EVALUE 0.00e+00; SWISSPROT HIT: P12821, EVALUE 1.00e-07
  unsure 29
  unsure 94
  unsure 177
  unsure 180
  unsure 301
  unsure 342
  unsure 346
  unsure 377
  unsure 410
  unsure 414
tgttgagctacttcaagccgctgctgganctggctccgcacggagaacgagctgcatggggagaagctgggctggccgcagtacaactggacgnccgaactccggtaccgccacccaccccacctccagccttgggtcttaaccccctccccaggctgggcagccatgcggctgacnctncggagcctggccctgccccgcacccttgccctgccctgccctgccctgcccatgctgtctccttgcttcccgctcagctcgctcagaagggcccctcccagacagcggccgcgtcagcttncctgggcctggacctggatgcgcaggaggcccgcgtgggcncagntggctgctgctcttcctgggcatcgccctgnctggtagccaccctgggcctcagccagcggctncttncagcatccgccaccgcagcctccaccggcactcccacgggccccagttcggctccgaggtggagctgagacactcctgaggtgacccggctgggtcggccctgcccaagggcctcccaccagagactgggatgggaacactggtgggcagctgaggacacaccccacac

SEQ ID NO: 1847 - DNA, 572 bp, Homo sapiens
  MAP TO CHR5.1; EXPRESSED IN ADULT LIVER, SIGNAL = 0.79; EXPRESSED IN BRAIN, SIGNAL = 0.68; EXPRESSED IN LUNG, SIGNAL = 0.67; EXPRESSED IN BONE MARROW, SIGNAL = 0.71; EXPRESSED IN HEART, SIGNAL = 0.79; NT HIT: gi16159220, EVALUE 1.00e-120; EST_HUMAN HIT: H15280.1, EVALUE 1.00e-89; SWISSPROT HIT: Q13591, EVALUE 2.00e-42
atctcaaacacgaagccagggagctgcgtgaggcctggtaaattagaagactctccaaggcccttgagttttcagatgttttgtagactacacaatccacttacctgggcagggcaaaatgttgcattcctggtattccagagatgggccaaggcaaggcattcccccatacttgggttcggggttgttgcaaacacgcttccggttccgaatgcccctgctgcagtcacggctgcactgtgaccacgacgtccaggctgaccaagccccgttgaccgtgtgggcagagtatctcccagcacgcaggaaatccccagaaagccctgccaaggaaacaggtgaagtgtgattctgttacaagtttcagaggaactacagtccatgctgactttcattctgtatctgctgtctgccttatttctagaactaccctctcacattccgttgagctctttttacacttcagtagccaaaaatcagtggtgtgatagcctcttatctctcaagcttgtttcctgcaattactatgaaataaggttgaaattaagaactccatgtgaatgtggtgaacc

SEQ ID NO: 1848 - DNA, 577 bp, Homo sapiens
  MAP TO CHR12.1; EXPRESSED IN BONE MARROW, SIGNAL = 1.2; EXPRESSED IN FETAL LIVER, SIGNAL = 1.2; EXPRESSED IN HELA, SIGNAL =   2; EXPRESSED IN BRAIN, SIGNAL = 1.2; EXPRESSED IN LUNG, SIGNAL = 0.85; EXPRESSED IN HEART, SIGNAL = 0.98; NT HIT: gi14784195, EVALUE 2.00e-74; EST_HUMAN HIT: R56451.1, EVALUE 0.00e+00; SWISSPROT HIT: P71613, EVALUE 1.30e-01
aggggcagtgattgttcatctgggtgtggggtgtgaaaatggttccaatatctgtatccccttctgcatagagtctggtactgcatgcacagccccagattgcttcaagccctggattcaaagggctgagtgggaaaaatcagggtaccaggggtcaggaaccaacaggagaccatccgtggagacccctttttcctttggttcccaactcctcttgcatttttgctctgcaagttgaagctgatttctcatttgccccaagctagtccctgaattaaggagtaggaagtggtagcgagagagctgatcctctctgtgcccctgtccccatcctgctctagggagtgagggccaagttctctgagagagccaatccctggagctgaacctgccctcatccctccaggctcgggtgcgtcctcgctgtgggcgccttgtggccttcagctccggtgtcgagaatccccatggggtgtgggccgtgactcggggacggcgctgtgccctggcactgtggcacacgtgggcacctgagcacagggagcaggtaaggagcggggtaggaagggatgtggtt

SEQ ID NO: 1849 - DNA, 587 bp, Homo sapiens
  MAP TO CHR14.1; EXPRESSED IN HEART, SIGNAL = 0.87; EXPRESSED IN ADULT LIVER, SIGNAL =   2; EXPRESSED IN PLACENTA, SIGNAL = 3.5; EXPRESSED IN HELA, SIGNAL = 1.7; EXPRESSED IN BRAIN, SIGNAL = 1.2; SWISSPROT HIT: P01768, EVALUE 5.00e-48; NT HIT: X92214.1, EVALUE 0.00e+00; EST_HUMAN HIT: BG503730.1, EVALUE 0.00e+00
caatctgcattttgtgccagggagaaaaggtcctcatatgcatagagaagacattgttaggcacagttttctaaatttaagaggttccctggggaactgtcagaagaagacaaagtcccacatcctgacaggaaacagcctccatctgcacctgcctccagggctgactctgatcagtggctcctgagcgccccctgcagctgatttcccgccagcgttcctgcagggaggtttgtgtctgggcgcacaatgacctcccctcactgtgtctctcgcacagtaatacacagccgtgtcctcggctctcaggctgttcatttgcagatacagcgtgttcttggaattgtctctggagatggtgaatcggcccttcacggagtctgcatagtatttattacttccatcataccatataactgccacccactccagccccttgcctggagcctggcggacccagtgcatgccatagctactgaaggtgaatccagacgctgcacaggagagtctcagggacctcccaggctggaccacgcctcccccagactccaccagctgcacctgacactggacacctgcaaacagaa

SEQ ID NO: 1850 - DNA, 508 bp, Homo sapiens
  MAP TO CHR1.1; EXPRESSED IN HELA, SIGNAL = 2.7; EXPRESSED IN BRAIN, SIGNAL = 1.8; EXPRESSED IN FETAL LIVER, SIGNAL = 1.9; EXPRESSED IN LUNG, SIGNAL = 2.5; EXPRESSED IN HEART, SIGNAL = 2.2; EXPRESSED IN BONE MARROW, SIGNAL = 1.8; EXPRESSED IN ADULT LIVER, SIGNAL = 1.9; EXPRESSED IN PLACENTA, SIGNAL = 1.6; SWISSPROT HIT: Q13751, EVALUE 9.00e-27; NT HIT: U17753.1, EVALUE 0.00e+00; EST_HUMAN HIT: BE878933.1, EVALUE 1.00e-82
aatccagtggtggaacaaggatttgaaccaggcagcctggctcctggaatctgctctgaactctacttttctttgttcctactgcggtggctgctgttgtctctcagcctgcgagtgtgatccggatggggcagtgccaggggctccctgtgacccagtgaccgggcagtgtgtgtgcaaggagcatgtgcagggagagcgctgtgacctatgcaagccgggcttcactggactcacctacgccaacccgcagggctgccaccgtgagtagggggcttggcccagcatgacgtggggtgggctgcatggggccaccagacccacggcttgccctgctcactgtgctctcttcagaggaaatcccactgcagggtagacagagggggtatgcccgggcctttgccaggagtccggacttcttgccctcttacccagcgccagatgctgtgccactggcctccagcaggtggcagcacacgtccgagttggaaggtgggactgagtcagc

SEQ ID NO: 1851 - DNA, 586 bp, Homo sapiens
  MAP TO CHR1.1; EXPRESSED IN PLACENTA, SIGNAL = 1.7; EXPRESSED IN FETAL LIVER, SIGNAL = 1.3; EXPRESSED IN LUNG, SIGNAL = 1.9; EXPRESSED IN BRAIN, SIGNAL = 1.6; EXPRESSED IN HEART, SIGNAL = 1.6; EXPRESSED IN BONE MARROW, SIGNAL = 1.8; SWISSPROT HIT: P14409, EVALUE 9.70e+00; NT HIT: AL163246.2, EVALUE 1.00e-128; EST_HUMAN HIT: BG620088.1, EVALUE 0.00e+00
gatgtagcgggaatcaccacctgtgtgtctttcaagtccttgatggtggcactgatctctgcaatccctccagggatgcgatattgtttttgatttacatttttctaggtagaggcagctttaatggcttccatttgatctttctcaccatagtagccctcaccctaccagtcagggagccaatgtgggggttctgccagctgctaagtatgtctatgccaattatgcattctggcactggggaaatgaccacaggatgaatctggggacccactggacccactgtaagttggacatgagctaaaactccattaattacctgacctccataagcccctactttaacaggaggaccacaatgacatttttggtcccctggaatcaacaccaactcagagcccagcgtccagtagtccccgaaatgtctgataatttctctttccccattgcacagttattctggtaaaaggctggaggtctccttggggaaggatgggagagagagttactgtataaattgtcggtagtggggtcttttctcaaggggacctggcctccctttcattcaaggggttctgggtctgta

SEQ ID NO: 1852 - DNA, 535 bp, Homo sapiens
  MAP TO CHR2.1; EXPRESSED IN LUNG, SIGNAL = 0.69; EXPRESSED IN HELA, SIGNAL =   1; EXPRESSED IN BRAIN, SIGNAL = 1.1; EXPRESSED IN HEART, SIGNAL = 1.6; EXPRESSED IN ADULT LIVER, SIGNAL = 1.2; EXPRESSED IN BONE MARROW, SIGNAL = 1.3; EXPRESSED IN FETAL LIVER, SIGNAL = 0.93; EST_HUMAN HIT: BG988724.1, EVALUE 7.00e-35; SWISSPROT HIT: P58008, EVALUE 5.00e+00; NT HIT: AJ277892.1, EVALUE 0.00e+00
ggtttttggcgttcatcttgttagatgccccttctaggcttgctatgtttacacccaactataatgttctgaaaaaataagataaataaatatctttaaagcacccgaagtacccaagaaaattgtcccagaagaaaaagttcgtgaagctgttctgaaaaagcctgaagttccaccagctaaaggtatacagtgatgctaatcagaacatgaaataattcttggtttagtttttcatggtttaaagtgaatgtgtgtgacattaaatccttgtatttcgtatcttatatttgttatctgtaacaattaatatactaatatctttaaagttcctgggatgcctaagaaaagtgttcaagaagaaaaatcacctattgttatttctgaagacacagagatgtacagtgagtgtagaaaaattagtggttctttttcgtttcatttatgtccttaaattcactatgtttgtctttttagctttgaaaagtaaatatactaaactcttataaaagcctaacatgccacaaatatatga

SEQ ID NO: 1853 - DNA, 582 bp, Homo sapiens
  MAP TO CHR3.1; EXPRESSED IN HELA, SIGNAL = 1.6; EXPRESSED IN LUNG, SIGNAL = 1.6; EXPRESSED IN BONE MARROW, SIGNAL = 1.9; EXPRESSED IN ADULT LIVER, SIGNAL = 2.4; EXPRESSED IN PLACENTA, SIGNAL = 2.5; EXPRESSED IN FETAL LIVER, SIGNAL = 1.6; EXPRESSED IN BRAIN, SIGNAL = 1.7; EST_HUMAN HIT: AA321353.1, EVALUE 0.00e+00; SWISSPROT HIT: P11150, EVALUE 2.50e-02; NT HIT: gi16158400, EVALUE 1.00e-112
ggaacaacagccatttcaccatggcctttaatctcatctagttgagcaatattccttctctgctattttgtccttaggcatgaaaaatattcacacagcttcattacagaagtgatgaaggctgtaataaatgagtgattattgcactagctgatgtataataaaccccatgcctgcaggcccctgtttcttgcttccttccaaggtcatctttcttccttctaagaacagatgacctcaccttggatgttgcttgttttgttttgttttcctccaggggatgcacctcctaccccacagccaaagtgcgctgacttccagagcgccaacctttttgaaggcaccgatctcaaagtccagtttctcctctttgtcccttcgaatcctagctgtgggcagctagtagaaggaagcagtgacctccaaaactctgggttcaatgccactctgggaaccaaactaattatccatggattcaggtgggagttaaataaccaacaggacttctcaactaagaatgatcaagtaaccataataccataagaagttagtgggcaacaaggggaggaatgaatttaccaa

SEQ ID NO: 1854 - DNA, 569 bp, Homo sapiens
  MAP TO CHR12.1; EXPRESSED IN FETAL LIVER, SIGNAL = 3.1; EXPRESSED IN BRAIN, SIGNAL = 1.3; EXPRESSED IN LUNG, SIGNAL = 1.3; EXPRESSED IN HEART, SIGNAL = 1.3; EXPRESSED IN BONE MARROW, SIGNAL =   2; EST_HUMAN HIT: AW601927.1, EVALUE 0.00e+00; SWISSPROT HIT: P10761, EVALUE 1.90e+00; NT HIT: AF320231.1, EVALUE 2.00e-87
tcccaggtgaaatcacttccgggtcatcatactcaagacgttggcctttctgttgcaggaataggtggagccagataaaattgttgattgctttgaggagaaagtgttttgaaagttgcattttattttttaggctgtaacagaagacaagtacgaaatactgcaatctgtcgacgatgctgcgattgtgataaaaaacacaaaagagcctccattgtccctgaccatccacctgacatcccctgttgtcagagaagaaatggagaaagtattagctggaggtagggaggccgagacacgccggcaggactttgaaaatgtggtgttccctcactattcaaatgtgctattcagttttagactgctttggtatacggtgtagattgaccacctttactctgagatcacatctcccgttggctttgagtacttgggagtttgacaaaacagtcgcactaaaagtgagtagcacttttcataggggactgcaccattttcctttatcttcatccttgaacgttctcaaacatgaatgtggaagttgcttttctatggagccattctctggc

SEQ ID NO: 1855 - DNA, 587 bp, Homo sapiens
  MAP TO CHR17.1; EXPRESSED IN FETAL LIVER, SIGNAL = 1.4; EXPRESSED IN LUNG, SIGNAL =   3; EXPRESSED IN HELA, SIGNAL = 0.76; EXPRESSED IN BRAIN, SIGNAL = 1.5; EXPRESSED IN HEART, SIGNAL = 2.4; EXPRESSED IN BONE MARROW, SIGNAL = 1.7; NT HIT: Y07701.1, EVALUE 3.00e-89; EST_HUMAN HIT: AA363447.1, EVALUE 0.00e+00; SWISSPROT HIT: Q11011, EVALUE 2.00e-31
cagcctggtgacaaaacaagactttgtctcaaaaaaaaaaaaaaaaaaaaaaaaaaggaagggaaaagaaaatgaccctcagatataattctaatatcaccagttggcctttcttgacatctcttttagtcttctctctttttcagaaatgtgagttctttgcgaaatgttttgaactgaattttaggtcattaaattgtgagttttggaatatagtggaagggacatgtgagtgttttagattagtagaatgacaatcatttcaatttctttaagtattttcatcttctgtttttaggaatggtggactcatctttggttaaatgaaggttttgcatcctggattgaatatctgtgtgtagaccactgcttcccagagtatgatatttggactcagtttgtttctgctgattacacccgtgcccaggagcttgacgccttagataacagccatcctattgaagtgagccatactttctaaccattagcctatgactgctctcatttacaatgaaatacgtaatttgttacatagatactttggactttgaaaagaagagaaaatagcatgggtgattttactggtt

SEQ ID NO: 1856 - DNA, 502 bp, Homo sapiens
  MAP TO CHR17.1; EXPRESSED IN LUNG, SIGNAL = 0.63; EXPRESSED IN BRAIN, SIGNAL = 0.44; EXPRESSED IN HEART, SIGNAL = 0.67; EXPRESSED IN BONE MARROW, SIGNAL = 0.43; EXPRESSED IN FETAL LIVER, SIGNAL = 0.7; SWISSPROT HIT: P75578, EVALUE 3.50e+00; NT HIT: AB013139.1, EVALUE 7.40e+00; EST_HUMAN HIT: BG686011.1, EVALUE 7.00e-01
cagtctggttccgagtgaccaccaaattctaatacatttaactatggactctggagttttacttttctgttctacagttttcaatgtctaccttttcaccatgttttaagcaagtgatctatcatctttttccttttttacagtttctcagaactcaccagcaatagatcttaggttacttgtaaacagctgtgggacgtaatttgtccctggaaacatgaacttatttgaaacagatgggtgttttcttactacctcctcacctgtctcaagtttcagtcctctttgtatgttgtttcacctttaccaacgtaaagtccattttctttactgaaaaggaaaagaaaagaaaacttgagtcaaatttctctttaatgtttacattattctcttaggtaaattacaaactgtgtttataaaaatttatgaaggtttatttctctctgccctctattataattcttcactctaattaaaccaatcttcccatttttccctcttg

SEQ ID NO: 1857 - DNA, 598 bp, Homo sapiens
  MAP TO CHR3.1; EXPRESSED IN BONE MARROW, SIGNAL = 1.3; EXPRESSED IN ADULT LIVER, SIGNAL = 1.4; EXPRESSED IN PLACENTA, SIGNAL = 1.5; EXPRESSED IN FETAL LIVER, SIGNAL = 1.1; EXPRESSED IN LUNG, SIGNAL = 1.7; EXPRESSED IN HEART, SIGNAL = 1.6; EXPRESSED IN BRAIN, SIGNAL = 1.4; EXPRESSED IN HELA, SIGNAL = 1.2; SWISSPROT HIT: P51178, EVALUE 8.00e-38; NT HIT: gi14737669, EVALUE 1.00e-79; EST_HUMAN HIT: AI074146.1, EVALUE 1.00e-79
aaagagggtggctgatgatgctggtccccgttcttagacatgaggtggacatggcggtatcctggtgggtggacaggcaggagggaacacagagagagttctggtcattcggcggcggagggggggtggatgcgtcaagggacagccagccccagcccaagagacgccaggccctgcttcccaccaccttggccatccccttctcttgacactcaccttgcttgaggctgttcaaggggatggtactctggccaatgaagtcattcttggaggaggcatcataatcttccaccaagaagcggatgagggcaaggtcaggcacaactacctcaaacgcaaactccgtgtcccaccatgggttgaaacctagggggacaggcaccatatcagcagcatggacaccagccctagtagcccagcccaggcccagcacctaccatttgttggtgatgacagcagtctggcggctggcacgtccggctcacgccatggatctccactgtcactttggggtccacaattgaattcttattcttgttgactttttgcagctgctgccccgaaatgacctgaggaaaggcagaggacaatggacagt

SEQ ID NO: 1858 - DNA, 507 bp, Homo sapiens
  MAP TO CHR7.1; EXPRESSED IN HELA, SIGNAL = 0.7; EXPRESSED IN BRAIN, SIGNAL = 0.44; EXPRESSED IN BONE MARROW, SIGNAL = 0.45; EXPRESSED IN HEART, SIGNAL = 0.73; SWISSPROT HIT: P08581, EVALUE 7.00e-33; NT HIT: U96973.1, EVALUE 1.00e-102; EST_HUMAN HIT: R97218.1, EVALUE 1.00e-109
ctctggaagctctttccaccccttctcttcacagatcacgaagatcccattgaatggcttgggctgcagacatttccagtcctgcagtcaatgcctctctgccccaccctttgttcagtgtggctggtgccacgacaaatgtgtgcgatcggaggaatgcctgagcgggacatggactcaacagatctgtctgcctgcaatctacaaggtaggaatctctaacagctggcatacatgtttttgtttggtgttttttttttttttttggtttggtttggtttgttttttgtttttttagatacaaatcccactaatgaaaaaaatttaaaaatcaatttactcatttagctgtgagtcatcagctaaagcaccatctctctcttggctttatccctcgggcagggagggggtggtgtttgggcatccccccaagtcctgcacctgaagtgcttgcttcacattgtctaggttctatcgctgggcagctgctcacctttagtgccgtgt

SEQ ID NO: 1859 - DNA, 513 bp, Homo sapiens
  MAP TO CHR12.1; EXPRESSED IN ADULT LIVER, SIGNAL = 0.68; EXPRESSED IN BONE MARROW, SIGNAL = 0.47; EXPRESSED IN FETAL LIVER, SIGNAL = 0.63; EXPRESSED IN HELA, SIGNAL = 0.58; EXPRESSED IN LUNG, SIGNAL = 0.85; EXPRESSED IN BRAIN, SIGNAL = 0.47; EXPRESSED IN HEART, SIGNAL = 0.88; EST_HUMAN HIT: AW504988.1, EVALUE 6.00e-97; SWISSPROT HIT: Q10105, EVALUE 5.00e-13; NT HIT: gi14768035, EVALUE 4.00e-97
agccaatgactcagtgtccctatttcactgtgaacatatttgtcctcggaggcaaagatcttagctgaatgggtgcaagttccctgcagtgtccaaaggctgcggcgttggtgggaggtcagggcaagcaccctcacgggaaaggcctacccaggatctccgggttcctgataacggagccgatctgcctgagcgcctgctgtccagccttctggactttgacatgggagtcggtcagcacctccgtaagcttgggcacaatgttgggtagacaggatgacagctgcttaggagcacagtacgccattgccccaagaagctccactgaccctgtggatagcagacacaagcccagtactgaatcactgagcaaaggccagcaactcacctgtgctggctacatgagcaagggacatctaccctggcccctgcagacggtgctcaagcagtcactgggaggaggggagagggggctggctctagcagaggggtcgaaaaagctcttgtggcctg

SEQ ID NO: 1860 - DNA, 587 bp, Homo sapiens
  MAP TO CHR19.1; EXPRESSED IN ADULT LIVER, SIGNAL = 1.6; EXPRESSED IN FETAL LIVER, SIGNAL = 1.6; EXPRESSED IN LUNG, SIGNAL = 1.5; EXPRESSED IN HELA, SIGNAL = 1.4; EXPRESSED IN BRAIN, SIGNAL = 1.3; EXPRESSED IN HEART, SIGNAL = 1.5; EXPRESSED IN BONE MARROW, SIGNAL = 1.3; EST_HUMAN HIT: BF364583.1, EVALUE 8.00e-75; SWISSPROT HIT: O33259, EVALUE 1.10e+00; NT HIT: AF079566.1, EVALUE 8.00e-28
ctgtgaacctgcctgtagccctataacctccttaccctgtgttgctttcccagtgctgctaaaaacagagaccctaggggcctgaaccctgcctgatcctgatcatgtgaggtgaagtcagaggccaggcagatcctgggaatgtgttctttatgcgttcccaggcacttgctgcccaaagaaggcctagtgggactagtgaagtcatgccatctttctgccagtttgagatctttctcttgtgccctagctggccaaaaaggataggaatttgaaggaaataatttctttaaaatctgcttatgtttggaaagagtcaaaccttactatctatatgacatataatcctgatatcagttttgtttacagttactatgtttttttcagaactgtttattatactgcaaagatcatgtggaaggctagttattttggtgacctttttttattttgttttgtagccctgactataatgtggaatttttccgacagtttatactggttatgaatgctttagataacagaggtgaggttattttaatacttttaatttctcagtatttcctctctcccatatcaaatttgtt

SEQ ID NO: 1861 - DNA, 578 bp, Homo sapiens
  MAP TO CHR17.1; EXPRESSED IN FETAL LIVER, SIGNAL = 1.4; EXPRESSED IN BRAIN, SIGNAL = 0.91; EXPRESSED IN LUNG, SIGNAL =   1; EXPRESSED IN HEART, SIGNAL = 1.6; EXPRESSED IN ADULT LIVER, SIGNAL = 1.9; EST_HUMAN HIT: AL555009.1, EVALUE 0.00e+00; SWISSPROT HIT: P51452, EVALUE 4.00e-33; NT HIT: AF326736.1, EVALUE 0.00e+00
ttctttatgtgctccccagggtggggaaagtggcccaggactgtgttgggacacacttgtagacaagtgccttgtgatgctgggagcagggtacagtgtgtttcctaaacatggcagctcgggacacctttgcccacggcctcccccacggacctctcgagcagaggtggtgggggtgccctagggtttcaacttcccctccttggctagtctgtcattgagctggcagagctgggccaggaagccatcgttggggccgatctcacggttctgcctcacgatgctcagggcagacttgacgtccatcttctgccgcatcatgaggtaggcgataactagcgttggggagcggctataaccttcccggcagtggacgagcacccggcctgtaagaaacaggggagacgtggtgagctgggggcgtcccatcacaccatggcgttggtcaagactcttccgtgaagtgccacttaaaagcacaatgtcacgccactgtgtgcctgtcagaatggctaaaatgaaaaggatggaaaacccaaagtgctggtgaagatatggggcaactggaactcttctgc

SEQ ID NO: 1862 - DNA, 539 bp, Homo sapiens
  MAP TO CHR7.1; EXPRESSED IN BONE MARROW, SIGNAL = 1.2; EXPRESSED IN HEART, SIGNAL = 0.74; EXPRESSED IN FETAL LIVER, SIGNAL = 1.2; EXPRESSED IN BRAIN, SIGNAL = 1.1; EXPRESSED IN LUNG, SIGNAL = 0.71; NT HIT: AJ010770.1, EVALUE 0.00e+00; EST_HUMAN HIT: BE464865.1, EVALUE 0.00e+00; SWISSPROT HIT: Q99996, EVALUE 1.00e-20
tcagacacccctcacctctcatctacttagagctaaggtctttaaagaagaaaatatgccaattaaataattttctttgagacataattccagatatcagaaatactcatattcaaaagtaaacaaaataacatttgaaagccgaatttttgtttgtactgttttctcctttatcaagaataatagaaaatgactataaataggagattgtataatatagtataatagtcttttgagcagttacctattttgtagaaattttttaaggtcttgggattttatttttctttacaaggaatattttgggttactttaggtgcagaaaagactgactcattttatcattcttctggtgggctggagttatatggagaaccaagacatactacgtatcgctcaagatcagatctggactatattaggtcccctttaccatttcagaataggtaagaatatgagaaaacctgcctggaattgttaaatgtattaatatttaacagagataaatggacatttttagggctttgacttctttgcat

SEQ ID NO: 1863 - DNA, 559 bp, Homo sapiens
  MAP TO CHR16.1; EXPRESSED IN ADULT LIVER, SIGNAL = 4.1; EXPRESSED IN BONE MARROW, SIGNAL = 2.8; EXPRESSED IN PLACENTA, SIGNAL = 3.4; EXPRESSED IN FETAL LIVER, SIGNAL = 2.5; EXPRESSED IN LUNG, SIGNAL = 1.6; EXPRESSED IN BRAIN, SIGNAL = 2.7; EXPRESSED IN HEART, SIGNAL = 2.1; NT HIT: gi14777106, EVALUE 0.00e+00; EST_HUMAN HIT: AW964032.1, EVALUE 0.00e+00; SWISSPROT HIT: P06924, EVALUE 7.00e-02
cctagctcctactcgggtcccagcacaccctgcagctcactcagaattttgggggaagccctggggtcttggggcatgtggttctgctgtcacacatggacacggcctcctgggagtcctggtcctgcagcccctaccaccggatgcccaggccagtgctggccttctccacggcgtggtactgcgtatgcagcaagcgacctgcacactccgagtccgtgccctgcagccagtgtgtgtacagctcctgaaccccaggcgcgtcctcgggcgcctcagcccggaccatgccgtacagtctctccacgtgctggaggagctctctgctgggcctgtctggggcctggagctggcccccgccgttcaggcagcctatgggagagcagacgggacaggggtcacagcctgcgccccagccaagcttcctgaccaccagggagcagggaggtgaccgggccccctctgtgccccacttcctcccactcccagcctggtggatggtggcccacagctctgctcccagaaggggtcctcgtgtcctgtcccttgcaggagctac

SEQ ID NO: 1864 - DNA, 507 bp, Homo sapiens
  MAP TO CHR1.1; EXPRESSED IN HEART, SIGNAL = 1.3; EXPRESSED IN ADULT LIVER, SIGNAL = 1.1; EXPRESSED IN FETAL LIVER, SIGNAL = 1.1; EXPRESSED IN LUNG, SIGNAL = 1.4; EXPRESSED IN HELA, SIGNAL = 1.2; EXPRESSED IN BRAIN, SIGNAL = 1.1; EXPRESSED IN BONE MARROW, SIGNAL = 0.96; EXPRESSED IN PLACENTA, SIGNAL = 1.5; SWISSPROT HIT: P46062, EVALUE 6.00e-13; NT HIT: AB037810.1, EVALUE 0.00e+00; EST_HUMAN HIT: BG250740.1, EVALUE 0.00e+00
gcattttctgaggaccttgcaggagcactgaggacagccacctgctacagaggcaaaggaggagtgagcattacttgggcctcccacgccttaccttcggggcgagccgtcatcatggggctggatgatgaccaccttcacagtcacagaagtacggagcaggtcgatcatctgctcgtgggtcagagtggccacggctactttgcagatctccacgaggcggctcccttggcgaaggccagccttccaggcaaagccaaaaggttccacatctgcgacaattccttcaaaattcacatggaagccaagctggcccagcccgttcctcctcagggtcatttccacagtctcgcagcctctcgtcactatctaagggggaaggagactgttagagatgcccttcctgcccaagctgccatggggctctgccaaaggtgcacgtatgggcctccatgccagccctctcccttgggccctcgcagcccagcctgtctctctctgcctttt

SEQ ID NO: 1865 - DNA, 507 bp, Homo sapiens
  MAP TO CHR7.1; EXPRESSED IN PLACENTA, SIGNAL = 1.8; EXPRESSED IN BRAIN, SIGNAL = 1.8; EXPRESSED IN HELA, SIGNAL =   2; EXPRESSED IN LUNG, SIGNAL = 0.95; EXPRESSED IN HEART, SIGNAL = 1.7; EXPRESSED IN ADULT LIVER, SIGNAL = 2.5; EXPRESSED IN BONE MARROW, SIGNAL = 1.8; SWISSPROT HIT: Q05921, EVALUE 1.40e-01; NT HIT: AB051545.1, EVALUE 0.00e+00; EST_HUMAN HIT: Z20946.1, EVALUE 3.00e-40
aacctttggaagcagcaatgtgggcagcagtccagccttctctgttggcgtggttaatgaggtctgcaggaacaacaggcttggatatgccttcaggactctcttctcctccatccaagtcaaagacacttgactcggactcctcctcattgaaagaatttccatgagctggtattctatggtacataagaagcttgaggctgtccacattaccagtgtccacagctgcgtgaactggtgtccagccatcctgaaaataaaatgaccagggggaaagggttgataacaacattaatgtcaaggaaaatattattgaaagttcacttctaaatgttcttgggcatggaccactgagctgggaaaagcaggcattccaatcctgaacattatcactgatgagctgggtaaagttctctgactcctgtcagttaacaatatttccaactgctgtgactcatgtttgctattttgtaatcatttctacctaccagttaaccatttggggtg

SEQ ID NO: 1866 - DNA, 567 bp, Homo sapiens
  MAP TO CHR7.1; EXPRESSED IN HEART, SIGNAL = 1.1; EXPRESSED IN ADULT LIVER, SIGNAL = 0.89; EXPRESSED IN FETAL LIVER, SIGNAL =   1; EXPRESSED IN BRAIN, SIGNAL = 1.1; EXPRESSED IN HELA, SIGNAL = 1.1; EXPRESSED IN LUNG, SIGNAL =   1; SWISSPROT HIT: P25159, EVALUE 6.20e-01
gaagctttgagtggcggtaggattcccaagcagatggaaaactatgtttgagcctttgggggcaggggcagcaggcagcacccaggttttctcaggagacccccaattaaatgagtttggtgctgggtacaagtagcactggtggagtccccagtcctaagctaagttctgctcctcactgaccttggggagggcaggcagaggcaccagcttggacacaagccgaaatctgaacatacagattggaggtggaacacgctgagcaggccctgggccagctcttccaactgatccatcaacaagtgtgtgtggggtgacgatggaggcgggcctgatacttttcctctttggccatgggtggttcatgggtggttgggtgtctgggacaagacccccaaaagtctgtttgtccccatgtgtggtgaggggaggtgtctgtggggagcctctgaaaggatccctctcctgcactctcgggactgatctaagctaaggggtgcattaagtcctgttttgtataaggttcaggctggcaggggattgattggagaaacactttgggaccca

SEQ ID NO: 1867 - DNA, 574 bp, Homo sapiens
  MAP TO CHR1.1; EXPRESSED IN ADULT LIVER, SIGNAL =   2; EXPRESSED IN BONE MARROW, SIGNAL =   1; EXPRESSED IN FETAL LIVER, SIGNAL = 1.6; EXPRESSED IN HELA, SIGNAL = 0.85; EXPRESSED IN BRAIN, SIGNAL = 0.95; EXPRESSED IN LUNG, SIGNAL = 0.97; EXPRESSED IN HEART, SIGNAL = 1.3; SWISSPROT HIT: O25455, EVALUE 4.80e-01; NT HIT: gi10863978, EVALUE 0.00e+00; EST_HUMAN HIT: BE299468.1, EVALUE 0.00e+00
tgtccgcacagaactcaatccatcagagaaatataaagctatggtattggcaggactgcgacaagagatcgtgttggacgttagctcctgagcagtgggcttctggacatatcaggtacatcaggaacatctctatcaagaacacaatttcatcaaggctgagggccatctgaaacagacggagaaaatatatactcagcaaatacaaagcgaggatgtagaattgacctctatgaaaggggaagtcacctccatgaagaaagtgctagaagaatacaagaaaaagttcagtgacatctgagaaacttatggaacgccatcttcagcatcaaaagctccaaggcctctatgatagccttaggctacgtaacatccctattgctaaccgtgaaggcacccttgaaccatctacgattgcacagtctggtgtttttggcttcccattaggaataacaactccaagtttcctttggatagtacacctgtttaaatcagggtgatggagatggagattttcagttcagacctttttttttgtgggttcttccacagcacctgaaaccagcaacagctt

SEQ ID NO: 1868 - DNA, 583 bp, Homo sapiens
  MAP TO CHR5.1; EXPRESSED IN ADULT LIVER, SIGNAL = 1.6; EXPRESSED IN FETAL LIVER, SIGNAL = 0.98; EXPRESSED IN LUNG, SIGNAL = 1.4; EXPRESSED IN HELA, SIGNAL = 0.67; EXPRESSED IN BRAIN, SIGNAL = 1.2; EXPRESSED IN BONE MARROW, SIGNAL = 1.3; EXPRESSED IN HEART, SIGNAL = 1.6; EST_HUMAN HIT: AA033953.1, EVALUE 4.00e-49; SWISSPROT HIT: P16471, EVALUE 2.00e-12; NT HIT: AF091868.1, EVALUE 1.00e-66
tggaggaaaacactcttgggtttaagagtttcattcattaggttggtttgtttttaatgatgctgtacgtgatcaaagctttctggctgtttgttttttagacttcaccatgaatgatacaaccgtgtggatctctgtggctgtcctttctgctgtcatctgtttgattattgtctgggcagtggctttgaagggctataggtacttcactgtctctcaacttttcctcccaatcatgatagtcaaggataatgacaaaaaaaaaaatacaaagatgatggaaacctgtagataatcctcattttagccattagatgtagtgtgtttgcccataaaaaaaatcttttatcagtgctataaaaagtagaaaaattgactcgtttcaggctgatgttctttctatgaaacagagattcctagttgtgaaacagtaaaaatctggcaagagtagctaaaatcaagagaagcaaatagtccagataatccactaacttcaaaatcagcctccttaattagctaaagttaattttaatataggcctctgtaattttattttcatcattgattgtttcatggagctgcc

SEQ ID NO: 1869 - DNA, 559 bp, Homo sapiens
  MAP TO CHR19.1; EXPRESSED IN HEART, SIGNAL = 1.2; EXPRESSED IN ADULT LIVER, SIGNAL = 0.78; EXPRESSED IN BONE MARROW, SIGNAL = 1.5; EXPRESSED IN FETAL LIVER, SIGNAL = 1.2; EXPRESSED IN PLACENTA, SIGNAL = 1.2; EXPRESSED IN LUNG, SIGNAL = 1.6; EXPRESSED IN BRAIN, SIGNAL = 1.5; EXPRESSED IN HELA, SIGNAL = 0.92; NT HIT: AB037816.1, EVALUE 9.00e-80; EST_HUMAN HIT: BF980727.1, EVALUE 1.00e-79
tcgagattgaaattgagcccatctttgggatcttggctctgtatgatgtgcgggagaaaaagaaggtaggaggcccttttttctctttcctccccttccttctccttgttggggggctgtgggcttcccagaggtggtggcccagctgcctctggtgtccccagatctcggagaacttctacttcgacctgaactcggactccatgaaggggctgcttcgggctcatggcacccaccctgccatctccaccctggcccgctctgccatcttctctgtgacctacccctcacctgacatcttcctggtcatcaaggtgcctgctggggctgggcaagggggtggtaatggcgaatgtcactgatttagtccctgccttcacagaatgagacagatacatcaccaagaagggtaatcagggctgttgtgggggaaacacaggcagggaggaggcccctgatccaactcaggtggggagaaatcaccaagggcttccagggagaggcgacagttgagctgataactatacgtgggcagcctggggagaaaagccatccctag

SEQ ID NO: 1870 - DNA, 518 bp, Homo sapiens
  MAP TO CHR6.1; EXPRESSED IN ADULT LIVER, SIGNAL = 3.6; EXPRESSED IN BRAIN, SIGNAL = 3.5; EXPRESSED IN BONE MARROW, SIGNAL = 3.5; EXPRESSED IN FETAL LIVER, SIGNAL = 3.4; EXPRESSED IN PLACENTA, SIGNAL = 3.9; EXPRESSED IN LUNG, SIGNAL = 2.1; EXPRESSED IN HELA, SIGNAL = 3.9; EXPRESSED IN HEART, SIGNAL =   2; SWISSPROT HIT: P43535, EVALUE 2.00e-05; NT HIT: gi14761357, EVALUE 8.00e-80; EST_HUMAN HIT: AA311258.1, EVALUE 8.00e-78
ctgactgttctccctctgcctcccagaggtggtagcagatgagacaccagcagtccaggctgttcttcgagctgacaccaagcgattgaagctgctggaagaggagcggcggcttcagggacagctggaacaaggggatgacacagctgctgagaggctagagaaggtagaggagatggcgcaggggacacgggcaaagacttgggggttcctgggaccctcagacgtgtgtcctcttctccctcctcccaggtgtatgaggaattgcgggccactggggcggcagctgcagaggccaaagcacggcggatcctggctggcctgggctttgaccctgaaatgcagaatcgacccacacagaagttctcagggggctggcgcatgcgtgtctccctggccaggtgggccattcacctcactgccctcccttccagcctcagaccaccggggcccttttcctctttcccttctcattcttccaaggccaatagggaggctcaaggcttacctctccctcc

SEQ ID NO: 1871 - DNA, 552 bp, Homo sapiens
  MAP TO CHR2.1; EXPRESSED IN BRAIN, SIGNAL = 0.97; EXPRESSED IN HEART, SIGNAL = 3.4; EXPRESSED IN BONE MARROW, SIGNAL =   1; EXPRESSED IN FETAL LIVER, SIGNAL = 0.67; SWISSPROT HIT: Q90688, EVALUE 1.00e-03; NT HIT: gi16157781, EVALUE 0.00e+00; EST_HUMAN HIT: BF576571.1, EVALUE 2.00e-87
cagaaggtggaaaacgcttcttaactttgcacaaagtcaaactggaccaagctggtgaagtcctctaccaggcccttaatgcaattacaactgccattttgacagtaaaaggtatggggcttttagaatttggggaggggtctcaactttatttcacttccctgtgcattctgaaaagcctcattcttaatgtctgattttcagaaatcgaacttgactttgctgtgcccctgaaggatgtcactgttccagaaaggcgacaggctcgattcgaatgtgtcctcacccgagaggcaaatgttatatggtccaaaggacctgatataattaagtcatctgacaaatttgatatcatcgctgatggaaagaaacatattcttgttattaatgattctcaatttgatgatgaaggggtctatactgctgaggtggagggcaagaagacctcagctcggttgtttgtcacaggtaagcgagctaatgagatctgtgacatcccataaaggcatgcaaatatatgactttaaagataggacgccaagttctaaaagc

SEQ ID NO: 1872 - DNA, 560 bp, Homo sapiens
  MAP TO CHR19.1; EXPRESSED IN LUNG, SIGNAL = 1.7; EXPRESSED IN BRAIN, SIGNAL = 3.7; EXPRESSED IN HEART, SIGNAL = 2.5; EXPRESSED IN ADULT LIVER, SIGNAL = 3.7; EXPRESSED IN BONE MARROW, SIGNAL = 3.6; EXPRESSED IN PLACENTA, SIGNAL =   4; EXPRESSED IN FETAL LIVER, SIGNAL = 4.5; SWISSPROT HIT: Q63413, EVALUE 2.00e-18; NT HIT: gi15303154, EVALUE 1.00e-117; EST_HUMAN HIT: BI463046.1, EVALUE 0.00e+00
caatcagaagaggccgagtccggacaaggccacagacacctgcagggctggggtatccgcctggtcaaagcagaacgccccactgccgagggcagccacaggccccgctgggcacaactgatccgcgggacagacgggcccctccctcacccacggcaaactggaggcggcaccgctctgggcgggcagggctggtcttgtcttggtgaggacctgggcaagaggataacacccagaaggcgtaccctcagaaggatgctcaaagccacagtccacgatggcccgcaggagctccggcttcagcagaaagtcccggaagccagagctgtggatggaaacgtaggatcccttgatgtctttcttagggggagctggtgtgctctcttgaggagcctggggctcttcctcttcatcgtaatccaaaagatcgttttccacatcctgttctgccatgatgctgagaagagagagaggcagggtcccgcgagtgggcacagaaggatgatgaagcttcattcaaatggcattctctgccgcctccttccatgagtgagcccatc

SEQ ID NO: 1873 - DNA, 519 bp, Homo sapiens
  MAP TO CHR1.1; EXPRESSED IN HELA, SIGNAL = 0.75; EXPRESSED IN BRAIN, SIGNAL = 0.64; EXPRESSED IN HEART, SIGNAL = 0.77; EXPRESSED IN BONE MARROW, SIGNAL = 0.43; EXPRESSED IN ADULT LIVER, SIGNAL = 0.48; EXPRESSED IN FETAL LIVER, SIGNAL = 0.55; EXPRESSED IN LUNG, SIGNAL = 0.58; EST_HUMAN HIT: H58183.1, EVALUE 2.00e-04; SWISSPROT HIT: P52720, EVALUE 1.20e+00; NT HIT: AL163204.2, EVALUE 1.00e-04
ctggtgatcaaccccttttggcacagttagttacaacctgcttgatgcaccccactgatccccacaccccacaaggattgcacagatgtgccacagtggccactctcagtcagagcatggtgcagggaactcatgcctccttgctctaaacccatcaattagaacttctcacgggaaacctgcttgggtagtgttgtggactccaataaagtctttggccttcgggtcctttgtgtcctttctcttgcttcctgcccactggttgagtgtgtgtgtcctggtcagctcccttcctgttggccctgtgaagggtgctcccctcttctctctgggacctgtaagtaataaactgcttgtgatattttatgtgttttgttgtgtcacctcttctgtttctcaccagattgacacacctgaacctaatttctttcctggtcagggcttgcctagagagtggctatcttggttacgagcaaagtagacacaagtcagacaagaaccacaagggtatctgccagt

SEQ ID NO: 1874 - DNA, 537 bp, Homo sapiens
  MAP TO CHR5.1; EXPRESSED IN BONE MARROW, SIGNAL = 4.7; EXPRESSED IN ADULT LIVER, SIGNAL = 4.8; EXPRESSED IN PLACENTA, SIGNAL = 3.7; EXPRESSED IN FETAL LIVER, SIGNAL = 3.4; EXPRESSED IN HEART, SIGNAL = 2.6; EXPRESSED IN LUNG, SIGNAL = 2.3; EXPRESSED IN BRAIN, SIGNAL = 4.5; EXPRESSED IN HELA, SIGNAL = 2.6; EST_HUMAN HIT: BG426437.1, EVALUE 0.00e+00; SWISSPROT HIT: P16471, EVALUE 5.00e-28; NT HIT: AF091865.1, EVALUE 1.00e-108
aaatgggcagaacatggaagcctaaggaaccatttgtcagctctgggttttgcgcttggaatttctgatacccaaaggccagtggtattgatctatgaagaaaaaaactagactctctttattactttcttattcattcctaatacattacttattgcagagagacactcatgcatgaatgtccagactacataaccggtggccccaactcctgccactttggcaagcagtacacctccatgtggaggacatacatcatgatggtcaatgccactaaccagatgggaagcagtttctcggatgaactttatgtggacgtgacttacataggtaaggggaaggaaagtgggtgaggaatttcttactccactatgtattagccaatagtcacactcagtttgagtcttcttgggttttggatggatccccaaaaagaaagatgagaaaactcacgatatgcttgtcaacagaacagttcaaatcattttttatcaagtcattcatgacactaaggctggcacttgggatccttgtgtt

SEQ ID NO: 1875 - DNA, 568 bp, Homo sapiens
  MAP TO CHR20.1; EXPRESSED IN HEART, SIGNAL =   4; EXPRESSED IN ADULT LIVER, SIGNAL = 2.1; EXPRESSED IN FETAL LIVER, SIGNAL = 3.2; EXPRESSED IN LUNG, SIGNAL = 4.4; EXPRESSED IN HELA, SIGNAL = 3.2; EXPRESSED IN BRAIN, SIGNAL = 3.3; EXPRESSED IN BONE MARROW, SIGNAL = 3.4; EXPRESSED IN PLACENTA, SIGNAL = 2.6; SWISSPROT HIT: P19725, EVALUE 2.80e-01; NT HIT: D00591.1, EVALUE 8.50e+00
aaactggtctccacaccctgccctgtgccccacagttcccagctccaggcttctacgcctccaatcccttctcccactggaattcagccgcctcttctgggccctccagtctgaattcgtcttgagctcagcgatcagggagggctttattaaaggatctccctgagacattttctctcctggcactgggggcctcctctccagctcccagaggcccagcccacctagtccttctacagagactcaggggtcggcctgcctgattaatgaggttccatggcaaccagggcctgggagggtggagggtggcagatggaaggacaggcagagggaggggatcagcagctggtccagctgccccgcccctgcagagaaggcctcccagccaggagggctgtccccagaggcctggccggccaggcctgcacctggcagtcagcatcgaggcaggaaggagggtctcctcaatggctcaccaacggttaggccccaggactttcctccgccccgccttcacttcccctagcagctgtgctcactaccgagatgcaaattctgagctgaagcc

SEQ ID NO: 1876 - DNA, 500 bp, Homo sapiens
  MAP TO CHR7.1; EXPRESSED IN BRAIN, SIGNAL = 0.88; EXPRESSED IN BONE MARROW, SIGNAL = 0.99; EXPRESSED IN FETAL LIVER, SIGNAL = 0.63; EXPRESSED IN LUNG, SIGNAL = 0.58; EST_HUMAN HIT: BE091067.1, EVALUE 8.00e-47; SWISSPROT HIT: Q00536, EVALUE 4.00e-08; NT HIT: gi6912583, EVALUE 5.00e-47
atatctctcatctgacagtgtgccaaaattataatggtatatattagttgattgttatccacgataaattgtttctctgtccattttgttttacagcttctcttttaaaaggactaaaacatgctaacatagtgctacttcatgacatcatccataccaaggagacgctgacacttgtgtttgaatatgtggtaagtaaaataagacttttaaatttagacatttaaaatatgaatgaaattcttatagtgttgtcatagaatttcgtttttagattgctgtactgaagttaatattttatctgaatacatgagaattataattttgtataaaataaaggccctataagagattattgaatgatatgtatcttaaaagaaaaacccagaaaaatgttaacttgaatttttatcagatatgttatctatttataacctatttgttactaggatacattgtaatttttaggtttattacataggattcaacagcctgatggt

SEQ ID NO: 1877 - DNA, 586 bp, Homo sapiens
  MAP TO CHR7.1; EXPRESSED IN BONE MARROW, SIGNAL = 3.8; EXPRESSED IN HEART, SIGNAL = 5.5; EXPRESSED IN ADULT LIVER, SIGNAL = 0.9; EXPRESSED IN FETAL LIVER, SIGNAL = 3.3; EXPRESSED IN LUNG, SIGNAL = 6.3; EXPRESSED IN HELA, SIGNAL = 3.3; EXPRESSED IN BRAIN, SIGNAL = 3.6; NT HIT: gi14752048, EVALUE 7.00e-19; EST_HUMAN HIT: BG183318.1, EVALUE 2.00e-17; SWISSPROT HIT: O35867, EVALUE 5.00e-03
attgtcaggctgtgacctcccccagaactcatcatcttgaagggtacatccaggagaggatctgccatttctcatagtatttatcacagccaacaataagcgatccttcccaggaggtgctctagctacctttctaatatgaattgccatctgttcctaataactcagcctctccacaccatcttgtatttttacttacactgttactcatcacgattagggtcaaagaagataggcttattaatattattcctctgagcagttgcagaggataatgaattctgtacccttgaagagcaattgaagaattgtctctctaaaacatctatcctttcatcacatggagaaagcacccagaattccctcaaccagacaaggtgcagcattctcaaccgctgccccattgaaggtcatcaccaaatcatacatgaatttctgctaagattgtttaaaagagcccttttagagcttgtagacacacctacctcttgctcactcactgcactcatttaacactgagcttcatttatttttacagaattttaccttcaatgatgacttcagtcccagcagtaccagttcagca

SEQ ID NO: 1878 - DNA, 512 bp, Homo sapiens
  MAP TO CHR1.1; EXPRESSED IN HELA, SIGNAL = 2.3; EXPRESSED IN BRAIN, SIGNAL = 1.7; EXPRESSED IN BONE MARROW, SIGNAL = 1.7; EXPRESSED IN HEART, SIGNAL = 2.6; EXPRESSED IN PLACENTA, SIGNAL = 2.2; EXPRESSED IN FETAL LIVER, SIGNAL = 2.3; EXPRESSED IN LUNG, SIGNAL = 2.5; NT HIT: gi14727273, EVALUE 1.00e-105; EST_HUMAN HIT: BI753651.1, EVALUE 1.00e-106; SWISSPROT HIT: P25323, EVALUE 1.00e-08
caagggtctttgcctactggaggaggaactggaaggataaggtgacctgaactgctcctctggatgatggaaaatgatggagctcagtctgcagatgccttggtggcatcaggcggctcactggctggccttcctgatctgtatctcatccttccagcctcctgctccagtcccatcacagtctgctctctgccatcccctctgctgtaactaagcctctctgttctctgccatctccccctcccccaaccctggcccccacagtgtggctctgcagaatacatggcccctgaggtagtggaggtcttcacggaccaggccacattctacgacaagcgctgtgacctgtggagcctgggcgtggtcctctacatcatgctgagtggctacccacccttcgtgggtcactgcggggccgactgtggctgggaccggggcgaggtctgcagggtgtgccaggtgagtgcggccccagggagcactgcgtagaccctgctaggggtcagtgtggt

SEQ ID NO: 1879 - DNA, 585 bp, Homo sapiens
  MAP TO CHR1.1; EXPRESSED IN PLACENTA, SIGNAL = 1.4; EXPRESSED IN FETAL LIVER, SIGNAL =   1; EXPRESSED IN LUNG, SIGNAL = 0.82; EXPRESSED IN HELA, SIGNAL = 1.3; EXPRESSED IN BRAIN, SIGNAL = 1.8; EXPRESSED IN HEART, SIGNAL =   1; EXPRESSED IN ADULT LIVER, SIGNAL = 2.2; EXPRESSED IN BONE MARROW, SIGNAL = 1.3; SWISSPROT HIT: Q9UBM4, EVALUE 3.00e-31; NT HIT: gi16160965, EVALUE 1.00e-108; EST_HUMAN HIT: AA457415.1, EVALUE 4.00e-92
tgcacaggacaaaactccagggaggggcactgaggcatccgagggcttttccaaggagtcctggtttatgttatttcctctggtttgggcctagtgcaggtggagagctggttagaatcccctcatcttgagagggatggagcaaggtgtggagacagctccaacctggacaaggaaagatagtgtgttctggtttctctctttgttctcccctaacctctctcagcaaagttgaagaggattgacctctccaacaacctcatttcctccatcgataatgatgccttccgactgctacatgccctccaggacctcatcctcccagagaaccagttggaagctctgcccgtgctgcccagtggcattgagttcctggatgtccgcctaaatcggctccagagctcggggatacagcctgcagccttcagggtgagtcaaggccttagatccactatctatcacctccaccacccacctctaccaccacccacctccaccacctacctccaccactcacctccaccaccacccacctccacctctaccacccacctccaccatcacccacctctaccaccacccact

SEQ ID NO: 1880 - DNA, 589 bp, Homo sapiens
  MAP TO CHR1.1; EXPRESSED IN FETAL LIVER, SIGNAL = 1.7; EXPRESSED IN BRAIN, SIGNAL =   2; EXPRESSED IN HELA, SIGNAL = 2.1; EXPRESSED IN BONE MARROW, SIGNAL = 2.1; EXPRESSED IN ADULT LIVER, SIGNAL = 1.5; EXPRESSED IN LUNG, SIGNAL = 1.9; EXPRESSED IN PLACENTA, SIGNAL =   2; EXPRESSED IN HEART, SIGNAL = 2.2; SWISSPROT HIT: P80560, EVALUE 1.50e+00; NT HIT: D86853.1, EVALUE 2.00e-03; EST_HUMAN HIT: AI570922.1, EVALUE 5.30e-02
ctctctcaggaacacagggctggatttttgacctccatattgctccaaactggcatagtttcccaatattctctttcccaactggctcggtgcatggccggatgctgccacactcactttccactcccctgattcccatcttattatcagattttctccctttcgccttcacgggagactctggggaagggattgttttggctggaatttgacaaggcacaggtggttttaccagctgcaagttctttagttcttgttggccgcccaccaactcttggtcttttcacagtcctttctgtggtggtggtggaggaggaggggcaggaagggacagtaagtccttgatgttgttgttccacatcagcagctgtctcaggttggcattgagtccggagtgtttttcgggaaaggttttttttttttggtttttttttttttttttttttttttcctcttgagattggagagagctggaggaaacagccaaaacccgacagctctgcctgcatcttggtcagttcgcctgggggtatcagggccgctgctcccctctgcacacatgcctgccccagttgtaccaggctcccat

SEQ ID NO: 1881 - DNA, 527 bp, Homo sapiens
  MAP TO CHR17.1; EXPRESSED IN FETAL LIVER, SIGNAL = 0.33; EXPRESSED IN BRAIN, SIGNAL = 0.46; EXPRESSED IN ADULT LIVER, SIGNAL = 0.55; EXPRESSED IN BONE MARROW, SIGNAL = 0.52; SWISSPROT HIT: Q12809, EVALUE 2.00e-17; NT HIT: gi6912445, EVALUE 0.00e+00; EST_HUMAN HIT: BG758764.1, EVALUE 2.00e-57
atggccagaatgacctatgccccttatgcagttactgcgtgacttcccagacgagctgagagctgacattgctatgcacctgaatcgggagatcctgcagctgccgttgttcggggcagcgagcaggggctgcctgcgggccctatcgctgcacatcaagacctcgttctgcgctccgggcgagtacctgttgcgccgtggggatgccctgcaggcacattactatgtctgctccggctcgcttgaggtgctccgagacaacatggtgctggccatcctgggtaaggacaccgtcaccctctactacctaccctggaaccaccccccgcaacccccactgaggacttgggaatggccaggattctagggaatgggatacccctcgtggatacctacagttcctgctgaggagtactctctcggtccctccgccctacgaccatcgcctttagacaattccccctaatccccttgggcatccctcaacccatcaacccttcccggtgactgtccccagctcaattgat

SEQ ID NO: 1882 - DNA, 594 bp, Homo sapiens
  MAP TO CHR19.1; EXPRESSED IN PLACENTA, SIGNAL = 2.5; EXPRESSED IN FETAL LIVER, SIGNAL =   2; EXPRESSED IN LUNG, SIGNAL = 3.7; EXPRESSED IN HELA, SIGNAL = 2.9; EXPRESSED IN BRAIN, SIGNAL = 1.8; EXPRESSED IN HEART, SIGNAL = 3.5; EXPRESSED IN BONE MARROW, SIGNAL = 1.9; SWISSPROT HIT: P20129, EVALUE 3.40e+00; NT HIT: gi14758681, EVALUE 3.60e-02; EST_HUMAN HIT: BG024307.1, EVALUE 2.10e-01
cccaggtgaaagagaagctgttcccttctccccccacagctgaccaggaagtgacctttcgggcacgctggccttctccctgcctcacaccagcctggtaccaccccaaccacagcccagcgggtgatctctccggtctcctgtgccatgcacatgcagagcctggcccttctttgtacacttatcccaaccctaagtgaccaaacttgaggttctgtgagaccaggccaccggggttggcccgggtggctccgatgccccagaggagaaactgtaagggcagggctcacctcggccgcggctgctgccctccttggcacgccggtactggttcagctctttggtgaagtcgtcatagtcctccttgcccatgtcctcctcctcgtcgccctcatattccccatactgctcattctcgtagtcctcgtacatgccataactcttgctgtccatcttggagtatgccttcttgggcaggggcgtggcatgcgatggggggtactgctggtgggactgcgtcccagagatggggaaaagaggtgagccggatcccacagccgtgggtgcagactaccaagatacccagggttccct

SEQ ID NO: 1883 - DNA, 591 bp, Homo sapiens
  MAP TO CHR1.1; EXPRESSED IN BONE MARROW, SIGNAL = 0.88; EXPRESSED IN LUNG, SIGNAL = 0.69; EXPRESSED IN HELA, SIGNAL = 0.87; EXPRESSED IN BRAIN, SIGNAL = 0.87; EXPRESSED IN HEART, SIGNAL =   1; EST_HUMAN HIT: BE901661.1, EVALUE 2.10e-01; SWISSPROT HIT: Q9IAK1, EVALUE 1.10e+00; NT HIT: AY048260.1, EVALUE 1.40e-01
ccacagtgatggtggaacacaccctgctctttactctcacgtttctgagtgtgggggttttgcgccctgcccctgaccccgagaggctggctgcctccgtcctgcggcctttgtcagtgtttatctgctttctttgtacatgaagctcttcttccctgagagttccctgagggcagaggctgagcaggatacatctgggccccctatgcccagcccagggtctgggccacagcaggcatcgttcagtgctccctgaattgaagcattgatgtctgctgggggaagggccctttggtgagtgctacaaaggggcatctataagtcagcctctgccagatgtccagctgctttctctcctcagaggggtctgctcctctaagaacagtgtctaaaaatgggctctgtatatataggaaatgctgtatgtataggaaaaaactgcccactgatcctttatgcctcatgtaagcagttgcccagatgctactatcttcaagaagccctccttgccatctttgattaagagtgacctctctttgcttaagtgccctcacagcccacagtctgtctcctttccatcctgtccatggt

SEQ ID NO: 1884 - DNA, 502 bp, Homo sapiens
  MAP TO CHR8.1; EXPRESSED IN BONE MARROW, SIGNAL = 7.4; EXPRESSED IN ADULT LIVER, SIGNAL = 9.6; EXPRESSED IN PLACENTA, SIGNAL = 5.2; EXPRESSED IN FETAL LIVER, SIGNAL = 6.1; EXPRESSED IN BRAIN, SIGNAL = 6.9; EXPRESSED IN HEART, SIGNAL =   6; EXPRESSED IN LUNG, SIGNAL =   5; EXPRESSED IN HELA, SIGNAL = 4.1; EST_HUMAN HIT: BE279786.1, EVALUE 0.00e+00; SWISSPROT HIT: P21860, EVALUE 7.30e-01; NT HIT: AB007965.1, EVALUE 0.00e+00
ctccttccactcagtctccggcctgtcttctcgaccgaggtgtccacctgtccaccgggagcttgtccagagcccggctgtccggcgctgtcagtgcccagtgcccagagcctgctgcccccagactcctggctgccagccccccaacccacacctgtgtggcatgcagcaggcggcggggcgcctcacctgtgtagccaatcttctcgaagctgagcaggctgaagatgctgttgtacagctgcatctccttgcggtggctctggtccatcccatccaggatctccatcagctcactgcctgtcttggtcgggtgggcgcacgcagcctcgtgcaccgtcagctcatggaaggggccgtgccatgggcagccgatgcgtttgtacttgcactgggttaccctgggggaggcaggtacattactcacagactgagccccgaacaggaggctgcaacaagctgtcctcccatatggcttccatccagctaagaaccccttcct

SEQ ID NO: 1885 - DNA, 562 bp, Homo sapiens
  MAP TO CHR6.1; EXPRESSED IN FETAL LIVER, SIGNAL = 4.2; EXPRESSED IN HELA, SIGNAL = 3.7; EXPRESSED IN BRAIN, SIGNAL = 3.6; EXPRESSED IN PLACENTA, SIGNAL = 3.1; EXPRESSED IN LUNG, SIGNAL = 4.1; EXPRESSED IN HEART, SIGNAL = 3.5; EXPRESSED IN BONE MARROW, SIGNAL = 3.5; EXPRESSED IN ADULT LIVER, SIGNAL = 3.9; NT HIT: gi13645061, EVALUE 0.00e+00; EST_HUMAN HIT: BE841771.1, EVALUE 1.00e-109; SWISSPROT HIT: Q15776, EVALUE 1.00e-116
acattggtagggcttctcccctgtgtgaattctcaggtgttgaatgagaccagtgttcccattgaaagctttcccacattctttacatttatagggtctttctccagtgtggattctctgatgttcaataaggcctgacttctgactgaaggccctcccacactcattgcatttgtagggtttctccccagtgtggctcctctgatgaccaataagatgtgagctccgcctgaaggttttcccacactcatcacactcatagggcttctccccagtgtggattctctgatgtccaatgaggtgtgagctatgactgaaagctttcccacactcattacattcatagggtctctctccactgtggattctctggtgcagaataaggcccgcactctgactgaaagccttcccacactgattgcactgatatggcttctccccagtgtggattctctggtgcagaatcaggcctgtgttctgactgaaggctttgccacactccttacagtgatagcgttttactttgttgtggatatcctgatgtgaaagaagggctgacctg

SEQ ID NO: 1886 - DNA, 575 bp, Homo sapiens
  MAP TO CHR14.1; EXPRESSED IN BONE MARROW, SIGNAL = 0.99; EXPRESSED IN ADULT LIVER, SIGNAL = 0.63; EXPRESSED IN FETAL LIVER, SIGNAL = 0.9; EXPRESSED IN BRAIN, SIGNAL = 0.94; EXPRESSED IN HEART, SIGNAL = 0.58; SWISSPROT HIT: O15488, EVALUE 4.20e+00; NT HIT: gi13385891, EVALUE 2.00e-31; EST_HUMAN HIT: AA379943.1, EVALUE 2.00e-88
gacttcccagctacccagtgatctggagtaagagaggggagagtctggaaacatcaaagagaggggctggtactcaccaagctcagcagcaatttccttccgggccctcaaggctgctccactccagatggcatctagcacacggctgccatggcgactacaggccagagccacatattgtccctgtatggagacaagcaaagtaggtctccctagcaaaatccacaaaagtattttggaggcttgtggagagtgaattttctgaagagtttaagggctgaattaaaatagtctaggaattacatagcctttttgagtctgaaggtacagtccagggaaagctcatattctctaaatggatgatggtggggaatcaaggcaaaagccagaaatctaacctttaggttctgcagcacacggcggcgcagcttgcgcgtcacagaggggctggtcaggatggcatcgagcacatgagagccagcgggactttgggcaagggacagaagctgtggtcccgtcaaggcacccagacttcgaagtacaagaccaggagtggagaagtgcagcagatgctg

SEQ ID NO: 1887 - DNA, 594 bp, Homo sapiens
  MAP TO CHR1.1; EXPRESSED IN LUNG, SIGNAL = 1.9; EXPRESSED IN BRAIN, SIGNAL = 2.4; EXPRESSED IN HEART, SIGNAL = 1.6; EXPRESSED IN ADULT LIVER, SIGNAL = 2.8; EXPRESSED IN BONE MARROW, SIGNAL = 2.7; EXPRESSED IN PLACENTA, SIGNAL = 1.8; EXPRESSED IN FETAL LIVER, SIGNAL = 2.2; EXPRESSED IN HELA, SIGNAL = 1.6; SWISSPROT HIT: Q9NAS5, EVALUE 5.10e-01; NT HIT: gi14861871, EVALUE 1.00e-04; EST_HUMAN HIT: AI174897.1, EVALUE 0.00e+00
tcatggcagtgaaaaattcagaagtcatggcacaactaactgaatctagacaaagtattttgaagctagagagtgagttagagaacaaagacgaaatacttagagacaaattttctttaatgaatgaaaaccgagaattaaaggtccgtgttgcagcacagaatgagcgactagatttatgtcaacaagaaattgaaagttcaagggtagaactaagaagtttggaaaagattatatcccagttgccagtaagtatgtgtgattacgtaatggaaaagaagaattttactaaagtgttttagaaaagactatcattttgtggttgctttattagcttctaatttctttttctctatacttttagtcatgaatttctcttctgtctaaatctctattttttttcctgcacttaccattctacacttttccccagtttctcagatgccatatataagaatggcacagaattttttttaaacagctttgttgaagtatcatttatataccataaaatttgcctgttttaagtgtactaatctatgatttttagtaaatttataagttttgtaacaatcaccatgatccagctttgaa

SEQ ID NO: 1888 - DNA, 599 bp, Homo sapiens
  MAP TO CHR7.1; EXPRESSED IN PLACENTA, SIGNAL = 1.6; EXPRESSED IN FETAL LIVER, SIGNAL = 1.4; EXPRESSED IN HELA, SIGNAL = 3.4; EXPRESSED IN LUNG, SIGNAL = 0.96; EXPRESSED IN BRAIN, SIGNAL = 1.7; EXPRESSED IN HEART, SIGNAL = 0.87; EXPRESSED IN ADULT LIVER, SIGNAL = 1.3; SWISSPROT HIT: P08243, EVALUE 2.00e-48; NT HIT: M27054.1, EVALUE 0.00e+00; EST_HUMAN HIT: AA205575.1, EVALUE 0.00e+00
tgcagagttggattggatattgaatatttttgatttgtctgcttttctctccatagaaagcttatagcttcattgcaccatgtgtggcatttgggcgctgtttggcagtgatgattgcctttctgttcagtgtctgagtgctatgaagattgcacacagaggtccagatgcattccgttttgagaatgtcaatggatacaccaactgctgctttggatttcaccggttggcggtagttgacccgctgtttggaatgcagccaattcgagtgaagaaatatccgtatttgtggctctgttacaatggtgaaatctacaaccataagaaggtgaggagaaagaaaccagatgtctggatgcgattaaacttcagagtttgttggttacgatgatgttacatattctgtatcatgctttttcctttgcaaagcactctatgttcgttatctcatttgctctaagtatgtaaatagggaactgatgaataaaaaggtgagtgaaatgacttggtcacaaaaaaagtgataaaaatggggattacagttcagtttcattgactcttagaattttttctccttctccccagcttttcattttgaa

SEQ ID NO: 1889 - DNA, 549 bp, Homo sapiens
  MAP TO CHR17.1; EXPRESSED IN HELA, SIGNAL = 3.7; EXPRESSED IN BRAIN, SIGNAL = 4.2; EXPRESSED IN HEART, SIGNAL = 2.1; EXPRESSED IN ADULT LIVER, SIGNAL = 5.6; EXPRESSED IN PLACENTA, SIGNAL = 3.8; EXPRESSED IN FETAL LIVER, SIGNAL = 3.7; EXPRESSED IN LUNG, SIGNAL =   2; EST_HUMAN HIT: BF529743.1, EVALUE 2.00e-60; SWISSPROT HIT: P25389, EVALUE 2.00e-17; NT HIT: gi15302254, EVALUE 1.00e-60
tgttccactgtgagagccagtcagtggggcctgggcctcctgggaggaaggaagaggcctgagtcccacctggctgtctcagccacagagacctaaagcccgagaacctgcttttggatgagaaaaacaacatccgcattgcagacttcggcatggcgtccctgcaggtgggggacagcctcctggagaccagctgcgggtgagtggggactgggctcccgagaccctgggcaggggtttagaagctggctggaggctcacatcagctctctccctcaggtccccccattatgcgtgtccagaggtgattaaggtgagtgaggggcggatagaggggagaggggtggaggcagcagtgaggagcgatgaagtcacaactggccttcccttccagggggaaaaatatgatggccgccgggcagacatgtggagctgtggagtcatcctcttcgccctgctcgtggtaaggcgccctcacctctcctgtcatttctagatcaatcccacctggtgggagcataggacagtaccttccatcctcaggtcatc

SEQ ID NO: 1890 - DNA, 587 bp, Homo sapiens
  MAP TO CHRX.1; EXPRESSED IN FETAL LIVER, SIGNAL = 3.2; EXPRESSED IN HELA, SIGNAL =   4; EXPRESSED IN BRAIN, SIGNAL = 4.2; EXPRESSED IN BONE MARROW, SIGNAL = 3.3; EXPRESSED IN ADULT LIVER, SIGNAL = 5.1; EXPRESSED IN PLACENTA, SIGNAL = 5.3; EXPRESSED IN LUNG, SIGNAL = 5.4; EXPRESSED IN HEART, SIGNAL =   4; EST_HUMAN HIT: AI302357.1, EVALUE 1.00e-106; SWISSPROT HIT: Q15904, EVALUE 4.00e-20; NT HIT: L44140.1, EVALUE 0.00e+00
tggctaactcaccttttgcctctcccctgtccccagaatgccctggacctggccccctcctcactggtgcttcctgccgtcgactggtatgcagtcagcactctgaccacttacctgcaggagaagctcggggccagccccttgcatgtggacctggccaccctgcgggagctgaagctcaatgccagcctccctgctctgctgctcattcgcctgccctacacagccaggtactgcccgcatggcccagccaccagcctcggggcccagagagcagcaaggccctgggctatggcatgtggtggcaccgtttggctaaagatgccagtactccccaccccctcacagcccttccagaaggtgccctgtgtggccagaagaggaggggagggcctcttctgtgactcaggagttggtgcctagcactgagctgggcctccagagatgaggcagatgtgagccctgcgggtggggagccttctcacctagccaggcccttgtcacagagcaggtggccaggacttgagtgtgactgagaagcctcggggtgggatgggcttccaggagggggcactgaggtaagagtg

SEQ ID NO: 1891 - DNA, 535 bp, Homo sapiens
  MAP TO CHR22.1; EXPRESSED IN FETAL LIVER, SIGNAL = 0.92; EXPRESSED IN LUNG, SIGNAL = 0.74; EXPRESSED IN HELA, SIGNAL = 0.91; EXPRESSED IN BRAIN, SIGNAL = 0.79; EXPRESSED IN BONE MARROW, SIGNAL = 0.88; EXPRESSED IN HEART, SIGNAL = 1.1; EXPRESSED IN ADULT LIVER, SIGNAL = 1.3; EST_HUMAN HIT: BG385331.1, EVALUE 2.00e-60; SWISSPROT HIT: Q15459, EVALUE 3.00e-05; NT HIT: gi5032086, EVALUE 1.00e-60
agctaccattgattggcgactcgccgcccccacccctcgcccccttggcactgtccccccccggcatgttaagtgcccttggcctcttgggactgcctggtgccagctgctggaaatgcctgggaggagtgctaggaccgtggcctcagcactcccattcatgctgtgaggaagcagcttggcctgctgccggctggcctcagctgccctgggaggcttagcacatggacgctggctggcagaggccaaggctccttgccacccagagacctgccaggctcagctacagggaggtggcctcagcccctctctgagtcctgccattgctttgcttttcagggttcagatgatgaagaagaagggcagaaagtgcccccacccccagagacacccatgcctccacctctgcccccaactccagaccaagtcattgtccgcaaggattatgatcccaaaggtagggagggcctgcttcccaaccctcgggctgcccaggaagtcctgtgtgccctcatgtgttcctcacacccgtctt

SEQ ID NO: 1892 - DNA, 588 bp, Homo sapiens
  MAP TO CHR15.1; EXPRESSED IN HELA, SIGNAL = 0.43; EXPRESSED IN BRAIN, SIGNAL = 0.44; EXPRESSED IN LUNG, SIGNAL = 0.69; EXPRESSED IN HEART, SIGNAL = 0.56; EXPRESSED IN BONE MARROW, SIGNAL = 0.39; NT HIT: AL163301.2, EVALUE 5.60e-01; EST_HUMAN HIT: BG485195.1, EVALUE 2.10e-01; SWISSPROT HIT: Q9Z1S5, EVALUE 7.50e+00
acatttgggtggcaagagacacctacacttttacacactcacacccacccacacacacatacacatatttctcataatcagccacacttactgagtaggtattatgctgacactgtgatggataatcaaacaagaataagacagtagccctgattttgagaaggtcacaaatcagctgacctgtgctctgaaaactgtagagttccgtgagtcggtccaaacattcctaaaggtgtaacatgtctggttgcccattgaaaagatgtttgcgcagcactgtgccactcactaacagttgatagatgactgcaaatcattagtgtggctattagtgtaatgggatgttggaggtgaaagatttgactaaatggagacaatggtgcagggcttctgggatttctggaaccatatatttcatacacctattaggaaattcagaggactggcttatgttttgtaatcaccacaataaggaaaagggtaaagttcacaggcatacagagctgagcaacctccacagaataggtgggtggcaggtgcctcactacacacacaccagtcaaggcaggaaggggagaaatgcaaacc

SEQ ID NO: 1893 - DNA, 567 bp, Homo sapiens
  MAP TO CHR10.1; EXPRESSED IN LUNG, SIGNAL = 0.65; EXPRESSED IN BRAIN, SIGNAL = 0.8; EXPRESSED IN HEART, SIGNAL = 0.63; EXPRESSED IN ADULT LIVER, SIGNAL =   1; EXPRESSED IN BONE MARROW, SIGNAL = 0.77; NT HIT: U14612.1, EVALUE 0.00e+00; EST_HUMAN HIT: AU117496.1, EVALUE 2.00e-90; SWISSPROT HIT: P13674, EVALUE 1.00e-26
aagacctcgcctctctcacccagaaaataatcattaatactgtatttaaaattctgaacatcctgtttgaggcaaaatatttgcagagtactgcttcttttgtatgtttttccagagatactctgtatgatgcaagcatgattattgtgctcttatctgcataggaatagatattaaaagtattattactgtaatatattcatcatattcttaactttatgtttagacccctcggagacagaaaaaactcttttgccgctaccatgatggaaaccgtaatcctaaatttattctggctccagctaaacaggaggatgaatgggacaagcctcgtattattcgcttccatgatattatttctgatgcagaaattgaaatcgtcaaagacctacaaaaccaagggtaaataatgttttctttctttctcctcaatttactgtacctttgtatcaatttttctttgtaaaaaaataggataattgatatacgaataatgccacagattttttaaagatattttgcctcagcataatggagttactaatgatgctgtgtttatgccagttt

SEQ ID NO: 1894 - DNA, 559 bp, Homo sapiens
  MAP TO CHR19.1; EXPRESSED IN HELA, SIGNAL = 0.83; EXPRESSED IN BRAIN, SIGNAL = 0.6; EXPRESSED IN HEART, SIGNAL = 0.98; EXPRESSED IN BONE MARROW, SIGNAL = 0.6; SWISSPROT HIT: P27393, EVALUE 1.00e-04; NT HIT: gi13569947, EVALUE 1.00e-66; EST_HUMAN HIT: BG479422.1, EVALUE 2.00e-66
gggatctttcctccttcctggtttgccctcacaggatggcccccggaggctcccggccttccccattctcatggccctccttcctcccctctggcaggcaggcactgtggccccaggaggggtgagcggcccttccccagcccagctgggagccccagccctcggtgggcagcagtcagtctccaataagcttctggcctggagcggggtcctggagtggcaagaggtgaggggcctgagggtccattgggcacttgggactcctggggccgtggggctgggcatgtaggactcatggggccagatgcgtggggtctgcagtgctgggtttggaggcattcgttgcgctggacctgtgggatgcggggcgaggccaggagccccatggagtggtgggacttgcggtacagaggagagtccccatgcaaagaacccagaaaagcccaggatttggggcccagagaagagcccaggcgatgtatcatctggggcacagtggatggtgggatttaggggccgggcacgtagctgtaacatttgaggaactgaaggcttgctg

SEQ ID NO: 1895 - DNA, 529 bp, Homo sapiens
  MAP TO CHR1.1; EXPRESSED IN ADULT LIVER, SIGNAL = 0.9; EXPRESSED IN BONE MARROW, SIGNAL = 0.74; EXPRESSED IN FETAL LIVER, SIGNAL = 0.56; EXPRESSED IN BRAIN, SIGNAL = 0.75; EXPRESSED IN HEART, SIGNAL = 0.63; SWISSPROT HIT: P42454, EVALUE 6.40e+00; NT HIT: AL163248.2, EVALUE 1.30e-01; EST_HUMAN HIT: AL563767.1, EVALUE 0.00e+00
cttctgtctgctccctggaccagcttcaggacttgaaggccctcgtggctgagatcatcacacatttgcaggggctgcagagggacttatctctagcagtctcctacagcaggctccattcctcagactggaatctgtgtactgtatttgggatcctcctgggctatcctgttccctatacctttcacctgaaccagggagatgacaactgcttagctctgactccactacgagtattcactgcccggatctcatggttgctaggtcaacccccaatcctgctctattcttttagtgtcccagagagtttgttcccaggcctgagggacattctaaacacctgggagaaggacctcagaacccgatttaggactcagaatgactttgctgatctcagcatctcctctgagatagtcacactgccggctgtggccctctgactttaactctcctcccatatagaaggtactcagtaaatgatcatctctaggttggggatggcaaataatcatctcaactgccaattcca

SEQ ID NO: 1896 - DNA, 593 bp, Homo sapiens
  MAP TO CHR17.1; EXPRESSED IN BONE MARROW, SIGNAL =  11; EXPRESSED IN ADULT LIVER, SIGNAL = 6.9; EXPRESSED IN HELA, SIGNAL = 7.2; EXPRESSED IN PLACENTA, SIGNAL = 6.7; EXPRESSED IN LUNG, SIGNAL =  12; EXPRESSED IN FETAL LIVER, SIGNAL = 9.8; EXPRESSED IN BRAIN, SIGNAL = 9.2; EXPRESSED IN HEART, SIGNAL =  11; EST_HUMAN HIT: BE256708.1, EVALUE 0.00e+00; SWISSPROT HIT: Q38953, EVALUE 7.00e-13; NT HIT: gi9910207, EVALUE 0.00e+00
ccttcacaggcggtagtttccctgtttctggtccgtgctcctccagctgggccttcttcccctgaccttgctgatccttggtgaccacctccgaatgtcagaatccacatcgttaggctcacaatgtgggctgcttttgccccagtgggtccagttgccccaacacgctgtgtagtgctgaccagtgtttacgtgtggggtcggctccattcctcgctttctcccgaaacagatgtcaatgccaatcgcatcatcccgaggagacgtggagagtgtccgccgctgcctggctcacagcctcttcatgagcaccgccgagcttcagccagatggcacctatgccaccacggacacccaccagccagtggccatccacccgtcgtctgtcctcttccactgcaagccggcctgcgtcgtgtacactgagctgctctacaccaacaagtgctacatgcgggacctctgcgtcatagatgcacagtggctgtacgaggctgcccctgagtactttaggaggaagctgagaaccgccagaaactgagccgccccaggatgccgccagaatcactggtccctgggagcttggactacag

SEQ ID NO: 1897 - DNA, 563 bp, Homo sapiens
  MAP TO CHR15.1; EXPRESSED IN FETAL LIVER, SIGNAL = 0.75; EXPRESSED IN LUNG, SIGNAL = 3.3; EXPRESSED IN HELA, SIGNAL = 0.69; EXPRESSED IN BRAIN, SIGNAL = 1.9; EXPRESSED IN HEART, SIGNAL =  11; EXPRESSED IN ADULT LIVER, SIGNAL = 1.8; EXPRESSED IN BONE MARROW, SIGNAL = 1.4; EST_HUMAN HIT: BG676607.1, EVALUE 0.00e+00; SWISSPROT HIT: P04406, EVALUE 3.00e-81; NT HIT: AF261085.1, EVALUE 0.00e+00
tcaccagggctgcttttaactctggcaaagtggatattgttgccatcaatgatccctttgttgacctcaactacatggtctacatgttctagtatgattccacccatagcaagttccacagcatcatcaagcctgagaatgggaaacttgtcatcaatggaaatgccatcatcatcttccaagagagagatcccaccaaaatcaaatggggtgatgctggcactaattacatcatggagtccactggtgtcttcactaccatgaagaaggctgggactcatttagacgggggaacccaaaaaggtcatcatctctgccccctctgtcgacgtccccatgtttgtaatgggtgtgaaccatgagaagtacaaaaacggcctcaagattgtcagtaatgccttctgtaccaccaattgctcagttcccctggccaaggtcatccatgacaattctggcatcatggaagaattcatgaccacagtccatgccatcacggacacccagaagactgtggatggcccctctgggaaactatggcacaatggctgtggaattttccagaa

SEQ ID NO: 1898 - DNA, 558 bp, Homo sapiens
  MAP TO CHR5.1; EXPRESSED IN HEART, SIGNAL = 2.7; EXPRESSED IN PLACENTA, SIGNAL = 3.2; EXPRESSED IN FETAL LIVER, SIGNAL = 3.1; EXPRESSED IN BONE MARROW, SIGNAL = 2.7; EXPRESSED IN ADULT LIVER, SIGNAL = 4.1; EXPRESSED IN LUNG, SIGNAL = 1.9; EXPRESSED IN BRAIN, SIGNAL = 3.2; EXPRESSED IN HELA, SIGNAL = 3.2; EST_HUMAN HIT: BI036374.1, EVALUE 0.00e+00; SWISSPROT HIT: Q9UN66, EVALUE 1.00e-50; NT HIT: gi14861871, EVALUE 0.00e+00
aagggtctcctctctccacctatgtctctattaactcagacactggtgtgctgtatgctctgtgctcctttgactatgagcagtttagagatttgcaaatgcaggtgacggcaagtgacagtggaagcccaccacttagcagcaatgtgtcattgagactgtttgttttggaccagaatgacaatgccccagaaatcctgtaccctgccctccccactgatggttctactggtgtggagctggcaccccgctctgcagagcctggctacctggtgaccaaggtggtggcagtggacagagactcaggccagaatgcttggctctcctaccgcctattcaaggccagtgagccagggctcttctcggtggggctgcacacaggtgaagtgcgcacagctcgggccctgctagatagagatgcgctcaaacagagccttgtggtggctgtacaggaccatggccagccccctctctcggccactgtcacgctcacagtagccatagctgacagcatcccagacatcctggctgacctgggcagtcttcagatccctgcag

SEQ ID NO: 1899 - DNA, 549 bp, Homo sapiens
  MAP TO CHR2.1; EXPRESSED IN HELA, SIGNAL = 3.3; EXPRESSED IN BRAIN, SIGNAL = 2.9; EXPRESSED IN PLACENTA, SIGNAL = 3.4; EXPRESSED IN FETAL LIVER, SIGNAL = 2.7; EXPRESSED IN LUNG, SIGNAL = 1.7; EXPRESSED IN HEART, SIGNAL = 1.9; EXPRESSED IN BONE MARROW, SIGNAL = 3.1; EXPRESSED IN ADULT LIVER, SIGNAL = 3.6; NT HIT: gi8923935, EVALUE 2.00e-93; EST_HUMAN HIT: AA181709.1, EVALUE 0.00e+00; SWISSPROT HIT: P26550, EVALUE 2.00e-01
ataatgagcatggcccagagcagccagttgactgacttctgcgtgtgctgctccagacgctctgactccgtcttcagtttctccaggttctggtccgccattttcagtgagtgtgacagggtctgtgggggaggtggaaaaggtgtcaacaggactggggccaagaatggcctctctctacttccctgggactggcctgcacctcttgtcgcttgctggtgctgtgccctctgctgggaatgccatttttgccttctacgaaactcctattcatcccgcaaagccccagccacaatgctcctgtgctgggaagccttctctgatgccccagggcagaggctggagagctcccccagtccccacacctggttgtccttcttgatgacactctgggcggccagggtattggtcttgaggctccgggccagtcctagcatctcttccgccagcttttcctggaggttctgatgtcgctgcaggacgaggtctagctcagctgccgactgcttctcactcactggctgggaccctgccactccactgatttca

SEQ ID NO: 1900 - DNA, 583 bp, Homo sapiens
  MAP TO CHR17.1; EXPRESSED IN FETAL LIVER, SIGNAL = 0.69; EXPRESSED IN LUNG, SIGNAL = 0.83; EXPRESSED IN HELA, SIGNAL = 0.43; EXPRESSED IN BRAIN, SIGNAL = 0.54; EXPRESSED IN BONE MARROW, SIGNAL = 0.52; EXPRESSED IN HEART, SIGNAL = 0.87; NT HIT: AB037822.1, EVALUE 1.00e-105; EST_HUMAN HIT: BE745931.1, EVALUE 1.00e-104; SWISSPROT HIT: O30509, EVALUE 1.50e+00
tccccttcattcaagtcctgtaacgtgagtctgcaccacagtctagaacttaattacatatgaccatttcccgtatgtatgtcctgccttcccatattaaatgttagctcttcaggagcagaaaaaatgtgtttttcttcttttgcatcacagtgacacagctctgagccaagtttttaaaaacgtattgactgaatttagatttgttgatagacttgttgactaaccgaattcgagcagccacatcacggggcgtgtccacttcatctggaaacatctcttccagtctttcttgtttatatttctccaacatttttgcctcagcttcttcatctactttcttatcatacagatcatcatgcacagactccccaatagtcatagtttcatattcttcctcttcttcactactctcatcctgtagaataggattacagttttttcagaagaaatccacacctgtctctaccccaaaggccaataagctaagagtaaaataattgtactagatccctattcccaaccaacataaattctaatacagtctaaagtataaaacaaaagcctcattcctggcaactac

SEQ ID NO: 1901 - DNA, 529 bp, Homo sapiens
  MAP TO CHR17.1; EXPRESSED IN HEART, SIGNAL = 1.6; EXPRESSED IN ADULT LIVER, SIGNAL = 1.5; EXPRESSED IN FETAL LIVER, SIGNAL = 1.4; EXPRESSED IN LUNG, SIGNAL = 1.8; EXPRESSED IN BRAIN, SIGNAL = 1.4; EXPRESSED IN HELA, SIGNAL = 2.6; EXPRESSED IN BONE MARROW, SIGNAL = 1.2; EXPRESSED IN PLACENTA, SIGNAL = 1.4; SWISSPROT HIT: Q14258, EVALUE 1.00e-103; NT HIT: D21205.1, EVALUE 0.00e+00; EST_HUMAN HIT: AW499619.1, EVALUE 2.00e-97
atcctggactacaacaccgcccacaacaaagtggctctgtcagagtgctatacagtagcttctgtggctgagatgcctcagaactaccggccgcatccccagaggttcacatactgctctcaggtgctgggcctgcactgctacaagaaggggatccactactgggaggtggagctgcagaagaacaacttctgtggggtaggcatctgctacggaagcatgaaccggcagggcccagaaagcaggctcggccgcaacagcgcctcctggtgcgtggagtggttcaacaccaagatctctgcctggcacaataacgtggagaaaaccctgccctccaccaaggccacgcgggtgggcgtgcttctcaactgtgaccacggctttgtcatcttcttcgctgttgccgacaaggtccacctgatgtataagttcagggtggactttactgaggctttgtacccggctttctgggtattttctgctggtgccacactctccatctgctcccccaagtaggcaggctgtaggc

SEQ ID NO: 1902 - DNA, 583 bp, Homo sapiens
  MAP TO CHR17.1; EXPRESSED IN LUNG, SIGNAL =   1; EXPRESSED IN HELA, SIGNAL = 1.2; EXPRESSED IN BRAIN, SIGNAL = 0.93; EXPRESSED IN ADULT LIVER, SIGNAL = 1.3; EXPRESSED IN BONE MARROW, SIGNAL =   1; SWISSPROT HIT: P34703, EVALUE 2.00e-08; NT HIT: D79984.1, EVALUE 1.00e-66; EST_HUMAN HIT: BF685611.1, EVALUE 2.00e-66
gactggaacagtctggggaggtggggcctgcttactgccctggctcagtccagctctctcccccagatcctgaagcagaacaacacccggctcgagagccggacccagctggtcaccatgtgccacatgggtcccaaagtcttcatgaattgtgctggcttcctcaagatcgacacggcctccctgggggacaggtgatgccctctgcctggatggggcaggaggaattcccttgtgggctttgttttcgggtttcaggggttagggctatcaaagggccacaagccattttaacttaggaaatgttttaaagaaaaggtaaggaactttattcagtcaagagcccctgacctatggaaaagatcggttcaatcatgtgaaacatttttcgtgtgagagaaacataaaaagtaccagcttagcttataaattaagcatggaaaacacaagattttgttcagtaaacacaaacttgcttttttattattatggtttgttgtggccagataagggtgggaatagcgggggcaatgaaaaaggagtttgggggtataaagagataaggaagggggagagagatttg

SEQ ID NO: 1903 - DNA, 556 bp, Homo sapiens
  MAP TO CHR11.1; EXPRESSED IN BRAIN, SIGNAL = 0.71; EXPRESSED IN HEART, SIGNAL =   1; EXPRESSED IN BONE MARROW, SIGNAL = 0.66; EXPRESSED IN LUNG, SIGNAL = 1.1; EXPRESSED IN FETAL LIVER, SIGNAL = 0.48; SWISSPROT HIT: gi461671, EVALUE 7.00e-02; NT HIT: AJ006520.1, EVALUE 7.00e-96; EST_HUMAN HIT: BI755888.1, EVALUE 1.00e-95
cctttgtgagggtgtgtgtgccgccgggtctgtgcagtgggtgtgggtgtttgtctccctgtatccgccttctctcccgtccgggacttttagccttcctgggctcgccttcctcatgtcctttctcctccctcttggggctcaaattgggtgccctggtgaaggaggggggcacactccagaacctagtccaaccccagacgctgcctgaggcttccctccagctcccctcccttccttttctccctttcctccctccctctctttccctttctccctccccgctaaggctggcgtgccagggggtgggacatgccaatcactggctgtgcctctcccgctgccagcacagggcgcagctccccctgggagccaggtgtttgggtccctggagacgccgcaggcccccagggaggcagtggggctgaggaccctacagacccctcttcagccccgtggtgagtacatttgggagggcttgggaggggctgcactaaggtagagggtaggagggtcctggggagcgggggagggcagggatcaggatgagatggaa

SEQ ID NO: 1904 - DNA, 595 bp, Homo sapiens
  MAP TO CHR5.1; EXPRESSED IN LUNG, SIGNAL = 1.2; EXPRESSED IN HELA, SIGNAL = 2.5; EXPRESSED IN BRAIN, SIGNAL = 1.6; EXPRESSED IN HEART, SIGNAL = 1.1; EXPRESSED IN ADULT LIVER, SIGNAL = 1.2; EXPRESSED IN BONE MARROW, SIGNAL = 1.8; EXPRESSED IN PLACENTA, SIGNAL = 1.6; EXPRESSED IN FETAL LIVER, SIGNAL = 1.6; EST_HUMAN HIT: BG773808.1, EVALUE 7.00e-97; SWISSPROT HIT: O14727, EVALUE 3.40e-02; NT HIT: gi14728178, EVALUE 5.00e-97
accgacgcctcttaatgttgaagatgccaaggcagccatccccgctgtagagagtagagcagtaggcttagacgcaaggtctatttgaggaagacatttcacacagggaggggaggggaggcaaggcagctttgaagttgtacctggctgtcagcagcagctttttggctggatccagagccatgtctgcgatgtactcttcatgttgcctcatatccattaaggggccctccttccgctggtcccagagacggataccacctgtgtcatccccagtggccagaacattctcatccaccagcagaagactgttgatgggggcactagagacacagatgtagaacttcttggagcatctctgtcccagtggggacctcctggtccttacccttcacctccatgcacatacacagaattggctgctctccttacccatgagccttggaaacacgtctttccagttggccctgctccacatctagaacatggatggctttgtccttggagacagtaatgagctctggggaaaaggtgcccaggtcatggtgctgctcactgctcccttccaccacattgctggttgtcttccccagta

SEQ ID NO: 1905 - DNA, 556 bp, Homo sapiens
  MAP TO CHR14.1; EXPRESSED IN ADULT LIVER, SIGNAL = 0.48; EXPRESSED IN BONE MARROW, SIGNAL = 0.53; EXPRESSED IN FETAL LIVER, SIGNAL = 0.62; EXPRESSED IN LUNG, SIGNAL = 1.1; EXPRESSED IN BRAIN, SIGNAL = 0.53; EXPRESSED IN HEART, SIGNAL = 0.79; EST_HUMAN HIT: BF663442.1, EVALUE 0.00e+00; SWISSPROT HIT: Q9DBU0, EVALUE 7.00e-38; NT HIT: gi14750850, EVALUE 0.00e+00
gagtctgccgttagagtggcaggctgcttcagccccctccccttttggtcctggatgtaagtgggtgcccttagagatgtagctcctagtgttgaccctccctccgggggcccatccctgcagtgcctttcttcctgacgtggagtgtggtgaactcagtgcattgggccaatggttcgacacaggctctgccagccacaaccatcctgctgcttctgacggtttggctgctggtgggctttcccctcactgtcattggaggcatctttgggaagaacaacgccagcccctttgatgcaccctgtcgcaccaagaacatcgcccgggagattccaccccagccctggtacaagtctactgtcatccacatgactgttggaggcttcctgcctttcaggtatcctccctttattccatggctattactgtcaggttcctgacctcaatttttcctgtccctactcatccagtaccctaacccaacccgttgatccctggttcagtggtaccattcagagatcattaaatggttcctcctatccccaagcaggactga

SEQ ID NO: 1906 - DNA, 569 bp, Homo sapiens
  MAP TO CHR17.1; EXPRESSED IN HELA, SIGNAL = 2.2; EXPRESSED IN HEART, SIGNAL = 1.9; EXPRESSED IN PLACENTA, SIGNAL = 1.9; EXPRESSED IN FETAL LIVER, SIGNAL = 2.7; EXPRESSED IN BRAIN, SIGNAL = 2.3; EXPRESSED IN LUNG, SIGNAL = 1.6; EXPRESSED IN BONE MARROW, SIGNAL = 2.7; EXPRESSED IN ADULT LIVER, SIGNAL = 2.7; EST_HUMAN HIT: AI345388.1, EVALUE 0.00e+00; SWISSPROT HIT: Q39575, EVALUE 1.00e-11; NT HIT: AJ242525.1, EVALUE 2.00e-03
aggagtttggcacaaacaggagaggaatgaggtggaattttttgaggacaatcaaatcatgttgttgttggttaagccctctctctggtgctagcaggaggtaaggtggaccagatggccctgatgatgctggttctctatggccacatacctttggtggctctgtggtcatcttgatgctgacctgcaagattgagatagggaagtctgggtgggggatggagctgagccagaggcggaaggatggatgaggatcctccacctgcagctgctccaccagcttgtccagattaggcatccaagacagtgacaggtggcagtttgccaggaacacccagtgtcctgcaaggagatgccagggtcagtgggaatcatttcctaagccctgcctgtcctcatgctttccacctggtgttggggtgggggtgctgggggggcctaacactaagatctgccacttctggggccctctgtagaagtgggaggtacagggacagtagtgtaattgaggttggaggttctagggacaaggactgggctgaagatgggggtggaagaaaggatggaca

SEQ ID NO: 1907 - DNA, 548 bp, Homo sapiens
  MAP TO CHR13.1; EXPRESSED IN LUNG, SIGNAL = 0.97; EXPRESSED IN FETAL LIVER, SIGNAL = 0.61; EXPRESSED IN HELA, SIGNAL = 1.1; EXPRESSED IN BRAIN, SIGNAL = 0.68; EXPRESSED IN HEART, SIGNAL = 0.61; EXPRESSED IN BONE MARROW, SIGNAL = 0.63; NT HIT: X53545.1, EVALUE 8.10e+00; EST_HUMAN HIT: BF203952.1, EVALUE 0.00e+00; SWISSPROT HIT: O32522, EVALUE 3.50e-01
aatgtgcttggcagggtaagacatggctcctaccttcaagaaacttacagaaggataagaaaaaccatgtgcaaaaaagtaagcacagtcacgtaggtataaacaggaagccaaggagcccagaagaggggcatatactggcggggtgggatagctgcccggtcttaaaaggcaaaagaaggcgggagggcaagccaggcaggaaggccagcgtcaaggagagaagcggcttggtttacaggagataaaaacagttcgaagttgctggaacatcaagcgcaaggcagggagcggtgggagttcaggctggagcggtggggcctagcaaggtggccacaggcacaagcccgcgtaattcccagaggttgggtaccggagggccgcttacgcaattcgcaagtgaacgaatttgggcgcccatggcgaggctctgtcagtgacggtcggagaaaagcgccgccagccagccccccgcccccgtgcacctgtgcgccttcgcagctgccaaagcaaacgcaggctccccgacttcgccagattttcaaagc

SEQ ID NO: 1908 - DNA, 500 bp, Homo sapiens
  MAP TO CHR11.1; EXPRESSED IN PLACENTA, SIGNAL = 2.2; EXPRESSED IN FETAL LIVER, SIGNAL = 2.2; EXPRESSED IN BRAIN, SIGNAL = 2.2; EXPRESSED IN HELA, SIGNAL = 1.8; EXPRESSED IN LUNG, SIGNAL = 2.4; EXPRESSED IN HEART, SIGNAL = 2.6; EXPRESSED IN ADULT LIVER, SIGNAL = 2.8; EXPRESSED IN BONE MARROW, SIGNAL = 2.2; NT HIT: AF303378.1, EVALUE 6.00e-87; EST_HUMAN HIT: BI458262.1, EVALUE 8.00e-87; SWISSPROT HIT: Q57145, EVALUE 6.00e+00
tcacttgatccagttggtgctatatctctccgatgatgcttccctcagtgtttgttaaattttttaggtattggttttcgctttgcttcatacatcaataatgatatggtgctgcagaaggagcctgctggggcagtgatatggggcttcggtacacctggagccacagtgaccgtgaccctgcgccaaggtcaggaaaccatcatgaagaaagtgaccagtgtgaaaggtaaggcagcccatcttccgttcagctattgccctcttctgccacctgctggattatctgaaaatgaatgctaatgctgtagctcacattatccatccgtccctacatccgtctgtccattcatccataaaagttatttgaatatttgccatgtgcttaggcactgaggatacaaacaaaaataagactgagtcaaagttcctgttctcaaggaacttacagaataatgggaatagataccaagttatataggacagcgtgatgaatgcta

SEQ ID NO: 1909 - DNA, 528 bp, Homo sapiens
  MAP TO AC013470.9; EXPRESSED IN ADULT LIVER, SIGNAL = 1.2; EXPRESSED IN BONE MARROW, SIGNAL = 1.1; EXPRESSED IN FETAL LIVER, SIGNAL = 0.87; EXPRESSED IN BRAIN, SIGNAL = 0.92; EXPRESSED IN HEART, SIGNAL = 1.1; SWISSPROT HIT: P22105, EVALUE 1.70e-02; NT HIT: gi14746296, EVALUE 0.00e+00
agccacagccaagaaatgaggtacaatcgacaaaacagatggaaacggcagaactttcatgagtttcctcctttgtttgctttcccgagtctcagccaaacggatctggaagaacttacttattttttcccagaggaccatgctgaggatgtacagcaagagtttttcccctcttggcccactccctctggcctcaccgagtatagcaccttgaccctctgtcaggagactctagccaactccagcataggaaggctgtgtcttgcttttcttggcaagagattagacagtgttatagagatgtgtgtgaaggatgttctgttaaaagatgatcttagttgggcagaagcaggtgtggcccttttagaaaatgaatgtgaaaagaggattgtggaggaggggaaatataacacagaagagtatggcacatcaattgaagacattctctcagtattaaaatgccccaatttatgcagcggcaatgggcagtgcatggaatgggggtgtgcgtgttccccaagctttagt

SEQ ID NO: 1910 - DNA, 510 bp, Homo sapiens
  MAP TO CHR2.1; EXPRESSED IN LUNG, SIGNAL = 0.67; EXPRESSED IN HELA, SIGNAL =   2; EXPRESSED IN BRAIN, SIGNAL = 1.8; EXPRESSED IN BONE MARROW, SIGNAL = 1.7; EXPRESSED IN ADULT LIVER, SIGNAL = 1.2; EXPRESSED IN PLACENTA, SIGNAL = 1.7; NT HIT: AF210835.1, EVALUE 0.00e+00; EST_HUMAN HIT: BF214488.1, EVALUE 4.60e-02
tgaatgctcattggtgaagcagtgggagttattttctttagtaaggagaatctaagctttcctcctctctcttttctaagtgactcaggccttttgcccccagtgaaattggcataagtccttttgttttccccttgctgtcagtccagaagggttctcaacaatcttgtcttgttagctgctatttgaaaacattagcatctctgctatgtggctagtagcattctggcaaagagctattttacagaaatgacttctagatgactcacgaagccgacaacacgtctgtcatctcctagtaccagggaaaggacagtagagacagtcgttgtcagggaatggtgtctttctcaggaacactgagatggctgaactagcagcataggattttggagacagtagttggtaggagacagagtagatgttggttttattcctcttaaatggccgaaggaacataacgcttacaaagccctgccttttctaccagccagttcatcagccctttct

SEQ ID NO: 1911 - DNA, 600 bp, Homo sapiens
  MAP TO CHR17.1; EXPRESSED IN BRAIN, SIGNAL = 0.78; EXPRESSED IN BONE MARROW, SIGNAL =   1; EXPRESSED IN HEART, SIGNAL = 0.69; EXPRESSED IN LUNG, SIGNAL = 0.82; EXPRESSED IN HELA, SIGNAL = 1.2; NT HIT: gi15149469, EVALUE 1.00e-109; EST_HUMAN HIT: AA521055.1, EVALUE 0.00e+00
aacctgtacatttccggattcctttttttttttttttaaaaagttcctttacaataaaagtctagttcatagtaagcaattttcaaaacaaaataatattccaagataattgccaataaagataataataattactgtaatggttttttctcttagccattcaggatccttttcatcttcactatctacttccatttcttgtggacggagaggtaagcaggtatcactatggaaatacagacgattgtggccactactatatgttctttgctgttctacttccccatcttcagattcaagaaattcagacatgcttgcttttgttcgttttggcctaatgaaaagaaataaatgttgatttatggcctctacatgtataccatctaacctcacgactaggagttgagatctgtgataatctgcaacatcacccttttataaaactaaccataaaacaatagtattagaggcacacccccactagttattttcttttggtacataatgtaaatcaaacctattacatattaattcaaacacaaactgtctttctgggtgtgaaaagttacagttaaaaaggaggaaaaagaaatgaagtgc

SEQ ID NO: 1912 - DNA, 500 bp, Homo sapiens
  MAP TO CHR7.1; EXPRESSED IN FETAL LIVER, SIGNAL = 0.64; EXPRESSED IN BRAIN, SIGNAL = 0.69; EXPRESSED IN BONE MARROW, SIGNAL = 0.75; EXPRESSED IN ADULT LIVER, SIGNAL = 1.2; EXPRESSED IN LUNG, SIGNAL = 0.74; SWISSPROT HIT: Q09461, EVALUE 3.00e-12; NT HIT: gi13640193, EVALUE 6.00e-93; EST_HUMAN HIT: AL574758.1, EVALUE 9.00e-93
tcaagggaaaaatctgtggcaattatgttgacatcatgacacatttaattttaaggttttcagacattatagactaaaagtttaaaatataaaatctgtgaatattaatttttacagtatatgtgtttgcatagtacatggctttatttttgttttcttttttttaacttgtttgtattagttggtgcagtaactgtgataagtccactagaattgattagaaccaagatgcagtccaagaagttttcttacgtggaactgcatcgatttgtcagcaagaaagtatctgaagatggttggatttccctttggaggggctgggctcctactgttcttagagatgtacctttctcaggtaggatttatcttatttgtagctactaaattttacatggctttgtctcattcaaatattactgtcactagatttttaactctttaccattaaaggtaagttattttctatagtgaccacaaactcctttttcattgttgggctc

SEQ ID NO: 1913 - DNA, 562 bp, Homo sapiens
  MAP TO CHR7.1; EXPRESSED IN BONE MARROW, SIGNAL = 0.83; EXPRESSED IN ADULT LIVER, SIGNAL = 1.2; EXPRESSED IN FETAL LIVER, SIGNAL = 0.65; EXPRESSED IN LUNG, SIGNAL =   1; EXPRESSED IN HELA, SIGNAL =   1; EXPRESSED IN BRAIN, SIGNAL = 0.91; EXPRESSED IN HEART, SIGNAL = 0.92; SWISSPROT HIT: O75038, EVALUE 8.10e-01; EST_HUMAN HIT: BI828524.1, EVALUE 0.00e+00
agggaagaccccaggatatgagaaagggccatttccttccgccgggatggggacgcccgtgcacccctgttgtggcgtggtttgggagcacagcaaaggccagactctaccctggagactgcagagctggggatgaggctttttccagctcctcttggggatgttcctggggatacttccgcggctgcagcgcctgcttcggcccacactccggtagcccccaggtgttagagaaaactgcagtaataaagacacccctatccccatggcagagctcagacctctgactgcagagaggccagccttacctgtggggagggaagagaaaacagaagtgaggctctgagctcctctagggcagtcagctttgtgtcctcaccagccacaacccctccccccacaaagccacacgcaccagccataagccccacatcctgcctggcagagtgaccttaatggacattggattaataaatgaatgtgccccttcaacaaggaagcacactgctgtctttcggggtcactttcttccctggtaaggtcacggaacgaattctccatt

SEQ ID NO: 1914 - DNA, 554 bp, Homo sapiens
  MAP TO CHR6.1; EXPRESSED IN BRAIN, SIGNAL =   2; EXPRESSED IN HEART, SIGNAL = 0.86; EXPRESSED IN BONE MARROW, SIGNAL = 1.6; EXPRESSED IN ADULT LIVER, SIGNAL =   5; EXPRESSED IN PLACENTA, SIGNAL = 1.5; EXPRESSED IN FETAL LIVER, SIGNAL = 2.8; EXPRESSED IN HELA, SIGNAL = 1.6
tttccttatttgtggggacgggtgggagcggtgtctttagcgtctactgatggctccaggtttgagggctggtgaaaactcctattgcaaagacagtgatttttcaaatcagaaacctgatattgtttgtagttgctgagaaactaatattgagcaatgaaaggtttctcccttcccctgaaaaaaagaaacagaactctttctaatgtaaaaatttcggtgtttcatttttcattttgtgtatttaagcagagcacctgcaggaaacaaaactatttctcactattaacaaaaaaaaagttttaagaagtattctcatgccttcactaagcttctaacatgaagaaccttacctttttaaaaatgacacatactgtaagatgacagtgtaggatcaagtagagaaaaaatgatttatactcatttatgaagaccagggtattgtatgtatataccaggtagattttatgagctagagttcagcttggatattttctgttttcagtgtgaaccatttatggtgtttttaaaagaatgggatgttttcatatgca

SEQ ID NO: 1915 - DNA, 542 bp, Homo sapiens
  MAP TO CHR19.1; EXPRESSED IN HEART, SIGNAL = 3.1; EXPRESSED IN ADULT LIVER, SIGNAL = 4.3; EXPRESSED IN PLACENTA, SIGNAL = 3.9; EXPRESSED IN FETAL LIVER, SIGNAL = 2.8; EXPRESSED IN LUNG, SIGNAL =   3; EXPRESSED IN HELA, SIGNAL = 3.6; EXPRESSED IN BRAIN, SIGNAL = 2.9; EST_HUMAN HIT: AW371525.1, EVALUE 3.00e-77; SWISSPROT HIT: P14314, EVALUE 9.00e-10; NT HIT: U50321.1, EVALUE 0.00e+00
gttccaggctgaaggaacagcatgtttgaagaaccggaggcagaagagcgtttaggggtctgaatgttgtcagggcgactggatcctagtaagatagggatggggcaaatggggctggagaatcaggcaggggcctgattacctgggcccttgcgggctacattgaggcgtttgggcttctctccagagggctacagggaaccccagctcgggagagagacccagcttggtgtgtgttttggaacatctccctgctgccctgtggagtagaggcagggaggtagtagtcaatgaggaggaggcagaacagaggagagctggtctcttgccttctgcccacccagaaaaagctcattgagctacaggctgggaagaagtctctggaagaccaggtggagatgctgcggacagtgaaggaggaagctgagaagccagagagagaggccaaagagcagcaccagaagctgtgggaaggtatggcagaaatggccaaggactcaccttcagtcctgggtgggagcaggtctgggcctaggagtctc

SEQ ID NO: 1916 - DNA, 568 bp, Homo sapiens
  MAP TO CHR11.1; EXPRESSED IN HELA, SIGNAL = 0.77; EXPRESSED IN BRAIN, SIGNAL = 0.85; EXPRESSED IN HEART, SIGNAL = 0.67; EXPRESSED IN ADULT LIVER, SIGNAL = 0.93; EXPRESSED IN BONE MARROW, SIGNAL = 0.9; EXPRESSED IN FETAL LIVER, SIGNAL = 0.64; NT HIT: AF282285.1, EVALUE 1.00e-14; EST_HUMAN HIT: AI239808.1, EVALUE 1.00e-08; SWISSPROT HIT: Q15620, EVALUE 7.00e-57
ttcattctggcgggattaacacatcagccagatctccagtcccctctgttcttcctgtttctagtaatctatgtggtcactctgttgggaaacttgggcttggtaactctaattgggctgaactcacaccttcatacccccatgtacttcttcctctttaacttgtccttcatagatctctgttattcttctgtgtttacacccaaaatgctaatgaactttatttcagagaagaatattatctccttcaaggggtgcatgacccaacttttctttttctgttttttttggtcatttctgaatgttatgtgctgacgtcaatggcgtatgatcgctgtggccatctgtaacccacttctgtatcacattgccatgtctcctacagtgtgctccagccttatgtttggttcctatttgatggccttttctggtgccatggcccacactggatgcatgctgagactgactttctgtgatgcgaacaccatcgatcactacttctgtgacatcctccctctgctccagctctcctgcaccagcacctacatcaatgagctggtggttttca

SEQ ID NO: 1917 - DNA, 575 bp, Homo sapiens
  MAP TO CHR19.1; EXPRESSED IN LUNG, SIGNAL = 0.93; EXPRESSED IN HELA, SIGNAL = 1.1; EXPRESSED IN BRAIN, SIGNAL = 0.91; EXPRESSED IN HEART, SIGNAL = 0.75; EXPRESSED IN ADULT LIVER, SIGNAL = 0.77; EXPRESSED IN BONE MARROW, SIGNAL = 0.79; NT HIT: gi15304769, EVALUE 0.00e+00; EST_HUMAN HIT: AA765801.1, EVALUE 3.00e-03; SWISSPROT HIT: Q01656, EVALUE 4.00e-24
cgaggaggacgaggagaaggccgtggacatcgtccctaagtccgtatggaagccgccgcccgtgatccccaaggaggagagccgctcaggcgccaacaagtacctgtactttgtgtgcaacgagccgggcctgccatggacgcggctgccccacgtcactccagcccagatcgtgaacgcccgaaagatcaagaagttcttcacaggctacctggacacgccagtcgtcagctacccacccttcccgggcaacgaggccaactacctgcgggcccagatagcccgcatctcggccgccacgcaggtcagcccgctgggcttctaccagtttagtgaggaggagggcgacgaggaggaggaaggtggtgctgggcgcgactcctacgaggagaacccggacttcgagggcatccccgtgctggagctggtcgactccatggccaactgggtgcatcacacacagcacatcctgccgcaggtgagcgccgggactcccgcctctcacaaacggcaggagcagggggctcacgcatgaccctgcaatactgacatcaagctcttactctctgctgggc

SEQ ID NO: 1918 - DNA, 581 bp, Homo sapiens
  MAP TO CHR17.1; EXPRESSED IN PLACENTA, SIGNAL =  10; EXPRESSED IN FETAL LIVER, SIGNAL = 9.6; EXPRESSED IN LUNG, SIGNAL = 4.5; EXPRESSED IN HELA, SIGNAL = 9.1; EXPRESSED IN BRAIN, SIGNAL = 9.6; EXPRESSED IN HEART, SIGNAL = 4.8; EXPRESSED IN ADULT LIVER, SIGNAL =  10; EXPRESSED IN BONE MARROW, SIGNAL = 8.8; SWISSPROT HIT: O15353, EVALUE 7.00e-24; NT HIT: Y11746.1, EVALUE 0.00e+00; EST_HUMAN HIT: BF836852.1, EVALUE 1.00e-05
gctagtgccaggctctgttcccagcacatgtcaccctgacccctgctctctgcagcatgtgaagattgacagggaggaggggccagacagggctcctccggtgcctcccagtgacacctgttctctccttccccatctaggaaacctgtgggaacagttgaaggatgatagcttggccctcgaccccctggtactggtgacctcatccccgacatcatcttcgatgccaccaccccagccaccacctcactgcttcccccctgggccctgtctgacagagacaggcagtggggcaggtgacttggcagccccgggcagtggtggctccggggcactgggtgacctgcacctcaccaccctctactctgcctttatggagctggagcccacgccccccacggcccctgcaggcccctctgtgtacctcagccccagctccaagcccgtggccctggcatgagctgtgcccagcttcgtcagctccagcgtttgcctggtctggaagtcctggccggccgcccacatcgggctcaccttaaaggtcaaggaaggaaaatactacctgtcccctatgccactaa

SEQ ID NO: 1919 - DNA, 567 bp, Homo sapiens
  MAP TO CHR22.1; EXPRESSED IN HEART, SIGNAL =   1; EXPRESSED IN PLACENTA, SIGNAL = 2.4; EXPRESSED IN FETAL LIVER, SIGNAL = 0.94; EXPRESSED IN LUNG, SIGNAL = 1.3; EXPRESSED IN BRAIN, SIGNAL = 1.1; SWISSPROT HIT: P01127, EVALUE 7.00e-30; NT HIT: K01399.1, EVALUE 1.00e-127; EST_HUMAN HIT: AI393607.1, EVALUE 0.00e+00
aagcatttacaacatgccccacactctgaattttctcacttgaaactacagtggttcttgggtgtagatctcatggtcccattttcagatggggaaacacaggcttagagtggctcagccatctgcccaagtcccatggctaatgacagccaggacttgaaacctgaaccctggggttgaagggcgtgagaaagagcagtcccggaggcacccgctgagctcccctgccaagtggggggactctggacaggcctacgctcctgacccaggtttcgtctcctcccaggttccctgaccattgctgagccggccatgatcgccgagtgcaagacgcgcaccgaggtgttcgagatctcccggcgcctcatagaccgcaccaacgccaacttcctggtgtggccgccctgtgtggaggtgcagcgctgctccggctgctgcaacaaccgcaacgtgcagtgccgccccacccaggtgcagctgcgacctgtccaggtgcgtaggctccgcggccccccgaggctggtcccggtggtgggtggagaccacccttctggggctcatacctga

SEQ ID NO: 1920 - DNA, 508 bp, Homo sapiens
  MAP TO CHR18.1; EXPRESSED IN FETAL LIVER, SIGNAL = 2.8; EXPRESSED IN LUNG, SIGNAL = 1.7; EXPRESSED IN HELA, SIGNAL = 4.5; EXPRESSED IN BRAIN, SIGNAL = 2.1; EXPRESSED IN HEART, SIGNAL = 1.2; EXPRESSED IN BONE MARROW, SIGNAL = 2.9; EXPRESSED IN ADULT LIVER, SIGNAL = 1.5; SWISSPROT HIT: Q15357, EVALUE 9.00e-37; NT HIT: gi14760146, EVALUE 0.00e+00; EST_HUMAN HIT: BG772605.1, EVALUE 0.00e+00
gaggacatgggtttctctgctgaacagccattatttatactcgttccaaggcttctaacatgatgatactatttcctcgtattaccaccattccaatattgttctattgaccactagtcgccatctccacacattcgtctatcacaaggttcataaaaggatcaaatccccgcaatattccttgcacatgtctgccaccatttaatttcaatgataacttcttgtccataaattttttcaactcgggagggtgagctttgctcatggtgtatactccgcgggctcacggatgccttggaacggaatgcatggcttccctcatgctcccgcggtaggcccggcgtctctatttaaattttatctatgggaccagtaatgtgattttcccatcttgttttcaggataccataaaacatgttttttttcctgttcaattttccttgtatatttgttagctggaatgaatcatacattgtaaaatctttgaggcaagggtccgtgtcttcta

SEQ ID NO: 1921 - DNA, 587 bp, Homo sapiens
  MAP TO CHR19.1; EXPRESSED IN BONE MARROW, SIGNAL = 2.6; EXPRESSED IN PLACENTA, SIGNAL = 3.1; EXPRESSED IN FETAL LIVER, SIGNAL = 2.3; EXPRESSED IN BRAIN, SIGNAL = 2.4; EXPRESSED IN HEART, SIGNAL = 1.7; EST_HUMAN HIT: BG677372.1, EVALUE 1.00e-110; SWISSPROT HIT: P90747, EVALUE 6.00e-19; NT HIT: gi9966896, EVALUE 1.00e-110
atgtcctcaacacctcgtccacaaacgaaataccctagcccacagcactcacccacgtcagcatgcttcagggcgcccacgtcgttggtgccatccccacacatgagggtcacgtagcccagctccttcaggctggtgatgacaaactcctgtatgggcggagacaggctgagcaggggctgcgtgcctaccgctgtgcccctgacccctagggctgtgcacataccttctgcttgggagccacacgggcgaacacctgcacatgggggatgaggcggagcagctgctgggggtcggtggcctgcaggtgggccaagccgtcgcctgtgaggcacagtgcgtactccagggccagtgcctttggggagccccgggccaggggcagcacgatgctgccgtcaatggagcgccactcgcactgccggcctgcgggcagcacctagggttagggctgggggcttggctgaccgggctcagaagcaccctccctccactcggaccccagcaccagccagtctctcctctctggagcccgcacctccctacccacccaggtgacccccagcccttctctggggactccacaa

SEQ ID NO: 1922 - DNA, 585 bp, Homo sapiens
  MAP TO CHR19.1; EXPRESSED IN HEART, SIGNAL = 1.1; EXPRESSED IN ADULT LIVER, SIGNAL =   2; EXPRESSED IN FETAL LIVER, SIGNAL = 2.7; EXPRESSED IN HELA, SIGNAL = 2.9; EXPRESSED IN BRAIN, SIGNAL = 3.1; EXPRESSED IN BONE MARROW, SIGNAL = 3.2; EXPRESSED IN PLACENTA, SIGNAL = 2.9; EXPRESSED IN LUNG, SIGNAL = 0.95; NT HIT: gi14763944, EVALUE 9.00e-80; EST_HUMAN HIT: AW590596.1, EVALUE 3.00e-77; SWISSPROT HIT: P82251, EVALUE 8.00e-23
ctttggttacagagacgggccacaggtattcgtgatgacttaataaaatgaataacaaggtggctaactggatcataaactatgctgtgaagagtaaactccactctaaaatacgatattttaaaagagtcaagtcagattggaactagaaggcatgcccctagcatttgaaagagttacatctaattcattaaaaaatccaaagccactcgtgactctggggctgcaagcttaccttgataggcctttccagctctttccttgtaaatctcatcacgatgagtcctagaatcgtcaggccataaaacagccatgcggcaaagctgaaataattgactaacgagtttatgtcaccagggatgatataaatcgttgctatgataccctaatagaaagaagaatggatttgtaggtcattactacaaaacactgttctcatgtcacagaagaccgaagaagcagtttttcttgtgaataaacactttagcatgaaacgaacttctaggcattccttcatagttggggttaaacctgactttggctatgatagctcttctctatgaagcttgcagaaaagacctggga

SEQ ID NO: 1923 - DNA, 573 bp, Homo sapiens
  MAP TO CHR3.1; EXPRESSED IN HELA, SIGNAL = 1.4; EXPRESSED IN BONE MARROW, SIGNAL = 1.4; EXPRESSED IN LUNG, SIGNAL = 1.6; EXPRESSED IN PLACENTA, SIGNAL = 1.3; EXPRESSED IN BRAIN, SIGNAL = 1.4; EXPRESSED IN HEART, SIGNAL = 1.2; EXPRESSED IN ADULT LIVER, SIGNAL = 0.58; EXPRESSED IN FETAL LIVER, SIGNAL = 1.1; NT HIT: AJ251367.1, EVALUE 2.00e-84; SWISSPROT HIT: P13806, EVALUE 5.00e-17
ggacacgctgtctgatgatgactatgtgaatgtggcctcggtgagtgccaaggtggcagacggggtgaaatgggtcaccccatctgccctgctcctgtgaccatcaccagccccatgcaatagctgcctaccccggccagcctgaggccactcaccaccctactgttcctgcagttcaacgagaaggcacagcctgtgtcatgcttcacacacctggtgcaggccaatgtgcgcaacaagaaggtgttcaaggaagctgtgcagggcatggtggccaagggcaccacaggctacaaggccggctttgagtatgcctttgaccagctgcagaacgtgagccccatgggtgggcaagtgggcggctgggggagtagagggccctggcttggtgtacccaggaaatcaagacggatggcctcgttagcaccaaacaggcagcttggacagatagctccatctgctgtgggggaggagggccagaggtccaggcccactgcgggagggaggccctgcccctggaccagggagggctgagagctgcctgcctccgcctcactcccctcagtccaacat

SEQ ID NO: 1924 - DNA, 520 bp, Homo sapiens
  MAP TO CHR5.1; EXPRESSED IN LUNG, SIGNAL = 0.87; EXPRESSED IN HELA, SIGNAL = 1.5; EXPRESSED IN BRAIN, SIGNAL = 0.92; EXPRESSED IN BONE MARROW, SIGNAL = 0.98; EXPRESSED IN HEART, SIGNAL = 0.64; EXPRESSED IN ADULT LIVER, SIGNAL = 1.3; EXPRESSED IN PLACENTA, SIGNAL = 1.4; NT HIT: gi13385045, EVALUE 6.00e-53; EST_HUMAN HIT: BI837879.1, EVALUE 1.00e-76; SWISSPROT HIT: P34670, EVALUE 3.00e-05
aactctgggggtgggagtaggagtgggatgaggacagggtctcccatgattcataacataaaactcaaatctgggggagaggggaaggataggagacccttacctcttctctgagctccttcatcctttcctcaaaatcataatccttctgcttctcttccatcttcttcttgttgacctcaaaacgtttcttcacctgatccagggtggaacgttccacacgcatagacatgcccaggtttctctgatctgcatagggtcaacagtgaagaaggcaagttcattacaacatcctcagcccctcaaaaattattttcctgacttctctgacatctcataaaacacacagcaaaaataattatggctaaaagaaactcccttggccagctgggtccaggagcagcacatggtttgggtgctgttgaaagcctcatggcctccagaatgaggcctcttacctcacggcctccagaaatattacataatgaagtaaaagacggcctgtgctgaaacaactgga

SEQ ID NO: 1925 - DNA, 583 bp, Homo sapiens
  MAP TO CHR22.1; EXPRESSED IN HELA, SIGNAL = 1.2; EXPRESSED IN BRAIN, SIGNAL = 1.1; EXPRESSED IN HEART, SIGNAL = 0.88; EXPRESSED IN ADULT LIVER, SIGNAL = 1.9; EXPRESSED IN BONE MARROW, SIGNAL = 1.3; EXPRESSED IN FETAL LIVER, SIGNAL = 1.1; EXPRESSED IN PLACENTA, SIGNAL = 1.5; SWISSPROT HIT: P08124, EVALUE 2.00e-03; EST_HUMAN HIT: AL044865.1, EVALUE 2.10e-01
tctaacctctggcctgttccctggagccctggtcagcagcccccctgcacccccaggtccccttccctctggggttctgtctctttgtcactttgtaatccttgcccagacgctatctacgggggaacagcatttcctgcctttgtttcctctccccgttgggcccctggctccctctcaaaagcattcccgggccctttcaatcccgcctgtgctggggggcggtgaggcaggcaggagggggccccagctgggcccacctattgttcgccagggcccccacccgatgtctcccacaacccccaccctatgcccgactggccgcccctggccacacacaatggggcaacttccaaatttagcctttctaccatttctttccaagcctttacacccccaccctcagacggcccctccacacccctggtgggggtcgggatcttggagatgaggtttcaatagcaggcctgtttcaaggcaaccatgtggctattttttcctaatcaacttaacctttccacaaagcgcatcttttccccatctcctccccaccagggacattccagagatggcagggagaaag

SEQ ID NO: 1926 - DNA, 571 bp, Homo sapiens
  MAP TO CHR16.1; EXPRESSED IN FETAL LIVER, SIGNAL = 1.9; EXPRESSED IN BRAIN, SIGNAL = 1.9; EXPRESSED IN HELA, SIGNAL = 1.3; EXPRESSED IN LUNG, SIGNAL = 1.8; EXPRESSED IN HEART, SIGNAL = 2.6; EXPRESSED IN ADULT LIVER, SIGNAL = 2.2; EXPRESSED IN BONE MARROW, SIGNAL = 1.9; SWISSPROT HIT: Q9Y4W6, EVALUE 2.00e-39; NT HIT: gi15317433, EVALUE 1.00e-111; EST_HUMAN HIT: BG424659.1, EVALUE 3.00e-06
ctaagcaagctgaaggacgggtgtggccttcgggtgtggcatgaccgtgactcaacatgggacccacgacctgtctgggcagaggccacactcaccttctccacatgctcccggcaccgtgtcagcaggtccagggtgcacctgtaggtggcactgacgaggtgccggacctcgtcatcaaggagctgggcgcttgcctcgccgtacagcttctccaccagggtcttgccgtgtcgggaaaagtcgaaggacacctggcccagcttctcactcaccccaaactgcacaacctgccagtgcggaacccaggatgagcctgcgcccaacagagcctcctgcggcccgtgccgggggatgcccacccttacctgggcgtaggcactctgggtgaccttcctcaggtcgtcctgagcccccatagtgatctacccggagcacagctgctcggctacccggcccccgagcatcatgcacgtgcggtcgaagagctgctcctgggtgtagagctgctgctcccggggcaggtactgtgcgtagcggagccccttgccctggggtatgatggacacct

SEQ ID NO: 1927 - DNA, 538 bp, Homo sapiens
  MAP TO CHR17.1; EXPRESSED IN LUNG, SIGNAL = 0.58; EXPRESSED IN FETAL LIVER, SIGNAL = 0.44; EXPRESSED IN BRAIN, SIGNAL = 0.52; EXPRESSED IN HEART, SIGNAL = 2.1; SWISSPROT HIT: P13535, EVALUE 2.00e-44; NT HIT: Z38133.1, EVALUE 3.00e-92; EST_HUMAN HIT: AW950405.1, EVALUE 1.00e-85
gagagagtgccctttttcccttcccagatttagagagattgagacacccaccctggcctccagtttctggatctgcttcttcccacccttcagcgccagctgctcggcctcatctagacgatgctgcaggtccttcaccgtctgctccaggttcttcttcatccgctccaggtgggcgctggtgtcctgttccttcttcagctcctcagccatcatggcagcctatttaggaaataaattaagaaagtaatgaaacttgatgatagcaggtgcatacgtgtcagtaggccaaatgttcatcttacatcagtgatggccttcttggctttctcttctgcattgcgtgattcttggattacttcttccacttcactttggagttgggaaacgtcattttctaatttcttcttggtgttaatgagactggtattctgttaaaagtagtcgtggaaatttacaaaatttgcagtttgccctcttgggattttacaagtgtcttacttgttggttcgtgcaggggatctgctggcaacatttc

SEQ ID NO: 1928 - DNA, 589 bp, Homo sapiens
  MAP TO CHR17.1; EXPRESSED IN BRAIN, SIGNAL = 2.8; EXPRESSED IN HEART, SIGNAL = 2.5; EXPRESSED IN BONE MARROW, SIGNAL = 2.5; EXPRESSED IN ADULT LIVER, SIGNAL = 5.7; EXPRESSED IN PLACENTA, SIGNAL = 1.9; EXPRESSED IN LUNG, SIGNAL = 2.2; EXPRESSED IN FETAL LIVER, SIGNAL = 2.1; SWISSPROT HIT: Q39565, EVALUE 6.00e-10; NT HIT: AF045555.1, EVALUE 8.80e+00; EST_HUMAN HIT: BF359284.1, EVALUE 2.00e-88
gctcagccaactcattaccctcacacccaccccacccccagtcacacggatcgtgcgggtcattggacagcctcggggcaacatgctcctggtgggtatcgggggcagcggacgccagagtctggcccgcctggcttcatccatctgcgactacaccaccttccagatcgaggtcaccaaacattatcggaagcaggagttccgagatggtacggctgggtttctgaaatgctaggaataaaagatcagatgcatacattcctgcagtgacaagagaggagagatggcagccagatgggcagacgtgtctggcccgtgttgggtgtaggatggtgtcgcgtgtatgctgcggggcggggagggttcctaaatctcagaaaaggaatcaagcccaggatggggaatctgcagtgagtttgtcctccttccctcccccggccagatatcaagcgtctgtatcgccaggctggggtggagctcaagaccacgtccttcatttttgtggacacccaaatagctgatgagtccttcctagaggacatcaacaacatcctcagctcaggcgaggtgcccaatctctacaagcctg

SEQ ID NO: 1929 - DNA, 582 bp, Homo sapiens
  MAP TO CHR7.1; EXPRESSED IN HEART, SIGNAL =   3; EXPRESSED IN ADULT LIVER, SIGNAL = 2.9; EXPRESSED IN BONE MARROW, SIGNAL = 2.2; EXPRESSED IN PLACENTA, SIGNAL =   3; EXPRESSED IN FETAL LIVER, SIGNAL = 4.7; EXPRESSED IN BRAIN, SIGNAL = 1.9; EXPRESSED IN LUNG, SIGNAL = 2.1; SWISSPROT HIT: P07942, EVALUE 2.00e-69; NT HIT: M61942.1, EVALUE 0.00e+00; EST_HUMAN HIT: BF832805.1, EVALUE 0.00e+00
accatgccaggaaatctttgctgttaactcacaatattttttcagctttatgagtaattcctctggctcattaactacttactctgcttcctcaaagagattcccaatgtttttcagtggctctgctgcggggctctgcgccaggatgtcttttatctcgctgactttcctctccaccgagtccacagtctcacggtaaggcccgatcacaccactgatcttcaaggccttggctttctccaggaatctgtgtgtcctgttggtcagctcggcaatgatcacatcccagagagcaaagcactggtggcagggtgtgcagtcagggaagacccccgagtaccctcgcgtgcacttgtcacagcgtggaccctcaacaccctcaacgcagacacactggcccgtggactggtcacactgtggcgtctcaatgcccctggggtcacagtcacaggctagaagggaataagcaatgctagctgatctacttaatcatgaacctcagtgacaagatgtggcatttagaatactcacttcactgtgaaaatgggaaggtgtcaaccatcgacaacaattgaccaatgg

SEQ ID NO: 1930 - DNA, 567 bp, Homo sapiens
  MAP TO CHR7.1; EXPRESSED IN FETAL LIVER, SIGNAL = 0.54; EXPRESSED IN LUNG, SIGNAL = 0.64; EXPRESSED IN BRAIN, SIGNAL = 0.37; EXPRESSED IN BONE MARROW, SIGNAL = 0.41; EXPRESSED IN HEART, SIGNAL = 0.77; SWISSPROT HIT: O43316, EVALUE 1.00e-39; NT HIT: AB008913.1, EVALUE 1.00e-120
agaaagcctcttttccagccccagtgtggggagggaagggtacttacactgggagtcttgtcctgggtgcaaagcccttcagcacaaagctggcgttggatttcccaggcaaagagggctggacactcacccttcagctgggcaattcgagccaccacagggggtgtagccagccgtggcttgcttcccccaatgccctttggctccaagacacctgtgcggtagtaacgccctaggatcttgctcacacagccattagatacctgagtcaggtgagaagcagggacaggtgaggcatgatgggcagaaggaaggagagtgtccctgggacaggaggaggctataagacaaagccaagacttactggaccaggccatgaagtcgggagtccagcctcacctttgagggcctgaggctccccttttcaacctccgagaggatctcccaggaagtgacccaagtcccagaagccctcagagcctgcaacagccccaggctcttgccttcagaggagccctttctccctgcttcctgtccccatcactgggtaaaggtgctggcccatta

SEQ ID NO: 1931 - DNA, 524 bp, Homo sapiens
  MAP TO AC019085.3; EXPRESSED IN PLACENTA, SIGNAL = 4.4; EXPRESSED IN FETAL LIVER, SIGNAL = 3.8; EXPRESSED IN LUNG, SIGNAL = 3.5; EXPRESSED IN HELA, SIGNAL = 4.2; EXPRESSED IN BRAIN, SIGNAL = 3.9; EXPRESSED IN BONE MARROW, SIGNAL = 4.4; EXPRESSED IN ADULT LIVER, SIGNAL = 2.7; EXPRESSED IN HEART, SIGNAL = 2.5; NT HIT: gi14786067, EVALUE 9.00e-83; EST_HUMAN HIT: AW937765.1, EVALUE 3.00e-80; SWISSPROT HIT: Q9TUZ0, EVALUE 5.00e-23
gaagctgtgagagtccagggagaggatggagaggggagtgagataacacagcagctggcatgggctgcggcccagggtatctcttgcagtgtccacaggagaaactgggcaagggcggcacctagcagccacagcaactggagatggagttgggagggatgagaggcaggaagtggatctgctggtctggaaggcacctgcagctccccccacgcaggcaggagctgccccaagctcctgggcatggcaaacaggcagcagtcacctggtcaccagggctgagataatgtccgtgatggtggcgttgacctcggccagcatctcctccactgggccggggatgggcagctgctggcagaggtgctcagccctgcggatctgctgccggttctgccagatgatctcggccaacttctcacacctgcacgagagccccaaggccaacaggaggacaatggcttctcctcacagacgccaggccccaagacacagctcccgttcccccaggaaggctctgtgctttc

SEQ ID NO: 1932 - DNA, 526 bp, Homo sapiens
  MAP TO CHR1.1; EXPRESSED IN BRAIN, SIGNAL = 1.8; EXPRESSED IN ADULT LIVER, SIGNAL =   2; EXPRESSED IN BONE MARROW, SIGNAL = 1.9; EXPRESSED IN LUNG, SIGNAL = 1.2; EXPRESSED IN FETAL LIVER, SIGNAL = 1.4; EST_HUMAN HIT: H85865.1, EVALUE 5.00e-76; SWISSPROT HIT: Q01055, EVALUE 2.80e+00
tttggggtttccttcttatttgtagcttaaagaaaaataaatgcttacagctgtgactttttttttctctagtatctccagaggcagttggatttttgtcagctgttggggtgtttattatcttgatgctgctcctttttctctatattaataagaagttctgttttgaaaatgttggcgggtttccagatcttggttcagaatacagtacaaggaagaattcacaagataaaatttgtaagtatcgtattgctgcttctcttgtttgttctttttatccgtactattatttacttattttaatatatgcaataaaaaggttggttgtgacatacaataaactaatatttgagctactgttctgtaaaagatctgttaagtaaattatgttcaggtattcttctgttgtttatgaattgctgttacataaaggtgaattgtctactatgacaaaatgacattttaatttttcgtatgtaagatatgcttttgagcctataataggagcagatacacttgaggaaga

SEQ ID NO: 1933 - DNA, 543 bp, Homo sapiens
  MAP TO CHR7.1; EXPRESSED IN FETAL LIVER, SIGNAL = 0.98; EXPRESSED IN BRAIN, SIGNAL = 0.94; EXPRESSED IN LUNG, SIGNAL = 1.2; EXPRESSED IN HEART, SIGNAL = 0.55; EXPRESSED IN BONE MARROW, SIGNAL = 1.1; EXPRESSED IN ADULT LIVER, SIGNAL = 0.64; SWISSPROT HIT: O95859, EVALUE 4.00e-26; NT HIT: gi14750320, EVALUE 8.00e-77; EST_HUMAN HIT: T94622.1, EVALUE 1.00e-76
acctggtctttcccacttccctttattaaaatgtgattaatgtttagatttttatattgttttttagctttcttctgcttctccccatattagagaaaaattttaaggccttttacatttagacagagaaggaaaatttcattggcatattgttgattctttaaagttattcctaagaaaacatttatccataataaattaaccatatatggcctcacctcttgataaaggtcactgagatcttcctggtgggcctgtttggaacatcctgggaattctctaacacagcaggaatctgggggccagtccatctctgtcatttccaaccagtcagtgaaatatactactccacagcacttaaactgcaaaaaaaatcactagtcagcctcagaaaccacaaaaatattttcttaacttataggagattaaacatcagttttttaaaatttttgtacccagagctatatctgtcatcacctaatgatatatgtacagtctatgttgatgatagaaatgtagtaaaggaacaccatggctaacgat

SEQ ID NO: 1934 - DNA, 598 bp, Homo sapiens
  MAP TO CHR6.1; EXPRESSED IN HELA, SIGNAL = 3.5; EXPRESSED IN BONE MARROW, SIGNAL = 5.8; EXPRESSED IN HEART, SIGNAL =   4; EXPRESSED IN LUNG, SIGNAL = 4.3; EXPRESSED IN BRAIN, SIGNAL = 5.4; EXPRESSED IN ADULT LIVER, SIGNAL = 8.9; EXPRESSED IN FETAL LIVER, SIGNAL = 5.3; EXPRESSED IN PLACENTA, SIGNAL = 4.4; SWISSPROT HIT: P39150, EVALUE 2.30e-01; EST_HUMAN HIT: AV693098.1, EVALUE 0.00e+00
aaattctgctgaccagggtgtgcatgtgtgggcaatgtgtattttatcgttttagttttatttcagagaacaccttagcttccaggagagttacatgtgcaacatctcggagagtgctgagctcaggttcctggccattcaggtagctcaagcagcaggcacctgaaagcactccgaggaatggccaagccctcatcgcacagccagagctggtcacagtgctgctctgcacaccagcctctagtcataaaaataaggaacacactaagaatcacacccctgtgatcccacatcagatgtctcctcccatcctgagttattaataattttattaagaatatgctttcaacacgcttgtatttatatatgtacttaacaagaaatcaccaagactgcagcgggcagttcctcttccctttccttttcattgcccagagaaagggagaaaaaaaaacaacactgcatttgacttgtcacttggaggcttaattcccttcttacatgcagcagtggggtctccttccgccctcaggcacagcttgctttgagacttgcagtatcacaattagtgttctcttgcagcttggacttaaccagc

SEQ ID NO: 1935 - DNA, 564 bp, Homo sapiens
  MAP TO CHR19.1; EXPRESSED IN LUNG, SIGNAL = 0.71; EXPRESSED IN HELA, SIGNAL = 0.55; EXPRESSED IN BRAIN, SIGNAL = 0.52; EXPRESSED IN HEART, SIGNAL = 0.83; EXPRESSED IN BONE MARROW, SIGNAL = 0.5; SWISSPROT HIT: Q99004, EVALUE 6.00e-05; EST_HUMAN HIT: AW890299.1, EVALUE 2.00e-13
tggttccagtaagcaaagggcagcgggatagtctggcccaggcgggtggagaggttggcaggtagggtgggctcagggttggctggcgtggggcttggcggggtgccccgagggctggggtaggccttgctgagccgggactcggatgtccactcgatgtacactttgaggcccaggagtgtgagcagtgctgacaggcagagaaggcacttggggcagcgcatgacccggcccagggaaggggcggccgcgggagctacaagggagccacaggggagccacggaggccattggggtgtggggatgggcctccagagagggcccagccaggccccaggcagacagcttcacaatctcccatagtccccgccaacccccataacagattctctcggtcccagatcctaaacagctcccctgacccagggacctcgttggtccttattcctagacctaggagtcccccattccaatcccgtaccagcaccctgttcttcccactccgtccaaatgcttccaccttcctaaaagcccaagggtctacctcttccctgtctccatcca

SEQ ID NO: 1936 - DNA, 526 bp, Homo sapiens
  MAP TO CHR12.1; EXPRESSED IN FETAL LIVER, SIGNAL = 0.76; EXPRESSED IN HELA, SIGNAL = 0.76; EXPRESSED IN BONE MARROW, SIGNAL = 0.77; EXPRESSED IN ADULT LIVER, SIGNAL = 0.99; EXPRESSED IN PLACENTA, SIGNAL = 1.7; EXPRESSED IN LUNG, SIGNAL = 1.2; EXPRESSED IN BRAIN, SIGNAL = 0.82; EXPRESSED IN HEART, SIGNAL = 1.5; SWISSPROT HIT: P04275, EVALUE 6.00e-30; NT HIT: M25842.1, EVALUE 0.00e+00; EST_HUMAN HIT: AU140944.1, EVALUE 2.00e-78
agggaggagacagaagagcctcccctcctccatgcccccattaccagcaccacctccattgctatccgtgtttagcccttgtttcttcctctctctggctgcacagccccctcactcatccctgcctacaagaaaactgaagggcaggcaccagctctgtgcctggtgactcaccatgcccggggggcagaggcagccagagacacagcccatgctcatgcactccaggtcatagttctggcacgttttggtacactcgagcccttcagcccgcaggttgtcagcgggacacaccagcttgaccatggggggccgacaggataggctccttttgcctcgaaggtaggaaaagcaaagagatgattagtgaaggagagaatggacctaccttccacactgtcctttggtcccctagagtctgtgactaaattcaagagactcagagttgcccactcacggggaccagcagctgcctgagccagggtccctgtgtgggactgggagggcatcttctcacctgggcttc

SEQ ID NO: 1937 - DNA, 562 bp, Homo sapiens
  MAP TO CHR12.1; EXPRESSED IN ADULT LIVER, SIGNAL =   2; EXPRESSED IN HELA, SIGNAL = 1.1; EXPRESSED IN BRAIN, SIGNAL = 0.98; EXPRESSED IN LUNG, SIGNAL = 0.98; EXPRESSED IN HEART, SIGNAL = 1.1; EXPRESSED IN BONE MARROW, SIGNAL = 1.6; SWISSPROT HIT: P78560, EVALUE 8.00e-41; EST_HUMAN HIT: AI863385.1, EVALUE 0.00e+00; NT HIT: gi14763473, EVALUE 0.00e+00
ggaccccattgtgtgaaaagcagaaacagaaaagatgattcatcttcattgttgttcattatgttaggaaacattcaaaattaacctggcttggcttaatcagtgaattaaataccatgacctggcagtctgctatggtttaaagatgtgcttgacctgaaggaacttacattgcagtgacactgtctttagggccacatcaacatgtctgtaatttgagctgtgattttggctctttccagggagaaatggaggccagagacaaacaagtactccgctcacttcgcctggagctgggtgcagaggtattggtggagggactggttcttcagtacctctaccaggaaggaatcttgacggaaaaccatattcaagaaatcaatgctcaaaccacaggcctccggaaaacaatgctcctgctggatatcctaccttccaggggccctaaagcatttgatacattcctagattccctacaggagtttccctgggtcagggagaagctgaagaaggcaagggaagaggccatgaccgacctgcctgcaggtaggcctcagaaaga

SEQ ID NO: 1938 - DNA, 563 bp, Homo sapiens
  MAP TO CHR19.1; EXPRESSED IN HEART, SIGNAL = 0.87; EXPRESSED IN BONE MARROW, SIGNAL = 1.8; EXPRESSED IN ADULT LIVER, SIGNAL = 0.85; EXPRESSED IN FETAL LIVER, SIGNAL = 1.5; EXPRESSED IN BRAIN, SIGNAL = 1.5; EXPRESSED IN LUNG, SIGNAL = 1.7; SWISSPROT HIT: P18965, EVALUE 3.60e-01; EST_HUMAN HIT: BG912304.1, EVALUE 6.00e-91; NT HIT: AB037816.1, EVALUE 1.00e-88
ttggcaccatgatttctgtcacctccaagatggctttaatggtgacctgccacctctgacccttgaccgctggcatcccccatttttcccccactctgcagagctccaccttctccagccaagccccggaccccaaggtgaccagcatgttcgaactgagtggaccattccggcagcagcacttcctagctgggctcctgctgacggagctggcactggccctcgaacctgaggctgaagggtgagcagagctcctgtctagccccaggacaggtgggacagtccaggagccatgtccaccctgtcctgagcacctcattaccccatagggcattcctgttgcacaagaaggccatcagtgctgtgcacagcctgctatgtggccatgacactgacccccgctacgccgaggccactgtgaaggctcgtgtggccgagctgtacctgccactgctatcgattgcacgggataccttgccacggctgcatgactttgctggtcagtgggccaggggaagatggggtcacatgatccagggacttggtcacagaaggcacaggat

SEQ ID NO: 1939 - DNA, 563 bp, Homo sapiens
  MAP TO CHR11.1; EXPRESSED IN BRAIN, SIGNAL = 0.97; EXPRESSED IN BONE MARROW, SIGNAL =   1; EXPRESSED IN HEART, SIGNAL = 0.61; EXPRESSED IN ADULT LIVER, SIGNAL = 0.91; EXPRESSED IN FETAL LIVER, SIGNAL = 0.76; EXPRESSED IN LUNG, SIGNAL = 0.57; EXPRESSED IN HELA, SIGNAL = 0.92; NT HIT: AF282277.1, EVALUE 3.00e-58; SWISSPROT HIT: Q15620, EVALUE 6.00e-40; EST_HUMAN HIT: AI239808.1, EVALUE 2.00e-07
tggatgccttgctatgtgtcttcagacatccctgggtttgtaaaccaggagattcagctctccctctggagataaagagtgaggatccattattaatgttttctacacctgttcctacagatcacacccagcaagttaatggctgtggaaaatgactcttcagtgacaagagtttattcttttgggattaacagaccagcctgagatctaattgcccctgtttttcctgttcttggtgaactatatgaccaccatggtgggcaacttgagtttaattaatctaatttgcctgaattcacaccttcacactcccatgtattttttccttttcaatctgtccttcattgatctctgttattcatttgtctttacccccaaaatgctgatgagctttatttcagagaggaacatcatctcctttccaggatgcataactcagctctttttcttctgcttttttgtccactctgagtgctatgtactgacagccatggcctatgatcgctatgtggccatctgcaaaccccttctgtacatggtcaccacgtcccctcagatctgtt

SEQ ID NO: 1940 - DNA, 539 bp, Homo sapiens
  MAP TO CHR7.1; EXPRESSED IN BRAIN, SIGNAL = 0.79; EXPRESSED IN BONE MARROW, SIGNAL = 0.7; NT HIT: gi4826977, EVALUE 0.00e+00; SWISSPROT HIT: P38138, EVALUE 5.80e-01; EST_HUMAN HIT: R55918.1, EVALUE 1.00e-126
ggacatttcaaaaagcagccaactttgaagatttataaaccactgggcaaaataacagctaacatttgttgagcaggagtatgggctaggcactcttataaatgcttttcatgtgctaatctatctgaagacataagcagaaaaatggctcacaggaaagaaaattgttcaatgtcttgtttcttaccatcatcaaaagtgtccaccaattggctgggattgatttctgctccaccaatcaaaatgttgtccagtgcccactgagcacgctccaccccagagaccacaattccattgctgatcacaaaaggctgccaccagcgaagtcgagttgtgttggtgagggcatcttcaggaagaagtatgtagtcgtgtctaacagaaatgtatttctggtaatccatctcatggagcaaagtccaggtaattcctataataacaaatataccaacatagcaatatatctagaatctcctgcctcctcataaaccaccagtatacttcagatactgtgaacttcccaaagaaattttcagcca

SEQ ID NO: 1941 - DNA, 546 bp, Homo sapiens
  MAP TO CHR5.1; EXPRESSED IN FETAL LIVER, SIGNAL = 2.7; EXPRESSED IN HELA, SIGNAL = 3.1; EXPRESSED IN BRAIN, SIGNAL = 2.6; EXPRESSED IN LUNG, SIGNAL = 0.63; EXPRESSED IN BONE MARROW, SIGNAL = 2.2; EXPRESSED IN HEART, SIGNAL = 0.79; EXPRESSED IN PLACENTA, SIGNAL = 3.6; NT HIT: AF395008.1, EVALUE 0.00e+00; SWISSPROT HIT: P30414, EVALUE 2.60e-01
atttaattttggtgcctgcgtcacctctgaccacacagcagcgtctgcccaggcaggcagcacatggctgggggtgtttctgaacgacgctgtgagagaatcactttccccaagaaaaggtatagcagaggggaagggagagacagcaacagaaagtgaggtcgtaagtagaaaattgcttctgggatttcaaatggctttgtcatggggccctcccttgctgccgagaaatcagttgatctgggaaagtttgttgcaaacccttgccctcttgcttttgggtggagctgagaaatgaatgaagataatggggctttatgagtgtgggggagggtagctgaggagacagccaccagtcctgaccccagcttggacccctagaaaggccagataggagctggccagtgtgtccctggccaggctgtcctgtctggaacatagtcagcctggccccagccggaccttcttagaagggaggcaggcgaagtgggaaacaggtttggagtgtgttacaatgcaccagctagatgaagggcataggcagaa

SEQ ID NO: 1942 - DNA, 511 bp, Homo sapiens
  MAP TO CHR19.1; EXPRESSED IN FETAL LIVER, SIGNAL = 1.1; EXPRESSED IN HELA, SIGNAL = 0.94; EXPRESSED IN BRAIN, SIGNAL = 0.96; EXPRESSED IN HEART, SIGNAL = 0.71; EXPRESSED IN BONE MARROW, SIGNAL = 1.1; NT HIT: gi14756511, EVALUE 9.00e-86; SWISSPROT HIT: P24864, EVALUE 3.00e-37; EST_HUMAN HIT: AU135533.1, EVALUE 1.00e-85
aggtaagtggctccatcacgtccgtggggccaccttccctgcagctggagtgaggaactctagaataggcgtgtggtggcatccatctcagcgttcttttcttctccgtagctgttggatctctgtgtcctggatgttgactgccttgaatttccttatggtatacttgctgcttcggccttgtatcatttctcgtcatctgaattgatgcaaaaggtttcaggtaagttggctttccagtgcatgcacaaacaaggtgtactaagcttacatccagttgtcagcctcagattaagcccacgatgtcttcactgcagggtatcagtggtgcgacatagagaactgtgtcaagtggatggttccatttgccatggttataagggagacggggagctcaaaactgaagcacttcaggggcgtcgctgatgaagatgcacacaacatacagacccacagagacagcttggatttgctggtcagtgctgctccttctttcagtccttcttggcca

SEQ ID NO: 1943 - DNA, 550 bp, Homo sapiens
  MAP TO CHR17.1; EXPRESSED IN ADULT LIVER, SIGNAL = 1.7; EXPRESSED IN BONE MARROW, SIGNAL = 1.5; EXPRESSED IN LUNG, SIGNAL = 1.1; EXPRESSED IN HELA, SIGNAL = 1.4; EXPRESSED IN BRAIN, SIGNAL = 1.4; EXPRESSED IN HEART, SIGNAL = 1.3; NT HIT: gi13652313, EVALUE 1.00e-103; SWISSPROT HIT: Q09884, EVALUE 1.40e-02; EST_HUMAN HIT: BF879575.1, EVALUE 0.00e+00
cgagatggaacaagccctacatgttcaacatgcagaaggcaggccagtgtaactgtaggatgagctacaacagggagggcgcaggaaatgaggtggagaggtagatcacgtggaactttgtaaaccacagtagagtcgggagttaattctttgtaccataagaaaccattggaggctgggtcttaggtgaggaaggggccagaccctgccatggagagcctggtagggctggtggggacggggtagtggcagggcaggcagggagggagggaagtccctggtgggtctggcagtgggaggcccacaggggccaggctgacctgcaggacgtggttgatggccccatcgagtttggaggccccgccagtgcctggggaggctgtgagacccagcacctggggtagcggctgtgccctctggagtttaagttctaggtactggctcatgatgacgttgtagacggtgtccttgtgcgtgtggtggcactcatccaccacgatcagggagaagactgagggcacaggggggaaggctgtgacctatgtttgca

SEQ ID NO: 1944 - DNA, 515 bp, Homo sapiens
  MAP TO CHR5.1; EXPRESSED IN LUNG, SIGNAL = 1.4; EXPRESSED IN HELA, SIGNAL = 1.2; EXPRESSED IN BRAIN, SIGNAL = 1.2; EXPRESSED IN ADULT LIVER, SIGNAL = 0.7; EXPRESSED IN BONE MARROW, SIGNAL = 1.4; EST_HUMAN HIT: BG054507.1, EVALUE 1.00e-70; NT HIT: gi16171823, EVALUE 7.00e-71; SWISSPROT HIT: P31836, EVALUE 3.00e-03
tccctgttatctgggctcacacagatcttttggggctttctgacagcaatgatgagaagctgtcactcaggtccagctcaccctcagtgcatttcagatgtgccagcccttcctgggcgtataatcagggctgctggctgcccaggggctgggcagccctaacactctcaatggccccataaaggaaagtgagtgggtctccagctgagcagtccaccctgagcactgtcctgtctgcagccaatgggagcgaactccacatcagcagtgttcggtatgaagacacaggggcatacacctgcattgccaaaaatgaagtgggtgtggatgaagatatctcctcgctcttcattgaagactcagctagaaagacccgtaagtcgacacgcgtttatgcttctcactgagctggctgggaggtgttgggtggcaagggagggcaccaattgaccagggccacagctgccaaccatgagcccgtgaagacaggggtaagcctcatatccctctttgca

SEQ ID NO: 1945 - DNA, 544 bp, Homo sapiens
  MAP TO CHRX.1; EXPRESSED IN HELA, SIGNAL = 2.1; EXPRESSED IN HEART, SIGNAL = 2.8; EXPRESSED IN BONE MARROW, SIGNAL = 2.3; EXPRESSED IN FETAL LIVER, SIGNAL = 2.1; EXPRESSED IN BRAIN, SIGNAL = 2.8; EXPRESSED IN LUNG, SIGNAL = 3.2; EST_HUMAN HIT: BI597939.1, EVALUE 7.60e-01; NT HIT: gi14757195, EVALUE 0.00e+00; SWISSPROT HIT: Q13474, EVALUE 4.00e-31
tgtgtcttctttgccacagccctcagctccccagcccttcccctgggctcagaggccaccctggctcttttcctgtctccatcctcacctgcaggagaagctccctcagacgctgcagctgggactctagctgcttgttgtgatcttcgaggatctgcatgcgcgtctccaggcggctcttatgttgccgaaggatacgggcctcggccagaagctcctcattgcggtggtctgttgctgcctcagtggagccgtcagccagactgggtgcctcagctgcctcctcatgctgccacttcaggcgcctcagctctccctggagaatcctgccatggagagagacaccaagacctatggctctaacagggctctgactgtccaggtttcagatgtcccctcaggcctaggtgtgaacaatccctgtgctcttccaccctacctcacccccacccccatccccacccccagctgtgctcttgcttgaatggccacatccacttcctctccagcacatatgtcatttactctgccatcctgagacctc

SEQ ID NO: 1946 - DNA, 554 bp, Homo sapiens
  MAP TO CHR14.1; EXPRESSED IN HELA, SIGNAL = 2.8; EXPRESSED IN BRAIN, SIGNAL = 2.8; EXPRESSED IN HEART, SIGNAL =   2; EXPRESSED IN PLACENTA, SIGNAL = 5.3; EXPRESSED IN FETAL LIVER, SIGNAL = 2.7; EXPRESSED IN LUNG, SIGNAL =  15; SWISSPROT HIT: P01795, EVALUE 7.00e-37; EST_HUMAN HIT: BG398259.1, EVALUE 6.00e-94; NT HIT: X92206.1, EVALUE 0.00e+00
ttcaggctgttcatttgcagatacagtgagttctttgaatcatctcttgagatggtgaatctgcctttcacagacgcggcgtattctgtggtgtaactgttagctttgtttctagtacggccaacccactccagccccttccctggagcctggcggacccagtccatgtagtggtcactgaaggtgaatccagaggctgcacaggagagtctcagggaccctccaggctggaccaagcctcccccagactccaccagctgcacctcacactggacacctgcaaacacagagacaccctggtcagaaactgtcacacaaatccactgtttctctcactcacgtccactcacacttaacatctctagttctccataaatcaccttgtaaaataacaacaaggaaaacccagctcagcccaaactccatggtgagtcctctgtgttcagtgctgatcaccaaatgaaaacacctgggaattctggggctggggctccgctctcagagctgcagggtcagggctgggctggttttcatcagcagagggaggaccctat

SEQ ID NO: 1947 - DNA, 572 bp, Homo sapiens
  MAP TO CHR7.1; EXPRESSED IN PLACENTA, SIGNAL = 3.4; EXPRESSED IN FETAL LIVER, SIGNAL = 1.2; EXPRESSED IN HELA, SIGNAL = 2.9; EXPRESSED IN BRAIN, SIGNAL = 1.3; EXPRESSED IN LUNG, SIGNAL = 0.81; EXPRESSED IN HEART, SIGNAL = 0.89; EXPRESSED IN ADULT LIVER, SIGNAL = 0.88; SWISSPROT HIT: P08547, EVALUE 4.00e-13; EST_HUMAN HIT: AI701473.1, EVALUE 9.00e-10; NT HIT: AF288742.1, EVALUE 2.00e-03
gaaatggacaaaaggcaagcaatagttaaaaatcaatgaagccaagaaatggttcttagaaagatcaataacatttataaacctttagctaagttgatgaaataatatacatacattatcgctggatgtagaaaatggaaacagttttggcaatttcttattaagttaaacatacacttaccaacaaacccatcaatcccacttctaggcatctacccaagaaaaatgaagaaatacgtccacattaaaagttttatgtgaatgttcgtaatagcatcattcataatagccaaaaactggaaagaacccaaatatccatcaactggtgagtaaacaaaatgtagtataaccatgcaatgaaatattactcagcgataaaaacaactcaactcttaacatatgcagcagcatgggtgactctaccatgtcatgccccagagggaagccagtcatgggagactccatactgtatgattctctttacatgaaattccaggaaaggtgaagctatcgagggagaaagcaggttagtgattgccagaggctggggtaggagctggaattacctgcaa

SEQ ID NO: 1948 - DNA, 579 bp, Homo sapiens
  MAP TO CHR2.1; EXPRESSED IN FETAL LIVER, SIGNAL = 1.2; EXPRESSED IN LUNG, SIGNAL = 1.1; EXPRESSED IN HELA, SIGNAL = 1.4; EXPRESSED IN HEART, SIGNAL = 1.1; EXPRESSED IN BONE MARROW, SIGNAL = 1.5; EXPRESSED IN PLACENTA, SIGNAL = 1.8; EXPRESSED IN BRAIN, SIGNAL = 1.3; EXPRESSED IN ADULT LIVER, SIGNAL = 0.9; NT HIT: gi14723798, EVALUE 0.00e+00; SWISSPROT HIT: O43174, EVALUE 2.00e-23; EST_HUMAN HIT: AA012833.1, EVALUE 4.00e-89
gggtgggtcttgggttagactgtggcgctcagcatggcctccgtctccggcaggatctcgttctggttggagtccaggccaaagaacttgacgctgaggccatccacggggtgcaggacggggaccaaggtgatgcgggggaaggtccgtgtggccagctcaaagcggctggtgctagccagctccaccgccagcaccttcaggaacagcttggccaggtgcttgcccaggcaggtccggacaccgccaccgaacgggaggtaatggaagcggccatccttgtcctcgctccgcgcctggctgaagcgatcggggtcgaacacgttcacgtctttgaacacgggcgctgtgtcatgggtgtcccggatgctatacatgacactccagcctttggggatctggaaaccctggagcaagatgggggccgaggagtgggtggtgagagccagaggagcccacagagggcccaggactgccccctccctgctcagccccagatgttcaagacctgccttttcttagagacaccccactgtggcccccaaggcctggccagcctgccccattcagcatgttagt

SEQ ID NO: 1949 - DNA, 598 bp, Homo sapiens
  MAP TO CHR3.1; EXPRESSED IN PLACENTA, SIGNAL =  43; EXPRESSED IN LUNG, SIGNAL =  29; EXPRESSED IN FETAL LIVER, SIGNAL =  21; EXPRESSED IN BRAIN, SIGNAL =  24; EXPRESSED IN HEART, SIGNAL =  15; NT HIT: gi11038618, EVALUE 0.00e+00; SWISSPROT HIT: P53506, EVALUE 1.00e-72; EST_HUMAN HIT: BG752264.1, EVALUE 0.00e+00
aagattgggactctgaccccattgagcgtggcatcatcatcaactgggatgacatgaagaagatttggcaccacaccttctacaatgagttgcgtgtggccccggaggagcacctggtgctgctgacagaggcccttgtgaaccccaaggccaacagagagaagatgacccagatcatgtttgagaccttcaacaccctgtccatgtacgtggccatccaggccatgctgtccctctatgcctctggatgcaccactggcattgttaatggaccctggagatggggtcactcatacagtgcccatctacgaggcctaagccctcccccatgccgtcctgcatctggacctggctggtggggacctgactgactacctcatgaagatcctcaccgagcacagctacagcttcaacaccatggctgagtgggagatcttgggtgacatcaaggagaagccgtgctatgttgccctggacttcgaacaggagatggccaccgccgcatcctcctcctctctggagaagagctaggagctgcctgacagcctggtcatcaccattggcaacaagtggtcctggtgtctggaggcgctgttat

SEQ ID NO: 1950 - DNA, 507 bp, Homo sapiens
  MAP TO CHR1.1; EXPRESSED IN FETAL LIVER, SIGNAL = 1.5; EXPRESSED IN LUNG, SIGNAL = 1.1; EXPRESSED IN HELA, SIGNAL =   2; EXPRESSED IN BRAIN, SIGNAL = 1.5; EXPRESSED IN BONE MARROW, SIGNAL = 1.7; EXPRESSED IN ADULT LIVER, SIGNAL = 0.93; EXPRESSED IN PLACENTA, SIGNAL =   2; EXPRESSED IN HEART, SIGNAL = 0.84; NT HIT: AF233322.1, EVALUE 4.00e-23; EST_HUMAN HIT: AW972047.1, EVALUE 4.00e-61
ctgtaaatttccctgtggggcacactctcaggtgtgtcctacaaattttgatacatgtttgtttatatttcccaaatacttgtcatggcacctggcacataattagtactcaagagtatttatttatttatttattcaaacatcctcctttcctttttttaaaatggacgatagaatccatgtttactgatatgttgcataataacttaagtaaaagggagtgcttaacttgattatgatgttaatatctctcctttatatttcaggtacagcagttgcaaggagtttacagtttacaggaacagcacttctggactttatgttctgacgtttatgttgggaccttgaaattaatagtagcacctgatgctgatgctaggtggattttaagccaaacacataatatttttactcaggtatgtcttttttactaacttcttttaagggccttaacattttttataactagtagttttaaaaatatttacaaggccaatgtgagaggat

SEQ ID NO: 1951 - DNA, 565 bp, Homo sapiens
  MAP TO CHR10.1; EXPRESSED IN ADULT LIVER, SIGNAL = 0.49; EXPRESSED IN LUNG, SIGNAL = 1.1; EXPRESSED IN HELA, SIGNAL = 0.43; EXPRESSED IN BRAIN, SIGNAL = 0.44; EXPRESSED IN HEART, SIGNAL = 1.1; EST_HUMAN HIT: BE562038.1, EVALUE 3.10e+00; NT HIT: AF344451.1, EVALUE 5.40e-01; SWISSPROT HIT: O15403, EVALUE 1.00e-05
taatagggtgggctcaatgctttaaaggttctctcctctgtcaatgccacatcacagcctttcacagtgccctcaaggcctttctgttgaacctatttcttattgtttttgaagctccacttgggagtgttgtcagtaaccatttatcctgtcaagtgggaatcatgctgggtggcttgcttgcatctactggactcatcctgagctcatttgccacgagtctgaagcatctctacctcactctgggagttcttacaggtaagggcactttgtaccacctgtctcaccccactccattcaggggtttccaagcacatcaacagagaagtaattcataaaatattcattttgttagatgcataatttagttgacctagcttatgtctacctacctagcagttaaacagagctggaaatgagattacattaccctaatgaaaatgcatctccactgtaattcagccagatggtaaaagcaactgcagctttctccttggaattagtgtatgactgagattctgtactcagaagaaacaagatattacccagggcaacatgaattttc

SEQ ID NO: 1952 - DNA, 586 bp, Homo sapiens
  MAP TO CHR12.1; EXPRESSED IN FETAL LIVER, SIGNAL = 0.71; EXPRESSED IN BRAIN, SIGNAL = 0.72; EXPRESSED IN LUNG, SIGNAL = 0.59; EXPRESSED IN BONE MARROW, SIGNAL = 0.79; EXPRESSED IN HEART, SIGNAL = 0.62; EST_HUMAN HIT: BI905835.1, EVALUE 8.20e-01; SWISSPROT HIT: P29064, EVALUE 9.70e+00
gcatttgagcctttctgacctgtcctgctatgatccccactgtggctactagtgatggtaattctgaccttttcaggggtatgggcagcggtggtaattatctttaaaatatatctttttcagacttctcactctgtaaaatatgtaattagacatagatatgtgtagagtggcctttctcagaggacccgcagctcttagcagttgcttggctaatcttcataccatctctgtaagataaacggtgttttctggttgggtagttgaggcccagataggctcagggactcacccagcgccttatcacaaacccacacggcccagcccccagttccgttcttcgtcctgtctagcatagatttcaccacttttgttctttcctgtcttacaccaagattgtttaagtacttcccaaaaataatgagccacgtgtgggtgtgttcgttctccagaatgaatcactgtgaaagaggttgtgaactaacgaaataagcataagtatctggaagcagaggctcctgactattcagtccctctaattggtgggctctggagtgagcgcttttctgaaaggcaactgtgggtt

SEQ ID NO: 1953 - DNA, 600 bp, Homo sapiens
  MAP TO CHR7.1; EXPRESSED IN FETAL LIVER, SIGNAL = 1.9; EXPRESSED IN LUNG, SIGNAL = 3.2; EXPRESSED IN BRAIN, SIGNAL =   2; EXPRESSED IN HEART, SIGNAL = 3.1; EST_HUMAN HIT: BF666559.1, EVALUE 4.00e-43; NT HIT: gi16176282, EVALUE 2.00e-43; SWISSPROT HIT: P17012, EVALUE 3.40e+00
agggtacatccctttcccactcactcagcattttgaaaatcttccagtttgtgtttacgcaacttacaaacaaatacctatcactgcaaatgaaccattcagaatgactattaaataaagcagtctgtcagggaaggcaaacgagaggccacagtcacctaagattctaccttacctttgtcatagttgtgtcatctttcttgggagtaaagtttccaaaaaatcgaaggctatagaagccgacaacagaggacaccataagatagctgtgagaatcaaggaaaaaaactctccaacagaatgcaagtttcctaagttctcggcagtctccaaaaagtcttaaggcccataggaaaagcaaaacaaaaagccgctttaagtgcttgaggaagactaacctgttgttttctcttctagacaagtgtcttagtaaataactactgccccagaaaacttggtataaaatttgtggataggctgaacgttcagttaaagaaaggatacaaaatcaaaatgatttcaagcgcagctcccacaaaaccaaacgtagaaagagaggcatttcctattccaggcccctggggtgggagaaagacactt

SEQ ID NO: 1954 - DNA, 516 bp, Homo sapiens
  MAP TO CHR2.1; EXPRESSED IN FETAL LIVER, SIGNAL = 0.33; EXPRESSED IN BRAIN, SIGNAL = 0.42; EXPRESSED IN BONE MARROW, SIGNAL = 0.49; NT HIT: X90982.1, EVALUE 1.20e-01
acaggccgtgtcttcgtatctaagtttggaaagaacccaggtaatgaggccagtgttcatggatctaaaggcactttgtataataaatcacagtcccccaaggttactagaaaacctgagtttaaagggattacataggaaaccaagatgctaaaatgacctctttttctggagtgaaaaagataatactttctatagaaaggaaaaaaaaaagatttgacaaagaaggtggtacttattgcccacatctttatatacctatggatgagaacatagaatggtgacccatcttatccatatttcagggcatgtgtacacgtgtccccaagctggaagcagctatgagacaatttgctaattagcatcatgtttacacatttattgtcaactgtaattacttgtttattagaacagaggtttccctgtttattacagtcattatagtctgtcagcaagagacagtgtgcttgaatttcacaagtatatgtacattgcacaaatcctgccagctctagc

SEQ ID NO: 1955 - DNA, 593 bp, Homo sapiens
  MAP TO AC027045.2; EXPRESSED IN BRAIN, SIGNAL = 0.62; EXPRESSED IN HEART, SIGNAL = 0.76; EXPRESSED IN BONE MARROW, SIGNAL = 0.62; EXPRESSED IN LUNG, SIGNAL = 0.78; EXPRESSED IN HELA, SIGNAL = 0.5; SWISSPROT HIT: Q9UMN6, EVALUE 3.90e-01; EST_HUMAN HIT: R68545.1, EVALUE 0.00e+00
ccttctgaggtccgtgtttcggaagaaggagaacaggaggaatgagagggcagaggtctctccacaggtgccccccgtctccctggtgagtggcgggctgagccctgccatggacgggcaggctccaggctcacctcctgccctcaggatcccagagggcctggccaggggcctgggcagccggctcgagagggatgtctggtcagcccccagctctctccgcctccctcgtaaagccagcagggccccgagaggcagtgcactgggcatgtcacaaaggactgttccaggggagcaggcttcttatggcacctttcagagagtcaaatatcacactctttctttaggtcgaaagaaaaccttaccggagtccagcttttgatggagcgtgtcagtattgtgtgacgctggcattcttgggactttgccaagcaactgtaggcagctcatgttgagaatgggtttccaggaaacccgttgtcttgtaatctctaaaaaaaaatttttttttttttgtggtggggggtctccatatctagacttccaacacccaaggtccatataacccaaggtcgaaaaccttcctgcatcat

SEQ ID NO: 1956 - DNA, 508 bp, Homo sapiens
  MAP TO CHR8.1; EXPRESSED IN FETAL LIVER, SIGNAL = 2.8; EXPRESSED IN HELA, SIGNAL = 2.7; EXPRESSED IN BRAIN, SIGNAL = 3.3; EXPRESSED IN LUNG, SIGNAL = 2.1; EXPRESSED IN PLACENTA, SIGNAL =   3; EXPRESSED IN HEART, SIGNAL = 2.5; EXPRESSED IN BONE MARROW, SIGNAL = 3.8; EXPRESSED IN ADULT LIVER, SIGNAL = 4.4; NT HIT: gi15431278, EVALUE 1.20e-01; SWISSPROT HIT: P22273, EVALUE 5.40e-01; EST_HUMAN HIT: AW996620.1, EVALUE 3.00e-06
tcagaagaggctgtgcaatgtgatcagcactacccagaataccacttgaaaagcagagagcagaatccaattggccaacatcctacctaataagacccagccccatatagtccagccctgtgagcctaaccaaggagcccagaaaggctgagcaagaagcttatttgtgtcagtgtattcaccactcctaccattctgggtgagctttgtggagcagatgagggtggcaatctgaaagctgtctttagtgctatccttgcttggggtgaaggtgaccaggtttttagatgcttgaagctctttttcttccatctccatcttggttccaggcagggtcaggtagaatttagcatcttccatttttttgttgtcaccctaaaaggaagcatgttaggaacaccaaatgatggccaaaatctcttatatgcaaataaaaacaatttctatcatgcattttcagcatgagaagcgtggacttatcaatttatcctgaagatcccttccacct

SEQ ID NO: 1957 - DNA, 516 bp, Homo sapiens
  MAP TO CHR2.1; EXPRESSED IN FETAL LIVER, SIGNAL = 0.28; EXPRESSED IN BRAIN, SIGNAL = 0.44; EXPRESSED IN HEART, SIGNAL = 0.47; EXPRESSED IN BONE MARROW, SIGNAL = 0.46; NT HIT: gi16157781, EVALUE 0.00e+00; SWISSPROT HIT: O70468, EVALUE 6.00e-17; EST_HUMAN HIT: AA194556.1, EVALUE 0.00e+00
tgctgaacatccatttggtaagaaaaataaaaatcctatttcaaagtctctattattaaatgtttcccctgaattttataaaattgtattcatacttaatacctttgtttatatttagtcccaccaagcgctcctaccagacctgaggtctaccatgtgtctgccaatgccatgtctattcgttgggaagaaccctaccacgatggtggcagtaaaatcattggctactgggttgagaagaaagaacgtaatacaattctttgggtgaaagaaaacaaagtgccatgcttagagtgcaactacaaagtaactggtttagtagaaggactggaatatcagttcagaacttatgcactcaatgctgcaggtgttagcaaggccagcgaagcttcaagacctataatggctcaaaatccagttggtatgtatcacaatttaagggcatatttgtttattattactgattctagtagaactcagagtggtatattttaaccttatttttgcatcccttcc

SEQ ID NO: 1958 - DNA, 585 bp, Homo sapiens
  MAP TO CHR19.1; EXPRESSED IN LUNG, SIGNAL = 2.3; EXPRESSED IN HELA, SIGNAL = 0.79; EXPRESSED IN BRAIN, SIGNAL = 2.3; EXPRESSED IN HEART, SIGNAL = 2.6; EXPRESSED IN ADULT LIVER, SIGNAL = 2.1; EXPRESSED IN FETAL LIVER, SIGNAL =   2; EST_HUMAN HIT: AU143734.1, EVALUE 0.00e+00; NT HIT: gi16163761, EVALUE 0.00e+00; SWISSPROT HIT: Q03923, EVALUE 1.00e-95
ggctttgccacattcttcacacttgtagggtttctctccagtatgaattatcttatgtgtagtaaggtgtgaggactggttaaaggctttgccacattctccacatttgtagggtttctctccagtatgaattaccttatgtttagaaagagttgaggactggttaaaagctttgccacattcttcacatttgtagggtttctctccagtatgaattatcttatgtgtagtaaggtgtgaagataggttaaaagctttgccacattcttcacatttgtagggtttctctccagtatgaattatcttatgtgtagtaaggtgtgaagataggttaaaagctttgccacattcttcacatttgtagggcttctctccagaatgaattctcttatgtgtagtaaggtgtgagaaccggctaaaggctttgctacatacttcacatttgtagaatttctctccagaatgaatcctcttatgtgtagtaagggttgaggattgtttaaaagctttgccacattcttcacatttgtagggtttctctccagaatgaattctcttatgtgtagtaaggtgggataaccggct

SEQ ID NO: 1959 - DNA, 592 bp, Homo sapiens
  MAP TO CHR9.1; EXPRESSED IN ADULT LIVER, SIGNAL = 3.4; EXPRESSED IN PLACENTA, SIGNAL = 3.9; EXPRESSED IN FETAL LIVER, SIGNAL = 4.1; EXPRESSED IN LUNG, SIGNAL = 2.9; EXPRESSED IN BRAIN, SIGNAL = 3.7; EXPRESSED IN HEART, SIGNAL = 3.2; EXPRESSED IN BONE MARROW, SIGNAL = 3.4; EST_HUMAN HIT: BE794550.1, EVALUE 7.00e-97; NT HIT: gi16161606, EVALUE 5.00e-97; SWISSPROT HIT: P48634, EVALUE 2.00e-14
gcagagaggtggttcctctgtaagctggaggttcctgggcctgtctcctcacccatgttgtaaagtctgcgagccttgtcctgcccatcagtgaaatggaagcctttttacaggttttagcagctcctttgtccctgtagtcttcagtgaagagcttgtaaagtgactaaagtgacaccaaacacttgtttgtcccactgctggtctgccctttgttttttgttgggttagctttgttatgatcacttagagattgaaagaacagctgaatgcatcaggcttctttccttctgtgacctttttgctggtgtctgttccatgtccctctccctgcagttattcctagacatggcttacagagtcttgggaaagttgctgcagcccggcgcatgccaccgcctgcaaacctgccaagcttgaagtctgaaaacaaaggaaacgaccccaacatcgtgatagtacccaaggacgggacgggatgggcaaacaagcaggatcagcaagacccaaagaggtaaacggaggaggcgggtggtgagtgggagctggcgctccaagggtggtcccggcatccttccctgtggcaaactaa

SEQ ID NO: 1960 - DNA, 569 bp, Homo sapiens
  MAP TO CHR7.1; EXPRESSED IN HELA, SIGNAL = 0.78; EXPRESSED IN BRAIN, SIGNAL = 0.89; EXPRESSED IN HEART, SIGNAL = 0.84; EXPRESSED IN BONE MARROW, SIGNAL = 0.95; EXPRESSED IN ADULT LIVER, SIGNAL = 0.55; EXPRESSED IN LUNG, SIGNAL = 0.83; EST_HUMAN HIT: T60653.1, EVALUE 3.00e-68; NT HIT: gi14743059, EVALUE 4.00e-94; SWISSPROT HIT: Q9Y6U3, EVALUE 4.00e-27
cagcaccttttctctttcggagatgtagatgaacagacttacatcttcatacttttcaaaaacagaaagtattggagcatggtgatgtttcccctgacaagaaactactcatggacaccgtgcctgcgataacaaaagattctcaagtcaacagggaaaattaattatcattaacctatatgttctgttaatcatcattcctcctgctcttgactttttattttttgttttattttcaaaaagacaacataagaacacatttggaactaaaaccttctttcacagcactcttaattatatttcttttattccccctctcccccatcagatccgagtctcccaaggcaaagagcctgttcacctactgagtttgttcaaagacaaaccgctcattatttacaagaatggaacatcaaagaaaggaggtcaggcacctgctccccctacacgcctctttcaagtccggagaaacctggcatctatcaccagaattgtggaggtaatgtcatgcattccataaaacatgccctagttatggacttcccaatggacctgagccatcagcaaat

SEQ ID NO: 1961 - DNA, 550 bp, Homo sapiens
  MAP TO CHR19.1; EXPRESSED IN PLACENTA, SIGNAL =  27; EXPRESSED IN LUNG, SIGNAL = 7.9; EXPRESSED IN HELA, SIGNAL =  14; EXPRESSED IN BRAIN, SIGNAL = 1.8; EXPRESSED IN HEART, SIGNAL = 3.6; EXPRESSED IN FETAL LIVER, SIGNAL = 7.9; SWISSPROT HIT: Q02543, EVALUE 3.00e-14; EST_HUMAN HIT: BE787040.1, EVALUE 4.00e-55; NT HIT: AB007175.1, EVALUE 1.00e-117
cttaacaccccatcctgtggggccaccaaggtgtagccgccccccactgggctcctgcgtcagagcaggcacttccctccaggggagtcccccagggcactcacgtggaactgcttgacagccggccggcggcacttgctggccgcgatctcctccaccttcatgatctgaatggagtgggctcgggcgcggtgccgggcacccatgtctcggtctgtggaaaggagcggggccagggtgacggtgttgcctgggctctgggcattcagcaaacctcctgagtgcctgcccaatgacctgacacatcctgttggtcacagcaactgcctgagggctcggggctcacgggaaggtggtggtggggaagcgagatagcccaaggcctgggtccctgcagtcactggccactagagttgtggaacctccaaattcactttgaggggcacggccacagccccccaaaggcgacaagatccgcttgctgtttgcacctctgtttaaaccaccgctataagaaacagtgattcttgggtttaggtgcaatcaggga

SEQ ID NO: 1962 - DNA, 587 bp, Homo sapiens
  MAP TO CHR6.1; EXPRESSED IN LUNG, SIGNAL = 7.8; EXPRESSED IN HELA, SIGNAL = 7.8; EXPRESSED IN FETAL LIVER, SIGNAL = 8.6; EXPRESSED IN BRAIN, SIGNAL = 9.8; EXPRESSED IN HEART, SIGNAL = 6.3; EXPRESSED IN ADULT LIVER, SIGNAL =  14; EXPRESSED IN BONE MARROW, SIGNAL = 9.8; EXPRESSED IN PLACENTA, SIGNAL = 9.9; SWISSPROT HIT: O15056, EVALUE 1.00e-48; EST_HUMAN HIT: AI452967.1, EVALUE 0.00e+00; NT HIT: gi14747877, EVALUE 0.00e+00
ttacaggacagggcaggttcttgagccattgagttgggcaatgccatgggaagttgcaggtgcacagacgttgccttcctggctgcggttgaacctgggctccatttgtccccttggagctccaggcggccgggccgacttcgaccctgagctctcctgtctgatttcctttccaggtggcacgtctctgagcttcctggtgttggtgacaggctgcacatctgtgggcagaattccagatgctgaaatctacaaaatcactgccactgacttttaccctcttcaggaagaggccaaggaggaggaacgcctcatagctttgaagaaaatcctcagctcgggggtgttctatttctcatggccaaacgatgggtctcgctttgacctgactgtccgcacgcagaagcagggggatgacagctctgaatgggggaactccttcttctggtgaggccctgggtcccctgcagagggtgggccctgggtctcctgcagagggtgggccctggttggcatctgaggccttgacctccacttgcaccacccccgggttatggggcacctctggagagttaggacccaggcct

SEQ ID NO: 1963 - DNA, 577 bp, Homo sapiens
  MAP TO CHR7.1; EXPRESSED IN ADULT LIVER, SIGNAL = 0.76; EXPRESSED IN FETAL LIVER, SIGNAL = 1.2; EXPRESSED IN LUNG, SIGNAL = 0.85; EXPRESSED IN HELA, SIGNAL = 1.3; EXPRESSED IN BRAIN, SIGNAL = 1.2; EXPRESSED IN HEART, SIGNAL = 0.58; SWISSPROT HIT: P22035, EVALUE 1.00e-06; EST_HUMAN HIT: BG282900.1, EVALUE 1.00e-128; NT HIT: gi10863946, EVALUE 1.00e-128
tttccaccagagggtcattcagaaacaaactcttagtactattgcttacttcctatcagtccttgtaaatagagggctgaatcagatttgtaaaagaagttagcagtggtagtctggatgatttccttttttcagggaagtggacagaagaagaagaaaagagacttgcagaagtggttcatgagttgacaagcactgagccaggtgacatagtcacacagggtgtgtcttgggcagctgtggctgaacgagtcggtacccgctcagaaaagcaatgtcgttctaaatggctcaactacctgaattggaaacagagtgggggtactgaatggaccaaggaagatgaaatcaatctcatcctcaggtttgtgtcctgaatcttgtaatgacaaaagcaacttaatttctgtggatgtcttgatagactttcctcttttggttttcctggatgcctagtgtctgaaaagtatcctttccatagagcactactgtttaagatcttaagtatttcatattgagctctttttttgtgttgtgtttgttcctttttttttttagtgggtttagtgctcatgca

SEQ ID NO: 1964 - DNA, 560 bp, Homo sapiens
  MAP TO AC007910.3; EXPRESSED IN FETAL LIVER, SIGNAL = 0.44; EXPRESSED IN LUNG, SIGNAL = 0.84; EXPRESSED IN BRAIN, SIGNAL = 0.35; EXPRESSED IN HEART, SIGNAL = 0.72; EXPRESSED IN BONE MARROW, SIGNAL = 0.33; NT HIT: gi14736006, EVALUE 0.00e+00; EST_HUMAN HIT: AA428896.1, EVALUE 0.00e+00
gttgcaggctttgtgtgttgcatatttaatatttctactaccaccgtatgtcaactgggtaaagccttccagagctctctaaatacctgaaagacttaagcctttttttaagtaattaatacttaaaaaaaaagatcctggcatctatttatgcaactaaatacttttcagaaatggtatataaaaggctacagtttaatatctgtatttttataaaagtatgatgaagggtttggggtgtttttatttgtagcagaggtaagaatatgtattcatataatctgcctacttttgagttctcatattaacatttagataacatatgaagtatggcccccttggatccttgtttttaagttactttcgatgtgtatacgaacaaagaccagggagaaacagaacttttaaaactataggctgctgtgttggggccagaaataaggtgacaagtaaagacttttataatacctaccttcaaaattagaatcagcagcactgtacaaataaagtgcctgtgcttcacctcacaccaagaatcttgcctaaccctgtcagagtgc

SEQ ID NO: 1965 - DNA, 563 bp, Homo sapiens
  MAP TO CHRX.1; EXPRESSED IN BRAIN, SIGNAL = 1.2; EXPRESSED IN HEART, SIGNAL = 0.97; EXPRESSED IN BONE MARROW, SIGNAL = 0.59; EXPRESSED IN LUNG, SIGNAL = 0.73; EST_HUMAN HIT: BI756607.1, EVALUE 0.00e+00; NT HIT: gi14762746, EVALUE 0.00e+00; SWISSPROT HIT: Q12809, EVALUE 3.00e-09
gccaggtcataggtcatgtggaagatctcctcccactggtggatgtagcggatcaggcgcgagaggcgcagcagccgcaggaggctgaggatcttggtgaagcgcacgatccgcagggcgcacgccgtcttgtagacctcggagtcgatgcccttctccacgatgaggaagatgtagtccacggggatggaggacacgaagtccaccatgaaccacgtgcgcacgtacttcttgatcttctcttggtccaggatgatctccgtgttgtcctcgatcacaatgccggtgcggaagttcaacaccaggtccatgaggcagaaggtgtccgagaccacgttgaacacgatccacagggcagtggtctcgtccttgaagaaggtgatgcccactgggatgatgatgaggtttcccaccatgaacagcagcatggtgaagtcccagtagaacctgaagtcgctgtacgggtggatgatccaggaccccgctgactggacgcgctcctgctcgcgctccacggccttctggctgccgaacatccgcagcgagaacttgttgacgcccag

SEQ ID NO: 1966 - DNA, 577 bp, Homo sapiens
  MAP TO CHR22.1; EXPRESSED IN FETAL LIVER, SIGNAL = 2.5; EXPRESSED IN BRAIN, SIGNAL = 2.3; EXPRESSED IN LUNG, SIGNAL = 3.7; EXPRESSED IN HELA, SIGNAL = 1.8; EXPRESSED IN HEART, SIGNAL = 3.3; EXPRESSED IN BONE MARROW, SIGNAL = 2.8; EXPRESSED IN ADULT LIVER, SIGNAL = 0.73; EST_HUMAN HIT: AL581952.1, EVALUE 8.10e-01; NT HIT: gi14778779, EVALUE 0.00e+00; SWISSPROT HIT: P10162, EVALUE 2.00e-06
tgtggacacagccttgactctctgggggcctaagaaaggcagagctggcagccaggtccccagagagagagcctcacctaccccctcacctcatccccaggtgaccatgctccctgccaaacaggcagaactgacccggcggagccaagcagagccccctcatccttggagtcctgagaagagacctgagggagatcggcagctccaggggtccccgctgccccccaggacatcagccaggacccctgagagggagctgcggacacagagacctctggagagtggccaagcaggcccaagacagcctctgggggtgtggcagagtcaggaggaaccgccagggtcccagggccctcatagacacctagaaaggagctggagcagccaggagggaggcctgggccctgggggctggtggggatgtggagagcccagcctgggggcagccaaagccccggagggagcatgggggggcacttccagggagtacaaggagagctgggggcagccagaggcctgggaggagaagcccactcatgagctccccagagaactaggaaagagaagcccactcacg

SEQ ID NO: 1967 - DNA, 532 bp, Homo sapiens
  MAP TO CHR5.1; EXPRESSED IN BRAIN, SIGNAL = 0.79; EXPRESSED IN HEART, SIGNAL = 0.68; EXPRESSED IN BONE MARROW, SIGNAL = 0.59; SWISSPROT HIT: Q9Y5H5, EVALUE 9.00e-99; EST_HUMAN HIT: BF920578.1, EVALUE 0.00e+00; NT HIT: AJ007610.1, EVALUE 0.00e+00
aggttttacctgctggttgctggttggcacgtccaggaagaaatactcattggggctcagtctgtaagtgagcagggcgttctccccgatatctgcatcggacgcgccctctagtggaaaccgagagtcaagcggcctggattccgcgatgaacagattcttttgtgtcgctgggaacactggagggttgtcgttaatgtccttcacctccacgtccacatggaaaacctgcagcggcctgtctacgatcacctccaggtggatgctgcactccgcgctccgcccgcacagctcctcgcggtcgatccgagaattcacaaacaaaatgccattctgcagatttacctccagaaggtccccgcggcctttggaatccaactggaacaggcgcggcaccagctccgccagctccagccccaggtcctgcgcgatgcggcccacgaaggtgccgtgttcggcttcctccgggacggagtagtggagctggccgctccccaccacccacattgcgaggatcagaagcgagagcagt

SEQ ID NO: 1968 - DNA, 526 bp, Homo sapiens
  MAP TO CHR20.1; EXPRESSED IN PLACENTA, SIGNAL = 3.5; EXPRESSED IN LUNG, SIGNAL = 1.6; EXPRESSED IN HELA, SIGNAL = 1.6; EXPRESSED IN BRAIN, SIGNAL = 1.3; EXPRESSED IN HEART, SIGNAL = 1.3; SWISSPROT HIT: P28356, EVALUE 1.90e-01; EST_HUMAN HIT: AW732051.1, EVALUE 0.00e+00; NT HIT: AF133282.1, EVALUE 8.00e-74
aggcctccctctctcttctgctccacccttggcctgtctcatccccaggggtcccagccaccccgggctctctgctgtacatatttgagactagtttttattccttgtgaagatgatatactatttttgttaagcgtgtctgtatttatgtgtgaggagctgctggcttgcagtgcgcgtgcacgtggagagctggtgcccggagattggacggcctgatgctccctcccctgccctggtccagggaagctggccgagggtcctggctcctgaggggcatctgcccctcccccaacccccaccccacacttgttccagctctttgaaatagtctgtgtgaaggtgaaagtgcagttcagtaataaactgtgtttactcagtgaacaaagagcctgggctcttgtgtgctccgggatggggaaaggaggggccgctggagagctgggtactggtcctggctctgctgccctcaggggagggccttggacaagtccttccttccttctgggcctgaatttatccacct

SEQ ID NO: 1969 - DNA, 570 bp, Homo sapiens
  MAP TO CHR17.1; EXPRESSED IN FETAL LIVER, SIGNAL = 0.53; EXPRESSED IN BRAIN, SIGNAL = 0.56; EXPRESSED IN HEART, SIGNAL = 0.5; EXPRESSED IN BONE MARROW, SIGNAL = 0.52; EXPRESSED IN ADULT LIVER, SIGNAL = 1.2; NT HIT: AJ276505.2, EVALUE 5.40e-01; SWISSPROT HIT: P54258, EVALUE 1.10e+00
tccaccataaatagggcctgccttctcccaagaatgaaaactcactggcccaagctcccagccttcttggcacgatggggcagacagcccccaaccccccaccccaatatccatgggctgtctctgcctctgattcaaaccatctttacaactccctgccaaatcccttactttgattttccatatggaggcttggtctcatttgccaggttggtgtttataaggatgggttttttgacagtttcgctgtcggtgaaacagaggatgggaccccaccccttgaacatgaatcactttcttgtcatccaaaaaagagtgaaagatcaacattctgaagcaataacaacaacaaaatagaaaccccagaggtatctagcaatgggaacgtctcgtctttccttccctccccgcatcctccacctcaaactaataggccatggagtggaaaatagactccaaggtgcttcaaaaaatggcccatcactctgttacctcatgtttacacatggggtacataaacgcagactgtaaaagtcacctgatggtttcccccacgccatcttagacagt

SEQ ID NO: 1970 - DNA, 521 bp, Homo sapiens
  MAP TO CHR5.1; EXPRESSED IN BONE MARROW, SIGNAL = 0.7; EXPRESSED IN LUNG, SIGNAL = 0.87; EXPRESSED IN BRAIN, SIGNAL = 0.66; EXPRESSED IN HEART, SIGNAL = 0.78; NT HIT: gi14722739, EVALUE 1.00e-57; SWISSPROT HIT: Q13283, EVALUE 3.00e-09; EST_HUMAN HIT: W92149.1, EVALUE 0.00e+00
tgagggaattgtccattttgtagtttaaaacttgttagctaagaaacttcattaagaaaaaggataagcctgctttgttttaacacaaaagttaacttaaaatttttcagccccgtccagagtctaagcctgaatctcagattccaccacaaagacctcagcgggatcaaagagtgcgagaacaacgaataaatattcctccccaaaggggacccagaccaagtaagagctcagaagggcgatttctcgtttgggggattttgaggtgagagcttattttgggagggcagttgatatttatatactttaaaataaaaatattgtagggttgatggaattacctgtttttagtgtagagggaaaactattgaatgtgagcagtcattgaaagatgtcttctttctcttgtctttcattgatgtttttgtctccttttaagtccgtgaggctggtgagcaaggtgacattgaaccccgaagaatggtgagacaccctgacagtcaccaactcttcattggcaa

SEQ ID NO: 1971 - DNA, 533 bp, Homo sapiens
  MAP TO CHR6.1; EXPRESSED IN ADULT LIVER, SIGNAL = 0.77; EXPRESSED IN FETAL LIVER, SIGNAL = 0.54; EXPRESSED IN HELA, SIGNAL = 0.55; EXPRESSED IN BRAIN, SIGNAL = 0.55; NT HIT: AJ250248.1, EVALUE 3.20e-02; EST_HUMAN HIT: AA962009.1, EVALUE 7.50e-01
gttggggattggaaaggaagaattatagaagcaagcatattctgtacggattggtcaaacaagatttaaagcgagagacagagaaggaggaggagggggaggaaaagaagaaggagaaaaaaagaaattctaggataaaaatcattcccccttatagagctggaatgtgtataatgtaaagagacagttgcattaaagcattaggcctcatggcctgattaacatcatttgatcttttcctattgaaaagaccctatgtgtttccaaaggcagtggctttttaaataaaaccagaagtctgggtgagcagaaagctgttagaagagaaagcaacttgttttatatttaatcatctttttatcctacgtgcttcataatcttcagtttccttctctctgtcagtaggggatgcatataaagttaaaaatctagactctgggagatctaatatgacaaaaaccaacaaataaaaattcactatgacctaaattggtcagatcagacttttgggctgcctgtctccaggagctttt

SEQ ID NO: 1972 - DNA, 536 bp, Homo sapiens
  MAP TO CHR1.1; EXPRESSED IN ADULT LIVER, SIGNAL =  17; EXPRESSED IN PLACENTA, SIGNAL =  56; EXPRESSED IN BRAIN, SIGNAL = 3.5; EXPRESSED IN LUNG, SIGNAL =  37; EXPRESSED IN HEART, SIGNAL = 9.7; EST_HUMAN HIT: BE293429.1, EVALUE 0.00e+00; NT HIT: gi14591905, EVALUE 0.00e+00; SWISSPROT HIT: P40429, EVALUE 9.00e-12
aggcagtgataaccaccctggaggagaagtggaaggagaaggccaagttccactacaggaagaagaaacagctcatgaggctacggaaacgggccgagaagaacgtggagaagaaaactgacaaatacacagaggtcctcaagacccacgggctcctggtctgagcccaataaagactgttaattcctcatgcttggcctggcctgcccttcctccatcgtcgccctggaatgtgcgggacccaggggcagcagcagtccgggtgccacaggcagcctgggacataggaagctgggagcaaggaaagggtcttagtcactgctttctgaggttacttgaaagcactcagggaattgtgcaggtgtaatttatctatgaccaataggaagagcaaccagttactattagcaaaaaggagtcggaagactaattggaggggccctaccttgtgagtggggcgtctgtttaactttccacctggtaatatagctctgcagctgttagaatgtgcaagcgcttggggacaacatgagctt

SEQ ID NO: 1973 - DNA, 559 bp, Homo sapiens
  MAP TO CHR16.1; EXPRESSED IN BONE MARROW, SIGNAL = 1.9; EXPRESSED IN ADULT LIVER, SIGNAL = 4.2; EXPRESSED IN LUNG, SIGNAL = 1.7; EXPRESSED IN FETAL LIVER, SIGNAL = 1.5; EXPRESSED IN HELA, SIGNAL = 2.3; EXPRESSED IN BRAIN, SIGNAL = 2.1; EXPRESSED IN HEART, SIGNAL = 1.8; EST_HUMAN HIT: AA350737.1, EVALUE 6.00e-88; NT HIT: gi15317433, EVALUE 4.00e-91; SWISSPROT HIT: Q9Y4W6, EVALUE 2.00e-15
gagtcatgaccccaaaatggcacgaagagataaacttgctctgtgtgcccagcagccagatccagcaccctgacccacaccacctgcaacgcgctggctgactgcccgcacacacgtagccgccgtctggctgcacacacctagccgctggctgggtcacgggcttaccaagaggcaactacatctgatcccaagcctgttcatacaagttgtacctgttgttctatgtaattaatattaaattaataaaacaggagtaagaaccgactctgacccacagccatctatgtggagctcagagtattactatgttttccaaaatcaatacctttggaatttttgctcctaagtcctgatactgcttgggattcttcaggaaattcacaaattccataatttccaatttgattcttcgcacccagctacgtctgcaaataacacatcgatgttgctttttaagatcttggctgctgtctcaccaacaccgaagaggccccctcctcgtctactgcgcctggatcccataaggcccctcctggcagcatagacgagaatgcca

SEQ ID NO: 1974 - DNA, 516 bp, Homo sapiens
  MAP TO CHR19.1; EXPRESSED IN HELA, SIGNAL = 4.2; EXPRESSED IN BRAIN, SIGNAL = 3.3; EXPRESSED IN LUNG, SIGNAL = 1.2; EXPRESSED IN HEART, SIGNAL = 1.2; EXPRESSED IN BONE MARROW, SIGNAL = 2.6; EXPRESSED IN ADULT LIVER, SIGNAL = 1.8; EXPRESSED IN PLACENTA, SIGNAL = 3.7; EXPRESSED IN FETAL LIVER, SIGNAL = 2.6; EST_HUMAN HIT: AL571521.1, EVALUE 9.00e-96; NT HIT: AB033031.1, EVALUE 1.00e-124; SWISSPROT HIT: P19837, EVALUE 1.60e-02
aaataccacaccttcctgcgctgccgggaccaggtgagccccacccacagcacccatcgccctgggattccaacctttctgacttcctcttgggatctgagggtccaagcccagccccatcctgcctcagacccaagagttcaggtccttctgtcttggacttaagaatgcagcccccagccctggtctccctgggacactgacatctgacaccccaggccccatgccccagccccttccctccccaaggccggtgtgccaccctccccagtgccatgtttgacccctgcagaccctggccatcgagggcggcgccgaggacctgggccaggaggaggtggtccagcagtgcatgcggaaccagccgtggctggaacagctctttgactccttcagtgacctgctggcccaagcacaggcccacagccgctgcgggtgaccccgccccagcttgtgaggggggcgcctcctccatgaaccgagaattgggacagaaccgtgtcctcaggagctaac

SEQ ID NO: 1975 - DNA, 588 bp, Homo sapiens
  MAP TO CHR12.1; EXPRESSED IN LUNG, SIGNAL = 4.9; EXPRESSED IN BRAIN, SIGNAL = 3.8; EXPRESSED IN HEART, SIGNAL = 3.5; EXPRESSED IN ADULT LIVER, SIGNAL = 3.6; EXPRESSED IN PLACENTA, SIGNAL = 5.1; NT HIT: AB022526.1, EVALUE 5.60e-01; SWISSPROT HIT: Q01956, EVALUE 2.50e+00
acatctcagcaaccctgacctccagcaggctgaggggatgctgcctccggaagcccccacatcctgcattctgctgaacccacaatgtgtcaggccacccgtcccagctgcagcacacagacggccggagctgacaggctggggctgaaagaccggcccctcagctagaaatagccctccgagaagtgtgtggtggctacgtgtccacagggaagggaggaggcagggcaggggagccaaggagtcccaggatcccgagataacaccagtccggatgtgcagagtcccaaacgtggtgggctggcctgggtcaccggctccaacgaggtgagtgggaaccaggatgtctgctccctgatgtgggctgcgtgacaagccccaggcatcctgagagggtgggctgggccctctagggcagcctttgagcaccaatcagactggacagcctgtgtggacacacacagacacacacacacacacacacacacacgcggctcctctgcagtcccaagtttccattgttccttccttgggcagaatcccagccttggaagcatggctgccttccctctggtttgggatcaagga

SEQ ID NO: 1976 - DNA, 588 bp, Homo sapiens
  MAP TO CHR19.1; EXPRESSED IN LUNG, SIGNAL = 1.9; EXPRESSED IN HEART, SIGNAL =   2; EXPRESSED IN FETAL LIVER, SIGNAL =   3; EXPRESSED IN BRAIN, SIGNAL = 3.6; EXPRESSED IN BONE MARROW, SIGNAL = 4.3; EXPRESSED IN ADULT LIVER, SIGNAL = 2.7; EXPRESSED IN PLACENTA, SIGNAL =   3; EXPRESSED IN HELA, SIGNAL = 2.4; SWISSPROT HIT: P25172, EVALUE 7.50e+00; EST_HUMAN HIT: AI609500.1, EVALUE 2.10e-01; NT HIT: AF401552.1, EVALUE 6.00e-04
gcactgccaaccttcttctcttccttcttctcctcaacccccactgggctttctgccctccagaccacctcctcccagacactaggggctgatttgcacagctggtggtcgaggcccctcctggcatccttggtggatccaacactgagtaaagttgccgaggcgagtagcgatgctctggtggaaggctccacatgcacattcaccccgaacagctgctggaaactggcacactctgctgctgtagaaattatcagcactgccacctcagctcctggagaaagtctcggtgtgacagcctgcaaagtaatcctgcatttgaatttcactgacaaatcctggcttcctccagacaagctccaacctgcacagatggcccctcgcatcaaaaagtaaaaataacaaagcttgcaattctgggcctccctttttctctgggcagatgtgctggctgcacatttcgggaatcgcgcggtctgagttccagcagcaacctctctcctcctgtacgctcgcactcgccccttctggcgtgctgctggggagcggccgtggcccctccgagtgtgttcagggaagtgtctggga

SEQ ID NO: 1977 - DNA, 521 bp, Homo sapiens
  MAP TO CHR20.1; EXPRESSED IN HELA, SIGNAL = 0.99; EXPRESSED IN LUNG, SIGNAL = 1.6; EXPRESSED IN BRAIN, SIGNAL = 0.97; EXPRESSED IN HEART, SIGNAL = 0.86; EXPRESSED IN BONE MARROW, SIGNAL = 1.2; EXPRESSED IN ADULT LIVER, SIGNAL = 1.7; EST_HUMAN HIT: BG546269.1, EVALUE 1.00e-79; SWISSPROT HIT: Q07050, EVALUE 1.00e-21; NT HIT: M60705.1, EVALUE 0.00e+00
agtgtgcagcatctgtcagggcccctggggccctggcttttcgatggtttctgagaaatgtcttttggaaatctctatactagggcttttattgactcaaagtggcaggatgggtacagtgtgctcttgtctagagcccaggcctggttcttgaggactttgctattcttctagggtagtagagtcaaagaagaaggctgttcagagactggaggaacagttgatgaagctggaagttcaagccacagaccgagaggaaaataaacagattgccctgggaacctccaaactcaattatctggaccctaggatcacagtggcttggtaagtgttgagccctccttgagctcctgctgctagcttaagaaaggtggagggggttccgagagcactggtggccttcacatgccattcctaagctacacactttagtcctctggggaaacttctggcttcagctgtgtacaagttactctggttgctgaaccttgtctgtaaatgcattgcaacattctggttgc

SEQ ID NO: 1978 - DNA, 594 bp, Homo sapiens
  MAP TO CHR8.1; EXPRESSED IN ADULT LIVER, SIGNAL = 1.4; EXPRESSED IN FETAL LIVER, SIGNAL =   2; EXPRESSED IN HELA, SIGNAL =   3; EXPRESSED IN BRAIN, SIGNAL = 2.2; EXPRESSED IN LUNG, SIGNAL = 1.2; EXPRESSED IN HEART, SIGNAL =   1; EXPRESSED IN BONE MARROW, SIGNAL = 2.5; SWISSPROT HIT: Q19691, EVALUE 5.80e+00; NT HIT: gi14732953, EVALUE 2.00e-03; EST_HUMAN HIT: BF699225.1, EVALUE 5.00e-67
aaaatatcagcatgcctggggatgtcattgatttaaatgagggcacaagttccgtatttccttgcagatgggtccagactgtttgcagactggccatggtccttgggccacactggaagaagaactgggctaagtattttttatgcctgtgatttaacttctccaataaaccgcagctcttgtaggatatgatggtcgctgtcaggcaaggactagattttcaatgagaacttgatggtggggattgaacgttggctggggagtgcagtggctacctcagtacccggaactccagttgcctctccactcttcctatgtaatgacttccctttctgtgtctcacctgcagaataaaatcttcatctatcggggaaaggagtatgagaggcgagaggacttcagcctgaggttgttaacccagttccccaatgcggagaagatgaccagtaccacgcctcctggggaagacatcaagtcgtcccccaagcagtgtatcctttccggggggagtatggcccgaggctcttatggctgtcacagcccagctaagccagagaacataggagctacagtcccttctctgcagacacacca

SEQ ID NO: 1979 - DNA, 523 bp, Homo sapiens
  MAP TO CHR2.1; EXPRESSED IN FETAL LIVER, SIGNAL = 0.34; EXPRESSED IN LUNG, SIGNAL = 0.76; EXPRESSED IN BRAIN, SIGNAL = 0.39; EXPRESSED IN HEART, SIGNAL = 0.7; EXPRESSED IN ADULT LIVER, SIGNAL = 0.43; SWISSPROT HIT: Q28235, EVALUE 6.30e+00; NT HIT: gi9506632, EVALUE 6.00e-59; EST_HUMAN HIT: AL561878.1, EVALUE 1.00e-58
gccttaatgtgctacccagccttcctcttacctccttgaactctttcacagtcttaaagtatagcctctgcttttctaacagctccaagtactggtcgttcaactggtctcttctcattttgttctcttgctttttcttttccatctgttgaaacattgtgggaaatggtgatgaaaagacatgttctgcccaagggctactggcaacatccaaaaggcaacagttgttaacagtttcatggatttccttacagtagaggaagcttcaatatataatttttgaggttggttaatttatttgcatattacatggaggctctacaatttattcagcaatttttctatcactgagtattaactgtttccatttttttttctcactacaatttcacaatggacaggttggtgattctcaactaggagctattttgccccccatcccccacccggcagtgtctggagacagttttgattgtcacaactgcgagaagtgggtgctactggaatcactgggtagaggcca

SEQ ID NO: 1980 - DNA, 533 bp, Homo sapiens
  MAP TO CHR19.1; EXPRESSED IN FETAL LIVER, SIGNAL =   4; EXPRESSED IN BONE MARROW, SIGNAL = 4.3; EXPRESSED IN PLACENTA, SIGNAL = 5.7; EXPRESSED IN LUNG, SIGNAL = 2.9; EXPRESSED IN BRAIN, SIGNAL = 4.1; EXPRESSED IN HELA, SIGNAL = 6.7; EXPRESSED IN HEART, SIGNAL = 2.6; EXPRESSED IN ADULT LIVER, SIGNAL = 4.8; SWISSPROT HIT: P22964, EVALUE 1.30e+00; NT HIT: gi4885106, EVALUE 1.00e-91; EST_HUMAN HIT: AI191348.1, EVALUE 1.00e-91
tgacctttctttggggacaggcagtgctgctttttaacaaatgcccatctttctagaattgttaggccagcttcacagggaggttcctgggaggtttgtgagcaggtctgtaaggcagcgtgatcctgagcctggggttttccttctcagtgatgtcgtcatcgtggagcgtgggaagggcgacggtgttcccgagaggaggaagtttggcaggatgaagctcctgcagttctgtgagaaccaccggcctgcctactggggtacctggaataagaagacggcactcatccgcgcgcgagacccctgggcccaggacacggtgagctagccccagagtgcctccgtccccgtacctcctcactgtgcccctttcctccagccccaaagacagttgtgagtcccatgtgtttcttttctcagaagctcctggactatgaggtggacagtgatgaggagtgggaagaagaggagcctggggagtccctgtcccacagtgagggggtaaggatgtgccccagctgtcttcactcaca

SEQ ID NO: 1981 - DNA, 561 bp, Homo sapiens
  MAP TO CHR2.1; EXPRESSED IN BONE MARROW, SIGNAL = 3.2; EXPRESSED IN ADULT LIVER, SIGNAL = 3.9; EXPRESSED IN PLACENTA, SIGNAL = 3.9; EXPRESSED IN FETAL LIVER, SIGNAL =   4; EXPRESSED IN LUNG, SIGNAL = 3.4; EXPRESSED IN HELA, SIGNAL = 4.5; EXPRESSED IN BRAIN, SIGNAL = 4.4; EXPRESSED IN HEART, SIGNAL = 2.5; EST_HUMAN HIT: BF876001.1, EVALUE 4.00e-61
attaccgagtcaccaccaggctgcgctgaacaggaagtgaacaagtcaattcgagaaagatccaataagggaatattctctgggcaccgctgggccaacacccacggaggggtcctggaatacaaataccctggagtctgaagggcggtggcccctcttctcaccacttcaattatgtcttcattgaactgggttatgaaaaagggaagcagggattgaaaatctagccttgtggccataagcctgtgatgactcatgccagctttgggtgctctaagatgctttcccatgtctgtaatgcttttcatatcatcctacacactcactgtcacctctcctcaccccagcacacagaaaagatgtgcttattatgtgcacttaggttttgttgtactattaaacacaatgacccactcctattattaaaacacaggttttgctggaaactcaaaaaagacttggctctgctggctcacagggaatctgggctccgctcttccaaaacctttgttctccagatgtcagtgcaaagttatgaacagctctccccctgagctaact

SEQ ID NO: 1982 - DNA, 592 bp, Homo sapiens
  MAP TO CHR7.1; EXPRESSED IN PLACENTA, SIGNAL = 4.8; EXPRESSED IN FETAL LIVER, SIGNAL = 5.5; EXPRESSED IN HELA, SIGNAL = 3.7; EXPRESSED IN BRAIN, SIGNAL = 5.7; EXPRESSED IN BONE MARROW, SIGNAL = 5.8; EXPRESSED IN ADULT LIVER, SIGNAL = 6.8; EXPRESSED IN LUNG, SIGNAL = 4.6; EXPRESSED IN HEART, SIGNAL = 4.4; EST_HUMAN HIT: AI890135.1, EVALUE 0.00e+00; SWISSPROT HIT: Q64727, EVALUE 2.20e-01; NT HIT: AF202145.1, EVALUE 0.00e+00
gagaggtaagagatgtggggggagacagtgaggtacccccataaatgtcatttgatttacaactttaacaggttctttaatgttttatagccagaacatttgttgaacacaagtgataatgttacagtgcagtgtcacacaccaagagtcatcattcagactgttgccacagaggacatcacttcttccatatcccaagcagaactgacagtcgatagtgatattcagtcatctgattttcctgagcctccagacgccctagaagcagacactttcccagatgaaattcatcaccctaagatgactgtggagccatcatttaatgatgctcatgtatccaaattcagtgaccaaaatagcacagaactgatgaatagtgttatggtcagaacagaagaagaaatctctgacaccgaccttaaacaagaggaatcaccctctgatttagccagtgcttatgttactgaggtaagttgtactttaagaacaactgaatggattcttgccttgagcctcaaacctgcagtttgggaaacttttttctgaagactcatgaaattaagctcaaacccccaacctcacacctcacaaa

SEQ ID NO: 1983 - DNA, 510 bp, Homo sapiens
  MAP TO CHR1.1; EXPRESSED IN BRAIN, SIGNAL = 6.2; EXPRESSED IN LUNG, SIGNAL = 4.3; EXPRESSED IN HEART, SIGNAL = 4.8; EXPRESSED IN ADULT LIVER, SIGNAL = 5.9; EXPRESSED IN BONE MARROW, SIGNAL = 7.6; EXPRESSED IN PLACENTA, SIGNAL = 5.8; EXPRESSED IN FETAL LIVER, SIGNAL = 5.2; EXPRESSED IN HELA, SIGNAL = 6.2; EST_HUMAN HIT: BF087101.1, EVALUE 1.80e-01; SWISSPROT HIT: P10070, EVALUE 4.20e-01; NT HIT: U49854.1, EVALUE 7.60e+00
ctcctcatgcctcagtctcctggcacactcaccactcgaaggaaaccagggggaagatacacagggggctgtgcaaatttttgggtgatggtggcagaagtggggaggaagcttggaggaacataaaagatgcaatccacagctgtctgcttttaattataattatcccctttcgcttcctttctggctaatgaggggggggatttaaatttttttctcccttttctcccccttcctcctttccctggaattgaggggtggggtgagttcaggatcctcctccccttcctcccttatcccctggttactgggagaaaggcagactccagagggtggtgacagtatgaagagatttgcaggaacaaaagaaggacaggtttggattgctggacacgtcccagagttggacagagccccccccccattccactggcacccccctcccatcaaccccccagctccctagacaaggaactcaatgtcttccagccggtgagaaaggagctaacg

SEQ ID NO: 1984 - DNA, 585 bp, Homo sapiens
  MAP TO CHR12.1; EXPRESSED IN HELA, SIGNAL = 0.57; EXPRESSED IN BRAIN, SIGNAL = 0.69; EXPRESSED IN HEART, SIGNAL = 0.97; EXPRESSED IN BONE MARROW, SIGNAL = 0.7; EXPRESSED IN LUNG, SIGNAL = 0.94; EST_HUMAN HIT: BE536459.1, EVALUE 2.00e-85; SWISSPROT HIT: P22829, EVALUE 4.30e+00; NT HIT: gi14755124, EVALUE 1.00e-85
ggcctaagggtagagggttgtggccctgtaggaggctggcagctccatctgtaaggccggaagctttgcgggggtggagtgatggctgccagtggcttcttagtagtgctgggttggccagcagtgagtaactgacccaacaccttctgtcttaagcattcaggtagaactggaagccgaggcggaaaagatgcgggtgtcccagcaagaattactttctgttgatgaatctgtttacactccagactctgatgtggccgcaccacagatcaacaggaacctcatccagaaggctggttaccttaatcttagaaagtgagaacgccaccgtctgcctctttttctgaaatccgttttccctaagaggtggctgaaaagcaatcttacgtgcctcattaaagtcagagggaggtgggtgggtgagactgggaagaactcccatcacagcagccctcccacttgcaacacaggaaacctctggggcccaggcgccaaactgcactaagagatggggctggaaacgagtcctctaagagcctggtgctgtggactctggtcactgtggccatgtgcaaacagaccact

SEQ ID NO: 1985 - DNA, 552 bp, Homo sapiens
  MAP TO CHR2.1; EXPRESSED IN PLACENTA, SIGNAL = 1.5; EXPRESSED IN LUNG, SIGNAL = 0.71; EXPRESSED IN HELA, SIGNAL = 2.1; EXPRESSED IN BRAIN, SIGNAL = 1.7; EXPRESSED IN BONE MARROW, SIGNAL = 1.3; SWISSPROT HIT: P54198, EVALUE 2.30e+00; NT HIT: U62293.1, EVALUE 9.00e-03; EST_HUMAN HIT: BG957228.1, EVALUE 1.00e-05
tgttctgtggaggacagcaggtcttgggcggtagtgccaaggcaggtaacacactggcttgagataagcctgctggggctagacactgttaggggtgcaaggcttaaaaggatggcttcagcaacaggaattctgaagctttgtgaaaaagaaagtagtctgatgtccctcaaagcctcctcccttttcttcttaccctgcagtgggccagagatgccaaaggggccacctcctgcctcctcaggaaaatctacagcagcttttgatgagctggtcagggatggttctagttcatatcaatgcaggacttttcttggccccttcgccagactcgcggcaggggtgcctggtctactcggctcgctgttctcagccccttgcaggagggagcacttgagcaagtgagtgcaggatccagccggccactccactgacacaggagcaagctctgtgcagggcccgcagccagaccaggtgtgtggcttcgaggggaatgcagcagcgcccagacaagggtagccatgaccctgaagccccagagagggtattagc

SEQ ID NO: 1986 - DNA, 535 bp, Homo sapiens
  MAP TO CHR7.1; EXPRESSED IN ADULT LIVER, SIGNAL = 3.3; EXPRESSED IN PLACENTA, SIGNAL = 3.7; EXPRESSED IN FETAL LIVER, SIGNAL = 2.2; EXPRESSED IN LUNG, SIGNAL = 1.9; EXPRESSED IN HELA, SIGNAL = 3.6; EXPRESSED IN BRAIN, SIGNAL = 2.9; EXPRESSED IN HEART, SIGNAL = 1.5; NT HIT: AF397148.1, EVALUE 1.30e-01
cttttccccttcctgtcctcagttgagcaactgtcagtttgccagaaaagacctcaacccttgctctgctaggatgtcagggagatacatattcattgaggactcctcgggacagagtgaacttgatggctgcatttcactgtgcttattcttagagaaaatttattttaagatacaaaatttctcccttatattaggatataatcttgacagctaagggggtaaacagtcacaagaggttgctcaatggaaaaatttcagtagcgctaagttcaagaagaatttaaaatgaaaggactgtatacaagcaatgtaattacctttgtcatctccttcaacttttcagtgctggaactttccagtagctaaacacacaactagaaatgaatctattttcatatttcttcatatacatttataaataggaggtggcaaaatacagattacgttgttatgtattttcccctttttgtttttctgcatatgattgcattgggaaacagaattcatatgtggcatcccggttcatctctta

SEQ ID NO: 1987 - DNA, 537 bp, Homo sapiens
  MAP TO CHR20.1; EXPRESSED IN PLACENTA, SIGNAL = 4.2; EXPRESSED IN FETAL LIVER, SIGNAL = 3.9; EXPRESSED IN HELA, SIGNAL = 2.8; EXPRESSED IN BRAIN, SIGNAL = 4.7; EXPRESSED IN LUNG, SIGNAL = 3.9; EXPRESSED IN HEART, SIGNAL = 4.1; SWISSPROT HIT: P35258, EVALUE 2.20e+00; EST_HUMAN HIT: BG745910.1, EVALUE 4.80e-02
aatggcttgcaaaactcctgaatatttaacaaatggctcccatgagccaggatggattggctccaggataccactgcgtctagggtagcacctctaataaaactaattgatatttctgcagcaaactgtgtaaatattcacactaattggtgtaaaacatcttcatatccattgaggtcagatttttgcgtgcaaagaatcaaccatgaattaactgtaaaagaaggactttcagttgagaaagatctttggattttcacattgcacgtaaaagatagtgggtctgtttctgcatggattccactgtctgcagatttgctgatactgttgggatccttcgggaaatcctggtgacctttgtgaacagcagtgaacaatgattttgagctcagtgatgtccaaggtccctttagttctagaagtctatggctaaaaatttaagaaatatttcactaactgcccatttggctttatttctattttagtactactgtgggctggagtcttttaaaacatggtttctggagccatggagag

SEQ ID NO: 1988 - DNA, 573 bp, Homo sapiens
  MAP TO CHR19.1; EXPRESSED IN BRAIN, SIGNAL = 3.9; EXPRESSED IN LUNG, SIGNAL = 4.3; EXPRESSED IN HEART, SIGNAL = 2.7; EXPRESSED IN BONE MARROW, SIGNAL = 4.9; EXPRESSED IN ADULT LIVER, SIGNAL =   5; EXPRESSED IN FETAL LIVER, SIGNAL =   6; SWISSPROT HIT: P38704, EVALUE 8.30e-01; NT HIT: gi14756722, EVALUE 2.00e-99; EST_HUMAN HIT: BF848343.1, EVALUE 0.00e+00
agttagaggtgcccatgcagggacactgaggacatgagtgtctcagatctgcagtagagcagggctcccaagcaggtggtctttggcaaatgccagatgaggtccccggcggggagcccaggccttggggagcccttcatgtaggtcaggaatagacttggggaaccgtggggcgcctctgaggagctgtggctggagggtcctgggccccccagtccctcctgagcgttgggccaggtccagtgagcactgcccaacccccatagacagccgatcgccagtacatggagggcttcaacgacgagctggaagccttcaaggagcgtgtgcgggccgtgccaagctgcgcatcgagaaggccatgaaggagtacgaggaggaggagcgcaagaagcggctcggccccggcggcctggaccccgtcgaggtctacgagtccctccctgaggtggggctccccggcccaggcgggcagcaggaagaccctgagcgggaccccccaggccacagggacccagcccctgaccccagcccctctgtacccccaggaactccagaagtgcttcgatgtga

SEQ ID NO: 1989 - DNA, 553 bp, Homo sapiens
  MAP TO CHR7.1; EXPRESSED IN BRAIN, SIGNAL = 2.6; EXPRESSED IN HEART, SIGNAL = 2.2; EXPRESSED IN ADULT LIVER, SIGNAL = 3.4; EXPRESSED IN BONE MARROW, SIGNAL =   3; EXPRESSED IN PLACENTA, SIGNAL = 2.4; EXPRESSED IN LUNG, SIGNAL = 2.1; EXPRESSED IN FETAL LIVER, SIGNAL = 2.3; SWISSPROT HIT: P49819, EVALUE 1.00e-30; NT HIT: L13756.1, EVALUE 1.00e-109; EST_HUMAN HIT: BG675041.1, EVALUE 1.00e-103
gggtcaattttaaacctcggagcttctcataggaacatactagcgaaagaagaaaatgttttacaataaattattaagatgatttcgtaaacatttgctatagaaacttttatgattattgggtttttttaatttatttgcagggttcagtttggcaaagacttggtgcagatgtgacagcagttgaatttttaggtcatgtaggtggagttggaattgatatggagatatctaaaaactttcaacgcatccttcaaaaacaggggtttaaatttaaattgaatacaaaggttactggtgctaccaagaagtcagatggaaaaattgatgtttcgtaagtatacatcatttgtttttgatgtatcatccctgtctctttaagcaaaacactcaagtttcaaaatcagtttagcaaatatagggttttttctaacttaaggtcattttattacttaatataactcagttgcttatcaaattattgcattagcacattgaaatttatgattaggttaatgctagaaagagaatccaatattctcattgttgtgcc

SEQ ID NO: 1990 - DNA, 559 bp, Homo sapiens
  MAP TO CHR22.1; EXPRESSED IN BRAIN, SIGNAL = 7.7; EXPRESSED IN HEART, SIGNAL = 6.1; EXPRESSED IN ADULT LIVER, SIGNAL = 7.7; EXPRESSED IN BONE MARROW, SIGNAL = 8.5; EXPRESSED IN LUNG, SIGNAL = 7.5; EST_HUMAN HIT: BF956772.1, EVALUE 2.00e-94; SWISSPROT HIT: Q00153, EVALUE 8.00e-01; NT HIT: Y18000.1, EVALUE 0.00e+00
taatgggcctgattcacctcactgggcaggtggcggctatctactgagtggtctgagcaagagccttaggaaaaaggtccagatagactgatgtcattttaaaattgccaacatcaaaagagaaatcacagcaaggatcatgagaacagaacctcgggctcgcagaacgagtttgcatctggctcttccctcccactgttgcagcaacgaatccggtgccgaggagagctgcactgaaacacatcttcagtgccgaggggccgaacagggtgttttactgcctcaaataaggcctggtaatatcctcaggcatctccaaatggtggtaaagtacctaggcaggcaaggcaggtttgtaggctcttcaacacctcccaaagaacaactgcttgaccaggtaaagtctcttaaccaaaaacaggattggcttgttgacttttagaagaggccgatacagtcttctatctagagctaccagaaacaagcaagaaaactaagctctcaacagttacgagacaccaggaactcagtgtgtgagagtggtaggagtggccttcag

SEQ ID NO: 1991 - DNA, 500 bp, Homo sapiens
  MAP TO CHR6.1; EXPRESSED IN FETAL LIVER, SIGNAL = 1.8; EXPRESSED IN BRAIN, SIGNAL = 1.5; EXPRESSED IN LUNG, SIGNAL = 1.2; EXPRESSED IN HEART, SIGNAL = 1.3; EXPRESSED IN ADULT LIVER, SIGNAL = 1.5; EXPRESSED IN PLACENTA, SIGNAL = 1.3; EST_HUMAN HIT: AL531312.1, EVALUE 0.00e+00; SWISSPROT HIT: P79955, EVALUE 9.00e-03; NT HIT: AJ010479.1, EVALUE 0.00e+00
gttcttcagctcctgttggccctgctcagcctgggcctgtaccttggctaaatgcccctccagtgttgtgcgctctgtccccagggccttgacctgctgctgggcatctctgagctggtcctgaagctgctggttctcttggtccaacgtttgagtcctctcacggcaccgttttagttctgcatttaggtcacataactgaccctttaagtcccaggctggacgtttgctgggtttcttccctcctgccatgggaggaacacctgatgctaagatgaacacagaaaggacaaaggtcagtgaagtctaggctctctatccctcctcccttctagcctttatgggatccacacctgatgctacatctccttccccttagagaccaaatggatttttctggtcactcaccatcttctcttccctatcccagcctctcacccagtggttatgtttgtcacttactgccagacttctggacaggaacagcaggaactggcttc

SEQ ID NO: 1992 - DNA, 594 bp, Homo sapiens
  MAP TO CHRX.1; EXPRESSED IN FETAL LIVER, SIGNAL = 0.48; EXPRESSED IN LUNG, SIGNAL = 0.63; EXPRESSED IN BRAIN, SIGNAL = 0.45; EXPRESSED IN HEART, SIGNAL = 0.64; EXPRESSED IN BONE MARROW, SIGNAL = 0.48; SWISSPROT HIT: O83174, EVALUE 4.40e+00; NT HIT: gi11466624, EVALUE 8.90e+00
aattcctgcatttcctgcactccagtgttctacagcctattaaaagatccaggcatatgaagaaacaattgccatacagagtggcaagtgccattagcaagaaatgtagtataaatggaggtaagacaaaggagaaggtgatcaactctgtttgagggtgggtcttaggttgggttccttggaagcggagcttgaggcagggatttattaaaggcatgcgctctggaggaaacacgtagtgcaagatagggcaggggaaggagtcaaggaaataagtgatcttggtcaatgtctaaccttgtcttcacacaaggcagatcctgtagcataaatctcacagcagagagaaaaggaagggtccaggcttttgtacctctgtgtcacagagccattggctgtcccagttagccaagggtattccttccgagaaggtcacaggcataagccatcagctgaagtgctcacaagtgtctgagcatttgggtattctgctggtcaagtggatctgggaagagcaccaatatcatctattaacagagggttagaaaaactagattatatgtttaatactttgggcagctcaacatctgaaca

SEQ ID NO: 1993 - DNA, 535 bp, Homo sapiens
  MAP TO CHR2.1; EXPRESSED IN HELA, SIGNAL = 0.59; EXPRESSED IN BRAIN, SIGNAL = 0.54; EXPRESSED IN HEART, SIGNAL = 2.6; EXPRESSED IN BONE MARROW, SIGNAL = 0.62; EXPRESSED IN FETAL LIVER, SIGNAL = 0.72; EXPRESSED IN LUNG, SIGNAL =   3; EST_HUMAN HIT: AV697461.1, EVALUE 8.00e-78; NT HIT: gi13637830, EVALUE 5.00e-78; SWISSPROT HIT: P46952, EVALUE 1.00e-23
attgcttgggaccatgtagcctccacagacttcactcggagcagagccatcgccttctgcgtcagggagggagcacaaaggcctatgctcatgtctacaacctctgaaatgtgtgtgtgtgtgtgtgtgtgtgtgtgtgtgtgtgagtgtgtgtgtgaaagagagagagagagaggcagtgagagagagactggttcccattttccagggctgctgtgggaggatgccccggatgccccaagactacattacctgggtctcataggtgtccccaaacaggctgagtggtgtgcctgcctgcagctccctgtggtggctgtccagccaggcatccagggacatgggctccatgatggatcgtgtgctcagagggaatggtggctccttgagcagctggtctgcacccacagcatgactatagtcggtgtcctcaggacccagcccacccagccccagtgggcccagttcccaggggccccaggtctcaattgccagaacaggctctgtatccagctcaatgatcaagcagccatgt

SEQ ID NO: 1994 - DNA, 597 bp, Homo sapiens
  MAP TO CHR9.1; EXPRESSED IN ADULT LIVER, SIGNAL = 3.6; EXPRESSED IN BONE MARROW, SIGNAL = 3.7; EXPRESSED IN PLACENTA, SIGNAL = 4.1; EXPRESSED IN LUNG, SIGNAL = 3.4; EXPRESSED IN FETAL LIVER, SIGNAL = 3.4; EXPRESSED IN HELA, SIGNAL =   5; EXPRESSED IN BRAIN, SIGNAL = 4.2; EXPRESSED IN HEART, SIGNAL = 3.3; NT HIT: gi13639766, EVALUE 0.00e+00; SWISSPROT HIT: P40484, EVALUE 5.00e-23; EST_HUMAN HIT: AU132477.1, EVALUE 0.00e+00
accaagtcagtgttccccagcatgtggtatgtgtaccactggagtccacaaaataaatgtaagtggtccataaagttttttttttcatttcaatgaggctcttatatatcactcactacaggtatgtgagtgatgggattaatgcatgggtgctacctagcattcaaaggcagtctgcaaattttcatagtgaagattgtgcaggtgacaaaaaaactgagagctggtaatgaacttacccacgcatgttggaaatatttcctcgttgttgatctgaacctcaatccaatccataagaaggttcatgtactggggagctggcagcgctgttggcttcttatacttgagatcatcctgccaccgatactcatatttggggccccctgacatcacaggacaggtccgctcggtgcagaactcacagatggtgccatagatgaggttgatccgattgaagaagtccaccacatgtactgccacccagtcattctggtcctccccactgggcaactgcacagccgccttcaggtccacacccgagttgagggatgcctgagcccgtttgtgcagctcaaacctctgtgtgccaggttcaaa

SEQ ID NO: 1995 - DNA, 590 bp, Homo sapiens
  MAP TO CHR19.1; EXPRESSED IN HEART, SIGNAL = 0.95; EXPRESSED IN LUNG, SIGNAL = 1.8; EXPRESSED IN FETAL LIVER, SIGNAL = 0.5; EXPRESSED IN HELA, SIGNAL = 0.39; EXPRESSED IN BRAIN, SIGNAL = 0.62; NT HIT: gi16176192, EVALUE 2.00e-40; SWISSPROT HIT: P52737, EVALUE 6.00e-68; EST_HUMAN HIT: AW023559.1, EVALUE 0.00e+00
caaatgctttcccacattccttacattcataaagtttctgtgaagtgtgggtacttttatgtttatgaaaggcactgggataagtgaatgttttcccacattccttacatttatacacctgctctccagtgtgaattctttcatgtattcgaaagtaactggaataactaaaggctttcccacattgcttacattcacagggtttttcaccagtgtgagtgttttcatgatttcgaatagaactggaatatctaaaggctttgccacattgtttacatatatagggtttctctccagtgtgaattcttgcatgttttcgaatggaactggaacaactgaaggctttcccacatttattacattcatagggtttctctccagtgtgagttctttcatgtgtaagatataaatgtagattatcaaaggccttcccacaaaacttacatttataaggttcatcttcactgtgcattaccatgtatcttcaaaaggtttgaacagaaatgaaggtttttccacatttcttacatggagtttctttccagtgtgaggcctttcatgtgtttgaaaggagtggcaatagctgaagg

SEQ ID NO: 1996 - DNA, 533 bp, Homo sapiens
  MAP TO CHR19.1; EXPRESSED IN PLACENTA, SIGNAL = 7.5; EXPRESSED IN FETAL LIVER, SIGNAL = 9.7; EXPRESSED IN HELA, SIGNAL = 7.2; EXPRESSED IN BRAIN, SIGNAL = 7.1; EXPRESSED IN BONE MARROW, SIGNAL = 8.2; EXPRESSED IN ADULT LIVER, SIGNAL =  11; EXPRESSED IN LUNG, SIGNAL = 3.6; EXPRESSED IN HEART, SIGNAL = 4.1; NT HIT: gi14756107, EVALUE 1.00e-128; SWISSPROT HIT: O00268, EVALUE 3.00e-02; EST_HUMAN HIT: AA985483.1, EVALUE 1.00e-11
cagttcagacccagctcctccagcaagcattcttgcatgagaccccagtcccaggcagggatccccactcagagctcccccggccaccctgcctgcggtgattcacccctttcctgaaccagacggtatactcctgaggcctccatcctggtgtggcctagcacaggacccccattagagggctccactccccactgcctgtcatggtcgccatggttacctgtgggcctgatccccggacaagcaggccccatggcaccaggtgcaggccccagactggttacaagcttcaggtgaggacagcaggcggcaggggtcagggggcagggtcagtgccagcaggcggcccagggccactcccccgaaacccccagagatatacaggcggctcccgactgctgccacagcatgggccacagactcctccattgggggccccacagaggccgagcctgaggaaagatggtgtattcagacagatagagagcaggagactccaggaagagacccacaccatgatgccagtcagagaa

SEQ ID NO: 1997 - DNA, 592 bp, Homo sapiens
  MAP TO CHR10.1; EXPRESSED IN FETAL LIVER, SIGNAL = 3.6; EXPRESSED IN LUNG, SIGNAL = 1.8; EXPRESSED IN BRAIN, SIGNAL = 4.5; EXPRESSED IN HEART, SIGNAL = 2.5; EXPRESSED IN BONE MARROW, SIGNAL = 3.8; SWISSPROT HIT: Q15717, EVALUE 5.80e-02; EST_HUMAN HIT: AW899738.1, EVALUE 3.00e-53
tggtctcccatgttagctccaagtgactaagcgcagggtgggaaataacgccactatgccggcaaatctcccgcctgggccctgagttcggcagccttttcacggggaagatgcctctgcctggaaaaaaaatgcaagcattgtgtggggaccattaatgcatgcgcctctgcacattccttcgagaaacaggagcacaccagtctctgagcccccagctctgtcccccagggattgtacaggcctggaacacactgcacatgccacctggtccttccccccaggccccagctctgtgagcggtgggaaggggcccgccaaacaccctggcttcattgtgccccagaaagaggggactaattactcgcctacactctggagcgcccagagagaaaacagaggccagtggggtggagagggtgggaaatgggtggggggtgaaagaagggagagaaagccacaggatacatttcaaagtttctctagcaatttgggggtgggaaaagaaagcctggtcctgacgtgaaatcatacagaggtcagggctgggtctcccaccgttgtgagaaagtggtgaatcagggacggttta

SEQ ID NO: 1998 - DNA, 509 bp, Homo sapiens
  MAP TO CHR7.1; EXPRESSED IN BRAIN, SIGNAL = 2.9; EXPRESSED IN HEART, SIGNAL = 2.6; EXPRESSED IN BONE MARROW, SIGNAL = 2.3; EXPRESSED IN FETAL LIVER, SIGNAL = 3.7; EXPRESSED IN LUNG, SIGNAL = 1.9; NT HIT: gi14745434, EVALUE 2.00e-58; SWISSPROT HIT: P22157, EVALUE 6.00e-03; EST_HUMAN HIT: AV694401.1, EVALUE 1.00e-122
cagagaggtcaaggcagaggaaaaggagaggagagccacctaggtaggagccaggcagctggtcccagggcagccggggcatgtggactcacgggaaggggtctggtttctcatcctgtcttgcaggtgactcagatattgctgggggttgtgagttgtgttcttggagtgtgtctcagcttggggccctggactgtgctgagtgcctcaggctgtgccttctgggcggggtctgtggtgagtaaggaacaggctgtgagcctggagggaggcaagtggtgatgggcaagaaggcgcttatggatcttggttggggctttggggaagcgaccaaagtctctggagccaaatggcctttggccatgaggaggctgctctggggtgtagctaaaaccctgtcacttccatttttctcttgaagacagatgggaggggtggggcaggtataggtggaatcctggtctgtgtgtcagagttctttgtctgtccctgggatcctgcttcacatt

SEQ ID NO: 1999 - DNA, 595 bp, Homo sapiens
  MAP TO CHR20.1; EXPRESSED IN BONE MARROW, SIGNAL = 6.2; EXPRESSED IN FETAL LIVER, SIGNAL = 6.1; EXPRESSED IN PLACENTA, SIGNAL = 5.8; EXPRESSED IN HELA, SIGNAL =   8; EXPRESSED IN BRAIN, SIGNAL = 4.9; EXPRESSED IN LUNG, SIGNAL = 3.4; EXPRESSED IN ADULT LIVER, SIGNAL = 5.7; EXPRESSED IN HEART, SIGNAL =   4; NT HIT: gi14772636, EVALUE 0.00e+00; SWISSPROT HIT: P08547, EVALUE 2.30e-01; EST_HUMAN HIT: BE271707.1, EVALUE 0.00e+00
caagccgtagattcctcagcctgattcggccacttgtgccaccatacaaaggtacccactgggattttaaaatcagtgtttttacttcagcaaacggaaccctgggataacaccagttggagtctgaggcctatgatcttgagaaggcagtatcctttgggagggtctgcatggggccaaatcttgagccacagccagacacctcagggctgcattaattggagggacggctcttgttatagacgaggaagtctgagatgtcgtgccatacattgctgtcctcatagaggtaggtcatggaggactgcagcgagggctgcagggtggatcggtgatactcaaagagccacagcaccagcccccacaccaccgcagtgagcagcgggaacgggtcccacctgggttcagggatgtagcccttctctacagccaggcggctcagggcaaacaggacgcgtgacaacaggtacatgttgatctgcaaagagggaatgatgggaattactggtgatcaatagtgatgtccctcttttgtttttgatattaataatttgtttcatttctctttttttcttagagagcctggctaggggtt

SEQ ID NO: 2000 - DNA, 506 bp, Homo sapiens
  MAP TO CHR19.1; EXPRESSED IN PLACENTA, SIGNAL = 1.9; EXPRESSED IN LUNG, SIGNAL = 0.78; EXPRESSED IN BRAIN, SIGNAL = 1.2; EXPRESSED IN HEART, SIGNAL = 0.96; EXPRESSED IN ADULT LIVER, SIGNAL = 0.87; EXPRESSED IN BONE MARROW, SIGNAL = 0.92; NT HIT: AF208980.1, EVALUE 0.00e+00; SWISSPROT HIT: P52742, EVALUE 5.00e-19; EST_HUMAN HIT: AV708395.1, EVALUE 0.00e+00
tcagtgaatggcccactatgaatgacagatttctcataccctctgccttcaaagaggttctttcgagaatgaattttctgatgctcactgagctctgagctttgcatgaaggcatcccggccatctgtaaagtcacagagcttctccttattgtaagttttctgacgccttttaagggactgaccaggaataaaggtttcctcacacactttacccttgttttcaaatgggttccctctagtatggattttctgatgttctttcagggatgagctatgaaggaaagtctccccacacaccttacattcgtacattttctctttaccatacattttctgaaactcattaagggctgggctgggcctaaaggtttccccgcgctcacgttcacgttcacgttcatgttcacgctcattatctttgtcatccccaaagtggattttctggtgctcaatcagggcagaactatgaaggaaggtttccttacacaccctgcactcgtagaa

SEQ ID NO: 2001 - DNA, 672 bp, Homo sapiens
  MAP TO CHR5.1; EXPRESSED IN PLACENTA, SIGNAL = 2.3; EXPRESSED IN FETAL LIVER, SIGNAL = 1.1; EXPRESSED IN BRAIN, SIGNAL = 1.2; EXPRESSED IN LUNG, SIGNAL = 1.7; EXPRESSED IN HEART, SIGNAL = 3.1; EXPRESSED IN ADULT LIVER, SIGNAL = 1.8; SWISSPROT HIT: Q9UN66, EVALUE 4.00e-37; EST_HUMAN HIT: BI488619.1, EVALUE 0.00e+00; NT HIT: gi14861871, EVALUE 0.00e+00
ctactggtgacagccagcgacagcgggaaccctccactcagcagcaacgtgtcgctgaacctgttcgtgctggaccagaacgacaacgcgcccgagatcctgtaccccgccctccccacagacggttccactggcgtggagctggcgcctcgctccgcagagcccggctacctggtgaccaaggtggtggcggtggacagagactcgggccagaacgcctggctgtcctaccgcctgctcaaggccagcgagccgggactcttctcggtgggtctgcacacgggcgaggtgcgcacggcgcgagccctgctggacagagacgcgctcaagcagagcctcgtggtggccgtccaggaccacggccagccccctctctccgccactgtcacgctcaccgtggccgtggccgacaggatccccgacatcctggccgacctgggcagcctcgagccctccgccaaacccaacgattcggacctcactctgtacctggtggtggcggtggccgcggtctcctgcgtcttcctggccttcgtcatcgtgctgctggcgctcaggctgcggcgctggcacaagtcacgcctgctgcaggcttcgggaggcggcttggcgagtacgcccggctcgcactttgtgggcgcggacggggttcgggctttcctgcagacctat

SEQ ID NO: 2002 - DNA, 592 bp, Homo sapiens
  MAP TO CHR7.1; EXPRESSED IN LUNG, SIGNAL = 0.98; EXPRESSED IN HELA, SIGNAL = 0.83; EXPRESSED IN BRAIN, SIGNAL = 0.63; EXPRESSED IN HEART, SIGNAL = 0.96; EXPRESSED IN BONE MARROW, SIGNAL = 0.62; EXPRESSED IN FETAL LIVER, SIGNAL = 0.56; SWISSPROT HIT: Q9UDV6, EVALUE 7.00e-83; EST_HUMAN HIT: BE546228.1, EVALUE 0.00e+00; NT HIT: gi11420492, EVALUE 0.00e+00
caccttccgctataagcagcagctggccacacatctgcgcagccactctgggtgggggtcttgtacacctgaggagccagaggagagccttaggcccaggccacggctgaaaccacagaccaaaaaggccaagctgcatcagtgtgatgtgtgcctgaggagcttcagctgcaaggtgagcctggtgacccatcagcgttgccacctgcaggaggggcccagtgccggccagcatgtccaagagaggttctcacccaacagcctggttgccctgcctggccacatcccttggaggaaaagccggagttccctcatctgtggttactgtggcaagagcttcagtcacccatctgacttggtgcggcaccagcgcatccacacgggtgagcggccctacagctgcactgagtgtgagaagagctttgtccagaagcagcacctcctgcagcaccagaagatccaccagcgggagcggggtgggctggccctggagcccggaaggcccaatggcctgctttaagggtgcagcccctcgcccgtctgggggatggaggggggtggcattggttcccccgaagagacactgcagtca

SEQ ID NO: 2003 - DNA, 599 bp, Homo sapiens
  MAP TO CHR2.1; EXPRESSED IN ADULT LIVER, SIGNAL = 7.8; EXPRESSED IN BONE MARROW, SIGNAL =  12; EXPRESSED IN PLACENTA, SIGNAL = 8.2; EXPRESSED IN LUNG, SIGNAL =  11; EXPRESSED IN FETAL LIVER, SIGNAL =  12; EXPRESSED IN HELA, SIGNAL = 9.4; EXPRESSED IN BRAIN, SIGNAL =  13; EXPRESSED IN HEART, SIGNAL =  13; NT HIT: gi14723939, EVALUE 0.00e+00; SWISSPROT HIT: P40954, EVALUE 1.20e+00; EST_HUMAN HIT: BG211364.1, EVALUE 0.00e+00
caccacgaccaccaccacgatcaccatggtgcccgccatcttggtatctattgtcctgctggtagccaccaccctggtatccacttcctgtatatgaagaagatgtttggaagccaccataacctccgccttgatagccaccactgctgtggccaccatgatagccacctggctggaaacctgaatctcgataaccaccatcttggtagccacctcctccaccactccctccatctgtccagcctccttgatgcttatttcctcttcctccccctcggccaccatggtcatagccaccacgtccacctctcccgcctccttgttcatgacctcctcgtcctccgtatgaggaatgttcatagccacctctccctcctcctcggcctcctgtttgctgctgggggccatcttgcctcttctgccacggtggcatctctgggggtggaggttcgatttcattgggtctaccacctctgtcaggcaccctgcccatcaacacctacagaataggaaagatattttaaacttttattttatgaacagaaataaatgcatttggaaaaaattaaaggtactctaatcaccttattgatggcaca

SEQ ID NO: 2004 - DNA, 579 bp, Homo sapiens
  MAP TO CHR17.1; EXPRESSED IN ADULT LIVER, SIGNAL = 1.7; EXPRESSED IN PLACENTA, SIGNAL = 1.4; EXPRESSED IN LUNG, SIGNAL =   4; EXPRESSED IN FETAL LIVER, SIGNAL = 1.3; EXPRESSED IN BRAIN, SIGNAL = 1.5; NT HIT: U14655.1, EVALUE 2.20e+00; SWISSPROT HIT: P56975, EVALUE 9.70e-02
tctccccacatggagcttagaattcacacaaggaaaggaagcaaggagacttccacacctctgcagcatcacctgctccagcaagctcccaaagccaccggagccagccagactgcctgggccccacacccccttctctgacggctttagctccagcccagcccacaggatgcagtgcctgatgccacttccgagcagagagagacacacacgcacacgcacacgcacacacacacagaatgccacctcgtcaatgacaagctgttccaatcacacagctcggacaccaagcggaccggacaacggacagcccaggcctcctccctctgactgggaggaagccaactgagcacgtctggggaagtgatcccccaccgcaagccccccactcaccctccatatttgatctgacagcagtgctctatcctggccggtagccttccctgcaaccagctcgcacaactctgaccaactaccctcgtggccttcaggtgaggcactgctctctctcctgtcccaaagcacaaggaaaccccaaaccaagcaggagaccaccggcgcaccacttctccagaggac

SEQ ID NO: 2005 - DNA, 511 bp, Homo sapiens
  MAP TO CHR6.1; EXPRESSED IN LUNG, SIGNAL = 4.6; EXPRESSED IN HELA, SIGNAL = 4.8; EXPRESSED IN FETAL LIVER, SIGNAL = 4.8; EXPRESSED IN BRAIN, SIGNAL = 5.4; EXPRESSED IN HEART, SIGNAL = 4.7; EXPRESSED IN ADULT LIVER, SIGNAL = 4.9; EXPRESSED IN BONE MARROW, SIGNAL = 5.4; NT HIT: gi14782528, EVALUE 0.00e+00; SWISSPROT HIT: P31695, EVALUE 2.00e-39; EST_HUMAN HIT: AA580558.1, EVALUE 7.10e-01
atgtcagcagtttgctgtggggaagtacagtccgggaccttccaaggggcatggttgggatgtcctgagccctgggaacctctgctggatggaggggcctgtccccaggctcacaccgtgggcactggggagacccccctgcacctggctgcccgattctcccggccaaccgctgcccgccgcctccttgaggctggagccaaccccaaccagccagaccgggcagggcgcacaccccttcatgctgctgtggctgctgatgctcgggaggtctgccaggttagcacacactgaggtccctacagggaatggggcgagcttacaagtaaagctggacagaagcatcccctagagtttgacaaggaggaaattggtgtgattgggaacctgacagggaaactgcggaggatggctgaatatggattgcgagtggggttaatagtgtaaggaactcgagttggcagtccaaggtaccccaggggtcactggccctctgtctccccagcttctg

SEQ ID NO: 2006 - DNA, 584 bp, Homo sapiens
  MAP TO CHR4.1; EXPRESSED IN BONE MARROW, SIGNAL =   3; EXPRESSED IN ADULT LIVER, SIGNAL = 3.1; EXPRESSED IN LUNG, SIGNAL = 1.9; EXPRESSED IN BRAIN, SIGNAL = 2.7; EXPRESSED IN HEART, SIGNAL = 1.8; EXPRESSED IN PLACENTA, SIGNAL = 1.9; EXPRESSED IN FETAL LIVER, SIGNAL = 2.2; EXPRESSED IN HELA, SIGNAL = 2.1; NT HIT: U16290.1, EVALUE 0.00e+00; SWISSPROT HIT: P40394, EVALUE 7.00e-37; EST_HUMAN HIT: BG533341.1, EVALUE 5.30e-02
gggttgactaccttgccatctagtcagctgagagtggtatgatatggtatttaactttggtccagtgaacctgctcttaagtgtttgactttttaggcaaaattgctatgtgattatcagtttttgcctgagtaaaactgactatcgcagagatatttccattattgactattaataaagttatagacaattaaatttaccttgtgcatgtctaataacttgggtattttgtggcttctcaaattttgggtcttaccatggtttcaagatgcccaataacttcaaaggtgtatcccacgttgttgcctgtcatttctgacagcacctcactgatgggtttggtagagtccttgggactgatacactcagtggcacctacagccatggccttctcaaatttgtctttgttgaggtcaatcccaatgatcctagatgcaccagctgacttacagcccatgatgactgacaggccaactcctcccaggccaaagacgacgcaagtggaaccaggtttgacctgtggagaggaatgttcttgaacatgttaggtgttagggtcaaaaagtgaaacctgaaaagggcct

SEQ ID NO: 2007 - DNA, 534 bp, Homo sapiens
  MAP TO CHR11.1; EXPRESSED IN BRAIN, SIGNAL = 0.76; EXPRESSED IN BONE MARROW, SIGNAL = 0.86; NT HIT: AF282289.1, EVALUE 1.00e-88; EST_HUMAN HIT: BF083448.1, EVALUE 3.00e-03; SWISSPROT HIT: Q9GZM6, EVALUE 2.00e-45
gtttggaagagcagtgagggtccatgttaaggtaattcatactttctattttcacagaaatgcctaaagaagaatgaccatggaaaattattctatggcagctcagtttgtcttagatggtttaacacagcaagcagagctccagctgcccctcttcctcctgttcctgggaatctatgtggtcacagtagtgggcaacctgggcatgattctcctgattgcagtcagccctctacttcacacccccatgtactatttcctcagcagcttgtccttcgtcgatttctgctattcctctgtcattactcccaaaatgctggtgaacttcctaggaaagaagaatacaatcctttactctgagtgcatggtccagctctttttctttgtggtctttgtggtggctgagggttacctcctgactgccatggcatatgatcgctatgttgccatctgtagcccactgctttataatgcgatcatgtcctcatgggtctgctcactgctagtgctggctgccttcttcttgggctttct

SEQ ID NO: 2008 - DNA, 501 bp, Homo sapiens
  MAP TO CHR19.1; EXPRESSED IN ADULT LIVER, SIGNAL = 0.89; EXPRESSED IN LUNG, SIGNAL =   1; EXPRESSED IN FETAL LIVER, SIGNAL = 0.88; EXPRESSED IN HELA, SIGNAL = 1.2; EXPRESSED IN BRAIN, SIGNAL = 1.2; EXPRESSED IN HEART, SIGNAL = 0.94; NT HIT: gi14575809, EVALUE 0.00e+00; EST_HUMAN HIT: BG123000.1, EVALUE 1.00e-121; SWISSPROT HIT: P12789, EVALUE 1.00e-15
ttgccttccttcatctggtctgcgtggtggagtgaaggtcagtgggacggacttgcagctggaaggctgggggaatgttgaaaaggccactgacggtgggcttgaggctcagggtgtccggcgggcacgggctctccagggagaaggcttgtaggatggtggtgaagaagaggaagagctccgcttttgccaggccctctccaaggcagacacgcttccctggtgaggagagagagagagagagggctgagtcagtattcctcacacccaggcccacggggggaacagcaggtggaggagccaacagtaagcccagggtgcagaagggtgcccccagctggcacagatgcctggagttcgccagcacctgcttgtgatacccagggctgcagcagatacctaaggagaagggcaggaacgcctcatgcttcctgaaccgtccatctgcatccaggaaacggtctgggttgaactcttctgggtgcttgaagatgttggggt

SEQ ID NO: 2009 - DNA, 512 bp, Homo sapiens
  MAP TO CHR17.1; EXPRESSED IN HEART, SIGNAL = 1.6; EXPRESSED IN BONE MARROW, SIGNAL = 1.7; EXPRESSED IN FETAL LIVER, SIGNAL = 1.5; EXPRESSED IN PLACENTA, SIGNAL = 2.2; EXPRESSED IN BRAIN, SIGNAL = 1.6; NT HIT: gi14773836, EVALUE 0.00e+00; EST_HUMAN HIT: AL551564.1, EVALUE 0.00e+00; SWISSPROT HIT: P29400, EVALUE 1.30e-02
gcagccctcttctagtggtgccaagaggcggaggctgcgggctgcccttggtccccagcccactcgctcagccctgaggtttccctctgcttccccagggagcttgaaggccaagcagtccatggcgggaatccctggtagggagagtaatgccccatctgtgcccactgtctccctgctgccgggggcgcctggaggcaatgccagctccaggacagaggctcaggtgcccaacgggcaaggcagcccagggggctgtgtctgttcaagtcaggcttccccggcccctcgcgcagcagcgcctccacgggcagcccggggccccaccccacgcactgaagaggccgcctgggctgccatggccctgaccttcctgctggtgctgctcaccctggccacgctctgcacacggctgcacagaaacttccgacgcggggagagcatctactgggggcccacagcggacagccaggacacagtggctggtgaggagttccctccctaccctaccc

SEQ ID NO: 2010 - DNA, 600 bp, Homo sapiens
  MAP TO CHR1.1; EXPRESSED IN BONE MARROW, SIGNAL = 0.62; EXPRESSED IN FETAL LIVER, SIGNAL = 0.75; EXPRESSED IN LUNG, SIGNAL = 0.91; EXPRESSED IN BRAIN, SIGNAL = 0.83; EXPRESSED IN HELA, SIGNAL = 3.7; SWISSPROT HIT: O43175, EVALUE 2.00e-22; NT HIT: gi14744595, EVALUE 2.00e-80; EST_HUMAN HIT: BE261376.1, EVALUE 4.00e-80
gggtgagccagctagaagtgcttggggtctaggtaagctgggcacagggacaaccagtgacccccatggatgctttctgcagcccctgcagggctttctgattcccagacccacttgaaacagtaatatctcaagaatttctaagatgtttctaaactgagtctggcccagatccataacagggactcctgccccagagcatctgaggaggaagagatgagagcaaagaggctgccgtccagcaggagagaggctctgggaaagagctggctcaaggaaagggaagacctctggaagccagggatgagcgtggggatcctggtgctgccccagcaggaagatgcttcgctttcttccaggcttgctgaatgacaacacctttgcccagtgcaagaagggggtgcgtgtggtgaactgtgcccgtggagggatcgtggacgaaggcgccctgctccgggccctgcagtctggccagtgtgccggggctgcactggacgtgtttacggaagtaagtgcctggcagcctcagcgtcaggaggacgggagagatagggagcagagaggcccatggcagggaaagcctggcgttttacagaaagc

SEQ ID NO: 2011 - DNA, 510 bp, Homo sapiens
  MAP TO CHR5.1; EXPRESSED IN FETAL LIVER, SIGNAL = 0.85; EXPRESSED IN HELA, SIGNAL = 1.2; EXPRESSED IN BRAIN, SIGNAL = 0.94; EXPRESSED IN HEART, SIGNAL = 0.64; EXPRESSED IN BONE MARROW, SIGNAL = 0.95; SWISSPROT HIT: P01414, EVALUE 2.80e+00; NT HIT: gi5174478, EVALUE 4.80e-01
caaaccgcagaagaggagagcattctcacaaaagctccagtgtttgcagcacaatgacggaggtagatggtgtgagctaagccctgttttgagagttccatagaaggtgtctttgacctattttcaagggctgtggtggtaggaggaatttttggccacatcataaagagttttgtggccacctctgatatacctagctcaggaagttgtaattttccatgattaggttattagtcaccaaagtgattgctgcccccagaccctggcccctgtgctgcaggaggctgacagagatgcccctccagcactgcagccctgcctccccagctgcaggccagaagccaaggaggccctgagtactgatgttgggccctctgggtgcttcccttgtttgtggaaccccacagccccattccaacttcttgagcactttgcctaccccaggagatttaactggggcaagaaatcctgtaagatctcaacaaacggacgtgggtagaatagctccca

SEQ ID NO: 2012 - DNA, 521 bp, Homo sapiens
  MAP TO CHR4.1; EXPRESSED IN HELA, SIGNAL = 0.59; EXPRESSED IN BRAIN, SIGNAL = 0.88; EXPRESSED IN BONE MARROW, SIGNAL =   1; NT HIT: AJ229043.1, EVALUE 7.70e+00; EST_HUMAN HIT: BE082877.1, EVALUE 5.00e-05; SWISSPROT HIT: Q06157, EVALUE 6.30e+00
catgtcgaatcacatttggctccagcccaatgtaatgtgaaagaaagaggactttttttcttataaatgtttacaattaaactggataggaatggcaaatctaggagacagagccccctgttttctttagaaacttcttcccagatggcactcccttggacagcattgcatctttggctctttgtggctgcccatagaggagaacaatggtgagacctgccccagggcacaatactggttacctctgtgccaagacccattattaaaagtgtctttgtaaggacagagttgccagaagacatctttccatagcacatggtcacttttgtgatctttagaattatccaaagcaaatggcctgaaaatatcaaataagttattgcttctatcacaattaattactcttccttaaggctctatttgcttgtgagagctgtcataacaaagtaccatacagggggtggcttgaaagacagaaatttgttagaagttcgagatcaaggtgtcagcagggtttgttt

SEQ ID NO: 2013 - DNA, 567 bp, Homo sapiens
  MAP TO CHR2.1; EXPRESSED IN ADULT LIVER, SIGNAL = 9.5; EXPRESSED IN BONE MARROW, SIGNAL = 7.1; EXPRESSED IN PLACENTA, SIGNAL = 6.6; EXPRESSED IN LUNG, SIGNAL = 4.4; EXPRESSED IN HELA, SIGNAL = 7.7; EXPRESSED IN FETAL LIVER, SIGNAL =   6; EXPRESSED IN BRAIN, SIGNAL = 8.3; EXPRESSED IN HEART, SIGNAL =   5; NT HIT: gi14779225, EVALUE 0.00e+00; EST_HUMAN HIT: AI905414.1, EVALUE 0.00e+00; SWISSPROT HIT: O76071, EVALUE 1.00e-43
tctcaggggctggtaaagtcttatatgacgttttctggggagtcattactctgtccaaagtcgaggtagctcagaggccttcaggccgctgatacttccagaaggccacctccccatcatcactgcaggaggccagtagccctggctccttggggttccaggccacacagttgacatcctgggaatgggcctgatgcaagtgggctgtcagggagaaggtgggctgctgtggatccgagttgggatcctcctgaaacacgcggatcgcgtcatccccacaagctgtggccagagcccctgtcagctgacacctggaaggaaagtgacatcagtgggtatacctgactaattaggccagagagacctgttccatagttcctggcctgttctcttccctaacttcaggcctcagctaaaaacctcttattaaaatgtttccttaactaataaggagtcacaaatatcacccacttatatcttcagatgctgcaatctagttctttcccctactatgattatcctaaaaaacgacatgcaattatgaactgcactttcctcacttggcat

SEQ ID NO: 2014 - DNA, 522 bp, Homo sapiens
  MAP TO CHR19.1; EXPRESSED IN BONE MARROW, SIGNAL = 0.94; EXPRESSED IN ADULT LIVER, SIGNAL = 1.5; EXPRESSED IN PLACENTA, SIGNAL = 1.8; EXPRESSED IN FETAL LIVER, SIGNAL = 0.9; EXPRESSED IN HELA, SIGNAL = 1.3; EXPRESSED IN BRAIN, SIGNAL =   1; EXPRESSED IN LUNG, SIGNAL = 0.87; NT HIT: AF043463.1, EVALUE 0.00e+00; EST_HUMAN HIT: AL583127.1, EVALUE 0.00e+00; SWISSPROT HIT: Q01201, EVALUE 3.00e-51
ttcagaagcatgaggaagggccaaggggatgggggtgctagacatcctggttgggattgcacggctcctccacctccctccccacccagtgcccctcctctggcatcgcggggctacgtggcttcaggccccggggataggaggccgcccccaaaggccgcctcgcggtaatgattggggaacatgttgctgcccacaaggctggcggtgcctccatccccggggcccggggcctggtacgagtccagtgtcagtggttcagggccgggggtctccccaaccacggccccggcacctccgctgcacacaacagcgctagcgtgtggcggtgccgggggcagcaggtccagcatggtgaagagtgtgggggccgtagggtcgtaggcaaagccatcgtccaggaggtcaggcccgccagggggctccaggccgggcagggacacggtgccagagaagaagtcagggtctggcagcagggctgacggcgggaggaacgggcctacggggatgaagacaagagaa

SEQ ID NO: 2015 - DNA, 596 bp, Homo sapiens
  MAP TO CHR19.1; EXPRESSED IN FETAL LIVER, SIGNAL = 0.37; EXPRESSED IN BRAIN, SIGNAL = 0.43; EXPRESSED IN LUNG, SIGNAL = 0.94; EXPRESSED IN HEART, SIGNAL = 0.74; EXPRESSED IN BONE MARROW, SIGNAL = 0.52; EST_HUMAN HIT: AI760623.1, EVALUE 0.00e+00; SWISSPROT HIT: Q9NY97, EVALUE 7.00e-28
gttgtttccagagccgaatgctggcctgggggcccaggggccgtaccagcagcaggttgcggaaagcacagtggtccgcagtgcggtctgctggccaggctgtgaggaagcctgggtgggcctggggcaccaggcccagggctcggatgcaaaggccagtgtagacgtcctcaaaggggaagggtgccacacgggctgccgcccgcagcagccagggtgccaggcgcccggcaatgacgtagccacccccgcttgcataggctgggtagccaccttcgaagaaggactcgggcacatagaagggtcctcctggcttccggagaggcatggcctgggtaaagacctcacccaggtagaggcttcgggccgaggcaggtggcagggcccgcaggtgagccagcagggcaggggtgtgtacaaaggcatcgtcctgagctcgcaagacaaaactcacggtggggcagtggcggcccagccaggccagcagcagcaggtctttgagcgtctggttgaatgggacgtcgaggaagtcccagagcagcaggtcactgtagcgacggctctcccaggccactagtgagtctaggtcaggcccc

SEQ ID NO: 2016 - DNA, 591 bp, Homo sapiens
  MAP TO CHR18.1; EXPRESSED IN FETAL LIVER, SIGNAL = 0.52; EXPRESSED IN BRAIN, SIGNAL = 0.66; EXPRESSED IN HELA, SIGNAL = 0.49; EXPRESSED IN HEART, SIGNAL = 0.5; EXPRESSED IN ADULT LIVER, SIGNAL = 0.56; EXPRESSED IN BONE MARROW, SIGNAL = 0.73; SWISSPROT HIT: P71380, EVALUE 4.40e+00
ccccttgtggagtttagcacaggaaatgtctaggcaggatgagttgtaattgtcagcatagtttatattctgggctgagaactccttttattatttttttccctctgtgaagatgtgcaaaaagaggttgtctaagcatatattttgatttcacttgccaacagattgtgaatagctgatttaaggtcactgtcacccccaaatgggaaaagattaggtttctgaggaccagaaatattaaaaagtctgcccaaacaatatttgctgctcaccagaattcaaaattgctgattttcaccccagaaacatcccatggagttttgtaaaggttgtaagtctattatgctgttttaatccatcagactttcactatctaaaggataagagcatcagatagaattacataagcttgattagtaattttttctcttctggatatcctgttgctattacagagagacccatattttttcacaaacaatgcaaatagtgtttaaataaaatacctgagaattcaaattatattttaaatgtattcagttagggtgctatttctgggcttcctacctgtgatggctttacagggctgaa

SEQ ID NO: 2017 - DNA, 503 bp, Homo sapiens
  MAP TO CHR17.1; EXPRESSED IN FETAL LIVER, SIGNAL = 0.78; EXPRESSED IN LUNG, SIGNAL = 1.2; EXPRESSED IN BRAIN, SIGNAL = 0.73; EXPRESSED IN HELA, SIGNAL = 0.89; EXPRESSED IN HEART, SIGNAL = 0.97; EXPRESSED IN ADULT LIVER, SIGNAL = 0.95; SWISSPROT HIT: Q01167, EVALUE 7.00e-31; NT HIT: U58198.1, EVALUE 1.00e-105; EST_HUMAN HIT: BG705861.1, EVALUE 1.00e-106
agcttggaagtgttgcatccatgttctcagctgctccagtgttgtggggacatgtggggactctgccctgccccggctggaacagcaaaaggtgctgatggtgggcttttcttttccaggtgcacattcaggttcccgagcacaaacatcaagataacgttcactgccctgtccagcgagaagagagagaagcaggaggcgtctgagtctccagtgaaggccgtacagccacacatctcgcccctgaccatcaacattccagacaccatggcccacctcatcagccctctgccctcccccacgggaaccatcaggtgcggccatggggatgggggactggagcatccttagtcccagtggcagccccaagtaacgcctttctccttccctggtgctgacttatgtggagagagagaatgtgaggtggtgtttaaaatatcattggatttctgctctgaatttcctgcattatgaaatgcagttcccaaaggttcctggttttt

SEQ ID NO: 2018 - DNA, 575 bp, Homo sapiens
  MAP TO CHR12.1; EXPRESSED IN HEART, SIGNAL = 3.7; EXPRESSED IN BONE MARROW, SIGNAL = 2.1; EXPRESSED IN ADULT LIVER, SIGNAL = 2.9; EXPRESSED IN HELA, SIGNAL = 2.4; EXPRESSED IN PLACENTA, SIGNAL = 4.9; EXPRESSED IN LUNG, SIGNAL = 5.3; EXPRESSED IN FETAL LIVER, SIGNAL = 2.7; EXPRESSED IN BRAIN, SIGNAL = 2.7; SWISSPROT HIT: P04275, EVALUE 2.00e-30; NT HIT: M25858.1, EVALUE 0.00e+00; EST_HUMAN HIT: AL038892.1, EVALUE 1.00e-110
gatgggtaggtggatggatgaatggatgggtggatagaaggataaactgacagcaataaataaatgagtaaactattaactgatagttaatagccaagcagtccttaccttgtcgggaaggcaggtggttgtggtacagccacagtcattggtggcggttgaggccaagtacccaaggggacagctcactgtggagttgacacagttgcaggcacactcatactcatcacagcactgggtcttccgaagggtgggcaaacggtgcggggggcaggagggtggggacactcttttgcactcctccttcctgcaggctgaggataggacaaggccacactgagcactgcgcccagccagggctcgtaagtattcagctatgctatagggtgccagggagctttagactcagaagattaagtcagaaatgtgtgagggccaagctcacgggctgggagttattcaatgttaccaaaagcagtccatctgcagaaaaatatgaacattaatcaaaaagggaaatgtgaagctaggaactctaatggaggagaagtgaaggctgctcaatccctgctcta

SEQ ID NO: 2019 - DNA, 546 bp, Homo sapiens
  MAP TO CHR17.1; EXPRESSED IN ADULT LIVER, SIGNAL = 0.69; EXPRESSED IN LUNG, SIGNAL = 0.67; EXPRESSED IN FETAL LIVER, SIGNAL = 0.62; EXPRESSED IN BRAIN, SIGNAL = 0.53; EXPRESSED IN HEART, SIGNAL = 0.65; EST_HUMAN HIT: AV742964.1, EVALUE 7.70e-01; SWISSPROT HIT: P54623, EVALUE 2.60e-01
gactgggactggcctgtaagaggcctagataccaacagacaagacatcacatcctatgaaggagacactaagagtcacattttcactttctgcctactcctttaccttctaatgtgcatgtttgagctgtatttctctgggaagctggttttagagtggaaggtctggagcagtgggcagggctcaggcagaagttgggttggggtggaagtcagtgagaagcatctttcttggtcctttgaagagcaagatgaggacatcaagaagatccagacccaaatcagcagcggcatgactaacaacgcaagcctgctgcagaactacctcaagacctgggacatgtaccgggagatctgggagatcaacaaggactccttcattcatcgctaccagcgcctcaaccctcctgtctcttcttttgttgccgacattgcccggtgagtggtgagggtggattgaaagtctgtctgtaggaggcacagcactgcaggaggagcccaggcctagagtcttgggaagtgggtaggggagctgaggatgacatgt

SEQ ID NO: 2020 - DNA, 520 bp, Homo sapiens
  MAP TO CHR7.1; EXPRESSED IN PLACENTA, SIGNAL =   2; EXPRESSED IN FETAL LIVER, SIGNAL =   2; EXPRESSED IN LUNG, SIGNAL = 1.5; EXPRESSED IN BRAIN, SIGNAL = 2.4; EXPRESSED IN HELA, SIGNAL = 2.1; EXPRESSED IN BONE MARROW, SIGNAL = 2.8; EXPRESSED IN ADULT LIVER, SIGNAL = 2.7; EXPRESSED IN HEART, SIGNAL = 1.4; EST_HUMAN HIT: BG029902.1, EVALUE 1.00e-51; SWISSPROT HIT: P28028, EVALUE 2.00e-18; NT HIT: gi4757867, EVALUE 3.00e-61
gagtcccgactgctgtgaacagtttttatttcccataatttttgttagaaacttttggaggagtcctgaaactaatcaaaatagtttattgatgcgaacagtgaatatttcctttgatgatattttttacaaaataaaagttgttaaacatatcctattatgacttgtcacaatgtcaccacattacatacttaccatgccactttcccttgtagactgttccaaatgatccagatccaattctttgtcccactgtaatctgcccatcaggaatctcccaatcatcactcgagtcccgtctaccaagtgttttcttgataaaaacagtaaaaaagtcaagtcaagccaaacagaaaaagaaaaccttatgtttcaccctaagtacattaccttatgcctgagagggatacaggaagagatccccttaagaaaaattctctggaagaatagtagttaaaagtatgactcttaaaatacaaaacttaaatttaagactgaagtcaatattaggatggaaaaa

SEQ ID NO: 2021 - DNA, 599 bp, Homo sapiens
  MAP TO CHR19.1; EXPRESSED IN BRAIN, SIGNAL = 2.5; EXPRESSED IN HEART, SIGNAL = 2.3; EXPRESSED IN BONE MARROW, SIGNAL = 2.2; EXPRESSED IN ADULT LIVER, SIGNAL = 1.8; EXPRESSED IN LUNG, SIGNAL = 2.3; EXPRESSED IN FETAL LIVER, SIGNAL =   2; EXPRESSED IN HELA, SIGNAL = 2.3; EST_HUMAN HIT: BE543060.1, EVALUE 0.00e+00; SWISSPROT HIT: P55067, EVALUE 2.30e-01; NT HIT: AB028987.1, EVALUE 0.00e+00
tcttgatgtggctgaactgctgcagctgtgaccgtgggtcccgcagagggtgcccggggagtgggtccaggggaatgttcacggccttctcccgcagggcccgctccccttcctcctcctccgttgggggcggcccagaccccttggaactgctggggcccacagggctggaatgaaggctgccttcgggcttggaggtgggcagggcgcgagccagccgaggatcggagggtcccgaatcacctgggccagacccgccagaagcctccacatggcgggtgagtctggggtcccggctgaggcgagggtcagccagccggcttcctgtggggtgtcccttctggaggcgggggtcccccagcccactgctgctcagctccccaactgaagccgggggtcggctggacgtctgctgcctcaaggtcttcaggatggaggtgacactgcttccaccctcatcctcatcacttgagtaccagtttccggtgtcacctgggaaagaacagaggagcagggaggggtgagtgggcgcatccaccacccgccctcttggatcccacagcagcccaccgtgagcagctcctttgcttgtgcctctc

SEQ ID NO: 2022 - DNA, 527 bp, Homo sapiens
  MAP TO CHR14.1; EXPRESSED IN PLACENTA, SIGNAL = 1.4; EXPRESSED IN FETAL LIVER, SIGNAL = 1.1; EXPRESSED IN LUNG, SIGNAL = 1.4; EXPRESSED IN BRAIN, SIGNAL = 1.2; EXPRESSED IN HELA, SIGNAL = 1.4; EXPRESSED IN BONE MARROW, SIGNAL = 1.1; NT HIT: AF109907.1, EVALUE 0.00e+00; EST_HUMAN HIT: BE709757.1, EVALUE 2.00e-60; SWISSPROT HIT: P97887, EVALUE 1.00e-15
cattgtggggttgagtagggcagtgatatttttgaattgtgaaatcatagcaaagagtgaccaactttttaatatttgtaacctttcctttttagggggagtaaaacttggattgggagatttcattttctacagtgttctggttggtaaagcctcagcaacagccagtggagactggaacacaaccatagcctgtttcgtagccatattaattgtaagtatacactaataagaatgtgtcagagctcttaatgtcaaaactttgattacacagtccctttaaggcagttctgttttaaccccaggtgggttaaatattccagctatctgaggagctttttgataattggacctcaccttagtagttctctaccctggccacacattagaatcacttgggagcttttaaaactgtaagctctgccctgagatattcttactcaatttaattgtgtagtttttaaaattccccaggaaattctggtatttctgtttaggaaccgctgcctcaagcctagcagcacaga

SEQ ID NO: 2023 - DNA, 567 bp, Homo sapiens
  MAP TO CHR5.1; EXPRESSED IN HELA, SIGNAL = 6.2; EXPRESSED IN BRAIN, SIGNAL = 6.8; EXPRESSED IN LUNG, SIGNAL = 3.6; EXPRESSED IN HEART, SIGNAL = 4.3; EXPRESSED IN BONE MARROW, SIGNAL = 7.3; EXPRESSED IN PLACENTA, SIGNAL = 6.7; EXPRESSED IN FETAL LIVER, SIGNAL = 5.3; EST_HUMAN HIT: BG702434.1, EVALUE 8.00e-01; SWISSPROT HIT: Q59803, EVALUE 5.40e+00
tttgctttgtaatccccaggcctctgctgttgatttattgtctcagagctactttgcagttgtagactaggagctcttcgtcatgacctaatttccctcccataaaaatcacagcacataataaagagtacaccacacacattacagggagactcctaatccttttaaattgcaggcgcatgtgacagatgggattgaagaaggtctaaaaatgtgtatgtgacatggataagaacagattccacaagtgtcaatgctctgcaatgtcaagatgggccagagggggaatcagtgaaatttaaattttgtagacagtgcaagggaataagaacaggaaattctgtcattgctgtaaacagttaagatcaatgttttgcaaagaacagtaattatatttacacttataaattaaatcctcatgtcctgactgcaaataatccattgttgaatctccagttatttcccttcttgtgtgtctccttttttattgactacagtaatatcttttgaacactgaatgtcaaactgtattaggcgtgtcagtcctcaccacagtcctgggacttt

SEQ ID NO: 2024 - DNA, 583 bp, Homo sapiens
  MAP TO CHR19.1; EXPRESSED IN PLACENTA, SIGNAL = 1.2; EXPRESSED IN FETAL LIVER, SIGNAL = 1.1; EXPRESSED IN LUNG, SIGNAL = 1.2; EXPRESSED IN HELA, SIGNAL = 1.1; EXPRESSED IN BRAIN, SIGNAL = 1.6; EXPRESSED IN HEART, SIGNAL = 1.3; EXPRESSED IN ADULT LIVER, SIGNAL = 0.99; EXPRESSED IN BONE MARROW, SIGNAL = 1.5; NT HIT: AF023258.1, EVALUE 5.00e-60; EST_HUMAN HIT: AW884375.1, EVALUE 0.00e+00; SWISSPROT HIT: P97849, EVALUE 8.00e-33
  unsure 460
gtcccaggaactccccttacaccccgccctgcgtgcgccttggcggagccttccgcgccagtccaggctgttttatgtatcccaggggccccaggaagaggagacagtggtcttccctgaactccgagacctgccccggggccctgccggtgtgcaccttgccgtccatgttggcaatgctgcagttgcactcggtggcgccgtagaactccccgatttggcgtacgccgaagcgctccgtgaactcctcccagatggcaggacgcagcccgttccccaccgccaggcgcacgcggtgtcgcctctccgcctcgcgcaccggctgcttcagcaggtagcggcagatctccccgatgtactgaaccacctgggggacggggtgaggaagtgggtgatgggaccggcaggcggtggggagcccggatcagaggagagaccccgagaccgccccacccagggnagctaatcctatgagcggaacagcctaaggatgatgatggctgcagaatcgtccacactccattagggaccacattgactcctaggactcgttcagtctcttgcaaagggtctaggatgcagc

SEQ ID NO: 2025 - DNA, 548 bp, Homo sapiens
  MAP TO CHR5.1; EXPRESSED IN HELA, SIGNAL = 0.75; EXPRESSED IN BRAIN, SIGNAL = 0.69; EXPRESSED IN HEART, SIGNAL = 0.69; EXPRESSED IN FETAL LIVER, SIGNAL = 0.57; SWISSPROT HIT: P14778, EVALUE 1.80e+00; NT HIT: AB028984.1, EVALUE 3.00e-61; EST_HUMAN HIT: BG054507.1, EVALUE 2.00e-56
ttccagcccgttcaataaagaggccagtctcatcgtcatctttgccctgtgcaggactttggagaggatgattccctgtacatcaccaaggtgaccaccatccacatgggcaattacacctgccatgcttccggccacgagcagctgttccagacccacgtcctgcaggtgaatggttagtaaatggctccatgcatgttgtcccctcatagcctccccaaactgctgctcagatcaaccctcgccccctcctgtattctgtcttcttaaagaaatatctaaccccaaaatatatcatctctcttataagtaaaggggaaccgtgtggaaagggcaaagtctgttgaccaattttcatatttggctccacccaaagcctccacaggtgaaacaaatccaagtgccatggcgtgagccattcaggccagtcacgctcagcagctggggctgccacagacagtgtggagcatggagcatgccccttaggcaacacagtgctggtgagccgctgtggcctctgggtctagtgcgagcagaaactgaaatcc

SEQ ID NO: 2026 - DNA, 583 bp, Homo sapiens
  MAP TO CHR6.1; EXPRESSED IN HEART, SIGNAL = 1.2; EXPRESSED IN BONE MARROW, SIGNAL =   1; EXPRESSED IN FETAL LIVER, SIGNAL = 1.1; EXPRESSED IN LUNG, SIGNAL = 1.2; EXPRESSED IN HELA, SIGNAL = 0.94; EXPRESSED IN BRAIN, SIGNAL =   1; SWISSPROT HIT: P34000, EVALUE 4.30e+00; NT HIT: AF305535.1, EVALUE 1.00e-69; EST_HUMAN HIT: BE897251.1, EVALUE 2.10e-01
ggatgaaagagagctcgcagcagagggaggaggcagttgttttgaaagttgttttgcgttgggagctggtgggaaagttcggtcttccccatttggaaaaggcaggctgggttccgctcctgcaccacacgcgctttccatttttagcttcattcagaggcagacagagctccttcctcttcctctccttgtttgtgacacttttctgaggcagcttttccacagtgccgagggtctggcggccatgaccccaggcattctgggacactggactgtgtgcccagaacatttttctgccatgagaggtaaagccagggattgttcagaggtgattctttttttttttttccttttccccacagtgaggttgccacattcttttttttttttttttttttaactaagagtagcatttaaaaaccttgcttcttttcaaggcagtttactttatacggcttcttggctctttctcaactgtaccaagcactctgcatctgcttttaaagtcttcagactactgtattagtcatagcctctcagaaggagccacaggaacggcgggacaatggggattaaaggcctt

SEQ ID NO: 2027 - DNA, 572 bp, Homo sapiens
  MAP TO CHR11.1; EXPRESSED IN BRAIN, SIGNAL = 0.79; EXPRESSED IN HELA, SIGNAL = 0.9; EXPRESSED IN BONE MARROW, SIGNAL = 0.85; EXPRESSED IN HEART, SIGNAL = 0.95; EXPRESSED IN FETAL LIVER, SIGNAL = 0.77; EXPRESSED IN LUNG, SIGNAL = 0.82; EST_HUMAN HIT: AI962273.1, EVALUE 6.00e-17; NT HIT: AF282279.1, EVALUE 5.00e-32; SWISSPROT HIT: Q15620, EVALUE 9.00e-66
cagtgtgctccagccttatgtttggttcctatttgatggccttttctggtgccatggcccacactggatgcatgctgagactgactttctgtgatgcgaacaccatcgatcactacttctgtgacatcctccctctgctccagctctcctgcaccagcacctacatcaatgagctggtggttttcactgtggttggcatcaacatcattgtgcccactgttaccatctttatctcttatggtttcatcctctccagcatcctccatatcagttccaaggagggcaggtccaaagctttcagcacttgcagttcccatataattgctgtttctctgttctttggatcaggtgcatttatgtatctcaacccatcttctgctgggtccatggataagagaaaattatcttctgtcttttatacaaatgtggttcccatgttgaaccccttaatctacagcctgaggaacaaagatgttaaatttgccctaagaaaagccctgagtagtaggaaactttgataagtaatagtatgtgtctgtgtgtatagtcacaagacagggatattctgtttg

SEQ ID NO: 2028 - DNA, 550 bp, Homo sapiens
  MAP TO CHR5.1; EXPRESSED IN BONE MARROW, SIGNAL = 0.74; EXPRESSED IN LUNG, SIGNAL = 0.99; EXPRESSED IN HELA, SIGNAL = 0.71; EXPRESSED IN BRAIN, SIGNAL = 0.72; EXPRESSED IN HEART, SIGNAL = 0.77; EST_HUMAN HIT: AI937924.1, EVALUE 0.00e+00; NT HIT: gi16171751, EVALUE 0.00e+00; SWISSPROT HIT: P36202, EVALUE 3.00e-35
cacggcatcgtgtgagtaaccgcccccgctgcccctcccggaccctagccttccagggccctggatgcgggcgcagtcgtgaacccatcagtcactcgacgctgtcctgtctcgttccccccatcaggggcaccatcgtcaaggcacgggacaagctctaccatcccgagtgcttcatgtgcagtgactgcggcctgaacctcaagcagcgtggttacttctttctggacgagcggctctactgtgagagccacgccaaggcgcgcgtgaagccgcccgagggctacgacgtggtggcggtgtaccccaatgccaaggtggaactcgtctgagctgggaccctgctcccacgcctgcttcttaaggtccctgctcggccggtgtaaatatgtttcaccctgtccctctaataaagctcctctgctccaccttgaacctgtcacctggcctgccaccctcctgcgcaggccatgcatggctcccgagtacagtagtatctgcttaggtgccaggcatgtcctaggctctgggtgcagtagtgagcaggacg

SEQ ID NO: 2029 - DNA, 517 bp, Homo sapiens
  MAP TO CHR5.1; EXPRESSED IN FETAL LIVER, SIGNAL = 0.99; EXPRESSED IN LUNG, SIGNAL = 0.63; EXPRESSED IN BRAIN, SIGNAL = 1.2; EXPRESSED IN BONE MARROW, SIGNAL = 1.2; EST_HUMAN HIT: BI023259.1, EVALUE 1.00e-27; NT HIT: AL163249.2, EVALUE 1.00e-17; SWISSPROT HIT: P06924, EVALUE 7.20e-01
agggaatggtctgtgtctgccactcagattgatatgaacagaaggcagggaaatactgggtagaagagggtggttccctggcaaaggcaccactctcaagcctggaaactcatggctgtaaatgggaacaggcattcctatttttgctccccaatgttgccttttccaagaccaatctggcctgccatgcccctatcctgcacccatataaaccccaaaccacaggctccatgagtagaagagtggcagagtagtagggcagtgtggcagagaaggagagaagataggagttcagcttgggatgggtggagaggagattggcttcaggatggccggactccaaggaaagatcatcttctcacttgatcccctttctagctctgcatccatcctgctgagaaccacctccatcactcagtaaaatccccacgtttaccatccttcaagtccgtgtgacgcgattcttcctggatgctggataagggcccaggtaccaagagggcagggtagaaagacc

SEQ ID NO: 2030 - DNA, 564 bp, Homo sapiens
  MAP TO CHR15.1; EXPRESSED IN HELA, SIGNAL = 1.1; EXPRESSED IN BRAIN, SIGNAL = 0.9; EXPRESSED IN HEART, SIGNAL = 0.98; EXPRESSED IN BONE MARROW, SIGNAL = 0.91; EXPRESSED IN FETAL LIVER, SIGNAL = 0.99; EST_HUMAN HIT: AW874308.1, EVALUE 8.00e-04; SWISSPROT HIT: Q15620, EVALUE 2.00e-52; NT HIT: AF282285.1, EVALUE 1.00e-14
  unsure 315
caatgatgttgatgccaaccacagtgaaaaccaccagctcattgatgtaggtgctggtgcaggagagctggagcagagggaggatgtcacagaagtagtgatcgatggtgttcgcatcacagaaagtcagtctcagcatgcatccagtgtgggccatggcaccagaaaaaggcatcaaataggaaccaaacataaggctggagcacactgtaggagacatggcaatgtgatacagaagtggggtacagatggccacagcgatcatacgccattgacgtcagcacataaccttcagaaatgaccaaaaaaatcagnaaaaggaaagttgggtcatgcaccccttgaaggacataatattcttctctgaaataaagttcattagcattttgggtataaacacagaagaataacagagatctatgaaggacaagttaaagaggaagaagtacatgggggtatgaaggtgtgagttcagcccaattagagttaccaagcccaagtttcccaacagagtgaccacatagattactagaaacaggaagaacagaggggactggagatctg

SEQ ID NO: 2031 - DNA, 552 bp, Homo sapiens
  MAP TO CHR20.1; EXPRESSED IN FETAL LIVER, SIGNAL = 0.55; EXPRESSED IN LUNG, SIGNAL = 0.83; EXPRESSED IN BRAIN, SIGNAL = 0.59; EXPRESSED IN HEART, SIGNAL = 0.82; EXPRESSED IN ADULT LIVER, SIGNAL = 0.7; EXPRESSED IN BONE MARROW, SIGNAL = 0.52; EST_HUMAN HIT: AL546961.1, EVALUE 0.00e+00; SWISSPROT HIT: P55040, EVALUE 4.00e-02; NT HIT: AF152863.1, EVALUE 0.00e+00
tgtgccctgtacaactttggagggcgggggggcatcgtgcatgtcatagtctaagtgaatgatgccccttagagttgaacagtgcatgacttgtacaactgttcttggcagccctgtgtccctggtgacagggctttcgctcctttggccacatcccagcccagcccatatggcccctacctcccagctgttcatggaggtccctctcttgcttccctgcaaagaggctggccaagctggtcttccccactccaggatctccaagtagcaccacacggtagagagcctcccaggagccttcagagtcgctggattcagaagaccaatcatctggggcaggtgaaggtttctgggtgggagggttgagggaggctgattggcccagccggggatgctgggattgagtggaaggcactgtgctcaggcggccaggctggtggccccgtggggacaggggcagtggggtgctggctcgccggtgcagaggggtctttgcttcctgctcggtgttgagtgtcatctttggtaggggggggtttgcttcttccttct

SEQ ID NO: 2032 - DNA, 503 bp, Homo sapiens
  MAP TO CHR19.1; EXPRESSED IN LUNG, SIGNAL = 2.1; EXPRESSED IN BRAIN, SIGNAL = 2.7; EXPRESSED IN HEART, SIGNAL = 2.5; EXPRESSED IN ADULT LIVER, SIGNAL = 2.6; EXPRESSED IN BONE MARROW, SIGNAL = 1.8; EXPRESSED IN PLACENTA, SIGNAL = 2.3; EXPRESSED IN FETAL LIVER, SIGNAL = 2.1; EXPRESSED IN HELA, SIGNAL =   4; SWISSPROT HIT: Q64355, EVALUE 2.70e-02; EST_HUMAN HIT: T03020.1, EVALUE 4.00e-33
taggatacacctggccttcgagaaatctcacgggaggagggtgccgccagggggctgggcacagctggcatgccacagctggaatcccccacattcctccctgccaggctgcccacctggctgtggctagcagcaggtgcgttcctaccatgcaggtgtgttggggtaggacgaggagcaggaagcggcagccaggcccatggcactacctggccaggatgctgcgggcagtgtggatgtgggtgaggggagggctgaaacatctgggctctggcagccacattctggggcacagaatgtggggccgggcaacgtgaggctccagggctgcttggcaactgagcagggctcttgggtgaggtgggcaaacatctggcatgtagcataggcagggagccaggccatgggtgctgccaggctgggagaaaagggtgctctaggcacccccagtagaacctggatatccccactcccaccaagagggcctgatgtccccgtactta

SEQ ID NO: 2033 - DNA, 526 bp, Homo sapiens
  MAP TO CHR16.1; EXPRESSED IN FETAL LIVER, SIGNAL = 1.4; EXPRESSED IN LUNG, SIGNAL = 1.6; EXPRESSED IN BRAIN, SIGNAL = 1.6; EXPRESSED IN HEART, SIGNAL = 2.8; EXPRESSED IN BONE MARROW, SIGNAL = 1.6; EXPRESSED IN ADULT LIVER, SIGNAL = 1.7; NT HIT: gi16164754, EVALUE 0.00e+00; SWISSPROT HIT: P04530, EVALUE 3.30e-01; EST_HUMAN HIT: BI545676.1, EVALUE 0.00e+00
gcagcatcaaaacacaccacgtcttgaacgacggcaccaaattcagttctatatctcaaagggactccaacaccaggcatgagataggggcagatacccaaggtaactacaaactgcaaaacgaactggacagtcttctgttgtgagatactaagtgcatcggggctcagggcaggagcaacttccggagtcctagggttgggtttacctggattgaaattagctgcaaggcggatcatggtttccttcaagcacaaaagcaacaacaaggtttgagaggtaaaactccaagtgacatccacagagttttgtggccattctgccttatcagcaatttcatctcttaggagtttcagattcttccactgaggatccttcagaaacttgtcctccaaagcagacaggttagattttaaagtagccaacaagacatcatgttttgtgacctgtagtgaacttgagcccgagccttttgaagaagaaaaaaaggagagtttatacacatagaaaacaagctgcacttccc

SEQ ID NO: 2034 - DNA, 525 bp, Homo sapiens
  MAP TO CHR7.1; EXPRESSED IN FETAL LIVER, SIGNAL = 0.72; EXPRESSED IN LUNG, SIGNAL = 0.79; EXPRESSED IN HELA, SIGNAL = 0.94; EXPRESSED IN BRAIN, SIGNAL = 0.64; EXPRESSED IN BONE MARROW, SIGNAL = 0.69; EXPRESSED IN HEART, SIGNAL = 0.87; NT HIT: gi14752543, EVALUE 1.00e-105; SWISSPROT HIT: P08581, EVALUE 2.00e-31; EST_HUMAN HIT: BF208095.1, EVALUE 1.00e-91
tgcctagtgaaattggagccattcagtccctagaaatatttatgcctatctgtggctatttgtctatttgcatgattatccttgccattatcctccaggctctgaaaatacacactgaaaggtttcttaccagcttgttcatgtctggattcacattaactctatgaccatattttattccagacacttctgagaaattcatcaggctgtgaagcgcgccgtgatgaatatcgaacagagtttaccacagctttgcagcgcgttgacttattcatgggtcaattcagcgaagtcctcttaacatctatatccaccttcattaaaggagacctcaccatagctaatcttgggacatcagagggtcgcttcatgcaggtaagtgctttctgagagtagctgtgtctgttctatctggtattgtgcaattaatttgttttcgtttttgcagtaaggtatttgcaaatactgtaaagtccaaatcatagtagaaactggaacacagactgaaagccaaacaatgaagcc

SEQ ID NO: 2035 - DNA, 559 bp, Homo sapiens
  MAP TO CHR6.1; EXPRESSED IN ADULT LIVER, SIGNAL = 0.72; EXPRESSED IN FETAL LIVER, SIGNAL = 1.3; EXPRESSED IN LUNG, SIGNAL = 1.3; EXPRESSED IN HELA, SIGNAL = 1.7; EXPRESSED IN BRAIN, SIGNAL = 1.1; EXPRESSED IN BONE MARROW, SIGNAL =   1; EXPRESSED IN HEART, SIGNAL = 1.1; EST_HUMAN HIT: BE782401.1, EVALUE 0.00e+00; NT HIT: gi14781652, EVALUE 0.00e+00; SWISSPROT HIT: Q55421, EVALUE 2.10e-01
ctaaggcactcgtgattgggaaagaccacgaatccaaaaacagccagctgtttgctgccagccagaagttcaggaagaacacagctccatctctctccagccggaagaacatggacctagcgaagtcaggtatcaagatcctcgtgcctaaaagccccgttaagagcaggaccgcagtggacggctttcagagcgagagccctgagaaactggaccccgtcgagcagggtcaggaggacacagtggcacccgaagtggcagcggaaaagccggtcggagctttattgggccccggtgccgagagggccaggatggggagcaggcccaggatacacccactagtgcctcaggtgcccggccctgtgactgcagccatggccacaggcttagctgttaacgggaaaggtgagtgtctagggagctgctcaggctccgtggtgatcccagagggctcgggtccttctctagagatcaggccttgagctgggcagagtccggggcttctcacggcatctgctggagccttgcagagatttcgccttctcctttcttcgctgga

SEQ ID NO: 2036 - DNA, 505 bp, Homo sapiens
  MAP TO CHR7.1; EXPRESSED IN BRAIN, SIGNAL = 5.9; EXPRESSED IN ADULT LIVER, SIGNAL = 4.2; EXPRESSED IN FETAL LIVER, SIGNAL =  12; EXPRESSED IN LUNG, SIGNAL = 4.2; EXPRESSED IN HELA, SIGNAL =  15; EXPRESSED IN HEART, SIGNAL = 3.5; EXPRESSED IN BONE MARROW, SIGNAL = 6.9; EXPRESSED IN PLACENTA, SIGNAL = 8.9; EST_HUMAN HIT: AI040942.1, EVALUE 0.00e+00; NT HIT: AF287737.1, EVALUE 4.80e-01; SWISSPROT HIT: P11464, EVALUE 3.00e-03
agataggggaagtgcaaggccagcatgcattcatgttttattaggatcccttccttgtatgtcacacatacctacggaagtgatgataactgtgaaatgagtttcatcttgcctgccggttatgttgttgtaagcacagcacacatagtccattgtcttctgggctactttctcagatgcaacttctaagcgaggcccatgcttaatgatatatgtagtattgtcagtcctcctaatccaggagtaggtgttggggggatgagaatcagcagaacaatcaaataggatggcctctccaaggtcaacagtaaacacttcccctacttttagccctttatcagaattcacttgaagtccataaggtccatctgcatcaatataaaaaaaaatagataagtaacacaagtaatcacaacataggttttgagtttgggagagcttagtagcattttactgtttttgaaaattttcatcttagaattggacgagcaggtccttgcttaga

SEQ ID NO: 2037 - DNA, 548 bp, Homo sapiens
  MAP TO CHR16.1; EXPRESSED IN HELA, SIGNAL = 4.4; EXPRESSED IN BONE MARROW, SIGNAL = 5.2; EXPRESSED IN HEART, SIGNAL = 2.9; EXPRESSED IN FETAL LIVER, SIGNAL = 4.2; EXPRESSED IN LUNG, SIGNAL = 2.7; EXPRESSED IN BRAIN, SIGNAL = 4.7; EST_HUMAN HIT: BI856039.1, EVALUE 1.00e-11; NT HIT: AF329695.1, EVALUE 5.00e-29; SWISSPROT HIT: Q9Y4W6, EVALUE 2.00e-16
ctggaggaggcttgtgaatctaacacagctttctccagtacgtttgcctgagagaacccttccttaaaaacagaataatcagggattctcttctgggggtgactgtacagaaaaaggctgtgcagactattcctaagcagctgcaggggaacagctgcacacactgtccatctccacgagcatctggttcagggtgttctcctgctcactctggcctccaaagtgcccttggcctcgcttcctgccaatcgcatcaatctcatcaatgaataagatacatggagcgtttttttcgggccattgcaaacatgtcatgaacctgaaacaggaacccacccagaatcggttttgctactggtaggaagacgggaacgccagttatcctccaccctctccttggaaacctctgacccattttgcctcagtgcaccagcacctcccacacatgcccatgcccagggccccacactaagctattcaagttgaccagtcctggtcaaggcacggtgctgaggccacctgcagcaggttcccatccacctaccctt

SEQ ID NO: 2038 - DNA, 543 bp, Homo sapiens
  MAP TO CHR5.1; EXPRESSED IN LUNG, SIGNAL = 0.91; EXPRESSED IN FETAL LIVER, SIGNAL = 0.47; EXPRESSED IN HELA, SIGNAL = 0.5; EXPRESSED IN BRAIN, SIGNAL = 0.74; EXPRESSED IN HEART, SIGNAL = 1.2; EST_HUMAN HIT: BE537133.1, EVALUE 1.90e-01; NT HIT: U48465.1, EVALUE 0.00e+00; SWISSPROT HIT: P21817, EVALUE 7.00e-59
ccgtgtgtgaccaggtgtaggaccaacggcctggcctagcccgcctgcccagcccagtactccattccctgccacctcaggtatcccgagtggacggcactgtggacacgcccccctgcctgcgcctgacccaccgcacctggggctcccagaacagcctggtggagatgcttttcctgcggctgagcctcccagtccagttccaccagcacttccgctgcactgcaggggccaccccgctggcacctcctggcctgcagccccccgccgaggacgaggcccgggcggcggaacccgaccctgactacgaaaacctgcgccgctcagctgggggctggagcgaggcagagaacggcaaagaagggactgcgaaggagggcgcccccgggggcaccccgcaggcggggggagaggcgcagcccgccagggcggagaatgagaaggatgccaccaccgagaagaacaagaagagagggtgagtcgaggggggcccagagtggggattgggggctgccttgggacccccaagtaggcaaccacagt

SEQ ID NO: 2039 - DNA, 587 bp, Homo sapiens
  MAP TO CHR19.1; EXPRESSED IN BONE MARROW, SIGNAL = 0.88; EXPRESSED IN HEART, SIGNAL = 1.1; EXPRESSED IN FETAL LIVER, SIGNAL = 0.91; EXPRESSED IN HELA, SIGNAL = 1.2; EXPRESSED IN BRAIN, SIGNAL = 0.87; EST_HUMAN HIT: BG721501.1, EVALUE 1.00e-100; NT HIT: gi9966896, EVALUE 1.00e-105; SWISSPROT HIT: P90747, EVALUE 3.40e-02
agcaggacagaaaggcaaaggtgctacaggcaaatcaaggactcacttgttgctcccaaatttcttctcagctgctcggatctctgagtcttcctggaagcctctgttgctctgatagtatgagaaggcgtttcccacaggaaaggccacggggagaaactgcttcttctccagggcatcgtaggaatacttgatcttctggaattcgaaggacagcacctcaagcccgtcttcgccctgcggtagaaggtgtgtttgccacagaggcccctgaccttggggtgtcagcgcctgggaatcctactcaagcccctcctccaggagcccagcaggcagtccctacctcattgcggtgcagggccacgagctccgtggagccattgttgggggttggcaccaccttcacaaaggtcgctttgctggggtcgtactcctgacagagacaaagaaagcattgtggcttagctcttctcaacctacagttccaagacccccccgggaggttttgggtgcagcagctctatgggtatattctgaaatgccactgggctctggtgctgcctctgtcactccctcgtctgtcatca

SEQ ID NO: 2040 - DNA, 514 bp, Homo sapiens
  MAP TO CHR15.1; EXPRESSED IN ADULT LIVER, SIGNAL = 2.9; EXPRESSED IN FETAL LIVER, SIGNAL = 2.4; EXPRESSED IN LUNG, SIGNAL = 1.7; EXPRESSED IN HELA, SIGNAL =   5; EXPRESSED IN BRAIN, SIGNAL = 3.3; EXPRESSED IN HEART, SIGNAL = 1.6; EST_HUMAN HIT: BF513828.1, EVALUE 0.00e+00; NT HIT: gi15300074, EVALUE 0.00e+00; SWISSPROT HIT: P15583, EVALUE 1.90e-01
gtgaacagctgtgaagcagggatgaaaattaatgtgcccagaagcagattctctttgaagcatcttttttcatactacctgataagtgtcttgctacatggcagtagcagcagtaagacgggtgatatcaaagagaactatctggaaacatttatcttcaatccaaaatggagccttatgtttgtcataaatctacgtactcttcttttccaggtgactacaattgcaaagtagaatttgctttgacacctgatgccaggacaatagtatgttaccatccttctatagacattccatatgaacgcacaaaacctatcccttgaccagatcctgtgtataataatgaagaaacacatggtcaagtgctgaaaactagagaagaaaaaagtgaacaccttgagcgagaacccataatagaacaacttagcaaaatgttctttatgctaagtacggttggcatcttcgtggacattagcacagatgtcagaagaaaccggaacctccagaagacaga

SEQ ID NO: 2041 - DNA, 503 bp, Homo sapiens
  MAP TO CHR5.1; EXPRESSED IN FETAL LIVER, SIGNAL = 0.9; EXPRESSED IN HELA, SIGNAL = 0.92; EXPRESSED IN BRAIN, SIGNAL =   1; EXPRESSED IN LUNG, SIGNAL = 1.1; EXPRESSED IN HEART, SIGNAL = 1.1; EXPRESSED IN ADULT LIVER, SIGNAL = 0.72; EXPRESSED IN BONE MARROW, SIGNAL = 0.98; SWISSPROT HIT: Q9Y5I0, EVALUE 5.00e-78; EST_HUMAN HIT: BI602140.1, EVALUE 7.00e-72; NT HIT: gi14728069, EVALUE 0.00e+00
tctgagtcctcctccctctggcctgttccctctgcagaacccagacaaggaggaaggctgggactgaaggccatgaggtccgtcttatgcgggccctccccagagcacaccctcggccgcctctgctgcgagtacgaccaactccctgccgcgctggagcacactagagtgggcttgcccggcgcgcacgcgccctcggtgggcggtgccgagcaccgcagcgcagtatacagcagcaacgtgagcaccaacaggctggacaccgcgcagatggcaatgatcaagtaaacattgacatccaccagcgccgcttctggacccacagcgcctgccgacgccctcgacgaagcctgtggcgcttggccgctctccaccagcgacaacagcaccgttgccgtggccgtcagcgcgggctcaccgtggtccttcaccagcaccagaaggcggtggtgcggcgcgtccacctcgtccagagggcgcgtcgtgctgatctcgccagtgta

SEQ ID NO: 2042 - DNA, 505 bp, Homo sapiens
  MAP TO CHR19.1; EXPRESSED IN ADULT LIVER, SIGNAL = 2.4; EXPRESSED IN PLACENTA, SIGNAL = 2.6; EXPRESSED IN FETAL LIVER, SIGNAL = 1.4; EXPRESSED IN BRAIN, SIGNAL = 1.2; EXPRESSED IN LUNG, SIGNAL = 2.4; EXPRESSED IN HEART, SIGNAL = 2.2; NT HIT: Y07661.1, EVALUE 0.00e+00; SWISSPROT HIT: Q15853, EVALUE 2.00e-37; EST_HUMAN HIT: W17190.1, EVALUE 1.00e-129
atgcagtaaaccccaagcacagcaatgaggggacgggatggaggaacagagaaagctaagggtagcctctgccctcctactccccaggctgtgatccaaaatcccttcagcaatggtggcagtccggcggccgaggctgtcagcggggaggcacgatttgcctatttcccagcgtccagtgtgggagatactacggctgtgtccgtacagaccacagaccagagcttgcaggctggaggtgaggagtagaagtcagattggcaggtgggggaggcaacgggcccagcagggagggaagcccccccagccagttctgacttcaccctgccttgccactaaccccccactctccctgcaggccagttctacgtcatgatgacgccccaggatgtgcttcagacaggaacacagaggacgatcgccccccggacacacccttactctccgtatgtgcaggggacacctggagggcctggtgttgaaatggaaggaagaggggtttctg

SEQ ID NO: 2043 - DNA, 511 bp, Homo sapiens
  MAP TO CHR15.1; EXPRESSED IN BONE MARROW, SIGNAL =   1; EXPRESSED IN FETAL LIVER, SIGNAL = 0.96; EXPRESSED IN HELA, SIGNAL = 1.1; EXPRESSED IN LUNG, SIGNAL = 1.4; EXPRESSED IN BRAIN, SIGNAL = 1.2; EST_HUMAN HIT: BI758303.1, EVALUE 2.00e-93; NT HIT: gi14777147, EVALUE 3.00e-82; SWISSPROT HIT: P34679, EVALUE 1.00e-08
caggaaccaagccttctgaggctcaatctccctggtgaacgtgtccccggtccacatcgcctctgcaatgaggcccacaggaaccaaggatacgtgatggtggtgtgcgcggctcccagcccctcagcgtggttcagcacgtagaccaggccgaaggccacgacgcccaccatgtgtgcactgagtgacagcaggaacaggaagaagtagcgatagtttcgacgcccgatgcagttgttgacccaggggcagtggtggtcaaagtcctgggcgggagcagtgcatcagggcacatggcaggcagggatgtggcacagggctgggggagcgcggggcagcagggcggtcacctctacacagttgtcacagacgctgcagtgggagcagcgcggcgggcggtagaagtggcacgtggcacaccacttcatgcggacctggatacctcgcacatccacgttcttgtacagcggagcccggaagtcgtcctccttgtcctcatcctcatccgcta

SEQ ID NO: 2044 - DNA, 542 bp, Homo sapiens
  MAP TO CHR17.1; EXPRESSED IN HELA, SIGNAL = 1.6; EXPRESSED IN BRAIN, SIGNAL = 1.5; EXPRESSED IN HEART, SIGNAL = 0.71; EXPRESSED IN BONE MARROW, SIGNAL = 1.5; EXPRESSED IN ADULT LIVER, SIGNAL = 1.1; EXPRESSED IN FETAL LIVER, SIGNAL = 1.3; EXPRESSED IN LUNG, SIGNAL = 0.64; EST_HUMAN HIT: BI905836.1, EVALUE 4.90e-02; SWISSPROT HIT: P22273, EVALUE 1.30e+00
cttcttgttcctgggtttggtagacaaaaaagtgagctgactcagaacgtttgtgaactttttgcctctggagacttttacaaacaagatagaccttattatcagggctgagtcgaaagtcctgttagaggcggacaaatggctgagctgacgtctgaagaagctgcctcttgaggaagcccttgaggggcagaggaaccagtgagaagacttcagttcccagggaggtcaaggatgcttgggggagggggagacagaggagggagcccttcctaattaagcctctacccacgagtgaatgtgaggctaataaggcagccccattccagggcacctccacacccagccagccggtctgcctgtttattgcccgtatggagatcattaatgcctcctgacactggggtcactcccggggtcaatcccggagccccttctggaaaacaaggggaaatgaacttcccagcacatgtggctcagccttggcagggagggggactctggtcaccccacacctcagctctgggagagatcagcactcc

SEQ ID NO: 2045 - DNA, 524 bp, Homo sapiens
  MAP TO CHR5.1; EXPRESSED IN HEART, SIGNAL = 0.77; EXPRESSED IN BONE MARROW, SIGNAL = 1.2; EXPRESSED IN ADULT LIVER, SIGNAL = 0.7; EXPRESSED IN PLACENTA, SIGNAL = 1.3; EXPRESSED IN FETAL LIVER, SIGNAL = 0.87; EXPRESSED IN HELA, SIGNAL = 1.3; EXPRESSED IN BRAIN, SIGNAL = 0.97; EST_HUMAN HIT: AW959797.1, EVALUE 7.30e-01; SWISSPROT HIT: Q02926, EVALUE 1.00e-02
ccagtgcctactaacgggtcctcttggcctaggggagggcatgccgtctggtttggggagtgggccccgtgctctctaggtggtaccagagagtgggcaggaggaggggcccagccatagagctgccgtggggatggggggaaggggaaaggcgtcctagcctttgacctggagcccagggtcccccatgggtggctgcatcggctcctctggttacctgggacaacaggcatttcctccatccccagcccctcctcttcctgctccaaccatccgggccaagaggcctcccagtcagacctggacggctccagccgtgtcctgaggagctggaccagccacatcccctggggctgcagttgaagcagaaccaagtggccatcccggcgttagaccgtaggttcctggtcccggagtggtcggagcccgccagtgggcaggcagctcttgctcacaggccgcggtgcccaggccgctggctctccgcagggcggaatggcgctgcaagtggagctggtacccac

SEQ ID NO: 2046 - DNA, 585 bp, Homo sapiens
  MAP TO CHR19.1; EXPRESSED IN HELA, SIGNAL = 0.49; EXPRESSED IN BRAIN, SIGNAL = 0.61; EXPRESSED IN LUNG, SIGNAL = 1.2; EXPRESSED IN BONE MARROW, SIGNAL = 1.1; EXPRESSED IN ADULT LIVER, SIGNAL =  15; EST_HUMAN HIT: BI023202.1, EVALUE 0.00e+00; NT HIT: AB002458.1, EVALUE 0.00e+00; SWISSPROT HIT: Q08477, EVALUE 1.00e-44
gccatctgttcctggataccccgtttactgataggaggtagctcctagctgctggtgggaggtgatcctggggcttcaggtgtattaaattgttgcctccctttctgcccttatcctgcaggaagcccagtgaatatattgccgccatcttggagctcagtgcccttgtgacaaaaagacaccagcagatcctcctgtacatagacttcctgtattatctcacccctgatgggcagcgtttccgcagggcctgccgcctggtgcacgacttcacagatgccgtcatccaggagcggcgccgcaccctccctagccagggtgttgatgacttcctccaagccaaggccaaatccaagactttggacttcattgatgtactcctgctgagcaaggtgggcctctctgggatctgaattcaagaagtagaagggagcttcatgtgaaatgtcagatgaaagaatttgaacttgacccagagggcactggggagccatggaaggtgattgaggaagggagggacaggtcagagataggttttggagatagctctgtggactagcacctaccaggggactgctaaatgaa

SEQ ID NO: 2047 - DNA, 505 bp, Homo sapiens
  MAP TO CHR19.1; EXPRESSED IN BONE MARROW, SIGNAL = 1.2; EXPRESSED IN ADULT LIVER, SIGNAL = 2.4; EXPRESSED IN HELA, SIGNAL = 0.7; EXPRESSED IN FETAL LIVER, SIGNAL = 1.2; EXPRESSED IN BRAIN, SIGNAL = 0.99; EXPRESSED IN LUNG, SIGNAL = 3.8; EXPRESSED IN HEART, SIGNAL = 2.7; EST_HUMAN HIT: AW236498.1, EVALUE 0.00e+00; NT HIT: gi14760087, EVALUE 5.00e-35; SWISSPROT HIT: P17024, EVALUE 6.00e-44
agcagatgccattgtatcccagccacggatttctcaactgccattaccaccaactggaagtctttttatttatttatttaatttttataacagagtctcactatgttgcccaggctggtcttgaactcctgggcttaagcagtccccccacctcagcctcctaaagcctggggttatggggtgtctatgcagtgagcccttccatgcacttgaagttgtgaagaacatctaaagactttaccacattggttacatttatagggtttctctccagtgtgagtccttccatgccttcgaaggtttgagggacatccaaaagctttcccacattgcttacatttatacggtttctctccagtgtgagtccttccatgcatttgaagtcgcgaggcacatccaaaagacttcccacactgcttacattcatagggtttctctccagtgtgagtccttccatgcatttgaaggtgtgaggcagatccaaaggctttcccacactgcttac

SEQ ID NO: 2048 - DNA, 595 bp, Homo sapiens
  MAP TO CHR14.1; EXPRESSED IN FETAL LIVER, SIGNAL = 2.3; EXPRESSED IN BONE MARROW, SIGNAL = 2.2; EXPRESSED IN ADULT LIVER, SIGNAL = 4.3; EXPRESSED IN LUNG, SIGNAL = 2.1; EXPRESSED IN PLACENTA, SIGNAL = 2.5; EXPRESSED IN BRAIN, SIGNAL = 2.6; EXPRESSED IN HEART, SIGNAL = 2.1; EXPRESSED IN HELA, SIGNAL = 2.3; NT HIT: gi13649630, EVALUE 1.00e-108; EST_HUMAN HIT: AV685589.1, EVALUE 1.00e-49; SWISSPROT HIT: Q61060, EVALUE 4.50e-02
gtgccttacctccttagcccacacagccttccctccctcctgcccaggcccctgagactctgtaccaggaaggctgtcttgccctgtcctgactgccccgtcaccaggctcagccttccgtggggcagcatcagccgttgcactgtgtcctgaagaaggcgtggccgggcaggactcggtggcttctgcagctgctggaaggtggcctggaccaagtcatcgtctgggatggacactggctgctccagcagggccccaggctgagggtaaatgggtcagtgactatccatggtgccatgctcctcagcactcccaggctaaaactcacagagcccccgccaagctacttcctccccaggacaacccagaccaccccatgtccctctccatgcctctggtcaccagtgcttctgctgacctgcaggtagagcttctggatcatattccatacatcctgcagaaccaactgcccaaactcctccagcccgccaacatagggccggccagctgccacacccccccactcacaggggtatctgtgggcaaatcaagcacaaccaggtcagagcaggcccggctcctctcaccacatctc

SEQ ID NO: 2049 - DNA, 572 bp, Homo sapiens
  MAP TO CHR22.1; EXPRESSED IN LUNG, SIGNAL = 2.5; EXPRESSED IN HELA, SIGNAL = 2.6; EXPRESSED IN BRAIN, SIGNAL = 2.8; EXPRESSED IN HEART, SIGNAL = 2.9; EXPRESSED IN ADULT LIVER, SIGNAL = 2.5; EXPRESSED IN BONE MARROW, SIGNAL = 2.8; EXPRESSED IN PLACENTA, SIGNAL = 1.9; SWISSPROT HIT: O75746, EVALUE 2.00e-04; NT HIT: gi14776826, EVALUE 1.00e-63; EST_HUMAN HIT: BI753542.1, EVALUE 2.00e-63
ctctgtctccacccaagagcacagaggctcatcaggaaggaccccctggcagccctggccccatccccgcagcaacggaaggaacaccagttccccatgtcccatacgctcacacctgctgcccagcctcccaggggacctgagaagcccacctcggtacatgccgaagaagccctccgcccgagccgtcttcatcaggcagtcgatcctggaagcagaggccagagtaggagtaagtgtgcagcgggcctcccagccgcctccatgccctgctcccgcgggcacatcccagctgatcagatccccagcccccaggctcacgcgcgctgcctggagactggagggaagggggccccatccctcccccgggcgcctctgccctccacgctcgcctgccagcacctacattcctttgtacatggctttcccatgctggttctgcaggcgagtcttggccaagtcgatggggaacacgcaggtcacccccacgagccctgctacacctccattgatgagtttggctgtgatgctaggacagggggaggacagggggaggagagaggcagagggag

SEQ ID NO: 2050 - DNA, 539 bp, Homo sapiens
  MAP TO CHR12.1; EXPRESSED IN BRAIN, SIGNAL = 1.2; EXPRESSED IN HEART, SIGNAL = 1.5; EXPRESSED IN BONE MARROW, SIGNAL = 1.3; EXPRESSED IN ADULT LIVER, SIGNAL = 1.6; EXPRESSED IN HELA, SIGNAL = 1.3; EXPRESSED IN LUNG, SIGNAL = 1.4; SWISSPROT HIT: P36062, EVALUE 3.40e-01; NT HIT: gi14769146, EVALUE 2.00e-46; EST_HUMAN HIT: H83555.1, EVALUE 0.00e+00
tcgtgatgaaccagcagaacatgtggccgggttgctccttaatctgtcgtaagtcagaagttaatcagagggcaaagaagacctttcatccactcagctgctgctatttgcttattcactaactgctgcctgtcctgtctgtgggaactttccaccgtctggatgctgtctgtcatacaggcgcttggagctgctgagctttcctgaaaagggggacccttccttaaaactctaggaactagagtggcattgtgatggaaatactcttatgctcattgaaactgtccctctgaacttctccctcgaaggcccgccacgatgactatcatggtggaggacatcatgaagctgctgtgctccctttctggggagaggaagatgaaggcggctgtcaagcactctgggaagggtgccctggtcacaggggccatggccttcgtcgggggtttggtgggcggcccaccgggactcgccgttggtaagtgcaggtgtctcacagagatagccagcctcggggatgtcataaaagggccgttgaa

SEQ ID NO: 2051 - DNA, 585 bp, Homo sapiens
  MAP TO CHR19.1; EXPRESSED IN HEART, SIGNAL = 0.64; EXPRESSED IN BONE MARROW, SIGNAL = 0.7; EXPRESSED IN FETAL LIVER, SIGNAL = 1.3; EXPRESSED IN BRAIN, SIGNAL = 1.1; SWISSPROT HIT: Q9UL59, EVALUE 3.00e-19; NT HIT: gi14768855, EVALUE 0.00e+00; EST_HUMAN HIT: AU118352.1, EVALUE 0.00e+00
ctcagtgagggctaagcctggaatgatagcttcctcagccatctggctctgctccagtaaatcatcttccctatgaagtctcatatgctcattaagggcagagctatgaatgaagccttgtccacacaaaaggcatcgaatggccgacccagcaagagcaggattcctctctgcagcacgattcctccgtggcttcatgggcaagagggcaataaaaccatcatcacaccccttcatggaatacaactggtcttgttcatggattctctgatgctcgaaaaggaatgagctatgaataaaagattccccacactttggacattcatacagctgctctccagtgtaatctctctgatactcgctgatggaatgggtgtgaattacagaatgtgtgtactcccgactgtcaaccaggcacttcctgctgtggactttctgatggtctgtgaggtctgtgagatccacaaagcccaggccacagtcctcacattcatagattttgtcatcagggtcatccttctgagggtcttccatgtctgagccttgaatgacagggtcttcaattgtctcctgaccatgggtctc

SEQ ID NO: 2052 - DNA, 554 bp, Homo sapiens
  MAP TO CHR19.1; EXPRESSED IN HELA, SIGNAL = 1.3; EXPRESSED IN BRAIN, SIGNAL = 1.3; EXPRESSED IN BONE MARROW, SIGNAL = 1.3; EXPRESSED IN ADULT LIVER, SIGNAL = 1.5; EXPRESSED IN PLACENTA, SIGNAL = 1.4; EXPRESSED IN FETAL LIVER, SIGNAL = 1.5; EXPRESSED IN LUNG, SIGNAL = 2.3; EST_HUMAN HIT: BG327347.1, EVALUE 1.30e-02; SWISSPROT HIT: Q14807, EVALUE 2.10e-01
acggtctcagttttacccccaggtgggggggatgggcctataggtagtcaggggtggaggggggtggtgctgggccttgtgcctcagtttccccgagcgtggaagctggaggagagcacgggttttcagaaaaagactacgattcccagaagctcccgcgcggctcccgccaggctgtcaatcaaagtaacgtgggtacctctccggcccgcgctctcccgcccgtcgcctccctcccgccagctcccgctccctccctgccggctcccggccggcgcggtataattacagcccattgatccgacccgggccggaaagcggctccctcggggagccaagcctttgcgttccgacaccgccaacctctgcctaccgccccctccagcggagctgccgggccaccagccaggcctgtcccctcccgctggccccgggctcgcgggtgacctctgagcctcagctccccgccacgcttggcggtgtgccccccggaaaaatcacacacacatttccttccacccaggaacatgaggagccatctccctagaacctcc

SEQ ID NO: 2053 - DNA, 528 bp, Homo sapiens
  MAP TO CHR3.1; EXPRESSED IN BONE MARROW, SIGNAL = 6.1; EXPRESSED IN ADULT LIVER, SIGNAL = 7.2; EXPRESSED IN HEART, SIGNAL = 3.4; EXPRESSED IN PLACENTA, SIGNAL =   4; EXPRESSED IN FETAL LIVER, SIGNAL = 5.4; EXPRESSED IN LUNG, SIGNAL = 3.5; EXPRESSED IN BRAIN, SIGNAL = 5.8; EXPRESSED IN HELA, SIGNAL = 4.2; NT HIT: M81844.1, EVALUE 7.80e+00; EST_HUMAN HIT: BG757771.1, EVALUE 3.00e-71; SWISSPROT HIT: Q07961, EVALUE 1.30e+00
ctgctagcctgagcctcttggggctgaaataaaaaaggaactaattgttttgttattttttccaatcagactctgaaatgccccaggtgcaatttgacaggattgatgatgaggatgtggccacatgcatctcaaaggactagtacctcacgcccattgtgacatggctggaccggacagagagggacctgagcaaccacagcatcgtggaaatcctggaggagcagatgaatggcttctacagggtgttctccatcctgaaataccctgtcaagttaaatgagaaatatctctgccacataacagagacagatgtgaacaaccagctcttcagaatcatccacaagtatccaagtaagtgcaaatccgaaaggaacagtgaaagtggggtgcatttcaccacagaaaagtcatcattcattaatatttactgaatgtcaaatatatcaggcatgccttcgcactttggggatttaaagaagcatcaggaacatacgcttggagccttgggcaagataaggtggtgaa

SEQ ID NO: 2054 - DNA, 537 bp, Homo sapiens
  MAP TO CHR5.1; EXPRESSED IN LUNG, SIGNAL = 1.4; EXPRESSED IN BRAIN, SIGNAL = 1.8; EXPRESSED IN HEART, SIGNAL = 1.5; EXPRESSED IN ADULT LIVER, SIGNAL = 2.1; NT HIT: gi14772274, EVALUE 8.00e-71; EST_HUMAN HIT: AL519667.1, EVALUE 5.00e-79; SWISSPROT HIT: O53553, EVALUE 1.10e-01
ttccccaattaatccttccccttccctcctggtctcggaggacccaatcctagcccgacctgtctcggcccgcaacttccccgaagctgttggtgccactcccagcccatgtgggcccccgcaggctgccaacgcctgtccgccagctccccgttccgctgggctttccaaaacctcgccaggggtgactttctgagccgcttgctccatacccctctctgcagcctctcctgccacttagggctgccgttccccctcccggcaacggggggctggcggagctgtgccacgggggcccccggggccggcggggccggcagagcaggcagtgccagggtcatcaggatgatgcggacgcagtgtctgctggggctgcgcacgttcgtggccttcgccgccaagctctggagcttctccgcccttttgcggtggcagatctgcatggtaattcagcaccaaactgttcgatatgatatcatccccttatcttcttgtcctggaatcagctaggtgaagaggaagatcatggtgctggat

SEQ ID NO: 2055 - DNA, 596 bp, Homo sapiens
  MAP TO CHR5.1; EXPRESSED IN BRAIN, SIGNAL = 0.69; EXPRESSED IN ADULT LIVER, SIGNAL = 0.45; EXPRESSED IN BONE MARROW, SIGNAL = 0.68; EXPRESSED IN FETAL LIVER, SIGNAL = 0.52; NT HIT: AE006848.1, EVALUE 8.90e+00; EST_HUMAN HIT: BE313087.1, EVALUE 8.40e-01; SWISSPROT HIT: O51750, EVALUE 2.00e+00
cccctagacgggctttttactaaacccaaatccctcaaaagaggtctctatctctacccatagtttccaatttccctttaaaaatacagaaaaacagagaatatctgttgagtgcagatattatatatagaagacaactagagttaaaacaggactcttcttcctgcccatttcctcaaggaaactcagtgctccacccagccttgtgcataatactatacttcttcacaggccccagatatgcagatgacaaatagaacacaagctactaaaagcagtggcaggttccttgttaaattatgaactcttgggttctagcaattcagtccaaaggtagatgaaagagacaaaaatatcttatgaaaggagataaaaccaaggcttgatccaattaggattcttgagttcgctgccagaaattcaggtggtaacctcagtcttctggcaaacttccaagagcatgcgattaccagtgatgctcctaaaatgttccttgtaagttctgcttttcctaggctgtgcccagcagattttctggaattgtttgagtgagctgattctgttcctaaagctgcccgaggtgaaaggtgccatat

SEQ ID NO: 2056 - DNA, 535 bp, Homo sapiens
  MAP TO CHR14.1; EXPRESSED IN HEART, SIGNAL = 1.1; EXPRESSED IN BONE MARROW, SIGNAL = 1.5; EXPRESSED IN ADULT LIVER, SIGNAL = 0.91; EXPRESSED IN PLACENTA, SIGNAL = 1.6; EXPRESSED IN FETAL LIVER, SIGNAL = 1.5; EXPRESSED IN BRAIN, SIGNAL = 1.4; EXPRESSED IN LUNG, SIGNAL =   2; SWISSPROT HIT: P27695, EVALUE 1.00e-23; NT HIT: X66133.1, EVALUE 0.00e+00; EST_HUMAN HIT: AU117331.1, EVALUE 0.00e+00
tatagttaacgccggatcgcagttggaaaccaccagctttttgtcagtatatattactcattttatagagccagaggccaagaagagtaagacggccgcaaagaaaaatgacaaagaggcagcaggagagggcccagccctgtatgaggaccccccagatcagaaaacctcacccagtggcaaacctgccacactcaagatctgctcttggaatgtggatgggcttcgagcctggattaagaagaaaggattagatgtgagtggaatttgagggaaagagacattttttagtattgaatggtcttagggtttagtcaccccttttctccgtttagccttcaggctgttttatttttctcctgcccgtagttttctgtggggcttccccagtcttgccagttgtatttcctaaatgtctgttccttcacttccattgccattttcttttttagtgttctctcctcttcccagaatgttgcaaaaacctcttcactatacttcctccattttatcttcctgcattgcattccatatg

SEQ ID NO: 2057 - DNA, 561 bp, Homo sapiens
  MAP TO CHR19.1; EXPRESSED IN PLACENTA, SIGNAL = 3.9; EXPRESSED IN FETAL LIVER, SIGNAL = 2.8; EXPRESSED IN HELA, SIGNAL = 3.7; EXPRESSED IN BRAIN, SIGNAL = 2.9; EXPRESSED IN BONE MARROW, SIGNAL = 2.5; SWISSPROT HIT: P32043, EVALUE 6.20e-01; NT HIT: gi7656943, EVALUE 5.00e-69; EST_HUMAN HIT: BG676612.1, EVALUE 5.00e-67
ctctaccccctccacctctccgggcagcagacccacctccgcgaagcagcagcagcagcagccagcctgcagtccagatcatggcctgggcacctgctttcctggcggggtccatggctccgtcctgctcccttggcgtcccccctgggtgtgccgcctccgagctcgggccctcttacctgagcccaggatgagtaacctcgccccaggcaaccccagccttgcccaaccgggccaactcagcgtcggctgtggggcggggccccgcccctaggcgcgtcatccaagggagagcggtccctgccctgtgaagttgccaaggagggaaagggtgggagctgaggttccctgacagctcgcgggagaaagtctgtgtgtgtttggagtgggagagtagtggggcttaaagacaggctggggctactcgacattcagtgttcggtaactgttaaatgagcatctacagtgtgcccggctttggtctaggtaatgctggagatgaagacagaaccagtgcctgtcctggcagagctcacagtctgatgggggagacagatgcta

SEQ ID NO: 2058 - DNA, 586 bp, Homo sapiens
  MAP TO CHR17.1; EXPRESSED IN BRAIN, SIGNAL = 1.4; EXPRESSED IN ADULT LIVER, SIGNAL = 1.7; EXPRESSED IN PLACENTA, SIGNAL = 2.1; EXPRESSED IN FETAL LIVER, SIGNAL = 2.1; EXPRESSED IN LUNG, SIGNAL = 0.84; EXPRESSED IN HELA, SIGNAL = 4.5; SWISSPROT HIT: Q09714, EVALUE 1.50e+00; NT HIT: gi4557568, EVALUE 1.00e-103; EST_HUMAN HIT: AI734969.1, EVALUE 1.00e-109
caaaggaggaagtgtttgcctttttgaggatttttgaaaaaaatatgtagggtctgaagacacctgccaaaagtattgctccaaaaactatttttgaataatgataacctcactgcaaagatgcatggcctctcaaagcaattgctttgaaagaggcaacagttatctggctacatgatctttggtgagcttaaaacaaataaaaccccctgcagtacagtcatatccttgtaaacagtgattgcttctcttgattgctggcctcatctgtatctggctagaaattttgcagtgatgtcgcaactctctcccatgcaaggttatcaacctggttgaccagacttcagaaaacgcacctaccaccgtgtctcgggatgtggaggagaagcccgcccatgcccctgcccggcccgaggcccccgtggactccatgcttaaggacatggctaccatcatcctgagcaccttcctgctgattggctgggtggccttcatcatcacctatcccctggtaaagctcaacaattcccctttgccatccacctatttctggggcttctctgcctgtcgcctcatgtcagtgaga

SEQ ID NO: 2059 - DNA, 548 bp, Homo sapiens
  MAP TO CHR7.1; EXPRESSED IN HEART, SIGNAL = 0.82; EXPRESSED IN BONE MARROW, SIGNAL = 0.58; EXPRESSED IN LUNG, SIGNAL = 0.86; EXPRESSED IN BRAIN, SIGNAL = 0.55; SWISSPROT HIT: P51532, EVALUE 3.50e-01; NT HIT: gi14753015, EVALUE 1.00e-75; EST_HUMAN HIT: BF684388.1, EVALUE 2.00e-75
ctcttctcacctctgccgactgaacatgcaggtctgggcccactatgaggagcagcccgtggaggaggtgatgccagtgctggaggagaaggagcgatctgctagctacaagcccgtgtttgtgactgagatcactgatgacctgcacttctacgtgcaggatgtggagaccggtgagtgctcaggccgctggctcgtggttcctggcttggtccagctggcgctgcctgggggtagggggcctctgcccagtgggtgggaggaacaatgcctaggcagtccaggagcctcccctgaagagctcacgttgccgcccctgtctccctgccttgtcccactgctcctctgggcttggagttacttcaggagccttcacatgagccctggcttgggctcaggcatggaggtgctgccggacaggtcctctggacgcaggtgagataaccaggtttatctgggtggagctctgagtctcttaggtgattgtttgttcctacatacccctggctatgctgggcaggatgatttgtagcccccagaatctgtca

SEQ ID NO: 2060 - DNA, 563 bp, Homo sapiens
  MAP TO CHR7.1; EXPRESSED IN HEART, SIGNAL = 1.3; EXPRESSED IN BONE MARROW, SIGNAL = 1.2; EXPRESSED IN FETAL LIVER, SIGNAL = 1.3; EXPRESSED IN LUNG, SIGNAL = 3.8; EXPRESSED IN BRAIN, SIGNAL = 0.96; EST_HUMAN HIT: AL079688.1, EVALUE 0.00e+00; SWISSPROT HIT: Q05209, EVALUE 2.00e-71; NT HIT: gi16175835, EVALUE 0.00e+00
tcgcaaccagattgtaatggctcttaatatgctactcttagctacataattctcaggtatcaacttgtttaacagtcttaaaatgccctttttaaatgtttgtttttcagttgccttgttgaaggggatgctaaagaagaaatactgcagccaccggaacctcatccagtgccacccatcttgacaccttctcccccttcagcttttccaacagtcactactgtgtggcaggacaatgatagataccatccaaagccagtgttgcatatggtttcatcagaacaacattcagcagacctcaacagaaactatagtaaatcaacagaacttccagggaaaaatgaatcaacaattgaacagatagataaaaaattggaacgaaatttaagttttgagattaagaaggtccctctccaagagggaccaaaaagttttgatgggaacacacttttgaataggggacatgcaattaaaattaaatctgcttcaccttgtatagctgataaaatctctaagccacaggaattaagttcagatctaaatgtcggtgatacttcccagaa

SEQ ID NO: 2061 - DNA, 548 bp, Homo sapiens
  MAP TO CHR5.1; EXPRESSED IN LUNG, SIGNAL = 0.67; EXPRESSED IN BRAIN, SIGNAL = 0.51; EXPRESSED IN FETAL LIVER, SIGNAL = 0.38; NT HIT: U78510.1, EVALUE 1.00e-119; EST_HUMAN HIT: AA235191.1, EVALUE 8.00e-78; SWISSPROT HIT: P04150, EVALUE 3.00e-23
aagattccttgttgcttgcgacagactttactaacctcagatatgctgttaaatatcctcaaacatgtcctgggacagtaataatgccacatgtacatttgctttacattacacttgtcctgccccaagcactcataactctatttccagtttgcctagatcctagatacctagtaggattgtttcagtcctgaattatcacaatagcagtcaatcaggaaaacatcagctggttaaagataccctatgaatacagggaaaatgacacacatacaacttactcattaataatcagatcaggagcaaaacacagcaggtttgcacttgattgtctatatgatctccaccccagagcaaatgccataagaaacatccaggagtactgcagtagggtcatttggtcatccaggtgtaagttcctgaaacctgaattaagagaaataaaggtatgaggcaacactcttcagaagatcatctctgtgggaattgccaaggagcaatgagatcaattagccctgtcaaaacaagggcacccctaacagaaaatg

SEQ ID NO: 2062 - DNA, 574 bp, Homo sapiens
  MAP TO CHR5.1; EXPRESSED IN PLACENTA, SIGNAL = 2.5; EXPRESSED IN FETAL LIVER, SIGNAL = 2.3; EXPRESSED IN LUNG, SIGNAL = 4.5; EXPRESSED IN HELA, SIGNAL = 3.8; EXPRESSED IN BRAIN, SIGNAL = 3.1; EXPRESSED IN HEART, SIGNAL = 3.5; EXPRESSED IN ADULT LIVER, SIGNAL = 1.5; EXPRESSED IN BONE MARROW, SIGNAL = 2.5; NT HIT: gi14861872, EVALUE 0.00e+00; EST_HUMAN HIT: BI465306.1, EVALUE 8.00e-78; SWISSPROT HIT: Q9Y5I0, EVALUE 4.00e-91
gcgcagtatacagcagcaacgtgagcaccaacaggctggacaccgcgcagatggcaatgatcaagtaaacattgacatccaccagcgccgcttctggacccacagcgcctgccgacgccctcgacgaagcctgtggcgcttggccgctctccaccagcgacaacagcaccgttgccgtggccgtcagcgcgggctcaccgtggtccttcaccagcaccagaaggcggtggtgcggcgcgtccacctcgtccagagggcgcgtcgtgctgatctcgccagtgtacagccccacgcggaacgggatgcgcgcgccgaccgccgccagctgcaattcatacgaaagccacgcattgtagcccgaatcggcgtccaccgcgcgcaccttcgccaccacgtggcctgcacccaccgaccgcggcatcagctcgctcactgtgcctcccgcgctgccagccccgggcgtcagcagcgccggagcgttgtcgttctcgtccagcacgaacacctgcagcgtcacgttgctgcccagaggcggcacgccagagtcgcgcgcgctcacctggaactgcaacag

SEQ ID NO: 2063 - DNA, 576 bp, Homo sapiens
  MAP TO CHR17.1; EXPRESSED IN ADULT LIVER, SIGNAL = 8.8; EXPRESSED IN BONE MARROW, SIGNAL = 9.3; EXPRESSED IN PLACENTA, SIGNAL = 5.8; EXPRESSED IN FETAL LIVER, SIGNAL =   8; EXPRESSED IN LUNG, SIGNAL = 5.7; EXPRESSED IN HELA, SIGNAL = 5.7; EXPRESSED IN BRAIN, SIGNAL = 8.7; EXPRESSED IN HEART, SIGNAL =   7; SWISSPROT HIT: P45444, EVALUE 8.00e-03; NT HIT: U85023.1, EVALUE 3.50e-02; EST_HUMAN HIT: AA551572.1, EVALUE 0.00e+00
ggaacatgggttccctgacgcagtagccggcactggtgggagtggggcacggggggtgggcgtgggccctggaccttctgctgctcatctgcctcccgcttctgctgcacaatgatgaccaggtactcctcacactgcttctggaactcagccaccttcttcttggcatcctccagctccaacgacatcacttgcaccttttccctagtttcgtcgatcttgaacaagcctgtccgcagtttattggcttgggccagcagctcctgccgtttttctcccagcaacctgggggaaagaataggacagggtgtggagaggcggggcttccggaaagcgcggtgtcctgtaaggtccaccttccccgtgtgtctcgagtccgccttcctttctgttgccaccaacactacccccaccatcctggtcgggattctatcacttcctgcctgggtcattgccaacagcttcccaagggctcttcttgatttcaggctctcattcctctggtttgttctacacaccactaccagaatcagcttgttaaacagtctccatcacaccacctcccctacatgagaa

SEQ ID NO: 2064 - DNA, 573 bp, Homo sapiens
  MAP TO CHR2.1; EXPRESSED IN HELA, SIGNAL =   3; EXPRESSED IN BRAIN, SIGNAL =   3; EXPRESSED IN HEART, SIGNAL =   2; EXPRESSED IN ADULT LIVER, SIGNAL = 3.3; EXPRESSED IN PLACENTA, SIGNAL = 1.9; EXPRESSED IN FETAL LIVER, SIGNAL =   2; SWISSPROT HIT: P47989, EVALUE 1.00e-28; NT HIT: U39487.1, EVALUE 1.00e-101; EST_HUMAN HIT: N49068.1, EVALUE 2.00e-01
agcagcaacattagcagcagtttcattgtgctgttagctcttacttggaaagctgcctctgagtggtcttgagggctgagatggttctgttggccattccaccatagcaaagggccagctcctgtacctctgtggttcctggcttgaataaaactctcatgccactggttaccttggcaatgtcatcttctctccgggaggcctgcttgaatgctgagaaatactccccctaaaagagatcaggaaggtgcctgttttccaccttgctctgtaggggctgcaaatggcagacccaaaccacagggctatgaggtgaggtgaggggataacaccatcacacatcagtgggtgaactggccccgggaatcaaagatcaaatgtaactgattaccacctgtttaggagaggttccagataacattcccagaagctgaaaaaaaaaacaggatttctccctgctagtcagaaaagctgagggtcagggacaaagtagaactgggtggtctccattgaacaacagctgcaggggaagaagggtgctttcacaaaggctccttagagacccctcatccc

SEQ ID NO: 2065 - DNA, 584 bp, Homo sapiens
  MAP TO CHR12.1; EXPRESSED IN HEART, SIGNAL = 1.7; EXPRESSED IN FETAL LIVER, SIGNAL =   3; EXPRESSED IN BONE MARROW, SIGNAL = 3.1; EXPRESSED IN ADULT LIVER, SIGNAL =   3; EXPRESSED IN PLACENTA, SIGNAL =   3; EXPRESSED IN LUNG, SIGNAL =   2; EXPRESSED IN BRAIN, SIGNAL =   3; EXPRESSED IN HELA, SIGNAL = 3.8; EST_HUMAN HIT: BF125432.1, EVALUE 1.00e-125; SWISSPROT HIT: P50570, EVALUE 5.00e-05; NT HIT: gi4826699, EVALUE 1.00e-130
tggaagtgtctttggctgtgagggtggatcccaggcccaaggcctgagggggccctgtgagtgggaagtgcctgagggggccgagggcaagggaaggtgggactggcgctcaggttggggtgggaggatcccactgcgcctgcgctgtccccatagccagcccccacctcaggttctggcagccacagtggcatggcgggggctcctactccatctgtatctgtagctcacaccctctccttcctcacagccccactccacagcgccgaccggtgtccagcatacacccccctggccggcccccagcagtgaggggccccactccagggccccccctgattcctgttcccgtgggggcagcagcctccttctcggcgcccccaatcccatcccggcctggaccccagagcgtgtttgccaacagtgacctcttcccagccccgcctcagatcccatctcggccagttcggatccccccagggattcccccaggagtgcccaggtaaggccaaccccctgccctccaccccaactgcctgcaccctggggtctctcctcctgtctcacttcctcccagtgagctc

SEQ ID NO: 2066 - DNA, 570 bp, Homo sapiens
  MAP TO CHR5.1; EXPRESSED IN BONE MARROW, SIGNAL = 2.4; EXPRESSED IN LUNG, SIGNAL = 1.2; EXPRESSED IN BRAIN, SIGNAL = 2.9; EXPRESSED IN HELA, SIGNAL = 5.5; EXPRESSED IN HEART, SIGNAL = 1.4; EXPRESSED IN ADULT LIVER, SIGNAL = 1.9; EXPRESSED IN FETAL LIVER, SIGNAL = 2.3; EXPRESSED IN PLACENTA, SIGNAL = 3.2; NT HIT: gi14861872, EVALUE 0.00e+00; EST_HUMAN HIT: AW161561.1, EVALUE 0.00e+00; SWISSPROT HIT: Q9UN74, EVALUE 1.00e-101
taccagctcgtcatcaggtggtttttccagagaaaagtattcatttgggctcagtctgtaagtgagcagggcgttctccccgatatctgcatccgaggcgccctctagtggaaaccgagagtcaagcggcctggattccgcgatggacaggttcttttgtgttgctgggaacaccggcgggttatcgttaatgtccctcacctccacgtccacatggaaaacctgcagcggcctgtctacgatcacctccaggtggatgctgcactccgcgctccgccggcacagctcctcccggtcgatccgagaattcacaaacaaaatgccattctgcagatttacctccagaaggcctccgcggcccttggacgccacccggaacaggcgcggcaccagctccgccagctccagtcccaggtcctgcgcgatgcggcccacgaaggtgccgtgtttggcctcctcggagaccgagtagtggagctgaccgttccctgcctcccaggctgcgaggagaagaagtaagagcagcagacgccgggattcctggccgcttccccaggaaaactccatctt

SEQ ID NO: 2067 - DNA, 504 bp, Homo sapiens
  MAP TO CHR17.1; EXPRESSED IN BRAIN, SIGNAL = 1.4; EXPRESSED IN HELA, SIGNAL = 1.9; EXPRESSED IN ADULT LIVER, SIGNAL = 1.5; EXPRESSED IN BONE MARROW, SIGNAL = 1.4; EXPRESSED IN FETAL LIVER, SIGNAL = 1.4; NT HIT: gi4506910, EVALUE 9.00e-89; EST_HUMAN HIT: AA424260.1, EVALUE 4.00e-70; SWISSPROT HIT: Q16586, EVALUE 8.00e-28
ctcagactaagcctgtgggcaatactgagagcatcagggaaagaaatggtgactggagcaatcagagagacggagataggaagcagcatgggagggaagggggactgggatgggggccatgccccaccccacccccggacccagggtccctcctcaccagggtcacattgcaccagtcaacgcggaagtggggtgccaaggtgtcgtagcaagacagaagtggaggctggccctgggcacagcgggcgtggctatcgggggatgccaccatcttcaggcaagtagaaaaaggtgaggcagaacccaccttaatgtataccctgggaccagatagaagtcactgtcagcagagtgggggcagggggcacgaggcaccactctgccaggggttgttgaaactttcctaattgtaggctatgacctggggatgggatgagggagacgcctaagagggaggattaagggaggaacatggcacagctggggtctggcaggagtcacagt

SEQ ID NO: 2068 - DNA, 510 bp, Homo sapiens
  MAP TO CHR4.1; EXPRESSED IN HEART, SIGNAL = 1.1; EXPRESSED IN ADULT LIVER, SIGNAL = 1.1; EXPRESSED IN PLACENTA, SIGNAL = 1.5; EXPRESSED IN FETAL LIVER, SIGNAL = 1.2; EXPRESSED IN HELA, SIGNAL = 1.2; EXPRESSED IN LUNG, SIGNAL = 2.1; EXPRESSED IN BRAIN, SIGNAL = 1.4; NT HIT: gi14781060, EVALUE 0.00e+00; EST_HUMAN HIT: BI916960.1, EVALUE 0.00e+00; SWISSPROT HIT: P35611, EVALUE 2.00e-37
tacacctgggtcagaaaggctggattcccaaagcctccgaagccccagctacccaacttgctctacgtcatctaactatgaacagtaaggtaggcacagaccaagcagttggtaatacagcttggcacgcagacaccggacgagagagactgcagcaagggtttcacgtgatcgtgtgtaatgttcgtccacaccttagtcttcgacttgggactgcttccattctgcccttcctcggaagcttcgtcgccccggccagagttcagccatcttgtcttctcccgctgctgcttctgaaaactgtgtctgagtggggagcaagtgcccgaatcaccgtcactagcaaaggagtaacctgtgacactagcaggaacctccacatcgctgtattttttagacttctctctcagagcagggtatcgataagggtagccagttctgtagccctagggtccaaggagagtgaaagacagtcaatattccagatctcaaaacagggtttcactttgg

SEQ ID NO: 2069 - DNA, 581 bp, Homo sapiens
  MAP TO CHR14.1; EXPRESSED IN FETAL LIVER, SIGNAL = 0.34; EXPRESSED IN BRAIN, SIGNAL = 0.41; EXPRESSED IN BONE MARROW, SIGNAL = 0.47; NT HIT: U76490.1, EVALUE 0.00e+00; EST_HUMAN HIT: BI906836.1, EVALUE 0.00e+00; SWISSPROT HIT: P01738, EVALUE 2.00e-40
tcctggagcttatcccactgctggggatacattttgtcctgagtgagtaaaatttctttatggtctctagttccacaggttctgactagaaatgcttgctttttatactgagtctgcactgctttcactgatagtacattgtttttccaggaactgccagagcccagtcagtgacccagcctgacatccacatcactgtctctgaaggagcctcactggagttgagatgtaactattcctatggggcaacaccttatctcttctggtatgtccagtcccccggccaaggcctccagctgctcctgaagtacttttcaggagacactctggttcaaggcattaaaggctttgaggctgaatttaagaggagtcaatcttccttcaatctgaggaaaccctctgtgcattggagtgatgctgctgagtacttctgtgctgtgggtgccacagtgcctgggtctgcagggggagctgaacacaaactgcctatgctagagaagttttcagagtttcagtatatctccctgtggtgttttcaaagatctccttttttatgatggcgaatgaggcaaagagggcta

SEQ ID NO: 2070 - DNA, 568 bp, Homo sapiens
  MAP TO CHR14.1; EXPRESSED IN BRAIN, SIGNAL =   1; EXPRESSED IN HEART, SIGNAL = 1.2; EXPRESSED IN BONE MARROW, SIGNAL = 1.1; EXPRESSED IN FETAL LIVER, SIGNAL = 0.85; EXPRESSED IN LUNG, SIGNAL = 1.3; EXPRESSED IN HELA, SIGNAL = 1.2; SWISSPROT HIT: P06322, EVALUE 2.00e-23; NT HIT: AF027557.1, EVALUE 2.00e-80; EST_HUMAN HIT: BI821699.1, EVALUE 1.00e-70
gaccagcgattgcactattcttaatgtttggtaagtaaaatggcacttaaaacttagaatcttttgttccattatgttgatgtaatctgtaaccacagttttctctaacgggtacagctaagatcacgtctaaggtaacttggtataatttgtttatttttttttcagggggaatcaatggagattcagtggtccagacagaaggccaagtgctcccctctgaaggggattccctgattgtgaactgctcctatgaaaccacacagtacccttcccttttttggtatgtccaatatcctggagaaggtccacagctccacctgaaagccatgaaggccaatgacaagggaaggaacaaaggttttgaagccatgtaccgtaaagaaaccacttctttccacttggagaaagactcagttcaagagtcagactccgctgtgtacttctgtgctctgagtgacacagtgacagggactgcaggggaagctgagcacaaactctgagcagcacgaggggcctggctgctgagtgtaagccactgtgatcccctctggttagggaccaggaa

SEQ ID NO: 2071 - DNA, 556 bp, Homo sapiens
  MAP TO CHR14.1; EXPRESSED IN FETAL LIVER, SIGNAL = 2.2; EXPRESSED IN HEART, SIGNAL = 1.8; EXPRESSED IN BONE MARROW, SIGNAL =   3; EXPRESSED IN ADULT LIVER, SIGNAL = 2.3; EXPRESSED IN PLACENTA, SIGNAL = 2.9; EXPRESSED IN LUNG, SIGNAL = 1.6; EXPRESSED IN BRAIN, SIGNAL = 2.7; EXPRESSED IN HELA, SIGNAL = 3.3; SWISSPROT HIT: Q00417, EVALUE 3.10e+00; NT HIT: AE008686.1, EVALUE 2.00e-22
caggaggcacctaaccagtcattcactgcatcatcatgcagagttatcctttaggtctccggatactgttgttgacaaggtaataacagaagaaagcagttgagaagactgatgtcgggacgtgggcctctgggctcgtgggacttcaccatgccaggggatggggcacattgccagaaaatgaggagcagcccactggggccacttttccgtggccagggggacactgtggcttctgctgccaggcttagtcccagcaggcgtctgctgctctctggtccccctggcagccctcgggggctcatttattcagaagccccattaccgcgagacaattctgcggtctgacctttcaccacaaatcccaaatgggaaagggagctctgggaattttaaagagcaaaccacacttgcttctccagcaaaattgaaaagatacagcataactagagtgcattcaggtgcacatagatagggaaacacggtttccatgctgccccaaacaaaaggagggagtccagtcctgccgactgcaggaaacagcctcactcggaag

SEQ ID NO: 2072 - DNA, 571 bp, Homo sapiens
  MAP TO CHR19.1; EXPRESSED IN HELA, SIGNAL = 1.3; EXPRESSED IN BRAIN, SIGNAL = 0.95; EXPRESSED IN BONE MARROW, SIGNAL =   1; EXPRESSED IN ADULT LIVER, SIGNAL = 1.4; EXPRESSED IN PLACENTA, SIGNAL = 1.4; EXPRESSED IN FETAL LIVER, SIGNAL =   1; SWISSPROT HIT: P21522, EVALUE 7.40e-02; EST_HUMAN HIT: BG334109.1, EVALUE 3.00e-40; NT HIT: AF274313.1, EVALUE 2.00e-40
tatctctctccagccgcttcctctcccagacccaggagtcccagcccccagacccaggagtcccagcccccagcctctcctccctcagatcaggggtttctggctcctatcagccttttccctccgacttggagtccgaacccccaatccccctcctttcccaagcacccaaatcctgagttcctaccagccccgagatagactaatctctcccaaagcaaaaatccttccccaaactgtcaccgtcggatcccccttcccgctgtccgccggccgggcccgcccccccctccggtccctcccacttttcccaaacaaagctcccggcaactttctccctcgcagcgccccgcccgcccgcggctccccagccccaggccgggaggtaggaaggcgccggcgggagtcggggatcctgctttggggtgtgtgagttggggtggggagttgcttcttaggaggtgaggcgtgcgtttgcgggaccgtctctgaatggttcgcagccctctttttgcccgggggcccgaatttgctcccgtgaccgagcctcagtgaggagtgggaactctgg

SEQ ID NO: 2073 - DNA, 534 bp, Homo sapiens
  MAP TO CHR5.1; EXPRESSED IN HEART, SIGNAL = 0.98; EXPRESSED IN BONE MARROW, SIGNAL = 1.1; EXPRESSED IN FETAL LIVER, SIGNAL = 0.81; EXPRESSED IN LUNG, SIGNAL = 0.63; EXPRESSED IN HELA, SIGNAL = 1.2; EXPRESSED IN BRAIN, SIGNAL = 1.2; SWISSPROT HIT: P33554, EVALUE 1.70e+00; EST_HUMAN HIT: AW438590.1, EVALUE 7.50e-01
tgaagtgtggattgagccaggtgagattcatgaagtttgagcacatggcttgtgggcatgtgctcagtcctcaatgaatgtaagctgttgtcacgctttgagtccctctgcctatattgctaagaattagaacattctgaaaacagatccgtgcatatgtgctctaagaatgcacaatacacaggcaagctgtcattttaagaggaaatcatccaaggtcttctggttagtcctcaataatcaccttctactacaatcagattaaatcttcaagtggtggcagaatgccagtttttttttttttttcctgcagttgtgtttcctgtgccttctaatggtattcaaaatacttcacaattcaactcaaaaaatttagcacatcttcagaataaattattattgtcattagcacattaccacccaagaaaatcttgtacaggaacagaatgcccagagtgagacactgcatgttcatcagcttgtgggtgccatatgtatggggatgtttttgtttcggctgttgctttttgtaca

SEQ ID NO: 2074 - DNA, 553 bp, Homo sapiens
  MAP TO CHR7.1; EXPRESSED IN BONE MARROW, SIGNAL = 1.7; EXPRESSED IN HELA, SIGNAL = 1.3; EXPRESSED IN FETAL LIVER, SIGNAL = 1.2; EXPRESSED IN BRAIN, SIGNAL = 1.7; EXPRESSED IN LUNG, SIGNAL = 0.84; EXPRESSED IN HEART, SIGNAL = 1.1
ggctggtagacaaatacccgataacctcctggagcagttcaacctaacccactgcttcttcccagctactaaagagcaactgaaatagaatttactttatgaaggtccctcgggattgagaacagtgtgtaataaagccactctcccatcaacaatacttgtgctctgtgggccatgaagaccaggatccagctcattataaatttaaagagcttcttgttttaaaattgacatgggaaagtagtaaagacctccaaaatatgaacctcaaattgcttgcatgtttgctttccatgtgaagccaggattcatacctcaaacttttccctggaatttatctaagctttttctggtacaaaatgctcaggagacaagactttcatgaaaggtcttcaattctatagccttattctttagaagatgatttggaagagacatccaagtaaaagatttttcccttgaaaaagggtattgacggcattgtttttttctgacacaggacacaagattttatttctgtgaatctctattctggccttggataaattaggaa

SEQ ID NO: 2075 - DNA, 585 bp, Homo sapiens
  MAP TO CHR20.1; EXPRESSED IN FETAL LIVER, SIGNAL = 0.96; EXPRESSED IN LUNG, SIGNAL = 0.68; EXPRESSED IN HELA, SIGNAL = 0.94; EXPRESSED IN BRAIN, SIGNAL =   1; EXPRESSED IN HEART, SIGNAL = 1.2; EXPRESSED IN BONE MARROW, SIGNAL = 1.1; EST_HUMAN HIT: BI906484.1, EVALUE 5.00e-36; SWISSPROT HIT: O94759, EVALUE 4.00e-33; NT HIT: gi4507688, EVALUE 1.00e-110
ttttcacagcaccactgagccccgcagcgttcccagcccgccctggtgtgctgcgggtgaggttcacaccctcctttcacatgctgtcttgggatctgacctccggaacccagccaggaggtttaccacctgggccctgccctctgcaaatcgctctggcacccactcagacccagtgggttctccgcatcggtccatgagtcctggtcctgcccaccaggctgacagtgtctctgcaaagcagccacatgctggtgaccgtcgtgcccgtcagcctcacctttttggtccactcgacaatcctgctttccgtgaaggtctcaaacatctcctggaagaacacgctcagtttctgctggatcagggagatagtgatgtccgagacaggcaggttggccacctgggcaatgacgtcggccacgcggcccgagccctccacaaccacacagggggtgccgttggtggtggcgttgtcgatggtctgcaaggcaggtgggggtgtgagcccgggactgggtcctcaccgctccgatgctttctgaaatggagaattctccaaggccagctaagggcagagctggctaa

SEQ ID NO: 2076 - DNA, 529 bp, Homo sapiens
  MAP TO CHR11.1; EXPRESSED IN HEART, SIGNAL = 1.7; EXPRESSED IN BONE MARROW, SIGNAL = 0.44; EXPRESSED IN LUNG, SIGNAL = 1.7; EXPRESSED IN BRAIN, SIGNAL = 0.45; NT HIT: AB026906.1, EVALUE 0.00e+00; EST_HUMAN HIT: BG568861.1, EVALUE 0.00e+00; SWISSPROT HIT: O14521, EVALUE 2.00e-16
ggaggcaaccccattaactcaccagaatatagaactcagtctcacaacttagatataattcctctcaaaccttttcctcaaagattaaattctgaaaataatcttgtgattaagagaagaaggctgtccaccaatggacttatctgttatttcttccttattgtgagcttaatggcatgacaaagcagaggcaaagaggcatacatcaattcttcaaagtatgaagtcaaaaaggtcagagcttccacagcatggcaacagctttgcagatgcccacatcgtgatagttgaaatagcaaagcccagcaaaggttaaagctgaaagtgccaaaagccctgccttggcagctttctgcaaggcatccccatgaacatagtcagtaacaacttgtccaaggcccctaaagaaaaagaaaaaatcataacatcaataaaaaaccacagtgaaattagaagactatacagataacttggctgcaaaaaaacaatctgtcaagttcaaatgcaatgtctccatttgccactccac

SEQ ID NO: 2077 - DNA, 516 bp, Homo sapiens
  MAP TO CHR9.1; EXPRESSED IN FETAL LIVER, SIGNAL = 1.2; EXPRESSED IN LUNG, SIGNAL = 1.2; EXPRESSED IN HELA, SIGNAL = 0.89; EXPRESSED IN BRAIN, SIGNAL = 1.1; EXPRESSED IN BONE MARROW, SIGNAL = 0.98; EXPRESSED IN HEART, SIGNAL = 1.1; EXPRESSED IN ADULT LIVER, SIGNAL = 0.94; NT HIT: AF179746.1, EVALUE 5.00e-69; EST_HUMAN HIT: AA909905.1, EVALUE 1.00e-11; SWISSPROT HIT: P30953, EVALUE 5.00e-44
ggtcagcacagaaggaaagctgggccaggaggagggtatgcaaaagagcacacgcacaagcgatgacccaggacccagccaccagcatgacacactggctctgagtcatgatggtggcataatgtagaggatgacagatggccacatacctgtcatatgccattgaagtgataaggaaactgtctaagtcagcaaaaaatatgaaaaaatatgtctgtgaaatgcatcccttgtaaaagacggctaggtgctgagtctgcatgttcatcagcatcttagggacagtgacagatgaaaaggagatgtcagtgagggccaagtggctaaggaagaagtacatgggggtgtgaaggtgagagtctagctggatgagcagcatgatgagcaggttccccagcaccgtggtcaggtacatgcccaggaacagggcgaagaacacggcctgctgctctggccggatggggaggcccaggaggaggaactcggacacgctgctctggttctcagggctcatgt

SEQ ID NO: 2078 - DNA, 598 bp, Homo sapiens
  MAP TO CHR5.1; EXPRESSED IN BONE MARROW, SIGNAL = 4.5; EXPRESSED IN PLACENTA, SIGNAL =   3; EXPRESSED IN FETAL LIVER, SIGNAL =   4; EXPRESSED IN LUNG, SIGNAL = 2.2; EXPRESSED IN HELA, SIGNAL = 4.1; EXPRESSED IN BRAIN, SIGNAL = 4.4; EXPRESSED IN ADULT LIVER, SIGNAL = 3.8; EXPRESSED IN HEART, SIGNAL = 1.9; SWISSPROT HIT: O60806, EVALUE 7.70e-02; NT HIT: gi16160471, EVALUE 1.00e-103; EST_HUMAN HIT: T80528.1, EVALUE 2.00e-66
gggatggagagaggagaaggaagactaggaaggagacctggtgacagttaagtctccacgtttgtgatcaagggtgacaatttgggcttggaggacaaaaatcaaagatcagaggtcagaggtcagaggtcagaagtggagatgagaggaggggtcagagatctggatctgtggtctggaattggaatctcttcatctctgcctcctggggctgctcttcctccatgaccctggctcctggagaggaggctggtggggaaaggccatgacgatgcggggccgaggcctccctggaggtggtgctcaggcctagtacttccctagtgatgaggatgagctgaggaaatccctgtctgagctggtggatgacaagttcgggacaggcacgaagaaggtgacgcgaatcctggatggtggcaaccccttcctggatgtcccacaggcgctcagtgccaccacctacaagcacggcgtcctgacccggaagactcacgctgacatggatggcaagaggagtgggtgtcaggctgggagaggggcatgggagggaggctggcacagaggggggcgccacgggccactctttggggacgaacat

SEQ ID NO: 2079 - DNA, 519 bp, Homo sapiens
  MAP TO CHR6.1; EXPRESSED IN ADULT LIVER, SIGNAL = 1.6; EXPRESSED IN BONE MARROW, SIGNAL = 1.8; EXPRESSED IN PLACENTA, SIGNAL = 1.4; EXPRESSED IN FETAL LIVER, SIGNAL = 1.5; EXPRESSED IN LUNG, SIGNAL = 0.95; EXPRESSED IN BRAIN, SIGNAL = 1.7; EXPRESSED IN HEART, SIGNAL = 1.7; SWISSPROT HIT: O15056, EVALUE 1.00e-11; NT HIT: gi14747871, EVALUE 8.00e-43; EST_HUMAN HIT: BF086627.1, EVALUE 1.00e-42
tgccaaggcaaaaatagagggctctaaggaaggttacattccagagcacactgacttctattcatacagggggtggcggaaggctgttcctgggattttcagggtgacgataaggttgtgccctagaagtgtgaattcccggagaccctgggaggccccaacccccagcagaccccctcctcagaggctggtcgacagccagcatgcccgcccagtacctggcgagaggtcagggcgcattgccggatgggggagcagaggacgccggagtccaccgtccgcccttcattctggctggtgtcgggtcacaggtggccggatcccgttacccagcccaggacgttcggtttcattgaagaatacctttccctttctgtttccttgtgccgcagatgatttacatggacgatggagtgtcatcttttgtccagatcagaggctccgttccgctgttctgggaacagccagggcttcaggtaggtcatgaaaaaacttaaatgtccccttgtgatgttgtcc

SEQ ID NO: 2080 - DNA, 545 bp, Homo sapiens
  MAP TO CHR3.1; EXPRESSED IN BRAIN, SIGNAL = 0.7; EXPRESSED IN BONE MARROW, SIGNAL = 0.57; EXPRESSED IN HEART, SIGNAL = 1.7; EXPRESSED IN ADULT LIVER, SIGNAL = 3.2; EXPRESSED IN HELA, SIGNAL =   1; EXPRESSED IN LUNG, SIGNAL = 5.9; SWISSPROT HIT: P38567, EVALUE 2.00e-09; NT HIT: gi15022800, EVALUE 0.00e+00; EST_HUMAN HIT: BG769235.1, EVALUE 0.00e+00
ggacacagtttccatctgggcctgtgggctgaggcagctgaccctgacctgtggtccttgtcttctgcctccaggagacctgccagtacctcaaagattacctgacacggctgctggtcccctacgtggtcaatgtgtcctgggccacccaatattgcagccgggcccagtgccatggccatgggcgctgtgtgcgccgcaaccccagtgccagtaccttcctgcatctcagcaccaacagtttccgcctagtgcctggccatgcacctggtgaaccccagctgcgacctgtgggggagctcagttgggccgacattgaccacctgcagacacacttccgctgccagtgctacttgggctggagtggtgagcaatgccagtgggaccataggcaggcagctggaggtgccagcgaggcctgggctgggtcccacctcaccagtctgctggctctggcagccctggcctttacctggaccttgtaggggtctcctgcctagctgcctagcaagctggcctctaccacaagggctctcttaggcatg

SEQ ID NO: 2081 - DNA, 563 bp, Homo sapiens
  MAP TO AC015913.4; EXPRESSED IN FETAL LIVER, SIGNAL = 0.85; EXPRESSED IN HELA, SIGNAL = 0.82; EXPRESSED IN BRAIN, SIGNAL =   1; EXPRESSED IN HEART, SIGNAL = 1.7; EXPRESSED IN BONE MARROW, SIGNAL = 0.94; EXPRESSED IN ADULT LIVER, SIGNAL = 1.1; EXPRESSED IN LUNG, SIGNAL = 1.5; NT HIT: gi14774502, EVALUE 9.00e-83; EST_HUMAN HIT: AL524142.1, EVALUE 5.00e-79; SWISSPROT HIT: O14939, EVALUE 7.00e-40
ctaatcccctttctctgggcccagtctaagagcagtcccaagcatctggctagaccagttcctggttcaaaactatgtcccgatccagggaggtggaaaagccttcctctctcctgtggtctctctttctcaactcccagcaaggccgtgggtgggctcaccactcagctggtgtctctcaccccagggaggcctcacctgtgggaggtatcgatccgcacgccgtgccgtgcctccgtgctccttttccccacttgcacctcaaagccagggtcaaagagctgaacaaatgagatggcacctgtctcgaggcacatgtacagcaggaaggagtccttcaccaccagccacctagagcagaagggctccgtgtgttcctctctgccctcaaaattttcttcctcacccccacccactgcccagctgcttggccatagcccgtacctcttggaccagcgataacaaacttggtctcggccacagcaggtgaggccaggaacacggtggccacctgagcgcttccggatcatcccctccctgtgggacaatcaggaagagaggcg

SEQ ID NO: 2082 - DNA, 546 bp, Homo sapiens
  MAP TO CHR22.1; EXPRESSED IN ADULT LIVER, SIGNAL =   1; EXPRESSED IN FETAL LIVER, SIGNAL = 0.77; EXPRESSED IN PLACENTA, SIGNAL = 1.6; EXPRESSED IN LUNG, SIGNAL = 0.64; EXPRESSED IN HELA, SIGNAL = 1.2; EXPRESSED IN BRAIN, SIGNAL = 0.97; EXPRESSED IN HEART, SIGNAL = 1.1; NT HIT: gi15318086, EVALUE 0.00e+00; EST_HUMAN HIT: AW071541.1, EVALUE 0.00e+00; SWISSPROT HIT: Q9Y6J0, EVALUE 4.00e-52
agggcttcagagctgaaatggccctgacgggcagtggcactgtgagcaggctgagaggctcctctagggctgggggctcccacttccacttgagtcatgagcatcagcatgacccttctgtctagggaggcagggctccccagcagtctcattcctgctgggctcagtgaacggggtctccccggaagccaaattcagggggcctgcttacccacaggagcgcctgtctccaacagaccaggactgtgcagtgggaagctggttgtagccacagaggtgtaggagaccacaggctcggcgacagccacagctgggttggtgctgacagtgcttggctggatcacgttaactggcgtcaccaccatggaggactcaagaggctggctggggtcctggtagtccgacaaatcaatccttttgccaaggctgggacgtgggggctcacaggtggtgagatgattgtacatggccagcaagctctctccgaggcacttccagctaaagggagagggccacaacacctgatcaccaccctgtcagaggaat

SEQ ID NO: 2083 - DNA, 517 bp, Homo sapiens
  MAP TO CHR2.1; EXPRESSED IN ADULT LIVER, SIGNAL = 1.3; EXPRESSED IN FETAL LIVER, SIGNAL = 1.1; EXPRESSED IN LUNG, SIGNAL = 0.71; EXPRESSED IN HELA, SIGNAL = 1.3; EXPRESSED IN BRAIN, SIGNAL = 1.3; EXPRESSED IN BONE MARROW, SIGNAL = 1.2; NT HIT: AF072550.1, EVALUE 1.90e+00; EST_HUMAN HIT: BG682373.1, EVALUE 3.00e-52; SWISSPROT HIT: P74168, EVALUE 1.40e-01
tgagctcgtgtcagaagtgctgtctacaaggatagtgggagcagaagcagaggtgggggtggaaggaccagaccccaaggaagatgccagcagagactgggctactgcccacacttacctgtgctatatcaagcaggaaaagctgcaggtaaaaggctgtggcgctggaggctatctggttggggaccccaccaatgccatagcacacctttgtacagaatgagaggcgaccggctctgctgtcctggaggagacacaggaactaagcccttctcccaacagacacaaaacaggtccccacaccccatgacttcagtaaacatcctgagtctctgtgatgtcttcagggcttttccagcaacctctcagccccattttgcccccatgtcatcctaagaggaagtgagacgaagagaaaaaagatcctaaaccctgacctctaaacatttccaggggggaagttcttctggacatcttaccctgggcttcctgctgaagccgccatcatttactgagt

SEQ ID NO: 2084 - DNA, 580 bp, Homo sapiens
  MAP TO CHR5.1; EXPRESSED IN HELA, SIGNAL = 1.8; EXPRESSED IN BRAIN, SIGNAL = 0.92; EXPRESSED IN LUNG, SIGNAL = 1.6; EXPRESSED IN HEART, SIGNAL = 1.1; EXPRESSED IN BONE MARROW, SIGNAL = 0.98; EXPRESSED IN PLACENTA, SIGNAL = 1.1; SWISSPROT HIT: Q15695, EVALUE 1.00e-103; NT HIT: gi14732709, EVALUE 0.00e+00; EST_HUMAN HIT: AA669459.1, EVALUE 0.00e+00
cctggagtacagcgaggaagaaacctaccaacagttcctagatttctatgaggatgtgttgcccgagttcaagaacgtggggaaagtgattcagttcaaggtcagctgcaatttggaacctcacctgaggggcaatgtatatgttcagtaccagtcggaagaagaatgccaagcagccctttctctgtttaacggacgatggtatgcaggacgacagctgcaatgtgaattctgcccagtgacccggtggaaaatggcgatttgtggtttatttgaaatacaacaatgtccaagaggaaaacactgcaactttcttcatgtgttcagaaatcccaacaatgaattctgggaagctaatagagacatctacttgtcttcagatcagactggctcctcctttggcaagaactccgagaggagggagaagatgggccaccacgaccactactacagcaggcagcggggaaggagaaaccctagtccagaccacacctacaaaagaaatggggaatccgagagaaaaaagagtagtcatagggggaagaaatctcacaaacgcacatcaaagagtcgggagagg

SEQ ID NO: 2085 - DNA, 546 bp, Homo sapiens
  MAP TO CHR7.1; EXPRESSED IN BONE MARROW, SIGNAL = 1.1; EXPRESSED IN HEART, SIGNAL = 0.96; EXPRESSED IN ADULT LIVER, SIGNAL = 1.2; EXPRESSED IN FETAL LIVER, SIGNAL = 1.1; EXPRESSED IN LUNG, SIGNAL = 1.2; EXPRESSED IN HELA, SIGNAL =   1; EXPRESSED IN BRAIN, SIGNAL = 0.96; SWISSPROT HIT: P10533, EVALUE 3.00e-29; EST_HUMAN HIT: BI039024.1, EVALUE 3.00e-96; NT HIT: gi4757867, EVALUE 2.00e-96
ccagccattagttagcatccttatgttcctggacagtaatttaaaatgcaatccaaaagaatagcagccaaaacctttaaaacatcctcaatggtcttcaaaaataatttacaagacatttaacgaatggaacttactccatgccctgtgcagtctgtcgtgcaatatctataagtttgatcatctcaaatttggtctcaatgatatggagatggtgatacaagctggagccctcacaccactgggtaacaatagccagttgtggctttgtggaatagcccatgaagagtaggatattcacatgtcgtgttttcctgtacaaagaaatgtgacagtaaacattaaatgtcgacaaactttagcaattcttacaaaagagaaccaaagtagtctgtcggtaaaatgttgtcagaaaaagcttttttttttttaaaaaaggcaacaaaaggatacatttagaagagactggcaattgccaagtctaacctcctactttatgcagagatatctttttaaatatatctgacaggcaactagaggttgctt

SEQ ID NO: 2086 - DNA, 504 bp, Homo sapiens
  MAP TO CHR12.1; EXPRESSED IN PLACENTA, SIGNAL = 1.7; EXPRESSED IN FETAL LIVER, SIGNAL = 1.2; EXPRESSED IN BRAIN, SIGNAL = 1.1; EXPRESSED IN ADULT LIVER, SIGNAL = 0.45; EXPRESSED IN LUNG, SIGNAL = 1.8; EXPRESSED IN HELA, SIGNAL = 1.5; EXPRESSED IN HEART, SIGNAL = 1.5; EXPRESSED IN BONE MARROW, SIGNAL = 1.2; SWISSPROT HIT: Q9Y6Q5, EVALUE 1.00e-25; EST_HUMAN HIT: AU099332.1, EVALUE 8.00e-84; NT HIT: AF020797.2, EVALUE 5.00e-84
agtacaccagggaggcattggcattcttcgatgtggtggccaccactggggcagcaaggttaaggaaaaggtgccatttatggagaagtaaatggaatacagaccccgaacctccaccctgtcccttgccaccaccctcatctctacctgcccctgccccccagcctaagccacagagatgtgcggtgcaactcctgtcctcagcccaccctctcttggcctgagctgccaccatcgccgacagcccccacacccacctccagggacaccacgtggggtggatacagtagaggttgctgtgtttgatccataggaagtggacctggccgtggctcagcagcggggccagggcgccttcctcctcccgctgtaccagcaaaggcatgaagtgctcaatcttgctcatggccacatcgcccttgtagttgcggctgatcaatggctgagggtggaaggaaaggacctggtcaccaccagcatccaagaacctaccacgctgaggag

SEQ ID NO: 2087 - DNA, 555 bp, Homo sapiens
  MAP TO CHR14.1; EXPRESSED IN PLACENTA, SIGNAL = 1.3; EXPRESSED IN FETAL LIVER, SIGNAL = 1.1; EXPRESSED IN HELA, SIGNAL = 1.1; EXPRESSED IN BRAIN, SIGNAL = 1.2; EXPRESSED IN BONE MARROW, SIGNAL = 0.98; NT HIT: M97710.1, EVALUE 1.00e-119; SWISSPROT HIT: P01737, EVALUE 5.00e-17; EST_HUMAN HIT: BI821699.1, EVALUE 1.00e-116
aactgcacgtacacagccacaggatacccttcccttttctggtatgtccaatatcctggagaaggtctacagctcctcctgaaagccacgaaggctgatgacaagggaagcaacaaaggttttgaagccacataccgtaaagaaaccacttctttccacttggagaaaggctcagttcaagtgtcagactcagcggtgtacttctgtgctctgagtgacacagtgacagggactgcagggggagctgagcacaaactctgagcagcacggggggcccggctgctgagtgtcagccactgtgatccactctggttctagcacagtctgtggttgtttgtgcctcagtttctctgattgatgcagtaatcatacacatggccagaggagaaaaacaagaaatgaacatccccaaacccagctcttggttagtgaaattaaaaacagacattgacaccaaatagttcctcatccagtgccaaagtaatttcaaggttaaaccacagaaacaatgaagctgtctctgtgatcatccttgcagacaaagttcaaccccca

SEQ ID NO: 2088 - DNA, 529 bp, Homo sapiens
  MAP TO CHR7.1; EXPRESSED IN LUNG, SIGNAL = 0.78; EXPRESSED IN HELA, SIGNAL = 2.9; EXPRESSED IN BRAIN, SIGNAL = 2.3; EXPRESSED IN ADULT LIVER, SIGNAL = 2.3; EXPRESSED IN BONE MARROW, SIGNAL = 1.9; EXPRESSED IN PLACENTA, SIGNAL = 1.3; EXPRESSED IN FETAL LIVER, SIGNAL = 1.7; EST_HUMAN HIT: Z41798.1, EVALUE 4.70e-02; SWISSPROT HIT: P42124, EVALUE 4.90e+00
ctaatctggctccatcccagcacctggctctcttgcctttgcgtgaggacgggccaagaatgaactcagtgggagaggatatgcagggagggctggagccaggggcagaaacaaccctccttccagaggcaacgggctccacagctgtcccaggcttcagagccctgcagtgccagtcatgaggctggctctgccatgtctctccacactcctggcaagggatctttttgttgttattcccccttcttcccttctgattccagacccagtgtttgcttgtcttgcagccaaagataagctccaggcattcaggaggccacattttagacacccaaatagagcattgactaagggaaaggaaaaatttgtcttagaaattgctttcccgtttgctttctccttcctagttcattttgattaggcaacactgtgtgtatggattcaatgaaatctcagggtgaaaatatcataaaatgcattgagactaacctcatgtaatccttgaaccccattcaccccattccaaatc

SEQ ID NO: 2089 - DNA, 593 bp, Homo sapiens
  MAP TO CHR7.1; EXPRESSED IN ADULT LIVER, SIGNAL = 0.39; EXPRESSED IN FETAL LIVER, SIGNAL = 0.76; EXPRESSED IN HELA, SIGNAL = 1.3; EXPRESSED IN BRAIN, SIGNAL = 0.73; EXPRESSED IN LUNG, SIGNAL = 1.2; EXPRESSED IN HEART, SIGNAL = 0.96; EXPRESSED IN BONE MARROW, SIGNAL = 0.63; NT HIT: D30612.1, EVALUE 1.00e-102; EST_HUMAN HIT: BG142182.1, EVALUE 0.00e+00; SWISSPROT HIT: Q9UDV7, EVALUE 6.00e-36
tggaagtgacattgaccctgtgtctttaatccatcagcacaggagaaaacgacgctccacacctttaacttcttccacacttccttcacaagcaacagagaaaagctcctattttcagaccaccgagatttcactctggacggtggtggccgctattcaggctgtggagaagaagatggagtcccaggctgcccggctacagagcctggaggggcgcacggggacagccgagaagaagctggctgactgcgagaagatggccgtggagttcgggaaccagctggagggcaagtgggccgtgctggggaccctgctgcaggagtatgggctactgcagaggcggctggagaacgtggagaacctgctgcgcaacaggaacttctggatcctgcggctgcccccgggcagcaagggggaggcccccaaggtagtctcattgaggattaaaagttagaagagaagggggagccagccctttaatatgtaagcacctcagttgctggcttttctgtcatagctgtgagtagaagcactcatggtgtgccattggtgattccaggtgtccaggtcactggagaatgatggcgtctgtt

SEQ ID NO: 2090 - DNA, 533 bp, Homo sapiens
  MAP TO CHR14.1; EXPRESSED IN FETAL LIVER, SIGNAL = 5.7; EXPRESSED IN LUNG, SIGNAL = 2.7; EXPRESSED IN HELA, SIGNAL = 7.7; EXPRESSED IN BRAIN, SIGNAL = 6.3; EXPRESSED IN HEART, SIGNAL = 3.4; EXPRESSED IN BONE MARROW, SIGNAL = 6.5; EXPRESSED IN ADULT LIVER, SIGNAL = 5.8; NT HIT: U32530.1, EVALUE 0.00e+00; EST_HUMAN HIT: BI821699.1, EVALUE 0.00e+00; SWISSPROT HIT: P06322, EVALUE 3.00e-24
ctgcttggttagtgagatgccttttaaaatttggtctctgtcttctatcaagccaaaaaaatctttaaccataatttgacctaagagcattatgctcaaggctaaacagatctctctctctctctctctctctttttttttttccctaggaagaacccgtggaaattcagtgacccagatggaagggccagtgactctctcagaagaggccttcctgactataaactgcacgtacacagccacaggatacccttcccttttctggtatgtccaatatcctggagaaggtctacagctcctcctgaaagccacgaaggctgatgacaagggaagcaacaaaggttttgaagccacataccgtaaagaaaccacttctttccacttggagaaaggctcagttcaagtgtcagactcagcggtgtacttctgtgctctgagtgacacagtgacagggactgcagggggagctgagcacaaactctgagcagcacggggggcccggctgctgagtgtcagccactgtgatccactct

SEQ ID NO: 2091 - DNA, 596 bp, Homo sapiens
  MAP TO CHR14.1; EXPRESSED IN HELA, SIGNAL = 0.44; EXPRESSED IN BRAIN, SIGNAL = 0.81; EXPRESSED IN BONE MARROW, SIGNAL = 0.8; EXPRESSED IN HEART, SIGNAL = 0.42; EXPRESSED IN FETAL LIVER, SIGNAL = 0.69; SWISSPROT HIT: P23588, EVALUE 8.80e-01; NT HIT: gi16190815, EVALUE 0.00e+00; EST_HUMAN HIT: AW271668.1, EVALUE 1.40e-02
ccgactctgccacttaaagctgtttgtgacctcaagcaagttacttagcctgtccaagtcttgatttttgaactgatacaatgagagataatgtggagatcacatgaaaagctcccgtcacaatgctggcatacagtagtaatcaagaaatgttaattctagacgtcaattcttcctacatgacacatgaattttccctaaagaaaactgatgatgacaaaacagacccctacaatgatcaccacaccaagtcacatccataaggctcttgttaccttggctgaagctggccccttccagttcaagtactgctctagttctgtgcccttagcccgggccctggaggagtcaaacactttcctcttggaaccccgcatcctgctgcagatgttggagtgtctctccagcctgaacgagaggaatttgcgcccacagtggctgcactcacccagctgtggctcttcaatggagccgctggaacctgaggagtctggtgccatggacaggctggaatttctggcggatccctgcaaagcaccgactggtgtttctgaaggcggggagaatttctccaccgatggctctgagactgggtc

SEQ ID NO: 2092 - DNA, 532 bp, Homo sapiens
  MAP TO CHRX.1; EXPRESSED IN PLACENTA, SIGNAL = 3.5; EXPRESSED IN FETAL LIVER, SIGNAL = 5.1; EXPRESSED IN HELA, SIGNAL = 3.5; EXPRESSED IN BRAIN, SIGNAL = 5.4; EXPRESSED IN LUNG, SIGNAL = 3.4; EXPRESSED IN HEART, SIGNAL =   3; EXPRESSED IN ADULT LIVER, SIGNAL = 6.9; EXPRESSED IN BONE MARROW, SIGNAL = 4.8; SWISSPROT HIT: P51793, EVALUE 7.00e-36; NT HIT: gi11641404, EVALUE 1.00e-102; EST_HUMAN HIT: AI087050.1, EVALUE 1.00e-103
acatgaaacagtggggaagggttttgcaagtgaagtttgagtggtagcattagagctggaaaaagcccgtcatctagtgttaagccacgaacttcagagcaggcacttgaaggtgaaatcacagacattcacaaatctcccagcagcattcccaagcacgcatggaacggcaggggtccccagccaggaccctgcccaaatacccacctctgactgattcaccagcagctccgaccatttctgccacaggggacacttgtctctgtcctcaaaagtggtctcgttagaagtccagcaacactgctcatggctataccagaaggcagacaggcagaccccctccttcaggtccgtcatccagtccacggcgagatcgatgaccccagccaaggtgcctggaagaagtaacacgagccactaagaggaatcgccccatgatgcgacaagaatgagaccaacacggcggccagacaggggcacatcagcaatgatggcccagattccagagcaggcaataaacttgcaatggggc

SEQ ID NO: 2093 - DNA, 569 bp, Homo sapiens
  MAP TO CHR9.1; EXPRESSED IN BRAIN, SIGNAL = 0.52; EXPRESSED IN HEART, SIGNAL = 0.67; EXPRESSED IN LUNG, SIGNAL = 0.61; SWISSPROT HIT: Q24372, EVALUE 8.00e-03; EST_HUMAN HIT: AW236532.1, EVALUE 8.00e-01
acagagctatcaggcttgggggacagacatcagacaggtgaatagcaaaatcattactgtcacaagtgctaccaaagaacagtctgggtgctgagggctccagagcaagcccttctggccagggttttggggggcttcccaggaaggtcaggtaggaggggggcccaggctggggggtctgcacagacaaaggccccgtggtaggcggggcttgcagggtttgaacagtttcccacccctcacgccttctcacccccagcccctccttccgtgcttggagccggggccgctcaggaggtgctaggattggccggtgcagacgtggagctgcagtgttggacctcaggggtccccacgccccaggtggagtggaccaaggacaggcagtgagtgcccccctccccgaggatggcgtgtggtggtgcccagactcagcctgctggatgtgggggttggggaaggttgaactcttcttggggagctgacaggcatggcatgtgccacccagggcccagactgagggctgtaggggcgcctcccacccagcaggagattagccagggagaccc

SEQ ID NO: 2094 - DNA, 530 bp, Homo sapiens
  MAP TO CHR19.1; EXPRESSED IN ADULT LIVER, SIGNAL = 4.7; EXPRESSED IN BONE MARROW, SIGNAL = 3.7; EXPRESSED IN PLACENTA, SIGNAL = 5.2; EXPRESSED IN FETAL LIVER, SIGNAL = 3.8; EXPRESSED IN LUNG, SIGNAL = 3.3; EXPRESSED IN HEART, SIGNAL = 3.5; EXPRESSED IN BRAIN, SIGNAL = 4.9; EXPRESSED IN HELA, SIGNAL = 6.9; SWISSPROT HIT: Q9TV36, EVALUE 9.00e-23; NT HIT: gi14787031, EVALUE 0.00e+00; EST_HUMAN HIT: BI913992.1, EVALUE 0.00e+00
gacagaatgttggagggtggaaagccaaagtgacagaggtcagggaggcagaggggaacaagtgaccccgggccccctgccctgtgcagatgtggatgaatgcacccagagcccaggcctgtgtggccgaggggcctgcaagaacctgcctggctctttccgctgtgtttgcccggctggcttccggggctcggcgtgtgaagaggatgtggatgagtgtgcccaggagccgccgccctgtgggcccggccgctgtgacaacacggcaggctcctttcactgtgcctgccctgctggcttccgctcccgagggcccggggccccctgccaaggtgagggtgctgagcccagccctactccatcactgtttgctgtggagactggagagagattattgaggggcagagaggcagagtgatggggctcagggatggagaacaggggctgagggatggggacctcactccagagtcttctctcctttcaacaaaataaggcagtcctccccacccctcctccctttttgaaag

SEQ ID NO: 2095 - DNA, 561 bp, Homo sapiens
  MAP TO CHR6.1; EXPRESSED IN LUNG, SIGNAL = 0.89; EXPRESSED IN HELA, SIGNAL = 0.95; EXPRESSED IN BRAIN, SIGNAL = 0.78; EXPRESSED IN BONE MARROW, SIGNAL = 0.78; EXPRESSED IN HEART, SIGNAL = 0.81; EXPRESSED IN ADULT LIVER, SIGNAL = 0.7; EXPRESSED IN FETAL LIVER, SIGNAL = 0.97; SWISSPROT HIT: P52526, EVALUE 2.40e+00; NT HIT: AP003135.2, EVALUE 8.30e+00
actgtttctgccaccgtttccctgctgttgtattgctagaagaggaaggtgatattttggaagacatttgatccatctaatggaagaggaagaaaacagagagatgagatcaggggaatttctgaaaaagaaattctgaaacacaagggacaaaagagtgagtcatcgagtcagcaacaatcatgggagaccatctggctcacggcttcccaattttgtttttagggtttttaaaaatgtctaaatggcttgacaattacctgctctgctgcattcaggagggaggaagggttatttacttatttacctctgacaatgaacatttgtatagagattgaggtggcacattatattttgggctaggtctctgaaatgaacctttgaaaacaatatatctggttcgtaatgaaaaggaaaaataaagttaaaataaggtggcaagccttggttcaccttttttcctggctggcagatctgcctcccctctgttgtggctgaaaattgcagatgctcaattcccagactccttttctgccaggagcaccctgtgtccgagaagtt

SEQ ID NO: 2096 - DNA, 528 bp, Homo sapiens
  MAP TO CHR7.1; EXPRESSED IN FETAL LIVER, SIGNAL = 0.99; EXPRESSED IN LUNG, SIGNAL = 1.4; EXPRESSED IN HELA, SIGNAL = 0.83; EXPRESSED IN BRAIN, SIGNAL = 0.84; EXPRESSED IN HEART, SIGNAL = 1.3; EXPRESSED IN BONE MARROW, SIGNAL = 0.71; SWISSPROT HIT: Q15329, EVALUE 5.70e-01; NT HIT: U15731.2, EVALUE 2.00e+00; EST_HUMAN HIT: BG104352.1, EVALUE 1.00e-39
gcttctgccaagagctgtgtgtatgtgacctgacagtgtccaactgggcccacaggccaggcccaggcccagctccccacacaagcaaggccagagggtttcccattggccactgcctggctgggctgtcccaggcgagcggaggatggggagtgctggggagggaggaagagaggctgggagaaaggcgcccttcctgcggtgcctgctggtaattggctctccggaaccagccggggacacgagggcctgctgggtcaggaagtggtggacaatgccaccctttcaggggagacacggcttggtcttaggtcctgtgtgactccagggaagtccagagaacagcctgttctcagatgatgttccctaacccagagccccctccagaggtgagacacccagccccgcactgcccgcccttggtgctgggaggggcccccaggcattggcctgtggcggggcgggaacagttcagaaccaaatgatgtccttcagagagcctggggccgggaggggaagggagtagat

SEQ ID NO: 2097 - DNA, 598 bp, Homo sapiens
  MAP TO CHR7.1; EXPRESSED IN BONE MARROW, SIGNAL = 0.98; EXPRESSED IN HELA, SIGNAL = 0.97; EXPRESSED IN LUNG, SIGNAL = 1.8; EXPRESSED IN BRAIN, SIGNAL = 1.1; EXPRESSED IN HEART, SIGNAL = 1.9; NT HIT: gi14739838, EVALUE 0.00e+00; EST_HUMAN HIT: BE898958.1, EVALUE 0.00e+00; SWISSPROT HIT: Q9CPH8, EVALUE 3.00e-01
tctcctcaatcctccactgccccaccagcccttgataaccaccattctattctctccttctatgagttcaacttaagattccacagtgagattatgcagcatttgtctttctaagcctggcttattttacttaacatgtcctccaggttgtcacagatgaaaggatttccttgtttttaagcattaaatactgttccatcaataccatttttaatatatttaaattatatccattttggaagtagtaacagcatgctttgatggtggctcagtagaagacattgtatcagaaatccacaaattaagcaactgtttcttatgaagtgcatcattttcctggttggcctgttcatccagtgactttcttatacaattctttaattcttcgattccttctccagtaactgcagatatggggatgatatgttggaactctacagtcctctctggaatcatgtttttttcaaataaatgcagaaaatctaaaagaaagagcacaaacaaagctgatttccattgttttcgaaagttagttaaaaccatgttaatggtttgatttgtgaagcagggaaccaacaccagcatttttcatgccttt

SEQ ID NO: 2098 - DNA, 564 bp, Homo sapiens
  MAP TO AL159162.5; EXPRESSED IN PLACENTA, SIGNAL =  24; EXPRESSED IN LUNG, SIGNAL =  11; EXPRESSED IN BRAIN, SIGNAL =  15; EXPRESSED IN HEART, SIGNAL =  12; NT HIT: AF261085.1, EVALUE 0.00e+00; EST_HUMAN HIT: BG397363.1, EVALUE 0.00e+00; SWISSPROT HIT: P04406, EVALUE 3.00e-89
tcagggatgaccttcctcacagccttggcagcccagtagtggcagggatgatgttctggagagccctgtggctgtcacgccacagtttcctggagggtccattcacagtcttctgggtggcagtgatggcgtggactgtggtcatgagtccttccacgataccaaagttgtcagtgatgactttggccaggggcgctaggcagttggtggttcaggtggcattgctgatgatcttgaggctgttgtcgtacttctcatggttcacacccatcgtgaacatggggggatcagcagagggggcagagatgatgacccttttggctccccactgcaagtgagccccagcattctccatggtggtgaagatgccagtggactccatgacatactcagtgccagcatcaccccacttgattttggagggatctggctcctggaagatagtgatgggatttccattgatgacaagcttcccgttctcagccttgacggtgccatggaatttaccatgggtgggatcatactggaacatgtagaccatgtagctgaggtcaatgaatgggt

SEQ ID NO: 2099 - DNA, 501 bp, Homo sapiens
  MAP TO CHRX.1; EXPRESSED IN FETAL LIVER, SIGNAL = 0.41; EXPRESSED IN LUNG, SIGNAL = 0.79; EXPRESSED IN BRAIN, SIGNAL = 0.5; NT HIT: gi6912503, EVALUE 1.00e-87; EST_HUMAN HIT: BG182104.1, EVALUE 2.00e-87; SWISSPROT HIT: Q02173, EVALUE 9.00e-03
tacccagtaccactgctccccatgcactgctgtgagtgcctgctcaggctgtgtactcccctggcatggagaagaaaattgatctttccttttgaaatcaccacaacgtactgtttgtttttagtcgggtaggttcactgttccggctgccggcttggtttatggctttaacgatgaagatgtagcgagtcccgctctggagtccatgcactgtgtaatggttctgtttaatgttgggaacaatcatccagctgtctactgaattatacaggcctgtaacatggggaaagacaaggacattaaccagcaggtaagagagacagaatgaaaaacacactgaaaattcatcataagccaccccctcaaaagtgaattcattttgttttcttttgagtcttagaagatgtaatgagatgaaccagggcttatgattccactatttcattactcccatagaactaggcttaggccaggctccttgcttgtggcaattgaatggaa

SEQ ID NO: 2100 - DNA, 504 bp, Homo sapiens
  MAP TO CHR17.1; EXPRESSED IN BONE MARROW, SIGNAL = 2.9; EXPRESSED IN PLACENTA, SIGNAL =  19; EXPRESSED IN FETAL LIVER, SIGNAL =   5; EXPRESSED IN LUNG, SIGNAL = 3.8; EXPRESSED IN BRAIN, SIGNAL = 0.89; EXPRESSED IN HEART, SIGNAL = 0.66; SWISSPROT HIT: Q62315, EVALUE 5.40e-01; NT HIT: X14945.1, EVALUE 0.00e+00; EST_HUMAN HIT: AA573027.1, EVALUE 0.00e+00
gtttgcggcagatgtagacctagcagaggtgtgcgaggaggccgttaaggctatactttcagggatcatttctatagtgtgttactagagaagtttctttgaacgtgtagagcaccgaaaaccccgaggaagagaggtagcgttttctcctgagcgtgaagccggctttctggcgttgcttggctgcaactgccgtcagccattgatgatcgttcttctctccgtattggggagtgagagggagagaacgcggtctgagtggtttttccttcttgatggctcaatgacagagactagctcgtaaactccgggccgtttccgggctgttcgctcctgcttggcaatgtcgcgagaaaggttttcgcctcctgtttcagcggtgacggctcttgggttttctcggggtggctttttaattttagtcttggcgcgaggcgggggatgctgtgtggcacctcctattgtctctttttgcgttttctcccattctcgctccctcttttg

SEQ ID NO: 2101 - DNA, 507 bp, Homo sapiens
  MAP TO CHR17.1; EXPRESSED IN ADULT LIVER, SIGNAL = 2.2; EXPRESSED IN PLACENTA, SIGNAL = 2.7; EXPRESSED IN FETAL LIVER, SIGNAL = 2.8; EXPRESSED IN LUNG, SIGNAL = 2.7; EXPRESSED IN HELA, SIGNAL = 5.1; EXPRESSED IN BRAIN, SIGNAL = 2.6; EXPRESSED IN HEART, SIGNAL = 2.2; SWISSPROT HIT: Q29550, EVALUE 4.10e-01; NT HIT: gi14774048, EVALUE 0.00e+00; EST_HUMAN HIT: AU124981.1, EVALUE 0.00e+00
agacagtgggaaggtcatggacacctttgagtcatgaacagacctaaccatttttcttttcccctgactacctcaggaagctgcaagtggattcgaactcctgcaatcatctactctgttcacaccatgacaaccttaattccgatactctccacatttctgtttgaggatttctccaaagccagtggtttcaagggacaaagacctgagactttgcatgaacggttaacccttgtgtctgtctatgccccctacttactcatcccattcatacttttaattttcatgttgcggagcccctactacaagtatgaagagaaaagaaaaaaaaaatgaaggaaacaaccactggcccagggtagagatgcctacagggtggttgcttgttggatacaatacaaggaacactgctcagaacccacgtcttcagcagcatttgaaacactggcagcaatgcacaagagcaagatggtgtcaggaaccatgtcaaaccctcaccttcttcca

SEQ ID NO: 2102 - DNA, 524 bp, Homo sapiens
  MAP TO CHR7.1; EXPRESSED IN FETAL LIVER, SIGNAL = 3.4; EXPRESSED IN HELA, SIGNAL = 1.7; EXPRESSED IN BRAIN, SIGNAL = 3.9; EXPRESSED IN LUNG, SIGNAL = 4.2; EXPRESSED IN PLACENTA, SIGNAL = 2.8; EXPRESSED IN HEART, SIGNAL =   4; EXPRESSED IN ADULT LIVER, SIGNAL =   2; SWISSPROT HIT: O60628, EVALUE 1.10e-01; NT HIT: gi14744152, EVALUE 4.00e-88; EST_HUMAN HIT: BI759387.1, EVALUE 5.00e-88
caagaaggaattgggcactcagcagtgagtgatggccttgttttccctggctcgatcttcccagtgcggccagcactatccctttccctacccctcagccatgtcagtgcctgacaccctcgctgatccccaggtgccttccccaaaacaaaggagtctttacagagtgtgtgggaccaacaagtctcacagggtaagttacctgggggatggccaggcctagagccacaccaccaagtaagaataggttgctgtgtatccagttgaccaacttgtcaatacagccattggtgtagatgactttgctagcttccaagtagtcaaaggcctgcataccttggccacacatagtgttgatcactgcctggggaaagagttgaaaagccaattgggactgtaattccaataactttttgtttggggccttagctgatgggcttcccacccttcccaaactcctaaattgtcagagaatatatgtggaggatattgggttggaagttgccaaatgcagacttcccttc

SEQ ID NO: 2103 - DNA, 566 bp, Homo sapiens
  MAP TO CHR5.1; EXPRESSED IN BRAIN, SIGNAL = 0.54; EXPRESSED IN HEART, SIGNAL = 0.58; EXPRESSED IN ADULT LIVER, SIGNAL = 0.82; EXPRESSED IN BONE MARROW, SIGNAL = 0.62; SWISSPROT HIT: P40480, EVALUE 2.00e-04; NT HIT: gi14727641, EVALUE 1.00e-105; EST_HUMAN HIT: BE839012.1, EVALUE 1.00e-103
tctttctgagcaataaggcatcttaaagccacataccagaagccagcaaatatttaaccaattccaggtgtccctcctgagatgcctccatcagaggtgtggagcagccaagttctatatcagcccctgccttaataagaaagtctgcaacttcagaaaatcctccacagcaagccaaagtaagagcagtttcttgagtttcttctgtctgggcatttatatttgctcctaggaaagtataaaaacagataaaattagttgcaagagacttataataaagatattaattttctgaattgtgataatcatctctgtcttctctgcttctgtggtttcctccagggtaatttatcatcaatgcaatatatatatatatatatatatatatatatatgcatatatatatatatgcatatatatatatatatatatatatatatatatatgctagctgtagtaaacttcaccagtactaacacaaaacatccaaagaaaactgatttttctaaaagaagtaaaactgctttaccttgtgctaagagtagtgccaccatttcttcatgtcc

SEQ ID NO: 2104 - DNA, 566 bp, Homo sapiens
  MAP TO CHR16.1; EXPRESSED IN PLACENTA, SIGNAL = 3.3; EXPRESSED IN LUNG, SIGNAL = 3.3; EXPRESSED IN FETAL LIVER, SIGNAL = 3.2; EXPRESSED IN HELA, SIGNAL = 3.2; EXPRESSED IN BRAIN, SIGNAL = 3.8; EXPRESSED IN HEART, SIGNAL = 3.5; EXPRESSED IN ADULT LIVER, SIGNAL = 3.5; EXPRESSED IN BONE MARROW, SIGNAL = 3.8; SWISSPROT HIT: P48029, EVALUE 1.00e-46; NT HIT: U41302.1, EVALUE 0.00e+00; EST_HUMAN HIT: BI044551.1, EVALUE 0.00e+00
gctggaggagaggagagaggctggggagtcagcccagtgttggggctcacacaagggggagtccaggggagtcaggagcaccacaaacaaggctccagaaggacagacggtgggagcactgccagcctgggtggggagataaaggggtggcaggggaggtggccaggaaagaatctacatggcaaggacttcccggccccaggcctgggctatgcctccatggtgatcgtcttctactgcaacacctactacatcatggtgctggcctggggcttctattacctggtcaagtcctttaccaccacgctgccctgggccacatgtggccacacctggaacactcccgactgtgtggagatcttccaccatgaagactgtgccagtgccagcctggccaacctcacttgtgaccagcttgctgaccgccagtcccctgtcatcgagttctgggagtgagtccagcacctctgggccaagcccatcccatcccccaggtctccctcatgttgcctggctccaggggaatggccctgagaggggaccagggtgtttcttggcagtccctc

SEQ ID NO: 2105 - DNA, 572 bp, Homo sapiens
  MAP TO CHR17.1; EXPRESSED IN BRAIN, SIGNAL = 0.42; EXPRESSED IN HEART, SIGNAL = 0.57; EXPRESSED IN ADULT LIVER, SIGNAL = 0.57; SWISSPROT HIT: P36024, EVALUE 8.30e-01; NT HIT: AB017483.1, EVALUE 2.00e-65; EST_HUMAN HIT: BF979875.1, EVALUE 1.00e-55
tcattctgtgagggaaagggaggtgagaagacacatgaagagctggtctcttcacagcccttgccaggaggtaggagagagtgcctgacccatgcttagcccacatgggaccaattgatatcacgccaattctttccccagggccaagccaggcaaggcacatttcagtgttgggagagctctgctagagttcctgacttctctcctgagtcagcctgggaagacaggtcagcccatagctgacatgtgaaatgtctgaccccaggaagggcaaaactagggcagtggttggaaaatccccaccacccagattcctggagagataatggctcccagtgggccagtagagctgccccagttcttcatcgccccacttctaggtccctccttcaccttgtagcgcaagcacaaggcctggttcagcttctctatgtctgcttcttttgccttctggacttcctgatgctgttcttcctgggcctgcagcctagcttgcagctcacaactgaaggaaggaagaatttagcaacattcctgtcctctcagggatcagttggacccttggcataaga

SEQ ID NO: 2106 - DNA, 550 bp, Homo sapiens
  MAP TO CHR12.1; EXPRESSED IN BONE MARROW, SIGNAL = 0.65; EXPRESSED IN BRAIN, SIGNAL = 0.6; EXPRESSED IN HEART, SIGNAL = 0.58; NT HIT: AF261690.1, EVALUE 0.00e+00; SWISSPROT HIT: Q05526, EVALUE 6.80e+00
agcgtcccacctaatgactgtaacaacgtcccctgaggagggccaatatggcgacggtctcctcttggcatagccctcttccctccctcatgatgggcagctccagtaacgcccattggctaactaggaggcggtgccaggcctacttcgtcccctcattggattgaataactgagggagccgccaattctcctctgccactccaagtttccgccctcagttaattcggcgtttaattggcttttagttcacgtcaatatgcgtcctttcctgtctcttttcagtctaactccaatcataacgttcctggctgcccgcctgatttctgattggttttaatcagcttcatcctctcctattcctgcctacttcttacctctccgcccactaggattttgcccaagcatatcccggattctggttggccgttgttctgtcattcctatcaaagctttgcctatccctacgtctcagggagcccgcctgccggttgactggtttccttccaagccaatcatctccagctcccgcccatcttcacttcctgcat

SEQ ID NO: 2107 - DNA, 518 bp, Homo sapiens
  MAP TO CHR1.1; EXPRESSED IN FETAL LIVER, SIGNAL =   4; EXPRESSED IN HELA, SIGNAL = 4.5; EXPRESSED IN LUNG, SIGNAL = 6.1; EXPRESSED IN BRAIN, SIGNAL =   4; EXPRESSED IN HEART, SIGNAL = 4.8; EXPRESSED IN BONE MARROW, SIGNAL =   4; EXPRESSED IN ADULT LIVER, SIGNAL = 0.68; EXPRESSED IN PLACENTA, SIGNAL = 5.1; EST_HUMAN HIT: AA446194.1, EVALUE 1.00e-11; NT HIT: gi14744979, EVALUE 0.00e+00; SWISSPROT HIT: Q9PLS6, EVALUE 1.90e-01
tcagctactgtgcagatggggcctgctttgcaggtgcagtccgccggggtgtctgtgccacaccataaggcacatgggcggccacagtgcccatctcctgagccccagccacatggaacatctggtcatcaaagaagatgtgtgggcggatcttctcaaggagagggcccttgggcgctccagcaaggaacaaggcttcatctgtctccaggccccagctgcgcagggtcttgagagcccgggccccggaactggctgcactgcgtgctgtcaccaagtaggtacgaattgggcactccagccgcaggcctttggagtagaacttcttctgcaacctacccagtgcctccagaaagccctttaaggggccctatgagaaggcaaggggaacattgttagctctaccacctcctaaatatttgccccctgctctccctaaagcactagtgtcttgtttggtgtggaaaacttcaggatccctaaatctttcagttagctctgcttatgcctgcttaggc

SEQ ID NO: 2108 - DNA, 509 bp, Homo sapiens
  MAP TO CHR5.1; EXPRESSED IN HELA, SIGNAL = 1.6; EXPRESSED IN BRAIN, SIGNAL = 1.4; EXPRESSED IN BONE MARROW, SIGNAL = 1.4; EXPRESSED IN ADULT LIVER, SIGNAL = 1.5; EXPRESSED IN PLACENTA, SIGNAL = 1.4; EXPRESSED IN FETAL LIVER, SIGNAL = 1.5; SWISSPROT HIT: P23570, EVALUE 2.00e-29; EST_HUMAN HIT: BG248798.1, EVALUE 9.00e-96; NT HIT: L05072.1, EVALUE 0.00e+00
ggctgcttaggaccacactcaccttcctcttggccttgctcttagcatctcggctggacttcgactttctttctgtggggcagacgggctgtcagccttggtgcaggctctccagccccagctgacctccttctaccctccctccctgagggcttcccaaggacccagagtccttggataccttttctctggttcttggtgagaggtggaagcatccggtacactcgcacagctgagctgcccttgttcctgctctggtctttcacctcctcgatatctggcagggagttcatggcacagcgaaagttggccttccacgtcttgggatctggctccttttcccctgctttgtatcggcctagagggcaggagaaaaaagaggatcgtcagggccatgggtagggatcctcagctgcccctggcctgaaggaggaaggcaaggtacccctgacctcttatgctaccagagagccacagtggtcaaaccagcaggtactcccggtgacact

SEQ ID NO: 2109 - DNA, 551 bp, Homo sapiens
  MAP TO CHR17.1; EXPRESSED IN HELA, SIGNAL = 0.86; EXPRESSED IN BRAIN, SIGNAL = 0.66; EXPRESSED IN BONE MARROW, SIGNAL = 0.72; EXPRESSED IN HEART, SIGNAL = 0.62; EXPRESSED IN ADULT LIVER, SIGNAL = 0.78; SWISSPROT HIT: P06909, EVALUE 1.80e+00; EST_HUMAN HIT: BG723889.1, EVALUE 1.00e-127; NT HIT: AF081118.2, EVALUE 1.30e-01
ggtgcgcttagcgttacttccggcgcgcggcgggcggaagtccgggttggggtcacctgaccggagagccggctagatatggcgtcctctttgcttgcgggcgagcgattggtgcgtgctttgggccccggcggggagctggagccagagcggctaccccgaaagctgcgggccgagcttgaggccgcgctggggaagaagcacaagggcggtgatagctccagtggcccccaacgcttggtttctttccgtctcatccgggatctgcaccagcatctgagagaaaggggtgagccccagtctccagtccggggtcccctccttgtgtccagatcgattccctcctgaggtcttttcccatcattccccttcttctacggagcactcatctagacaagtcaagagtcactccataaatcccagggccacccactttcttaactcccatgggaatttctcgtggatgacaaatttgcttgtgcagtttctgctcttttgagagccccctcttcacttccaggcacacctaggcccaattcacccttgagaaa

SEQ ID NO: 2110 - DNA, 531 bp, Homo sapiens
  MAP TO CHR19.1; EXPRESSED IN HELA, SIGNAL = 1.8; EXPRESSED IN BRAIN, SIGNAL = 1.3; EXPRESSED IN HEART, SIGNAL = 0.78; EXPRESSED IN BONE MARROW, SIGNAL = 1.6; EXPRESSED IN PLACENTA, SIGNAL = 1.9; EXPRESSED IN FETAL LIVER, SIGNAL = 1.3; EXPRESSED IN LUNG, SIGNAL = 1.1; SWISSPROT HIT: Q15139, EVALUE 1.00e-12; NT HIT: AF309082.1, EVALUE 0.00e+00; EST_HUMAN HIT: AW402065.1, EVALUE 0.00e+00
aacagagtttgaacccaggcctgctgagtccagaagctgcgttctcaaccccaccattgcccactttcctctttggcccttccattccccagaaccgtgccccacccatctagatctattctctcaaggacccgaggtgggaggacttactgtggggcgcgtggcctggggcgctgggtgcgtcctgaaggatgacgggcatcagggcctggcggatggctgtctcccagccccgggcggcctcagccccctgcccacttggcccacccggagtcccgccaggcatctcgcccacgaagtaggtggcattggcagtgacgatctcaaagcagtgtgggttggtgcccggcggcacaaggctgaagttctgggcggactccaccgtgaggatttctgacagcggaatttcctgcaggacgtggaaccagcacaggtgaggatgccaggcagaccttggaattctagtgcttacccagaaggatacacgggatccatgttgatagggatgggcctggtttgcacagtggtcag

SEQ ID NO: 2111 - DNA, 547 bp, Homo sapiens
  MAP TO CHR19.1; EXPRESSED IN PLACENTA, SIGNAL = 6.5; EXPRESSED IN FETAL LIVER, SIGNAL = 6.3; EXPRESSED IN LUNG, SIGNAL = 3.7; EXPRESSED IN HELA, SIGNAL =   7; EXPRESSED IN BRAIN, SIGNAL = 6.8; EXPRESSED IN HEART, SIGNAL = 3.6; EXPRESSED IN ADULT LIVER, SIGNAL = 8.1; EXPRESSED IN BONE MARROW, SIGNAL = 7.7; SWISSPROT HIT: Q05469, EVALUE 1.00e-61; NT HIT: gi11525931, EVALUE 0.00e+00; EST_HUMAN HIT: BG023944.1, EVALUE 0.00e+00
ctgaccctgagggacttgagcctgaggggaaactccgagacgtcgtcggacacccccgagatgtcgctgtcagctgagacacttagcccctccacaccctccgatgtcaacttcttattaccacctgaggatgcaggggaagaggctgaggccaaaaatgagctgagccccatggacagaggcctgggcgtccgtgccgccttccccgagggtttccacccccgacgctccagccagggtgccacacagatgcccctctactcctcacccatagtcaagaaccccttcatgtcgccgctgctggcacccgacagcatgctcaagagcctgccacctgtgcacatcgtggtgagcgacagagggggccggtacaggtgcatttagagaagagcagggcacccggggaggagggggaccgggcacgggtacacctgggaaaaagagctccggagtggggagaaagggacaggcgtgtccccaggggagaacaatgccccgaacgaacgggaggaggacaagagtcagggctgcctccgttttactttgc

SEQ ID NO: 2112 - DNA, 575 bp, Homo sapiens
  MAP TO CHR14.1; EXPRESSED IN BRAIN, SIGNAL = 0.62; EXPRESSED IN HEART, SIGNAL = 0.51; EXPRESSED IN ADULT LIVER, SIGNAL = 0.4; EXPRESSED IN BONE MARROW, SIGNAL = 0.71; SWISSPROT HIT: Q9QXJ1, EVALUE 2.20e-01; NT HIT: AF099810.1, EVALUE 8.60e+00; EST_HUMAN HIT: BF669034.1, EVALUE 9.00e-87
ttggggctgtgatttctaggggtgaggaaaaggagagagaaaaagtctgggcaaagagactatgtgagtggaagtgtaacctcagacttcttaatagtcatttttcaaagtctgaggcattgaggcttcagctctctcccacatccactcctcccagttcccctcccttcctcacaacggaagcttctctccccaacagctcataagagccgatcagggcatcctgtgctgggaagcagagtggtcagaatgcagaggcactgagcactccatccaggaataaaaatattatcccaggaggtaaggaacatgggccaagccaagtccctctcagctgcttccctgggagaagatttaaaggggataaatcaacaaacgaacgccaaacaaaccacagagaccattctaggggaaacggctgagccgagattgctccaggtgggaaagaaaggagtgcgtctcatgtgtgcttcaatcccctttctaatggcttctcatgcgcagaggctgaattcctccatcaagagagtgccagggtgcctccagcctctccaggatttggtcacccagtggac

SEQ ID NO: 2113 - DNA, 563 bp, Homo sapiens
  MAP TO CHR6.1; EXPRESSED IN PLACENTA, SIGNAL = 1.5; EXPRESSED IN FETAL LIVER, SIGNAL = 1.4; EXPRESSED IN LUNG, SIGNAL = 0.71; EXPRESSED IN HELA, SIGNAL = 1.7; EXPRESSED IN BRAIN, SIGNAL = 1.7; EXPRESSED IN ADULT LIVER, SIGNAL = 1.1; EXPRESSED IN BONE MARROW, SIGNAL = 1.7; EXPRESSED IN HEART, SIGNAL = 0.71; SWISSPROT HIT: P15765, EVALUE 9.20e+00; NT HIT: gi13652184, EVALUE 2.10e+00; EST_HUMAN HIT: AA814872.1, EVALUE 1.30e-02
aagtactgtcccaacgtgccctgggttatccagtctgtttctcgtaaactagctcctaaattatgccacattttttgaaaaaaataatatacacaggctatgtctgcaagtcaaactgatgagcccattctgaaggccaagttcagtaaaaataagtcaagccgaaagagaaaacttgactattgtaaaggttgaaccagatgtttgtatagagccagtccaatcatacggcataatttagaacttggcttatgtgaaacagatggccaaaggcctgtccttgcgtgctctgtgttctctgcttctattactaaatctgactaagttttatattttctgctttgttttgtttgggatcgttgtttgttgttgttgtttaactgacaatcattttagaagccaaacaagttgtgtttatcaatgtagcctttggaaaagatgacaaataactcggtgtggaagaaattggctttagatttctttttggctttagtttctagaaacctaaagcttataagtgaccggagagaaaataaaatgtttggaaacacctcctgaagcag

SEQ ID NO: 2114 - DNA, 562 bp, Homo sapiens
  MAP TO CHR22.1; EXPRESSED IN BRAIN, SIGNAL = 0.3; EXPRESSED IN HEART, SIGNAL = 0.72; EXPRESSED IN FETAL LIVER, SIGNAL = 0.32; NT HIT: gi14778437, EVALUE 6.00e-81; SWISSPROT HIT: P31636, EVALUE 2.00e-10; EST_HUMAN HIT: BG742097.1, EVALUE 8.00e-41
caccaaagccaaagacaagggaactctagttcacttctacgtctgtacttctccagaggattctaggtgggaaccagggttcactcaccgtccagctatcaggagctctttctccgacgcttgcttccgcatcttggtgtagaggtcaatggtgaagagggtgctggcgctgttgaagatggaggtcagggagctcatgagagaggccagcatgaccgaaagcatcaggcctcgcagtcctggagccgggaaagggtacaagcactggttagtggctggacactgccttgctaaaccagagagggttgaaaggttaaaagtatcatctggaacataggttaactgatgtccttatcaatacacatcagcatgtggagtttcctgcatattttcctggtcacctgagaataatccagtataaataagtcaggcacagaaagacaaaacatcacatgttctcacttacttgtgccatctaaaaatcaaaaacaattgaactcatggctatagagagcagaaggatggttaccagaggctgggaagagtaatgggggactagggg

SEQ ID NO: 2115 - DNA, 570 bp, Homo sapiens
  MAP TO CHR12.1; EXPRESSED IN PLACENTA, SIGNAL = 2.1; EXPRESSED IN FETAL LIVER, SIGNAL = 1.8; EXPRESSED IN LUNG, SIGNAL = 1.2; EXPRESSED IN BRAIN, SIGNAL = 2.2; EXPRESSED IN BONE MARROW, SIGNAL = 2.4; EXPRESSED IN HEART, SIGNAL = 1.3; EXPRESSED IN ADULT LIVER, SIGNAL = 1.9; SWISSPROT HIT: O94810, EVALUE 3.20e+00; EST_HUMAN HIT: AA295374.1, EVALUE 4.00e-46
ctaaggcctctttcccatcccgctcccactcttggctagttacacaaagccacctcccacaccatgcttcacgttttgcaggctccacctggtacctcccttcctgcagttctgccttccctatgtcaccctcaagcggaggccctttggggcctgaactgagaaggcagcagcttggttgggatccgcccccctcaccacccctcccctcaagctgctgtgccctgcccagtgtattctgccagaaccagctcatggcctgaaaactgcaagtcagagtggaaagccttcattactgcatcaccagtactgagtagaacagcatgatgtgaggcccagttcaggatcatcactgtgatttgtggtttgcttggtttgctaggctttgatctgggcctcagacaatgtgctgcttctctgaagtctggctttggcagaggtaaaagagcactgcgcggagcagagctccggggttcccaatccttggtgaaatcagcatctttaatttccaacagaggagtttaatcacttcagagctcccacattcttcccaggagggaaaggtttttc

SEQ ID NO: 2116 - DNA, 599 bp, Homo sapiens
  MAP TO CHR2.1; EXPRESSED IN HELA, SIGNAL = 1.3; EXPRESSED IN BRAIN, SIGNAL = 1.1; EXPRESSED IN HEART, SIGNAL = 1.3; EXPRESSED IN ADULT LIVER, SIGNAL = 1.4; EXPRESSED IN BONE MARROW, SIGNAL = 1.1; EXPRESSED IN PLACENTA, SIGNAL = 1.5; EXPRESSED IN FETAL LIVER, SIGNAL = 1.1; EXPRESSED IN LUNG, SIGNAL = 1.2; SWISSPROT HIT: Q62673, EVALUE 2.60e+00; NT HIT: AJ277892.1, EVALUE 0.00e+00; EST_HUMAN HIT: AA112999.1, EVALUE 0.00e+00
aaagtgtctgtccacccgtctgctttcttaaaaaaaataactgtgcatagctactttagaaaatataaagtcaattctaaaaatgtctcttcaagttcctgaagtacagaagggagttgtgacagaagaaaaaataaccattgtaactcaaagagaggaatctccaccaccagcaggtacttaatcccatctccatgaaataaccttgtctttccttcaagcctctttaattgcatgtcttctttaattgccacttctatgttgctcatttatttggcctttttgacaaattttaaaattcaatactatcctttaagtgccagaaataccaaagaagaaagttcctgaagaaaggaaacctgttcctcggaaggaggaagaagttccaccaccaccaaaaggtattgtttctccatcttcccaagaactgtctttatgttccagtgattttgttagttttgtgatatgagtgcactgtgggtgtatttctttgttttgcactgggcttcaatgagatcacattaaatttctaaaagtgcataatgtctctaaagtgccagctctgcctaagaaacccgtcccagaggagaaagttgcag

SEQ ID NO: 2117 - DNA, 516 bp, Homo sapiens
  MAP TO CHR1.1; EXPRESSED IN PLACENTA, SIGNAL = 6.6; EXPRESSED IN FETAL LIVER, SIGNAL = 7.7; EXPRESSED IN LUNG, SIGNAL = 5.5; EXPRESSED IN HELA, SIGNAL = 5.4; EXPRESSED IN BRAIN, SIGNAL = 8.5; EXPRESSED IN HEART, SIGNAL = 6.7; EXPRESSED IN ADULT LIVER, SIGNAL = 8.4; EXPRESSED IN BONE MARROW, SIGNAL =  10; SWISSPROT HIT: P31916, EVALUE 5.50e-01; EST_HUMAN HIT: AW074478.1, EVALUE 1.20e-02
ttcaatcttggagtcctgggagtgttttagcaattagcttaaattatctgtaataccacagtgtgagttaacttttacccttttagaataccctttattaaattaattgtattgatgtcaatctttttctttatctattattccttaaatttgaccctttcaatctgacttgattgcatatattattttgcttttaatttatagaagaggtaacctggttgacctaactttttaaaattatactcttctactatctgctttgatctttttcctttgataaattgtagagaatgcaagatggagattgaagacaaaaagcaggagctccttgaaatggatcaggcacttaaagagagaaattgggaactaaagcaaagagcagctcaggttgatttttcttgattatattttaatggagttttctgttatgacacagtcacacaggatttgagaggtcaccaattttttgtaaaatgggcatttttatagcatatcttttctctgcacatagggttt

SEQ ID NO: 2118 - DNA, 597 bp, Homo sapiens
  MAP TO CHR6.1; EXPRESSED IN HEART, SIGNAL =  11; EXPRESSED IN ADULT LIVER, SIGNAL =  16; EXPRESSED IN BONE MARROW, SIGNAL =  17; EXPRESSED IN PLACENTA, SIGNAL =  10; EXPRESSED IN FETAL LIVER, SIGNAL =  13; EXPRESSED IN HELA, SIGNAL = 7.1; EXPRESSED IN BRAIN, SIGNAL =  15; EXPRESSED IN LUNG, SIGNAL =  11; SWISSPROT HIT: Q9GZK4, EVALUE 3.00e-47; NT HIT: L35475.1, EVALUE 0.00e+00; EST_HUMAN HIT: AL520186.1, EVALUE 8.40e-01
ttaactctgccacagcatggagaaaggcctttgggacctgctcctcccatctcactgtggtcaccctcttctacagctcagtcattgctgtctacctccagcccaaaaatccgtatgcccaagggaggggcaagttctttggtctcttctatgcagtgggcactccttcacttaaccctctcgtatacaccctgaggaacaaggagataaagcgagcactcaggaggttactagggaaggaaagagactccagggaaagctggagagctgcttaatatactttcgaaagtaagaagagtttcttcaagatttatgaacatgttaagttttccagactactacccttcccacatacacctgagccactgtggtgggtcacagtgtggctatgttatctatgagagggagaatgagaaagagagggacagagagataaaagaaattgggtgagaggagataggtagctccataaggcacacaaattcaaatattatcattcctatcactgtccattcttaatatttctatcctccattctgttctttttactgtcatcacttctatagatttcctaactccaccatgcctatttctggt

SEQ ID NO: 2119 - DNA, 519 bp, Homo sapiens
  MAP TO CHR17.1; EXPRESSED IN BONE MARROW, SIGNAL =  23; EXPRESSED IN ADULT LIVER, SIGNAL =  17; EXPRESSED IN FETAL LIVER, SIGNAL =  16; EXPRESSED IN BRAIN, SIGNAL =  18; EXPRESSED IN LUNG, SIGNAL =  15; EXPRESSED IN HEART, SIGNAL =  17; SWISSPROT HIT: Q91094, EVALUE 1.30e-02; NT HIT: AF046059.1, EVALUE 1.00e-123; EST_HUMAN HIT: BG149307.1, EVALUE 0.00e+00
tgtcagtgtgctgcccttagcacagaatacaggtattctaatatatagttaggcttcaggagagaaaaggttagcagcataccatgaggcaccaatgtggaatgacctatctgggggacactccaaggactccactcctgtcggccatctcctcgggcgcagactctgaactggtaatcaacgttggggtctatgtgcaatactatgaattcagtttcagaacctacatatacatcctcaaaatgatttgaagtacatttacgaaactggagcctgtaatcttgggctgtaaagtcatcatccacctagggagaaaagctttatgttaggtaaaaaacagaaaatgacttctctcagcatcactgcttaaaaattttgaacggagccattttggaccaagcagacaggcccacatgctgaatatggggtattcttgggaaggccatagaaaatatgccatcacatcattatctcccttcttttttttttgagaaagggtctcactttgtcacccaggct

SEQ ID NO: 2120 - DNA, 564 bp, Homo sapiens
  MAP TO AL359813.20; EXPRESSED IN BRAIN, SIGNAL = 0.75; EXPRESSED IN HEART, SIGNAL = 0.92; EXPRESSED IN ADULT LIVER, SIGNAL = 0.72; EXPRESSED IN BONE MARROW, SIGNAL = 0.82; EXPRESSED IN LUNG, SIGNAL = 1.1; EXPRESSED IN FETAL LIVER, SIGNAL = 0.53; NT HIT: gi14781497, EVALUE 4.00e-82; SWISSPROT HIT: O15160, EVALUE 6.00e-46; EST_HUMAN HIT: BG773833.1, EVALUE 6.00e-82
gcaggagatgaagaaggcacagagatagatactctacagtttcgtctccaggtcagatgcactcggaacccccatgctgctaaagattcctctgaccccaacgaactgtacgtgaaccacaaaggtgagtagtggtagggtgaggaagaggccccacctgtgggtagctgctagttttagggactgagatcttctgacatgtttttcctccagtgtataccaggcatatgacatggatccccctggggaaccaggctgatctctttccagagggcactatccgaccagtgcatgatgatatcctcatcgctcagctgcggcctggccaagaaattgacctgctcatgcactgtgtcaagggcattggtgagaaccctgtgtgccttcctgggaagggggatagttcggttgcagtggggcaagctgactagggaactcagctgagacattcccggcaggtagaaagccaagagggttgtgcttttgctgttagtagcttaggaggagtattcttcctaaccctagaagggtttcctataggcacgttccctcttcctctccagg

SEQ ID NO: 2121 - DNA, 537 bp, Homo sapiens
  MAP TO CHR17.1; EXPRESSED IN HELA, SIGNAL = 0.85; EXPRESSED IN BRAIN, SIGNAL = 0.75; EXPRESSED IN HEART, SIGNAL = 1.2; EXPRESSED IN ADULT LIVER, SIGNAL = 0.79; EXPRESSED IN BONE MARROW, SIGNAL = 0.98; EXPRESSED IN LUNG, SIGNAL = 1.1; EXPRESSED IN FETAL LIVER, SIGNAL = 0.95; EXPRESSED IN PLACENTA, SIGNAL = 1.7; NT HIT: gi14770669, EVALUE 0.00e+00; SWISSPROT HIT: Q03211, EVALUE 1.30e-02; EST_HUMAN HIT: BF845921.1, EVALUE 1.00e-118
tcaggattctcacacccctcccactcccccaaccccaaccaccagcagtagcaacagcaacagtggcagccacagcagcagccctgctgggcctgtgtcctttcccccaccaccctatctggccagaagtatagacccccttccccggcctcccagcccagcacagaacccccaggacccacctcttgtacccctgactcttgccctgcctccagcccctccttcctcctgccaccaaaatacctcaggaagcttcaggcgcccggagagcccccggcccagggtctccttcccaaagacccccgaggtggggccggggccacccccaggccccctgagtaaagccccccagcctgtgccgcctggggttggggagctgcctgcccgaggccctcgactctttgattttccccccactccgctggaggaccagtttgaggagccagccgaattcaagatcctacctgatgggctggccaacatcatgaagatgctggacgaatccattcgcaaggaagaggaacagcaacaacacga

SEQ ID NO: 2122 - DNA, 600 bp, Homo sapiens
  MAP TO CHR13.1; EXPRESSED IN BONE MARROW, SIGNAL = 0.79; EXPRESSED IN FETAL LIVER, SIGNAL = 0.83; EXPRESSED IN LUNG, SIGNAL = 0.71; EXPRESSED IN BRAIN, SIGNAL = 0.79; EXPRESSED IN HEART, SIGNAL = 0.81; NT HIT: gi15301770, EVALUE 0.00e+00; SWISSPROT HIT: Q15323, EVALUE 3.90e-01
gggaaggaagaaagtttggcaagttgagaagggtcctctggccactgggaggaagggtatgtacaagacagtgcaagtggtagaaggacagcttagaggtgcccaagaagctcacacctgtgcatgggaggacagaggggagggaggtggaggaccacacagggctgccctcagagcacccagagttcctgcttcagccacgctgtctgctaatgagcattttccttggtgctctgcagggtgacgactccgatgaggaagatctttgtatcagcaacaaatggactttccaaagaaccagtcgcaggtggtctcgtgtggacgacctctacacgctgctccctcgaggagacagaaatgggtcaccgggaggcacggggatgaggaacacgaccagcagtgagagcgtcctcacagacctgagcgagcctgaggtctgctccattcacagcgaaagcagtggaggcagcgacagtcgcagccagccgggccagtgctgtacagacaacccggtcatgctggatgccccactcgtcagcagcagcctcccacagccccccagagatgtcctcaaccaccccttccaccccaagaatgaga

SEQ ID NO: 2123 - DNA, 527 bp, Homo sapiens
  MAP TO CHR17.1; EXPRESSED IN FETAL LIVER, SIGNAL = 0.76; EXPRESSED IN LUNG, SIGNAL = 0.82; EXPRESSED IN BRAIN, SIGNAL = 0.9; EXPRESSED IN HEART, SIGNAL = 0.7; EXPRESSED IN BONE MARROW, SIGNAL =   1; EXPRESSED IN ADULT LIVER, SIGNAL = 1.3; SWISSPROT HIT: P41234, EVALUE 5.00e-07; EST_HUMAN HIT: BF885208.1, EVALUE 9.00e-16; NT HIT: gi14773065, EVALUE 3.00e-95
tcactggagccaaactttccgggtttgaatgtcacacacattgactactaagttggtcaagttccttgctctcttgaaccacatgtataaaatagggataataatagcacctatctcatagggttgctatgaggaataaatgatttattagatttaaagttaaggatatgcttggcgcattgtaaattatatgcaatgttagctattgtttaaattggattttcttgtccaacaattgtacaatgatttgcgcacaaataatttaaaattaaaactcagtgcaaatggttttaataatctcattttgaccaacacattaactttaacatatttttgtacctctttatccacttcttgtggcagaatcccttttattttagcaaagagtctgaggttttctcttacagtgaggaagtcaaattgcacattggattgtggacaaactccggtcagcttgctgagattttctaggtcagccatttctgaaagcttattgttatagatggtgactgaacctgtaacaaagg

SEQ ID NO: 2124 - DNA, 580 bp, Homo sapiens
  MAP TO CHR9.1; EXPRESSED IN LUNG, SIGNAL = 0.66; EXPRESSED IN BRAIN, SIGNAL = 0.79; EXPRESSED IN HEART, SIGNAL = 0.69; EXPRESSED IN BONE MARROW, SIGNAL = 0.88; NT HIT: L04289.2, EVALUE 1.40e-01; EST_HUMAN HIT: BF911743.1, EVALUE 8.20e-01
ttgatttcaagaagaaaaccagcattaacctgaaatgcatgtactatatatatgtacatatgtatgtgtgtatgtatatatctatatctatttcttccccttcctgccatgcagagttctatatgaagggaaagaacggcttattccaggatgtgaagtgatcctagccacaccctatggtcgctgtgccaatgtcaacaatagttcaactacttcacaaagaatctttatcacttatcgaagggctcctccagttcgaccccagaattccttggctgtaactgatatctgtgttattgtaaccagtaaaggagaaactcctcctcataccttctgcaaagttgacaaaaacttaaattgtggaatggtaagaataaagttttcatcttcaaagtttcatatgaaaccaaaaagggatacgttttggattcctgtttactgttgggtatatactcacattttatattttcatgatgcttgtttttatttttcctaatttttatgatttgtaataatttttaaagtcctatcccatgatttataataatttcatctttaagtcagggatatttttgaggga

SEQ ID NO: 2125 - DNA, 547 bp, Homo sapiens
  MAP TO CHR17.1; EXPRESSED IN HELA, SIGNAL = 1.2; EXPRESSED IN BRAIN, SIGNAL = 1.6; EXPRESSED IN HEART, SIGNAL = 2.8; EXPRESSED IN ADULT LIVER, SIGNAL = 2.5; EXPRESSED IN LUNG, SIGNAL = 3.3; EXPRESSED IN BONE MARROW, SIGNAL = 1.9; EXPRESSED IN FETAL LIVER, SIGNAL = 1.8; EXPRESSED IN PLACENTA, SIGNAL = 1.2; SWISSPROT HIT: P23098, EVALUE 3.00e-06; NT HIT: AB042983.1, EVALUE 5.20e-01; EST_HUMAN HIT: AA701546.1, EVALUE 7.70e-01
tgggacaggactaagggttggcttaggatatccttgcatttacagaacatggatgcaataaaagcattaggatccattttacggtaagagagtggggaggtggccctctggcaccttctcccagtagaaccgaagttggctgagccagtcaaaggaattgacatccatgaggccactcttgtaaagcttctccaacacatcccgggcatgaatttctatcgtcaccagagccacaattttaagccgcatgatcttggtcaagttccccctgatggcttctgaatacttattcaggattgacacctgtggcatgaagcagcagggaagagagcagacagagcaatgccgccaaagcctgatcaacccttgcccctacccagcaccgcttccaacccggtgctgaccccacctgctgtaactcctggtaattctgctctaccacggactgcccccactggacttccatcataaagcaccctcgctctggcccttttccaccagctcacctctaattctgactgctccctccctgcaattctagctccag

SEQ ID NO: 2126 - DNA, 554 bp, Homo sapiens
  MAP TO CHR7.1; EXPRESSED IN PLACENTA, SIGNAL = 1.3; EXPRESSED IN HELA, SIGNAL =   1; EXPRESSED IN BRAIN, SIGNAL = 1.3; EXPRESSED IN BONE MARROW, SIGNAL = 1.2; EXPRESSED IN ADULT LIVER, SIGNAL = 1.4; EXPRESSED IN FETAL LIVER, SIGNAL = 1.3; EXPRESSED IN LUNG, SIGNAL = 1.1; NT HIT: gi14750332, EVALUE 1.30e-01; EST_HUMAN HIT: BF755277.1, EVALUE 4.00e-30
ttatcctgaaggaagccagccgacttcggactccccaggggatattgccgaaggcggaggggatgtgactatcacttcctatccggggtgggggtggggaacttgggaacaatagtcctggtggggcggaggcgacgctacgggccgaagccctgaactgggagataaccttcccagcgcccccccgcctccgccaccccctactttccgccctctgcttgtgcaggcagtcttgagaggaggtgaaggttaaaagtcttgttcatgaaattgctctagatacactattgctttagcacactgtgagggggtcagatccgaaggcgtgagaccagaagtcgacttcctacgttacccacccccccaacccccgccctttttatttttctgctggacaatgttccctctagggttgtttcccggcttaggaggcggtggttgcggctgctgctcctacggatattgcgcaagactggggcgttggaaaccctgtaggtctggggaatgaaaaaggaagtgggactttgggaagtggttgctccttagtcttggcg

SEQ ID NO: 2127 - DNA, 594 bp, Homo sapiens
  MAP TO CHR7.1; EXPRESSED IN HELA, SIGNAL = 0.57; EXPRESSED IN BRAIN, SIGNAL = 0.54; EXPRESSED IN HEART, SIGNAL = 0.69; EXPRESSED IN ADULT LIVER, SIGNAL = 1.1; EXPRESSED IN BONE MARROW, SIGNAL = 0.49; SWISSPROT HIT: P08581, EVALUE 2.00e-22; NT HIT: X54559.1, EVALUE 7.00e-87; EST_HUMAN HIT: BG205092.1, EVALUE 1.00e-86
aagaaatggggaaaattgggtctggaagacagttatgtttctgcttcttagagttggaagagctcagtttaatcaagtaccaaaagtactttaaaggtttttttttcaaatctcaaatgttttccagtcaaggatagcttgtccacaacaaaggtaagtttgagatccagtcagattaaacagcctacactagaaaaggcttccactcaggaaattcccacttaggaaccattgagttatatccttttgatttgtggatataattctaaaatatgtgtatctctaatagctaaaattcacttccttaattttttttgttcagtgtgtcaaacagtattcttgaatgttataccccagcccaaaccatttcaactgagtttgctgttaaattgaaaattgacttagccaaccgagagacaagcatcttcagttaccgtgaagatcccattgtctatgaaattcatccaaccaaatcttttattaggtaagtagaagcttctgatgggtataagaaaacaatgaatacaaggatgattttgctgtagaatagtcaagaggaattgcagttttatctctggctttgatgctgttatg

SEQ ID NO: 2128 - DNA, 506 bp, Homo sapiens
  MAP TO CHR7.1; EXPRESSED IN PLACENTA, SIGNAL = 8.9; EXPRESSED IN FETAL LIVER, SIGNAL =  16; EXPRESSED IN BRAIN, SIGNAL =  15; EXPRESSED IN HELA, SIGNAL =   9; EXPRESSED IN LUNG, SIGNAL =  10; EXPRESSED IN HEART, SIGNAL =  10; EXPRESSED IN ADULT LIVER, SIGNAL =  18; EXPRESSED IN BONE MARROW, SIGNAL =  19; SWISSPROT HIT: Q09332, EVALUE 3.60e+00; NT HIT: gi14739735, EVALUE 3.00e-98; EST_HUMAN HIT: BG716928.1, EVALUE 4.00e-98
ttgtgccactgcactctagcctggataacacagtgagaccgtgtttcttaaaacaaatttataaataaaaatactttgttctcttctagcgagttgaagaatttctcagcaaagatatcagttatcttatttcaaataagaaggaagctaaatttgcacaaaccttgggtcgaatttctcctgtaccaagtccagaatctgcatatactgcagaaaccacttcacctcatcccagccatgatggaagttcatttaagtcaccagacacagtaagtctcttaaatatgctttgagactcagaagggctatatcctgaagatctcctggtttttaatagcaaggtggcagtagagtttacttatgtagaacatttgcaaagccacatgatgtgtggctctctagtcctcaataaagttgctgtcttttaggaaggtgggtttttcctaatagttcttgtgtaatcatactctgattgcttaggtatacccttgtatttagggatggcg

SEQ ID NO: 2129 - DNA, 510 bp, Homo sapiens
  MAP TO AC015947.3; EXPRESSED IN FETAL LIVER, SIGNAL = 0.82; EXPRESSED IN LUNG, SIGNAL = 0.61; EXPRESSED IN HELA, SIGNAL = 0.77; EXPRESSED IN BRAIN, SIGNAL = 0.98; EXPRESSED IN BONE MARROW, SIGNAL = 0.94; EXPRESSED IN HEART, SIGNAL = 0.65; EXPRESSED IN ADULT LIVER, SIGNAL = 0.61; SWISSPROT HIT: P03386, EVALUE 3.20e-01; EST_HUMAN HIT: BF743607.1, EVALUE 7.00e-04
tggatgaaagtccttcccactcagagaagccattctcagacctccaatgggttctagggctgtgcccctccctctgctctggtccatgtgctaggctgtggaggtttgcaggccaggaggcggaggcagcccttctgaagacaaagggcaatgttggggggcgggcgaggaagagagaagggagttgggtggggggctggagcgcccccctccttcattctcacgggcctgggaaactggggctgagtgggacctcaatggctggtagcccctttaagggtgaattctcctcccgcctcgtaaattacgctggtccaccctctggccggcccgtgaggcagtgaccgtgaacgccagcggggaagggagaatcagaggcctcggctgtggctgtcagaaattctcccggccaatcagtgtggtgctccgtagccccatctacagcctcttgcactttctttctggagagccagctggggacctctggggtggctactgaacctgaggctg

SEQ ID NO: 2130 - DNA, 578 bp, Homo sapiens
  MAP TO CHR22.1; EXPRESSED IN ADULT LIVER, SIGNAL = 0.59; EXPRESSED IN BONE MARROW, SIGNAL = 1.2; EXPRESSED IN PLACENTA, SIGNAL = 1.5; EXPRESSED IN FETAL LIVER, SIGNAL = 1.5; EXPRESSED IN LUNG, SIGNAL = 3.3; EXPRESSED IN BRAIN, SIGNAL = 1.2; EXPRESSED IN HEART, SIGNAL = 3.1; EST_HUMAN HIT: AI133716.1, EVALUE 0.00e+00; NT HIT: Z95636.1, EVALUE 3.50e-02; SWISSPROT HIT: Q28640, EVALUE 5.60e+00
aaatcaactgcctgaggtggacaggctaggagagcctaacacaggatagcacagcacacaacacaagacacatgataaaaggtaagaccactttgaaagtcctgagctgatgtggccccgacaggtactcaatggtgactgttgttccaacatcacccctgcctctggaggggcttccgtagctgccactggtttcaggggcaggtgctggcatcctgagatgaccaggcttggtcaaggccctcacctgtcgatgaccagctccagcagcacggcatgggacagctgcgtgaactcggggtcacccggaacatggtcatagtgctccagcagggccaccatgtcgaggtcacaggccatgcggtcagggaacttccaggaggggaagcgcacaggcccggcgcgggagaagacgtctacgatggcaccctgcaggtcggtgaggtctgtgcgcaggctctccatgcaggcctggctgcccagcaggtgcgccatcctcacagatcctggggtgagcagagaagagccctgccagccagagccacgtggctgctgcaggaggaaactccctgaaaccc

SEQ ID NO: 2131 - DNA, 580 bp, Homo sapiens
  MAP TO CHR5.1; EXPRESSED IN FETAL LIVER, SIGNAL = 0.96; EXPRESSED IN LUNG, SIGNAL = 0.69; EXPRESSED IN HELA, SIGNAL = 1.2; EXPRESSED IN BRAIN, SIGNAL = 1.4; EXPRESSED IN BONE MARROW, SIGNAL = 1.1; EXPRESSED IN HEART, SIGNAL = 0.75; EXPRESSED IN ADULT LIVER, SIGNAL = 0.68; SWISSPROT HIT: Q9Y5H7, EVALUE 1.00e-107; NT HIT: gi14861872, EVALUE 0.00e+00; EST_HUMAN HIT: BG023736.1, EVALUE 4.00e-89
agctcatacgaaagccaagcgttgtagcccgaatcagggtccactgcgcgcaccttcgccaccacgtggcccgcacccactgacctcggcaccagctcgctcactgcgccgccggtgccacccactcgaggcaccagcagcgccggcgcgttgtcgttctcgtccagcacgaacacctgcagcgtcacgttgctgcccagaggcggcacgcccgcgtcgcgcgcgctcacctggaactgcagcagctccacttcctcgtggtccagcggctgcagcgcgtacaccttgccgctctccgcgtgcaccgaaacgtaactcgacagcgggcgctcgcccacccgccgctccaccagcgagtaggacaccagggcgttctcctgcgcgtccgcgtcccgtgcagacaccgtgaagatgtggcagcctggcgggttgttctccttcacgaacacggtatactggggctgcgcgaacgccggagcgttgtcgttcacgtcggccacttccacagacacgctggcggtggcccacagcgaaggcgagcccccgtcccgcgcggtcaccaccagctcatagaccgaca

SEQ ID NO: 2132 - DNA, 588 bp, Homo sapiens
  MAP TO CHRX.1; EXPRESSED IN BONE MARROW, SIGNAL = 0.96; EXPRESSED IN ADULT LIVER, SIGNAL = 0.6; EXPRESSED IN FETAL LIVER, SIGNAL =   1; EXPRESSED IN LUNG, SIGNAL = 0.59; EXPRESSED IN HELA, SIGNAL = 1.3; EXPRESSED IN BRAIN, SIGNAL = 0.84; SWISSPROT HIT: Q93008, EVALUE 6.00e-36; NT HIT: gi14764084, EVALUE 1.00e-116; EST_HUMAN HIT: BE833893.1, EVALUE 1.00e-116
cttcaactgcaaaatgccactgcaacacttaatgagtaataatgtcaaagacaaaaagaaaactagaaaacaacttaagaatgcctcacccaaaaaaccaaaacaaaaccagatgggagagtgggggaggttattaaaaaaaattagatgaaatgaaaatgtttttaatgggcaaagacaacaattttcaaacgagaaaaatttctgctctccttttaccaaatggctaggaaaatatcaaataattaagaattagcaccaatagattagttattcacaaacctcgacatagggagaattgttctttcctcatgataatcactgtcacattcatttatatattcccttaaaacagttaatactcgaaccattcgaacagcttcctgtcttgcacaattaacactgtctttgtcaccatccaaaacacacaatgtgtcataggaagccttcagacgatcaaaacaagactgaatgaagtcttcatggatcaccacctacaaatatcaggccaaataaacacagttaaaattgctttaaaatgtaaaaaccaaatattaatccaattaaagatggcaatggctgatttaa

SEQ ID NO: 2133 - DNA, 594 bp, Homo sapiens
  MAP TO CHR3.1; EXPRESSED IN LUNG, SIGNAL = 2.9; EXPRESSED IN HELA, SIGNAL = 3.1; EXPRESSED IN BRAIN, SIGNAL = 1.7; EXPRESSED IN HEART, SIGNAL = 1.6; EXPRESSED IN ADULT LIVER, SIGNAL = 1.4; SWISSPROT HIT: P54727, EVALUE 5.00e-41; NT HIT: gi13639852, EVALUE 0.00e+00; EST_HUMAN HIT: AL542437.1, EVALUE 0.00e+00
gaaaagccagcagagacaccagtggctactagcctgacatcaactcatagtacatcaggagattcttcttggtcaaacctttttgaagatgcaacgagtgcacttgtgatgggtcagtcttacgataatatggtaactgagatcatgtcaatgggctatgaacgagagcaagtaattgcagccccaagagccagttccaacaaccctgacagggcagtggagtaccttttaatgggaatccctggagataaagtcaggttgtggttgacccccaccaagcagctagtactggggctcctcagtcttcaacagtggctgcagctgcagcaactacgacagcaacaactacagcaagttctggaacatccccttgaatttttatggaatcagcctcagtttcaacagatgagacaaattattcaacagagtccttcccttcttccagtgttactacagtagatagattgagagaatcctcaattacttcagcaaattagccaacaccaggagcattttattcagatgttaaatgaaacagtttgagaagctggtggtcaaagaggaagaggtggaggtgtcagtggaggaattgca

SEQ ID NO: 2134 - DNA, 589 bp, Homo sapiens
  MAP TO CHR10.1; EXPRESSED IN LUNG, SIGNAL = 0.69; EXPRESSED IN BRAIN, SIGNAL = 0.59; EXPRESSED IN HEART, SIGNAL = 0.68; EXPRESSED IN ADULT LIVER, SIGNAL = 0.57; EXPRESSED IN BONE MARROW, SIGNAL = 0.66; SWISSPROT HIT: Q12979, EVALUE 5.00e-19; NT HIT: gi14768454, EVALUE 0.00e+00; EST_HUMAN HIT: BG820884.1, EVALUE 0.00e+00
tgactccagtactccaggggcaaggaaggcaggcgctcgaccaccttgggttgacacttgatgtcctgtaacatcgtcactggttctggattgggcacagcatgggccactattgtagagccaaagacttcagccagattggcaacattcattttagtatatggactctgagccactctctgcaagtgaatcatgaggaaaaccaatgtgtccctgttggcctggggcagttcaccaacagcctggtacatggcagatatgctgttgtcttcatctgtgatttctgctgcttccataaaggctttgtttaggcgaaaggtcagaagaggttctttgaagtttcgaagaaagtctttaagaaggctacagatagcatggatatcatccactttgctgacgaggggtacagttttcactctgaggaatttctctttcagcttttactgtgctgtcacagcccaagatcctatacaggcctgtctcagtaagacctctctgctcaatctcatttacacaatgcacaacaatgcgggggatcattggaaaagtctgggacacaaagtcggccagcattccctctccaatcttg

SEQ ID NO: 2135 - DNA, 535 bp, Homo sapiens
  MAP TO CHR17.1; EXPRESSED IN ADULT LIVER, SIGNAL = 3.5; EXPRESSED IN FETAL LIVER, SIGNAL = 2.4; EXPRESSED IN BRAIN, SIGNAL = 1.1; EXPRESSED IN LUNG, SIGNAL = 4.3; EXPRESSED IN HEART, SIGNAL = 2.1; SWISSPROT HIT: P52631, EVALUE 1.00e-37; NT HIT: gi14786033, EVALUE 1.00e-117; EST_HUMAN HIT: BE179288.1, EVALUE 0.00e+00
accccaacaaaagcactcactacaattctttcccataaggagaaataattatcccccaggttattcaggcatttgcctatctatcctccaaggatcccaaaatttccaacttttcccaaaaattaaatgccaggaacatggaaaatcaacaactacctgggtcagcttcaggatgctcctggctctctggccgacaatactttccgaatgcctcctccttgggaatgtcaggatagagatagaccagtggagacaccaggatattggtagcatccatgatcttatagcccatgatgatttcagcaaatgacatgttgttcagctgctgctttgtgtatggttccacggactggatctgggtcttacctgtcacaggacatgggaaggaaagatcatggaacctacagctaggtcatctcagagaaaactgcccattttttctttcctcgaaggggaaaagacttaagccaccctagtgttgagaccctgaacaccctgttcagtggcctggcactgtggaaatattcaggctggc

SEQ ID NO: 2136 - DNA, 587 bp, Homo sapiens
  MAP TO AC024740.3; EXPRESSED IN FETAL LIVER, SIGNAL = 0.66; EXPRESSED IN HELA, SIGNAL = 1.9; EXPRESSED IN LUNG, SIGNAL = 1.1; EXPRESSED IN BRAIN, SIGNAL = 0.7; EXPRESSED IN HEART, SIGNAL = 0.86; SWISSPROT HIT: P33609, EVALUE 8.60e-01; NT HIT: gi14760508, EVALUE 0.00e+00; EST_HUMAN HIT: R80760.1, EVALUE 0.00e+00
gtagccagtccaagacgaggtccaggttggttcggatttgaacagctcgggaccattgatagaaaggccggccttgacctgtgggtgttaaaggtatgagaggcagttggttggctggactctgtgctcctgcctcccagactcttcctatccttcagcctgggatctggagcttgttctccagggtacccaaaggtgaggcttgagcccgtggtgtgtctaatatgacctgagtctcagtggctcctgtctttgcctccctgacagctcccagccaaccttcacctcgttccatcagcgagttgagaagggatgcgttggagaagaagaacaagtagccaaaagtctgagacacgaggtcagggtgcagctcgcactggctggtcagctccaaggctgcctggaacacgcccagggtaggtctcaatcctggaggcatggcccccagctccgcgccaggccccggcagctctgcaccagctgtgaaagggttactatccaggagagcaggcagcgttgaatagagagtctgagaaaatagagaagtggaaacaagtgattggactacaactcccaggaagcttcag

SEQ ID NO: 2137 - DNA, 600 bp, Homo sapiens
  MAP TO CHR8.1; EXPRESSED IN BRAIN, SIGNAL = 3.9; EXPRESSED IN HEART, SIGNAL = 3.3; EXPRESSED IN BONE MARROW, SIGNAL = 4.6; EXPRESSED IN ADULT LIVER, SIGNAL = 3.1; EXPRESSED IN PLACENTA, SIGNAL = 4.8; EXPRESSED IN FETAL LIVER, SIGNAL = 3.9; EXPRESSED IN LUNG, SIGNAL = 2.6; EST_HUMAN HIT: AU138190.1, EVALUE 0.00e+00; NT HIT: U63630.3, EVALUE 0.00e+00; SWISSPROT HIT: P33991, EVALUE 2.00e-60
agcacagcacagttccacagaccctgtctttcaagggtccacatattttaaacacgtccatgttcacggtggagaaggcgactcacctttgcaatggacagagtctgctgttccatgacttcatgcaataccgatcttgtactttcattcatcttgtcgaactcatcgatacagcagatgccgttgtcactcaggacaagagcacctgtctgcaggaccagctgccttgtctcagggtctttcattacgtacgcagtgaggccaactgcactggagcccttcccagacgtgtactggcccctggggacgaggttgtacacgtactgcagcagctgggacttgctggtaccagggtcgccacacagcaagatgttgatctcagcccgaaatttgccccttccagtgtgactaaaatccttccttgtcccgccaaagagctgaagcaaaattccctaaataatcagagacatgtctaaacattcattttctgcacagttaactgagatgtagtttaaactttagaggtacttttctctcttataaagaactacaattaagaaatcacaggaaggtataaaaaggctcgtgaaagtgcttgat

SEQ ID NO: 2138 - DNA, 565 bp, Homo sapiens
  MAP TO CHR1.1; EXPRESSED IN FETAL LIVER, SIGNAL = 0.58; EXPRESSED IN HELA, SIGNAL = 0.38; EXPRESSED IN BRAIN, SIGNAL = 0.61; EXPRESSED IN BONE MARROW, SIGNAL = 0.74; EST_HUMAN HIT: BI828731.1, EVALUE 2.00e-63; NT HIT: gi14736704, EVALUE 1.00e-63
atccttaacaaaaacggggctttgtacaagtacttaactgtgtgttacccactactctcttcttgtacccccacttctatacctaccccataatatttatcttgctcaaagtttgaacttctcctttttatttccctcaggtgattctagtcacaagattcctatttcaaattttgaacgtgggcataaccaagcaactgtgttacaaaacctttatagatttattcatcccaacccagggaactggccacctatctactgcaaggtaatttcaggttaagaagttcttttaaggtatcaatttatagtaccaaaagatccataaaacaaagaatttttgcctgtgtatttttgtctgtatattgtgtgtcttaaaacacactcattttgaattgttttgaatgtaattaggtatagtgcctattttaaaaatgtctccaattttggagggattttgaagactgcaaaagctaaacatatatctattttggtagagttcatgttctctgagttcttctttctgaaatatctacagtatctttttacccttaagaatggatgctcc

SEQ ID NO: 2139 - DNA, 566 bp, Homo sapiens
  MAP TO CHR6.1; EXPRESSED IN PLACENTA, SIGNAL = 4.1; EXPRESSED IN LUNG, SIGNAL =   2; EXPRESSED IN HELA, SIGNAL = 1.7; EXPRESSED IN BRAIN, SIGNAL = 0.99; EXPRESSED IN HEART, SIGNAL = 1.4; SWISSPROT HIT: Q01956, EVALUE 8.20e-01; EST_HUMAN HIT: AW361844.1, EVALUE 0.00e+00; NT HIT: gi16174208, EVALUE 2.00e-68
gacagctccaggctgtcttccccaactccctgggaggacagcccacccctggaagcctcttgcccagcttaccatgcgcagtgtggacagtccacccaccaacagccagaagaggtagaagagggcgtggaggtggatattataggtgatgaacaggacaatgcaatgcccaaagaggccatagccctgggaaggaggatggtggagaggaaaatcattcaggttgggctgctttctggcccctcatggggaccctgggaaacacatggtccattggcctactcctcccattccaggctttggggccccaggacagatgccgaccaaggcctggctactctttttaacatcactcttgcccaccacacctggctccttaccagcagtgccaacatctgcagcatggtgatctgggcgttgcacaggtaggcaaggaagtaaatgaaggatgagactcccagccagtagccgaagcaggtgccaatggctgtgcccatcagggtgccctcccgctgtggggtgaaggctctatttagtcctaggaggcctctgatctcagcctcacc

SEQ ID NO: 2140 - DNA, 590 bp, Homo sapiens
  MAP TO CHR10.1; EXPRESSED IN BRAIN, SIGNAL = 0.82; EXPRESSED IN HEART, SIGNAL = 0.6; EXPRESSED IN BONE MARROW, SIGNAL = 0.93; EXPRESSED IN ADULT LIVER, SIGNAL = 0.81; EXPRESSED IN FETAL LIVER, SIGNAL = 0.62; NT HIT: AF213884.1, EVALUE 2.00e-03; SWISSPROT HIT: P47907, EVALUE 2.60e+00; EST_HUMAN HIT: AV732403.1, EVALUE 1.00e-08
gctcttgcaggattgaaagcagcaacctcagttcctctgaccacacaggaaccacagtgccctcctgcccctctagacagttccacattttgcctcagtcaaatttcacctttgcaagatttcctgcagaacctccctagagtcagtctttcccctctctgtggcctcattacccatagttttagattctgtttctagtacttcatcaaagtattttaaaatatttccacataatcagagcacttagagtcatgtatatttccttcttttttgtcaaatatagatctttatattttacagctttattgaggtataattgaccaaaaaactgtataaatttaagctgtgcatgtgacgttttgatgtacgttgtgaaacagtcaccacaatcaagctaattaacacatccgtcacttcacatagtcatccttgtgtgtgtttgtggagaacacttaagatcggttcacttagcaaatttcaagtctataatacagcgttattaactatagtcaccctgctgtacatttgatcttcagaacttttcagagtcctttgtatttctaaagcagcctttgaatttgggaacggaa

SEQ ID NO: 2141 - DNA, 539 bp, Homo sapiens
  MAP TO CHR19.1; EXPRESSED IN LUNG, SIGNAL = 1.2; EXPRESSED IN HEART, SIGNAL = 1.1; EXPRESSED IN FETAL LIVER, SIGNAL = 2.2; EXPRESSED IN BRAIN, SIGNAL = 2.2; EXPRESSED IN HELA, SIGNAL = 2.1; EXPRESSED IN BONE MARROW, SIGNAL = 1.9; EXPRESSED IN ADULT LIVER, SIGNAL = 4.2; EXPRESSED IN PLACENTA, SIGNAL = 1.9; SWISSPROT HIT: Q9WU42, EVALUE 1.50e-01; NT HIT: AB006628.1, EVALUE 0.00e+00; EST_HUMAN HIT: AU118060.1, EVALUE 0.00e+00
atagatagggtggggccttggccagtgggcggtgactgagtggatgggccggacatttgtggagagggaagtcaccagaaggtgtagccttgggggcgtgcacaaggactttgaatgggggcccccctgaccttccctcgacgtggccgtggcctgcaggaggatgggcagggactctgagtgggcgagggtcggagctgaccgcccgcttccctccccaaggctctagcagcctgggcttcacctccagcccctcccctttctcctcctcgtcgcccgaaaacgtggaggattccggcctggactctccgtcccacgcggcacctggcccctccccagattcctgggtcccccgcccaggcaccccgcagagcccgcccagctgtagggcgccacccccagaggccaggggtatccgggcaccgcctctgccagactcgccgcagcccctcgcctcgtctccaggcccctgggggctggaggccttggccggaggaggtgagtccagcgggcctgggcctgagagttgctggaaccct

SEQ ID NO: 2142 - DNA, 578 bp, Homo sapiens
  MAP TO CHR17.1; EXPRESSED IN FETAL LIVER, SIGNAL = 1.1; EXPRESSED IN HELA, SIGNAL = 1.3; EXPRESSED IN BRAIN, SIGNAL = 1.3; EXPRESSED IN HEART, SIGNAL = 0.61; EXPRESSED IN ADULT LIVER, SIGNAL = 1.2; EXPRESSED IN BONE MARROW, SIGNAL = 1.3; SWISSPROT HIT: Q9Z1G4, EVALUE 7.00e-15; NT HIT: gi15312503, EVALUE 3.00e-67; EST_HUMAN HIT: BF943198.1, EVALUE 0.00e+00
ctttgaactatcggcttggcaacagttctgtgggatgaattcatttaatgtctttcagagcaaacatattgagcttagcttaatatattttcttatttcatctaggccaattttgagaagattgaaaatgaactgaaggaaatcaacacaaaccaggaagctctgaagagaaacttcctggaactgaccgaattaaaatttatacttcgcaaaactcagcaattttttgatgaggtcagactattgtttcttttagtatttgagcagctgatattatactcacacaagtgggccatatttttattccagtaattattttaatttgctagtttggaagcaatgccatttttgcaccctgttttagttacagaaatgtgagattatgttccatttttcatgcagtacacaaccagccatggttttgcattttttcacattttcttcaatttttcatctcaatatgaggaaaagaaccctgaagtagttgtataaacatagttagtataaatttttacattatatttatacttataaggtaagtatatgcttaaggttaaagctgaggaagcaaacatttg

SEQ ID NO: 2143 - DNA, 523 bp, Homo sapiens
  MAP TO CHR9.1; EXPRESSED IN ADULT LIVER, SIGNAL = 5.6; EXPRESSED IN BONE MARROW, SIGNAL = 5.1; EXPRESSED IN PLACENTA, SIGNAL = 4.9; EXPRESSED IN FETAL LIVER, SIGNAL = 4.6; EXPRESSED IN HELA, SIGNAL = 4.2; EXPRESSED IN BRAIN, SIGNAL = 4.8; EXPRESSED IN LUNG, SIGNAL = 2.7; EXPRESSED IN HEART, SIGNAL = 2.5; SWISSPROT HIT: P57783, EVALUE 1.40e-01; NT HIT: gi16161010, EVALUE 0.00e+00; EST_HUMAN HIT: AI201286.1, EVALUE 0.00e+00
tggggttagtaagtggcagggtccacgggtaccagtgaaaaaaggaccaaccagtaaaatccaaattaaacagcaaagctctccgccgacggagctcctggctctgagttacaatttcccaccaggaggcctccagggtggttttgaacatcccctgggtttgaggctggcttttgtgagctgtctacacttgtgtttagtggccctgggctgggtccctatggcctgggcaggacgagcggctcccctggtgctctcctggtgcgcctggggctcactcacgtgctgcagcaccttgcgcggcaacttctcggagtgggcgatccattctttcattaagtctaggatgagggggatgaggctgaccacgccgccgtagtggttccgggcctcgtcacagctgaggtggttcaccacatcatgagggtatctgcaggacggcagggggccaggtgaacccatgctcccgggacttgccatgccgtggcaagcagctgccacacctcaggcacagcagagtcac

SEQ ID NO: 2144 - DNA, 502 bp, Homo sapiens
  MAP TO CHR17.1; EXPRESSED IN ADULT LIVER, SIGNAL = 1.2; EXPRESSED IN PLACENTA, SIGNAL =   2; EXPRESSED IN FETAL LIVER, SIGNAL = 1.7; EXPRESSED IN LUNG, SIGNAL = 0.71; EXPRESSED IN HELA, SIGNAL = 2.2; EXPRESSED IN BRAIN, SIGNAL = 1.9; EXPRESSED IN BONE MARROW, SIGNAL = 1.9; EST_HUMAN HIT: AW900206.1, EVALUE 1.80e-01; SWISSPROT HIT: P98092, EVALUE 7.90e+00; NT HIT: AF329900.1, EVALUE 7.40e+00
ggaaacagaactggctgctctgcatgtcaacaagaatgggtttcaaaactggcctcccagaggttctccatgcaggagggagcagagattcagaatcattcctcctgggtgccaggctggaggtctctggagcttctgaaagccaggatgcccattccagaaattcttctgaaccaaccaccttggtctttagcattctggcgctcgttggccccctggaaatgctcattagcttatttttacggctgcagaaacagaaatctcagagttggttactcaaggccacccagcatgaacaaggtgaccaaagaccaggcagttttttcttttttttaaattagtcttttcttagcatcttctaatgatatgggagcattgctatttatgattatttttcctgttcacagaaagtaaacaaattcaagcttccgttctcaaccttctcttagatgttaggactcctcacctccaacctgggttgagttttatggctttcccagca

SEQ ID NO: 2145 - DNA, 584 bp, Homo sapiens
  MAP TO CHR7.1; EXPRESSED IN BONE MARROW, SIGNAL = 1.3; EXPRESSED IN FETAL LIVER, SIGNAL = 1.3; EXPRESSED IN HELA, SIGNAL = 1.3; EXPRESSED IN BRAIN, SIGNAL = 1.4; EXPRESSED IN LUNG, SIGNAL = 0.71; SWISSPROT HIT: Q47866, EVALUE 4.30e+00; EST_HUMAN HIT: BG528367.1, EVALUE 1.00e-101; NT HIT: gi14781751, EVALUE 1.00e-103
gcccgcataggtaaaatgacagagcacaaacacaacccagtctttctgactcaaggcttatgttctctatttcctataaccctctcatttctggggaatctgtccaaatataggttagagaaaacttcaaatacctgacagttttttgtttctaattatcctataatgtatttttttttattgttttgcatcttagatatgccaatgtcaagaaatgcagtaatgagggtcgtgccctgatgcaattggattttcaacagtttttaatgaaacttgaaaaactaacagatattagacccattcctgataaagaatttgtagaaacttatattaaagcttattacctaactgagaatgacatggaacggtggatcaaagagcacagggtgagagctggaaaatagttaattaagtttttattcctttttctttgtgctgttcttgttgggtgtgttatttaattcaaaatcatgagagtgaaatataaagaaacatttgcttttttaatacaaactacttaggtcaattctttgccttattcagattaagggcaccgtatctaagcagtgccctttgactcatca

SEQ ID NO: 2146 - DNA, 540 bp, Homo sapiens
  MAP TO CHR17.1; EXPRESSED IN HELA, SIGNAL = 0.84; EXPRESSED IN BRAIN, SIGNAL = 0.97; EXPRESSED IN ADULT LIVER, SIGNAL = 0.99; EXPRESSED IN FETAL LIVER, SIGNAL = 0.9; SWISSPROT HIT: P51671, EVALUE 3.00e-14; NT HIT: Z92709.1, EVALUE 0.00e+00; EST_HUMAN HIT: AA910483.1, EVALUE 5.00e-73
aatgtccccagaaagctgtgatgtaagtaaataaagttcaccctcccctagacaaaaaaataatgtctagggcacagagtcaagaactgtgtcacagttgctgggagtcatagactctgatagtttgacctctatggtccaattcattaattttcacaagtgagtgttcactcccagctccctgcctgggagattgctgtagtcatatcaatttcttcaagtcaagagcaaagatggttttactgggcctttaagagcagcaactaacccaagagtctcatccttcctcctctccgtagcaaccctttgtccaggggcagatggtccttaaatatttagggtcaaatgggcagaattttcaaaaacaatccttccaattgcatcctgtatctcccacagcttcaagaccaaactggccaaggatatctgtgccgaccccaagaagaagtgggtgcaggattccatgaagtatctggaccaaaaatctccaactccaaagccataaataatcaccatttttgaaaccaaaccagagcctga

SEQ ID NO: 2147 - DNA, 503 bp, Homo sapiens
  MAP TO CHR17.1; EXPRESSED IN BRAIN, SIGNAL = 1.5; EXPRESSED IN LUNG, SIGNAL =   1; EXPRESSED IN HEART, SIGNAL = 0.97; EXPRESSED IN ADULT LIVER, SIGNAL = 1.3; EXPRESSED IN BONE MARROW, SIGNAL = 1.7; EXPRESSED IN FETAL LIVER, SIGNAL = 1.5; SWISSPROT HIT: P34926, EVALUE 9.20e-01; NT HIT: AF156673.1, EVALUE 8.00e-03; EST_HUMAN HIT: BE766419.1, EVALUE 7.00e-01
tgcctaagaaggggaagacctaattagatcacagctcatgaggaaaagacctaggagtgactgcaaaccccacctttgtttgggctgcggaagaagtgatgccatcccggaatgaatgaacataaagggtgttcaggccagggagaaaaggcctctgtgatcagactatatctggaattgggtgttccgatctggctgcaccacagagaaagacaatgcagggctggacccactccagagaagagctgcctcgccctccagcgtcctcagcctcggctccctgcccacagacagctggacccagcctggctctctgattcccaacccctcctcccccaccccatccctgtctgctcagcacttccaggcccccaggacagcctgaatttgcccaccacttccgcccaaacgtccatttcaatggaggttccacgggactttttgcttgtgaaacggactccagccctggctcctgaggagctgggtttgagtcttggctcagc

SEQ ID NO: 2148 - DNA, 584 bp, Homo sapiens
  MAP TO CHR1.1; EXPRESSED IN PLACENTA, SIGNAL = 1.6; EXPRESSED IN FETAL LIVER, SIGNAL = 2.1; EXPRESSED IN LUNG, SIGNAL = 2.1; EXPRESSED IN HEART, SIGNAL = 2.4; EXPRESSED IN HELA, SIGNAL = 1.8; EXPRESSED IN BRAIN, SIGNAL = 2.8; EXPRESSED IN BONE MARROW, SIGNAL = 2.8; EXPRESSED IN ADULT LIVER, SIGNAL = 1.1; EST_HUMAN HIT: BI914767.1, EVALUE 1.00e-70; SWISSPROT HIT: P13688, EVALUE 2.50e+00; NT HIT: U66315.1, EVALUE 3.60e-02
actacagacctgaccccgtgtacttactaagagtcatatgtatgcatacacccactgcacccactattgttgacagactgcactcctgtacacatttgaatcttcatgtgtatgcacagaaatgcacacaaagtctgatgttccatatatcccaggcacattctaatattcacgggtttacaagcatttttctgggttttcatgctggcaggtgtgtgtatacagaagcacatactactacagaatttacccaatccatgaactctctgctgcccattattggacttagcccagcccatctgaggcccttcttgcccagtactgggtgtaccttcaaatgggctctggagctgctggcgccggcggtacaggtagcaacaggaacagaggaagcagcagatggtggtggcaaccacagcaacaaagaggatcacagctgaggcgatgcctgctatggtcttggggctttagacaaagaacaggtcctctcaccttccaacactcataggacggagtcctcattatgctggctccaactcctggccagcaggggggccatggcatgctgagatttggggttcctt

SEQ ID NO: 2149 - DNA, 527 bp, Homo sapiens
  MAP TO CHR22.1; EXPRESSED IN BRAIN, SIGNAL = 6.2; EXPRESSED IN HEART, SIGNAL = 4.5; EXPRESSED IN ADULT LIVER, SIGNAL = 6.7; EXPRESSED IN BONE MARROW, SIGNAL = 6.1; EXPRESSED IN PLACENTA, SIGNAL = 6.3; EXPRESSED IN FETAL LIVER, SIGNAL = 5.6; EXPRESSED IN LUNG, SIGNAL = 3.6; EST_HUMAN HIT: AI302274.1, EVALUE 1.00e-102; SWISSPROT HIT: Q15459, EVALUE 1.00e-20; NT HIT: gi5032086, EVALUE 1.00e-102
acgcatgaaataccaccctcttaactcaggtggctgcccaccagtgttcttactgaaacatctgtttccttttagcctccaagcccttgcctccagcccctgctccagatgagtatcttgtgtcccccattactggggagaagatccccgccagcaaaatgcaggaacacatgcgcattggacttcttgaccctcgctggctggagcagcgggatcgctccatccgtgagaagcagagcgatgatgaggtgtacgcaccaggtgaggtgggggttccaggagagcccatggtagtctccgaattacagccatcttcttctaagcaaacatagaaagcaacaattgaggtcaacaaaagcttttgaggagagttgcactctatgatattgcaagagaactccccactttccagaagaactccccatagaaattccccaaaggcagacactgaaggagatgccatgtgcctgttgacatcccagagcaagctctggctttagctggaagggcttcctgtggctgtttag

SEQ ID NO: 2150 - DNA, 534 bp, Homo sapiens
  MAP TO CHR7.1; EXPRESSED IN ADULT LIVER, SIGNAL = 2.8; EXPRESSED IN HEART, SIGNAL = 1.6; EXPRESSED IN BONE MARROW, SIGNAL = 2.8; EXPRESSED IN PLACENTA, SIGNAL = 1.9; EXPRESSED IN FETAL LIVER, SIGNAL = 2.3; EXPRESSED IN LUNG, SIGNAL = 1.5; EXPRESSED IN BRAIN, SIGNAL = 2.6; EXPRESSED IN HELA, SIGNAL =   2; EST_HUMAN HIT: BE622817.1, EVALUE 3.00e+00; NT HIT: gi15791399, EVALUE 7.90e+00
gctatcatggagcagcattggagaaacctaaagggtatgcaaacataactgtcttctggtgttgccctccccaaataggatcaaaaattccaattattgtatattatctgtcacaggacagcaaagtcctattagttatgtagactgtagttgttgaaatataagtgctctagtttgtatatctctgaagaaccatgtctaattgaacatgcctgttttagtctctgttgcctttaaaacaataaaaatcgctgtccctaatggcaaaaaatcaagtagtgctgaaaaagcaaaactgaaaggactggcaaagtccagaaattgcaagtgaaattcaaaaggatttgcatttgctgtgtgagttggctgatgtagcaaatcacatttaatgctgacagctgttaaaaataatgataaatggacaccaaaataagcaggtaaatgaagcaagcaaaccagagtcactgagttcctaatagatgacaaaaagctctgacatgggttaaaatcctttgaatggtaagaaatggggca

SEQ ID NO: 2151 - DNA, 556 bp, Homo sapiens
  MAP TO CHR1.1; EXPRESSED IN PLACENTA, SIGNAL =  30; EXPRESSED IN FETAL LIVER, SIGNAL =  34; EXPRESSED IN BONE MARROW, SIGNAL =  46; EXPRESSED IN ADULT LIVER, SIGNAL =  41; EXPRESSED IN LUNG, SIGNAL =  26; EXPRESSED IN BRAIN, SIGNAL =  31; EXPRESSED IN HELA, SIGNAL =  14; EXPRESSED IN HEART, SIGNAL =  30; NT HIT: gi16161683, EVALUE 1.00e-88; EST_HUMAN HIT: BF974794.1, EVALUE 9.00e-87; SWISSPROT HIT: P49368, EVALUE 9.00e-30
cttgaggccaggagtttgaggctgcagtgggctgtgactgtgccactatactccagcctaggcaacaaggtgagactctgtctcaaaaacaaaacaaaacaacggcatgaaaaacagactatttcctcacaagtgagatgactcatgctaacatataatttgacccaatgtatacactttgaaagtttaccttttccactcttgcatatttttttatgtcaatctctttccgaccattctcctcaaactgtaccatcttgacagcatccagggcaatgttgcaagccaaagatgaccaccgactgatggctttggtagtaatagagctgttgatgatgttcagcatcatatcactgtcactgatgtcgactgggatactagagaaaagaaaaccagacgatatgtgaagaaggcatgttagatatgtagagatgtgccttatctatacctcagtgactataataatggaccaagaggcagaacaaggggatttgttcctttggaggaaactaaaaggacattaggaggtaacctttgtccattcctctgcctttca

SEQ ID NO: 2152 - DNA, 529 bp, Homo sapiens
  MAP TO CHR7.1; EXPRESSED IN LUNG, SIGNAL = 3.6; EXPRESSED IN HELA, SIGNAL = 1.3; EXPRESSED IN BRAIN, SIGNAL = 1.3; EXPRESSED IN HEART, SIGNAL =   2; EXPRESSED IN ADULT LIVER, SIGNAL = 0.72; EXPRESSED IN BONE MARROW, SIGNAL = 1.2; EXPRESSED IN FETAL LIVER, SIGNAL =   1; EXPRESSED IN PLACENTA, SIGNAL = 1.5; SWISSPROT HIT: P29619, EVALUE 3.00e-03; NT HIT: gi15299185, EVALUE 1.00e-72; EST_HUMAN HIT: BF204361.1, EVALUE 2.00e-72
aatgaatggcaggattccactaaatatatatacacatggccccccttcccctgttctctctctctctctctctctctccacacatacacacacacacacacacacacacctgtaatgcacatacaaacatacattatcttatgtttgtggacacacaaatatgtgaatctctgcatacacgttacatacagatgccaaaataaaatgatgtgtctgcttggactggatgttgtggatttgtcatactcactgtcggtgagttcccatagccgtggcggcaggtcactaaaatactcgtggctcaaggcagcctgtgccgacagtctgttctttggggaacattgtaggagcttggaggccaggtcctctgcatggttcacatagctgagcctaaaaacatgagcaaaaaagagaggtcagaccaaacaagaaaatccactaaataagacataaagcttacctaatttttctggatttcaatttattcctggctagaaaaacaaattacctgctgaaataaacagaagca

SEQ ID NO: 2153 - DNA, 600 bp, Homo sapiens
  MAP TO CHR7.1; EXPRESSED IN FETAL LIVER, SIGNAL = 0.71; EXPRESSED IN LUNG, SIGNAL = 1.2; EXPRESSED IN HELA, SIGNAL = 1.8; EXPRESSED IN BRAIN, SIGNAL = 0.52; EXPRESSED IN HEART, SIGNAL = 1.1; EXPRESSED IN BONE MARROW, SIGNAL = 0.65; SWISSPROT HIT: Q9UPN9, EVALUE 2.60e+00; NT HIT: gi14753015, EVALUE 0.00e+00; EST_HUMAN HIT: BG717945.1, EVALUE 0.00e+00
ttagcccatccttgcaaatcaactctttcagcgcttcctggaactcaccaccgttttggggaccaagaggcggggctccgcgagcagggtgcctattggcctgagggccggcgggctctgggcgctaattgggcggagggcggtggcgctctggcacgcttgcgcggcgagtagaacgtgtggcggcggcggagatcgcgtctctttcgctccgtgtcccgctgctgctcctgtgagcgcccggcgagtccgtcccgtccaccgtccgcagctggtagccagcctgcccctcgcctcgactccctttcaccaacaccgacacccacattgacacctccagtccggccagccgctccactcgttgcctttgcatctccacacatggcgtcctccgcgcagagcggcggctcctccgggggacccgcggtccccaccgtgcagcggggcatcatcaagatggtgagaacgggccccggacaccgacccctctgcctgccttcgggcgggagtcaggcattgactccaccttccgccagcctgctccatgtcccagatcccctttcctctgcccccttcctcacttttcgtcgattctccgaa

SEQ ID NO: 2154 - DNA, 502 bp, Homo sapiens
  MAP TO CHR19.1; EXPRESSED IN PLACENTA, SIGNAL = 4.7; EXPRESSED IN FETAL LIVER, SIGNAL = 3.6; EXPRESSED IN LUNG, SIGNAL = 2.7; EXPRESSED IN HELA, SIGNAL = 3.8; EXPRESSED IN BRAIN, SIGNAL = 4.1; EXPRESSED IN HEART, SIGNAL = 4.1; EXPRESSED IN BONE MARROW, SIGNAL =   4; SWISSPROT HIT: P08572, EVALUE 1.10e-01; NT HIT: gi14756560, EVALUE 4.00e-97; EST_HUMAN HIT: W22972.1, EVALUE 2.00e-53
ggttggggcatcagacttacactacccatgcctggtcgccagcatctcccctggtggagccaggcccccgtggtcaccgagtttgaggggaagcttctggcgcaggtttctacggctgagttcccaggcactgaccctgagaccctgcactacttccgggacctctatctcccagcctccaggaagctgttttgctccgtgggacagaacccacaggacgtggttcaggtgagtgaagggcccagagccccaagacgtggctcaggtatgttgcggggtgaggccctcccctgggtcccagcgctcagggcctccattctgcaggccattgtcaacgtcatcagctcgactcgaccacccctgcgccgacagaccaacatccgctactcgccgctgaccacgcttaaaaccgtggattcctctggcagcctgtatgtgcgaacgacccaccgcctcctcttccgctgtccacgcctcctcaaccttggccttcaatgtctgt

SEQ ID NO: 2155 - DNA, 522 bp, Homo sapiens
  MAP TO CHR15.1; EXPRESSED IN PLACENTA, SIGNAL = 3.9; EXPRESSED IN LUNG, SIGNAL = 4.2; EXPRESSED IN HELA, SIGNAL = 3.5; EXPRESSED IN BRAIN, SIGNAL = 2.7; EXPRESSED IN BONE MARROW, SIGNAL = 5.1; NT HIT: gi14756730, EVALUE 1.00e-84; EST_HUMAN HIT: BE544267.1, EVALUE 2.00e-84
gctgcatcagagacaactgaagatgaaaaaactaccatccccatatataactaatttgtgccatgcactaacaagaacctgcttttaatttccatgccagtttacaatccccatactgtactaggcaaggttggtggctattgaaaataccaccaggacagggatatctaaagacacatttggtagtgtgttaactatacaaaaaaaaaaagacattgtacagtttaaaaacaaatcttacacagccttacatttcagtttttttctttaaaaggagtgagttatgtacaggttaaatgctttatagacgagaaaaaaaactacactagaaccaacttattcatcatcatcttcatcttcctcctcctcattcttatcctcttcatcttcctcatcttcctcctcttccttctttttcttgcttttttcagccttgacaactccctttttttgctgcagcaggctttcctttagcccgatatgcagcaatatccttttcttacttttccttcagcttcgcag

SEQ ID NO: 2156 - DNA, 588 bp, Homo sapiens
  MAP TO CHRX.1; EXPRESSED IN BONE MARROW, SIGNAL = 1.3; EXPRESSED IN ADULT LIVER, SIGNAL = 0.94; EXPRESSED IN HEART, SIGNAL = 0.84; EXPRESSED IN FETAL LIVER, SIGNAL = 1.3; EXPRESSED IN BRAIN, SIGNAL = 1.2; EXPRESSED IN HELA, SIGNAL = 2.2; EXPRESSED IN LUNG, SIGNAL = 1.1; EST_HUMAN HIT: BG121806.1, EVALUE 9.00e-84; SWISSPROT HIT: P10398, EVALUE 2.00e-28; NT HIT: U01337.1, EVALUE 0.00e+00
cagctgtctgtaagggcctcgtggctgggcctctgtgctccccatccccccacccaccccaggctgggctcactgttggcggttggtactcatgtcaacacagactgtggggaccttggaggaacaatgctggtggaacttgtagccacaggtttggcaacggaagccatggaacagaaacttaaggcagaagtcacagaacgccaggctgaagaaggtcttccgtacctgatgccacagagcagggaagtttgagacctggtcaaggacacccccaaccatggtccacccccaccgtccaccctgcactcacaaaattgtgcatggtcagcgggacatcttcaaggacctcgacaatgagctcctcgccatccaggggagcaatggctgtgtcccaggcagtgaccgtctttcgtctgcagggggcatggaaaggaatgagtgggaggttgggtaggggccatggggaggcagggaacccccacaagtccctccaagcctgctacccacagggtcatgtctggcatgtttaattctcatcacagcaactctagaaattagtcactatccttgccccaactttacaga

SEQ ID NO: 2157 - DNA, 551 bp, Homo sapiens
  MAP TO CHR1.1; EXPRESSED IN LUNG, SIGNAL = 5.1; EXPRESSED IN HELA, SIGNAL = 5.9; EXPRESSED IN BRAIN, SIGNAL = 8.5; EXPRESSED IN ADULT LIVER, SIGNAL =  11; EXPRESSED IN BONE MARROW, SIGNAL = 9.7; EXPRESSED IN HEART, SIGNAL = 5.7; EXPRESSED IN PLACENTA, SIGNAL = 7.3; EXPRESSED IN FETAL LIVER, SIGNAL = 7.8; SWISSPROT HIT: P04540, EVALUE 6.90e-02; NT HIT: AL115664.1, EVALUE 5.20e-01
attatgcaggaggcaaggagtgggaaaccagatcattttatttgtgcctctgaactagggaaaaagagaagtcattagtaaatctaatagttatgttgccatcaattttttgatccagttttcaaaagttatttacaattattgtagactatactgtgtgttgaggctaattggaaacagtgaccagattcttaatcattatcaggaaactgcattcagagaatgagaagaacacccccgctggatgaattgcagccaccaccatatcaggatgacagtggttctccccatctgtcatgtacaccctcagaaattggggacagtaaatgtgaattttcccactgcagcaacagtccaagatgctcatataacaagtgcccaagtgaaggaagcacaggtcatgaaatagaaagttttcataataaaggatatgaagaagatgttccaagtgacagcactgcagtcctgagccctgaagtaagtaaaagcacatagaagtttgaaaatgaatgttatttggaggataataatcctgtgcttctcctcttggt

SEQ ID NO: 2158 - DNA, 594 bp, Homo sapiens
  MAP TO CHR22.1; EXPRESSED IN PLACENTA, SIGNAL = 1.7; EXPRESSED IN FETAL LIVER, SIGNAL = 1.4; EXPRESSED IN BRAIN, SIGNAL = 1.7; EXPRESSED IN HEART, SIGNAL = 0.81; EXPRESSED IN ADULT LIVER, SIGNAL = 1.6; EXPRESSED IN BONE MARROW, SIGNAL = 1.5; EST_HUMAN HIT: BG548231.1, EVALUE 1.40e-02; SWISSPROT HIT: O88935, EVALUE 2.30e-01; NT HIT: K02212.1, EVALUE 3.60e-02
tttccacagatgaagggacccatccccatgtgctccatccctgcagcccctgggggcttccttccctggggtgtggtcattgataagctgcccaagagctggatgaggctgggcagtggggttggtgagggcaggggctgggaagaggcggcacttccctcctgggcccaacacttctgcccactcagcacctccaggcccccagaggcctccaggaggggagaaacaggccagaccagctcagcctggcaccggccactcccacaaaggccccccacctacacccacactccaccccctgccacgaggggcccaggggactttgtctctgtagggcccagggctgcgatccggaacagtgataggggctaattgcaggaggcagccaagcgggcccggggccaagggctgtgatgaaaaggagaagaaagaaaggaccgggcgggcaggggtggtatgatgagagccagagccccgcagtaggggcgaagttccagtcctggctctgctgcttcctacatcggtgaccttggacaaggccctgaccctctctggacctcattttgtccatctgcaaatggggacagcagaatt

SEQ ID NO: 2159 - DNA, 557 bp, Homo sapiens
  MAP TO CHR6.1; EXPRESSED IN FETAL LIVER, SIGNAL = 0.84; EXPRESSED IN LUNG, SIGNAL = 0.61; EXPRESSED IN HELA, SIGNAL = 0.96; EXPRESSED IN BRAIN, SIGNAL = 0.91; EXPRESSED IN HEART, SIGNAL = 0.79; EXPRESSED IN ADULT LIVER, SIGNAL = 1.2; EXPRESSED IN BONE MARROW, SIGNAL =   1; NT HIT: gi12731938, EVALUE 1.00e-109; EST_HUMAN HIT: BG027374.1, EVALUE 1.00e-109; SWISSPROT HIT: O75818, EVALUE 8.00e-33
gcaaaaggagctgaaagcagctttaaatgattttaatttgaatgcagctctgcacagcttccatcttactcaatcttaccgctcagatgggaatgggtgggttcaggtattcactaaacttgcttacgatggtcagatggattcaaatggccttgtgtggtgtgtttttaaggttcagaagaatcgacaatgatgtcatatttttccaagtaccaaattcaggagcatcagccaaaagtagcactgagcacgttgagagatctccagtgcccagtgctgcagagcagcgagctggagggaacgccagaggtgtcctgccgggctctggagctcttcgactggctcggcgccgtcttcagtaatgtcgacctgtgggtatctgaactccctgtgtcttccagggctctggcctgctgcttgtttttaataggagtttaatactttggaagtgatcatgtgatggatatacatgtgttatctctctctcttttatttttttggtgacagaaataatgagcctaataatttcatatcaacctattgctgtcctgagccaa

SEQ ID NO: 2160 - DNA, 507 bp, Homo sapiens
  MAP TO CHR17.1; EXPRESSED IN LUNG, SIGNAL =   1; EXPRESSED IN HELA, SIGNAL = 2.3; EXPRESSED IN BRAIN, SIGNAL = 1.1; EXPRESSED IN HEART, SIGNAL = 1.2; EXPRESSED IN BONE MARROW, SIGNAL = 1.1; EXPRESSED IN FETAL LIVER, SIGNAL = 0.98; NT HIT: AF312393.1, EVALUE 0.00e+00; EST_HUMAN HIT: BI463548.1, EVALUE 1.00e-100; SWISSPROT HIT: O53426, EVALUE 3.20e-01
cgacaatatagagcgtggggtcctccatggctacccggagccgtgcgggaccggccgggtggggctggagctggagcgggagacccggagagaagcaggagcggaagggaggagagctagcgggcgagagcggagagcagaggaaactcgagccacgtccgtgcgcaccgggacagcggccagaactgctgggcgggggatcggtgagctccccagctcccgggccaaactccggagtctgatcgctgattggctggccccaccccagaaagggagggaccggggtagaaggggagatcgacgaggcggggcggcggagggggacccaagagccgagcgccccacccttcccgggatggttggaatagttggagcgggagactagggcctccgctggcggcgggagcgggacgggcggaggaatgcgagctgaggaacggaatcaggttctaagagtgttgctctctgtttccctctcacttgaattgctcatccgaaaatcctcaa

SEQ ID NO: 2161 - DNA, 508 bp, Homo sapiens
  MAP TO CHR17.1; EXPRESSED IN FETAL LIVER, SIGNAL = 1.6; EXPRESSED IN LUNG, SIGNAL = 7.6; EXPRESSED IN BRAIN, SIGNAL = 1.7; EXPRESSED IN BONE MARROW, SIGNAL = 1.9; EXPRESSED IN ADULT LIVER, SIGNAL = 1.3; SWISSPROT HIT: P51692, EVALUE 3.00e-29; NT HIT: gi14786062, EVALUE 4.00e-91; EST_HUMAN HIT: BG394677.1, EVALUE 6.00e-91
aaatggagatttctattggagccattataatggcaagcttgaatttatagtatgttggggttttaagatttcctaattcagaaatcatgtttagaatgtgattgttctgtttattgatctagaggaaagaatgttttggaatctgatgccttttaccaccagagacttctccattcggtccctagccgaccgcttgggagacttgaattaccttatctacgtgtttcctgatcggccaaaagatgaagtatactccaaatactacacaccagttccctgcgagtctgctactggtaacaatgttcgcattctgatttgattttgttgtgtgtgtgtgtgtgtgtgtgtgtgtgtgtgtgtgtgcatacctgcgtgtgttatctctcttgtgtgaaaacccacacaattaccattcagtgagagcagtttgagcattttccagggcagatgtaaaccttgggctggattcttcagtcatacagaaaacacatctaccactaaccccaaa

SEQ ID NO: 2162 - DNA, 599 bp, Homo sapiens
  MAP TO CHR17.1; EXPRESSED IN BONE MARROW, SIGNAL = 3.3; EXPRESSED IN PLACENTA, SIGNAL = 4.4; EXPRESSED IN FETAL LIVER, SIGNAL = 3.2; EXPRESSED IN LUNG, SIGNAL = 5.1; EXPRESSED IN HELA, SIGNAL = 4.3; EXPRESSED IN BRAIN, SIGNAL = 3.4; EXPRESSED IN HEART, SIGNAL = 3.2; SWISSPROT HIT: P51692, EVALUE 9.00e-35; NT HIT: L41142.1, EVALUE 1.00e-114; EST_HUMAN HIT: BF884606.1, EVALUE 1.00e-113
tgtgaggactgtgagcttggtctttggatcctggtctgggatcctcctttggcagatggcttgggtccttgctctctgttttctgtttcctggtctgcatctctgtccctgcatgcccccaccccctgcatcggttttcttccctgcaggctgggaaaaaaagtgcaagctagtatataaaagccgccgcatttcctgcccttgcatttgtgtcacctttctggatctgtctcagtctcctctgtctctaggtgtctgtgtatcttgtgtgtgtgtgaatatttccaactccctcaatctaccttttcccctctcttgtctccctctcagggcagggtgccatttgccgtgcctgacaaagtgctgtggccgcagctgtgtgaggcgctcaacatgaaattcaaggccgaagtgcagagcaaccggggcctgaccaaggagaacctcgtgttcctggcgcagaaactgttcaacaacagcagcagccacctggaggactacagtggcctgtccgtgtcctggtcccagttcaacagggtgaggggcccagctgccagccgcccaccagggcccaccggggtctgttgctcctccacctc

SEQ ID NO: 2163 - DNA, 600 bp, Homo sapiens
  MAP TO CHR2.1; EXPRESSED IN BRAIN, SIGNAL = 0.34; EXPRESSED IN BONE MARROW, SIGNAL = 0.35; EXPRESSED IN FETAL LIVER, SIGNAL = 0.28; EST_HUMAN HIT: BE084039.1, EVALUE 6.00e-85; NT HIT: gi9631294, EVALUE 8.90e+00
acctgggcagtaggtaaaggtaaagtccatagatctatgaaccttctttaaaattatccattctgtaaagcactactcaaataataccagtaataatatatgtagcttacaaattactcagatatgtataacttcatcagattcttagaaccatcatatattgtggacataaataatatatctttctgttattactgaagaaacacatataacttaaaaaatcttccttaaagttatacttgctataatatttttatagtaattatttaataataaagttttattgaatggaaaaaacgtctaactttgttgtctggatttccttagtgccacaccaaaaattgtttctaaagcaaagaatattgaagttgaaaataaaaataatttgtctgctgttccactgaacaacttggaacccattactaatatacagatctggttggccaatggaaaaaggattgtccagaaatttaacattactcataggtgagtcttcaatttcagtatttgatattttttcaccaagttaaaatttcattttttctttttggttcagtcaacagtttattttttagagatagaatctttctttgttgccca

SEQ ID NO: 2164 - DNA, 587 bp, Homo sapiens
  MAP TO CHR2.1; EXPRESSED IN ADULT LIVER, SIGNAL = 0.41; EXPRESSED IN BONE MARROW, SIGNAL = 1.1; EXPRESSED IN FETAL LIVER, SIGNAL = 1.1; EXPRESSED IN HELA, SIGNAL = 0.74; EXPRESSED IN BRAIN, SIGNAL = 1.1; SWISSPROT HIT: P78575, EVALUE 4.30e+00; NT HIT: AF388573.1, EVALUE 5.60e-01
cagtgtccagaccaccaatgaattcccacttagctcctgagacggttacatgaaaatgccttccctaaaatcttgggaaaaagcctaatggttgcttaaaactggctatctgaaaagcctttggcttgtcagtcataggccccttacaagtacccacggaaaagatgtttccccagcaggcttctctggaaaaggggatcactggagagggcagggccttactccatcagctttaagaataagcaccccatggaataaaaagaaagccatctacccagcataacctgagccttgtaacagagaggggagtgtgtgggaagaacaagaggcagatccaattaattacccttagaagcaaaggtaaaagttgaagattacgagacccatttacaggaggaaatagacccatcattgagcctagagaatgggaggattgtttagggccagaaaagcgtctcaatgttcagattccattccttttctggagctttggaaagaggaaggtcatagcttgggcttggaagttacacttagcagtgggttcagactggtaggaggggggtgctgctgtcttgggtccgattctg

SEQ ID NO: 2165 - DNA, 552 bp, Homo sapiens
  MAP TO CHR18.1; EXPRESSED IN ADULT LIVER, SIGNAL = 1.1; EXPRESSED IN FETAL LIVER, SIGNAL = 0.85; EXPRESSED IN LUNG, SIGNAL = 4.3; EXPRESSED IN BRAIN, SIGNAL = 0.74; EST_HUMAN HIT: AI904584.1, EVALUE 1.00e-116; SWISSPROT HIT: P18490, EVALUE 4.00e+00
cagctgcctgttgttgtgaggtttttttctccctttattcaattgcctctgaaattacaggtgagcagaatggcaacaggaatcctggtggattgcagattggtgacctggtaaatatagatctcgacctcgaaattgtacagtctttgcagcatggtcatggaggatggactgatggaatgtttgagactttaactacaactggaactgtttgtggcattgatgaagatcatgacattgtagtacagtatccaagtggcaataggtgggtgatatctctcaatttttgacaatgacaaataaaactaatatagagaaaagtcttagagaaagcaaataaagtgatacaaccaaatactcattaaagctagcttttagatggtaagtaaaaatccagaatatatattggtaaggtggagagaaacaaatgataagaattacgtgtgtgtgtgtgtgtgtgtgtgtgtgtgtgtgtcttgtgtgtgtatgtgaattatatgaggatgtttatgatacagtgttctgtacactatttttccttcaagaggagaa

SEQ ID NO: 2166 - DNA, 572 bp, Homo sapiens
  MAP TO CHR20.1; EXPRESSED IN BRAIN, SIGNAL = 1.3; EXPRESSED IN HEART, SIGNAL = 1.4; EXPRESSED IN BONE MARROW, SIGNAL = 1.5; EXPRESSED IN PLACENTA, SIGNAL = 1.2; EXPRESSED IN FETAL LIVER, SIGNAL = 1.8; EXPRESSED IN LUNG, SIGNAL = 1.1; NT HIT: gi14786661, EVALUE 1.00e-105; EST_HUMAN HIT: BG257453.1, EVALUE 1.00e-103; SWISSPROT HIT: P04066, EVALUE 1.40e+00
gtccaggctcaagaggtcagacccaggcttctggccagtggcccctactcgctacccagatgctcagttctctgctggatccttgtacctcccatggtaactgagcagataaagacagaaagacacatcgtgaagggctctgttcctgggtttacagaatatttctgcattgaaaaccagttacacatcaagagacatgctccttacaagctaggaagaaatttctggaactaactccaagtgtttttctttaagccggcagcagtcctgcctgcttcaacctgcttcccgaggttctgagtcttacccccggaggctgggcctgcaggacctctgctgcctcctcctcactcagactcagctgcagccatatggggtgggtgtggaggagccggtccaagatgctgagcctgttggagaggctgtcatagcctgagtcccgggcacaggtcttcacgtcctcttcctcggaatagccaccatccttgtgtcttaccatgctaggagaaagagaagcggcacggtcagctggctgcagtaccatttccctaacaaggagaccgtccctacaa

SEQ ID NO: 2167 - DNA, 548 bp, Homo sapiens
  MAP TO CHR1.1; EXPRESSED IN FETAL LIVER, SIGNAL = 1.2; EXPRESSED IN LUNG, SIGNAL = 1.2; EXPRESSED IN BRAIN, SIGNAL = 0.89; EXPRESSED IN HEART, SIGNAL = 0.61; NT HIT: AB011173.1, EVALUE 1.00e-118; EST_HUMAN HIT: BF926145.1, EVALUE 0.00e+00; SWISSPROT HIT: Q21988, EVALUE 2.00e-04
aaatgtcctgtgcttcagggtagcgaggctccctcccagaaggtagttatacatgagggaaggacgctttacaactgggtatctaaactgatgagaacacatgttaagcatcactttaggactgagcctaggtagagttttattgtctcatttctacttgtcaattctgggaaagtgcctactgataagggagactcttcgatagaatgatgaatagtaattgggggggtcagcctttaaaaaggtcaacagcaatttaagtacttagcaatttaagtacaagaataaaggtatatgtgcagcctgccaattttctctttttcccctaaaatagccgattccacgactcttctttgcgggagaacatacgatccgtaactacccagccacagtgcatggtgctctgctgagtgggctgcgagaagcgggaagaattgcagaccagtttttgggggccatgtatacgctgcctcgccaggccacaccaggtgttcctgcacagcagtccccaagcatgtgagacagatgcattctaagggaagaggccc

SEQ ID NO: 2168 - DNA, 583 bp, Homo sapiens
  MAP TO CHR2.1; EXPRESSED IN FETAL LIVER, SIGNAL = 4.7; EXPRESSED IN LUNG, SIGNAL = 8.4; EXPRESSED IN HELA, SIGNAL =   5; EXPRESSED IN BRAIN, SIGNAL = 4.3; EXPRESSED IN HEART, SIGNAL = 4.7; EXPRESSED IN BONE MARROW, SIGNAL = 4.1; EXPRESSED IN ADULT LIVER, SIGNAL = 4.6; SWISSPROT HIT: P47838, EVALUE 1.00e-06; NT HIT: AL163208.2, EVALUE 2.00e-44; EST_HUMAN HIT: BF893263.1, EVALUE 2.00e-38
tccacgtggtagaggaggtctcacaatcgtggtagaaggaagggacgtctcacatggcggcaggcaagagagaaaggggaaagcccttataaaacatcagatctcatgagacttatcactacctcaagaacagtatgggggaaactgcccctatgattcatttatctcccactggatccctcccataattccaacacgtggaaattacgggagctacaattcaagatgagatttaggtggggacacagccaaaccatatcataaagtaaatagcattagatggaggacacatacacaaaaactctcgagttcctcaattttattttattttatttttgggagtctagtcttatttattggttacttaaaagaatcctaattttggctggactcagaagttgaatctcacagagaggacagtgtgcatctcttggcaatctgttcctggagtttgtctttggcctccttcattctcttggccaaaagttcagcgtattttgcagcctcttcctcatttttcttagtacactgtttcttcagagcaatacgccagcatttgtgttgcaagacacatggggtaaca

SEQ ID NO: 2169 - DNA, 508 bp, Homo sapiens
  MAP TO CHR10.1; EXPRESSED IN FETAL LIVER, SIGNAL = 0.67; EXPRESSED IN LUNG, SIGNAL = 0.86; EXPRESSED IN BRAIN, SIGNAL = 0.59; EXPRESSED IN HEART, SIGNAL = 0.94; EXPRESSED IN BONE MARROW, SIGNAL = 0.52; SWISSPROT HIT: P41739, EVALUE 9.30e-01; NT HIT: gi6754709, EVALUE 4.80e-01; EST_HUMAN HIT: BI909006.1, EVALUE 7.10e-01
cagatgcaaatatcccccaccagtgtttgtacagctttgggcaagtgacaggtcaacctccagttgttgacagggagaggttttgtgagccaaacacctttatcatgaagtattatcttgtaaaaatatttactagggtgtaagtgcagaacattgtgcttccagtgaggcacacgaattttgcaaccgtgatgcagtcccacaaaacaatacccaggaaaaggccttatttttctcagcccttgctgtgcacgttgtttgtatggaagcgttccctgattggctctgcctcttgttttgaagttctgttttcacggttgaccatgcttcccggtcacatagaatacctttttattactgcccctgatttttgtgtaaaagaaatttgagtttatgtcataaagtgagtgtcactcctaagaaccaagcttgatgaaaattgtgctcctatctggcaaacattctcattcccgtgcatctttggcacggccgtcttcttctgtggtgt

SEQ ID NO: 2170 - DNA, 538 bp, Homo sapiens
  MAP TO CHR11.1; EXPRESSED IN HELA, SIGNAL = 2.1; EXPRESSED IN BRAIN, SIGNAL = 3.4; EXPRESSED IN HEART, SIGNAL = 2.3; EXPRESSED IN ADULT LIVER, SIGNAL = 3.6; EXPRESSED IN BONE MARROW, SIGNAL = 3.4; EXPRESSED IN PLACENTA, SIGNAL = 2.4; EXPRESSED IN FETAL LIVER, SIGNAL = 2.8; EXPRESSED IN LUNG, SIGNAL = 2.1; SWISSPROT HIT: Q06033, EVALUE 3.90e-02; NT HIT: gi14772151, EVALUE 1.00e-124; EST_HUMAN HIT: BI223250.1, EVALUE 1.00e-124
atgctgggaatctatggtggcgaccatgctgagtgtgtagggcaggtcctccacagggactataggagtcttcacattaaggcaactgtccttagacgaccctataaaagatgaccttagttctgttttccttgccaacactttttatgacactctcaaccttaagaaaatttccccatttatgtcacccaccactagaattcaaaggggagaggtactcaccagagaactggtatctaggattcaggacagctgggagcacaaagcgcagagccccatctgcttccagaggcagctcctgcacatacttcagggtgactgccgccttcgacccaggttggaggttacccacattgcaagagaagacatccctggagctgctgtccccctccaataagaaggcctggtggccctgggagatggctttctcatagttggtgcgggcctgagaagcacagggcgagggatgggaaagaaagggaacatccaaggtgacatggctgaaaaagagacgagcagtgcagagcgactgtgtgat

SEQ ID NO: 2171 - DNA, 559 bp, Homo sapiens
  MAP TO CHRX.1; EXPRESSED IN LUNG, SIGNAL = 1.4; EXPRESSED IN HELA, SIGNAL = 1.3; EXPRESSED IN BRAIN, SIGNAL = 1.1; EXPRESSED IN HEART, SIGNAL =   1; EXPRESSED IN ADULT LIVER, SIGNAL = 0.96; EXPRESSED IN BONE MARROW, SIGNAL = 0.98; SWISSPROT HIT: O60488, EVALUE 2.00e-24; NT HIT: gi12669908, EVALUE 0.00e+00; EST_HUMAN HIT: AL598614.1, EVALUE 0.00e+00
tggaagctgcaaatttcctcaaactacattctactccaactccaatttattttgttcaacattaaatatttttctttacaaaaacaagtatatcttaggctaatttttaaaaacagaatttctgctctataataacacagctaaagggaaataacttttcaatttcagctgcactagaactatgcaaaactaagttaaagtaaaccggacaacaattttaataacttttggttttgttttctttttactctatctttagaatgatataccttacattctaacagttcaacaaaggcttaaaattctagaggttgaaaaccaccaggctacctcctgcacaactgtcaataagacaacaacattttatttgcccccatacattcgttcaatgtctttgaggtaatggttcctcagctccttccttttcagtttgaaagcatcagttaccaaaccagtttcaggggtccatggctctgggcttaatcgaaccttgattggaatttcaaatcgctccaatttcactgaaattagaagtgaaagatgggagaaaaggagaggg

SEQ ID NO: 2172 - DNA, 583 bp, Homo sapiens
  MAP TO CHR11.1; EXPRESSED IN FETAL LIVER, SIGNAL = 2.9; EXPRESSED IN HELA, SIGNAL = 2.7; EXPRESSED IN BRAIN, SIGNAL = 3.5; EXPRESSED IN LUNG, SIGNAL = 3.4; EXPRESSED IN HEART, SIGNAL = 3.2; EXPRESSED IN ADULT LIVER, SIGNAL = 1.2; EXPRESSED IN BONE MARROW, SIGNAL = 3.4; NT HIT: Z69780.1, EVALUE 0.00e+00; EST_HUMAN HIT: AL537900.1, EVALUE 0.00e+00
taaaaacaaaggggctgtgcaaaaggtgatgggtggcccaaggagggagccaagagaccaagttccggccaaagggtcagcgccatgcagctattctggttacacagttgtcactggccaccaggaaatgcagccacaacaggttctagcagcaaagctataagtgagctggctctcactgagaactgaccaggtttgcagctgttactcctcagggatttgggatgccccttgggggattcttgggaatgacccatcacaattcctcaatctgcacttttgtgcggagattcccttggtcacttttgaaatgaactcagatgtgtttggagatagctgtgccgtttttgccttctttccctcttgtagggaaaccttcgcttattcccccaagttgctggcaggtgtgctgaaaatttggcaatggactcaaggctgagctagaagaggaatttctcatttttgtggttgacaattagggggtggaaaggcaaggcaaaccatctgcagctggcaggagaaggaagctgtgggttcctcccctgtcctcagggtttagggttggtagagagtgaggaggggc

SEQ ID NO: 2173 - DNA, 580 bp, Homo sapiens
  MAP TO CHR14.1; EXPRESSED IN PLACENTA, SIGNAL =  42; EXPRESSED IN LUNG, SIGNAL =  25; EXPRESSED IN HELA, SIGNAL =  34; EXPRESSED IN BRAIN, SIGNAL = 3.9; EXPRESSED IN ADULT LIVER, SIGNAL =  43; EST_HUMAN HIT: BG684294.1, EVALUE 0.00e+00; SWISSPROT HIT: P11518, EVALUE 1.00e-60; NT HIT: gi13654754, EVALUE 0.00e+00
gagaccacctgtccttcgagcaggagttaacactgtcaccaccttggtggagaacaagaaagctcagctggtggtgatttcacacgacatggatcccatcgagctggttgtcttcttgcctgccctatgtcgtaaaatgggggtcccttactgcattatcaaggggaaggcaagactgggacgtctagtccacaggaagacctgcaccactgtcgccttcacacaggtgaactcagaagacaaaggcgctttggctaagctggtggaagctatcaggaccaattacaatgacagatacgatgagatccgccgtcactggggtggcaatgtcctgggtcctaagtctgtggctcgtatcgccaagcgcaaaaaggcaaaggctaaagaacttgccactaaactgggttaaatgtacactgttgagttttctgtacataaaaataattaaaataatacaaattttccttaaaaaaaaaaaaaaagaagttgttcgaaggagagagtaatcgttcctaagcaaaaagaatgctctgtagaaaagttcctagagagtaatgttggaactgggttttgaaggatg

SEQ ID NO: 2174 - DNA, 522 bp, Homo sapiens
  MAP TO CHR16.1; EXPRESSED IN HELA, SIGNAL = 1.5; EXPRESSED IN LUNG, SIGNAL = 0.57; EXPRESSED IN BRAIN, SIGNAL = 1.2; EXPRESSED IN BONE MARROW, SIGNAL = 1.3; EXPRESSED IN HEART, SIGNAL = 0.6; EXPRESSED IN PLACENTA, SIGNAL = 1.5; EXPRESSED IN FETAL LIVER, SIGNAL = 2.1; NT HIT: X77471.1, EVALUE 0.00e+00; EST_HUMAN HIT: AA913333.1, EVALUE 0.00e+00; SWISSPROT HIT: P17735, EVALUE 1.00e-22
tcattctgacaagtggctgcagccaagctattgacctttgtttagctgtgttggccaacccagggcaaaacatcctggttccaagacctggtttctctctctacaagactctggctgagtctatgggaattgaggtcaaactctacaatttgttggtaaatgactttttaatcttagactcaaatgctcagttactaacctgtaaaaaatatatgaacattacttcagcagaggaaggtctcaaagtggtggttgaagccagagacagactttattgcttacattggacccttgagataagtgaggattccccctaaatgtttcagaatcatcttagtctcatcctttctttctctccagccagagaaatcttgggaaattgacctgaaacaactggaatatctaattgatgaaaagacagcttgtctcattgtcaataatccatcaaacccctgtgggtcagtgttcagcaaacgtcatcttcagaagattctggcaggtacgtccagcagacttcacaga

SEQ ID NO: 2175 - DNA, 517 bp, Homo sapiens
  MAP TO CHR18.1; EXPRESSED IN BONE MARROW, SIGNAL = 2.4; EXPRESSED IN PLACENTA, SIGNAL = 1.3; EXPRESSED IN FETAL LIVER, SIGNAL = 1.9; EXPRESSED IN LUNG, SIGNAL = 0.9; EXPRESSED IN HELA, SIGNAL =   2; EXPRESSED IN BRAIN, SIGNAL =   2; NT HIT: gi14756107, EVALUE 1.00e-115; EST_HUMAN HIT: BF842027.1, EVALUE 1.00e-104; SWISSPROT HIT: O14248, EVALUE 3.20e-01
ttctgtttcctctggggatggagctggcaggagctaccacagctgtctctgtcagggcccagtgtgaggctggggagtgggctggggagagatgctcaccttctcctgccgccattgcagggtggtgaggttgaggacccagaaatcacgggtgacgcctccagcggtaagtccccccagcagatacatggcaccacggccagcgggcacatatgcggctgcatggaaggagcggggcgatgggcctgggcccccgtcctcggctcccgccagcatctgtgtccaccgccgctcactcactgagtacctggggccagggtgcaaaaaagcagcctcattacagtcatcccagcatccttcaaggtgaccctgcctgacagatgtccccgcatcccctggggtgaccttcctatgacagtcctcttgccattccctggagtagcaccacccaaataagtaccctggtccccaagtgtccccgggtgagcttcctgtgacaagtgtcccagcatccttt

SEQ ID NO: 2176 - DNA, 564 bp, Homo sapiens
  MAP TO CHR1.1; EXPRESSED IN LUNG, SIGNAL = 1.8; EXPRESSED IN BRAIN, SIGNAL =   4; EXPRESSED IN HEART, SIGNAL = 2.5; EXPRESSED IN ADULT LIVER, SIGNAL = 3.3; EXPRESSED IN BONE MARROW, SIGNAL = 3.9; EXPRESSED IN PLACENTA, SIGNAL = 3.3; EXPRESSED IN FETAL LIVER, SIGNAL = 3.1; NT HIT: gi12963578, EVALUE 3.00e-52; EST_HUMAN HIT: AW995913.1, EVALUE 6.00e-14; SWISSPROT HIT: P20107, EVALUE 5.50e-02
gcaagcaaaggaaaaccaacataattatttgtattttagacctataatttaagtaacatatttctctctcagtctcactttaatacttgaaagtaacaataacacttaccttacaactataagaatggctataagaattgaacagataggatctgctatcatcagaccaaaattttgcatcatgatggcagaagcaattacaccaatacttccaagtgtatctgctaggatatgtaaaaatacacctagaaataaaccataataaaaatcaaaacagtcttttggttaatttaaaatacgaatatatcctagagctatactcttaattttatatataaaaaactagatatcaacttcaaaaataagtaagcatgtatattcaccatttagtaaccatgtaatagtacatttatgaattaaaatcactttttctgtttcaaatcaacaggggttgaaatatctgactggtaatttataccttttcttaatgatataaatgaagtagagaagcaagttgattttaaaaattgtttgtgaacattcacctctggctaacaggagtcc

SEQ ID NO: 2177 - DNA, 523 bp, Homo sapiens
  MAP TO CHR19.1; EXPRESSED IN BRAIN, SIGNAL = 0.38; EXPRESSED IN BONE MARROW, SIGNAL = 0.39; SWISSPROT HIT: Q60698, EVALUE 9.60e-01; NT HIT: gi16176275, EVALUE 1.00e-118; EST_HUMAN HIT: BF593952.1, EVALUE 0.00e+00
ccactgtggctgctattctgtttgtgatgctagcctagggctcgtaagaagcccccagaaatgggcggccccctatgtgccctcgccctgcagacctacctttgtcactgtcagggtctgagtcgctgaggggcttcaggggcgaatgcaggtcctggaagtagcggtggccagcttcgcactgccacacggccgtggtgtacaggccaaaagtggggtctagctccgccaggtgcggctcgtacgggcagcggtgcttgtggtcctcgtaccagatcaccacgttcttcaggcagttcacgttgcgtcgccgccctatggacacagggccgaggagtgggtataagggacagggctcagcccatggtgacatggctgcctgaaccaccggggctttatgggtcccatgggtttggaggccctcctgagtaccatccaggcctgtacccagtttaaagggggaaactgaggctcagagaggagaggcaccccctggaggtaacggggactgttctattggcaa

SEQ ID NO: 2178 - DNA, 548 bp, Homo sapiens
  MAP TO CHR17.1; EXPRESSED IN FETAL LIVER, SIGNAL = 2.1; EXPRESSED IN PLACENTA, SIGNAL = 2.2; EXPRESSED IN LUNG, SIGNAL = 1.2; EXPRESSED IN HELA, SIGNAL = 2.8; EXPRESSED IN BRAIN, SIGNAL = 2.2; EXPRESSED IN HEART, SIGNAL = 1.4; EXPRESSED IN ADULT LIVER, SIGNAL = 2.6; EXPRESSED IN BONE MARROW, SIGNAL =   2; SWISSPROT HIT: Q9Z2S9, EVALUE 5.00e-11; NT HIT: gi14773894, EVALUE 9.00e-46; EST_HUMAN HIT: BF759388.1, EVALUE 1.00e-116
ggggtgtctgttagtcctgctgggtggccaaaatggcccggtgagcatgttccagtggcgacgacctgactagccctctcttgtgggacttgcgggggctggggtgctggagagagactgcccctggctgctgtcctctcctcctccccccgaacccgagtacgggaccaggcagctcaacggacatgcgcagggctgctgagttactatacctgggcgacacccgtcacagttaaagctaccccctcggccgtctctacgtcctcgcagcggggctgcaacgtcataatctctagggaaatcctgccaagaaacgcaaaacaggggcatgggtctgggggcgcagggcctggtggtgttgggaaagaggccagtacctcactgctccggctgggtcctggtgaggaaggtggagggaggactctccacggggctgagatgggagtgtctgagaaggaggtgggcacgagggcagggtgggtgcaggtggccccaggggaaggagtggaagtgggctgcatatgtgcacacaccctctgctcaagtca

SEQ ID NO: 2179 - DNA, 569 bp, Homo sapiens
  MAP TO CHR5.1; EXPRESSED IN LUNG, SIGNAL = 2.6; EXPRESSED IN PLACENTA, SIGNAL = 5.3; EXPRESSED IN FETAL LIVER, SIGNAL =   5; EXPRESSED IN BRAIN, SIGNAL = 4.2; EXPRESSED IN HELA, SIGNAL = 5.6; EXPRESSED IN HEART, SIGNAL = 2.4; EXPRESSED IN BONE MARROW, SIGNAL = 4.8; EXPRESSED IN ADULT LIVER, SIGNAL = 6.1; SWISSPROT HIT: Q9UKU0, EVALUE 5.00e-31; NT HIT: gi16171763, EVALUE 0.00e+00; EST_HUMAN HIT: BG722225.1, EVALUE 1.00e-123
gcagaaggagtgcctggtaggagaccctgcccaaggctgctgcagagctaagtggctgactgccaggggagacaccttctctgggccatgtgaggtcaaataagccacaagtctggcttctacttccaagatgcctgtcctctgccccctactttccgcagtggaacgtctcctatcctgctcacctctacttcttctgactgcatcaggaggttgcatggcggctgcaaggcctttggccggtgagtgaaccagtaggcaaggatggcagccagggcacccatactcacgagggtggtggccgagaggctgcggaaaaactgtcccaagtcacctagctcaggcagtcgcagtatcctcaggatctcctgtgtctgcatcttctccagaagtgagaggacaaactctgttgaaaacaagagtcagataaggcaagagacctgacgggcaggttagggaggggtcctgggtcacaggacctgatatctggtctgaaacactgtagggcaggccctgggggagttgggatgtacagagtgcaccccagaagctggctacctagaagggct

SEQ ID NO: 2180 - DNA, 571 bp, Homo sapiens
  MAP TO CHR19.1; EXPRESSED IN PLACENTA, SIGNAL = 2.6; EXPRESSED IN FETAL LIVER, SIGNAL = 1.4; EXPRESSED IN HELA, SIGNAL = 1.8; EXPRESSED IN LUNG, SIGNAL = 0.65; EXPRESSED IN BRAIN, SIGNAL = 1.9; EXPRESSED IN BONE MARROW, SIGNAL = 1.5; EXPRESSED IN HEART, SIGNAL = 0.6; EST_HUMAN HIT: H42031.1, EVALUE 1.00e-115; SWISSPROT HIT: O75298, EVALUE 5.00e-29; NT HIT: gi5032054, EVALUE 1.00e-115
cagctgaaacaagggagaggaatggcggttgggagaagaccagagttaggactgaggggcagctcagaggaatcatatgtagagggctggggtcagggtcagggtcaggggaagggatcgaggatgaagggtaccaggttaggatcagagattaggattgaagggtaggttaggggatcgggatgaaaaatgatcaagatgagtcggggtccgggtgggagtcggtgcctgatttgaggtcgtgggtcatgctttagggtcaggacaggggctcaggtcaggggccgggggttctcactggaaagggttggctccatccccccggtgcacggcctgcagcactttgcggtaaaccctgagagagatggtgccgcagagcagcaacagagccaagtgcgcggccacggacacgatgctaaagtgcaggaggcagaggagggagaccatcaggcctgtgaagaccactcctgacgtcctcgtgtccttccagtacagcaggtccgccactgtggaggggtggggggcatcagggcttgtacctgacctggctggtctcctcacctccctttcc

SEQ ID NO: 2181 - DNA, 542 bp, Homo sapiens
  MAP TO CHR19.1; EXPRESSED IN ADULT LIVER, SIGNAL = 0.95; EXPRESSED IN BONE MARROW, SIGNAL = 0.98; EXPRESSED IN FETAL LIVER, SIGNAL =   1; EXPRESSED IN BRAIN, SIGNAL =   1; EXPRESSED IN LUNG, SIGNAL = 0.75; EST_HUMAN HIT: BG118689.1, EVALUE 6.00e-91; SWISSPROT HIT: P52341, EVALUE 1.00e+00; NT HIT: AF091095.1, EVALUE 4.00e-91
tcagtgggtctagggtgtccttagagcttacacttctgaagtgttccccaaggacgccagtgctgttgatccatggaccacactttgagtagcaaggctgtaagagacattcatccttggagttctgtttggcttaaaaattgtgacccctctgtttcaatatttcccttgccccaaaagaaagtctcattaagtctgggtttgtgccttttttatgttggctattaacagccacgtcttttcctttttctaaatagcaaaacaccgaattgctcataaaccgcattccaaaccaaaaacttcagatatttttgaagcagatattgcaaatgatgtgaaatccaaggatttgctagctgataaagaactgtgggctcgacttgaagaactagagagacaggaagaattgctgggtgaacttgataggtacttgatgacaaattatctttccaagataatttgtttctatacacatttcctcattaatctttttcttcattaataaaataatatgtgttcattgaagaaaatgcagggaagca

SEQ ID NO: 2182 - DNA, 558 bp, Homo sapiens
  MAP TO CHR16.1; EXPRESSED IN HELA, SIGNAL = 8.7; EXPRESSED IN LUNG, SIGNAL = 1.4; EXPRESSED IN BRAIN, SIGNAL = 3.8; EXPRESSED IN BONE MARROW, SIGNAL = 1.5; EXPRESSED IN PLACENTA, SIGNAL = 2.6; NT HIT: L39891.1, EVALUE 0.00e+00; EST_HUMAN HIT: BG910737.1, EVALUE 1.00e-115; SWISSPROT HIT: P98161, EVALUE 5.00e-30
cttcctggtcaatgactggctttcggtggagacggaggccaacgggggcctggtggagaaggaggtgctggccgcgagtaaggcctcgttccatggtcccactccgtgggaggttgggcagggtggtcctgccccgtggcctcctgcagtgcggccctccctgccttctaggcgacgcagcccttttgcgcttccggcgcctgctggtggctgagctgcagcgtggcttctttgacaagcacatctggctctccatatgggaccggccgcctcgtagccgtttcactcgcatccagagggccacctgctgcgttctcctcatctgcctcttcctgggcgccaacgccgtgtggtacggggctgttggcgactctgcctacaggtgggtgccgtaggggtcggggcagcctcttcctgcccagcccttcctgcccctcagcctcacctgtgtggcctcctctcctccacacagcacggggcatgtgtccaggctgagcccgctgagcgtcgacacagtcgctgttggcctggtgtccagcgtggttgtctatcccgtct

SEQ ID NO: 2183 - DNA, 510 bp, Homo sapiens
  MAP TO CHR9.1; EXPRESSED IN HEART, SIGNAL = 3.5; EXPRESSED IN ADULT LIVER, SIGNAL = 2.8; EXPRESSED IN BONE MARROW, SIGNAL = 4.6; EXPRESSED IN PLACENTA, SIGNAL = 2.7; EXPRESSED IN FETAL LIVER, SIGNAL =   3; EXPRESSED IN HELA, SIGNAL = 3.5; EXPRESSED IN BRAIN, SIGNAL = 3.7; EXPRESSED IN LUNG, SIGNAL = 3.3; NT HIT: gi13899252, EVALUE 0.00e+00; EST_HUMAN HIT: BF664526.1, EVALUE 0.00e+00; SWISSPROT HIT: P52623, EVALUE 2.00e-25
cgctgcttgtctgtctcttggcgcagttgccatcaacctgatcgtgcagcacatccaggacattctgaatggtgacatctgcaaatggcaccgaggagggtccaatgggcggagctacaagcggaccttttctgagccaggggaccaccctgggatgctgacctctggcaaacggtcacatttggagtccagcagcagaccccactgaggggctgccgagcctcagggcaggtctcccgcccggcatgtgtgttcagggactgagcctggggacgcccacccacacccactgcttcctctcggcgcaccccaggggagtgttagcagcgaggccttcctcactcaggagtggaaactcagatgtgtcactcagactcaacttgctgggacactgacaggcgttcctgaggttttcagccacttaggctcgttgcggtttaaagatccctctaggtcactgagaaatgccacagaatgtgcaggaagcctgggaggcttctgtgaggaatg

SEQ ID NO: 2184 - DNA, 510 bp, Homo sapiens
  MAP TO CHR7.1; EXPRESSED IN HEART, SIGNAL =   1; EXPRESSED IN BONE MARROW, SIGNAL = 1.4; EXPRESSED IN FETAL LIVER, SIGNAL = 1.1; EXPRESSED IN LUNG, SIGNAL = 0.75; EXPRESSED IN HELA, SIGNAL = 2.3; EXPRESSED IN BRAIN, SIGNAL = 1.4; NT HIT: gi14781728, EVALUE 0.00e+00; EST_HUMAN HIT: BG257570.1, EVALUE 0.00e+00; SWISSPROT HIT: O15084, EVALUE 3.20e-01
gctgttgtaaaccagaccctcagtataaattggattatcagcttagaagtagagtttatcttttaaaagtgttatcttcaatgtatttcaaggtagaaaataagtgattttcatcctttatttttccctttctttccattttaggacttttcttggtagagatggaaatccaaataaacggaatgtgcacaatgaaacatctatgcatttgttgtgtatgggacctcaaattatgatatctgaaggagcccttcatcctcgcttggcacgccccacagaagatgatttcagaagagcagattgtctgcagatgatcttaaaatggaaaggagcaaaacttgaccagggtgaatatgagagagcagctattgatgctgttgataacaaaaaaaacacacccttgcactatgctgctgcctcagggatgaaagcctgtgtagaggtaaattttttttttttttaatattctgcattgtaaaatttgtatccaggtgatatgtaactgtcagg

SEQ ID NO: 2185 - DNA, 517 bp, Homo sapiens
  MAP TO CHR7.1; EXPRESSED IN FETAL LIVER, SIGNAL = 0.95; EXPRESSED IN LUNG, SIGNAL = 1.1; EXPRESSED IN HELA, SIGNAL = 0.93; EXPRESSED IN BRAIN, SIGNAL = 0.89; EXPRESSED IN HEART, SIGNAL =   1; EXPRESSED IN BONE MARROW, SIGNAL = 0.79; SWISSPROT HIT: Q13201, EVALUE 6.20e+00; NT HIT: gi13631241, EVALUE 1.00e-130; EST_HUMAN HIT: BG217778.1, EVALUE 1.00e-108
atccaagtcattggtgagcctcctaatttactaaaaactagggcaaattaactctcaataaactgtaggctccctccaaccctagttaaaaatgagatgtctatcagaaaaaatataagaaataaaaatggacagtataactaaattcaacattagtatctggtttttgtatgtattctaccctgccttcactcacctggattgtgagctgtcaaggaaagatgtaattagctgacgccgcccatctttgttgaaaaccagggccttaccactggccaagacaccacaaccaaagctgacttcagcaccacggatagagtaaaagttatggtaagaggagagcctggaactgccaaagctttcagaaataaacattgggaatgtctgggatgccatctcacaagctgggccagaaaatccagggtcacacctgaaagaaatatggtgaaattaaatcttaaactgttggctgtttcggagattctcgaatctactttggggaggaagaagtccagag

SEQ ID NO: 2186 - DNA, 578 bp, Homo sapiens
  MAP TO CHR11.1; EXPRESSED IN PLACENTA, SIGNAL = 2.2; EXPRESSED IN FETAL LIVER, SIGNAL = 1.8; EXPRESSED IN BRAIN, SIGNAL =   2; EXPRESSED IN LUNG, SIGNAL = 2.7; EXPRESSED IN HEART, SIGNAL = 3.2; EXPRESSED IN BONE MARROW, SIGNAL = 2.3; SWISSPROT HIT: Q04609, EVALUE 8.00e-25; NT HIT: gi14767564, EVALUE 1.00e-100; EST_HUMAN HIT: AV752940.1, EVALUE 1.00e-95
tggactgataggctcatcccttaccttttgctggatagcctggagtgagtgggtcaccagcaccattcaaatttaacacatttcctctctgggctgcagttccaggaagattccatcctttgggatatggctgtacctcaggagcaaagtagtcagctggatctgagtacaagatgattcctatggctcctgctaacatggcatttttaacctgcaggggcaatgtgcaattcataatgcagatatggcaaatggttggcttattcatataagaaagacattaatttaataatggaaggatatttagacactgccttttaccatacaattacacattcagttctcttggctttgaacacaatttcccacctattagacctaacagacttccattattccatggaaatctaaacgagttatcatttcttctgtgaaacattcctattacaacctgcaactgtagaattcatgtcccttctttgtagttctatattttctatattataggatagctcttaatgtattaaaacatctattaaatatctatctctcctattaggctgagggtgtttttgaaa

SEQ ID NO: 2187 - DNA, 522 bp, Homo sapiens
  MAP TO CHR19.1; EXPRESSED IN LUNG, SIGNAL = 1.2; EXPRESSED IN PLACENTA, SIGNAL = 1.5; EXPRESSED IN BRAIN, SIGNAL = 2.3; EXPRESSED IN HELA, SIGNAL = 2.2; EXPRESSED IN BONE MARROW, SIGNAL = 1.3; EXPRESSED IN HEART, SIGNAL = 1.7; EXPRESSED IN ADULT LIVER, SIGNAL = 3.4; SWISSPROT HIT: Q9Y6N1, EVALUE 3.70e+00; NT HIT: AF191307.1, EVALUE 1.30e-01
caggacagaagtagggtgggccctggctttagggtgggcccttaaaggtgggttggggtcacccacaaggcccacccctaccacctccatgaggctgagactttggggccgtgacggaagctttctttagactctgtcctgggggtgcacatgtggattaaattagagcaatatgtttttcaaacagcatcttggctgaaaagtcaagcagataaatggaaacaaacccagctttatgtgactggaaaggggctggtgggagggccgcttctgcctgaagcaccactgcaggccaggctcccctcctgggctctctccacccccacctcttccccctctccaccctccccctgcagccctgaccccctggcctagcccaggaaggcctcagcagaggctctccctgccactccacatcccctctccaggcccctgctccagcctgcctggcctccagctgcacccgtcagctgtcaaccttgctatgccttctggtcagtgtcttctcggaggtcagtctgg

SEQ ID NO: 2188 - DNA, 556 bp, Homo sapiens
  MAP TO CHR7.1; EXPRESSED IN FETAL LIVER, SIGNAL = 1.4; EXPRESSED IN HELA, SIGNAL = 1.3; EXPRESSED IN BRAIN, SIGNAL = 1.5; EXPRESSED IN HEART, SIGNAL = 0.93; EXPRESSED IN BONE MARROW, SIGNAL = 1.6; SWISSPROT HIT: P75127, EVALUE 5.30e+00; NT HIT: gi15893298, EVALUE 1.30e-01
gcgagatggatggagagaagagaaagtgagggaaatattttaaatttgaaatgaaattttctagcaatattaataacagctttaaatctttccaataatttcactatgttattttaaaagaaaatgaccagtgtaagttgcagttctaactgctagtaaatcatggcttaatgaaaacaattacagcagaaagtataatgttttatttgttcttagtacggccccgtaagaactagcagacatcagatttgtcaaagtcacaactcctttagaatttccaggagaacaccaggatcaaagaaaagaaatagataagataaagaattatcatctatttgtaataggagtttcccatttaagttttacttgttactatcattttagaacaagtgaaaactatgcttgttaggaatctttacctgacactaatggaacctcttttgacagatttttttaaacaaaaattatatggtgtgaataaaaaaaaaacaactgtcaggttggatcagttattttgtatctgccggtacctgcttggctcacataatttccccaa

SEQ ID NO: 2189 - DNA, 565 bp, Homo sapiens
  MAP TO CHR14.1; EXPRESSED IN FETAL LIVER, SIGNAL = 1.1; EXPRESSED IN BRAIN, SIGNAL = 0.8; EXPRESSED IN HEART, SIGNAL = 0.82; EXPRESSED IN BONE MARROW, SIGNAL = 0.96; SWISSPROT HIT: P79820, EVALUE 9.20e+00; NT HIT: gi14747074, EVALUE 1.00e-125; EST_HUMAN HIT: AU120412.1, EVALUE 1.00e-123
agaatgccccttgagatgtgcagcataatcagttgtttctaattagaaaagagagtatgtgttacctgtttgtttattttaggagaaggaagaagaaccagttataaaaatcatggttgatgatgcaattgtgataagagacaattatttcagtctgcccgttaataagaccgatacgagcaaagcccccttacactttcccattcctgtgattcgctatgtggtgaaggaggtctctcttgtctggcatctttatggaggaaaggattttggaatagtccctcccacttctccggctaaaagttatatgtaagttaatttctatataagtttatttgggaggccaatatattcttttcttagaaaaatagaattttccatttcccctttagagagaaaaaagaaaaataggatttatcattttaagaattattaataaagtagtattaaaaactgtaatttaaatgttactctcacagttttccaattgtgaacttatttgtattatttgtatttttactaaaatgttgactctcatcattttcattcagcagaaattttcagg

SEQ ID NO: 2190 - DNA, 550 bp, Homo sapiens
  MAP TO CHR20.1; EXPRESSED IN ADULT LIVER, SIGNAL = 2.9; EXPRESSED IN PLACENTA, SIGNAL =   4; EXPRESSED IN HELA, SIGNAL = 5.1; EXPRESSED IN FETAL LIVER, SIGNAL = 3.8; EXPRESSED IN LUNG, SIGNAL = 3.7; EXPRESSED IN BRAIN, SIGNAL = 3.6; EXPRESSED IN HEART, SIGNAL = 2.6; EXPRESSED IN BONE MARROW, SIGNAL = 3.1; SWISSPROT HIT: P44792, EVALUE 1.80e+00; NT HIT: AF014116.1, EVALUE 1.30e-01; EST_HUMAN HIT: BF328563.1, EVALUE 1.00e-106
cctggagaagcagtttctggagtaagaaaaatgtgacttttagatggatcttgaagaattaatggaacctggacctatggaattagagacgatgagtaagcaaagaagaaggaagttgagatggcagtaccagcaggagaaagattctgtgcaggaaagggttgggtgtgttcaaggagcctgcatcagtctctaaactgaggtttcctacgtttatttcctgtctgggacattctgtgacacatgtccaaatggaaaaatcattctccattgagctagccaaatatcttcaataaataatgcaaaaattattaagacattttccagaggaccacaccatttcctgtcttgacaatggagctggatttgacatcagctaattcaagaggttagaaataaaagctgtggccaattcaaacttcccttccaaatgtttttcaataatctgaaattggtccaagagacaggacttgtaatcaacttttttcaaaccatcttaacatctttcatgaagtcatgaacatgaccgtgcagacgtgccattgactaa

SEQ ID NO: 2191 - DNA, 547 bp, Homo sapiens
  MAP TO CHR17.1; EXPRESSED IN ADULT LIVER, SIGNAL = 2.8; EXPRESSED IN BONE MARROW, SIGNAL = 2.1; EXPRESSED IN PLACENTA, SIGNAL = 2.1; EXPRESSED IN FETAL LIVER, SIGNAL = 2.5; EXPRESSED IN LUNG, SIGNAL = 1.3; EXPRESSED IN HELA, SIGNAL = 1.7; EXPRESSED IN BRAIN, SIGNAL = 2.2; EXPRESSED IN HEART, SIGNAL = 1.5; NT HIT: AF227986.1, EVALUE 5.20e-01
ttacggagatctgactgggggaaaaaggtggcgaaaagtgggtggagaatcaggaaaaaggcagtctggatatgagaccccctgcagtcagccagattcaattgctaagtctcaggaaaccctgaactatttctcctggaaattaaactgagatttgaaactaatgaggggccaaagtatagaagagtgttggatagcatgtgcagctaattatttcattcagggagccaaagggaccttgggacatttccatacagcctataaactagagaaattaatcctaaaagcttagaggaaaaaattaggttcccatcatgaaagtgcagattttgaatttgttgataatttcacctcaccttcctaggaggttacactaagaccaggtagaaaatttcattctcaattaagatcaatctggctctctagtgaaaatttggctgggaacagaaggagtgctggagtgctctaatgaggtaagtcctaggctgctgtaatatcttcacctaagaattcagtgttctatgggtgcaatgttgtttgcataggg

SEQ ID NO: 2192 - DNA, 504 bp, Homo sapiens
  MAP TO CHR20.1; EXPRESSED IN LUNG, SIGNAL = 2.2; EXPRESSED IN BRAIN, SIGNAL = 3.6; EXPRESSED IN PLACENTA, SIGNAL = 3.4; EXPRESSED IN FETAL LIVER, SIGNAL =   3; EXPRESSED IN HELA, SIGNAL = 2.8; EXPRESSED IN HEART, SIGNAL = 1.7; EXPRESSED IN BONE MARROW, SIGNAL = 3.7; EXPRESSED IN ADULT LIVER, SIGNAL = 2.8; EST_HUMAN HIT: BI522489.1, EVALUE 0.00e+00; NT HIT: gi7662411, EVALUE 0.00e+00; SWISSPROT HIT: Q04833, EVALUE 2.70e+00
catctctctgtcctctgggccctcaaccgcagagagggctgagacccagaaagccgcttgccacaatggtgaccactgtgtgagctctgaagggaaaagagaaaaacataagaatgaaaatcaaggtcagagcggggatagctggggaaaggagggacatggcaggtgcccaaggctgcccttggactgtcgtcatcttgtaaacaagctagtgtgagttctcatcagatagaacgagtaaaaagaccgcagtatggaggctgggccgggagttgccgacgtccatctatctagtccaccacggccagcaagaggaaaaaaaaagttttctagtttcgtgatttttgttgattttttttgtgagtaaaatcttcataacctaaagctgggagggacccaaaaaagccaaattgtgagcccttgtatgcgtcaatttgaaagttggctcagggtctctagacagaataaccatagcaaaggttgagaaaactctgttccgttcgc

SEQ ID NO: 2193 - DNA, 520 bp, Homo sapiens
  MAP TO CHR6.1; EXPRESSED IN BONE MARROW, SIGNAL = 2.3; EXPRESSED IN ADULT LIVER, SIGNAL = 2.7; EXPRESSED IN LUNG, SIGNAL = 1.2; EXPRESSED IN FETAL LIVER, SIGNAL = 2.1; EXPRESSED IN PLACENTA, SIGNAL = 2.5; EXPRESSED IN BRAIN, SIGNAL = 2.8; EXPRESSED IN HELA, SIGNAL = 2.6; EXPRESSED IN HEART, SIGNAL = 1.6; SWISSPROT HIT: O00294, EVALUE 7.00e-29; NT HIT: AF034920.1, EVALUE 0.00e+00; EST_HUMAN HIT: BE780807.1, EVALUE 2.00e-93
tagggtcgatggagatgaggtaattggctgtcttgctccgttttcgtttcctgccagccaagaggaacacctggggaaaaggggagacaggtgagaggatgggaagagaaggtgggaaggggtggaggtgagctgcagggagaaatcaggcccgtttgtcccgtggcccccatgccggatccctccacactccctcctctgctgcctctccccacccaccttcttctccgtgtccaggtgcaggaagtaggagggatacatgcctcgatccatgccctttttgtcccgggtcagccggcagcgcaccgtgcggccctggggggcaggccggagcacaaactcccggggttcgtccacctccacggggggagacggggccctctcctccttctgggtgggggcagagggtacatcagccccagagcaccagctcccccgctcccagcaggtcccagtgctgagacacgggcagcccggcaggacaactcaccgctttctgtgtgcggagagaacagagagg

SEQ ID NO: 2194 - DNA, 589 bp, Homo sapiens
  MAP TO CHR5.1; EXPRESSED IN HELA, SIGNAL = 1.5; EXPRESSED IN LUNG, SIGNAL = 0.87; EXPRESSED IN BONE MARROW, SIGNAL = 1.6; EXPRESSED IN HEART, SIGNAL = 0.87; EXPRESSED IN ADULT LIVER, SIGNAL = 1.7; EXPRESSED IN PLACENTA, SIGNAL = 1.2; EXPRESSED IN BRAIN, SIGNAL = 1.7; SWISSPROT HIT: P16591, EVALUE 1.00e-31; NT HIT: gi4885230, EVALUE 2.00e-87; EST_HUMAN HIT: BE964530.2, EVALUE 1.00e-21
atcagtgagaagcctttggcagaacaggactggtaccatggtgcaattcccagaatagaagctcaagaactgttaaaaaaacaaggagactttttggtgcgagagagtcatgggaaacctggtgaatatgtcctttctgtatattctgatggacagaggagacattttatcatacaatatgttgatgtacgtttccagtttagttcatatgtatattttgatgtagttcattgcggtacaattatattaaaataacgaatggtttgtgataaatgcctgcaacacttgaaatttagcacttaatttttttctgaatttcttaaatacagtgcttcaaaatgtactaacatttaaatatgtttaaggaaacatgtatttagtaatattttaaattaaaaataatgtttataaaatcaaagtatatagctatttaaaatatgttgttaaatttgaacattaaagatattttgaattaaaactaaaaacaatgtgattattataaatttttttctagagaaacttaagtttatgaaacttatacttttgaaattggagcttggaattgttttcagaatggtgccatgaaaga

SEQ ID NO: 2195 - DNA, 520 bp, Homo sapiens
  MAP TO CHR17.1; EXPRESSED IN BRAIN, SIGNAL = 0.6; EXPRESSED IN HELA, SIGNAL = 0.75; EXPRESSED IN BONE MARROW, SIGNAL = 0.65; SWISSPROT HIT: P02814, EVALUE 7.20e-01; NT HIT: gi16164704, EVALUE 2.00e-59; EST_HUMAN HIT: AW410408.1, EVALUE 2.00e-59
agagagatgctcaacacggggcccctccaggcactgggctggcctggtcccctctctgtggctgaggagagggctcctcctctcactctgccctttctgtcttttcaggatcatttcttctttcttcaaaatgaaagtaaaacatgctgggaataatttcataattacaaaactgccctcccaattggcccctgcctctaccccctgacctcaccacccaccagggaggtgggtcttattctgggcatcgtgccaagttcttagcggggccctctagaatctctaaagcaaatcaggctgaagaggggaaaaccagcagggggaggcagcattcccggtgcccagtatggtctaggaggcattgaaattccagggccgaagtcctgagacaaagatcataatgagacaggaaggtggcaaaggaaggagcccatttgcatgacaataattgagccaagaatagaaagccacagggatgcaagggtgaggctggcggctgagctgggctaaacctcacaaa

SEQ ID NO: 2196 - DNA, 597 bp, Homo sapiens
  MAP TO CHR19.1; EXPRESSED IN PLACENTA, SIGNAL =   6; EXPRESSED IN FETAL LIVER, SIGNAL = 7.1; EXPRESSED IN LUNG, SIGNAL = 3.2; EXPRESSED IN HELA, SIGNAL = 6.3; EXPRESSED IN BRAIN, SIGNAL = 5.1; EXPRESSED IN HEART, SIGNAL = 4.2; EXPRESSED IN ADULT LIVER, SIGNAL = 7.2; EXPRESSED IN BONE MARROW, SIGNAL = 5.2; NT HIT: gi14758805, EVALUE 1.00e-122; EST_HUMAN HIT: BG751004.1, EVALUE 1.00e-103; SWISSPROT HIT: Q62101, EVALUE 1.00e-21
tctgaccctgtctgtcctccccgacaggcccagctaacctttgcattgcaggccctgccggaagaggcccttgaggagtttcttgcaagcctggcaaacggtgggccgtgtatagctgtggatgaggaaggtgtgcggcaccttgaccttggagagcagcatcttgtccagctcaatggggcggcccgtatacgatgaggcagaagaggaggaagaggatgacgggggacggcgaggcaggagttcggtggtgctacggctctgtcgttggcaagaatggaggggacacatcagtgcgttggccccatgcctgggccaagtcacccccctagccaccaacccgtcccatcccccatctcctcaccagctcttcagccgtgcagggcagggactcggaggtgccgaggcgcaccgagtggccactggccagagacgtggatgacaggcgccgtttgcgggccccactacagttgttggggatgctgaaggcacagcgcttgtggtagttcagcccgcagcctgcagggggcgccagagagtaagagacatggcgtctgcccctcctaggtctcttcttgagaagttgtgccctttcca

SEQ ID NO: 2197 - DNA, 506 bp, Homo sapiens
  MAP TO CHR1.1; EXPRESSED IN BONE MARROW, SIGNAL = 0.52; EXPRESSED IN FETAL LIVER, SIGNAL = 0.3; EXPRESSED IN BRAIN, SIGNAL = 0.47; EST_HUMAN HIT: AI419844.1, EVALUE 0.00e+00; NT HIT: gi13629279, EVALUE 0.00e+00; SWISSPROT HIT: Q14209, EVALUE 7.00e-33
gcagcacctagtgtccaatgtccctgtgcaggcagaggggctgtcagcctgtctgtgaggaggtagagtcgggggcaggctgctgggggcaggcagggccactcaattaatcaacaggtccccaaggtcgtaggagtcgaagagatcgctgatgccctcacccgcctccaagccccacaggtagtcgtcctggtccaaggatggggagaagctgatcagaggggagctgcacgccagggtcggggacaggaactggtcctcagtctgctgcaggagtgggtgcggcagctccagcaggctgtcagtagcctccaaggggaccagggatggaggcggtggggcctgctggggggttggcgctggtgctggcactggagacaaacagacaaaggttacgcctggccctagcatccaactcctcagcacgcgaggacagacttccggttctctggatgactgcacccttcttctctctccttagcctgggtggactgtcgtgctctcaa

SEQ ID NO: 2198 - DNA, 583 bp, Homo sapiens
  MAP TO CHR7.1; EXPRESSED IN LUNG, SIGNAL = 0.95; EXPRESSED IN HELA, SIGNAL = 1.4; EXPRESSED IN BRAIN, SIGNAL = 1.2; EXPRESSED IN HEART, SIGNAL = 0.63; EXPRESSED IN ADULT LIVER, SIGNAL = 1.2; EXPRESSED IN BONE MARROW, SIGNAL = 1.1; EST_HUMAN HIT: AL602710.1, EVALUE 1.00e-102; NT HIT: gi16161124, EVALUE 1.00e-102; SWISSPROT HIT: P17624, EVALUE 1.00e-03
gctaggctaggacatggcaggaagctggtccacacaaccttcttccccaccgtcatcaccaacccctctgccactatcggccttgtcaccagcacaagggcctaaagggtggactctccaggactgccatgctcgtaccagctcatggctctgtggcttgccctgcagcttctggtggtagtcaaaggtaagcctgtccaacaccgcctgttcctcctcatccacggtggccatggagcgctccttgttgatcttgtcaatgtcgatgggctcttctccctccaggatggcgttccaccaatactcgcccaccttgctcaggttcacctggggacaagcaggacagagacctgagtcagagacctgagacaggtgtccagggctggggacagagcagagcccactgagggatgggtgtccaggataagctcaggaccaactacacaaagggaggtgacagacaagagggggtgccagaacccaaggcaggaccctctgtgcctgggaatgcatttgctgcctgtgctaacatatcccagggaagagctaggaggcacatacctgaggggactgacattctgga

SEQ ID NO: 2199 - DNA, 564 bp, Homo sapiens
  MAP TO CHR6.1; EXPRESSED IN FETAL LIVER, SIGNAL = 0.82; EXPRESSED IN HELA, SIGNAL = 1.2; EXPRESSED IN BRAIN, SIGNAL = 1.2; EXPRESSED IN BONE MARROW, SIGNAL = 1.1; EXPRESSED IN HEART, SIGNAL = 0.5; EST_HUMAN HIT: BF744369.1, EVALUE 2.00e-63; NT HIT: X95275.1, EVALUE 2.10e+00; SWISSPROT HIT: P15787, EVALUE 5.40e+00
tgctaacccttttcccacactgcacaacctgggagttaataaattctgttctatttcactacgaagggagctttttctgattaatttccagccacctgagttgattctagatagaattatttggcacatctaaaaatcgctaatttgcgttcccctatgatgctcagaggaacaggttgtaagaatggttccttagggaaatattacttttcctatatgcttaaaaacaaatttccagggatttaaaatatatttagttatatttagtaataaccagtcctaaatcaggctgactttctgtttaagagggatttgatatcctctctggtcaatcccaaagaatgttggtaataagctgatacctgcagacatgtgtgttgctgtcttatttctttaacaggtgtgcattgagacgtacataagcagctgtcaccagcgtagcataaacactgctgtgcgggcaactctcagtcaaatgctgagtgacttgactttacagttacgacagaggcaggagaatacggtgagtctgtgacacccccatgttcatcaccttcctggtgg

SEQ ID NO: 2200 - DNA, 512 bp, Homo sapiens
  MAP TO CHR7.1; EXPRESSED IN HEART, SIGNAL =   1; EXPRESSED IN BONE MARROW, SIGNAL = 0.8; EXPRESSED IN FETAL LIVER, SIGNAL = 0.79; EXPRESSED IN LUNG, SIGNAL = 0.96; EXPRESSED IN BRAIN, SIGNAL = 0.77; SWISSPROT HIT: Q9Y6U3, EVALUE 1.00e-20; EST_HUMAN HIT: AL037345.2, EVALUE 1.00e-110; NT HIT: AB067492.1, EVALUE 1.00e-113
aagcttttcccgttcctctcccaaaacagcaatgagataactgccttgtaatgtttgtttgctttttacaaataccaatttaccacttgctggaatcccagcccaggaaccagcctgtgaatgtgggtggctcatggccctgttttatgatgacaattggtgtcctcttgtctcttccagaagggtctgtctcaaggtacattttggctaaaaaaagttgtaaagacatataaattcagttagtttgggttaaactaaagtaactgcagattgaaaattcttcgaataaaagtaatgaattaaatttccagaagaacaaataaatattggctacattgaaaatgaaaattcttcgaatacaattcttcaaatcaaagtaataaatttccattgaccaggtagacaaatacaatttctttttgatttctctcgtctgccatgaaaggcaacatgtgaatctcattaatgcctgaaagaattccaagttttatggaattgtccttgtggcataa

SEQ ID NO: 2201 - DNA, 592 bp, Homo sapiens
  MAP TO CHR5.1; EXPRESSED IN BONE MARROW, SIGNAL = 0.89; EXPRESSED IN FETAL LIVER, SIGNAL = 0.66; EXPRESSED IN HELA, SIGNAL = 0.73; EXPRESSED IN BRAIN, SIGNAL = 0.82; SWISSPROT HIT: P43947, EVALUE 1.10e+00; EST_HUMAN HIT: BG180188.1, EVALUE 5.30e-02; NT HIT: AL163301.2, EVALUE 9.00e-03
cgcagaggagtaggtccaagtccatgccaatggccaggaaccagaggagcaagacaaagctagcaggaacacggaaacaaaacagcaacaacaagcaagcacttcctgcattgttcatggttcttctatagttcttcggctacacaaaccatcccaggatagccagggcaaaggcagggtaggggttcataacacccagccaagtgatggagcatgaaggggacaaaggattctgactaccaatgtgtttcccacttggattgctgtccagggaatatctatgtccaaacctgagcacctacttaaaattaaatgatgacaacactgctgagtttacaaagccctttaaaaaaaaaaaggaataaataaaaattgtgttatctattctgttttgaggtattcctttaaagatttgctttcaatgatgtgacagtaaatggttatgttgcagtatgaaatcaggacagcagttatgtaaaggaggcaaaacttatttcattaaaatgcatggagggagaagcaatggattatagtatagatcatgctacagatgagcagattactgagcaccaggcacacaagggagacagat

SEQ ID NO: 2202 - DNA, 523 bp, Homo sapiens
  MAP TO AC026530.3; EXPRESSED IN BRAIN, SIGNAL = 0.41; EXPRESSED IN HEART, SIGNAL = 0.52; EXPRESSED IN BONE MARROW, SIGNAL = 0.41
tcctcttttccacctcaacctttaaaatatatgccttcattagaatgcattcctccttcacaccagcaaataattattctttataaataagtaaaacatctctttaaggctaggtcactgctcaatggaaattataaattgcaagcttctctctttgtcctcacaaacaaataaatccaagaaaaacagactctttgaattaatgctttccataaaaatctagtccctgaccctccaaagtgaatgttaagtgactatcaatttatctgccggcctctgagaaggcctctggaatagacgtccaataactataaaaatgcacctatggagacagaaaagtaatttttagtcttattttatactttcagatatttagtacacagtgaatagagttagccttctaaataattatattgcaaatttaagaaattatgaacttaaagagtgtactgaactctaacgagatcattaatatggcctcccaagtgtttattatgtgcctggcattacacctgctgcttga

SEQ ID NO: 2203 - DNA, 570 bp, Homo sapiens
  MAP TO CHR17.1; EXPRESSED IN HELA, SIGNAL = 0.8; EXPRESSED IN FETAL LIVER, SIGNAL = 0.94; EXPRESSED IN BRAIN, SIGNAL = 0.78; EXPRESSED IN ADULT LIVER, SIGNAL = 1.6; EXPRESSED IN BONE MARROW, SIGNAL = 0.84; SWISSPROT HIT: P06924, EVALUE 3.20e-02; NT HIT: gi13652313, EVALUE 2.00e-93; EST_HUMAN HIT: BG720093.1, EVALUE 3.00e-93
actcttcaccatgctgggtcaccaggtgcacctgggggtggagaatgagctgggaaaagagagctgaatctggggccaggggtagggaggcggtaaggtgacccgcaggacatggctgggtactgagccagggtggaaagacaggtgagcttagcgatggccacagcagctttggagttctggtggggactgggagatgcctgaagagctaagaccctgcttggtggtgggagagcggggtagggacagaccactcaccctgttgaccaatacaaccaccttggctccatccacagtctctaggtgccgcttggccacataagcagccgcccgggtcttcccggcacccgtgggcagccagatgatgatattcttgccctccagggcaggcatgatcacctcccattggtaggaccgaagctccattctgggaatggcaggggactcagacccaccgactcctccacccctcccaactcctggccagaccagtcagtacagagacctccctttgcccaggactccaccccacttgagggaggtggggcaggactccctcagaacccatca

SEQ ID NO: 2204 - DNA, 547 bp, Homo sapiens
  MAP TO CHRX.1; EXPRESSED IN BRAIN, SIGNAL = 0.82; EXPRESSED IN ADULT LIVER, SIGNAL = 0.7; EXPRESSED IN PLACENTA, SIGNAL = 1.2; EXPRESSED IN FETAL LIVER, SIGNAL = 1.9; EXPRESSED IN LUNG, SIGNAL = 1.6; EST_HUMAN HIT: BE744408.1, EVALUE 0.00e+00; SWISSPROT HIT: Q15233, EVALUE 2.00e-51; NT HIT: Y11291.1, EVALUE 0.00e+00
cagaagcaaactagggtggccaaagagctgaagcacacagttaagttctttcacttctgtttctttgtatggttgtttagtttttccggggagatattgaactatactgctttagactgttgatggctgctaaggtgttctttgtcaaactgagttattctgattttcctctgcttcctaggaaacccgaaccctagcggagattgccaaagtggagctggacaatatgccactccgtggaaagcagctgcgtgtgcgctttgcctgccatagtgcatcccttacagttcgaaaccttcctcagtatgtgtccaacgaactgctggaagaagccttttctgtgtttggccaggtagagagggctgtagtcattgtggatgatcgaggaaggccctcaggaaaaggcattgttgagttctcagggaagccagctgctcggaaagctctggacagatgcagtgaaggctccttcctgctaaccacgtaagtgagggtcattttcagacgtagaccttagattgctaattccttccatggtctggagagt

SEQ ID NO: 2205 - DNA, 542 bp, Homo sapiens
  MAP TO CHR17.1; EXPRESSED IN HEART, SIGNAL = 9.5; EXPRESSED IN BONE MARROW, SIGNAL = 9.2; EXPRESSED IN ADULT LIVER, SIGNAL = 4.3; EXPRESSED IN PLACENTA, SIGNAL = 9.6; EXPRESSED IN FETAL LIVER, SIGNAL = 8.3; EXPRESSED IN LUNG, SIGNAL =  12; EXPRESSED IN HELA, SIGNAL = 8.9; EXPRESSED IN BRAIN, SIGNAL = 8.5; NT HIT: Y11740.1, EVALUE 0.00e+00; SWISSPROT HIT: Q11116, EVALUE 2.00e-01
ttcacgggtaggtcaaggacatccatccatctatcccactaaatattcatcctttacactacagatactcacagaaataaaaatacttaaaataaaaaaataaaacattcatctatctgtctgttgatttgtccatctgtccagctttccatccatcaatctctccatccgatgatctgtccattcatccaactgttcatctttacatacataaatacatctatctatccacccatccatccagagaggtcaggctctagttggcctccccagggctgctaggaagggcctgtggtcctgtggcatttatggggcatgtgacctgcctgcctggcctggggagacagccccgcctcagccctcgggcagggggccggtccaggcatgtgggagtatttatacctcgatggaggctcctggggagctgcaggctgaatgactccccgaagcggtgatggtggccatgacccagagcccactgtgagtgcttggatttggctcctttggggccatggctgggtggcagaggttagagaggggct

SEQ ID NO: 2206 - DNA, 516 bp, Homo sapiens
  MAP TO CHR17.1; EXPRESSED IN HELA, SIGNAL = 1.3; EXPRESSED IN BRAIN, SIGNAL =   1; EXPRESSED IN LUNG, SIGNAL = 1.4; EXPRESSED IN HEART, SIGNAL = 1.2; EXPRESSED IN ADULT LIVER, SIGNAL = 0.68; EXPRESSED IN BONE MARROW, SIGNAL =   1; EXPRESSED IN FETAL LIVER, SIGNAL = 0.99; SWISSPROT HIT: O75616, EVALUE 1.00e-44; EST_HUMAN HIT: BG742664.1, EVALUE 0.00e+00; NT HIT: gi16164708, EVALUE 0.00e+00
tcctcacttttgcttccaggaggaaatttgagggctgtcttcatatggtagaaaccaagggccaggctatggccaagactaactgacctttagtgttttcacgtcctcctggcttagggctgacaacatgaagatctccttgaagtggggccagccaatcctctgaggatttcccacagattgtgtgtttgggtccttaactgctgggctggggcaatgggtgccagggtgtgagtggaaggcctgcctcatcttgagctttttgccattgaccacaccttcagtgagggctgccgtgagctccaggagaactgacttctgcttcaaacaatctacctggacatgggggatgggcaaagggtgtgtggtcagagataggggacttggagggaagtagaccccttcctcaggtgggtagtgctcaccttgttcatgaccaggacactagggatctgggagtacttggtcaagcacctgagcaactgggggctgagctggttccgtgtccacttgtct

SEQ ID NO: 2207 - DNA, 562 bp, Homo sapiens
  MAP TO CHR3.1; EXPRESSED IN FETAL LIVER, SIGNAL = 4.9; EXPRESSED IN LUNG, SIGNAL =   4; EXPRESSED IN HELA, SIGNAL =   3; EXPRESSED IN BRAIN, SIGNAL = 4.8; EXPRESSED IN HEART, SIGNAL =   5; EXPRESSED IN ADULT LIVER, SIGNAL = 6.5; EXPRESSED IN PLACENTA, SIGNAL = 3.3; EST_HUMAN HIT: BG010811.1, EVALUE 3.00e-03; NT HIT: AJ271791.1, EVALUE 9.00e-03
gtgagcttggtagagctgggatttgaaccagggttgactgactccaaaggccaccttaaactactacctccacctctacaattaggggaaggtaactgccgatagctgaaagttttaattattgataatgtggaagtggcagaactgccaggcagattccagcatgctgatatctcattgtatgcccacaaagagacactcgggcaggaggagcagtgggagtggcagcagactagggcaagaattacatggaagccacaactcctgactctccctcctcttggagtcctttatcttcttgttgcaaggatgactcctgtgtatccacagaggtcagtccagtttggggatgagattctctagggatttggcccctcaccgtcatactgacactgagaatctggaggcactggatgggatcagtcagcacccacgtcatgagcaggatcacatcagccatcaacagggctgccaccaaccccagcaactgcaggtctttgataatctgcaaaagagtcaaggtcaaaacttctccttgttgactggctaaatgacagagggg

SEQ ID NO: 2208 - DNA, 513 bp, Homo sapiens
  MAP TO CHR20.1; EXPRESSED IN FETAL LIVER, SIGNAL = 1.7; EXPRESSED IN HELA, SIGNAL = 2.5; EXPRESSED IN LUNG, SIGNAL = 1.1; EXPRESSED IN BRAIN, SIGNAL = 2.5; EXPRESSED IN HEART, SIGNAL = 2.9; EXPRESSED IN ADULT LIVER, SIGNAL = 1.8; SWISSPROT HIT: O75363, EVALUE 3.00e-06; EST_HUMAN HIT: BE825197.1, EVALUE 5.00e-76; NT HIT: AF041260.1, EVALUE 8.00e-74
ggggaggagatggagtaaggagaacacatcttggtggcaggagaacctggtgggaaccgtgctgatttgtttacttggatttgccaactggtccgatggatactgggtctgtttgcacttgagcatccaacatccgctttggtccctggagaaaaacagaaagacgtggcagcctattgaagctctgtaatgtcaacagcaacaatggccatttatgtagcacttactctgtgctaggtgttgggctaaattaatatatctcattcctcagtgctgggtaagagaatggtctccagtcagatgcccgggttcgatacccagttacatgactttctagctttgtgaaatcttggacaaattacttatcatctctttgcgctttggtttctttatctttaaaatggaaatgacaaacttatctcagagggttgttcccaagataaagtgagttcatgcttataatgtacttagtacctagggggtactaattctacctcactttagctccctccc

SEQ ID NO: 2209 - DNA, 579 bp, Homo sapiens
  MAP TO CHR7.1; EXPRESSED IN BONE MARROW, SIGNAL = 2.7; EXPRESSED IN ADULT LIVER, SIGNAL = 3.6; EXPRESSED IN PLACENTA, SIGNAL = 4.9; EXPRESSED IN BRAIN, SIGNAL = 2.5; EXPRESSED IN HEART, SIGNAL = 3.3; EXPRESSED IN LUNG, SIGNAL = 3.8; EXPRESSED IN FETAL LIVER, SIGNAL = 3.5; EXPRESSED IN HELA, SIGNAL = 2.9; SWISSPROT HIT: P07942, EVALUE 6.00e-31; NT HIT: M20206.1, EVALUE 1.00e-113; EST_HUMAN HIT: AL543775.1, EVALUE 0.00e+00
ctgcttcttccagagcttcctttaccatatctgcagtgactttaacatctgttgcacttttgctgagtaaaaaataatgagacagtatattgttgctgaacatgaaaaaagtactctcagtgttcttttctttaaagaatagccttcctgaaatgacccagagagactcgcataggtccttcttagaagtttcattggttaaagagatactttttactccatgatagatacacaaaataagccccttagatgccatgtctttagataccttgctcttttagcttcttctaacaacatctcagctctggcaatgtcagcagcactatgctgaagaataacctctacttgagaaaggctttcaactcgttcacgtatatcttctgtcaagttctgtaactgctgtggggtgctaggcatctccattttcaatacttcattagcaactgcttcaatgctgtccaaatcagcactatcctctgtgaaaagcaaagatgtccccaaaaagaggtgaaaagaatagatggttcattcattcaaccacttactggtcatctactatggactagcatggtggggtta

SEQ ID NO: 2210 - DNA, 535 bp, Homo sapiens
  MAP TO CHR17.1; EXPRESSED IN BONE MARROW, SIGNAL =   1; EXPRESSED IN HELA, SIGNAL = 0.63; EXPRESSED IN BRAIN, SIGNAL =   1; EXPRESSED IN HEART, SIGNAL = 0.89; SWISSPROT HIT: Q61751, EVALUE 2.90e+00; NT HIT: gi14773065, EVALUE 1.00e-100; EST_HUMAN HIT: BE843844.1, EVALUE 5.00e-85
ggattccagagggacagatgtttcagaaatgccattaatagacattcagatggcatctcacctgggccattccaagcatgaaggcaaagggactaagcaagcttaaaatccactccaaggatgcaggaaggtgtctgtacagtgatgtgaaccccagacacccccaaaagacagtgaggaggaacacgaccaggccggtgaggaaagatttctttaccaagatgctcattaagaaagccaaagctacctaaaatgagagaagatctagttggtttatgtttctctaacattattactagcataataaaatagatatacaaaattatagttattttgtgtatgtaacagttgtatattatagttattttgtatataacatacaaaactatgctctgcaaattgcactaaaaattgacattacaaaacacctcaaatcaaattgtacctgtttatagatttttcacatgcaaacagagtaggtagaaaaaaaaggaggcatacagagtaatcagtcggaaacaaacaatttttaggc

SEQ ID NO: 2211 - DNA, 560 bp, Homo sapiens
  MAP TO CHR4.1; EXPRESSED IN BRAIN, SIGNAL = 0.44; EXPRESSED IN BONE MARROW, SIGNAL = 0.43; EXPRESSED IN FETAL LIVER, SIGNAL = 0.36; SWISSPROT HIT: P32298, EVALUE 5.00e-30; NT HIT: U33164.1, EVALUE 0.00e+00; EST_HUMAN HIT: AA905915.1, EVALUE 1.00e-85
gacctgagcctcctgaacacacgtgtcctccctgctgggccaagacacaggtggacccgagcctcctgaacacgcgtgtcctccctactgggctgcaggggcaggggcagggcctgggaggtgggtgaccaggacttgctgaagatgacagaccaattttttttgttatagctgccagtgaaaacaactagaatgagtgagaagtgccatttcccagcctctacagagcctgacttaccatcctgcagatagatttggcatcctctgaaaacttctcagaatactcctcggtatcattcttgattctttgatcgacctcctcccatttgactttctctttgtattttttgaatggagaatgtccctgaatcatttcatagatcagacagccaagtccccaccaatcgggactaaacgtatacttttcattattgacaacttcaggtgctacataacaaatacaggaaatggaaattaagttaaattttgattttaaattttcttataattcccagtaacacagtatacattcaacgtgtgtgacaacatggacgaacctt

SEQ ID NO: 2212 - DNA, 510 bp, Homo sapiens
  MAP TO CHR2.1; EXPRESSED IN FETAL LIVER, SIGNAL = 0.52; EXPRESSED IN BRAIN, SIGNAL = 0.82; EXPRESSED IN BONE MARROW, SIGNAL = 0.84; NT HIT: gi16162843, EVALUE 4.00e-94; EST_HUMAN HIT: AW403204.1, EVALUE 6.00e-94; SWISSPROT HIT: Q15032, EVALUE 3.00e-24
acgggatttcaaattcaagccttataagtcaatcttaggtaacaaaaatgtaacgtttcaaaatgataatgaacaaaaccatcttacctggacaatattgtctacactgctaaattctacacacttctgtcctctctggtgatcacagtaatatttgttttgtttccactgcgggggtgagtgggcacaagattgtggattgtttggtacactgagctgcatcatcaccatccccccaccaggtggcggtggtggtccagctgaaaatcagaatttaggatgctatagtcagaatattttagcaactagttggtgtttctgaacactaggataacagtagtaattttacatttctgaataaaattttactattaactaagaaaaccaggttgaagccctagtgcatcacactacaagtattgtgtgtttaaacaggcattaagatggactctgtaggcctaaacatctcacttatcataaaggtaatttggagtaaacaggaacagctgg

SEQ ID NO: 2213 - DNA, 537 bp, Homo sapiens
  MAP TO CHR5.1; EXPRESSED IN HEART, SIGNAL = 1.8; EXPRESSED IN FETAL LIVER, SIGNAL = 3.3; EXPRESSED IN BONE MARROW, SIGNAL = 3.5; EXPRESSED IN ADULT LIVER, SIGNAL = 2.7; EXPRESSED IN PLACENTA, SIGNAL = 3.8; EXPRESSED IN LUNG, SIGNAL = 1.6; EXPRESSED IN BRAIN, SIGNAL = 3.6; EXPRESSED IN HELA, SIGNAL = 4.5; NT HIT: AJ309484.1, EVALUE 0.00e+00; EST_HUMAN HIT: BF904845.1, EVALUE 0.00e+00; SWISSPROT HIT: P98081, EVALUE 2.00e-01
tgttatgacgaggaaaggggtttgctttaaaatttcgagtcacctgttcccccttgactcttcctttcccacttttaattcttaaccttttctatgttgtttcttaagcttccctgggatcagagatcttgatccagtcttattctttatacatttttgtgcatgtagcaatagactgtccctatgcaataatattaatatgggacttgtggcttttcccccccagaggaacaaaggaacagcatcatcaactccagtttggaatctgtctcatcaaatccaaacagcatccttaattccagcagcagcttacagcccaacatgaactccagtgacccagacctggctgtggtcaaacccacccggcccaactcactgtaagtatgatgtccagctgcctaccccacaagggctttggtcagccattccacctagaatttgctgtctggctccatctgactttggaccattatcccctgaacattatttaaacctcctccctaaactgggagctcagctggcttgttgtgggttttt

SEQ ID NO: 2214 - DNA, 591 bp, Homo sapiens
  MAP TO CHR5.1; EXPRESSED IN HELA, SIGNAL = 1.5; EXPRESSED IN BRAIN, SIGNAL = 1.6; EXPRESSED IN BONE MARROW, SIGNAL = 1.6; EXPRESSED IN HEART, SIGNAL = 1.3; EXPRESSED IN PLACENTA, SIGNAL = 1.7; SWISSPROT HIT: Q9Y5H6, EVALUE 1.00e-108; NT HIT: gi14861872, EVALUE 0.00e+00; EST_HUMAN HIT: BG719192.1, EVALUE 0.00e+00
ttgtcattctcgtccagcacgaacacctgcagcgtcacgttgctgcccagaggcggcacgcccgcgtcgcgcgcgctcacctggaactgcagcagctctagctcctcgtggtccagcggctgcagcgcgtacaccttgccgctctccgtgtgcaccgaaatgtagctcgacagcgagcgctcgcccacccgccgctccacaagcgagtaggacaccagcgcgttctcctgcgcgtccgcgtctcgcgcagacaccgtgaagatgtggcagcccggcgggttgttctccttcacgaacaccgtgtactcgggctgcgcgaacgccggagcattgtcgttcacgtcggccacctccacagacaagctggcggtggcccacagcgaaggcgagcccccgtcccgcgcggttaccaccaactcataggccgacactctctcgcggtccagggcgctgtccagcaccaacgagtagtaattcttgaaggtggacaccagcttgaaggggacatggggcatcagggagcaggtcacctgcccgttggcacctgaatcgaggtcgttcacgctaattagggcgatgacagtaccaaat

SEQ ID NO: 2215 - DNA, 561 bp, Homo sapiens
  MAP TO CHR7.1; EXPRESSED IN FETAL LIVER, SIGNAL = 0.28; EXPRESSED IN BRAIN, SIGNAL = 0.38; EXPRESSED IN HEART, SIGNAL = 0.48; EXPRESSED IN BONE MARROW, SIGNAL = 0.39; SWISSPROT HIT: Q10425, EVALUE 5.30e+00; EST_HUMAN HIT: BF353592.1, EVALUE 2.00e-01; NT HIT: gi16159610, EVALUE 1.40e-01
agggaaagtgttgatgcgagaatgtaagcagttcactctcatacaaacaacggctttgtctgccatggaagctagtgcaaggtaaccaagatgtaaactctaaacacatgttcagcagaaatagtaaagtgactgtttctttgtagaagaatttctttatgtgtttattactgctttgatgtacaccataaatttctgcttaaaggtcacaagattgtgataacaaatcaaaaaccaggttgtgataatatgttgacggtgtaggaacactgtgtaaagaactggagaataataaacattaaggccagtaccggcattttaaaaatacagattagatgctcttaaaaaatcttctaaaaatatttggttcccacaaagtacaagcaaaatattttactgttgagtagaattcattctttttatgaaatccttgtacttgaaagctttcataagattatcgttttgtgatgacatttctctttagaatgagacaagaaagacaattcttataattaaacgtgttaactggtttaatagttttgcaactcaggatttttccca

SEQ ID NO: 2216 - DNA, 567 bp, Homo sapiens
  MAP TO CHR5.1; EXPRESSED IN BONE MARROW, SIGNAL = 1.8; EXPRESSED IN HEART, SIGNAL = 1.5; EXPRESSED IN ADULT LIVER, SIGNAL = 3.5; EXPRESSED IN FETAL LIVER, SIGNAL = 2.2; EXPRESSED IN LUNG, SIGNAL = 1.3; EXPRESSED IN BRAIN, SIGNAL =   2; SWISSPROT HIT: P51826, EVALUE 2.00e-07; EST_HUMAN HIT: AI807417.1, EVALUE 1.00e-122; NT HIT: gi14781210, EVALUE 1.00e-122
gttgagcagagagtgaggggatctggcttttaagtctttgaactgtaacaaggtacatgacttcttcagttattgtccatctcttgttttgttgttattcattaaaacaaaggctacagattctaagataacaagattatgaattacaagattatagtacttatttagaagaaattgtagctctctgaaaacccatctagtttaagagaatctttacattttaaatgctttcatgtagaaagagctagtagtacttgattttataatgcttaccatgtccatatgaacaagcttcctatttctgttgtgtagcaaagctgtggggatgccttcccctgtttctccaaagctgtcaccaggcaattcaggaaattattcatctggggccagtagtgcttctgcaagtggttcttcagtgaccattccacagaagatccaccagatggcagccagctatgttcaggtcacatccaacttcctctatgccaccgaaatttgggaccaagctgaacagctttccaaagagcaaaaaggtaggtaggtttctggataaacttcaagggatgg

SEQ ID NO: 2217 - DNA, 593 bp, Homo sapiens
  MAP TO CHR7.1; EXPRESSED IN FETAL LIVER, SIGNAL = 0.53; EXPRESSED IN HELA, SIGNAL = 0.39; EXPRESSED IN BRAIN, SIGNAL = 0.54; EXPRESSED IN BONE MARROW, SIGNAL = 0.61; SWISSPROT HIT: P57142, EVALUE 9.90e+00; EST_HUMAN HIT: BI759740.1, EVALUE 1.00e-112
aatagtttccctggaaggggtggacaagtgaaagatttaaaaatgaaattgttacaaagtttactgatgtggtgtaactatttgtcattgagcttccaatagctacatttacaatgccatggagtccaggaaaactttaaacttttgtttttgtcatattctggagtgacatataaaagagggaatttacaggtgaagatggctatggattgtaagaaaattcaagtggaaattctacttttgcttcacgcctttaagaaactgaattattattattagaatgtaatcatttgaataatgaaagtgaacaaaaccctaaggagattgaccttaccatttattaagaaagcagcaagaataagagtagcctcttccaataaagtctcaccttttttacataatcaggcacctcttctaatgtttggaatgaagtttcactgggtttcatcgtgtaaaacaacatgcgaaatccctgggaaactgaaacatcctgctgggcttctgggttcttcatttctgcccttgtctgattcccagctggagaatatttaggattcaatgcttgaagcctgaggctgaacaaagaggacgag

SEQ ID NO: 2218 - DNA, 541 bp, Homo sapiens
  MAP TO CHR17.1; EXPRESSED IN FETAL LIVER, SIGNAL = 0.58; EXPRESSED IN HELA, SIGNAL = 0.4; EXPRESSED IN BRAIN, SIGNAL = 0.72; SWISSPROT HIT: Q05922, EVALUE 1.00e-02; NT HIT: D82351.1, EVALUE 8.00e+00; EST_HUMAN HIT: AW380512.1, EVALUE 1.00e-124
taaaactccccactggcaacttaatttcattcagaatttcttccttctctcatttctgtatcttttgctgcagtttaagtctattttctttaattctgtgctcaatggaaatagccaacatgaggttactttctcctaggggtttactttacttaaagtgagtcactagtcttttgcctaggattaaaaagatttcagtctcctcctttccttagttcctttttcctgagtaccatcagtaagttgtctatagccctcaggacccagccatgtgtggtggggcaagaggaacagagatcacaacattgtgcaggactattactcactttgctttagagatgaatttgtaagtgtcattccagtacgccaggagatccgttgcctcttcatcatatacccgaatgttatgatactcaaagactcctgggaagaagttatctatctctcgagtgacattcaagatataccgtaccctgcaaggaaaccaagggagaatatgtgctctactactcaggctaaatccaattcccagcactgtttt

SEQ ID NO: 2219 - DNA, 502 bp, Homo sapiens
  MAP TO CHR17.1; EXPRESSED IN HEART, SIGNAL = 1.5; EXPRESSED IN PLACENTA, SIGNAL = 3.6; EXPRESSED IN LUNG, SIGNAL = 2.7; EXPRESSED IN FETAL LIVER, SIGNAL = 1.2; EXPRESSED IN BRAIN, SIGNAL = 1.2; EXPRESSED IN HELA, SIGNAL = 1.6; EXPRESSED IN BONE MARROW, SIGNAL = 1.1; EXPRESSED IN ADULT LIVER, SIGNAL = 0.76; SWISSPROT HIT: P13598, EVALUE 2.00e-13; NT HIT: gi14771220, EVALUE 0.00e+00; EST_HUMAN HIT: AU159558.1, EVALUE 0.00e+00
cagaagtccagctggtagcctgagccctgggccaccttttttccagataataattttaatgcagacaccattcaccactcatctctgcaactggggtgactgctggatgcatgagcgggcggcggggtctgggggtctgggttgggggtggacttccactcccttttggtccctggtaactgggatcacaggacgtctaagacccttgccccctccctccccagagcctgtgtcggacagccagatggtcatcatagtcacggtggtgtcggtgttgctgtccctgttcgtgacatctgtcctgctctgcttcatcttcggccagcacttgcgccagcagcggatgggcacctacggggtgcgagcggcttggaggaggctgccccaggccttccggccatagcaaccatgagtggcatggccaccaccacggtggtcactggaactcagtgtgactcctcagggttgaggtccagccctggctgaaggactgtgacaggca

SEQ ID NO: 2220 - DNA, 583 bp, Homo sapiens
  MAP TO CHR11.1; EXPRESSED IN FETAL LIVER, SIGNAL = 0.79; EXPRESSED IN BRAIN, SIGNAL = 0.86; EXPRESSED IN ADULT LIVER, SIGNAL = 1.4; EXPRESSED IN BONE MARROW, SIGNAL = 0.84; EST_HUMAN HIT: AI239808.1, EVALUE 1.00e-08; SWISSPROT HIT: Q15620, EVALUE 4.00e-36; NT HIT: AF282276.1, EVALUE 2.00e-16
tctagggttaattggcggtgttctgtaaaggcagattctgtgggtacaggttaggctaatctcaggcagacccattgtggaaagagctgggttgtcctctaatgcaaccgtttgtttttttcccctgtttccagagattcccttaaagaagaatggcacctggaaatggctctttcgtgactgaattcattctggcgggattaacacatcagccagatctccagtcccctctgttcttcctgtttctagtaatctatgtggtcactctgttgggaaacttgggcttggtaactctaattgggctgaactcacaccttcatacccccatgtacttcttcctctttaacttgtccttcatagatctctgttattcttctgtgtttacacccaaaatgctaatgaactttatttcagagaagaatattatctccttcaaggggtgcatgacccaacttttctttttctgttttttttggtcatttctgaatgttatgtgctgacgtcaatggcgtatgatcgctgtggccatctgtaacccacttctgtatcacattgccatgtctcctacagtgtgctccagcct

SEQ ID NO: 2221 - DNA, 571 bp, Homo sapiens
  MAP TO CHR6.1; EXPRESSED IN PLACENTA, SIGNAL = 4.7; EXPRESSED IN LUNG, SIGNAL =   1; EXPRESSED IN HELA, SIGNAL =   6; EXPRESSED IN BRAIN, SIGNAL = 2.4; EXPRESSED IN HEART, SIGNAL = 1.8; EXPRESSED IN BONE MARROW, SIGNAL = 2.4; EXPRESSED IN ADULT LIVER, SIGNAL = 5.6; SWISSPROT HIT: Q9N0N3, EVALUE 2.00e-17; NT HIT: X77343.2, EVALUE 0.00e+00; EST_HUMAN HIT: BG251670.1, EVALUE 0.00e+00
agaattaggctggggaggtgtaactttatggtagaggaaaagaaggaagaaggatggaggtataggagtacatgcaaatgtttctttttgccatgaaataattccattcacatctggctatattctctgcaaagatgaaactgcccaactgacataaaatacgaccaaacatctggccactaaatattatccattttccaagaaggaagttccttctagttagcaagtggattcgcttaccctctactagtgatgtgagcagggtaacgttggcagctttacgtctccctgcaggcagatttaatcctattttgtccagtttttctcttaaagatcttcctccatttttagacttcgccctgtttcacaaatatatgcgagaaagggatttagaaaacattgggttgctctgcaccacattaaaatcattttgaaagcttcctaaaatgtgctttcaaaaactgagaagcttggccccaagacatttaaaggagggaaacctaggaatagtacagaagttcataggagataaacgcctgttaaactgtaaagcaccccctacgttcagtta

SEQ ID NO: 2222 - DNA, 530 bp, Homo sapiens
  MAP TO CHR19.1; EXPRESSED IN FETAL LIVER, SIGNAL = 1.4; EXPRESSED IN LUNG, SIGNAL = 1.2; EXPRESSED IN HELA, SIGNAL = 2.3; EXPRESSED IN BRAIN, SIGNAL = 1.6; EXPRESSED IN HEART, SIGNAL = 1.1; EXPRESSED IN BONE MARROW, SIGNAL = 2.1; EXPRESSED IN PLACENTA, SIGNAL = 1.9; SWISSPROT HIT: O43823, EVALUE 8.00e-22; NT HIT: gi14761769, EVALUE 8.00e-77; EST_HUMAN HIT: BG111461.1, EVALUE 7.00e-72
ttggttttgcggtttctttctccatcaattcctgacgccgcttctcaattttcttatttctgtttacaatgtattcctaggtgggattggagagggcataaagtaaaatgagaggtgggcgcatgtgggcatttctcaactgccagggctaggcaggcagctatcagagcagctgcgtggggcagcacagcacgatggctggagctcccggttgtccctgtgactcagggacttacacagctactctatctgggaaaggaaaccttggccaagtatagcctctgatttcccttcctccttcaagggatccggcacctgcgggatgggcaagagacgcggtgacggggcccaggtttcctttacctggaggaactccacggtcttgtcgggcagcttggtgcttatgaaccgcagggtctctttgtgaaatttgctttgcagatgcttctggatctcttcgtcatcaaagctacggaacttgcatacagaacaggcaaactgaattctgtagaaggaaaacaaggagggga

SEQ ID NO: 2223 - DNA, 545 bp, Homo sapiens
  MAP TO CHR22.1; EXPRESSED IN BRAIN, SIGNAL = 0.52; EXPRESSED IN HELA, SIGNAL = 1.2; EXPRESSED IN LUNG, SIGNAL = 0.6; EXPRESSED IN BONE MARROW, SIGNAL = 0.48; EXPRESSED IN ADULT LIVER, SIGNAL = 0.86; EXPRESSED IN FETAL LIVER, SIGNAL = 0.61; SWISSPROT HIT: Q15040, EVALUE 1.00e-34; NT HIT: gi12742814, EVALUE 1.00e-108; EST_HUMAN HIT: BG822958.1, EVALUE 1.00e-108
atgagctcagtgtccccaacctaagaaatgaagcagcctagcaacttagtcacaaaaggtgccgattacctgagctcgctctcgcctccaatccactcgggcatcttgagtttggagtcgaggttgtagtaggcccctcccacctctcgaacacagatccagtgctgccttttgaggggcagtttcagtggaccccagcataggctggagggcagattcatgatgaagcccatgacgttagtgagggcaatgacaccgacatccctgcaggggagaaatggtggcaggctctgatgcagcccattttccaaggttccctggctgtaataccacaactggctacctccccactcatgccatgagcccaagtactaaaagcttataccacaaccgtgctgttctccatcaagtcaagcctgattcagattacctgcgcttgtcccaccaaacagcttcatagcctttggtctgaagtgctgccataatgacattcacatcgtagttgccatttcccagcatgctcttcttgtgaggtgtcaccatgg

SEQ ID NO: 2224 - DNA, 550 bp, Homo sapiens
  MAP TO CHR6.1; EXPRESSED IN ADULT LIVER, SIGNAL = 3.2; EXPRESSED IN HEART, SIGNAL = 1.7; EXPRESSED IN PLACENTA, SIGNAL = 1.8; EXPRESSED IN FETAL LIVER, SIGNAL = 2.1; EXPRESSED IN HELA, SIGNAL = 1.9; EXPRESSED IN LUNG, SIGNAL = 1.8; EXPRESSED IN BRAIN, SIGNAL = 2.4; SWISSPROT HIT: P16654, EVALUE 5.20e+00; EST_HUMAN HIT: BE302751.1, EVALUE 3.00e+00
cattaggggaaagcttgctgttttttatctcactccgggaactgccgagccaccgtcggggtggtttccctgatggcatggggataagttcaggagacaataaacctcttggtagacagaagacttcctaaaatatgtagtctgacaaaaagggagatgaatgacaaagatataaatttgcaatgaaagaaaacagtacccccagcaccaaaaaatactttccgtgctatgtaagttatgcataaacactacagccgattcacatttgataaactattaacttccccatttctttgataggaaggctgtggagtgagataaagcaggattgcaccatggaggacaaacatctcggcatccagtacacttcaaaatgtttctttttttttgttttcaagactggctgctatttcctccatgcctcttgtttattagcgtgttgactcatctagagcccagcgccttgttccacaccagagagatggacttgtgcctctgccaagtggagtcggctcgagagataacagccagccacaacaatggtcttcct

SEQ ID NO: 2225 - DNA, 550 bp, Homo sapiens
  MAP TO CHR4.1; EXPRESSED IN BRAIN, SIGNAL = 0.67; EXPRESSED IN BONE MARROW, SIGNAL = 0.67; EXPRESSED IN FETAL LIVER, SIGNAL = 0.52; EST_HUMAN HIT: AA524869.1, EVALUE 2.00e-01; NT HIT: AJ308471.1, EVALUE 3.40e-02
tggagagaggcaattatggggtgctcatgattttattctttcttaagatcctcttatataaccgatttgttgtgcaatcgagcagttggcagttcaaggaagctggctcgtaccttagataagaagttgaattattccagaggacatttggaggcaggcaggctgggacacgccgagaagtgatctgggcctcctacacaggacatggtattttagctgtgaagttccctatatgtaagccacatgagtcccccatttcctgagcatctgtatttggtgagcactggaaacctcttgctttcccactgaaggccccttgtttcctcttgctagagtcaaaaacatgacccagttacaacagaggcacagaagagcagcttggtaggaagaggagaagaggggagggaggggagggacgaggcagtctccatatttgaaaataaaaatgatcccagagaatcataagcatgttaatgtacaagttcaaggttacatacatgccgagacatgcacactcacacacacagtaacaaacacaaccagggcaata

SEQ ID NO: 2226 - DNA, 545 bp, Homo sapiens
  MAP TO CHR11.1; EXPRESSED IN ADULT LIVER, SIGNAL = 4.7; EXPRESSED IN FETAL LIVER, SIGNAL = 5.3; EXPRESSED IN LUNG, SIGNAL = 5.1; EXPRESSED IN HELA, SIGNAL = 7.2; EXPRESSED IN HEART, SIGNAL = 4.4; EXPRESSED IN BONE MARROW, SIGNAL =   6; EXPRESSED IN PLACENTA, SIGNAL = 5.3; EXPRESSED IN BRAIN, SIGNAL = 7.6; EST_HUMAN HIT: AL520526.1, EVALUE 2.00e-75; SWISSPROT HIT: P49589, EVALUE 5.00e-23; NT HIT: gi14774408, EVALUE 1.00e-75
tttcccttctgaaaaccacgcgctccataaaaacgttcccaattcataaaacgaaaagcccattatgcccctcaactcaagttcaatgttgacttggccgcttaattgagctggccttgccaaaacaggaatttagaaatcagggcccttagcgcaagagagccagcacaagacaatcgtgacacttacattcagagcttccatgtctctgtggaagtccccctcccagaacttgggcagcttggagaagatggaattgtcagtgacatcacagccaagtgtagaatccagccagtcagagagcaaatccttggcttcttccagcaacacctgaagagaaagaaacaaaaatccagcagcgggccacacacttcacatgagaacatctcgtgcagctggtgtgagcccatcagtgccctgaattcaaaggtgctgaccttgacctgtgaagagccaccgtctcctagggagactgtgatgcttacacaactggctcggcagggacaaatacaagactctacaaatgggcaggtctcacatgaact

SEQ ID NO: 2227 - DNA, 533 bp, Homo sapiens
  MAP TO CHRX.1; EXPRESSED IN BRAIN, SIGNAL = 4.2; EXPRESSED IN HEART, SIGNAL = 3.8; EXPRESSED IN ADULT LIVER, SIGNAL = 5.2; EXPRESSED IN BONE MARROW, SIGNAL = 4.4; EXPRESSED IN PLACENTA, SIGNAL = 4.8; EXPRESSED IN FETAL LIVER, SIGNAL = 3.9; EXPRESSED IN LUNG, SIGNAL = 3.2; NT HIT: X86810.1, EVALUE 0.00e+00; EST_HUMAN HIT: BG746458.1, EVALUE 0.00e+00; SWISSPROT HIT: P50402, EVALUE 3.00e-38
ctcgccctgactctcttctgcaggtgcatgatgacgatcttttgtcttcttctgaagaggagtgcaaggataggtgcgtagtgggggagcccagggacgggctggttctgggtccaggctcctggcccacttgctcccctcttttgcctcagggaacgccccatgtacggccgggacagtgcctaccagagcatcacgcactaccgccctgtttcagcctccaggagctccctggacctgtcctattatcctacttcctcctccacctcttttatgtcctcctcatcatcttcctcttcatggctcacccgccgtgccatccggcctgaaaaccgtgctcctggggctgggctgggccaggatcgccaggtcccgctctggggccagctgctgcttttcctggtctttgtgatcgtcctcttcttcatttaccacttcatgcaggctgaagaaggcaaccccttctagagggagccatgagggtctgggcttcagagctaggtctttggggaagtcctggctgactgccttag

SEQ ID NO: 2228 - DNA, 567 bp, Homo sapiens
  MAP TO CHR19.1; EXPRESSED IN BRAIN, SIGNAL = 1.7; EXPRESSED IN HELA, SIGNAL = 1.7; EXPRESSED IN BONE MARROW, SIGNAL = 1.7; EXPRESSED IN HEART, SIGNAL = 1.3; EXPRESSED IN PLACENTA, SIGNAL = 1.6; EXPRESSED IN FETAL LIVER, SIGNAL = 1.3; EXPRESSED IN LUNG, SIGNAL = 1.2; SWISSPROT HIT: O60610, EVALUE 5.50e-02; EST_HUMAN HIT: BI520117.1, EVALUE 1.00e-103
gaaggacttcccagaggaggatgaagatgtggggactcacccatgtagttgacaggcagcaatccagtcacgcatgacaaccaggaaagtgtccaagtccacagtggccttagggccctccccattggggtccaggctgttggccaatgtttggaggcgtgcatcctgggggccctggcctgtcacagcctccaggtaggccagcacctgggccacagccacagtgcctgtgacagagcatgcagtgagggggtctggggcaggtggggagtgatgggtatggactggcagcagcttgggaccaggatgtcactggctaggctggtggcactcctgctccatggcccagtggagacacactgggcaagccctttcccctcctctgagtccactttttcacctggaaatggggcccagtcatccccccatcacagggtaaaccaaaggggatggacatagggacagcatcagccatgccccacgccaccatggtggctgcctccctcccctatcccacgaccccaaaactctgccctcttccatcaacgtcccccaagttttcctcat

SEQ ID NO: 2229 - DNA, 551 bp, Homo sapiens
  MAP TO CHR4.1; EXPRESSED IN BONE MARROW, SIGNAL = 0.86; EXPRESSED IN FETAL LIVER, SIGNAL = 0.81; EXPRESSED IN BRAIN, SIGNAL = 0.86; SWISSPROT HIT: Q15542, EVALUE 7.90e-01; EST_HUMAN HIT: BG285681.1, EVALUE 3.10e+00
aacaaatgggttcaaaagccattgaaattctttgtttagaaaatctttaaacagcttagaaaattacattttcaactttttaaagagtgctgacacttgtcacatttatactgtttgtaccaacagatgaataactcaaaccatttccaaaatgctcttttaatatacaagtttctttagaaagactttcttacttgttaaaatgtcacctttaccttgaagggacagatgaagtgtgcttattttttcaaaaatatctgcttggtagcatttgttatcatagtaaaagtctgaaaatacaaaacatctttcttataaaagaaaaatgtggaattcatttttaagtttgacaaatctattcagaacttttccataagacaacctgtgaaattctgggttgatcagaatattttcatgctcactccccgtctcagtagaaggtattgatgattctgctgtctttagactatgtgtgaatagtagcacctcttgatatatgaagagcatggaagatgaaggccccattgtcaaccctctgacttggaggactg

SEQ ID NO: 2230 - DNA, 589 bp, Homo sapiens
  MAP TO CHR7.1; EXPRESSED IN FETAL LIVER, SIGNAL = 0.76; EXPRESSED IN BRAIN, SIGNAL = 0.72; EXPRESSED IN HEART, SIGNAL = 0.84; EXPRESSED IN BONE MARROW, SIGNAL = 0.74; NT HIT: L13609.1, EVALUE 1.00e-08; SWISSPROT HIT: P76594, EVALUE 3.30e+00; EST_HUMAN HIT: BE546152.1, EVALUE 4.00e-09
ccaaatcaaaaatcggaaggaatatcaactcttttcataaatcttctattatggattattttgatgtttatgctgctcattttcatggggccctcacctgccaccatgggctggatcctcatgaatgcagtggacacagatgtgatgaagcttcagactgtttcattacggccagtttgcctggtttcacattaaagaaggagctgggaagtggcagtccctgaagatcacaaagcagcgaccatgaaacaggctaaatgagacacctctgatttttcaggcatgactgagactgatggtgccacagctgtgtagggagaacacatagcagagcagttgtgtgtgtctctggagtcaggctgtctaggttcaggacccagatattcccaattacttgctgtgtacttttggacaagttatttaacatctctaagcctcagtttcctcgttgtaaaatggagataataatagtatctaactcacagggtcgatgtgaggattaaatgagctcatgctactggagtacatggaacaaggtctggcactaaataaacactcagtgaatgttagctgctaagtcctgtctgcc

SEQ ID NO: 2231 - DNA, 528 bp, Homo sapiens
  MAP TO CHR3.1; EXPRESSED IN FETAL LIVER, SIGNAL = 0.67; EXPRESSED IN HELA, SIGNAL = 0.85; EXPRESSED IN BRAIN, SIGNAL = 0.52; EXPRESSED IN ADULT LIVER, SIGNAL =   1; EXPRESSED IN BONE MARROW, SIGNAL = 0.44; NT HIT: gi14768472, EVALUE 6.00e-84; SWISSPROT HIT: Q61085, EVALUE 7.00e-08; EST_HUMAN HIT: BG118573.1, EVALUE 2.00e-75
ggctctttctctgcaaatgggttcatgagggcccttgtgccgggctgccccttcccagtgtcccttctatttcaggtgggagaggtctaccaacagctacacgcagccatgagccaggcgccggtgaaagagaacatcccctactcctgggccagcttagcctgcgtgaaggcccaccactacgcggccctggcccactacttcactgccatcctcctcatcgaccaccagggtaaggcctggggggttcgggagtttggcgagggctgtggtccagctgccccaggggcgattctgagctgagtgagagctaactgccttccctggagatgctcacaggctgaaggcagaggatgggagtgacccatgactgaggcagctgccgcacaggccatggtggggttaggggttataagcttctttagagggaggaagaagaggcacctttaattctgcctgggtgcaagaggatgaattttcacctggaatctagaatctaagggaaggccaaaaatgctggcatcaaga

SEQ ID NO: 2232 - DNA, 512 bp, Homo sapiens
  MAP TO CHR5.1; EXPRESSED IN FETAL LIVER, SIGNAL = 0.83; EXPRESSED IN HELA, SIGNAL = 0.89; EXPRESSED IN BRAIN, SIGNAL = 0.97; EXPRESSED IN HEART, SIGNAL = 0.7; EXPRESSED IN BONE MARROW, SIGNAL = 0.99; SWISSPROT HIT: P55937, EVALUE 6.20e+00; NT HIT: gi16171606, EVALUE 0.00e+00; EST_HUMAN HIT: BF984088.1, EVALUE 4.00e-21
ttgccattttctatctgtgccatgataaggagcttagaaagcactactctaactttggggttatttcttcctccagtgaacacttaagccctggccatgccagccatgtcctccacagaagcctgagccggcatgcctgggtgatgtctttcaaacaaggcctgttgtgttttcctaggtccatggaagaaatctcttgtccattgactatgatcgaaatattcggactgaaaagatctatgatgaccaccggaagttcaccctgaggatcatttatgaccaggtgggccgccccttcctctggctgcccagcagcgggctggcagctgtcaacgtgtcatacttcttcaatgggcgcctggctgggcttcagcgtggggccatgagcgagaggacagacatcgacaagcaaggccgcatcgtgtcccgcatgttcgctgacgggaaagtgtggagctactcctaccttgacaaggtaggtgaacatgctgccctgacagcaagggctttct

SEQ ID NO: 2233 - DNA, 584 bp, Homo sapiens
  MAP TO CHR7.1; EXPRESSED IN BONE MARROW, SIGNAL = 2.8; EXPRESSED IN ADULT LIVER, SIGNAL = 1.9; EXPRESSED IN PLACENTA, SIGNAL = 3.1; EXPRESSED IN HELA, SIGNAL = 3.4; EXPRESSED IN FETAL LIVER, SIGNAL = 2.5; EXPRESSED IN LUNG, SIGNAL =   2; EXPRESSED IN BRAIN, SIGNAL = 3.2; EXPRESSED IN HEART, SIGNAL =   2; SWISSPROT HIT: P87312, EVALUE 4.30e+00; EST_HUMAN HIT: AL157549.1, EVALUE 3.20e+00
tgctgagctgtgagttctgggaagaaatactcaacatctctctgcctcattttgtcatttgtaaagtgagaaaatacagagttgctgagtgaagtaaatgaaatcttgtatgtgaaagagcttggtaattataaaacacctcataaaggtgaggtgtttgggaggataaaagtgacgttctggttcattcaagaattgaaagtaaatgcattaagatattgcacaaaagtgtgagcctctttaaatatgtagaaatagggaaaattgtgtttgagttatgtgtattgtgttttaaagaaattacttttggggaaaatatattttatacttaaataataataaataaggtagaagcactttgtaaatgatataaagtatacagacactgcagaaaatgtacgcacgtgaacacatacgcactgtagctccagtgacttctgggaactatttgagggagttgcagtaacagaatttcataggatttattagcagtagaaagttccccagagctgcctacataaggctttaattattcaaagattgcactttggcacttcaaacattgccaacccaagaaatcagaa

SEQ ID NO: 2234 - DNA, 507 bp, Homo sapiens
  MAP TO CHR19.1; EXPRESSED IN HELA, SIGNAL = 1.6; EXPRESSED IN ADULT LIVER, SIGNAL = 2.3; EXPRESSED IN BONE MARROW, SIGNAL = 1.3; EXPRESSED IN HEART, SIGNAL = 0.97; EXPRESSED IN FETAL LIVER, SIGNAL = 1.2; EXPRESSED IN LUNG, SIGNAL = 1.4; EXPRESSED IN PLACENTA, SIGNAL = 1.7; EXPRESSED IN BRAIN, SIGNAL = 1.1; EST_HUMAN HIT: BE151230.1, EVALUE 0.00e+00; SWISSPROT HIT: O96013, EVALUE 4.00e-20; NT HIT: gi15308728, EVALUE 0.00e+00
tctggggccacatagtaagcgccatcacaggtgccatcactgtccctgtcccgtctacaccccaagatctagacacccatgacctccgccccctgccctcctgcacagtacatgccgccagccgacttggcagaggcggacactgcagccctacagcaaatgaacagtggggagcctcgccccctgaccctcccctccttctcgacaggtgtcgccatccctgaagggcttcctggaccgcctgctggtgcgagaccctgcccagcgggccacggcagccgagctgctgaagcacccattcctggccaaggcagggccgcctgccagcatcgtgcccctcatgcgccagaaccgcaccagatgaggcccagcgcccttcccctcaaccaaagagccccccgggtcacccccgccccactgaggccagtagggggccaggcctcccactcctcccagcccgggagatgctccgcgtggcaccaccctccttgctgggggtagatgaga

SEQ ID NO: 2235 - DNA, 579 bp, Homo sapiens
  MAP TO CHR17.1; EXPRESSED IN ADULT LIVER, SIGNAL = 0.61; EXPRESSED IN BONE MARROW, SIGNAL = 0.83; EXPRESSED IN HELA, SIGNAL = 1.1; EXPRESSED IN BRAIN, SIGNAL = 0.9; EXPRESSED IN LUNG, SIGNAL =   1; EXPRESSED IN HEART, SIGNAL = 1.1; EST_HUMAN HIT: BE613048.1, EVALUE 5.20e-02; SWISSPROT HIT: Q24432, EVALUE 8.40e-01; NT HIT: AL163247.2, EVALUE 1.40e-01
gatgtcaatgatggggttccctgatgagctcctgggtgttgctcaccttcatgccagcctcccggccttcctgcattatgaaggaagctccagaagcccagctttggccagctgcaaagccagtgggggcccagtgctgggaggccatatggggagctgggcagaggggtaccttggccgacctagggacttcaagctggtccctgagctaagcaattgcgcggcggtgctcagggcaggcctgcctttctgggccttcagacttcccaccatctgcttagtgaggccctctgtttaaattctctacttgtctcggcttccacaaaataattagcatctattcgttcctagagcttgcttggcgacattagtcattgtaggagctttcagtgcggcttgcagaaatttccatttgatgcaaagttgaaaatggcttaagtgggactccacgggccccacttactttaccagcatctggtgccttggtttgtttcctcctacctgcttctttgctgccttctgagcaggtgtggggcctgatgatgacaaagggagaggagggcactcagacaagagagg

SEQ ID NO: 2236 - DNA, 524 bp, Homo sapiens
  MAP TO CHR5.1; EXPRESSED IN FETAL LIVER, SIGNAL = 1.2; EXPRESSED IN LUNG, SIGNAL = 1.6; EXPRESSED IN HELA, SIGNAL = 1.8; EXPRESSED IN BRAIN, SIGNAL = 1.3; EXPRESSED IN HEART, SIGNAL = 1.3; EXPRESSED IN BONE MARROW, SIGNAL = 0.98; EXPRESSED IN ADULT LIVER, SIGNAL = 1.4; EST_HUMAN HIT: BF852890.1, EVALUE 0.00e+00; SWISSPROT HIT: O15379, EVALUE 1.00e-14; NT HIT: AF053137.1, EVALUE 0.00e+00
ttctgggaaaagtcattggctttcatcagtcactcatagcagtctgggatcccttccagaagtttcagaccagtgatttgattcttttgggtggcccctttcctgggctacatgctcgctcaaccccctttttccttttgttccctgtctccccatccccttggggtgccaggtgcccatctttggccctctcccaggttacaagcaccttttccagccggttatcaaccaggtagtggacttctaccaacccacgtgcattgtgctccaggtaatactgtcagttcctcctcaggagtgttctgcctgggcttggggaaagagagcaagggaagaggaggttctttaggttggtggtggaaggggtatctgtgatgttctgatcagttctgatcactgcactttcctggggttttgctttttgcagtgtggagctgactctctgggctgtgatccattgggctgctttaacctcagcatccgagggcatgggtgagacttgctctccttcttctccccaaggt

SEQ ID NO: 2237 - DNA, 578 bp, Homo sapiens
  MAP TO CHR19.1; EXPRESSED IN BRAIN, SIGNAL = 1.3; EXPRESSED IN HEART, SIGNAL = 1.4; EXPRESSED IN BONE MARROW, SIGNAL = 1.5; EXPRESSED IN ADULT LIVER, SIGNAL = 1.6; EXPRESSED IN PLACENTA, SIGNAL = 1.8; EXPRESSED IN FETAL LIVER, SIGNAL = 1.2; EXPRESSED IN LUNG, SIGNAL = 1.4; EST_HUMAN HIT: BE264995.1, EVALUE 0.00e+00; SWISSPROT HIT: Q15139, EVALUE 3.00e-42; NT HIT: gi14758797, EVALUE 0.00e+00
gaataccatggagggtggtgtggtggggatgctggggtgggtgcggctccatcacctggtggagcctccatcccttgccctctgcaggtgaagctgtgtgactttggctttgctcgcatcatcggcgagaagtcgttccgccgctcagtggtgggcacgccggcctacctggcacccgaggtgctgctcaaccagggctacaaccgctcgctggacatgtggtcagtgggcgtgatcatgtacgtcagcctcagcggcaccttccctttcaacgaggatgaggacatcaatgaccagatccagaacgccgccttcatgtacccggccagcccctggagccacatctcagctggaggtgcctgggcccgcctaccccatgggcgggtgggttgtggggtggggctggagaagtgggcggagccatgagaggggggtggacccggaaacagcctgtcaccttgggggtggagcccagtgctggggcgggcctactggagggatgtggctacaggaggagccgtcctgtaaaagatgggctgggactcaggcctagactaggttacttgggctggaaacca

SEQ ID NO: 2238 - DNA, 583 bp, Homo sapiens
  MAP TO CHR19.1; EXPRESSED IN HEART, SIGNAL = 0.65; EXPRESSED IN BONE MARROW, SIGNAL = 0.84; EXPRESSED IN FETAL LIVER, SIGNAL = 1.1; EXPRESSED IN LUNG, SIGNAL = 0.66; EXPRESSED IN BRAIN, SIGNAL = 1.1; NT HIT: gi14768850, EVALUE 0.00e+00; EST_HUMAN HIT: BE081747.1, EVALUE 2.00e-94; SWISSPROT HIT: P52742, EVALUE 2.00e-28
gttcacgttcatgttcacgctcattatctttgtcatccccaaagtggattttctggtgctcaatcagggcagaactatgaaggaaggtttccttacacaccctgcactcgtagaatttgtctttgccatatattttctgaagctcactaaaggtggggctaggcatgaaggcttcctcacattcctgattcttacattccacaagataacctctagcatgaatcttccgatgttcagccaaggcggcactcttattgaaggtctctccacagtccttacattcaaaacgtttccctccaacctgacttttctgaacttcactgacagccacactgtggataaaggactcaccatactcatagaggttctctctagtatgcatgatctggtgctcaacaaattctgagatgacactgaacgacctcccacactcatcacatacatatggcattgccccaaaatcaattggctgtgactcggtaaaggagggggagctgaggctgctcaggctgctcacgctcatggcttttctcatctcactaccacattcaaagggcttcttcctgggacagcctttttgatc

SEQ ID NO: 2239 - DNA, 520 bp, Homo sapiens
  MAP TO CHR12.1; EXPRESSED IN LUNG, SIGNAL = 0.99; EXPRESSED IN BRAIN, SIGNAL = 1.3; EXPRESSED IN ADULT LIVER, SIGNAL = 1.7; EXPRESSED IN BONE MARROW, SIGNAL = 1.5; EXPRESSED IN FETAL LIVER, SIGNAL = 1.4; EXPRESSED IN PLACENTA, SIGNAL =   2; EXPRESSED IN HELA, SIGNAL = 1.6; EXPRESSED IN HEART, SIGNAL = 1.3; SWISSPROT HIT: P20908, EVALUE 1.20e+00; NT HIT: gi14761659, EVALUE 0.00e+00; EST_HUMAN HIT: BG950003.1, EVALUE 1.00e-111
ctcagcctcatctgagacccccactaccttccctatgggactcaacggggagggaacggacagtggtagggcaggaggagagcactgggaaggaggggagttttggggaaccagggaatgctgaaggagtggcgaacactgaggaggaaggggctccatcaggatgggagaagccggccccactggggagcctggagatgggggaaggatcataggggggacaggctcagggtcagtgcagttagcttctggtggagggctgatgggtgtctccaggatgggggcagccaacggtgactcagggtcactgtcccctttggcaccaaaggggtactctaactcccccaaaggagacagggccggtggggccgcagctgtgatgatgggtgagagtggaggaggaaggggatctggaaggaaagagaaaaaagaagggctcttagattagatgtgccatgaagagttacagctgttccagaataacagagtactaacatccccttacctggtggcatcagct

SEQ ID NO: 2240 - DNA, 535 bp, Homo sapiens
  MAP TO CHR11.1; EXPRESSED IN BRAIN, SIGNAL = 1.1; EXPRESSED IN HEART, SIGNAL = 0.69; EXPRESSED IN BONE MARROW, SIGNAL = 1.2; EXPRESSED IN FETAL LIVER, SIGNAL = 1.1; EXPRESSED IN HELA, SIGNAL = 1.4; EXPRESSED IN LUNG, SIGNAL = 0.83; SWISSPROT HIT: P52276, EVALUE 3.00e-12; NT HIT: gi14767127, EVALUE 0.00e+00; EST_HUMAN HIT: BI823322.1, EVALUE 0.00e+00
attgtctgtctgtggaggggaaagactggtctatcacagtgaggtaaacaataacaaatgattgcaaaatacgtttgaaacattaaattctaatcataacatctggtcttatactatatatagatgatgattttctatttttgaaaaacaggtatctggaccttcgtcgatttggatctgtgccacatggaggttttgggatgggatttgaacgctacctgcagtgcatcttgggtgttgacaatatcaaagatgttatccctttcccaaggtttcctcattcatgccttttatagctggaagattggttaaggaaaagcaccccccatggcagagacactgcacatgattgtgcatacagcagaatgcatgtttggattttagaaatgcagatttcaatatgtaattgttgtgccataagatatcatagaaaaaatataagtggttgtgattttcttagaaagttgagggtatttcacgtaaggatgagctcccgcaagaagaggtacttatagcaaggggactctcaaatcca

SEQ ID NO: 2241 - DNA, 569 bp, Homo sapiens
  MAP TO CHR5.1; EXPRESSED IN LUNG, SIGNAL = 2.1; EXPRESSED IN HELA, SIGNAL = 1.5; EXPRESSED IN BRAIN, SIGNAL = 2.7; EXPRESSED IN HEART, SIGNAL = 1.6; EXPRESSED IN ADULT LIVER, SIGNAL = 1.4; EXPRESSED IN BONE MARROW, SIGNAL = 3.3; EXPRESSED IN PLACENTA, SIGNAL = 2.3; EXPRESSED IN FETAL LIVER, SIGNAL = 2.2; SWISSPROT HIT: Q9Y5E4, EVALUE 1.00e-53; NT HIT: gi14861873, EVALUE 0.00e+00; EST_HUMAN HIT: AU131635.1, EVALUE 0.00e+00
tatacagggttctgtcgccccgcacatcacctcccggtctagtttttcatatagaagcaaattgccggtctttatatcaagctgcaagagctctttgtttcctttgtaatgcattcgcgcgccccgagtggccagttcccccaccccaagacccaggtcttttgccaggttggccacagaatagccactttctgtttcttctggtatggaatacctaactgcctcagagccagcctcccacaaaagcaacaatatagcaagaaacataacttgccttttctgtggcgtttttgctagcgcagtctccattgttcagacccggtccagaaggcgcagtttaactccgtacacaatccacccagatgatttgcataaataaccgcgaatccgatctttcttgactgatttccacaagaacgaagcccaccctgaagatctagccactagatcttacctaaaatgcgtccttcttttagagtttggattccccagcttaatggcgtctgagttatccgcagagcccactatccacactcttagcctgcagcgccaccaggcgtcctaattta

SEQ ID NO: 2242 - DNA, 559 bp, Homo sapiens
  MAP TO CHR17.1; EXPRESSED IN HEART, SIGNAL = 0.69; EXPRESSED IN ADULT LIVER, SIGNAL = 1.1; EXPRESSED IN FETAL LIVER, SIGNAL = 0.99; EXPRESSED IN LUNG, SIGNAL = 0.62; EXPRESSED IN HELA, SIGNAL = 1.2; EXPRESSED IN BRAIN, SIGNAL = 0.86; EST_HUMAN HIT: BI520366.1, EVALUE 0.00e+00; SWISSPROT HIT: P45018, EVALUE 1.10e-02; NT HIT: AP002995.2, EVALUE 1.30e-01
ctccgttagcctgtggtctcccccgtcagcctgcagcctccccagcccattgctctgagctggagggacagggtgtgcttctacctggggctgtctcctctcaggttgtgtaccagccgcaggaggcggagccgaccacgtccaagtcagagaagctggacccgcggcctttcctgagggtgctggagtccattgaccacaagtacccgcctgaggagcggggtgacctcctcgtcttcctcagcggcatggcggagatcagcgccgtgctggaggctgcccagacctatgccagccacacccagcgctgggtggtactgccactgcacagcgccctgtctgtggccgaccaggacaaggtatcacaggaagcccgagtggggcaggcggggggtctgcatgagtcaggggtggctgcgcacaggacttgtgtaactccacaaacacagggctcgggggctgtacttgtgcaaagtcgtagccacctagtggcagagccaggctgcgaacccaggtagtctggccccggagcccatgctctaaaccagaggtcggcaaa

SEQ ID NO: 2243 - DNA, 559 bp, Homo sapiens
  MAP TO CHR14.1; EXPRESSED IN HEART, SIGNAL = 0.77; EXPRESSED IN HELA, SIGNAL = 0.83; EXPRESSED IN FETAL LIVER, SIGNAL = 0.58; EXPRESSED IN BRAIN, SIGNAL = 0.92; EXPRESSED IN LUNG, SIGNAL = 0.73; EST_HUMAN HIT: AI970398.1, EVALUE 0.00e+00; SWISSPROT HIT: P43651, EVALUE 3.60e-01; NT HIT: gi14747105, EVALUE 0.00e+00
tcccttttgcagggtacatctgcccaagcccccatggccctggataattctctctctccttctttgcagctgcccatgatggggggagctttcatggactcgcccaacgaggacttcagcaccgagtactccctgtttaactcctctgccaatgtccacgcggctgccaatggccagggccagccggaagatcctcctcggtcctccaacgacgccgtcttgctatggattgccatcatagctacgctggggaacatcgtggtggtgggcgtggtgtatgccttcaccttctgaggacggcacaccctgcaccaccatggggtgaggcttggcacgtagctctgacttgctgtcggcctttggcttctcctgtgttctagaaccaggagttttgaccaggggcggcggccgtccttctggaatttctccccagcagccctgatttcaaatatcccatgttgtggtcaagctgagtcagaagacatggaagtatgggcctcctgcccctagaggcatgacggggcaaggccttcagagggcagattggggatccttgaaa

SEQ ID NO: 2244 - DNA, 571 bp, Homo sapiens
  MAP TO CHR7.1; EXPRESSED IN HELA, SIGNAL = 0.86; EXPRESSED IN BRAIN, SIGNAL = 0.99; EXPRESSED IN BONE MARROW, SIGNAL = 1.1; EXPRESSED IN HEART, SIGNAL = 0.54; EXPRESSED IN FETAL LIVER, SIGNAL = 0.82; NT HIT: gi16161755, EVALUE 3.50e-02; EST_HUMAN HIT: BG618154.1, EVALUE 3.00e-03; SWISSPROT HIT: Q9U6A1, EVALUE 7.10e+00
tagaacatccccattgctccagggaaagaggaaagaagaacagaagcagcaggaggaggagagagagggagggtggaaggaagtacttctgtctttgcaagtggtttaggtgttctgggtggtgccagctgagatgcagctgcttttgtctttggacatcctcccacctgggcacctgggcacctgggcgccattctccatctgatgctaatcatctccaccaaactgtgggttgtttgttggtggtgattatggagtttgttttttacccttatatttcccattaattttgtcctggcttaggtttgttttccttctggtaatacaagtcttgaataaattcatttgttgcttatgggcaaaagcaaatctaacacagccaaagacatcttcagaccttaagaatgttggttcacctgtaaaatttgcatctactccaagaacacttaacagagccctcccttttggctgtcaacatgccccttccacttctcctggggctaagaggccacctcagaacaggtcccacagcttctccagaaagagctatgcccaaagcagatggaacaat

SEQ ID NO: 2245 - DNA, 537 bp, Homo sapiens
  MAP TO CHR4.1; EXPRESSED IN ADULT LIVER, SIGNAL = 2.7; EXPRESSED IN BONE MARROW, SIGNAL = 2.2; EXPRESSED IN PLACENTA, SIGNAL =   2; EXPRESSED IN FETAL LIVER, SIGNAL = 2.7; EXPRESSED IN LUNG, SIGNAL = 3.1; EXPRESSED IN HELA, SIGNAL = 1.7; EXPRESSED IN BRAIN, SIGNAL = 2.2; EXPRESSED IN HEART, SIGNAL =   3; SWISSPROT HIT: P40394, EVALUE 1.00e-50; NT HIT: U16289.1, EVALUE 0.00e+00; EST_HUMAN HIT: BF672864.1, EVALUE 1.00e-91
atttggcattgtgttgcttggcagcctgaatatgcaatacattcttttaaatgttttttttttttccaaaactcttcaagattccaagcaaatcatttaagaaaaggaaagaagaacaaataaactagcctaccctgtttcttaccttgccagttttaacagcagcgccatatccagtggaaaacccacagccaattaaacagactttctcaggaggagctgcatcatcaatcttagcaacagaagattcatccaccactgtgtactcggtaaatgtactggtgttcatgaagtggtggactggtttgcccttgcatgtaaatctggtggtgccatcagccagtactccacgaccagtaatactgtttgatacatcaaatacacgtattaattaattcaattcaaaaattagcataggaaaaatgtaaatacattaaagtaaaaatgactgaaacctactcgctcctaatgcaaaggttgccatctgggttgcgacaagcattgcattctctacattgtggcagaaagagagggatg

SEQ ID NO: 2246 - DNA, 579 bp, Homo sapiens
  MAP TO CHR11.1; EXPRESSED IN FETAL LIVER, SIGNAL = 0.88; EXPRESSED IN HELA, SIGNAL = 0.86; EXPRESSED IN BRAIN, SIGNAL = 0.96; EXPRESSED IN LUNG, SIGNAL = 0.57; EXPRESSED IN HEART, SIGNAL = 0.93; EXPRESSED IN ADULT LIVER, SIGNAL = 1.2; SWISSPROT HIT: P47619, EVALUE 3.20e+00; NT HIT: AB040926.1, EVALUE 3.00e-12; EST_HUMAN HIT: BF957112.1, EVALUE 4.00e-92
tgtgattcatacggaggtgaagtaatataatgtctggggttggcaaacatggcaaaacctagataatagttaaatatgaatgatggataaataaagacttatttccctagtctctctactttagaatatgtatgaaaatttcaattataaaaattttaagtacattagattaatataaactacctaattctttttctctcacaattttccttcattctttcctaccagaatcagagtctaagtgatttcactcaaaaatcagcattcaacttgtatgaacataaagttttctagggaaaaaaattttctcattttattaaattactctcttttaccctatttttcttttatctttgagaggaaggaaccacttactggttgatcaatgttttcttctttaatcacagatgatgtacagacaccagcataatttgctgatgtaatttccttatccaaggcagtgctatgaaaggccacaagtgcttttatatttttcatgtaatgccacttttgattggcagctccattgttgtacggcttatatttctgaaaaaagaggcaaaatatggagtcaagtga

SEQ ID NO: 2247 - DNA, 565 bp, Homo sapiens
  MAP TO CHR17.1; EXPRESSED IN ADULT LIVER, SIGNAL = 2.1; EXPRESSED IN LUNG, SIGNAL = 2.5; EXPRESSED IN HEART, SIGNAL = 1.4; EXPRESSED IN PLACENTA, SIGNAL = 4.1; EXPRESSED IN FETAL LIVER, SIGNAL = 3.5; EXPRESSED IN BRAIN, SIGNAL = 3.3; EXPRESSED IN HELA, SIGNAL = 4.7; EXPRESSED IN BONE MARROW, SIGNAL = 3.6; SWISSPROT HIT: P52631, EVALUE 4.00e-20; NT HIT: gi16164507, EVALUE 4.00e-82; EST_HUMAN HIT: AA180402.1, EVALUE 6.00e-82
tgcccaagtaaatgaggtccaaatcaaccttcaagacatccaccaccatacaggcggtttcaatgtgtcaaagacagttgcccacatgcccttctaagataaaaaaggctttacaagaccaaagggtgcccctttatctcctgatctcattttccccatcacctgtacccatacattttttaatggaacagcaaggcatgacattaagagttcatgtctcttgactcaaactgaaacctaacaatttggagagtcacttaagaaggacttaccaatcttgactctcaatccaaggggccagaaactgccgcagctccattgggaagctgtcactgtagagctgatggagctgctccaggtaccgtgtgtcaagctgctgtagctgattccattgggccatcctgctaaaatcaggggtcccaactgtaaaccaaagtgtgcatatgttcaccacaagtcccagtaggggtaaacaatctagaagtagccattgcccaacacaggtgtcaggtctgtgactagggataaagatgctctggggaggaccctgcttctttctcccagt

SEQ ID NO: 2248 - DNA, 517 bp, Homo sapiens
  MAP TO CHR5.1; EXPRESSED IN BONE MARROW, SIGNAL = 1.4; EXPRESSED IN ADULT LIVER, SIGNAL = 2.1; EXPRESSED IN HEART, SIGNAL = 0.98; EXPRESSED IN FETAL LIVER, SIGNAL = 1.1; EXPRESSED IN LUNG, SIGNAL = 0.85; EXPRESSED IN PLACENTA, SIGNAL = 1.5; EXPRESSED IN BRAIN, SIGNAL = 1.7; EXPRESSED IN HELA, SIGNAL = 1.2; EST_HUMAN HIT: BF946745.1, EVALUE 2.00e-13; SWISSPROT HIT: P16960, EVALUE 3.00e-40; NT HIT: U48475.1, EVALUE 0.00e+00
gtgagagggtcaagaatgccaacgctgtcacagtggtggctatggccctctccggacctgggcccctggtgaccccgcacactctgcccgtgcacaggaacatcatgaacaacaaagtcttctaccaacacccgaacctgatgagggcgctgggcatgcacgagacggtcatggaggtcatggtcaacgtcctcgggggcggcgagtccaaggtgagggcccaggcaggtgctggggagctcaggggaggcagccacagagggcaggccctgaccaccctgcctgtcccaggagatccgcttccccaagatggtgacaagctgctgccgcttcctctgctatttctgccgaatcagccggcagaaccagcgctccatgtttgaccacctgagctacctgctggagaacagtggcatcggcctgggtgagaacccccgagcccaggggctgtcccccagaacccactcctggcaccccgtccaggcctgccccactttccaccagctcactcattcaa

SEQ ID NO: 2249 - DNA, 563 bp, Homo sapiens
  MAP TO CHR12.1; EXPRESSED IN BONE MARROW, SIGNAL = 0.95; EXPRESSED IN PLACENTA, SIGNAL = 1.2; EXPRESSED IN FETAL LIVER, SIGNAL =   1; EXPRESSED IN LUNG, SIGNAL = 0.96; EXPRESSED IN HELA, SIGNAL = 1.3; EXPRESSED IN BRAIN, SIGNAL = 0.79; EXPRESSED IN HEART, SIGNAL = 0.97; EST_HUMAN HIT: AL046060.1, EVALUE 0.00e+00; SWISSPROT HIT: Q99853, EVALUE 9.40e-02; NT HIT: gi6912453, EVALUE 0.00e+00
ccagtgccaacagtgtgtatgcttgagccaagatctcatccaagaggcttggaaccaaggaggggggtgttttatgattcagggaagcttggagagcttgggtgaggcgctcagcggcttcaggacagcccttcagcacgacctgcagcagatccagaccctgggcttggtggcccatggccagcctcacccctgccgtgaccaatacccagcgcagacagactgctgtgaggacagggctggcgcagagcgagcagtcacaggtgggtgaatgggacaggaagttgggtatgggctggggcttggttttcaagactggggaggagtttgtagaaggtgctatggggccaggctccttggcacagtggccaccagctctagagcagggcctcttaggaagagctcctcctctgggagctgtggaggacaggggacctgggcctgctgcttccccttctgcaggtggaccttcttcacagagtccaggtgctgagtcaccccaccaaactctggggagaaggcagaacaagaattacaaaacggggagaaatggcatcaagcac

SEQ ID NO: 2250 - DNA, 571 bp, Homo sapiens
  MAP TO CHR10.1; EXPRESSED IN HEART, SIGNAL = 1.2; EXPRESSED IN BONE MARROW, SIGNAL = 1.2; EXPRESSED IN ADULT LIVER, SIGNAL = 1.1; EXPRESSED IN PLACENTA, SIGNAL = 2.2; EXPRESSED IN FETAL LIVER, SIGNAL = 1.2; EXPRESSED IN BRAIN, SIGNAL = 1.2; NT HIT: AL163284.2, EVALUE 1.00e-130; EST_HUMAN HIT: BE463763.1, EVALUE 1.00e-100; SWISSPROT HIT: P04323, EVALUE 2.10e-01
ttggcaggcccttatagatgaatcacagcagaggcctctaggattttggagcaaggctctgccatcttctgcagataactactctccttttgagagacagctcttggtctgttactgggctttggtggaaactgaacatttgcccataggtcaccaagtcaccatgtgacctgaactgcctatcatgaactgggtgctttctgacccatctagccataaagtgggtcatgcacagcaacattttatcatcaaatggaagtggtatatatgtgatcaggttcaagcaggtcttgaaggcacaagttacatgaggaagtggctcaaatgcccatagtttccactcctgccaccctgccttctccagcctgcaccaatggcctcatggggagttccctatgatcagttgacagaggaagagaagaccaaggcctggttcagagatggctctgcatgatatgcaggcaccacccaaaagtggacagctgcagcactacagcccctttctaggacatacctgaaggacagcggtgaagggaaatcttcccagtgggcagaacttcgagcagtgcac

SEQ ID NO: 2251 - DNA, 517 bp, Homo sapiens
  MAP TO CHR7.1; EXPRESSED IN LUNG, SIGNAL = 0.76; EXPRESSED IN HELA, SIGNAL = 0.43; EXPRESSED IN BRAIN, SIGNAL = 0.81; EXPRESSED IN BONE MARROW, SIGNAL = 0.97; NT HIT: D90322.1, EVALUE 0.00e+00; SWISSPROT HIT: Q08048, EVALUE 4.00e-25; EST_HUMAN HIT: BI915528.1, EVALUE 5.00e-88
atagaatggcccacatggcattcaggtttatttaccttctgaacactgaggaatgtcacagacttcgtagcgtacctctggattgcttgtgaaacaccagggtcccccttcttcccctcgaggatttcgacagtagttttcctgtaggtctttaccccgatagctcgaaggcaaaaagctagttttaaaatgataatcattacagtataagagcatgcaacttttttttgcctattaattttactaattagtgggtatgtttttgctgaaggtagaaaaatcctttatcttatattccttcatatattttaccttaaaattctgtcattttcatctgtccttaaaacgtttgaattttattaacatccatttagctgaatttccatattcaccatcaagttagaaagatgagcctgtgaatttgctgagtcaaacattctagaactgaatcgaagttgtctgaaacataatttcaaagctccactaaaagatagcaggtgattgagcaaggccactt

SEQ ID NO: 2252 - DNA, 568 bp, Homo sapiens
  MAP TO CHR9.1; EXPRESSED IN BRAIN, SIGNAL = 0.78; EXPRESSED IN BONE MARROW, SIGNAL = 0.9; EXPRESSED IN FETAL LIVER, SIGNAL = 0.82; EXPRESSED IN HELA, SIGNAL = 0.79; NT HIT: gi11429600, EVALUE 3.00e-61; SWISSPROT HIT: P52735, EVALUE 2.00e-15; EST_HUMAN HIT: AW375131.1, EVALUE 0.00e+00
tgtcttctgaatgcacaggccttgggggttttgcagctatgtgatgagaaggctgggggcggtggtggctacaccctcggatgtggagctggtctgcctgcttccacttccatccaggcctggcttctcaccccccagccttgggacggggggtttcgtcatctctctgagcccatttcctccttgagaaaacaggaatgagcttggatgtgctggcgcacggaagccagagcttgctgctgttgctgttacggtttttacagagcttacagttttaataagtttttccttgccctccctttgttttttccctttagtttctgtgtttgaagaacatacgcaccttcctgaaagtctgccacgataaatttggattaaggaacagcgagctgtttgacccctttgacctcttcgatgtgcgagactttggaaaggtgagcagtcactttctccagcctcggtcgctcagctgtggtggccgatttgccggctcagcggcaggtgggccagatccatggagcagcctgattggctccaacacagagccagtggatttctgcaccctcat

SEQ ID NO: 2253 - DNA, 569 bp, Homo sapiens
  MAP TO CHR5.1; EXPRESSED IN HELA, SIGNAL = 2.5; EXPRESSED IN BRAIN, SIGNAL = 2.2; EXPRESSED IN HEART, SIGNAL = 1.7; EXPRESSED IN BONE MARROW, SIGNAL = 2.3; EXPRESSED IN ADULT LIVER, SIGNAL = 1.7; EXPRESSED IN PLACENTA, SIGNAL =   2; EXPRESSED IN FETAL LIVER, SIGNAL = 2.3; EXPRESSED IN LUNG, SIGNAL = 2.3; EST_HUMAN HIT: AI434423.1, EVALUE 4.00e-24; SWISSPROT HIT: P04920, EVALUE 1.00e-07; NT HIT: gi16158934, EVALUE 6.00e-87
atgtgagccagggagatgacagtggctgagacataccaaggcagtccaagcgctgatgtgagtagcatcagcacagccacacagaagaggtccaggtggaagccagctcccttctgcaggtagtggtgggggcaatgaggatgaagctagcccaggccccagccctctgtcctctgaggtaggagaggaggagcgtagactcccctggagcttctgtcccttggtcttgggccttacccagcaggccttacctgcagtctgtattccatgcggttgaggatgactgctgtgatctgttggtccatgaagatgaggatagacagcagcagggcaggcagggcagctgccacactccaccaccaggggttggctccaaaaggtgacaccagccagccacgcccagggagtgtgggctggaggagggcatttcatggacaggttggagtgggtctcccaagagcatctcacctgcacatctcaaccttggcattcttccacaacctgcccccaccccaagtcactagatgctagtgggctgtgtgtgcatagctggttcaaagcatcccagt

SEQ ID NO: 2254 - DNA, 513 bp, Homo sapiens
  MAP TO CHR4.1; EXPRESSED IN BRAIN, SIGNAL = 0.45; EXPRESSED IN HELA, SIGNAL = 0.45; EXPRESSED IN BONE MARROW, SIGNAL = 0.49; EXPRESSED IN HEART, SIGNAL = 0.79; EXPRESSED IN ADULT LIVER, SIGNAL = 0.39; EXPRESSED IN FETAL LIVER, SIGNAL = 0.6; EXPRESSED IN LUNG, SIGNAL = 0.77; SWISSPROT HIT: P49959, EVALUE 6.20e+00
cgcctactggtaccttctgggagtttagcaaagcatatattttgaactgttggccaaaataaccccatctgagtgacaatttacacacatgtcacaccttttcatctcccttgttttcttggaaaaggtcaaagccatcaagacgacatgctcagccagagtcagggagagtcatcatttcacaaccgtgaagtggaactcacacagcaaatgaggctaatcattcagcaagtacaaggaaaagagattatgagatcataattttctcaccaattgagaatcactgtgcataaaaataggaattactaggaaaaatttagaatacttaccaagaaaataagagcactaaataaaatgatctctcgtctggaaaatgactttccaggcaaaacagaaagcactcagaaatacaaacgataagatagcaagaaagtaaatcctactgaaaacaatttaattctgttgctttattctcaaaatatgatttgtcacacagaatgccctgagtgacct

SEQ ID NO: 2255 - DNA, 580 bp, Homo sapiens
  MAP TO CHR11.1; EXPRESSED IN PLACENTA, SIGNAL = 4.2; EXPRESSED IN FETAL LIVER, SIGNAL = 2.2; EXPRESSED IN BRAIN, SIGNAL = 2.2; EXPRESSED IN HEART, SIGNAL = 1.5; EXPRESSED IN BONE MARROW, SIGNAL = 2.3; EXPRESSED IN ADULT LIVER, SIGNAL = 1.4; EST_HUMAN HIT: BG392587.1, EVALUE 3.00e-80; NT HIT: gi14783737, EVALUE 2.00e-80; SWISSPROT HIT: Q13472, EVALUE 1.90e+00
ctggcaaatgttatccaccctcaggccacccgttctcaacaccctctaccctgtcagacctacccctgccaggagggatggcatgcctacatcatgtgttccctttcttaccctccaatgggaagcacccatgtgggggacccccgcagtccccagtggcctggcccagcctgctgctcacccgggcactgacaaagatgaagtccttgcgctgagtccggtccttctccttctcaaacacaacacccagcttgttctggacacgctgggacttaatgagctggcggactagggcatggaggaccggtcacatgggcctgtgcccctaggccaggggctccgcccctgcccacccctcccaggtctggccctggctcactgcggtcgtgcgtgaaggtggtccagtcctcctgggagtcccgctgtctccgcagcagcaccagccgcccaccctccacatccacgctcagcgtgaacttctgtgacttcccaatcttggtcaggtcacccagggtcacatctagcttcacctgtaggccaggtggggaggctgctgacaagaccttggagtaggcagcac

SEQ ID NO: 2256 - DNA, 518 bp, Homo sapiens
  MAP TO CHR19.1; EXPRESSED IN ADULT LIVER, SIGNAL =   3; EXPRESSED IN HEART, SIGNAL = 2.4; EXPRESSED IN FETAL LIVER, SIGNAL = 1.6; EXPRESSED IN LUNG, SIGNAL = 1.7; EXPRESSED IN PLACENTA, SIGNAL = 1.3; EXPRESSED IN HELA, SIGNAL = 1.4; EXPRESSED IN BRAIN, SIGNAL = 1.5; EXPRESSED IN BONE MARROW, SIGNAL = 1.6; EST_HUMAN HIT: BI115860.1, EVALUE 8.00e-87; NT HIT: S38320.1, EVALUE 2.00e-99; SWISSPROT HIT: P12694, EVALUE 2.00e-25
tcactaagagaaagaaagaaaaaggctagatttctgctttcttttgaaaaatcagattggccttgctgggcagagtcagtcagtctgaacatcagtcttcctcttaaaacaagcctgagctttcctgtctgcctgccagcatgctgcaggtcacccacagggctgaactgtccccctgtactgcccactcggctaaccattgcctcctcccctcctaggtgtgctgatgtatcgggactaccccctggaactattcatggcccagtgctatggcaacatcagtgacttgggcaaggggcgccagatgcctgtccactacggctgcaaggaacgccacttcgtcactatctcctctccactggccacgcagatccctcagggtgaggatgcatgccctgtaccttgcacatgtgcagaccaatgtcacacccctgtccaggcctcagctcttttgcctgccttctgggtggaattctgggttggtgacaccactagagccctggtctgtgctccagact

SEQ ID NO: 2257 - DNA, 568 bp, Homo sapiens
  MAP TO CHR6.1; EXPRESSED IN ADULT LIVER, SIGNAL = 1.6; EXPRESSED IN BONE MARROW, SIGNAL = 0.98; EXPRESSED IN FETAL LIVER, SIGNAL =   1; EXPRESSED IN HELA, SIGNAL = 1.4; EXPRESSED IN BRAIN, SIGNAL = 0.81; EXPRESSED IN LUNG, SIGNAL =   1; EXPRESSED IN HEART, SIGNAL = 1.2; SWISSPROT HIT: P18892, EVALUE 2.00e-51; EST_HUMAN HIT: BI754184.1, EVALUE 0.00e+00; NT HIT: gi16174351, EVALUE 0.00e+00
gaccaggaaccacacaatccccagggttcctgagaccccaggcataaacctgagacttcctctgcagctgatgtggtcctggatccagacaccgctcatcccgagctcttcctgtcagaggaccggagaagtgtgaggcggggcccctacaggcagagagtgcctgacaacccagagagattcgacagtcagccttgtgtcctgggatgggagagcttcgcctcagggaaacattactgggaggtggaggtggaaaacgtgatggtgtggactgtgggggtctgcagacacagtgttgagaggaaaggggaggtcctgctgattcctcagaatggcttctggaccctggagatgtttggaaaccaataccgggccctgtcctcccctgagaggattctccctttgaaggagtccctttgccgggtgggcgtcttcctggactatgaagctggagatgtctccttctacaacatgagggacagatcgcacatctacacatgtccccgttcagcctttactgtgcctgtgaggcccttcttcaggttagggtctgatgacagccccatct

SEQ ID NO: 2258 - DNA, 595 bp, Homo sapiens
  MAP TO CHR11.1; EXPRESSED IN BONE MARROW, SIGNAL = 1.5; EXPRESSED IN ADULT LIVER, SIGNAL =   1; EXPRESSED IN PLACENTA, SIGNAL = 1.5; EXPRESSED IN HELA, SIGNAL = 1.4; EXPRESSED IN FETAL LIVER, SIGNAL = 1.6; EXPRESSED IN BRAIN, SIGNAL = 1.4; EXPRESSED IN LUNG, SIGNAL = 0.63; NT HIT: gi14783788, EVALUE 8.90e+00; SWISSPROT HIT: P27816, EVALUE 8.70e-01; EST_HUMAN HIT: BI836250.1, EVALUE 0.00e+00
gagagaggggtgaccagaccctggcacctcagttggccttggtcagtctgtagtgttccacaggctcccggctttcgacagctgacaaggcgacgagcatctgggccgcatagtaggtggacatgataagcgcccgagagtagggcacaggaaaacagaatttgttgagggcgatggtcaggtctgagatgataaagaagagtgcaccactgccagctgccagctctgtccagcgccagtctgccccggccagccgcagccctgccatagctcgccagcccatgaagccgataagggccacatagacccccaccaggtaggtgaaggcacctgagaggcatgggtagaggagggcatagcacaggcccgacagcgctgccatcaccagacctgtccgaagagccagtggctgcatgccaaaggccgaggcgtagaacatgtgggtcacagcaaacatcagcagacctgggggtaagaggggcaaaggcagctgagggcaagcttgatgaagaatgagtaacagggtgggggtagggatggatgtggcgatggagtggagtgtttgggataacccagcagctttgctttgggataa

SEQ ID NO: 2259 - DNA, 594 bp, Homo sapiens
  MAP TO CHR12.1; EXPRESSED IN PLACENTA, SIGNAL =   2; EXPRESSED IN FETAL LIVER, SIGNAL = 1.7; EXPRESSED IN LUNG, SIGNAL = 2.3; EXPRESSED IN HELA, SIGNAL = 1.9; EXPRESSED IN BRAIN, SIGNAL = 2.6; EXPRESSED IN HEART, SIGNAL = 1.5; EXPRESSED IN BONE MARROW, SIGNAL = 1.6; NT HIT: X82818.1, EVALUE 0.00e+00; SWISSPROT HIT: P29350, EVALUE 1.00e-33; EST_HUMAN HIT: BI824676.1, EVALUE 1.00e-109
actctcttgtgccatccaggccctgaaccactcattcctggttccccgtggcagtgctgactccccgtctgttcccttgcccccaacccccacactccccatccctgtctgtgcccacccatgcccatgtgtgcccccacccaggacctcagccgatccctgccctcctgcctctactcctgcaccgactggcctcaccgcctggtgccctgcagggtgggggatcaggtgacccatattcggatccagaactcaggggatttctatgacctgtatggaggggagaagtttgcgactctgacagagctggtggagtactacactcagcagcagggtgtcctgcaggaccgcgacggcaccatcatccacctcaagtacccgctgaactgctccgatcccactagtgagaggtgagggctccgcacccccgccattcccaagcagggatgagccggctcccaccctgaacagccagggaggcagggagactggcagccggcgctgcctaccctccatcccctcccctccctgcaccagctggggctctcaatgtccctcctccctgctgtcctgggacctggtgtctcagagcct

SEQ ID NO: 2260 - DNA, 594 bp, Homo sapiens
  MAP TO CHR17.1; EXPRESSED IN LUNG, SIGNAL = 0.76; EXPRESSED IN HELA, SIGNAL = 0.88; EXPRESSED IN BRAIN, SIGNAL = 0.61; EXPRESSED IN HEART, SIGNAL = 0.88; EXPRESSED IN ADULT LIVER, SIGNAL = 1.3; EXPRESSED IN BONE MARROW, SIGNAL = 0.6; NT HIT: gi14773945, EVALUE 1.00e-104; SWISSPROT HIT: P46997, EVALUE 1.10e+00; EST_HUMAN HIT: BI193156.1, EVALUE 0.00e+00
tgcgtctgtttcctcatctgtgaaatgaggataacaatactgtccaccttacaacaatgttaataatcggaaaaaggacataggtaacgtgcctggcctgtagctcaccaaatattaggtggtgttgcgattaagatgccttagaacaattcagttctccgactctctagacctgaggaaccttcccagggaacccctaactttcccagaccacactgtcagatattctataggccccgcccctccagagcctccgagtcctccctagcccacccgagcccggtccccagcattacctgacccatagcgcacgtcgtgtgagtgcagtcggacgttgtggcgcgtattgagtagcttcaccacggagccgcaagtaacgacacccaggctggacgctcccacagcgctccacaaaccccccaacaacagcagaggtactacagccatcctaactgtatcgcggagccccaaatcttcgaagaaaactcggcccctccccggaaccggaagctaatggcgaaaccacggagagaaggaagtgaagaagcccgagtctgatctttatggtttatttgactagagcggcctgagaaa

SEQ ID NO: 2261 - DNA, 529 bp, Homo sapiens
  MAP TO CHR2.1; EXPRESSED IN BONE MARROW, SIGNAL = 0.55; EXPRESSED IN FETAL LIVER, SIGNAL = 0.64; EXPRESSED IN LUNG, SIGNAL = 0.84; EXPRESSED IN HELA, SIGNAL = 0.53; EXPRESSED IN BRAIN, SIGNAL = 0.41; EXPRESSED IN HEART, SIGNAL = 0.88; NT HIT: gi4557730, EVALUE 3.00e-67; SWISSPROT HIT: P22064, EVALUE 2.00e-22; EST_HUMAN HIT: AA504656.1, EVALUE 4.00e-67
gccccaaatctggttagactctttttaattgaaagatcaaacctaactcctttttgtatttctcaatttttttccccgtagatgcagatgaatgcctactttttggacaagaaatctgcaaaaatggtttctgtttgaacactcggcctgggtatgaatgctactgtaagcaagggacgtactatgatcctgtgaaactgcagtgctttggtaagctttagggggatatagtatggtgtactgtgaaaatatacagatggaaaaaataactatgctatgtagtaaaaacaatttccttgaatctaaatcatgtgttgaaaagatgtgtaaacgttttagggatctttttcttaagcacaattgaagaaaataaaaagaaaaaaccacctccatactactgtttgaatgtatttcaaacaaagagttaatattcactgtggaattatgattcaggccactggtataactgaagtgttcttttggtctgtggaacatcctgtttcatcactcataccgtgcaagtgacagc

SEQ ID NO: 2262 - DNA, 520 bp, Homo sapiens
  MAP TO CHR20.1; EXPRESSED IN BONE MARROW, SIGNAL = 0.55; EXPRESSED IN BRAIN, SIGNAL = 0.57; EXPRESSED IN HEART, SIGNAL = 0.65; EST_HUMAN HIT: T08076.1, EVALUE 4.70e-02; NT HIT: AL163209.2, EVALUE 7.70e+00; SWISSPROT HIT: P21522, EVALUE 9.50e-01
tcctcatccccttgtctttggtggggatactgagtcccagagaggaaaagggacttgataaaaacaaaacaggggatcagactcggagtgattctagactcagagtggggcagcaacttctgccttacacagcggatgggcccgaccccccaaaaagagctactcagttctgagcatagagcctgaaattccaccattggagattatttcctttggagggcaaaggatgttgaaggctctttggtcttcagggagcctcagccaatgttgcaaacccctgcgatgagtcctacacaaaactcatgtcagcctgttcccaggaggatgggctggctgacaggcagccaagggtgagatgccgtgggaaggagatcctgactgagggctggaggaatgtgggaagcaccaaagcaggcagaaaaatggggataggtgggggaggggcggtgtcagctgtagagagggtggggctgctgtgagagcctcgggtgggggactcaggaagcttgacttcactgcc

SEQ ID NO: 2263 - DNA, 529 bp, Homo sapiens
  MAP TO CHR17.1; EXPRESSED IN LUNG, SIGNAL = 0.79; EXPRESSED IN BRAIN, SIGNAL = 0.82; EXPRESSED IN PLACENTA, SIGNAL = 1.3; EXPRESSED IN FETAL LIVER, SIGNAL = 0.76; EXPRESSED IN HELA, SIGNAL = 1.9; EXPRESSED IN HEART, SIGNAL = 0.61; EXPRESSED IN BONE MARROW, SIGNAL = 0.85; EXPRESSED IN ADULT LIVER, SIGNAL = 0.98; EST_HUMAN HIT: AW499619.1, EVALUE 2.00e-97; NT HIT: D21205.1, EVALUE 0.00e+00; SWISSPROT HIT: Q14258, EVALUE 1.00e-103
gcctacagcctgcctacttgggggagcagatggagagtgtggcaccagcagaaaatacccagaaagccgggtacaaagcctcagtaaagtccaccctgaacttatacatcaggtggaccttgtcggcaacagcgaagaagatgacaaagccgtggtcacagttgagaagcacgcccacccgcgtggccttggtggagggcagggttttctccacgttattgtgccaggcagagatcttggtgttgaaccactccacgcaccaggaggcgctgttgcggccgagcctgctttctgggccctgccggttcatgcttccgtagcagatgcctaccccacagaagttgttcttctgcagctccacctcccagtagtggatccccttcttgtagcagtgcaggcccagcacctgagagcagtatgtgaacctctggggatgcggccggtagttctgaggcatctcagccacagaagctactgtatagcactctgacagagccactttgttgtgggcggtgttgtagtccaggat

SEQ ID NO: 2264 - DNA, 513 bp, Homo sapiens
  MAP TO CHR17.1; EXPRESSED IN FETAL LIVER, SIGNAL = 0.84; EXPRESSED IN LUNG, SIGNAL = 0.81; EXPRESSED IN BRAIN, SIGNAL = 0.64; EXPRESSED IN HEART, SIGNAL = 0.71; EXPRESSED IN BONE MARROW, SIGNAL = 0.78; SWISSPROT HIT: P39188, EVALUE 1.00e-14; EST_HUMAN HIT: AL559704.1, EVALUE 6.00e-94; NT HIT: gi14773961, EVALUE 4.00e-94
aggcatgcaaaaccatatccagctgattttttaaaaatcttttgtagggatgggatctcgctgtgttgcccaagctggtttcaaatgcctggcctcaagcagtcctcccaccttggcctcccaaagcagtgggattacaggcatcagccattgtgactgcccagattctcagcttttgcaaatgttctaagtataagcctgtgataggagtcccctttgccctctggcagcttctcagcttaaattccaaggatccccactgggatccctcaagctttgagaggaaccttcttaccccactgtgagatgtgtcagtctgtgtgctactgtcctgggtttctgggtgagggacagccagctggctcttccagtcccgaagctggcgggagagaacctccagaatgacaagagagctcagcaggttatcttccaagtcatgtcgagacaaggcagtcagatctggaggccggctgcagcagaaagagaagaacatgacgaaaagaaaaggagggg

SEQ ID NO: 2265 - DNA, 580 bp, Homo sapiens
  MAP TO CHR4.1; EXPRESSED IN HEART, SIGNAL = 8.4; EXPRESSED IN BONE MARROW, SIGNAL =  20; EXPRESSED IN ADULT LIVER, SIGNAL =  11; EXPRESSED IN FETAL LIVER, SIGNAL =  15; EXPRESSED IN LUNG, SIGNAL = 8.3; EXPRESSED IN BRAIN, SIGNAL =  15; EXPRESSED IN PLACENTA, SIGNAL = 8.2; EXPRESSED IN HELA, SIGNAL = 7.3; NT HIT: AF003529.1, EVALUE 2.00e-09; SWISSPROT HIT: P39195, EVALUE 1.10e-02; EST_HUMAN HIT: BG776467.1, EVALUE 2.00e-13
tttcagctccaaatgataccgtataaatcccttgtaatattataaatatagtacttcaattcaagggttgagctactaaattggtaataataggtcctgaacaaaatctaatgatacaacccagtttctctgcccattttctagatttcccctttaggccttcagcagtgggaattaattttgtttttaaatggtttaactgtagaactatttttttctcttttatacatattctaattacatggaataatggatctcaaattggattcaaaagaaccctgggttccaaaggcaattccttaaaataaatcttatgtaattcattgcaagaaaatatgaacatgttttatttatattagacctcatgcccacaccaaaaaagaatttcagggccccccagaaataatgtagaatggttcataattttggttgatgatgcgtgtgatgagaagggttaggagctcagcagctgagaagtttttcttttccttttcctttttttttttttttgagacacggtctcactctgtcacccagactggggtgcgatggtatgatctcagctcactgcaatctctgc

SEQ ID NO: 2266 - DNA, 503 bp, Homo sapiens
  MAP TO CHRX.1; EXPRESSED IN HELA, SIGNAL = 0.78; EXPRESSED IN BRAIN, SIGNAL = 0.78; EXPRESSED IN HEART, SIGNAL = 0.8; EXPRESSED IN ADULT LIVER, SIGNAL = 1.2; EXPRESSED IN FETAL LIVER, SIGNAL = 0.84; NT HIT: AF141325.2, EVALUE 1.90e+00; EST_HUMAN HIT: BG109937.1, EVALUE 1.80e-01
tactcaccctccctcgaatgtggcatttgattaaatatagccttgtcactattttagttactttaagtatgtcagccctgtaaagagtctgaggggattgtttatgcctgttctaatatatcctccttgcttctaacttggttctaggcatatggttaaggcataataaatatttgctgactgctaactgatgctggtgttgcctagtagcctgggcctatacacactgtcagttctgtcaacagaggctgcgaaaattctaccagagattatgtctgcacaaaaataagcctctggcataaattgcgatagctgccactagagaattcacctgcaggaaagggacctcaggcatattacctggtgctcccagagactcttatgccaggttttccactgtcaaaatacagctaaaccatgtgctaatgtagtgatgtgagtctctccaataatttactgtaaatttatacttgcttagttttctgacatggctttagcatcct

SEQ ID NO: 2267 - DNA, 577 bp, Homo sapiens
  MAP TO AC068936.2; EXPRESSED IN PLACENTA, SIGNAL = 2.4; EXPRESSED IN FETAL LIVER, SIGNAL = 3.2; EXPRESSED IN BRAIN, SIGNAL = 2.1; EXPRESSED IN LUNG, SIGNAL = 1.7; EXPRESSED IN BONE MARROW, SIGNAL = 2.6; EXPRESSED IN HEART, SIGNAL = 2.1; EXPRESSED IN ADULT LIVER, SIGNAL = 2.5; EST_HUMAN HIT: BF770806.1, EVALUE 0.00e+00; SWISSPROT HIT: P34369, EVALUE 2.00e-33; NT HIT: AF092565.1, EVALUE 1.00e-109
agccagatagccccctaatgattcccgaagtggtaatcctaccctaaagacggatgtttacgcctccaaggaaataaagagacacccaccttccagggaatgttggctttccagcagcgccaggcttcactgaggtgctgcaggattgtccgggccttgttctgcttgatcccctcaggcatcatgtccagaatatcatgcatcacagctgcccgcagctcaaggtcaaaatgtgactccactcgctgctttgttactgtctttgccaccccctttgagtgtcgacctggaagtagagtgtcccaaggggattacaaggaagattccttgctttcaataagggtctctaccttcatgctcctcactcattatggttattaataaaattaggtattaacaaagcgtccctgtgcccagcatatgcaaaaagacgagctaccttaaacattcacaactatgcttctgaggaatttccactcctgcaaatgcatgactgcctctcaaggccccagaaggaagcccaagaaatagaatactaggtcagactcatttcagaactggacctaaaggcaatcca

SEQ ID NO: 2268 - DNA, 543 bp, Homo sapiens
  MAP TO CHR7.1; EXPRESSED IN FETAL LIVER, SIGNAL = 3.2; EXPRESSED IN HELA, SIGNAL = 3.5; EXPRESSED IN BRAIN, SIGNAL =   3; EXPRESSED IN LUNG, SIGNAL = 1.5; EXPRESSED IN HEART, SIGNAL = 1.7; EXPRESSED IN BONE MARROW, SIGNAL =   3; EXPRESSED IN ADULT LIVER, SIGNAL = 2.2; EXPRESSED IN PLACENTA, SIGNAL = 3.6; EST_HUMAN HIT: BG529043.1, EVALUE 1.90e-01; NT HIT: gi15297303, EVALUE 5.20e-01; SWISSPROT HIT: P17927, EVALUE 3.90e+00
aagattgtctgcagggttggtaggtgaggacttgaggcagattatgaacattgaaaacagttgccaagagaagtggggacaacccagaggattgccagggggtgcagaggccccaatgaggttaaaaaccatggctttaggtggcatcagtttgcaaggtttttcattattcctcttagagacactgtgggagtggggctgatccagactgggtgttgatggatgagtgtggaaggcagacagcgaggccagggagttgcgcaggtcccatgtcagccagggaacggcaaggagcagaagaggacacacacagcacgcaggcctctctgcaagacgctatcatagtttgtctttgctttatatttccaccttgaggcaaaattttccatttctgccctgtcacaaaacaaacaggatgcaccatggcttaagctagatcacttatgtaacggattccatgctctgccacgttcttgacagttacaaaacgtctgtgctgctgggacatcatgttgggacaacaggacgtgtgtgctaatgtgg

SEQ ID NO: 2269 - DNA, 519 bp, Homo sapiens
  MAP TO CHR19.1; EXPRESSED IN PLACENTA, SIGNAL = 3.2; EXPRESSED IN HELA, SIGNAL = 2.5; EXPRESSED IN FETAL LIVER, SIGNAL = 4.3; EXPRESSED IN LUNG, SIGNAL = 4.6; EXPRESSED IN BRAIN, SIGNAL = 4.1; EXPRESSED IN ADULT LIVER, SIGNAL = 6.6; EXPRESSED IN BONE MARROW, SIGNAL = 4.2; EXPRESSED IN HEART, SIGNAL =   5; EST_HUMAN HIT: BG683628.1, EVALUE 0.00e+00; NT HIT: gi14759976, EVALUE 0.00e+00; SWISSPROT HIT: Q60900, EVALUE 2.00e-51
tctctctctctctgctgcccggggagggggtgggagggcaggcggggtgggctcacgccttgtgctgtttgctggtcttgaaggagacctgcagcacgcgctcgcccaggcgatagccgttcaggctggcgatggccatggccgcctcgtcatagttggtcatggtcacgaagccgaaacccttgcacttgttggtggtgaaatcacggatgaccttgacgttggtgactgccccaaaaggcccgaacagctgccacagcacgctctcgtctgcctccggtgacaggttgtacacgaagatgcaccagccggcgcccgccgcgccccccgacaggcccacgcccgccaggccgctcataccatcgatggcgatcggcgagaacctggcgatgagcgacaggggactactttgggggtcacgcgggctctgccctgaccccccgcatgcttctgaccccgttgtgacccttcacacctttatgacccctgactgtgccatgaccttggaatggtgtgacc

SEQ ID NO: 2270 - DNA, 576 bp, Homo sapiens
  MAP TO CHR8.1; EXPRESSED IN FETAL LIVER, SIGNAL = 0.4; EXPRESSED IN BRAIN, SIGNAL = 0.38; EXPRESSED IN LUNG, SIGNAL = 0.68; EXPRESSED IN BONE MARROW, SIGNAL = 0.35; EST_HUMAN HIT: BG111070.1, EVALUE 4.00e-89; SWISSPROT HIT: Q92636, EVALUE 3.00e-26; NT HIT: gi4505464, EVALUE 3.00e-89
aggcagactggacagctaggactgtaagaatgaaaaggcaaatagctaaggatcaaacaccagcttcaaaaccacagaagagaaagagaaccacatcaaaacatatatggccaactttcactcatattcaattgccagaaaataaaagcgatttgatttcccttacagtctatagctgaaaacaaacaacatcagcaaaaacaggtatctgttttcaggagaactgcaataaggcaggagaacacaatcatctctaagtagcacaacagtatacgtcttatctcctcttcagaaacattttcatcacagaagagaaacaaaaggtgctcacgtttattctctttacaaaatttacctggggaatctgccatagaagcattataactggaggtctgggacaaacttttaaactttggggtgatccttcgaggatgtggtgtcacaaatagttgttttggtgtctgcccaaattccaagatttgcgtaagcatggctaccttctcatcaggatcctggatgctttgggacagaacacaaataatgcagtgaaccactaggttcgagttccttgaaagc

SEQ ID NO: 2271 - DNA, 551 bp, Homo sapiens
  MAP TO CHR17.1; EXPRESSED IN BRAIN, SIGNAL = 1.3; EXPRESSED IN HEART, SIGNAL = 1.3; EXPRESSED IN BONE MARROW, SIGNAL = 1.1; EXPRESSED IN FETAL LIVER, SIGNAL = 1.2; EXPRESSED IN LUNG, SIGNAL = 1.9; SWISSPROT HIT: O42933, EVALUE 6.80e+00; NT HIT: gi14773945, EVALUE 0.00e+00; EST_HUMAN HIT: AI798964.1, EVALUE 0.00e+00
aaagaactgacccacgcaagtctgggagagtgactagttcaaatgtgcagggctgaagcttccaaacacagccactattttctgttgtatatcttcatctcaatggtgacatggccactgcccaaggaacttgtggcagggatcccaaggtgaggcagcaacagatgtctgtgaacattgtgcgttaacagtggctcagagcctctagattcacagctctgcatggtgggcttctgccttcaacaactcactgggcttcatgaagatgccttccatggctttccagtagttgttctgacttggctgggccatgccatgcacctctttttgcccactgataggtcgaccatattgttctcctgtgacagacagcagtacctcagtggaagagtgtttgaaccgcacctcaccatctctcacccagtagggtccattacagagcactgtccagtcatccagataatcaccttcaccttcctcaccaaaagcactcacttcctagaaaatacagaaggtagtaacatcagcatggctgacaagggcttgaaaag

SEQ ID NO: 2272 - DNA, 563 bp, Homo sapiens
  MAP TO CHR2.1; EXPRESSED IN BRAIN, SIGNAL = 0.78; EXPRESSED IN LUNG, SIGNAL =   1; EXPRESSED IN BONE MARROW, SIGNAL = 0.92; EXPRESSED IN HELA, SIGNAL = 0.9; SWISSPROT HIT: Q9Z175, EVALUE 1.00e-58; NT HIT: gi15297995, EVALUE 0.00e+00; EST_HUMAN HIT: BG820692.1, EVALUE 1.00e-58
aaggctgtgcaatggataccatgtggttcacttcagtccccaactcaccctcctgacactcagtgtcttcgagacagaaactagctttgtggccctcagccaccttggtgccatttggggtgaggatatcatagtgagtgaagatgtccatgctgtggtaatgcctgtggggagaagggaacttctgtttccttctctgcccccagaaggtttgccccatcccccgtggtcttgcccttctacttgactccctaccctctcacccatggcactcgtgccacacccaggagtggcgcccagccttgggcctgaagtcagctcgtcccaggttgtggatctgggaggagaatcggagcagacgccggtgaccatagggccagttggctgagcgggctgagctggccaggcagttctcttccgcagcacagtacaacatatgcaggggccggtcttcgatgtaggcggtctcctgcaccagtgctgagtgcagcaacagatctgatgcagctgcaccaagaaaggaagggggtgttagaagtcactgctgacttcacagagagggg

SEQ ID NO: 2273 - DNA, 506 bp, Homo sapiens
  MAP TO CHR19.1; EXPRESSED IN HELA, SIGNAL = 1.1; EXPRESSED IN BRAIN, SIGNAL = 1.2; EXPRESSED IN HEART, SIGNAL =   1; EXPRESSED IN BONE MARROW, SIGNAL = 1.2; EXPRESSED IN LUNG, SIGNAL = 0.85; SWISSPROT HIT: Q9NVW2, EVALUE 1.00e-10; NT HIT: gi6755665, EVALUE 6.00e-13; EST_HUMAN HIT: AI807507.1, EVALUE 0.00e+00
cgtctacgaggacttgaggggccagatcgccatcccctcagtgttcgtgagcgaggccgcctcgcaggacctgcgggtcatcctgggctgcaacaagtcggcccacgcgctgctcctgcccgacgacccaccgtgccacgacctgggctgtcaccccgtgctgaccgtgtcctgggtgctgggctgtaccctggccctggtcgtatcagccttctttgtcctgaaccacctgtggctctgggcccaggcctgctgcagccacagacggccggtgaagacgtctacctgccagaaggcccaggtccgcaccttcacgtggcacaacgacctgtgtgccatctgcctggatgagtatgaggagggcgaccaactcaagatcctgccctgctcccacacctaccactgcaaatgcattgacccctggttctcccaagccccccggcgctcctgccccgtgtgcaaacagtcggtggccgccacagaagacagctttgactccaccacct

SEQ ID NO: 2274 - DNA, 504 bp, Homo sapiens
  MAP TO CHRX.1; EXPRESSED IN FETAL LIVER, SIGNAL = 2.2; EXPRESSED IN LUNG, SIGNAL = 1.3; EXPRESSED IN HELA, SIGNAL = 1.8; EXPRESSED IN BRAIN, SIGNAL = 2.3; EXPRESSED IN ADULT LIVER, SIGNAL = 1.6; EXPRESSED IN BONE MARROW, SIGNAL =   2; EXPRESSED IN HEART, SIGNAL = 1.2; EXPRESSED IN PLACENTA, SIGNAL = 1.4; SWISSPROT HIT: P51854, EVALUE 6.00e-17; NT HIT: X91817.1, EVALUE 1.00e-63; EST_HUMAN HIT: AA806792.1, EVALUE 0.00e+00
cttcagctacctcctgtgccctgagtgctctttttatttttatccctgcatgttattctgagtctctttcttgtaccaagctggtttttgctgttctgcagatatttttatccgtgtcatcgacctgtttaccattaaacctctggatgtcgccaccatcgtctccagtgcaaaagccacagagggccggatcattacagtggaggatcactacccgcaaggtgtgtgtgggcattgagaatgctttggaaggttttggtgtttttgtttccttgattggccacatggcatgctctcaggcatcacctatagtctacctctcacccagcatggctttgttatttgatgttcactaagcgtggggccatactcatacacatctgtgtgtccccaacagagtgcacagtgcccagtcaccagggcgggtcagtggcaacacagaggagtggctattgcaggcaagcgaggtgtcatgaaaagcatcgcagtttctttgggtttgga

SEQ ID NO: 2275 - DNA, 527 bp, Homo sapiens
  MAP TO CHR3.1; EXPRESSED IN ADULT LIVER, SIGNAL = 3.7; EXPRESSED IN BONE MARROW, SIGNAL = 4.6; EXPRESSED IN FETAL LIVER, SIGNAL = 3.8; EXPRESSED IN HELA, SIGNAL = 5.1; EXPRESSED IN BRAIN, SIGNAL = 4.6; EXPRESSED IN LUNG, SIGNAL = 1.7; EXPRESSED IN HEART, SIGNAL =   2; EST_HUMAN HIT: BI769966.1, EVALUE 1.00e-73; SWISSPROT HIT: Q9FUM1, EVALUE 7.40e-01; NT HIT: gi14763088, EVALUE 1.00e-78
ttgaccaacaacagaggctggtgctcctgtatcgctcttgcagcccctccttcctgataccctgacacttggtcctgccattaggtttgtggctgtcgaattacctttctggtttttatactgcctgggtgctgtccagccatagagtccgtctccaggctcctcgtccttcagaacagtgtcatacttggatagagtttctgtggcatagatatcatcatcttcctcttccagggcacctacaccaaaagcctttaaaaaaacaaggtttcaaactgagcacaggtgttagggtatgtctgggatcttcagggataaagctactttaaggatgtgattggaaaccatgttagcacttcaagatcaccaagagagaagtgaacgggggtcccagatcgaccaacacacacacaagttttctggaaaacagtgaccagaggtgaatgccatgtccctactgccaacactgccctccagtccccacaacagccatggctccaggtcccagcacaggaagaggagtggag

SEQ ID NO: 2276 - DNA, 515 bp, Homo sapiens
  MAP TO CHR7.1; EXPRESSED IN BONE MARROW, SIGNAL = 0.58; EXPRESSED IN FETAL LIVER, SIGNAL = 0.73; EXPRESSED IN LUNG, SIGNAL = 0.59; EXPRESSED IN HELA, SIGNAL = 0.84; EXPRESSED IN BRAIN, SIGNAL = 0.55; EXPRESSED IN HEART, SIGNAL = 0.63; EST_HUMAN HIT: BE784306.1, EVALUE 1.00e-112; NT HIT: AF114820.1, EVALUE 0.00e+00; SWISSPROT HIT: Q99835, EVALUE 7.00e-39
cagagagcctggaccttgtctcacagagcactcaccgtgcagccttcagggaagcggtcaggagtgcagcgcaggaagtcaggccagccccgctccctctccacgatggcacaggggcctcgggtggcctggcagagggtacggctgggcagctccacccggtcattctcacacttgggcatgtatacggcacacagcaggggctggatcactgcccagcagcggggggcattccggaggcctgggggtggcaacagcattgcagtgaaggcccctcctcactctgacccacagacgcagcttcacccctgtcctccaggcctttgccacactgcagcccatcactggtcagacctggcaggtacagtgtttctcaacagtgcatctgggcaggacagttctttataccataggactgtcccatgcattgcagacactagactctgccaactcaatgccagtagaacccagaagtgattgtgacaaacaaaaatgccccagccctctactctagg

SEQ ID NO: 2277 - DNA, 584 bp, Homo sapiens
  MAP TO CHR12.1; EXPRESSED IN FETAL LIVER, SIGNAL = 1.4; EXPRESSED IN BRAIN, SIGNAL = 1.6; EXPRESSED IN LUNG, SIGNAL = 0.72; EXPRESSED IN HEART, SIGNAL = 0.75; EXPRESSED IN ADULT LIVER, SIGNAL = 1.4; EXPRESSED IN BONE MARROW, SIGNAL = 1.6; EXPRESSED IN PLACENTA, SIGNAL = 1.7; EST_HUMAN HIT: BG980348.1, EVALUE 0.00e+00; NT HIT: gi14784165, EVALUE 4.00e-82; SWISSPROT HIT: P56399, EVALUE 3.00e-24
tccctgactctcccatgaacctttcaggccccattctgttccctggctgcccagacctccctaccctgcctctttcccatagaggaattgccggagctctgaaaatcctaatgaagtgttccgcttcttggtggaggaaaagatcaagtgcctggccacagagaaggtgaagtacacccagcgagttgactacatcatgcagctgcctgtgcccatggatgcagcccttaacaaaggtaggctgctccatcagcaaggccgtggcacggtgggaggctaaggtctaggaggaatgcttgggcacctcatgggagcacagcccagggaatgccctgcttcaccagccaaggttccagtctgggccaccaggagtaggtagattaacctcgtccagtggacactcagcttgttagcagagctgcatggaaacaggcgagatatattggacatgtgtcaggggtgctttggaagggtagaggaactgaaatacggacacagagccagtagggagaggctaaggaggcaaagaagcagcaccctccgaaggatccaccaacccattctgtcaccagaggagcttctgg

SEQ ID NO: 2278 - DNA, 560 bp, Homo sapiens
  MAP TO CHR5.1; EXPRESSED IN HELA, SIGNAL = 1.5; EXPRESSED IN BRAIN, SIGNAL = 1.7; EXPRESSED IN HEART, SIGNAL = 1.7; EXPRESSED IN BONE MARROW, SIGNAL = 1.5; EXPRESSED IN PLACENTA, SIGNAL = 1.5; EXPRESSED IN LUNG, SIGNAL = 1.9; EST_HUMAN HIT: AA828166.1, EVALUE 2.00e-01; SWISSPROT HIT: P11716, EVALUE 1.00e-29; NT HIT: U48468.1, EVALUE 0.00e+00
ctttccctcctttcagacccccacccccatcctgactccccactgcgccagctgctaggaatcccagctccgaagagctcagtgtccggggcgaggggtttcagctctcaggtctgcaggcggtgggtgtttggggatgggactctgaggttgtgtgtttccgggagcttggggaagggggtgtccagggtccagagctactcacatgaggagtgcagtgaccgcttctgtctcctgcagcctcaagtgtagcaactgctacatggtgtggggcggagactttgtgagtcccgggcagcagggccggatcagccacacggaccttgtcattgggtgcctggtggacttggccactggcttaatgacctttacagccaatggcaaagagagcaacacctttttccaggtgagtccaggccacagcaatttagcgagagcatcatgtcccagcatcccaggacagctcttatagatgtcccctgaggccagacctcagagatggaacaaaaacagctcctaggctgtcctcaagaggtcgctgggagaccaccttgttgaaa

SEQ ID NO: 2279 - DNA, 530 bp, Homo sapiens
  MAP TO CHR19.1; EXPRESSED IN PLACENTA, SIGNAL = 1.5; EXPRESSED IN FETAL LIVER, SIGNAL = 0.69; EXPRESSED IN HELA, SIGNAL = 0.71; EXPRESSED IN BRAIN, SIGNAL = 0.95; EXPRESSED IN LUNG, SIGNAL = 0.73; EXPRESSED IN BONE MARROW, SIGNAL = 0.83; EXPRESSED IN ADULT LIVER, SIGNAL = 0.9; SWISSPROT HIT: Q61982, EVALUE 5.00e-23; NT HIT: AF058887.1, EVALUE 0.00e+00; EST_HUMAN HIT: BG004643.1, EVALUE 1.00e-115
aaatgacagcacagtgccaggcacacagttcaagcttaatgactgtgttccccagagcagcacccccaagagctcccctgcactcactggggtcacagtcattgatgtcctgatcgcaggaagggccagtgtaccctccatggcaggtgcagctgaaactccctgccaggttggtgcagataccatgagggccacagggtgcggggccagcacactcgtccacatcctgctggcatcgtgggcctgggggtagggagcaaggttacacctagggttacagggtacagagcagggtctcagggacctggggctcaggaagaacctgcaggccgagatgggtgaaggcaaaataagccgtgctgtcattcgtgtctgggcattttgcatatgcagtttcagaatggccgtctccctgtctcagtaggtggcaaatacctactatgaggtctgctcctccaggaagctgtaccctaaaccccgccctaagtcccagcatctctagccccataactcttcctcttccaagggct

SEQ ID NO: 2280 - DNA, 578 bp, Homo sapiens
  MAP TO CHR1.1; EXPRESSED IN HEART, SIGNAL = 0.77; EXPRESSED IN BONE MARROW, SIGNAL = 0.51; EXPRESSED IN ADULT LIVER, SIGNAL = 0.53; EXPRESSED IN FETAL LIVER, SIGNAL = 0.52; EXPRESSED IN LUNG, SIGNAL = 0.61; EXPRESSED IN BRAIN, SIGNAL = 0.39; NT HIT: AL163285.2, EVALUE 2.20e+00
ccctctggctgttagtttgcactcaagtgctatgctgagagtgaccagaggccaaagccaaagcaaagcctccttaatctgtgcatctactaatatatttcccatctggcaagaagattgtcctcttctgttttcagttactcctcgttaaaatttcaaacagcatttttatttctgtggttccagattctaatcagacttctgccaatctctaaaaggctgtgcatctcctgttgctggcatgttttcttgactttatctgaattacatgagttatggccatgctgacatttctcctctaatctgactctaatcataataaatacaattttcagatggtgttgtttcccctaccctctttattccaatatgacactcttaactatgaaagaaggggagctactgaagactcttaggtccctgcagaaacatatttcatcagagtctttaagacctggtaattttcattttgtgcaaacagaatttcacttccagctatgtcagaataattattaatagtaccagactatttctccactataaatagctataaaaaatgggcaaaacacatgaaacaa

SEQ ID NO: 2281 - DNA, 531 bp, Homo sapiens
  MAP TO CHR7.1; EXPRESSED IN HELA, SIGNAL = 0.93; EXPRESSED IN BRAIN, SIGNAL = 0.86; EXPRESSED IN LUNG, SIGNAL = 0.99; EXPRESSED IN BONE MARROW, SIGNAL = 0.96; EXPRESSED IN HEART, SIGNAL = 0.91; EXPRESSED IN ADULT LIVER, SIGNAL = 0.51; SWISSPROT HIT: P51805, EVALUE 2.90e+00; NT HIT: AJ277291.1, EVALUE 3.00e-79; EST_HUMAN HIT: BG566274.1, EVALUE 5.00e-79
ggctttagggaaatcaactgctctattttcaatactgaattctaaattacttaggtattaacacaagtgtgtcctgcttttttatttcagtacctactagaaatgaaaagcttaatcctacccccagaacatatcctgaagagaggagacagtgaagcaatagcatatgcattctttcatcttgcacactggaagagagtggaaggggctttgaatcttttgcattgtacgtgggaaggcagtaagtaattttctttttttgaaacatttttaagagcatgaaaaggtgctaaaatgtttttgcactgtttatgatgaataatgaagatttacatatgtactgctcttgtgttctgtgatggcccatctaagccagttagtgacttaggttctcccatcccccggtggtggtgggtattcctgtggtgaggctgtttccacagctcagaaaggtaagtttatattatagatggggtgaacccagatgttcttcaaaggggcaccttgtcaccctgaaaaccctgtttggaa

SEQ ID NO: 2282 - DNA, 526 bp, Homo sapiens
  MAP TO CHR7.1; EXPRESSED IN HEART, SIGNAL = 1.2; EXPRESSED IN HELA, SIGNAL = 1.1; EXPRESSED IN BRAIN, SIGNAL = 0.98; EXPRESSED IN LUNG, SIGNAL =   1; EST_HUMAN HIT: BF206698.1, EVALUE 4.70e-02; SWISSPROT HIT: Q9Y8G8, EVALUE 2.80e+00
atcgcttcacatcttctgcctggaagatctgatgatttaattacatcttaaatcttatggttcaagtgtactttctggagagatttcaaagaaataagaaggacagtttgattttttaaaaggtggtcatagggactgtattgtgaaaagataattaaggagagagacaggagaagtgcttcactgaagaaaaagggacagagtggggattagtgcagagatggagcactctaacagtctaggcagcaggataatgacctccttattggtcttcccgcctcagcctctgtagcctcaattctctcacaggtgtcacaatcatcttcctcaggcctctctttgattgcattatttcccctttctgagtcctgtgccaatgcccaattacctctcaatccaaattaacactcttaatcacaggcatcaaggccctccacccactagtttcctggaatgaatggccagcctcctcccagctcaggctcctgctccggcccccaagctctgtttgccagcacttgagtga

SEQ ID NO: 2283 - DNA, 523 bp, Homo sapiens
  MAP TO CHR7.1; EXPRESSED IN FETAL LIVER, SIGNAL = 0.41; EXPRESSED IN BRAIN, SIGNAL = 0.58; EST_HUMAN HIT: AW194644.1, EVALUE 4.70e-02; NT HIT: gi9631294, EVALUE 7.80e+00
ccagcatgacaaacaccatctatctggctttacactgtcatttccactgaaaacctgtaattactttccacaagcaacacttcatcctgccaagctgattaaaggcaatacgcacaggaaggcaaagagtagcagcgctcagatatcaaaacatttatcttataagcaacactgcaacggcatgcacacagtaagcactaaataattgtttttagatattacatttgctctttgacagacaatatagttaatgattttctcatgaaacataatagtctcttaaagagtgaatagggcagatcaaaatggacttctgaactgccgtttatttaaaatattccaccataacggacatatcattccagggtcttcactctcaccatctagtttacatctacaccaaataagttaattacttaactattatcatttcttgacaggcaaaccggtaggcaggtacttttcctatcatattctttaactgagttgaatctacttactttggctgattagagccatcagg

SEQ ID NO: 2284 - DNA, 541 bp, Homo sapiens
  MAP TO CHR19.1; EXPRESSED IN ADULT LIVER, SIGNAL = 4.6; EXPRESSED IN LUNG, SIGNAL =   2; EXPRESSED IN PLACENTA, SIGNAL = 4.7; EXPRESSED IN FETAL LIVER, SIGNAL = 3.9; EXPRESSED IN BRAIN, SIGNAL = 4.5; EXPRESSED IN HELA, SIGNAL = 4.8; EXPRESSED IN HEART, SIGNAL =   2; EXPRESSED IN BONE MARROW, SIGNAL =   5; EST_HUMAN HIT: AI815717.1, EVALUE 7.00e-72; SWISSPROT HIT: P51858, EVALUE 3.00e-17; NT HIT: gi14249157, EVALUE 5.00e-72
cacccaacaagtaccccatctttttctttggcacacacgaaacgtaagtgtccccttctggggcttggttttctcctctggtgcctcccggggtggcctcactcacctgggactggcccccgtttcccttctccagagccttcctgggacccaaggacctgttcccctacgacaaatgtaaagacaagtacgggaagcccaacaagaggaaaggcttcaatgaagggctgtgggagatccagaacaacccccacgccagctacagcgcccctccggtgagtacccggggtggagagccagtgtgaagcgcgctactgatgcaagaaggggcctccagttagggtctctcccctgggcactgtggacacatggggctcgatcgttccctgtggtggggcattctgggccctgcaggtgctgagcagtgtccctggcctccacctactcagtgccaaggccacccccaccccattcatggtgatgacagatgtccccagtcattgcccagtgtcccctgggtggaggggaacgggatagaatc

SEQ ID NO: 2285 - DNA, 573 bp, Homo sapiens
  MAP TO CHR17.1; EXPRESSED IN FETAL LIVER, SIGNAL = 1.4; EXPRESSED IN PLACENTA, SIGNAL = 2.2; EXPRESSED IN LUNG, SIGNAL = 1.4; EXPRESSED IN BRAIN, SIGNAL = 1.5; EXPRESSED IN HEART, SIGNAL = 2.1; EXPRESSED IN ADULT LIVER, SIGNAL =   2; EXPRESSED IN BONE MARROW, SIGNAL = 1.6; EST_HUMAN HIT: AI752157.1, EVALUE 1.00e-123; NT HIT: gi7661903, EVALUE 1.00e-123; SWISSPROT HIT: Q10254, EVALUE 3.20e+00
cgaccttcaagtccaccttccacagtaatgacacagattccccaaatgaagagtgcctagagacagctgacttcccagattgtggacccatcagggataagatacgagacagacattgggcacaggtatctgatgcttccacctgaagtcctcgaatggtacaatcaagaaaaagggtatctgactgggtgctggacaggcccagaggctggttatagctaccctagagaagaagcagacggatcccattagaagtatgcaggcgcacagttttataatgccctaatgcacttcctgctgcattaggatgctcagcgctctgacgcatgacaggatgaggaaagctgtgcaggcccctattcaccaaagccctcacctacctgtagtgtgaaggagtccagaacaagtgcctcaccccaaacatgcatattgggtgggtgtggcgcccgctgaatgtgggagtcactgcccacacgccagcagaggtggtccacagttaggacgccccgctgatggatgctttgtggcctgaggtgctggtaatctgaacaaaggtgagaaagagggattgca

SEQ ID NO: 2286 - DNA, 544 bp, Homo sapiens
  MAP TO CHR2.1; EXPRESSED IN BRAIN, SIGNAL = 0.44; EXPRESSED IN BONE MARROW, SIGNAL = 0.58; EXPRESSED IN ADULT LIVER, SIGNAL = 0.96; NT HIT: D11456.2, EVALUE 5.00e-78; SWISSPROT HIT: P47989, EVALUE 5.00e-24
gcaggtgcataactgtgacgtgttagtcctaggccagtgttctttatcatacggtgtgcccaaaggtttacaaacgcgtaaagatgaaccacaactgacaggctatgacaccgattgcaggctgtgagcccacctgccccgggctgaagatcattataagatcttaaagagatggctgtgaatgagttggcaaactcagcagtctcataagttatccattgaattattagcttcctatatggggtcagcagaaaggctgtaggatatgaaacccagaagagcaactggacttctactcctagtgcttacttgttgaacttgtcaacctcactcttccgagcatgatactgagagcttgctaggcattcttcccagcatctgggcaaggtgaaaccctcaagcttctggttgaagtgtgtcaggtccccttctttgtacaggttttttctccgcaccttcccaaggagagagacacagaggccttgttggcggcaagagactgtgggggcagggcacaacctaaagttaagcttccaaccccctc

SEQ ID NO: 2287 - DNA, 595 bp, Homo sapiens
  MAP TO CHR9.1; EXPRESSED IN HELA, SIGNAL = 1.2; EXPRESSED IN BRAIN, SIGNAL =   1; EXPRESSED IN LUNG, SIGNAL = 0.89; EXPRESSED IN ADULT LIVER, SIGNAL = 1.4; EXPRESSED IN BONE MARROW, SIGNAL = 1.2; EXPRESSED IN FETAL LIVER, SIGNAL =   1; SWISSPROT HIT: Q02817, EVALUE 2.30e-01; EST_HUMAN HIT: AU118221.1, EVALUE 1.00e-113; NT HIT: gi15298906, EVALUE 1.00e-114
tggggaaatgcaaagaaaacgcgaaggaggtgcgaggtcagaagggggcggggcccgggctacaggggaggagctcgagaaattaaacgaggaaagggacaagtccacagaaggtggaaggtgggacaagggagagggtgggcccgggcgttgcgggggcggggctcagactgaaggggcgaggtttgcaggcggaggctacagctagggctgctcagtaactgccccaaccactaccacgtccccaagtgcaacgggacccacggaactacaggtgtggggcagggtgagcgtggaagaagggacgcggatgggggtgcgctttgcagacgatctggagactgctgtgtgttgagggaagatacgaagtcgcgggagcagttggggactcaatgtgtgggcaacaaggtgcattctccagaggcctctatgggggaagggcgggagcgctttgttgtgggggggttgcgaggtacattgtgagggggctgtctctgtctgatgtggggggttggaggaggtacatgaggggcaggggacatggaggtgctttgaaggaaggggggctgtttaatggagaaggagtgtagcggtg

SEQ ID NO: 2288 - DNA, 595 bp, Homo sapiens
  MAP TO CHR12.1; EXPRESSED IN BRAIN, SIGNAL =  12; EXPRESSED IN LUNG, SIGNAL = 9.8; EXPRESSED IN HEART, SIGNAL =  16; EXPRESSED IN ADULT LIVER, SIGNAL =  22; SWISSPROT HIT: P04406, EVALUE 8.00e-65; NT HIT: AF261085.1, EVALUE 0.00e+00; EST_HUMAN HIT: BI861178.1, EVALUE 0.00e+00
acccagaagactgtggatggcccctctgggaaactgtggtgtgacagccacggcgctctccagaacatcatccctgcctctactggtgctgctaaggttgtgggcaaggtcatccctgagctaaatgggaagttcactggcatggccttctgtgtccctactgccaatgtgtcagttgtgggcctgaactgctgtctggaaaaactgccaaatatgatgacatcaagaaggtggtgaagcaggcgtccgagaccccctcaagggcatcctgggctacactgagcaccaggttgtctcctctgattttaacagcgacatccactcttcaacctttgatgctggggatggcattgacctcaacgaccactttgtcaagctcatttcctggtatgacaatgaatttggctacagcaacagggtggtggacctcatggcccacatgacttccaaggagtaagacccctggactaccaaccccagcgagagcgagagaggaagagagaggccctcactgctgggaagtccctgccatactcagtcccccacaacactgagaatctccctttctcaagtttccatgtagaccccctgaaaa

SEQ ID NO: 2289 - DNA, 585 bp, Homo sapiens
  MAP TO CHR17.1; EXPRESSED IN BRAIN, SIGNAL = 0.34; EST_HUMAN HIT: BI826055.1, EVALUE 0.00e+00; SWISSPROT HIT: Q9UH77, EVALUE 8.00e-25; NT HIT: gi13385187, EVALUE 0.00e+00
tgcttttaggacaatctctctgtgataaatgaatcaagagtgaacactgaccttaggaagcaaaattgaaatgtgctgctttctattttgggggtcatgagaaatccactttaaaatggcctcaaatacagcatcttcctgtttgacattgagctcatctttctcaatgatatccttaagttcagtgaccgagagctctaaaaattctgccgagactttcaccatctcctcaaagttgtgcagtatgaacatgtaggccttctgcctcagctcaggacagtagtagtagtccgtgaacttacagatgccgatacaattatccaagcacagctctgacttgaggaactcgcagcaacccctgacgatacccatgatgttaaactggtctgcagcagcaagcagtttctccacattgtccggtgtgataggcacggtccgggtgtatgcatactcaatgattagcttcatcatgtcgggagaaatgccagggatgttgtataccttcttttcagtgttgttccagccacttgtaaacaaagctctggaaaaaagaaagaaactagcagccacggaaacatttctctc

SEQ ID NO: 2290 - DNA, 537 bp, Homo sapiens
  MAP TO CHR13.1; EXPRESSED IN BONE MARROW, SIGNAL = 0.54; EXPRESSED IN FETAL LIVER, SIGNAL = 0.41; EXPRESSED IN BRAIN, SIGNAL = 0.52; EXPRESSED IN HEART, SIGNAL = 0.43; EST_HUMAN HIT: BG564188.1, EVALUE 3.00e+00; SWISSPROT HIT: O60840, EVALUE 4.00e-03; NT HIT: AF078779.1, EVALUE 4.00e-54
aaggtttgtgggatgcaaactagatttgccatgttagaccttattaatgtatgtctcattcatacataaaattgtgattagtgtatttgaacaatataactatccatagatatttatgatgctcttaatttagattttacatgcatggcccttatttgcatataatgaactactctagagtccatttaagaattcggttagggaatctaagcctctgtaactcatacctcttgcgcttataccaagaaatgcaggagattttacaaaaccattacatttttcatttaggcaataagcaaagacttacaagatatataaatatgtccattactccaccgaagtccctgatgacagcagttggagtgaaaaataagccatctgccataatcttcagattaagctcaatgctcatgaatatcacaaacacatactcagcaatctgaaacgggcaaaaggcagtttggttacaatgaacggaaaaacagcaggtcagtattttacctcctagttgtaagctgagattttgcagcggtaagc

SEQ ID NO: 2291 - DNA, 584 bp, Homo sapiens
  MAP TO CHR7.1; EXPRESSED IN ADULT LIVER, SIGNAL = 1.1; EXPRESSED IN BONE MARROW, SIGNAL = 1.4; EXPRESSED IN BRAIN, SIGNAL = 1.6; EXPRESSED IN LUNG, SIGNAL = 1.5; EXPRESSED IN HEART, SIGNAL = 1.6; NT HIT: M29432.1, EVALUE 0.00e+00; SWISSPROT HIT: P08183, EVALUE 4.00e-32
cacagcccaagtctcacaagtaatacaggtccagttctttaaatcttatttaacacaataaccaacctcagtttttaaaaatgtatctacgaccagttgatactgctagagctttcaaatctgaagtaatcttactttcccttcttaggatttcccttcttccgatttatagtagtttcctaacttcctgcatagtaggcctgcattttattttttgcacctctagaaaggcaaagggcaaggacaacttacatgaggcagtttcatgataaagtcataggcattggcttccttgacagctttctcaatctcatccatggtgacattttcacggccatagcgaatgttttcagctatcgtggtggcaaacaatacaggttcctgactcaccacaccaatgatttcccgtagaaaccttacatttatggtcctaatatcctgtccatcaacactgacctggaataaaaagtaagtgtgactttcatacatttgtaattgaaagggcaacatcagaaagatgtgcaatgtgactgctgatcaccgcagggtctagctcgcatgggtcatctcaccatcccctctgt

SEQ ID NO: 2292 - DNA, 588 bp, Homo sapiens
  MAP TO CHR19.1; EXPRESSED IN FETAL LIVER, SIGNAL =   3; EXPRESSED IN LUNG, SIGNAL = 4.3; EXPRESSED IN HELA, SIGNAL = 4.1; EXPRESSED IN BRAIN, SIGNAL = 2.4; EXPRESSED IN HEART, SIGNAL =   3; EXPRESSED IN BONE MARROW, SIGNAL = 2.2; EXPRESSED IN ADULT LIVER, SIGNAL = 1.3; SWISSPROT HIT: P78329, EVALUE 8.00e-27; EST_HUMAN HIT: AI761193.1, EVALUE 1.00e-104; NT HIT: gi14767694, EVALUE 1.00e-118
ccatcctactccacctgctgttactgctgtaaataattaatgggctgctgtgatccaggggtttggtgcatcttttatcatagatacagacatagacaaagacatagacatatagatacacataaaaatgtgaaagactaacacactaacttataagttgaataaaatatcatgctcctcacagtttcagaattagcagtgccctgtgggctgcatgcaataaagtcatctctaaaacctatctgtgaccttccctttctcaagcatcttccatggctcccagtgccctttggatcaaaaccaatttatttcacctgacatttgacatgaagctctattctctcacctaaattcagatcatagagaaacctaccttgctcagcagaagcacatcaatgaaatccaaagtcttggacttggctttgtctttgaaaaaatcatcaataccctgagtggggagggtgcgacgccgctcccggatgacagcgtctgtgaagtcatgcaccaggcggcaggccctgtggaagcgccgcccgtcatgggagaggtaatacagaaagtccatgtgctggaggatatgctggcttc

SEQ ID NO: 2293 - DNA, 533 bp, Homo sapiens
  MAP TO CHRX.1; EXPRESSED IN BRAIN, SIGNAL = 0.83; EXPRESSED IN HEART, SIGNAL = 0.65; NT HIT: AF195953.1, EVALUE 0.00e+00; SWISSPROT HIT: Q9PRA6, EVALUE 6.50e+00; EST_HUMAN HIT: AV647764.1, EVALUE 2.00e-07
ctccaggtctgcttttggaggggactgaaatgaaaacactttttctgttcttccacagttcacacaagattcaggtgtggggaaataagagtgtgagaaaaactcattacaaaagaaatgtaatccccctacctgacacctgttttcaaagcactttctttcacttacatcctcgttattcaaagcaggacaagcagcaaggatgtcacctgggagcttgtgagaaatgcagacccaccccaggctggctggctccaaatctgcattttaatgcgatccccaggtgcttcttggctcttatagtttgagaagccctgccctgtgctaccttatcctctggtccctcatgaagctcctgtgagaaagaatggctatttgtagtgggttgaatagcgttttcccccaaattcatgtccaccccaaaattcacattgtgatcttattgggacataagatctttgcagatgtaattagttaagtaagataaggtcaccctggagtagggtgggccctcaattcaatgatccgtgtcg

SEQ ID NO: 2294 - DNA, 545 bp, Homo sapiens
  MAP TO CHR19.1; EXPRESSED IN LUNG, SIGNAL = 3.8; EXPRESSED IN BRAIN, SIGNAL = 9.6; EXPRESSED IN PLACENTA, SIGNAL =  11; EXPRESSED IN FETAL LIVER, SIGNAL =   8; EXPRESSED IN HELA, SIGNAL =   9; EXPRESSED IN HEART, SIGNAL = 4.6; EXPRESSED IN BONE MARROW, SIGNAL = 9.6; EXPRESSED IN ADULT LIVER, SIGNAL = 7.4; SWISSPROT HIT: P03181, EVALUE 6.00e-03; NT HIT: gi14786903, EVALUE 1.00e-110; EST_HUMAN HIT: AI733586.1, EVALUE 0.00e+00
agcagagtcagggtcaggagccggtgtgggacctgaagcagggcacaggctggggctcatcgcggcccggcccctttccatcgcagatcccgcctcctcgcgactcggcccccaggtcacatccctccgtcggtgcccgccacccactcaccgtggggctcccgtgcggcaggtacaccgggtagtcgcgagcggtctgcggcggcagggaccccaccagccaggggagcagcacggcctcgggcgtccccagccgccaccaaccctctgttgctgccaccacccggccggacaccaccagactgacgaaggtcgtgcccgcggcctcagcgaacccggagagggcttcctgggtacgggaggcaggaggactgggagtcagcagacaagcgtagggggtggcagcgacttcccagatgggcagggaatggggagaaacccacagccagccccgagctcgcgcagtggccatgctcctacgtctcaccctctctgagcctgagttccttcactttcatacgaagtcacatccccaactcacactg

SEQ ID NO: 2295 - DNA, 561 bp, Homo sapiens
  MAP TO CHR12.1; EXPRESSED IN PLACENTA, SIGNAL = 3.8; EXPRESSED IN LUNG, SIGNAL = 3.2; EXPRESSED IN HELA, SIGNAL = 3.2; EXPRESSED IN BRAIN, SIGNAL = 5.1; EXPRESSED IN BONE MARROW, SIGNAL = 4.1; EXPRESSED IN HEART, SIGNAL = 3.7; EXPRESSED IN ADULT LIVER, SIGNAL = 6.9; SWISSPROT HIT: P36786, EVALUE 4.10e+00; NT HIT: M64239.1, EVALUE 3.40e-02; EST_HUMAN HIT: AW850403.1, EVALUE 3.10e+00
aaagcccaagattttcccaccatacaacacaccttagaagcagagcctggccttgctggctgagagccaggctcaggcctggggacctccagagaggaaggtggagagagtgggaagagacggggagaggggaggggcccctgggctctgttcctcgacagccgcctattcccactccctgagcacagtgtctgactccgcctgcgctttgtggttgcggggtagggggactttttccatcctttgtgtcttgagcggttttttccttgctttgcgcttccctactgtctctccatattcctttttgtagctaatactcccacaggcctcccacggcagctccaaaatgcagcctcccgagtttcttgttgacagaggctttgagcatctctgaacagggatcctcctcaacattcccctccctgtgactccccaccacggccaaatgcgtcaagagctggcggaaggggagaggaaaaggagttacagtgaggaggactatggtgcccatctcccagggccctgctcaattttcaactccccaatgcccgtcttactctc

SEQ ID NO: 2296 - DNA, 584 bp, Homo sapiens
  MAP TO CHR13.1; EXPRESSED IN HELA, SIGNAL = 0.69; EXPRESSED IN BRAIN, SIGNAL = 0.89; EXPRESSED IN BONE MARROW, SIGNAL = 0.67; EXPRESSED IN ADULT LIVER, SIGNAL = 0.73; SWISSPROT HIT: P51587, EVALUE 1.00e-109; NT HIT: gi14757035, EVALUE 0.00e+00; EST_HUMAN HIT: AA938167.1, EVALUE 1.00e-110
tacatgaacaaatgggcaggactcttaggtccaatttcaaatcacagttttggaggtagcttcagaacagcttcaaataaggaaatcaagctctctgaacataacattaagaagagcaaaatgttcttcaaagatattgaagaacaatatcctactagtttagcttgtgttgaaattgtaaataccttggcattagataatcaaaagaaactgagcaagcctcagtcaattaatactgtatctgcacatttacagagtagtgtagttgtttctgattgtaaaaatagtcatataacccctcagatgttattttccaagcaggattttaattcaaaccataatttaacacctagccaaaaggcagaaattacagaactttctactatattagaagaatcaggaagtcagtttgaatttactcagtttagaaaaccaagctacatattgcagaagagtacatttgaagtgcctgaaaaccagatgactatcttaaagaccacttctgaggaatgcagagatgctgatcttcatgtcataatgaatgccccatcgattggtcaggtagacagcagcaagcaatttga

SEQ ID NO: 2297 - DNA, 545 bp, Homo sapiens
  MAP TO CHR10.1; EXPRESSED IN HEART, SIGNAL = 1.6; EXPRESSED IN ADULT LIVER, SIGNAL =   4; EXPRESSED IN BONE MARROW, SIGNAL = 3.9; EXPRESSED IN PLACENTA, SIGNAL = 5.1; EXPRESSED IN FETAL LIVER, SIGNAL = 3.9; EXPRESSED IN HELA, SIGNAL = 5.8; EXPRESSED IN BRAIN, SIGNAL = 4.1; EXPRESSED IN LUNG, SIGNAL = 1.3; SWISSPROT HIT: Q90722, EVALUE 9.00e-25; NT HIT: U47009.1, EVALUE 0.00e+00; EST_HUMAN HIT: AA325012.1, EVALUE 7.60e-01
tcccacaagctaccttcagcgcgccttaccgaaggggtcgccgtcctctgccatggcgttgatgcgcttgttggccaggacctgcacgtgcttcccgctggtgcggctgtagagttggtaggtccggatgaggcggcggctgagctgatccgtcaccaggctctgctccctcacatgctgtgtaaaattaggtgaggactgaacagttacctttaggaaattgaaaaatacacaatacaccattataatgctactccgcccaggggcccgagtggccccatcaccctgcgtccccctcactgccccaagccgccagcaggtgctgggggttcccccaacatgccagcccaggccaccatcccccacccacgcaagtcgggcagacccagcccaggatgaacgagccccagggagaagctggacccacctgttgggagacaccctggggctcccggccagcccggaacagggaagcgagctccctgcccagcgcagggcccctgcccgggccttcctagaggagcagggcgcttttaagtagggag

SEQ ID NO: 2298 - DNA, 589 bp, Homo sapiens
  MAP TO CHR4.1; EXPRESSED IN FETAL LIVER, SIGNAL = 0.72; EXPRESSED IN LUNG, SIGNAL = 0.88; EXPRESSED IN HELA, SIGNAL = 0.83; EXPRESSED IN BRAIN, SIGNAL = 0.88; EXPRESSED IN HEART, SIGNAL = 0.85; EXPRESSED IN ADULT LIVER, SIGNAL = 0.47; EXPRESSED IN BONE MARROW, SIGNAL = 0.8; EST_HUMAN HIT: BG753882.1, EVALUE 1.00e-92; SWISSPROT HIT: P42681, EVALUE 2.00e-27; NT HIT: U34374.1, EVALUE 0.00e+00
ggtcaaataatgtgcctgggttacacaatgagcttgagcaaagttgtgacacaaatccaggtgtggctgcctccaaagctcatgttgtttccatgacaccagggcatggtatgatatttatcagggtgttgtttatacgtacatcatcactttggcctcttcaatgaaatcctcttcagacatggagccttcattgatggccttgatagctacctggatatgtgaccgccattcacctaaatggaccactccaaactgaccgcttccaatctcctttataaaagccaactcagatggatctatctcccacttttctgaaaaagtaaaacatccatgttacaagtagaaagaaagactgttaaaatattagggctggaaaatgtttaggaagtatctattatttgacagagaggttaaaaaatgtataaagtggagaggatatgaagccattttaatactctcactgtggcttaaacgtaattcaaggactcaagtttcaaaacacaaactttatttatttggtgatgtttgtataacaaattaaggataacaaaatgcactctctgctcccaaagacaacagcgaacac

SEQ ID NO: 2299 - DNA, 558 bp, Homo sapiens
  MAP TO CHR2.1; EXPRESSED IN HEART, SIGNAL = 1.9; EXPRESSED IN BONE MARROW, SIGNAL = 3.4; EXPRESSED IN ADULT LIVER, SIGNAL = 2.9; EXPRESSED IN PLACENTA, SIGNAL = 3.2; EXPRESSED IN FETAL LIVER, SIGNAL = 3.8; EXPRESSED IN HELA, SIGNAL = 3.8; EXPRESSED IN BRAIN, SIGNAL = 3.5; EXPRESSED IN LUNG, SIGNAL = 1.7; EST_HUMAN HIT: BF129625.1, EVALUE 7.80e-01; SWISSPROT HIT: P47989, EVALUE 2.00e-19; NT HIT: U06117.1, EVALUE 1.00e-66
ggaaggcagacagacacctcagaaatatggacacaaaggcaggagaccccaggaggtctccacaccaaccaggagttctcccaagtaagagagggttggctttctagcagatcttagtcaccaccttgttggggggcctgagcccttcctccaaagggtagtccctcatgcttctcaccctggcacttgccctgacctctgcagggcctcgtttgccattccacctcctaggctgtgcctgaaggcccataccttggaaggcattctcaatctcctccatggtgggctcgggctgattccggagcagtgtgtacatactcatgacgatgccaggggtgcagaacccgcactgggagccgtggcttttggcaattctctcctaaaagatacagatgacatagacacctgggatggcagaaccctcccaggctccccaaaggactcgactggagccagcacatgttgagagatagtgggggtagtaatcactgcacagagtcaagccccagtgccaccatttaccaactgtgaccttggccagtttccaagccctctgag

SEQ ID NO: 2300 - DNA, 576 bp, Homo sapiens
  MAP TO CHR2.1; EXPRESSED IN HEART, SIGNAL = 2.9; EXPRESSED IN BONE MARROW, SIGNAL = 3.1; EXPRESSED IN ADULT LIVER, SIGNAL = 0.68; EXPRESSED IN PLACENTA, SIGNAL = 2.5; EXPRESSED IN LUNG, SIGNAL = 2.9; EXPRESSED IN HELA, SIGNAL = 2.8; EXPRESSED IN BRAIN, SIGNAL = 2.7; EST_HUMAN HIT: AA707261.1, EVALUE 5.20e-02; SWISSPROT HIT: Q01295, EVALUE 1.90e+00
taccagaatggaaccaagccgtgtgccagcaaccaggttcatctgaaactaattattatattgggaggaataaactgatcttgtaaagagcagaagattgttgacattactctcctgctgagcagacaaaacatggatgccagatttgactagaactgggagagagagagttcagggtggattgagcacacagattgaggggtttggaagggataggaagttgggaaatggaagaaagcatcataataatgtgggtgatgagagatttagaagaaatccctgcttcagtggttcaagttttatgtaaattttatatttggggctttgagacagagcttttagcaaagacactccatgaatgcatacattcttctgcagagattacagtattcctcagcttgagggatagggtgcaagcccatccgagtcactgaggaaacagatttgcagaattcctaagctctagaaggatgcaggtttgcttctttgcttagctctaaatcatggatggtaaaggcttgcttcctaagaaatggtctgtggtataactactgatggttgtgccatgcaaaatta

SEQ ID NO: 2301 - DNA, 559 bp, Homo sapiens
  MAP TO CHR19.1; EXPRESSED IN FETAL LIVER, SIGNAL = 0.58; EXPRESSED IN BRAIN, SIGNAL =   1; EXPRESSED IN HEART, SIGNAL = 0.58; EXPRESSED IN BONE MARROW, SIGNAL = 0.61; SWISSPROT HIT: Q20799, EVALUE 2.00e-11; EST_HUMAN HIT: AI038963.1, EVALUE 0.00e+00; NT HIT: gi13430867, EVALUE 6.00e-81
acccactgcacctgttatcctagttaatcctcagctccatgaaagtaaaggactcccatttcaatgtcacaaatggggaaacggaggcccagagaagcccatcgaaatccaggagggtcccagcccagggctctacttgggagaagctggggcccaagcgatgagactccccctgccccatcctcccgcccaggcctcaccttgtgcctgcatgcgggtccggaccagggccagcgggtaactggctatctggccgcaggtgctggatatggtaccgcaggccaggagcacgaggatgcctgggtctgccgagtcgtggctgtactgctgaagccaccagttcttcagagtctggagtggagaagggagtagggagggttggggtgggtgaccctaggaccctggcttcaaaggcctgctggccggttctgtatcccatgacaggtgctactagctgagcacttggtacctcctaggggccgggccagccctttccctgcgtcccctcacccagtcctcatctggaccctctctggtaggtggaataagggtcccctgt

SEQ ID NO: 2302 - DNA, 554 bp, Homo sapiens
  MAP TO CHR6.1; EXPRESSED IN LUNG, SIGNAL =  78; EXPRESSED IN BRAIN, SIGNAL = 9.5; EXPRESSED IN HEART, SIGNAL =  11; EXPRESSED IN PLACENTA, SIGNAL =  50; SWISSPROT HIT: P30507, EVALUE 8.00e-52; EST_HUMAN HIT: BI010526.1, EVALUE 0.00e+00; NT HIT: AJ133100.1, EVALUE 0.00e+00
tgggacaagaaaacccagaccccactcctcaccccttccctacctgagctcttcctcctacacatcacaacagccatcacagctcctaggacagctaggacagccaggacagccaggccagcaacgatgcccacgatggggatggtgggctgggaagatggccctgggaaaggaggggaaggtgaggggccctgacccccaagcctcagccctgacccggctgaagggctccaggacttctgctttccctgagaagacacatgacccctcatccccctccttaccccatctcagggtgaggggctctggcagcccctcgtgctgcacatggcacgtgtatctctgctcttctccagaaggcaccaccacagctgcccacttctggaaggttccatctcctgctggcctggtctccacaagctcggtgtcctgagtttggtcctcgccatcccgctgccaggtcagtgtgatctccgcagggtagaagcccagggcccagcacctcagggtggcctcatggtcagagacgggatggtgggtcacgtgtgtctttg

SEQ ID NO: 2303 - DNA, 559 bp, Homo sapiens
  MAP TO CHR19.1; EXPRESSED IN HEART, SIGNAL = 0.67; EXPRESSED IN ADULT LIVER, SIGNAL = 1.3; EXPRESSED IN BONE MARROW, SIGNAL = 1.5; EXPRESSED IN LUNG, SIGNAL = 0.64; EXPRESSED IN HELA, SIGNAL = 1.1; EXPRESSED IN BRAIN, SIGNAL = 2.1; NT HIT: AF324891.1, EVALUE 9.00e-09; SWISSPROT HIT: P48165, EVALUE 9.10e+00; EST_HUMAN HIT: AW450648.1, EVALUE 0.00e+00
tgcaaaccaaactttttaggctaaaggaggaactaagcttttggatttataactctaacaaaataacatatttaaagccccaaaaacaaaacagacaaaagagactgagaaatatttatttttaactttatttttattgttgacactattacagatagaatgaccacaaccatattaacaaaccaaaaacctgtgcacagaaacaagatgaagaaaatatatcaagatgttaaccacactctttggatggtgaaaacatgggtgagtttctcttctacatttctgtaacttcaaagtttctataatgaacacatttcatatataatggaaatatatgtagtaaaggtggactaccaaaacactagaatgatgacctttcaaggaaaccgaaacaaaataaccataatcccacaacaaccacacaactatttcttgtttttcatctttcttcccatctttgacatttatgcatacttatcactaacaccctaataatcacagactagtgcacagatcaagatgttaacagttaattgttgttgggtgttgggaatatgtg

SEQ ID NO: 2304 - DNA, 559 bp, Homo sapiens
  MAP TO CHR2.1; EXPRESSED IN HELA, SIGNAL = 1.4; EXPRESSED IN FETAL LIVER, SIGNAL = 1.7; EXPRESSED IN LUNG, SIGNAL = 2.1; EXPRESSED IN BRAIN, SIGNAL = 1.4; EXPRESSED IN HEART, SIGNAL =   2; EXPRESSED IN BONE MARROW, SIGNAL = 1.4; EXPRESSED IN ADULT LIVER, SIGNAL = 2.2; EXPRESSED IN PLACENTA, SIGNAL = 1.2; NT HIT: gi16158343, EVALUE 2.00e-68; SWISSPROT HIT: P47989, EVALUE 3.00e-08; EST_HUMAN HIT: BG875638.1, EVALUE 3.00e-22
agaagcctctgctttccctcggtatcctcatctccccatcctgcactcatccttcccagctttgagggcagtgattatgattcttgggcctctcttttagcttgaggtttggagaaacagcatcctcctggataagggagccagaggcctggccagagccaaagagcctgcaaggaacccttctagctcccacccagggagactctccaggcccacagctctgggctggccctctgctctgcgggatcccatgggctccttacatagacggcctgtccattgaggtcagcgctgacagaggcagccgtgggagaggtgttgggcacagtgttagtgcttgtctcgctgatataaatcttagaggtggggattttcagagctctactggccacctgcgaaaagagaagacattgccctctagggaaggggttatcatggggcttggctgccttctccccaagacaggattcacattcactgttacaggcaagaaaacaatttcgtaaactctaatctcattgtctgggatgtccttacatctggctgaatttgaaggagc

SEQ ID NO: 2305 - DNA, 505 bp, Homo sapiens
  MAP TO CHR1.1; EXPRESSED IN BRAIN, SIGNAL = 2.1; EXPRESSED IN LUNG, SIGNAL = 3.3; EXPRESSED IN HELA, SIGNAL = 1.4; EXPRESSED IN HEART, SIGNAL = 2.8; EXPRESSED IN BONE MARROW, SIGNAL = 2.4; EXPRESSED IN ADULT LIVER, SIGNAL = 2.2; EXPRESSED IN FETAL LIVER, SIGNAL = 2.4; EXPRESSED IN PLACENTA, SIGNAL = 1.6
cctgcatacatgtgcctgtctctctggacagtggtgctggctgtggggtttgggctggtgcaccctgagttgataaaagagacgaccagtctgggcaggctgcagtattttctactggatttcacaggtctgcagaaacactgagcatttttgttttccctaagaaacagaatgttggcagctttatttttctcaagggtatagcactgaatgttatttattgttctgactctgaatttcgtgctgtctttttttctgtttcctgctgacaggtgatttgctcttgaacaattaacagagtgaaggctgtgttccatctcctcacagtctcccgctgggcatccttgggagcacaggaggagaaaggctttcttcttgatcctattactgctgcccagcatcaagaaggattaattaacccaccaggttttgcttcattacgaggaaaaaagaaaagccagtgacagtggaattcaaacattgaacaggcaaaggaatcagtgct

SEQ ID NO: 2306 - DNA, 583 bp, Homo sapiens
  MAP TO CHR7.1; EXPRESSED IN ADULT LIVER, SIGNAL = 0.51; EXPRESSED IN BONE MARROW, SIGNAL = 0.61; EXPRESSED IN FETAL LIVER, SIGNAL = 0.46; EXPRESSED IN HELA, SIGNAL = 0.55; EXPRESSED IN BRAIN, SIGNAL = 0.54; NT HIT: AJ236922.1, EVALUE 1.00e-112; SWISSPROT HIT: O00222, EVALUE 1.00e-34
aagatcaagccactaccaaaatgttatgtaattactagaatgcacaatataataggactcaataaggtggaaaaaagataatgaaactatacatcttttatttactttatatctttttgttgctaatgaaatagttttactctttccaaataaacttaatatccagtttaaaaacctgactcagtaagtatagaattaatcagaagtgaaatcaaatagtcgtgtctcattaagtgttcctcaaatgatggaaatcttagctctaatgctgtcttttattggaatctaacatcaactgatggtttttacttttttattttgcagggctggagcgaattgctcgggattcatcttatgaacaggaaggaaaggtccaatttgtaattgatgctgtatattccatggcttacgccctgcacaatatgcacaaagatctctgccctggatacattggcctttgtccacgaatgagtaccattgatgggaaagagctacttggttatattcgggctgtaaattttaatggtaagttacaacgtgtgtgtgtctaaatacattaaaagcgacagggtgtgtttttcct

SEQ ID NO: 2307 - DNA, 568 bp, Homo sapiens
  MAP TO CHR5.1; EXPRESSED IN ADULT LIVER, SIGNAL = 5.6; EXPRESSED IN PLACENTA, SIGNAL =  12; EXPRESSED IN FETAL LIVER, SIGNAL = 8.3; EXPRESSED IN HELA, SIGNAL =   8; EXPRESSED IN BRAIN, SIGNAL = 6.6; EXPRESSED IN LUNG, SIGNAL =   3; EXPRESSED IN HEART, SIGNAL = 5.2; EXPRESSED IN BONE MARROW, SIGNAL = 8.1; EST_HUMAN HIT: F34519.1, EVALUE 1.00e-107; NT HIT: U48453.1, EVALUE 0.00e+00; SWISSPROT HIT: P21817, EVALUE 5.00e-13
accccaagtctcatatccccacttcaggcctcaaccttggcctgaaaataccctgaaactcagacctccaactgcaaaaccccaaactcagccctcaggttcccccaggggaggagcagggcccctgacttcatcttggctcctggtcttcctggggctccagcctcccattgaccaacttcccttgctcctctccaggcttcgtgacgggaggtcacgtcctccgcctctttcatggacatatggatgagtgtctgaccatttcccctgctgacagtgatgaccagcgcaggtctgggctgtggacgagagggcctggggtctaggggtggacgtggagggctgggaccctatgagtaggattagggaccagattccggggagctgaacccttgacttcactctcttctgtgtccccagacttgtctactatgaggggggagctgtgtgcactcatgcccgctccctctggaggctggagccactgagaatcaggtagggcggggaagatggggagagaccagggagaggctggggtcacctggcaggctgggaggacagaaaaggt

SEQ ID NO: 2308 - DNA, 539 bp, Homo sapiens
  MAP TO CHR22.1; EXPRESSED IN LUNG, SIGNAL = 1.3; EXPRESSED IN HELA, SIGNAL = 0.76; EXPRESSED IN BRAIN, SIGNAL = 0.69; EXPRESSED IN BONE MARROW, SIGNAL = 0.63; EXPRESSED IN HEART, SIGNAL = 1.1; EXPRESSED IN ADULT LIVER, SIGNAL = 0.74; EST_HUMAN HIT: BG991922.1, EVALUE 7.00e-69; NT HIT: gi15318086, EVALUE 1.00e-107; SWISSPROT HIT: Q9Y6J0, EVALUE 1.00e-31
gcaaggagagaaggtgcaagtgggtgtgagggacactggcagcacacacctgcagaagaagcagctgggctggcctctcaggaatggaagtcataaactccaggtgtttggcccggtcaaacccactggtgcacaaagtggggcggagcagatgcacaacagccttgtagtcgcctgcttcatacagccgctgaatctcctccagggactggcaccgctccagcgacttcaggttcttatcaatctgaaaaaggcccggcaatgctgtatgagggtaaacccctcagcccctgccccaccaaatctggccagtgtttgtttttatcagacttggatgaggagaataaaaattagactatgttccagcccaaaaaaaattagattcctccttcatacatcagtgtttacactaaacgtatgtgttaaaagtatttctattaatggctaggcatccaattctttaaaaaacaagcacatcaaaaaccaaaaactactcagaagcagaggagttccaggaaagcatccaccaagatagctgg

SEQ ID NO: 2309 - DNA, 536 bp, Homo sapiens
  MAP TO CHR17.1; EXPRESSED IN ADULT LIVER, SIGNAL = 1.8; EXPRESSED IN FETAL LIVER, SIGNAL = 1.7; EXPRESSED IN LUNG, SIGNAL = 3.8; EXPRESSED IN HELA, SIGNAL = 0.7; EXPRESSED IN BRAIN, SIGNAL = 0.75; EXPRESSED IN HEART, SIGNAL = 1.4; EXPRESSED IN BONE MARROW, SIGNAL = 0.68; SWISSPROT HIT: P12821, EVALUE 3.00e-35; EST_HUMAN HIT: BI821905.1, EVALUE 1.00e-104; NT HIT: AF118569.1, EVALUE 0.00e+00
ctgatgctcctctttgcctctgggaacctccaggatctgtttagctggctgtagctaattagaaattgtagagtggcaacccccaagccaattttccagctagctgcagatccacgggcctcgagccagtggaagagccgacttacagctgagaggctgaggtccgagcctttggcctgagctacatacctcacccccacgcccccaggcttcacagacacgggggcctactggcgctcctggtacaactcccccaccttcgaggacgatctggaacacctctaccaacagctagagcccctctacctgaacctccatgccttcgtccgccgcgcactgcatcgccgatacggagacagatacatcaacctcaggggacccatccctgctcatctgctgggtaaggacctggcctcgcctccacatgagtcccacggaagtgtgggtcccgaggtaggggtgggggatgtccagggtaagggaaggtgggttgtgaccctcacatctcacatgtgtggggcatcatactgtttgct

SEQ ID NO: 2310 - DNA, 536 bp, Homo sapiens
  MAP TO CHR7.1; EXPRESSED IN BRAIN, SIGNAL = 0.31; EXPRESSED IN HEART, SIGNAL = 0.47; EXPRESSED IN FETAL LIVER, SIGNAL = 0.27; NT HIT: gi9961251, EVALUE 1.00e-111; SWISSPROT HIT: P21439, EVALUE 4.00e-33; EST_HUMAN HIT: BF309006.1, EVALUE 4.80e-02
tggacaatcttgcatctcaaacattattagctaaacctttgaagaataaactcagtcctatgaggtgaaattctaatttcaaggacaactactttatcagaggctttacctgtggtaatttcatgataaactcataggcgttggcctctttgacagctttctttatctcatccatggttacatttccacggccataacaaatattttcagcaattgtggtggaaaacagcaccggctcctgactcaccacaccaatgatttccctcagatagtttacattaaagttcctaatatcctgcccatcaatgttaatctgaaagaaagaaatatttcctattaagtatttaaccatttaatagctgaagtatcaggaccattcatgaaaaacatcctacctaatatttaacttggttcagtgtttagaaataataattagaaataaacagcaatatgcaagaacaaaaataaaaagcttatgctctctcctgatatttattttcatatatacagttttttcgtggaaggattatttgcca

SEQ ID NO: 2311 - DNA, 590 bp, Homo sapiens
  MAP TO CHR19.1; EXPRESSED IN LUNG, SIGNAL = 6.3; EXPRESSED IN HELA, SIGNAL = 5.9; EXPRESSED IN BRAIN, SIGNAL = 4.9; EXPRESSED IN BONE MARROW, SIGNAL = 4.8; EXPRESSED IN ADULT LIVER, SIGNAL =   3; EXPRESSED IN FETAL LIVER, SIGNAL = 5.1; EXPRESSED IN HEART, SIGNAL = 5.4; EXPRESSED IN PLACENTA, SIGNAL = 5.7; SWISSPROT HIT: P43234, EVALUE 1.90e+00; EST_HUMAN HIT: BE170483.1, EVALUE 3.00e-34
tgttggggagaagaggattggaggtgtcagtgttaaaggaacctctacaacgaaggtgaagccacggaagataaggtaaggctgagacttgggtgcggagtgcgcgtcattgggctggagctgtaaactggcgcagaaatgggcagggaacccgcaagcccacaccgcccaagagtcagtgaaacctgagggatcttccccaaggctctgaaccacgcgggacgcctgggtcctcgcatggatgccgacggggccggctgagtgggagccccgcccgtagctggggtgaggagggcgggaggcgccgcagccaggagggcggggaccagacctgccccgtctcgccccgggctccgcgagcgatccccgcctccgccgggggcatgggaaggaaagggaagggagggggatgaggccgccggacgctggggtttccccagccaccctgagaggaactgggactttggggtccagactgccagcgtttagcgcagcggggtcctcctgccccttggtggaagcgcaggctcctccccccgcgcgtggcacccacgtggggctttctcactcctcccagcttggttttctca

SEQ ID NO: 2312 - DNA, 583 bp, Homo sapiens
  MAP TO CHR7.1; EXPRESSED IN FETAL LIVER, SIGNAL = 0.68; EXPRESSED IN HELA, SIGNAL = 0.52; EXPRESSED IN BRAIN, SIGNAL = 0.76; EXPRESSED IN ADULT LIVER, SIGNAL = 0.46; EXPRESSED IN BONE MARROW, SIGNAL = 0.74; NT HIT: AF325528.1, EVALUE 8.70e+00
ctcctcagtcgcagaaaagctaggttcaaagtgaatgttccaaggaagctaatttcatgtttgcatttaatctccatattaaagaaacatcagacaagtggtatttagaggaactctacagctaaatccaagttctgggactcaaactatgtttaccttttgggagaatagccattcgggagaatgaacaataaatacagatatatttttacaaaggatattacatttctctacactttgcactcccagaagaagaaaataagaggattctgtttcctgacataccatactagccaaattcatcagtcattggagattattctattcgatacatatttctttagggactgcctggctctctttcccttctggaattccaaatgtgccagactgcagcatcttcttctcatcaaagtataaaacattcccggacaggtaaaatagtccctgtcacatgacttttaccttagatatttgtatttcctatgtaattttaatgtacctataaatcaaaagcatctactagaagcgaaaagtggacctgggttttgctgatattttgtggtgctagatttggggactg

SEQ ID NO: 2313 - DNA, 556 bp, Homo sapiens
  MAP TO CHR13.1; EXPRESSED IN FETAL LIVER, SIGNAL = 1.1; EXPRESSED IN LUNG, SIGNAL = 0.89; EXPRESSED IN HELA, SIGNAL = 1.4; EXPRESSED IN BRAIN, SIGNAL = 0.87; EXPRESSED IN HEART, SIGNAL = 0.99; EXPRESSED IN BONE MARROW, SIGNAL = 0.85; SWISSPROT HIT: P53708, EVALUE 5.30e+00; NT HIT: gi14757710, EVALUE 1.00e-85; EST_HUMAN HIT: BI461342.1, EVALUE 1.00e-82
caggcatttatgggatcgtcaatcaggtataaggccaacttgccctcagtaaaggacaaagtcaacggctctgcatatgccaacaggtgctctttatcagcaccaagaacaaacaaaaaccaaaaaaacttaacagagggatcagctgtttacttttgtaaattataatccacatgacaaacatacctaaatccacgagaatcgcatgctgctgagcagtgagctgcttcaaaagttccttataggatatgtcaggaggctgttgtttattaggcaatctgtgtctgagtcggtactgtaaagccagaaactgccaaatttctcctcgtcgacttttgggaactcctacaatgaaggagataaataaccaaggccttgaactctggaatgaagttgatagatcccagctgattcactatataattctggtaaacaggcagctgtatgtactgcatgccaccctaagaccacacaatataattgacagaagcatattttgacaagctgaatcctatagctcttgatgccttgcaaaagaaaaccctcacgcaacact

SEQ ID NO: 2314 - DNA, 599 bp, Homo sapiens
  MAP TO CHR6.1; EXPRESSED IN BONE MARROW, SIGNAL = 2.8; EXPRESSED IN ADULT LIVER, SIGNAL = 3.4; EXPRESSED IN PLACENTA, SIGNAL = 4.5; EXPRESSED IN FETAL LIVER, SIGNAL = 3.5; EXPRESSED IN HELA, SIGNAL =   4; EXPRESSED IN LUNG, SIGNAL = 4.8; EXPRESSED IN BRAIN, SIGNAL = 3.2; EXPRESSED IN HEART, SIGNAL = 4.9; NT HIT: gi15208634, EVALUE 0.00e+00; SWISSPROT HIT: P22105, EVALUE 4.00e-56; EST_HUMAN HIT: BF848660.1, EVALUE 0.00e+00
agtggacaccactcctcaccagggcacacagctcggcaagcagagtgctggctggatttcagtccctctgtactccctcagcaaatgcacttttgtgcagtgaacaacctgcacagcctcacacagcattcctatgtgggatttggcttccccattctccttggacctaagtctctcccttctctctacccactcttcctagtgcctcagagtgacccaagtccagggactccaccccacctgggaaacctgtgggtgacagaccctaccccagattcactgcacctctcctggactgtccctgagggccagtttgacaccttcatggtccagtacagggacagggatggacggccccaggtggtacctgtggaagggcccgagcgttcatttgttgtctcctcactggaccctgaccacaagtacagattcactctgtttggaattgcgaacaagaagcggtatggccccctcacggccgatggcaccactggtgagtagcagccacctcagcccccatgtgaccccttctcagccccatgcacacttcccttcagcccaaaaccagctggggtcccccagcaagacagctgactcca

SEQ ID NO: 2315 - DNA, 537 bp, Homo sapiens
  MAP TO CHR19.1; EXPRESSED IN BONE MARROW, SIGNAL = 0.69; EXPRESSED IN ADULT LIVER, SIGNAL = 0.5; EXPRESSED IN FETAL LIVER, SIGNAL = 1.1; EXPRESSED IN LUNG, SIGNAL = 1.2; EXPRESSED IN HELA, SIGNAL = 0.87; EXPRESSED IN BRAIN, SIGNAL = 0.91; EST_HUMAN HIT: AI125175.1, EVALUE 0.00e+00; SWISSPROT HIT: P55526, EVALUE 4.40e-01
catcttgccttctcccagacactccggatcctcgccctcgccgtctgtgcgcacgcagacaagaggcgcatctggtagcagcaaggcctggacctgggcccagtccttctcagtgggggccccaggggtgacgaggatgagggcgtcgtagtgcgttgggtgagaggcggcggccgcggtggtggcagtgcccgtgtggcccagaggcacggtccagagcaccacattcgggcgctctggggctgggaagggagtgggtgctgtggggaccgaagcaggcgcagcgcctgggtcgccaggatccaatccaagcagcatgtccaccacaaggcccacgtcagccttgccagccacggccaggtctagccgtgcgctgcccaggcgctccaggcctgagcgcacccacgacagcgcagcctcaaggccgccggtctcaaaggcctcacgcacagcctctagctctgctgcacccaacacctcgaagccatcctgcgccggtggcaggagcctgtggggacaagaagggacagggtcaaa

SEQ ID NO: 2316 - DNA, 579 bp, Homo sapiens
  MAP TO CHR3.1; EXPRESSED IN ADULT LIVER, SIGNAL = 1.4; EXPRESSED IN LUNG, SIGNAL = 1.7; EXPRESSED IN BRAIN, SIGNAL = 0.64; EXPRESSED IN BONE MARROW, SIGNAL = 0.7; EXPRESSED IN HEART, SIGNAL = 1.4; EST_HUMAN HIT: AL524242.1, EVALUE 0.00e+00; NT HIT: gi14768472, EVALUE 0.00e+00; SWISSPROT HIT: P89429, EVALUE 5.60e+00
aatagccatatttcatatcttcaacactattctatttacaatactttatataataaataacttacagcagtatagtaacacacctcaaaaaagttcttttttcactaattcctagaggtttcttggttactttccttcataaaaacacatcaaatgtgagtttacactatgagaaaaacaggatttgagaacagatagatagatattttccattatggcacaaacgtttaaggccgagtcagcaccggaaatgttcggggcctgaacatgtttgtttcctcacattagtaccaagaactgtctgagttgagaaggctgaaaggggagggcagcttcttcttgacctgaggccgtgcagccccgaccgatgggaggcacaaggtgctggctgacttctgtctgttcttgttggtgccccaactcaggaaggaaagcttcttggagattttcttggttttatcagttttgtcgtcatcatcaatggctaagcagatcatggagtacgttttctgcattcccacggagtatgtggcactcttattatgctgcacatagaaaagtaagaaaaagggcgtcagg

SEQ ID NO: 2317 - DNA, 527 bp, Homo sapiens
  MAP TO CHR6.1; EXPRESSED IN ADULT LIVER, SIGNAL = 0.57; EXPRESSED IN BONE MARROW, SIGNAL = 0.51; EXPRESSED IN LUNG, SIGNAL = 0.7; EXPRESSED IN BRAIN, SIGNAL = 0.43; EXPRESSED IN HEART, SIGNAL = 0.66; SWISSPROT HIT: P97402, EVALUE 1.00e-52; EST_HUMAN HIT: BI766041.1, EVALUE 2.00e-23; NT HIT: L41605.1, EVALUE 1.00e-23
gcgtgcactcacagagtttagactttatgtagattggaaatcaagttccacatacctggaatcctactgagtgtcacccagaaatgctcatcaggagagtcagtatcttttgaccactcaagtaaatcaatggcccttaggttttgaagaacaaaattagcaaattcccttgtaagggccacataggcagagccaaagtaaattgtcagatggtggggaggaggcatttttctcatgcaagtccacagcatgaaggaaaacaagctatctctgctccaagtgcatgtatttggtccttctgataatatgaggaggaggcggcaccccgggggtgatatttttccttttccgtaacctcagatactgaacgtatttccctgttggttttcaggggaattcttgcccacaggtgttgatgacgtacttccagggaacctcagaggccacaaggtctttcaggcagtgcaggtcagcctggagcctggagatccctgtgtagaacagagactccctctcagaagccacag

SEQ ID NO: 2318 - DNA, 561 bp, Homo sapiens
  MAP TO CHR19.1; EXPRESSED IN HEART, SIGNAL = 0.71; EXPRESSED IN BONE MARROW, SIGNAL = 1.1; EXPRESSED IN PLACENTA, SIGNAL = 1.6; EXPRESSED IN FETAL LIVER, SIGNAL = 1.1; EXPRESSED IN HELA, SIGNAL =   2; EXPRESSED IN BRAIN, SIGNAL = 1.3; EXPRESSED IN LUNG, SIGNAL = 0.8; NT HIT: AF289667.1, EVALUE 3.40e-02; SWISSPROT HIT: P42705, EVALUE 9.30e-02; EST_HUMAN HIT: BE244518.1, EVALUE 3.00e-71
ccttctcgttcttggagcagctcagttctgtgtgggaggacgggccagcacccccgtcaggcgggtggggcaaatacaacctgtccccagcccggccccagccagaccctcagggcctgcagagtgcccagagaccgctgagatggtcaggctcaaggcagcacaccttacatgcccccccaccccaggaagagctcccaggacccaagggaagcagggtggagatgagaactaagccccactttgctggcccctgcgagaaccattttaaagagggggaaactgaggtccacaacaggcaggggcttgcctggggtcacatacagcacccagggcccctcaacacctgccctagggcccctctcaccgtgctccaggccgcagctgccccccttgacctcaggccccgggggcggctcagggggcagtgccagggcgaactcgggcttcaggccgttgggcagtggtggccctgaccgaggcggctccggtggtggctgaggctcagaggaccctgtgtcccgggtgtcaatggccccggctggtggtagggaaggtgag

SEQ ID NO: 2319 - DNA, 562 bp, Homo sapiens
  MAP TO CHR19.1; EXPRESSED IN PLACENTA, SIGNAL = 4.1; EXPRESSED IN FETAL LIVER, SIGNAL =   2; EXPRESSED IN LUNG, SIGNAL = 3.1; EXPRESSED IN HELA, SIGNAL = 4.8; EXPRESSED IN BRAIN, SIGNAL = 3.2; EXPRESSED IN BONE MARROW, SIGNAL = 2.3; EXPRESSED IN HEART, SIGNAL =   3; NT HIT: gi14787031, EVALUE 0.00e+00; SWISSPROT HIT: P22064, EVALUE 9.00e-11; EST_HUMAN HIT: AW118247.1, EVALUE 0.00e+00
agtgacgggaaagtgtgaggtggggaggcaagagatgcagaaatgacaggaggtgacagtgggagaaagagaaacagtgacagaggagcgtgagaggtgtggagtctggttctgccactgatggctgccaccctctgtttccctatctatgccagcctcagtttccccatctatgatagtggcggggctggggattcagcccacactgggctaaagctccttgtctccccaggcacgttcccaggctcgcagccccaggcacctgctagccccgttctgcccgccaggccacctccgccacccctgccccgccgacccagcacacctaggcagggccctgtggggagtgggcgccgggagtgctactttgacacagcggccccggatgcatgtgacaacatcctggctcggaatgtgacatggcaggagtgctgctgtactgtgggtgagggctggggcagcggctgccgcatccagcagtgcccgggcaccgagacaggtgggcatgggctgatggggacacagggctgagggcttgggtggaaatactgggtggggtgtg

SEQ ID NO: 2320 - DNA, 580 bp, Homo sapiens
  MAP TO CHR17.1; EXPRESSED IN HELA, SIGNAL = 0.88; EXPRESSED IN LUNG, SIGNAL = 1.9; EXPRESSED IN BRAIN, SIGNAL = 1.2; EXPRESSED IN HEART, SIGNAL = 1.9; EXPRESSED IN BONE MARROW, SIGNAL = 1.5; EXPRESSED IN PLACENTA, SIGNAL = 1.3; EXPRESSED IN FETAL LIVER, SIGNAL = 1.5; NT HIT: gi4505152, EVALUE 5.00e-69; SWISSPROT HIT: Q61084, EVALUE 1.00e-20; EST_HUMAN HIT: BE313361.1, EVALUE 8.00e-69
tagtgcctgctccatctgtggagtttgtttcctattaggaagggactttgtttgcctgagggagctggcacatgctggacgttggtgccatgacccatctgagtcacattcctgacctctagggcctaatagttggccccatgcctgctcctcttgggccacacaccctgggctctgttgttgaaagcctcctttatgtgctctaggctcccagaaccctggccgaagctcacctccccctggctatgttcctgagcggcagcagcacattgcccggcaggggtcctacaccagcatcaacagtgagggggagttcatcccagagaccagcgagcagtgcgtgagtataggggggctgggatatgcctgtggcctgtatcagcagaccaagctcataacaaggggttcttagtagtcacagtgcagaactgagggacatgaaccccatttgaaagctcttttataaaccaggcctgcccaaatatggattgtccctttttaagggccaaataacaatttctgccaaagatgggatctaaaggatctaaactacatagtttccttgttgttgggtgaggat

SEQ ID NO: 2321 - DNA, 595 bp, Homo sapiens
  MAP TO CHR7.1; EXPRESSED IN ADULT LIVER, SIGNAL = 2.7; EXPRESSED IN FETAL LIVER, SIGNAL = 2.1; EXPRESSED IN LUNG, SIGNAL = 1.3; EXPRESSED IN HELA, SIGNAL = 1.5; EXPRESSED IN BRAIN, SIGNAL = 1.1; EXPRESSED IN HEART, SIGNAL =   1; NT HIT: U51689.1, EVALUE 0.00e+00; SWISSPROT HIT: Q16850, EVALUE 3.00e-33; EST_HUMAN HIT: AU129039.1, EVALUE 1.00e-92
tccccaaggatctctaagccatcaacccaaaacatatctgataaagcttaatggcaagaagcaataacattaagatattttaggtaaggttatagggaatttgctaaaaatagagaagctgatcaatttaagctatagtatatagaaaatctcaaattgtcccttttaaaaattagccacagatcctcaaagtcataaggcagcaatgaaactgaaaaatccaacaaacctggtcataagttaaaggaggcagattctctccacagactgttttctgttctaaataacattttttttgaagtgttttgtctctggccaaaaagaagcccatccaagcactagtagttgaggatgtatgctgccctgccaagagtaatccaataagcatccctgctacttcatcatcagtcaaaggacgcccatccctaaggaatgaaccaaagacacaaatttaacattttggcagatacatttcatgcctcaacctttaaataaagtgtcataatgaatacatttttcaggtatagtggtctcttatatttgactatcacaagtcaagagttttttttctcttagggaagagacagaccagcac

SEQ ID NO: 2322 - DNA, 594 bp, Homo sapiens
  MAP TO CHR12.1; EXPRESSED IN HELA, SIGNAL = 0.58; EXPRESSED IN BRAIN, SIGNAL = 0.66; EXPRESSED IN LUNG, SIGNAL = 0.64; EXPRESSED IN BONE MARROW, SIGNAL = 0.67; EXPRESSED IN FETAL LIVER, SIGNAL = 0.44; EST_HUMAN HIT: AA173146.1, EVALUE 6.00e-54; NT HIT: Z26284.1, EVALUE 0.00e+00; SWISSPROT HIT: Q13936, EVALUE 5.00e-14
taagcacaaagtgtgcgtcccttcactaaggatcagagcaaagtgctttccgggggtgcagctgtccctgtgggtggccacttctcagcctccaggaacaagccccatgagctctctgttccaggctctcctaccaggatgacgaaaatcggcaactgacgctcccagaggaggacaagagggacatccggcaatctccgaagaggggtttcctccgctctgcctcactaggtaaatgcaccgctcgctctctggatgtggtcggcggttactccctagagaacactggtcagggatgattgggaaatcgttgtggcctgcctcaaatcagccccacacagtggggcatttccaaagcaaggagacaacattccaaaggcagggtgtgcagggatgagccctggacaccagaatacgtctcagacgaggggaggggaaaggaggagcgtctcgggccatagttactgctcctggcaccccaccagggtgtaaactgtcacaggccagtgccctgttttcctgccctgatggtggctctctggctggctttgcaggtcgaagggcctccttccacctggaatgtctgaagcgaca

SEQ ID NO: 2323 - DNA, 547 bp, Homo sapiens
  MAP TO CHR12.1; EXPRESSED IN HELA, SIGNAL = 2.1; EXPRESSED IN BRAIN, SIGNAL = 2.3; EXPRESSED IN LUNG, SIGNAL = 1.3; EXPRESSED IN HEART, SIGNAL = 1.3; EXPRESSED IN ADULT LIVER, SIGNAL = 2.8; EXPRESSED IN BONE MARROW, SIGNAL = 2.5; EXPRESSED IN PLACENTA, SIGNAL = 2.1; SWISSPROT HIT: Q9Z5Z2, EVALUE 2.30e+00; NT HIT: AF287263.1, EVALUE 1.30e-01
tgttgctcagagacacctgggaataggccggggccgagatggcgctgagcactcggtctccccttcagacccatccatcagcagcggtccctgccagaagatggcctattgaacatttccagaaatagcacagccaagcccgtcaactgctttcttggaaatacattcaataaggatggcggtcctccagcagggagagcagaaagcctggcctggatcagtctgctgagaaacagcaatgcctggctacaggccatgtcggtgccttgggaaaggggagcggttctcatgggacttcccaagccctgcagcctctgaagtcacttcaaaatgttctcagtatggagggagagagtcacaccttgcagaaggccttaggccctgccgacttcttctaactcagtgacctgcacatcttgctgtgttcgttcagacaccccgcagacaggaaggcgattcaggcttggaggcaaggtattaactgtcagcagagagagacctctgcatcatctggggaacgtttattgcagtccctcctcttgtgagc

SEQ ID NO: 2324 - DNA, 506 bp, Homo sapiens
  MAP TO CHR19.1; EXPRESSED IN BONE MARROW, SIGNAL = 0.6; EXPRESSED IN FETAL LIVER, SIGNAL = 1.1; EXPRESSED IN BRAIN, SIGNAL = 0.65; EXPRESSED IN LUNG, SIGNAL = 0.81; SWISSPROT HIT: P56730, EVALUE 4.10e-01; EST_HUMAN HIT: AL541029.1, EVALUE 0.00e+00; NT HIT: gi14766620, EVALUE 0.00e+00
gttcctgttgaagcacctccctgagctcacagcaacccttgctgtctctcctcttgccctcagctcctgccagggccatccaggtgaccgtgtccaacccctaccacgtggtgatcctcttccagcctgtgaccctgccctgtacctaccagatgacctcgacccccacgcaacccatcgtcatctggaagtacaagtctttctgccgggaccgcatcgccgatgccttctccccggccagcgtcgacaaccagctcaatgcccagctggcagccgggaacccaggctacaacccctacgttgagtgccaggacagcgtgcgcaccgtcagggtcgtggccaccaagcagggcaacgctgtgaccctgggagattactaccagggccggaggattaccatcaccggaagtatgttgggcagggcagggggatgaggctgggcttgcccgggtggtgggactggcgtccttgtgcgggacctggagtccccatctgaaagctcttga

SEQ ID NO: 2325 - DNA, 542 bp, Homo sapiens
  MAP TO CHR11.1; EXPRESSED IN FETAL LIVER, SIGNAL = 2.9; EXPRESSED IN PLACENTA, SIGNAL = 1.8; EXPRESSED IN LUNG, SIGNAL = 1.8; EXPRESSED IN BRAIN, SIGNAL = 2.8; EXPRESSED IN ADULT LIVER, SIGNAL = 1.6; EXPRESSED IN HEART, SIGNAL =  10; NT HIT: U91629.1, EVALUE 0.00e+00; SWISSPROT HIT: Q14896, EVALUE 2.00e-44; EST_HUMAN HIT: AU140784.1, EVALUE 0.00e+00
gtgaaagcacctcctgttccctggatggatggagagtcgctgggctgcccctcccccagcagcccaaacctcagggaaggctgatcaggatcttacctgcctctatgaccttgaggtcgaacttgaccttggaggagccagcaatgactgcgtaagatccctggtcggcagggcccacttcccgcactgtcagcgtatgccgtgtgccctctgtggccaggccgtacttgttgctggcgctgatgtcactgcctccgcgctgccagcgcaccttcactcctgcccgctctgtctcggcctcgaacacggcagggctgcctgcggccacttccactgaccgtggcttcttgctaaaagctgagactgaagggccaggtggaggctacagcggcccctggttggagcgtgcaccccgcccctgcagcccctctcagtaaatactgtgctagcactttctatgcatcccctcacgtaatactctaccagttctctgaggtagttgcagttattctgttcatttctcagaggaggacactgaggct

SEQ ID NO: 2326 - DNA, 573 bp, Homo sapiens
  MAP TO CHR11.1; EXPRESSED IN BRAIN, SIGNAL = 0.52; EXPRESSED IN LUNG, SIGNAL = 0.7; EXPRESSED IN HEART, SIGNAL = 0.83; EXPRESSED IN BONE MARROW, SIGNAL = 0.6; NT HIT: gi5454139, EVALUE 0.00e+00; SWISSPROT HIT: Q99816, EVALUE 1.00e-38; EST_HUMAN HIT: N29095.1, EVALUE 0.00e+00
tttgtggtttgcaaggtcagtgcctctacaacccaagttaaaaaatcttggaacgtaaaatgaagaaataccttcaggaagacatccaggtctatcacgccccttctcaaggcttctcccaagtaaaagatagtgtcttcaatagcgttttcttctgcatacagattcaggatctgtttgtataagggagctgtgggaatgataacttcatcgatatcattgttttcagactgattttccattttttccagagcagaactgagttcttcatccttctttttcaaaagttctatgtttttatcaacctcggcctgaaaacagaacagtccaagcattaataactgtacataattatccacttgtcagacacctacaacacttcacaggaaaagacaggctaacaaccatgtttaaacaactcatggatgagaataatgtttcaaataacaccctggtcaaaggtagaggaaaagatgtgatctactatgctgagtgaaatagagtaatgatggagatatcctgaggtgacagcactttcagtgacagtaacaagcttgtcacctgtcagcgaca

SEQ ID NO: 2327 - DNA, 571 bp, Homo sapiens
  MAP TO CHRX.1; EXPRESSED IN BRAIN, SIGNAL = 0.61; EXPRESSED IN ADULT LIVER, SIGNAL = 0.64; EXPRESSED IN BONE MARROW, SIGNAL = 0.75; EXPRESSED IN FETAL LIVER, SIGNAL = 0.84; EXPRESSED IN LUNG, SIGNAL = 1.1; NT HIT: AF195953.1, EVALUE 0.00e+00; SWISSPROT HIT: P24866, EVALUE 1.90e+00; EST_HUMAN HIT: BF830085.1, EVALUE 1.00e-100
tgcttgtccaaagtcactgcacagctagttagggacagagctggaattcattttcaagtttggctgactccaaagtctctgctagatcaggccgtatactctccagcctcctgacaattttatgagctctctggatggccatccctgtttcctcttctggctcttcccagttaggccaagaagggaactcactgcacagttgttggctgaccagatgactgaatggctgaggggcttcacctcactttaggttaagacttctcaggcctagagtggggattggtgcctggcttgggctggggcctggcaaacccaccttgggtatcatttcatagatcccatacatggtatagctggtcccaatccagatcctcacatctcccaatgagtaggcctggatgctgtcacgaacttggctgtaatcctcgatttgcacacacatggggcctgtgcaactggagttcagatagctcaaggtttcggagctaaagcgactcttgtttgcaaacaacctgggtggggtgggaagacaaggagggtcctgagcatctgctaaggatgcaaaggacca

SEQ ID NO: 2328 - DNA, 576 bp, Homo sapiens
  MAP TO CHR19.1; EXPRESSED IN FETAL LIVER, SIGNAL = 2.1; EXPRESSED IN LUNG, SIGNAL = 5.5; EXPRESSED IN HELA, SIGNAL = 2.1; EXPRESSED IN BRAIN, SIGNAL = 1.9; EXPRESSED IN HEART, SIGNAL = 4.5; EXPRESSED IN ADULT LIVER, SIGNAL = 0.72; EXPRESSED IN BONE MARROW, SIGNAL =   2; NT HIT: gi15308568, EVALUE 1.00e-103; SWISSPROT HIT: Q00417, EVALUE 1.00e-03; EST_HUMAN HIT: AI028345.1, EVALUE 1.00e-128
gtttcaccaacatcacacgcctgtggggagggtgctgggaccttcctcagtgaccctctgtccccgagcccccagcaaacaccgtgtggcacagacgaggtggaggcagggctttttaaaatctcagatgctgctttatttaccaaaggtgctggcttggggctggttctgctggccaagccagcggatggctgtgggggtcccagctcagtcttccaagggcgagactgtacagccttgctgtggggggttgggggcagggttccctcccggggccctgttggggttcccgcccagcggcagccagggtgggcagtgggtaccagcactgccatctcaggaaggcactttcagcttcggggtccccaggaagaactgcaggacgcggtcggccaggagcgccaggcagaagtccaggagcaggacctgggcaatgaccagcttgaactgtcggggcagggagggatggtgagctggagacctgcagcccagctcagggtcactgccataggagggacccatcaagctgagccccagggtcacctccacagggccactgacctccacagggatgtc

SEQ ID NO: 2329 - DNA, 572 bp, Homo sapiens
  MAP TO CHR18.1; EXPRESSED IN BONE MARROW, SIGNAL =  21; EXPRESSED IN ADULT LIVER, SIGNAL =  11; EXPRESSED IN LUNG, SIGNAL = 9.7; EXPRESSED IN HEART, SIGNAL =  10; EXPRESSED IN PLACENTA, SIGNAL =  15; EXPRESSED IN FETAL LIVER, SIGNAL =  16; EXPRESSED IN BRAIN, SIGNAL =  16; EXPRESSED IN HELA, SIGNAL =  10; NT HIT: gi14762496, EVALUE 2.00e-93; SWISSPROT HIT: O08912, EVALUE 4.00e-30; EST_HUMAN HIT: BI597521.1, EVALUE 3.00e-93
ttgcactactgcattccagcctgggtggtgacagagtagtgataccctgtttcaagggaaaaaataaaaaataaaaacacttactatacaattgttctgtagttggcattaaacaggaatgttttgaaagatttcttaacttgcttttatgacatcaggagaacagtggtgtgtcccatcatcgatgtgatcagtgatgatacttttgagtacatggcaggctctgatatgacctatggtgggttcaactggaagctcaattttcgctggtatcctgttccccaaagagaaatggacagaaggaaaggtgatcggactcttcctgtcaggtaattaatttgtcagacattttgcctaaagtgttattggcagaaggttgtggagctttgggaatcatatcaaatggataagtgtattttgagaaacgtgaagcattcgtataccttatggtagttaacagccatctttcacatatgtgagtgttttaaagaaggatttctcctctaataaaattagaaatttttgcttattctataaatctagtgcacatgagaaatgatgacatgcgtgtt

SEQ ID NO: 2330 - DNA, 569 bp, Homo sapiens
  MAP TO CHRX.1; EXPRESSED IN BONE MARROW, SIGNAL = 6.3; EXPRESSED IN ADULT LIVER, SIGNAL = 3.8; EXPRESSED IN PLACENTA, SIGNAL = 6.8; EXPRESSED IN FETAL LIVER, SIGNAL = 5.7; EXPRESSED IN LUNG, SIGNAL = 3.3; EXPRESSED IN BRAIN, SIGNAL = 6.1; EXPRESSED IN HEART, SIGNAL = 2.6; SWISSPROT HIT: Q15904, EVALUE 7.00e-40; EST_HUMAN HIT: AV695620.1, EVALUE 1.00e-127; NT HIT: L44140.1, EVALUE 0.00e+00
tctgtcaagtggggacactgcttcttcaggtggctgcaaggacccaaggcagcttaggtaggagcagagctgaggaacttgttcctctaagatgccaaaggccctcccagagcctcacagtgcgcctctttctctggccccacaggctctcactgacctatgaacgactctttggtaccacagtgacattcaagtgagtcctgggggtggttgaggtatgggtgggctggtgtggccccagcctccccagctcacctgacatccctgccaccttccccaggttcattctggccaaccgcctctacccagtgtctgcccggcactggtttaccatggagcgcctcgaagtccacagcaatggctccgtcgcctacttcaatgcttcccaggtcacagggcccagcatctactccttccactgcgagtatgtcagcagcctgagcaagaagggtagtctcctcgtggcccgcacgcagccctctccctggcagatgatgcttcaggacttccaggtatggagcgggcgtggcccagcttcaggtgggggagcccaggctagtggttgagag

SEQ ID NO: 2331 - DNA, 560 bp, Homo sapiens
  MAP TO CHR19.1; EXPRESSED IN BRAIN, SIGNAL = 1.2; EXPRESSED IN BONE MARROW, SIGNAL = 1.2; EXPRESSED IN PLACENTA, SIGNAL = 1.6; EXPRESSED IN LUNG, SIGNAL = 1.8; EXPRESSED IN HELA, SIGNAL = 2.1; NT HIT: gi14762990, EVALUE 0.00e+00; SWISSPROT HIT: O00255, EVALUE 2.40e+00; EST_HUMAN HIT: BE350923.1, EVALUE 0.00e+00
gttcctgcagaattggttggaaccggcaggccgcctcccctctcccccttcccccaccacccctactccgacacccacatcaacaccctgtgcgcctgtccccaggacttcagtctgctgtacgaggaggcgcgctactatcagctccagcccatggtgcgcgagctggagcgctggcagcaggagcaggagcagcggcgccgcagccgggcctgtgactgcctggtggtgcgcgtcacgcccgacttgggcgagcggatcgcactcagcggcgagaaggccctcatcgaggaggtcttccccgagaccggagacgtcatgtgcaactccgtcaacgccggctggaaccaggaccccacgcacgtcatccgcttcccgctcaatggctactgccggctcaactcggtacaggtgagggctgcacgctgccccctccccgccgcacccccggcgtccgcggagccctccaggggcagagtgagctggagggaggcgcgatccctgaaacggtgaagccccccgtgccatcctacaaaaaaggcaacaatgtgtcgatgcat

SEQ ID NO: 2332 - DNA, 563 bp, Homo sapiens
  MAP TO CHR17.1; EXPRESSED IN HELA, SIGNAL = 2.7; EXPRESSED IN BRAIN, SIGNAL = 2.1; EXPRESSED IN LUNG, SIGNAL = 2.6; EXPRESSED IN HEART, SIGNAL = 1.5; EXPRESSED IN BONE MARROW, SIGNAL = 2.1; EXPRESSED IN PLACENTA, SIGNAL = 2.1; EXPRESSED IN FETAL LIVER, SIGNAL = 1.7; NT HIT: gi14771543, EVALUE 5.00e-75; SWISSPROT HIT: Q01453, EVALUE 8.00e-12; EST_HUMAN HIT: BG104485.1, EVALUE 8.00e-75
aggacttctgcttctgctgcctgtgaggactgtgctgtcagcagtcatggcccttcaggccctgcacctcgaggcagagccctcccccggccatggccagctctcctaaccaagtgtctctttcccccagaatggctgcagtctgtccaggccaccatgatcctgtcgatcatcttcagcattctgtctctgttcctgttcttctgccaactcttcaccctcaccaaggggggcaggttttacatcactggaatcttccaaattcttgctggtaagttgtggatggtaaagtccatgtggaagcggggtgcatccaagtctgcggaatgattagtttagtagaaggatgtggcctcagaatgactgatgttcatgagtctccccactggatgctttccataaagtgagggtgggtgcttgtatgtgtgggtgtgtacctgtatgtgtcttagaacttgggacttagaactctccccttctccctggaatgagatgcatatgaaagagaacttagaggatctggaaggaaggtccccacccaagccaggcgtatcaacaggaat

SEQ ID NO: 2333 - DNA, 579 bp, Homo sapiens
  MAP TO CHR1.1; EXPRESSED IN BONE MARROW, SIGNAL = 4.3; EXPRESSED IN PLACENTA, SIGNAL = 5.8; EXPRESSED IN FETAL LIVER, SIGNAL = 3.8; EXPRESSED IN HELA, SIGNAL = 6.9; EXPRESSED IN BRAIN, SIGNAL = 3.8; EXPRESSED IN LUNG, SIGNAL = 1.8; EXPRESSED IN HEART, SIGNAL = 1.7; EST_HUMAN HIT: AL134293.1, EVALUE 1.00e-121; NT HIT: U58003.1, EVALUE 0.00e+00; SWISSPROT HIT: Q12889, EVALUE 1.00e-36
gagagaagcacattccaggcagagacaacagcaactacaaaagtaaggaggcaggaaagagctcaaggtgtctgtgacaaggagttctcaagttgggggtgctctggacccctatttgagaggaaggtaggactggaagaaatagaagaaagttgaagagtaacaggagaaatagactgttatcttatacctgtgaaatctgaaaatacaacccccacatccaatatgaacacacctctcctttagtttgttgaactctgggtagagaattttctcatcctggagatccttagcaacaatctgattgttgttcattgaggcaaaggcaaatatcaggtgggtgcagagaaaggggtccaggtcatggggcaagatcgaggcagggcctggccgactgtgtgcccagttggtgaaataacacacgagtttatgggcagcacctggtaagggagagcacacattagttggcagaaaccaagggaggggatggagctcagcttccagaaagcaatgtgaacgcagcccaagagaccaggccacattttcacatcctctctccctggccctgaagtacacctc

SEQ ID NO: 2334 - DNA, 573 bp, Homo sapiens
  MAP TO CHR5.1; EXPRESSED IN LUNG, SIGNAL = 1.5; EXPRESSED IN HELA, SIGNAL = 1.1; EXPRESSED IN BRAIN, SIGNAL = 1.5; EXPRESSED IN HEART, SIGNAL = 1.3; EXPRESSED IN ADULT LIVER, SIGNAL = 1.1; EXPRESSED IN BONE MARROW, SIGNAL = 1.6; NT HIT: gi14735844, EVALUE 0.00e+00; SWISSPROT HIT: P04267, EVALUE 3.70e-01; EST_HUMAN HIT: AW963585.1, EVALUE 0.00e+00
gcaaaacgttgcaatctcagtaaaaatggtttattacaatgttattttagaaaggcttagtcctcaaactgttgaaaatgtacttaaaagatgtccaaatcatgagaatgatcaacttcaatggcttcctctgcctccaacttggcttctgcatgtccttcctgtgactcatcaagagaggccaaggcctcattcgtgtcacttgcaaaagtttctcgtgatgtatcatcatcttcttgaaaatttagacttttaatagcttgtttcatctttttccccaacacttgtgttctcctcttcctagcagcttttttattttcatattccttttggttttcaatgtagaaaatgtcctgtaataaaggaacaaagttagtaaacaagaactaccacgttattaaaggtttattccatgactgtccctttaaaatcattatctccatttcttacaaaaaatacaagtattattaggctcattattaagatggagttcaagatattaagtaagtactcattgcaagattgaaactgatttaaacccagcctagtgttaggtttagggcccatgcttat

SEQ ID NO: 2335 - DNA, 591 bp, Homo sapiens
  MAP TO CHRX.1; EXPRESSED IN PLACENTA, SIGNAL = 6.3; EXPRESSED IN FETAL LIVER, SIGNAL = 7.7; EXPRESSED IN LUNG, SIGNAL = 4.3; EXPRESSED IN HELA, SIGNAL = 7.8; EXPRESSED IN BRAIN, SIGNAL = 8.3; EXPRESSED IN BONE MARROW, SIGNAL = 7.3; EXPRESSED IN ADULT LIVER, SIGNAL = 8.6; SWISSPROT HIT: P49203, EVALUE 3.30e+00; NT HIT: L44140.1, EVALUE 0.00e+00
aacaaggaatgggcgtgtagagggttcttgtccctagaacatagtatcaaccgccagatgtcgcccgatcccaaagccaccagatcgggcagtcctgggaagccaaaatccagctctttcatattttcccttatttggagtagattcttggatgttaggcacaccccgcccaccacaccacccctggccctcagaccccaggccagaccctcccactgggaggtatagcccaagcccaggagctgttcagctgggatccctaaggagctgtttccaggcctgcgtagccagggggcgcaggagggaaggaagccgcagactggcaaggtgagaagagacctgtgctggcaagtccaggtgcggcaggtgaggtcgcccattcccaagctcccaccttgacggtgcactcggagcacttacaaatgggtctgccagtggattttaacctattttgcctggccccaggtggcacgggaatctggggacattgttggttatatcctggctggcagtgcgcatccaactcagagccaacctggcatagggcccagggcccaaccaaggaacctggcctggtctcatcctcaccat

SEQ ID NO: 2336 - DNA, 578 bp, Homo sapiens
  MAP TO CHR7.1; EXPRESSED IN HEART, SIGNAL = 0.53; EXPRESSED IN BONE MARROW, SIGNAL = 0.67; EXPRESSED IN FETAL LIVER, SIGNAL = 0.83; EXPRESSED IN LUNG, SIGNAL = 1.1; EXPRESSED IN HELA, SIGNAL = 0.77; EXPRESSED IN BRAIN, SIGNAL = 0.63; SWISSPROT HIT: P53004, EVALUE 2.00e-45; EST_HUMAN HIT: AA595133.1, EVALUE 0.00e+00; NT HIT: U34877.1, EVALUE 0.00e+00
agcccctaaccccaaatatcccaacatagctcataacaataagattcttgtttccccaacatgtttaattttaagaatagagataatggtcaactcttgagaagaaccaaatgctggtgccatcttggaagtgctacatcacctcctcctcttacttccttgaacagcaatatttctggatttcttctgcaagccccaggcagtgcaggatgcgtttcttttcagcagccagttccttctcagagaactggcccaagagtttctggacaaatatattttgatctttcagaaatatgttcttattcactcctacatttggcacattctccaaggacccagacttgaaatggaagcttaaatatctgtttcgttttagaccaggtcctttttcttcaatccatgacagtggactgcaaagacaaaagacaaaagaatcatgttagagattacacaagagcacaagtgggtgcttgctggcaccagaccgcctggtaacatgtccttgtcaggcacccatcctccttgcagccaccagcctcccagaggctgtgggtgactgtgtcaacctcacagccaaa

SEQ ID NO: 2337 - DNA, 572 bp, Homo sapiens
  MAP TO CHR19.1; EXPRESSED IN ADULT LIVER, SIGNAL = 1.4; EXPRESSED IN BONE MARROW, SIGNAL = 1.8; EXPRESSED IN PLACENTA, SIGNAL = 1.7; EXPRESSED IN FETAL LIVER, SIGNAL = 1.6; EXPRESSED IN HEART, SIGNAL = 1.1; EXPRESSED IN LUNG, SIGNAL = 0.95; EXPRESSED IN BRAIN, SIGNAL = 1.9; EXPRESSED IN HELA, SIGNAL = 2.3; NT HIT: AF082802.1, EVALUE 0.00e+00; SWISSPROT HIT: P32942, EVALUE 3.00e-27; EST_HUMAN HIT: AI199660.1, EVALUE 0.00e+00
aaacttggttcttcgacccctagccctgtctccggatgccccgcgcctcgctgctccccggctcttggaagttggctcggaaaggcccgtgagctgcactctggacggactgtttccagcctcagaggccagggtctacctcgcactgggggaccagaatctgagtcctgatgtcaccctcgaaggggacgcattcgtggccactgccacagccacagctagcgcagagcaggagggtgccaggcagctggtctgcaacgtcaccctggggggcgaaaaccgggagacccgggagaacgtgaccatctacagtaaggaaggaggcggggtctccgcggctccgaggtgggaccagaggaatgcgaaggcggggcgaagagtgggcgggacctcagtaccggaacaggcgtggcccgaggggcggggcaggtgggggcggagacgtaatcgctggggaggaggagcctgtacagcctgagaggcggggcgccgtaccctagttcgttctcagcaccccgaggattcgggcagataaggggcgggccttgaccggagggaggggtatggtcagt

SEQ ID NO: 2338 - DNA, 532 bp, Homo sapiens
  MAP TO CHR9.1; EXPRESSED IN ADULT LIVER, SIGNAL = 6.7; EXPRESSED IN BONE MARROW, SIGNAL =  13; EXPRESSED IN PLACENTA, SIGNAL = 7.3; EXPRESSED IN FETAL LIVER, SIGNAL =  10; EXPRESSED IN LUNG, SIGNAL =   7; EXPRESSED IN HELA, SIGNAL = 6.5; EXPRESSED IN BRAIN, SIGNAL =  11; NT HIT: gi14740866, EVALUE 0.00e+00; SWISSPROT HIT: O14656, EVALUE 6.00e-18; EST_HUMAN HIT: BE902614.1, EVALUE 0.00e+00
tccctgccaggtagaatgacaccttcccaagttctgtgcaggatgggtcctgagggctggggctgcagccgtgtgtggcctggagcaggtgactcccctgtctgggctcaggacttactccctagggtggcaccccatggtgagaacagtggtcaaggacgcatccagcctaccttgtagcgctcgatgtggctggggtgggggaagtggaggacgggagaaaagtggtgcacgcgggggctgcggaggccgccctggaagaggtagtgcgccagcagggagctgacataggatttgccggtgccggtccagccgtgcagggagaggaccagcggcttggtgggggctgggtcccgcacaaaggccttcagcgccttcaccaccagcgccttggccagatgctggccggccaggtgctgagccaggtcacactccagacctagggccacaggaggatggtgaggacacatcccaccgaggcagaggttcaaggagaacatcatgtctggaacctggtctgggactcctgtgt

SEQ ID NO: 2339 - DNA, 530 bp, Homo sapiens
  MAP TO CHR12.1; EXPRESSED IN FETAL LIVER, SIGNAL =   1; EXPRESSED IN HELA, SIGNAL = 0.62; EXPRESSED IN LUNG, SIGNAL = 1.1; EXPRESSED IN BRAIN, SIGNAL = 0.83; EXPRESSED IN HEART, SIGNAL = 0.92; EXPRESSED IN ADULT LIVER, SIGNAL = 0.84; EXPRESSED IN BONE MARROW, SIGNAL = 0.87; NT HIT: gi14768694, EVALUE 2.00e-59; SWISSPROT HIT: O95838, EVALUE 2.90e+00; EST_HUMAN HIT: AW813820.1, EVALUE 0.00e+00
aagagaggcgatgtgctaggggaaaaaatgttgagaaaagagattcgagttgacctcaggagtttcaagttacctagtttaaagctttgagtatcgttggggaggggtgagagtgtttgcatgtgattgaacatggagtaggaagctgtggttaagatttaaactgggataacatcacactctgtcctctactttaatgaggcaggattgcagatgttatgggctgatgccaaaaaggctagaagaataaagacaaatatgtggaagcacaatataaagtttcatcaacttccataccgggagatggagcatttgagacaggtatgggccaggggcagatatccagaagttcatggtgaggtaattacatttaatcaagatctcaaggttttttctttcatttgttgttcaccattgatcaagcttttgccctttgccgtgagaacaaaatattgaactgaatgaggcatcagattatttgtaagaattgggttcatccagagttgtagccctccatagcaagagctcca

SEQ ID NO: 2340 - DNA, 568 bp, Homo sapiens
  MAP TO AC020907.4; EXPRESSED IN FETAL LIVER, SIGNAL = 6.1; EXPRESSED IN LUNG, SIGNAL = 0.77; EXPRESSED IN BRAIN, SIGNAL = 1.1; EXPRESSED IN HEART, SIGNAL = 0.98; NT HIT: gi14766659, EVALUE 1.00e-101; SWISSPROT HIT: P05981, EVALUE 2.00e-43; EST_HUMAN HIT: BG538624.1, EVALUE 0.00e+00
  unsure 216
attttccaaattggctgcactgatcattgatagttaaggcccactttgtgctccctcgagatcattccccttattgccaaggatgcctgagccataagttgattgccttgtgcccctggtcccctcctctgtcctcctggcctcgggtcctcaagccccatggctcagcccttagacttacctgtgaggggcaggggactggagaggtggaccagngcaatatcgttgctgttctcctcgctgttggggtcccgaaagggaagatagcccccgtggtagaccacagcctgcacccccagctgcagaccgtggggagaggcctgggccacggcaccggcaaacactcgccatcgggacaggacccggttccgcctaccagggaaaggggtggagggtggccacctgcctgggcacaatccgccctcctccccactgtctctccgctcctctgcctccccatcatcagcgccattggggggcactcactccgggaagcagtgggcggctgtcagcacccagtccccggagagcagggatcccccacagaggtgtgctccatcatagcgaa

SEQ ID NO: 2341 - DNA, 547 bp, Homo sapiens
  MAP TO CHR5.1; EXPRESSED IN FETAL LIVER, SIGNAL = 0.85; EXPRESSED IN HELA, SIGNAL = 0.8; EXPRESSED IN LUNG, SIGNAL = 0.67; EXPRESSED IN BRAIN, SIGNAL = 0.83; EXPRESSED IN HEART, SIGNAL = 1.5; EXPRESSED IN BONE MARROW, SIGNAL = 0.69; EXPRESSED IN ADULT LIVER, SIGNAL = 1.1; NT HIT: gi14861871, EVALUE 0.00e+00; SWISSPROT HIT: Q9UN66, EVALUE 2.00e-09; EST_HUMAN HIT: BI087139.1, EVALUE 1.00e-45
aggcgctgtgattctaggtgtccttgagcgcacagtgcgccttcgaccaagagcagccgcgagccttcaagctcacgctgcaggcccgcgaccaggactagctcgcgctcggcgtcaacgtgagcctgcgcgtgttggtggacgacctgaatgacaacgcaccgcgggtgctgtaccccagctctggagcgcaatggcttcgcgctcttggatatggtgctgcacgccgcggagcctggctacctggtcaccaaggtggtggctgtagacgcagatgtgagacacaatgcgtggctgtcctaccacgtgctgcaggccagcaagcccaggctcttcagcctggaatgcgcaccgacgaggtgctgacagctcgcacgatgggccacaggaaagcgactcgccagcgcctactggtcgcggtgcactgcggtggacagccgctcctctcgctaccgccacgtcaccaccactaccgcccctcgtcgccgacagcctgcaggagactctgccagacctcagcgatcactctgcaaagctacagcctgaa

SEQ ID NO: 2342 - DNA, 509 bp, Homo sapiens
  MAP TO CHR2.1; EXPRESSED IN ADULT LIVER, SIGNAL = 1.2; EXPRESSED IN FETAL LIVER, SIGNAL = 1.5; EXPRESSED IN BRAIN, SIGNAL = 1.5; EXPRESSED IN LUNG, SIGNAL = 0.7; EXPRESSED IN HEART, SIGNAL = 2.5; EST_HUMAN HIT: BG989548.1, EVALUE 0.00e+00; NT HIT: gi16157781, EVALUE 0.00e+00; SWISSPROT HIT: P52179, EVALUE 5.00e-15
tggaaaccattcagaggaccactgccagagatccgatatgtaagctttaaaatctaaatttaaaatatcttctcaaaattgaagtatattattataaacaacgcttaatacttcctttaattatttttacagatcctcctgatcctcctattaaactcaagattggcctcatcacaaagaacacagtgcatctgtcatggaaacccccgaagaatgatgggggctcccctgttacccactatattgttgagtgccttgcatgggaccctactgggacaaagaaagaagcctggaggcagtgcaataagcgtgatgtggaagaactgcaatttactgttgaagacctagtagagggtggggaatatgaattccgagtcaaagctgtcaatgctgcaggagtcagcaagccttcagccactgttggccctgtgactgtcaaagaccagacatgtaagtaccaatgtactgacaaagaatgtcctccttacagctgccttcctaggtgttca

SEQ ID NO: 2343 - DNA, 433 bp, Homo sapiens
  MAP TO CHR11.1; EXPRESSED IN FETAL LIVER, SIGNAL = 2.2; EXPRESSED IN LUNG, SIGNAL = 2.9; EXPRESSED IN BRAIN, SIGNAL = 2.4; EXPRESSED IN HEART, SIGNAL = 2.9; EXPRESSED IN ADULT LIVER, SIGNAL = 3.2; SWISSPROT HIT: P10515, EVALUE 9.00e-25; EST_HUMAN HIT: BF796701.1, EVALUE 2.00e-87; NT HIT: J03866.1, EVALUE 5.00e-87
aagtcaaggagagggcacagcaaaatgtaaaaattaggatagacatcttaatttttgtctttggctgaacaataacacacattggttcaaaaaatttttgaagtaaatataaatattcttgcttaacctggcacacaggctcttaataaacagttttttattatatttatttttctttttaaacagaaatcatgttgttgatgtcagtgttgcggtcagtactcctgcaggactcatcacacctattgtgtttaatgcacatataaaaggagtggaaaccattgctaatgatgttgtttctttagcaaccaaagcaagagagggtaaactacagccacatgaattccaggtagggtattaattattgctttctaattatgttatttttaaggtttgcataatgcatttattgcatttttcacctttgattctg

SEQ ID NO: 2344 - DNA, 580 bp, Homo sapiens
  MAP TO CHR7.1; EXPRESSED IN FETAL LIVER, SIGNAL =   3; EXPRESSED IN LUNG, SIGNAL =   4; EXPRESSED IN HELA, SIGNAL = 3.9; EXPRESSED IN BRAIN, SIGNAL = 3.3; EXPRESSED IN HEART, SIGNAL = 3.5; EXPRESSED IN BONE MARROW, SIGNAL = 3.7; SWISSPROT HIT: Q04863, EVALUE 1.40e+00; EST_HUMAN HIT: BI911441.1, EVALUE 0.00e+00; NT HIT: gi16161197, EVALUE 0.00e+00
aagtaacctgaggcacgctctcttctagaaggtgccttccacatctctctcttctcgcagaagctgccagcagctccgtccagagattctggagcagagactgctgcctggaggtcacagatgaatcttggggtggccgatgctccagccaacttggggtgcaaaaaagacatgagcgctcctcttctcgggagcaagtagacacaggtgccagggtcaggaagatgatgctacagccccaagtcctacgccagccttccagcccggaaggctcatgtgtgcaggctcttgaccccagtgcttgcccttaccccagcaacgcggcgcggccagaaccagaatgcaataaatagaggcagggccaggaggcggagggccgggatggtgctagctttctgacgccgtctgcggcactgtgggttggtccacacagaagcgcttcaggggcggggcacctgagtcttcctcttcctcaacgacctaggagcaggcagagcatggaatgccagggccacccctcccaaccagaaccttcccacccacccgaattataatgggatgtccactctgctccttccag

SEQ ID NO: 2345 - DNA, 513 bp, Homo sapiens
  MAP TO CHR19.1; EXPRESSED IN FETAL LIVER, SIGNAL =   2; EXPRESSED IN LUNG, SIGNAL = 2.4; EXPRESSED IN HELA, SIGNAL = 2.4; EXPRESSED IN BRAIN, SIGNAL =   2; EXPRESSED IN HEART, SIGNAL =   2; EXPRESSED IN BONE MARROW, SIGNAL = 1.6; NT HIT: gi14764354, EVALUE 0.00e+00; EST_HUMAN HIT: BG423839.1, EVALUE 0.00e+00
cgctctctccgactaacctggccctcggcctgcccctctagactaccaaatccagtttgcttctcgctgcttaaggccaatcacctgtagactctccttcagctgcgggatgagcatcttataacgctgcacaggatcgaagtcctgttgctgttgctgcaggaggccgctctgggcagggcccaccagttgtgctggcggttgcggctgctgctggggacccgggccgccagccgaactaggacccgatacaccagcagctgaggaagccgctgaagcttgctgctgggatgcagccatcttcctcgcgtagaccgccggaagtgcgttacgactgcgtctctccccgttgcttttcagcatccctatttctagtccccgtttgctagttagtcccgccccctaggcaattaagccaatggaggggaaggaggtgccccaacgttacgtcactctcaaatctgcgtccagactgagatatctctccaccaatcacagaagcacctctctccc

SEQ ID NO: 2346 - DNA, 593 bp, Homo sapiens
  MAP TO CHR3.1; EXPRESSED IN FETAL LIVER, SIGNAL = 1.6; EXPRESSED IN BRAIN, SIGNAL = 2.2; EXPRESSED IN HEART, SIGNAL = 1.7; EXPRESSED IN ADULT LIVER, SIGNAL = 2.7; EXPRESSED IN BONE MARROW, SIGNAL = 2.3; EXPRESSED IN PLACENTA, SIGNAL = 1.7; EXPRESSED IN LUNG, SIGNAL = 2.4; NT HIT: U66059.1, EVALUE 5.70e-01; SWISSPROT HIT: Q48303, EVALUE 5.80e+00
agggttctgaggatgagacgtgaaggcctgaggcaagtgacactgagctgcttaccaccatgacaaggcatctgcacaaacacccatccttttgttcttgccagctctatgtgggtggcagaggttggaataatttcattaccagagtctatcagccttgacagtgtctctctaagattgcctttttcatgatcattttgtttgtttgcctgaaatggaattcaggtagataaggaatggggtagtgcaggggtagctattaacctttcaaaagataacatgacaggaatgaatcatctacccccacaccctgattcccaggtttgtttttgctttcttttttatcctctaaataataagagaaaatttcaaaggagaaagagttccttatggctagtaaagttgagaaccatcataatataaggttgagaccacaactctgggatagaaataggaatctttcaaaaatgctgggccaagatttcaattttgttattttactcacagtatggtaaggccaaaggaatatgagacatcagcattttacagattgagagatgaagccccaaagacggagtgtaagttgcccaagc

SEQ ID NO: 2347 - DNA, 509 bp, Homo sapiens
  MAP TO CHR3.1; EXPRESSED IN BONE MARROW, SIGNAL = 0.82; EXPRESSED IN HEART, SIGNAL = 0.9; EXPRESSED IN ADULT LIVER, SIGNAL = 0.77; EXPRESSED IN BRAIN, SIGNAL = 0.77; NT HIT: AF373412.1, EVALUE 4.80e-01; SWISSPROT HIT: P52498, EVALUE 1.90e-01; EST_HUMAN HIT: AU123128.1, EVALUE 1.20e-02
ttccttaatttggggccttctgtatgcaagggtgttcctcggtattttaaaatacctgtagtgttttaaaatatatatatatgttagacagtatcttcctgtctgtaaaggactgtggttctgtaccgatgctactatgtgtaaacaaatgctttctgaaaacacaactaatgctctgtttcctttgaaacgatatttcccagcaaagaaaaggtctgatcgtcctgtacacagctataaacacgtacaaatccaatgactggtacattcctcttatcttcactctgatggctattttctttgctgggttgatttcctgggtatgtttcctgctttggaaatatgggaacattatggaatgctgtcagaaaatgaccaaggaagtctccaaggccaaacccaagtatgtgatttttctttctaagcttttgatataaagagctaaaaccagttgaggtttggtaaacttactctaaggacttatgtatgcttttgaagggcagaggaaa

SEQ ID NO: 2348 - DNA, 543 bp, Homo sapiens
  MAP TO CHR12.1; EXPRESSED IN BRAIN, SIGNAL = 1.4; EXPRESSED IN BONE MARROW, SIGNAL = 1.5; EXPRESSED IN HEART, SIGNAL = 1.5; EXPRESSED IN ADULT LIVER, SIGNAL = 1.9; EXPRESSED IN LUNG, SIGNAL =   3; NT HIT: gi15306928, EVALUE 4.00e-97; SWISSPROT HIT: Q99622, EVALUE 6.00e-29; EST_HUMAN HIT: BI767389.1, EVALUE 0.00e+00
gtctgttctccgacgcctacccgggacgcctccctgggatgcttctggcgcgcagtggtcctcgcggaggtgatccaggcgttctccgccccggagaatgcagtgcgcatggacgaggctcgggataacgcctgcaacgacatgggtaagatgctgcaattcgtgctgcccgtggccacgcagatccagcaggaggttatcaaagcctatggcttcagctgcgacggggaaggtgggtcagacgcgggaaggcgggtcagacgcgggaaggcgggagttgggtcgggagagggcgccggatctgtgggcccatgagcggttgtcccctttctcgccacacggcggcagccacaatctgactaacattcttggcactcagagcccagggtctaccctgagcttgtgcgtccgagttgcgttttgtacagtagaggttctgtatcccttacccgaaatggttgggaccggaagtgtttcgggttttttcagatttcggaatatttacatatacatggatatcttgggggatgggacctaaatctg

SEQ ID NO: 2349 - DNA, 536 bp, Homo sapiens
  MAP TO CHR19.1; EXPRESSED IN HEART, SIGNAL = 4.7; EXPRESSED IN PLACENTA, SIGNAL = 6.5; EXPRESSED IN LUNG, SIGNAL = 5.7; EXPRESSED IN FETAL LIVER, SIGNAL = 5.2; EXPRESSED IN BRAIN, SIGNAL = 6.2; EXPRESSED IN HELA, SIGNAL = 6.7; EXPRESSED IN BONE MARROW, SIGNAL = 7.7; EXPRESSED IN ADULT LIVER, SIGNAL = 0.6; NT HIT: gi15302322, EVALUE 0.00e+00; SWISSPROT HIT: Q60847, EVALUE 2.30e-02; EST_HUMAN HIT: BE541091.1, EVALUE 0.00e+00
agctctcttctctccccaggacccaggctgtggatcacggggcctgccagcttgagtgtagagggaggggggactctacccttctcagccccaccagcccccctctgcccaaccacaattttcccttcctccgccttcctctccctctcctgtttacactccccaaatgcgcacaggctgttatcatgggtcctgagtcatcccacacacagcctgccccagcgtccctgcccccagctggccgcagggcccgccccatggagccccctgccgccctgggctaatgggagccagatggccgcctggtgactcagccaccgggcctgtgggaacccaggcgtcccgccttcccatgcccccacacccggctcctgctcccccagcagacacacacaggagggcctggccactgttgagggggcacacagggcaagggtcaccaagtcggggcctagggactcctcatgcctctgagatggaatggtggtatcctgccgtggccaagcctgaaggaccctcaaaactgcctcctggag

SEQ ID NO: 2350 - DNA, 519 bp, Homo sapiens
  MAP TO CHR8.1; EXPRESSED IN BONE MARROW, SIGNAL = 0.91; EXPRESSED IN ADULT LIVER, SIGNAL = 0.95; EXPRESSED IN FETAL LIVER, SIGNAL = 0.8; EXPRESSED IN BRAIN, SIGNAL = 0.84; EXPRESSED IN HEART, SIGNAL = 0.87
tgggaataattagccacaacgggtggtataaatccaaagagaaaaataattcatcaactttaaagcaactcatttaaaactgggagtgtggtttatttgacctgcatttgggagcaaatgttaatgaagaagtaaaggcaacttatggctttttcagttctttcatttccctctagatgtctttgatagaaactaattatcaatgctcttgatttaatttggaaaaaaattggatgaaggtttttcttaagtcccatgtcactgttcataacctgggagagctaaaattcacctctgatccttcatcagtaactgctctagtcagtagagtccgaggagtccactttggaaaacaagaaaaattattattatggtgattattattttttaaataaaaatttcttgtgggaatgcagaaagaccagaggaaattttcccagtgctaaagttgcttttattaacccattaagcagataaacaaaactttcattaattgaaacccaaccaaattgaaccctt

SEQ ID NO: 2351 - DNA, 511 bp, Homo sapiens
  MAP TO CHR9.1; EXPRESSED IN BONE MARROW, SIGNAL = 1.8; EXPRESSED IN HEART, SIGNAL = 0.95; EXPRESSED IN PLACENTA, SIGNAL = 1.4; EXPRESSED IN LUNG, SIGNAL = 0.83; EXPRESSED IN HELA, SIGNAL = 1.8; EXPRESSED IN BRAIN, SIGNAL = 1.6; EST_HUMAN HIT: BE731749.1, EVALUE 1.00e-123; NT HIT: U80802.1, EVALUE 0.00e+00; SWISSPROT HIT: Q64249, EVALUE 9.00e-42
gttttgaatgaaggatgggccatcagagccatcagcaccactcacccttccggttcatccccatctggaggcatttgagcaggcggcagtactggcacctgttcctctgcttccgagacatgacacagttcttgtcacgactgcatcgatatacccgtttgttgcaaatgctccgcttgaaaaaccctttgcagccctcacaggagatgatcccatagtgcaagcctgtagcgcggtccccacaaatgagacaggttcgttgttcagcccgatcatctgaaacagaaactgatcatgttcaagttagaacacagtggaaataatggctttaagcctacagttcctaaagtgagcaactctgctctgggtagattaagaccaccactatctccaggctaaagggcaaacagggggcccatcttcggatccttgtcccaagagtagtccctgtatctgtggttgcagataccacaacacagtctacctaaactcttcctcctgggtttcatca

SEQ ID NO: 2352 - DNA, 551 bp, Homo sapiens
  MAP TO CHR19.1; EXPRESSED IN LUNG, SIGNAL = 1.2; EXPRESSED IN HELA, SIGNAL = 1.2; EXPRESSED IN BRAIN, SIGNAL = 0.96; EXPRESSED IN HEART, SIGNAL =   1; EXPRESSED IN FETAL LIVER, SIGNAL = 0.96; SWISSPROT HIT: P06924, EVALUE 3.50e-01; EST_HUMAN HIT: AL043875.1, EVALUE 0.00e+00; NT HIT: AF200923.2, EVALUE 0.00e+00
ttgctgagatgatcgtggagggagcacatcttcaagtgtagatggtccagagtggccatcttctccctgtcatgaggcagcggggagttgatggcggcatggctaggtgctggggtgttggagtggaaggggagatcaggccctttccccaagatctcaccctcctcccatgccctcagcctccttcctcactctggcttcatcttgtctgtcagcagtaggttcttggcccgcagggcctcgtcttgggccagccgaagggtggagctcagggcctctgccctgacgtgtttggctaaggcctggcgctccagctcctggggagaggagcgtaggcgtagctgggcttgctggactgggctgggggtggagggggaactggattgcggagggcaaagggtagggtcccatggggcccacatttctccctcagagtttcccatcatgccttgagcttgagactgaccccagcatcccacaatgcactggtctccagattccgctgtggactaaatctgtgtctgtcctattgtctgtcccatgatgcactg

SEQ ID NO: 2353 - DNA, 533 bp, Homo sapiens
  MAP TO CHR6.1; EXPRESSED IN ADULT LIVER, SIGNAL = 0.64; EXPRESSED IN FETAL LIVER, SIGNAL = 1.1; EXPRESSED IN BRAIN, SIGNAL = 0.93; EXPRESSED IN HEART, SIGNAL = 0.74; EXPRESSED IN BONE MARROW, SIGNAL = 1.1; NT HIT: gi14742966, EVALUE 0.00e+00; SWISSPROT HIT: Q9NVP1, EVALUE 7.00e-80; EST_HUMAN HIT: BG117955.1, EVALUE 0.00e+00
ttctggtagccaaatccaccaccacccccttgctttttctgcttggcttcattgcagttgatgttcagatcaacaaagggagtcaccttgaaaccaaatgacagagcaacttgaggcaaatttaagttattaacattaaagatctgtttcagagaatggtaatcataggcttgtatgtacggcttatatggtttctgggctgacttacgaagaaagtagttcttttcaatcaatttctcaagctgggacttaatgtcagaaattttagaccagaaaaattctaataaactcaatggaaccttggattgtttcaagtagcgaagaaaacccaattattctgggcacaaaatgagcagggcatgccctctcccatttaggcctctggctgttctgcccacacaatgaatatattccttagggtcatccggagggtcatactgaacaatccagtcaacttcaggaatgtccagtcctcttgttgccacatccgtacacaatagtgttcctgaatctgggttgcagaactggaagaa

SEQ ID NO: 2354 - DNA, 556 bp, Homo sapiens
  MAP TO CHR22.1; EXPRESSED IN LUNG, SIGNAL = 1.8; EXPRESSED IN HELA, SIGNAL = 1.4; EXPRESSED IN BRAIN, SIGNAL = 1.6; EXPRESSED IN HEART, SIGNAL = 2.3; EXPRESSED IN ADULT LIVER, SIGNAL =   2; EXPRESSED IN BONE MARROW, SIGNAL = 1.7; EXPRESSED IN FETAL LIVER, SIGNAL = 1.7; NT HIT: AB003286.1, EVALUE 0.00e+00; SWISSPROT HIT: Q92523, EVALUE 4.00e-28; EST_HUMAN HIT: BG470677.1, EVALUE 0.00e+00
gagtccaaactggcttcagggaggacagagaccacccaccgcccctggggccatctgtgtttagagacagccatgagatggaggaggcactcacaggcccctggagcattttcagcacttccctcttacccacaaagctgagcccggcctctgggggctgattctccctcagactgtcttttgcgtaccctcctcctgaagatgtcttggccggctgtgccctttctccaccagctaaacgtcatgcctcctagacatgacccagagtcctgcttggagagccctaccctcagctgacccttcccatgtcttggcagtgccaggcggtcatcgagagttcctaccaggtggccaaggcgttggcagacgacgtggagttgtactgcttccagttcctgccctttggcaaaggcctcatcaagaagtgccggaccagccctgatgcctttgtgcagatcgcgctgcagctggctcacttccgggtaggagccccgcctcccgctgctgagagggcagggtggtaccagggtccacctgccagattcacccctctgta

SEQ ID NO: 2355 - DNA, 574 bp, Homo sapiens
  MAP TO CHR5.1; EXPRESSED IN BONE MARROW, SIGNAL = 0.66; EXPRESSED IN ADULT LIVER, SIGNAL = 0.58; EXPRESSED IN FETAL LIVER, SIGNAL = 0.49; EXPRESSED IN LUNG, SIGNAL = 0.99; EXPRESSED IN HELA, SIGNAL = 0.43; EXPRESSED IN BRAIN, SIGNAL = 0.67; EXPRESSED IN HEART, SIGNAL = 0.96; NT HIT: AF061282.1, EVALUE 2.20e+00; SWISSPROT HIT: P53045, EVALUE 1.10e+00; EST_HUMAN HIT: AW444703.1, EVALUE 2.00e-01
tcaaaggaaatgagaaacttgttgaagtctgttgtccaagttatgtttatttttaactttctaagaagatactaagtttgttttttattgtttcagactgagaatgtacaatgcactggctacatttatattagttgccatggtttcaaatacttcagaaattgtccaagaaaggagtggaatttttctcaccatgcaaagatgtttttccctaacttgtttgtgcccacgtaatgtaccagtttgaatcgtctgcttttctcctccccatctgtgctgttttcaaggggcggagaggaaaagaaaagaaaaaagcaggtagaagagagttagacatagtttcattccagcatctattagctcacaatttcatactcttggttgtaaactgaaggcctcttacatagtatagacagcatctataatatgttttgcttttctcaaataattcctacatgaccatataacagtttttgtagaaaaggcagggcaaagactactaattctcaagaggctgaactgtcagaagagattttatgctaacagttttattcctgctgttgctgctgttgtt

SEQ ID NO: 2356 - DNA, 577 bp, Homo sapiens
  MAP TO CHR2.1; EXPRESSED IN LUNG, SIGNAL = 2.6; EXPRESSED IN HELA, SIGNAL = 1.6; EXPRESSED IN BRAIN, SIGNAL = 1.5; EXPRESSED IN BONE MARROW, SIGNAL = 1.7; EXPRESSED IN HEART, SIGNAL = 2.6; EXPRESSED IN ADULT LIVER, SIGNAL =   1; NT HIT: gi14738455, EVALUE 1.00e-112; SWISSPROT HIT: P54925, EVALUE 8.00e-12; EST_HUMAN HIT: BI913754.1, EVALUE 1.00e-126
ctgtgctttccctccatttcaggcaccctttcttgggccgcgaggtccctatctcgaacggctcaggattcgtggtggctgccgatgggctcattgtcaccaacgcccatgtggtggctgatcggcgcagagtccgtgtgagactgctaagcggcgacacgtatgaggccgtggtcacagctgtggatcccgtggcagacatcgcaacgctgaggattcagactaaggtgggggctggggtaggccaggtctggttggagctgcttatttgctcgcatcttcagatgacaggtctcttttacccattctcccttaggagcctctccccacgctgcctctgggacgctcagctgatgtccggcaaggggagtttgttgttgccatgggaagtccctttgcactgcagaacacgatcacatccggcattgttagctctgctcagcgtccagccagagacctgggactcccccaaaccaatgtggaatacattcaaactgatgcagctattgatgtgcgtcctgataggagagaaatgacaaatgatgggggaggggggagaggctgtgtggtacaagca

SEQ ID NO: 2357 - DNA, 547 bp, Homo sapiens
  MAP TO CHR7.1; EXPRESSED IN LUNG, SIGNAL = 1.5; EXPRESSED IN BRAIN, SIGNAL = 0.92; EXPRESSED IN HEART, SIGNAL = 1.1; EXPRESSED IN ADULT LIVER, SIGNAL = 0.63; NT HIT: AL139076.2, EVALUE 8.10e+00; SWISSPROT HIT: O89107, EVALUE 7.80e-01; EST_HUMAN HIT: BG675396.1, EVALUE 0.00e+00
tcagggttctgtcctcatcctggctctgtggccctgccacatggggttcaaggacctcagcaggcatctccagtgcctggacagattccaattcacagagcacaggtgccaccaacatttcaaaacaattaccatgggtcagggtggcattaaaatggactccaaaaacatttttttaaatgttctgtaagataaactgtatatttcatatgtacctgttaaggtactttttaaagcttgtacatgaacctttgtataaaaaacaccagtgctctttcgttgtatttttctcatttttgctttttaaaattcctttaaaaaatgtgctgttaagccagtattaggtatctttattttgtaagtgaacattccagctgtttttttctggcagatctgatgctgatttgatgctgtatgatcttttttttttttttagttaaattcatttagtgaatgttctattattttatacatacacattaagtactcagctaagtaatggcactatgaggattttttttttctttcctgtcagcagcagttctgt

SEQ ID NO: 2358 - DNA, 549 bp, Homo sapiens
  MAP TO CHR17.1; EXPRESSED IN HELA, SIGNAL = 2.8; EXPRESSED IN BRAIN, SIGNAL = 3.4; EXPRESSED IN HEART, SIGNAL = 2.9; EXPRESSED IN ADULT LIVER, SIGNAL = 4.9; EXPRESSED IN LUNG, SIGNAL = 4.1; EXPRESSED IN FETAL LIVER, SIGNAL = 3.4; NT HIT: gi14774937, EVALUE 7.00e-93; SWISSPROT HIT: Q92791, EVALUE 2.00e-40; EST_HUMAN HIT: BF316883.1, EVALUE 0.00e+00
ctactcactgatccagccccttggacactcccagctggggcccctgcacccagcgtctttctcaacagacaaggccttcctcccggctggctcctccgcattcgcagtgctccacgtgcatgaaggggacatctgccttaccgggccctgtgggtgagaggaccgcccaccgtggtctgggtggcagatacctgctatggccgggtagaagtccttgaagtccacctgctcatgggccccttcacagccggccaggcaccgggcaaagactgccaggtactctgacaaggcccgctccatgtcctccgtgctgctgcggaaatccccgctgttgtagagcttcacagcccggaggaacacggcctggaaggggcgtggcagggggagtcagggcgcccccaacatctcccctcctctactagccctcctctacaagcctcctcctgaccctccaccccacctcgtagggctgggcctctaggtccgtgagggactcgtcggcgacgtccagcatcccctgatagtagttgagatacttggcggtcagct

SEQ ID NO: 2359 - DNA, 554 bp, Homo sapiens
  MAP TO CHR17.1; EXPRESSED IN BRAIN, SIGNAL = 0.64; EXPRESSED IN HEART, SIGNAL = 0.73; EXPRESSED IN ADULT LIVER, SIGNAL =   1; EXPRESSED IN BONE MARROW, SIGNAL = 0.77; NT HIT: gi14785740, EVALUE 0.00e+00; SWISSPROT HIT: P48982, EVALUE 3.50e-01; EST_HUMAN HIT: BG574411.1, EVALUE 0.00e+00
gaatttctgcttggacactgcatagctgctgggaaaatgaacatcagtgttgatttggaaacgaattatgccgagttggttctagatgtgggaagagtcactcttggagagaacagtaggaaaaaaatgaaggattgtaaactgagaaaaaagcagaatgaaagggtctcacgagctatgtgtgctctgctcaattctggagggggagtgatcaaggctgaaattgagaatgaagactatagttatacaaaagatggaataggactagatttggaaaattcttttagtaacattctgttatttgttcctgagtacttagacttcatgcagaatggtaactactttctgatttttgtgaagtcatggagcttgaacacctctggtctgcggattaccaccttgagctccaatttgtacaaaagagatataacatctgcaaaagtcatgaatgccactgctgcactggagttcctcaaagacatgaaaaagactagagggagattgtatttaagaccagaattgctggcaaagaggccccgtgttgatatacaaga

SEQ ID NO: 2360 - DNA, 501 bp, Homo sapiens
  MAP TO CHR17.1; EXPRESSED IN HELA, SIGNAL = 3.1; EXPRESSED IN BRAIN, SIGNAL = 4.1; EXPRESSED IN BONE MARROW, SIGNAL = 4.4; EXPRESSED IN HEART, SIGNAL = 3.2; EXPRESSED IN ADULT LIVER, SIGNAL = 2.1; EXPRESSED IN FETAL LIVER, SIGNAL = 3.7; EXPRESSED IN LUNG, SIGNAL = 3.2; SWISSPROT HIT: P11086, EVALUE 2.00e-67; EST_HUMAN HIT: BI457762.1, EVALUE 0.00e+00; NT HIT: X52730.1, EVALUE 0.00e+00
accaggtacagccctcacagcccaaccttctgagcccaggcgaagaagacgcccttgacatcatctacgcctgtctgaaggtgggcaggcatgatataggtgcggaggtcccggaccttgtagccactacgcaccagggcctccctcacctcctcctcagacactggcaccaccgtcagcctggcctccccagccaggtaccacgactcctccagggccccgatgaggaggaggtgccccccaggcctcagcagcgtggtgatgtggtccagggcccgctgaaagctggcaagatctgggctcacagcctccaagcagaaggcagagaccagggcgtcagcaggcaggggagctgggctcccagcacccaggggctggggctggtgcacgtcgatgggcaggacccgtttcaccctggctcgcaggcgctccttatcctgccagcattccctgtgcaggaggcacaaggcagggctcaaggctgttctacgctcaggcctc

SEQ ID NO: 2361 - DNA, 599 bp, Homo sapiens
  MAP TO CHR22.1; EXPRESSED IN ADULT LIVER, SIGNAL = 0.47; EXPRESSED IN BONE MARROW, SIGNAL = 0.66; EXPRESSED IN FETAL LIVER, SIGNAL = 0.7; EXPRESSED IN HELA, SIGNAL = 1.5; EXPRESSED IN BRAIN, SIGNAL = 0.49; SWISSPROT HIT: Q9TLT9, EVALUE 8.80e-01; EST_HUMAN HIT: AW939097.1, EVALUE 8.00e-66; NT HIT: gi14777127, EVALUE 5.00e-66
tttggccatctccctacaagccacatagctgggcccagcctgcgttcccaatcacccacacttcactgaccatgcccagcaggctgggataggagatgtagctgggacgaccccacccctgcccacaaagccacacaagtggcccaggagagaggcagctgtgagcaacagcagagctgcccagctctgccccctctgagcacagagcctcaggaatacgctccagggtggcagcacaggctgccctgggacctgctgatggccagttacctgcttgaccatcttgctgctctcacggccatacatgcgcagtaaagacccccagttcttgacatgtgggtgcagcagctgaaggatcttctgtgaggctaactgctttccaactctcttgttcttacctacacagagaaagagcaagcatggagagggggtcacaaacacccagtgctcatggggccccctgccgctcccagccctcctgacccacaccccgagggccagccagggcacattctacaggaataggcagcactctgccactgctctgggcacctgagtctcacagtacccagctgccaccttgagagagtggccctcag

SEQ ID NO: 2362 - DNA, 515 bp, Homo sapiens
  MAP TO CHR11.1; EXPRESSED IN BONE MARROW, SIGNAL =  13; EXPRESSED IN ADULT LIVER, SIGNAL = 8.4; EXPRESSED IN FETAL LIVER, SIGNAL =  11; EXPRESSED IN BRAIN, SIGNAL =  10; EXPRESSED IN PLACENTA, SIGNAL = 9.1; EXPRESSED IN LUNG, SIGNAL =  16; EXPRESSED IN HELA, SIGNAL = 6.1; EXPRESSED IN HEART, SIGNAL =  13; NT HIT: gi16184410, EVALUE 1.00e-54; SWISSPROT HIT: P39192, EVALUE 7.00e-03; EST_HUMAN HIT: AL574309.1, EVALUE 0.00e+00
acagacagaccaaagtggggagcacgcgatcctctcaaaggacaggtggttccagctcagggctgcacatctccgcagacgggccctggtcaggatgcattagctcagcctcccagggggtgaaggtccccaggaggggagacacaggctacaactgacctgatgtaggtggactggtctcggaaggtgtcacacagggagtttccatcgagccagagctcttctagcttcagcccctttatcttgtccaattcccgctcagacttcaactgcaaagggtggaaggaacaaagggaggagaccctggtgaagacagccagctggctccccatacccccagtccctacgcttagctctgagatcttttctaatcttttaaaattttttcttttttttttttttttgggacagggtctcactctgtcacccaagttcagtgccgtggcatgatcatagttcactgcagcctcaaactcctggactcaagagatcctcccacctcagactcctgggta

SEQ ID NO: 2363 - DNA, 586 bp, Homo sapiens
  MAP TO CHR12.1; EXPRESSED IN LUNG, SIGNAL = 3.3; EXPRESSED IN BRAIN, SIGNAL = 1.5; EXPRESSED IN HEART, SIGNAL =   2; EXPRESSED IN ADULT LIVER, SIGNAL =   2; EXPRESSED IN BONE MARROW, SIGNAL = 1.2; EXPRESSED IN PLACENTA, SIGNAL = 4.2; EXPRESSED IN FETAL LIVER, SIGNAL = 1.3; NT HIT: U23851.1, EVALUE 1.00e-97; SWISSPROT HIT: P54258, EVALUE 2.00e-13; EST_HUMAN HIT: N95730.1, EVALUE 1.00e-123
aatcccaattccaccctaccactggcaacttacagaactgggtgtgttacctcactttttagttcattacctttgtatgtaaaggagctggctatcccctggtccagagcaggtacttgttatccgttggtcatatgccccttgcccttcctgctcacagctgccccttaccgggacctgccggcctccctttctgccccgatgtcagcagctcatcagctgcaggccatgcacgcacagtcagctgagctgcagcgcttggcgctggaacagcagcagtggctgcatgcccatcacccgctgcacagtgtgccgctgcctgcccaggaggactactacaggtaccctagggtgccccagcccaggggacatgggctcagcgagcctgggaggagctgtgggcatggtacggctgggcaccgtgctcctgggggagggaacccctcctctcccaaccccttcggtaagagggggcaaggtcagagttggtctcaagtctcttacctctctgctatgcactgccccttccctagtcacctgaagaaggaaagcgacaagccactgtagaacctgcgatcaagagagc

SEQ ID NO: 2364 - DNA, 523 bp, Homo sapiens
  MAP TO CHR3.1; EXPRESSED IN PLACENTA, SIGNAL = 2.7; EXPRESSED IN FETAL LIVER, SIGNAL = 2.5; EXPRESSED IN LUNG, SIGNAL = 1.6; EXPRESSED IN HELA, SIGNAL = 3.8; EXPRESSED IN BRAIN, SIGNAL = 2.5; EXPRESSED IN BONE MARROW, SIGNAL = 3.2; NT HIT: gi14737669, EVALUE 1.00e-105; SWISSPROT HIT: P51178, EVALUE 5.00e-34; EST_HUMAN HIT: BG766678.1, EVALUE 2.00e-96
ctgagcacatcgcagaagaggatcttggaagtgaaagtatagccgtggtagatgattggttcctggtttgggcccgtccagcagtcaagctccaggcatcggcagcctttgcacagtgccctgcgggaagggtggtggctaggacccgccaggtctggtcccgggtcccacccagactcccgacccaaggctccctgagcagcaccggatgtaggcttcagtgctgctgggcccggctagctggtcctccacaggtaggtgttgtgtgaagaggacaccaggtagtggctaagtggctggcccatgtcctggtagacacggcggtgtgccaggctgaaggcgctgcgtcagcgacagtaagtacatgaggaagccgtccttggtcatctgccgctgcgccttggctgggagggaggaggccactgccgtcagagccagcctccagcaggcgctcctggctgcccacccatctggacagaggagccctctgaaccgcttgcctgcctgtcctgagccagtcttc

SEQ ID NO: 2365 - DNA, 565 bp, Homo sapiens
  MAP TO CHR16.1; EXPRESSED IN ADULT LIVER, SIGNAL = 0.49; EXPRESSED IN FETAL LIVER, SIGNAL = 0.6; EXPRESSED IN BRAIN, SIGNAL = 0.76; EXPRESSED IN HEART, SIGNAL =   1; EXPRESSED IN BONE MARROW, SIGNAL = 0.68; NT HIT: D38554.1, EVALUE 8.00e-68; SWISSPROT HIT: Q13202, EVALUE 5.50e-02; EST_HUMAN HIT: BI826757.1, EVALUE 0.00e+00
gtgagctccacttgcctttcatcctgttccctcctgcgctctctcctgtctcaggtgaccaagaatatggcccaggtgaccaaagccctggacaaggccctgagcaccatggacctgcagaaggtctcctcagtgatggacaggttcgagcagcaggtgcagaacctggacgtccatacatcggtatgtggcccctacccttggggctgtggcctggggacaaggagcgtgtgtgggcagctcatcgggaggggtggctcacaggctgacgtgctgtctctgcatacctgtggttgctccctgacgtcaccaagcatcctctgtgctgggtccctgccaggaccctgacaggtagggtgggcagggcggcgggggcctcctgcaggcacctggctccttgtggggaggctcggatggcagacaagcatgcagaggtgtggaaagatgtccacccgcggcagcaggcatggcacagtcagagggtggggctgggtgggggggcaggaaaggctcctggtggaaggtgagacagagagagtcactgagagaacagggcaagaaggtg

SEQ ID NO: 2366 - DNA, 600 bp, Homo sapiens
  MAP TO CHR10.1; EXPRESSED IN LUNG, SIGNAL = 0.99; EXPRESSED IN HELA, SIGNAL =   2; EXPRESSED IN BRAIN, SIGNAL = 2.1; EXPRESSED IN BONE MARROW, SIGNAL =   2; EXPRESSED IN ADULT LIVER, SIGNAL = 2.4; EXPRESSED IN PLACENTA, SIGNAL = 1.7; EXPRESSED IN FETAL LIVER, SIGNAL = 1.4; NT HIT: AF143312.1, EVALUE 0.00e+00; SWISSPROT HIT: P14590, EVALUE 3.40e+00; EST_HUMAN HIT: AA021528.1, EVALUE 1.00e-101
gtctcagtcctttggcttgctcttagggtagcaggcgaggagtggcaccagtttggggactctctccccgcgttctgtaagaatcggcggcagccagcaggcggggaggcgggggcacgtgtttggatgtgggtgcttgtgtaaccagttccccaagcgccagccccgacagcgctccttcgggaggctggtccgagcccctgtttccgccgcggcgcaggaagggttggggttccgctgcctgcaccaggcaagagcaccccgagcaaaggaagaagacgacttgcctccggagctatcactggggagtgggaatttggaaagttccccaactagggacacacgtgacctccttcggaaagtagttccgactgtggcccgtgtatccttccacctccttttgaaccctcctaggtctcctcgccccgcccactcgctgggctgcagcttcctaccgttccgtactttccactcaacccggtaaccccaaacgtgcacggtccggccggggcgcgcggagcctggccccgggcgatccatcctgccgggttttcacggcggccaagggggggcggggctaggtggtctctgagaaccgag

SEQ ID NO: 2367 - DNA, 598 bp, Homo sapiens
  MAP TO CHR19.1; EXPRESSED IN FETAL LIVER, SIGNAL = 5.2; EXPRESSED IN BRAIN, SIGNAL = 5.2; EXPRESSED IN LUNG, SIGNAL = 3.7; EXPRESSED IN HEART, SIGNAL = 3.5; EXPRESSED IN BONE MARROW, SIGNAL = 6.8; EXPRESSED IN ADULT LIVER, SIGNAL = 4.9; SWISSPROT HIT: Q02818, EVALUE 8.00e-12; EST_HUMAN HIT: BG398396.1, EVALUE 1.00e-92; NT HIT: U31342.1, EVALUE 0.00e+00
atggcggtgaatacttgaggctcccccagtgattaacatggtggccacaggccttcccagcttctggacacccatggggacacggacacgggcagccagagattcagtggatggaagcagcttcccccgctgtcacctgctgcagctctctcttctgggcctccaggcggccctgggaccgccctagagcctctgtctcctggctgaggcgctgggccttggcattcagctctgcctcccgggcagccagctcctcttcaaagcgcctcagctcttcctcggtgtaggcagggtgcatctccactgtctgcagggcaggcacaggggccatcaggggcacaggtccaacctcggcccacccatgttggagagggttgtgccaatgggggaggtgtagaggaggctgggaggccagggccatgtgggtgggcaaagaagcccaagtgggaggtgggagtgggataaagaccgagagacaaggccgggcaccatggctcccacctgtaatcccaggactttgggaggcgaaagtgggaaggatcacttgacgccaggagttcaaggtcagcctgggcaacggagcgagaccctgtctcta

SEQ ID NO: 2368 - DNA, 600 bp, Homo sapiens
  MAP TO CHR2.1; EXPRESSED IN HEART, SIGNAL = 0.47; EXPRESSED IN BONE MARROW, SIGNAL = 1.2; EXPRESSED IN ADULT LIVER, SIGNAL = 0.61; EXPRESSED IN BRAIN, SIGNAL = 0.97; EXPRESSED IN LUNG, SIGNAL = 0.73; SWISSPROT HIT: Q64317, EVALUE 2.60e+00; EST_HUMAN HIT: BI011235.1, EVALUE 8.00e-66; NT HIT: gi13636901, EVALUE 2.00e-68
aggaacctccttccacatccatcccccagtcacaattcccggggggttaggggctgcaacggggcatggggcgggggttcccgttacctcataggaatcccggatcaggtccgaaatatcagtcacagggtagggctcctggtcgtcggagaaaaaggcatggtggctgccaactgggggccctgggctgtcctcattcttaatgtgatctagaaacctgaacacaccgccccgtcaacgcccaagtccatcctcattcgggtaccacaacacgggctgccttcacagtgtcagacatgccagggcacttccaaacaccaacacctgggaggagggcaaggctgcagctgctcggcttattttagagaagcgagaggcagtcatgaagcccggcttgtggattgggctccacaggtggctttccaggcctgaaactctccagtgaagtaagcccaacattctgcgcatacatgcaaggttaagcttccatcatgctctgaaagagaaccccctctttcaatgtcatctgacttgccctcagctcctagaaagcccagctctggcgctcaacctagtgggccttttccctcactgctgctc

SEQ ID NO: 2369 - DNA, 599 bp, Homo sapiens
  MAP TO CHR19.1; EXPRESSED IN PLACENTA, SIGNAL = 1.7; EXPRESSED IN FETAL LIVER, SIGNAL = 0.78; EXPRESSED IN LUNG, SIGNAL = 1.6; EXPRESSED IN BRAIN, SIGNAL = 0.77; EXPRESSED IN HEART, SIGNAL = 0.95; EXPRESSED IN BONE MARROW, SIGNAL = 0.85; EXPRESSED IN ADULT LIVER, SIGNAL = 1.1; NT HIT: gi14760508, EVALUE 0.00e+00; SWISSPROT HIT: P54842, EVALUE 3.00e-01; EST_HUMAN HIT: BG680205.1, EVALUE 0.00e+00
tagtccattccctccaccagccacccacccaccacccctaggagtccaggtctcgggactttcactcccctgaacttgactcctccacctttaggaatctgtaaggcaagttcccagccctttctcggggatttgggaagccgtttcccaggcaacggtggccttccatcgtctgaactacaacttccatcatgcccaggggctcctagagtagcgtgtgaacggaccccgccccaggagttgctggggtttgtagtttttttcttcctttgggtgtgacgcagcctcggctcttcccgatgcaactacctcactcccactttcagactctaaccgcgccgccttcggcctcacaggggacatcttcgaaagcttctcctcgcacccgcccctcatcctccccctggggagctcgcgcctgcgcctcactggtccagtgacggacgatgccttgcaccgtgaactccgtaggctccgccgcctcctctgggatcttgagcagcaggagctgccagccaattatcgccatgggcctcccgtggccacgtctccttgagaaccaataccaaacgagcgcgcgaaccttgaaatgtcacggg

SEQ ID NO: 2370 - DNA, 536 bp, Homo sapiens
  MAP TO CHR20.1; EXPRESSED IN BRAIN, SIGNAL = 2.2; EXPRESSED IN BONE MARROW, SIGNAL = 2.2; EXPRESSED IN HEART, SIGNAL = 1.2; EXPRESSED IN ADULT LIVER, SIGNAL = 1.6; EXPRESSED IN PLACENTA, SIGNAL = 1.7; EXPRESSED IN FETAL LIVER, SIGNAL = 1.9; EXPRESSED IN LUNG, SIGNAL = 1.2; NT HIT: gi5453572, EVALUE 1.00e-97; SWISSPROT HIT: Q9Y6D5, EVALUE 6.00e-28; EST_HUMAN HIT: BF909315.1, EVALUE 2.00e-97
tgagccagtagaaagcctgcttcaacacaatttaattgtttcgagtgatttggatttcatagaactgttcattgtttttcaactaacagccataggagttggctcttcataataatcacctagtttaatttgcagagccatcttacaatttatttgaaaaaagcacacagaaaagaaaaacaaaaccagaccctctagaaaagtgtggccataggagggcaggaaggtgatgtgcgttcctgatggtgaaggtcgcggatttctattttaggctcttctgactgcagtgacttccccacacattgaaattcatgagggtactatcctgcagacagtgagaacatgttacaatatctatttggccagcaaaaatctcatcaatcaaaccactgccaaggctacccttactcagatgctgaacgtcattttcacccgcatggaaaaccaagtggtgagtgacagcacttacgtgctaggggcaagacatcattgctctctgaactctatcatgtgtgaccttggtgcctgtgaagaat

SEQ ID NO: 2371 - DNA, 595 bp, Homo sapiens
  MAP TO CHR7.1; EXPRESSED IN ADULT LIVER, SIGNAL = 2.9; EXPRESSED IN PLACENTA, SIGNAL = 3.4; EXPRESSED IN FETAL LIVER, SIGNAL = 3.6; EXPRESSED IN HELA, SIGNAL = 4.2; EXPRESSED IN LUNG, SIGNAL = 1.9; EXPRESSED IN BRAIN, SIGNAL = 3.5; EXPRESSED IN HEART, SIGNAL = 2.1; SWISSPROT HIT: P23523, EVALUE 1.10e+00; EST_HUMAN HIT: BF883142.1, EVALUE 3.00e-93
gcagatgtctcaggtcccacagggaggtataatgttctctgtgtatagcaacaaatattatatttgtttttgtgagagcatcttcatgatgagtgacatctaccacatgaggaaaaaattcagaagcaaacttaggatttctacttcctatgaccacatgatagccgcatctaataagtcgaatggtcaaggatttggcaaaatctccacttccaatcacacctacagtgaccttccttgcatctttgataccatttatgccattaggtaaaaaagtttcactaaggctcttagggcttcccatcatagagattgattccatgatacggacacttccaagatcaccaagaatatcctaggggagagaaaataaaatggtcatcagttacctattactgaacattaaaacacttctagacattgtaatgtcctgtctttctagaggtaaaatatttcaccacactttaacatacagcacagtaagacacaatttgtaagctaaaaaaggatcactattctggtttctcttcataaatcttttggcttttaaaaaagcatctcaataggaaaattaactgtcacaaaggtgaggtgc

SEQ ID NO: 2372 - DNA, 550 bp, Homo sapiens
  MAP TO CHR7.1; EXPRESSED IN BRAIN, SIGNAL = 0.48; EXPRESSED IN HEART, SIGNAL = 0.85; EXPRESSED IN BONE MARROW, SIGNAL = 0.57; EXPRESSED IN LUNG, SIGNAL = 0.6; NT HIT: gi11421851, EVALUE 0.00e+00; SWISSPROT HIT: P16157, EVALUE 1.00e-08; EST_HUMAN HIT: BE220587.1, EVALUE 0.00e+00
ctggggtaggtaggggtcacaaagtcttgaaaccatgagtgtacaagcagacaacaatgttggccacccagaaaggcttacctctccaaaccaattgcttggcacagagaatggaacttggagttgtacaaaagtgcaaagctgtgtgtccacttaaggagtagcaattgagctttgccccacgatcacagaggatcttaacacaatccacattggccatttcacaagccacgtgaagaggggttttcccattgggtctacagttgattgtagcattgtggtccagtagcaccagaagacattccacatggccaaacaagacagagagatggaggcctgtggcccaggaagacttcaatttatagctaggcaaccagtaacctgaaaaaaaaaaaaaaaaggaaaaggaaagtttaacttcttgacctaggctttctccctgttttgtgaggatttttacaagtattttattttggccacatttataaaagtggggtggagaggggatgacagaggttttaaactaatagctaatgggtctgcaagcgtt

SEQ ID NO: 2373 - DNA, 564 bp, Homo sapiens
  MAP TO CHR7.1; EXPRESSED IN FETAL LIVER, SIGNAL = 1.9; EXPRESSED IN LUNG, SIGNAL = 3.6; EXPRESSED IN HELA, SIGNAL = 1.3; EXPRESSED IN BRAIN, SIGNAL = 2.2; EXPRESSED IN HEART, SIGNAL =   3; SWISSPROT HIT: P52881, EVALUE 6.20e-01; EST_HUMAN HIT: BF723595.1, EVALUE 0.00e+00; NT HIT: AF099810.1, EVALUE 2.10e+00
aatggctctggttctgatggggggtgctaaatccccagcctttgtgcagctaccagctggggatctgaggggtctcctaccatgatgcctagacactggcagcctggctagaagagctctcattctctatcactttcttggtgactagggccagtttgtatggcagcccagtgaggctactcgatttgtattcagtgcacaaaccctgaaaaaaaaccctgccagccagcaactctgaaaggatgctttgtgtgagtgagcagtgtctgagatggacagggactctcctccctcccctgaaaacagcctctctggcccagcaacttattggtgctttggatctggcacagagctcctggggatccctccccaagaggagaccatcttgggatcccagataacactgagcaacttacgccctgtccttcctgccctggcttctggcagtcagcctccatgagccagtcagcaggatccattcaaggtggtgcccgtgtatgcaagagagacagtaagtggaaaaggggggagatgaacatgaacagaccaaccagccaacaaact

SEQ ID NO: 2374 - DNA, 500 bp, Homo sapiens
  MAP TO AL359813.20; EXPRESSED IN PLACENTA, SIGNAL = 4.1; EXPRESSED IN FETAL LIVER, SIGNAL = 4.5; EXPRESSED IN LUNG, SIGNAL = 2.5; EXPRESSED IN HELA, SIGNAL = 4.7; EXPRESSED IN BRAIN, SIGNAL = 4.7; EXPRESSED IN HEART, SIGNAL = 2.3; EXPRESSED IN BONE MARROW, SIGNAL = 4.5; SWISSPROT HIT: P02463, EVALUE 2.40e-01; EST_HUMAN HIT: BE046892.1, EVALUE 5.00e-88; NT HIT: gi16174220, EVALUE 4.00e-88
tttaagaagggggttgggagcactattgaaggtgcatgacctaccccaatgcaaccagcaatgaggcgtttgaattggtcctttcggcgcttgtcagccactttctgcagggaggggtttaaaagcttgcagtcaaactggtccagtgagtccttctgtatttcagggatttgctccattacagctcttatctccaggtacctggggcgctgatatcagcagggataaacttactggatgtaggtttggatattgccaccctccccatttcctgccacacccatttctcagagattgcaccagcaatttggcaggtgcctgaatttaggataaggcccaagagactaggagcagactgagtgatgaagctgcagccatccttcccccatgccttccccactcaccagtgcctcgtatatctggaaggccagatggaccagggaagccatgcacccgtcgtgctgcccgtgcatctgtaagcctttcagcacactggtgaa

SEQ ID NO: 2375 - DNA, 503 bp, Homo sapiens
  MAP TO CHR19.1; EXPRESSED IN BRAIN, SIGNAL = 1.9; EXPRESSED IN HEART, SIGNAL = 0.71; EXPRESSED IN ADULT LIVER, SIGNAL = 1.1; EXPRESSED IN BONE MARROW, SIGNAL = 1.2; EXPRESSED IN FETAL LIVER, SIGNAL = 0.52; SWISSPROT HIT: P23441, EVALUE 1.60e+00; EST_HUMAN HIT: AA988386.1, EVALUE 0.00e+00; NT HIT: gi16177516, EVALUE 0.00e+00
cactgtcagatgacgggttgtttcccaccctggatggagagctcagcacagggtgaggctcaaaggagacacccacggaacaactgagataaaatcaagtactgggtggatagttagggcggcaagtagacaaagggcagggactgcactctgcccgaggacgcagctccaagggattaaggggctgagtcccacccccacccaccatgcaaacacacatcccagcccctgaccttctggccatccagcagcacgcggtctcccaggcgcaagcccagtgcgctaagcatgagattgcctgggacgttgtcatagttgggtagcgtgaccttggggagggcgcaagatagtggcactgcctcttccagaagcgtccgcagctccttggccaccagtgccgcctctgccttgtccagggacatgtccataggatctgggaccacctccgccggcacctgtccttttcgattctgggggccaatgggaaaagaaggcagggactc

SEQ ID NO: 2376 - DNA, 508 bp, Homo sapiens
  MAP TO CHR1.1; EXPRESSED IN LUNG, SIGNAL = 0.82; EXPRESSED IN FETAL LIVER, SIGNAL = 0.75; EXPRESSED IN BRAIN, SIGNAL = 0.95; SWISSPROT HIT: P51841, EVALUE 1.20e+00; EST_HUMAN HIT: BG995290.1, EVALUE 1.00e-113; NT HIT: gi16158658, EVALUE 1.00e-115
gaagaggctgcttgtggaaggaagtttatgaataaggagctgcagaaaaggggagtgaggatccccaaagccagtggaagagaaaagaggaacatagggaaggttacctgctctctccaagctgtgcacacacataaggcagatgatgaccatttgaaagatgagaaggtccgggaggaaagcatatccactctcatactcctcctcatcctcactggccaggctgaggttgggtgaggagggcaggtagaagaggcagaggttgaagtcctccaggactgactggcaaagtgaggtcagctctgagtccacggagctacagaggggcaggagtaacaggggaggtcagtggtgggggctggggaaggagaagagcagggaatacaagattcagagaaaggactatgggatgctgcaggggagacctgagagcacaccagggaagggtagtgctggattgatctccatagcaactaaaacaggggaagggatgtgagtaggcttccca

SEQ ID NO: 2377 - DNA, 587 bp, Homo sapiens
  MAP TO CHR11.1; EXPRESSED IN ADULT LIVER, SIGNAL = 0.66; EXPRESSED IN BONE MARROW, SIGNAL = 0.67; EXPRESSED IN FETAL LIVER, SIGNAL = 0.56; EXPRESSED IN BRAIN, SIGNAL = 0.6; EXPRESSED IN LUNG, SIGNAL = 0.64; EXPRESSED IN HEART, SIGNAL = 0.92; NT HIT: gi14773420, EVALUE 0.00e+00; SWISSPROT HIT: Q9Z0E8, EVALUE 4.00e-04; EST_HUMAN HIT: BI760120.1, EVALUE 0.00e+00
caccctcccacatatcgttccatagacccacgcactaccaggcacaaatatacctctccctggcctatgccctgcccacagctctggctcgtcttgccccagtgccatgaccttctcggagatcctggaccgtgtgggaagcatgggccatttccagttcctgcatgtagccatactgggcctcccgatcctcaacatggccaaccacaacctgctgcagatcttcacagccgccacccctgtccaccactgtcgcccgccccacaatgcctccacagggccttgggtgctccccatgggcccaaatgggaagcctgagaggtgcctccgttttgtacatccgcccaatgccagcctgcccaatgacacccagagggccatggagccatgcctggatggctgggtctacaacagcaccaaggactccattgtgacagaggtatgcctgggcaaaccctctccctccacttacccacgtacccccataccctgcaccgctggtgggcagcagaggaggctggggtctggtgttcccaggaactgaggacaggtcactgggcaggcaaagaggaaggacctgagtgcag

SEQ ID NO: 2378 - DNA, 592 bp, Homo sapiens
  MAP TO CHR9.1; EXPRESSED IN FETAL LIVER, SIGNAL = 1.3; EXPRESSED IN HELA, SIGNAL = 2.5; EXPRESSED IN LUNG, SIGNAL = 1.9; EXPRESSED IN BRAIN, SIGNAL = 1.6; EXPRESSED IN BONE MARROW, SIGNAL = 1.7; EXPRESSED IN HEART, SIGNAL = 1.9; NT HIT: gi14744893, EVALUE 1.00e-63; SWISSPROT HIT: P05622, EVALUE 7.50e+00; EST_HUMAN HIT: AI792319.1, EVALUE 0.00e+00
gaaagcacagcagagcacagcctcggaaatgtcagccctgggcaggacactcctcgtttaggcctcggcaagtctaaggaaaatgccctgtagcaggaagtggcatctgagtaaagaaccatcgagtggtgggttgtggggaaatatgtcagtttgttgaattccactgctttctgaagaacagtgttgctaatctctttattttggggtggtttttaaacttgcagctcctggatgaaacggccacactggtcttctttgttctaacggggtataaattccgtccggcttcagataacccctacctacaactttctcaggaagaagaagacttggaaatggagtccgtgtaagaaatctttcttccctcttccttagccctgacccctttgcctaacacaaagcagcacagtgtgaatcgggtcggctgctctcagcatttcgtggctgcaggggtggttcctctatttttagcagaaggaagcggacactggagccccaggctgtctgatctggtttgaagtacagtatctgccaaacctagctgggtcttgtcagggaagatggaacttgccgttccactaagcatcat

SEQ ID NO: 2379 - DNA, 560 bp, Homo sapiens
  MAP TO CHR12.1; EXPRESSED IN BRAIN, SIGNAL = 0.94; EXPRESSED IN HEART, SIGNAL = 0.78; EXPRESSED IN ADULT LIVER, SIGNAL = 1.3; EXPRESSED IN PLACENTA, SIGNAL = 1.2; EXPRESSED IN FETAL LIVER, SIGNAL = 0.89; NT HIT: gi14763440, EVALUE 0.00e+00; SWISSPROT HIT: O00182, EVALUE 6.20e-01; EST_HUMAN HIT: BI908701.1, EVALUE 0.00e+00
aggatctggggagaaagagccccatcccttctctctctgccaccatttcggacaccccgcagggactcgttttgggattcgcactgacttcaaggaaggacgcgaacccttctctgaccccagctcgggcggccacctgtctttgccgcggtgacccttctctcatgaccctgcggtgccttgagccctccgggaatggcggggaagggacgcggagccagtgggggaccgcggggtcggcggaggagccatccccgcaggcggcgcgtctggcgaaggccctgcgggagctcggtcagacaggtagggagccgatcggccgcgacgcgtgcgggagggagcgcctccccaaggaagcagctaggaagcggggtcgaggtgggaagcaaagaataagatggaaatacgtcccttgcttccaagggaccgcggagagcacgctcgcagggtcctgggtccttgggaatgcgtaaggaaagtggttctccagggactcaggcctggcggagcgcagagcgcgggaagagcttcttggaaatagcttcttagcacgctggaag

SEQ ID NO: 2380 - DNA, 558 bp, Homo sapiens
  MAP TO CHR11.1; EXPRESSED IN PLACENTA, SIGNAL = 1.9; EXPRESSED IN LUNG, SIGNAL = 1.2; EXPRESSED IN HELA, SIGNAL = 2.1; EXPRESSED IN BRAIN, SIGNAL = 1.9; EXPRESSED IN FETAL LIVER, SIGNAL = 1.3; EXPRESSED IN HEART, SIGNAL = 1.3; EXPRESSED IN BONE MARROW, SIGNAL = 1.8; EXPRESSED IN ADULT LIVER, SIGNAL = 2.2; SWISSPROT HIT: O08901, EVALUE 4.70e-01; EST_HUMAN HIT: AV651235.1, EVALUE 1.30e-02
gagttcaaaaagcagccaggtagcttttcaggctacactgattacttacagaatttcactggaagcattttccgttgttagaggatcttcttgcatttgcttttcttccggttctgtaacttgcttctcttctccaaaaattgctacaggtttatgcacagcaagcttgcttccagatacaatgtcactttggacttctaaaacaagagctgagcagaaattcacaaattgcaaagacatattacttacaattgcagagcatcaggaatttaaaaacacacactaaaatacaaatgcaaaataattccatctatttggtctattcataggttacttattaaactcagttgaatttaattttaatttttatagattctttactctcaagatattcttagtcaaaaatactaaaaattggtctttccaaagatcagttaattatcatatatcgtaattattcaaatgggctacattatttagatatatgtttctagatcattctctgggatccaaaactcatcagtggaagtcccagtcccagtcccagagaaagccttg

SEQ ID NO: 2381 - DNA, 519 bp, Homo sapiens
  MAP TO CHR5.1; EXPRESSED IN ADULT LIVER, SIGNAL = 0.9; EXPRESSED IN BONE MARROW, SIGNAL = 0.66; EXPRESSED IN LUNG, SIGNAL = 0.61; EXPRESSED IN FETAL LIVER, SIGNAL = 0.5; EXPRESSED IN BRAIN, SIGNAL = 0.63; EXPRESSED IN HEART, SIGNAL = 0.85; NT HIT: gi16171606, EVALUE 4.00e-94; SWISSPROT HIT: Q9ZZY7, EVALUE 6.30e+00
atgactgctgctaaccagggtttatctatctatctatctccccccagctatgaccacgaaggccgcctgaccaacgtgacgcgccccacgggggtggtaaccagtctgcaccgggaaatggagaaatctattaccattgacattgagaactccaaccgtgatgatgacgtcactgtcatcaccaacctctcttcagtagaggcctcctacacagtggtacaaggtgagcctccacccataccatcctacccccaaactcacccatagacccagaacccagccaagcccaacatgtgagttatgcagcctgggaggacttccagagacccagcgtacccctagctttctattttattcaagtgtccacagcaaactataagaggtcaatcttgtagaaaatgacttaatcagatagaacagaatgtcatctacacccagccaaatgtctagatatttgaactgtctacatagttatctgaaaatgtccatttccacccgccccccacatactctctccct

SEQ ID NO: 2382 - DNA, 520 bp, Homo sapiens
  MAP TO CHR17.1; EXPRESSED IN BRAIN, SIGNAL = 0.63; EXPRESSED IN HEART, SIGNAL = 0.8; EXPRESSED IN LUNG, SIGNAL = 1.4; SWISSPROT HIT: P52352, EVALUE 3.70e+00; NT HIT: gi14772094, EVALUE 0.00e+00; EST_HUMAN HIT: BF766850.1, EVALUE 6.00e-60
tggcttggttttacctgctcgctcctcacagtcactctgaaggaggaatggttacttccatttcagagatgaggaaatgaaatctcctacctgtaaggcctccagtcgcatgggggatggttcgtaggtgcttcctgctgcagagccagcatcgctacctgaacaggaatcctccttgggcagtacgacaatggaaatgcagagtcgaatgagccagcagggctctgaagaccccttaggtgagctaactgacgtttcttccagagagggtcctgcaggggctttcttccaccaatcaggagggctgaggtgaggggttgctgaattgctattaccgagtccagaagaacatggctgttgcagaagtagttggacttcaggtaaaggtgcgtgggtggacactatagctcccaagagtgtgagacttgacacacgaacattaacatctgtcaaaggaagcagtaagaacttatcatcatggcaacaactactgtaaagatggtagttatcccagcaggca

SEQ ID NO: 2383 - DNA, 598 bp, Homo sapiens
  MAP TO CHR19.1; EXPRESSED IN PLACENTA, SIGNAL = 2.5; EXPRESSED IN FETAL LIVER, SIGNAL = 2.1; EXPRESSED IN LUNG, SIGNAL = 2.1; EXPRESSED IN HELA, SIGNAL =   2; EXPRESSED IN BRAIN, SIGNAL = 2.5; EXPRESSED IN HEART, SIGNAL =   2; EXPRESSED IN ADULT LIVER, SIGNAL = 2.7; EXPRESSED IN BONE MARROW, SIGNAL = 2.5; EST_HUMAN HIT: AL555038.1, EVALUE 2.00e-85; SWISSPROT HIT: P18887, EVALUE 2.00e-24; NT HIT: gi5454171, EVALUE 1.00e-85
taaggatcaggcaatggaggcccagagagcgtaagtcacttgcccaagatcacacagctaaaaagtggtatagccaggacgtgaactcagtaatcagacgccagatctcctgatgttaactactaggcccactctactaggccacctctctaacaagtcagttcccctcctccgattcccctctgagatgctgcagttcacccttcctagattccctccgggagatgaaacttctcattacaggaaagatcccaaacccatttcagggaacgcagggacccagcctccccataatcccatgggacaccagctgtctactcctcccagccctatgggactcaatattggcccttatttccctccttgcccaggaccaaggactctgcaccctggctcccaccctaggtaccttgctgtagggctggctgcaaacaattttgacccggtcccagcgcttctcggcggctgcccggaccagcttgtcaggcccaaacatgcgaacgcggttggggtttgagccactgcggctctcggaaggggacatgaaagatgaggtgaccagaaggacctgggtgggagaagccacagtgcatgagaa

SEQ ID NO: 2384 - DNA, 563 bp, Homo sapiens
  MAP TO CHR19.1; EXPRESSED IN LUNG, SIGNAL =   1; EXPRESSED IN BRAIN, SIGNAL = 0.92; EXPRESSED IN HEART, SIGNAL = 0.89; EXPRESSED IN ADULT LIVER, SIGNAL = 1.4; EXPRESSED IN FETAL LIVER, SIGNAL = 1.1; EST_HUMAN HIT: BG490046.1, EVALUE 1.00e-106; SWISSPROT HIT: P29597, EVALUE 5.00e-36; NT HIT: gi4507748, EVALUE 1.00e-106
gggggttgaggataaattcctacctaaggtgattctcaggagatgtgggtgggaccctctgctttgagggaggcctaggtgccaaggagtcttaatagagcggagtaggcggggcctggggtattccgaaaggatctgcctggaggagtggcccgggaaatcgggggttggggagtggtgcagggattggggaggtggagctgaccctcgtgcgctcccgaccagggtcacttcggcaaggtcagcttgtactgctacgatccgaccaacgacggcactggcgagatggtggcggtgaaagccctcaaggcagactgcggcccccagcaccgctcgggctggaagcaggagattgacattctgcgcacgctctaccacgagcacatcatcaagtacaagggctgctgcgaggaccaaggtgggcgggacccggcgagtcctagagacttgagggggcgtggttagagcgtgggtgtggccttgtgggcggggccagtctggcctagccaattagagactctcaaccccaggctgcagtacgcggttcttggcatctgggtgag

SEQ ID NO: 2385 - DNA, 560 bp, Homo sapiens
  MAP TO CHR3.1; EXPRESSED IN PLACENTA, SIGNAL = 2.5; EXPRESSED IN FETAL LIVER, SIGNAL = 2.3; EXPRESSED IN LUNG, SIGNAL = 1.8; EXPRESSED IN HELA, SIGNAL = 2.1; EXPRESSED IN BRAIN, SIGNAL = 2.1; EXPRESSED IN HEART, SIGNAL = 2.4; EXPRESSED IN BONE MARROW, SIGNAL = 2.1; NT HIT: D63395.1, EVALUE 2.00e-03; SWISSPROT HIT: Q9TTR7, EVALUE 5.30e+00; EST_HUMAN HIT: BF477302.1, EVALUE 2.00e-04
tgatcccttcagtcagggagatcctgaccccacacttagcagctacataactctaaacaaacttcttaatctactgatccagtgtttactgctcaagtgaggatttaagattccattttgtattatcaagtgaaaacaaggtatggaaggcccacgcacagtgcctggcacatagtaggtcctcagttcatgtgaatctctcatgagccaagccacctccttccccaccccacccccacatttcccctacactcagaggctgaagggggctgggggatgcagctcttcctagcggccttgtctccagggaatataaactctatgatcaagggacatgttcagaaaatggaaatatttggccaagccttcagagatttaattaaaattaatattatgccttatcaaagcagaaagctcaacgctgtgcatgtagaacaatctatttaaccaattagccgaggcaaacatgactgtccagccttcagcaaggccgtccacacctactcttgggccacagttgctgctaatgccatgtgctcagacaagtgggccagcttaag

SEQ ID NO: 2386 - DNA, 566 bp, Homo sapiens
  MAP TO CHR12.1; EXPRESSED IN HEART, SIGNAL = 0.89; EXPRESSED IN BONE MARROW, SIGNAL = 0.76; EXPRESSED IN ADULT LIVER, SIGNAL = 0.83; EXPRESSED IN FETAL LIVER, SIGNAL = 0.64; EXPRESSED IN LUNG, SIGNAL = 0.82; EXPRESSED IN BRAIN, SIGNAL = 0.79; NT HIT: gi14150091, EVALUE 0.00e+00; EST_HUMAN HIT: AL539585.1, EVALUE 0.00e+00
gtgactgaaacgctgtctgcttttctctaaccgtgacaggaagtcaaggggaaaccgtgggattcaaaggtttgaagtacttcctcgcgtactgctaaaggagtcgaccacaccaaaatgagtctacgtgatgctagtgggggacataagagatcaagagatagacgaaggtcaagtgacagatcacgagattcatctcatgaaagaacagagtctcaactcactccttgtattagaaatgtgacttctccaacacgacagcaccatgttgaacaagaaaaagactgcagttcctctcgtccaagcagtctgcgtcctcaaaaagcatccccaattggttccattagcagtgctgggaacagcagcagaaacagtagtcagtcaagttcaggtggtagctgtaagacatctggggagatggtgtttgtatatgaaaatgcaaaagaaggagctcaatataagaatgtcagaacgagtgacactaatagtggataacactagatttgttgtagacccatccatttttactgcacagccaaatacaatgttgggcaagatgtttggat

SEQ ID NO: 2387 - DNA, 579 bp, Homo sapiens
  MAP TO AC009789.18; EXPRESSED IN FETAL LIVER, SIGNAL =   2; EXPRESSED IN LUNG, SIGNAL = 1.1; EXPRESSED IN HELA, SIGNAL = 2.5; EXPRESSED IN BRAIN, SIGNAL = 2.2; EXPRESSED IN HEART, SIGNAL = 1.2; EXPRESSED IN BONE MARROW, SIGNAL = 2.2; NT HIT: AF287967.1, EVALUE 0.00e+00; SWISSPROT HIT: O05544, EVALUE 1.40e+00; EST_HUMAN HIT: AI769799.1, EVALUE 0.00e+00
cattctcctcctcctccctcctcactccctaggcccaagtctcctaggggcttggtcctagggtgggaaggggctagggaggaccaaagggatggtattgagaagagagaaagaagatagtgagatttaagttcctgctgcctgggtaggccccacaaggcctggtctgggagtatacggaaacaaaaatgatcctcagtgcaaaatgtcttgtgtatttctctgtgaatccatgggtctggctagagggcccaaagcttgtaaatatggggatagtctgggtcagacccatctctcccttacccatcttgcttccaagaccatttgtagtgagcgagtggatgctgtgctacgtgtgaaatctgtctttgcggggcctgtctcagtgattcgcttttggtatttgtttgtagctttcctggaagtcaaataaatgtttcccccactccattgcccttccacttgtcttttctccgaggggtctgcctctcccatcccgggcacaccctgcaccattctcaatagatctggggtgcagggaagaaaaagtaggctgctccccaacaactcttctcagcc

SEQ ID NO: 2388 - DNA, 592 bp, Homo sapiens
  MAP TO CHR7.1; EXPRESSED IN HEART, SIGNAL = 0.66; EXPRESSED IN BONE MARROW, SIGNAL = 0.57; EXPRESSED IN BRAIN, SIGNAL = 0.54; EXPRESSED IN LUNG, SIGNAL = 0.63; NT HIT: gi14746296, EVALUE 1.00e-129; SWISSPROT HIT: P53250, EVALUE 9.80e+00; EST_HUMAN HIT: AI934090.1, EVALUE 3.30e+00
gtttcagcatcgcagtcatcattaaggcgtacagtaatttgttgggtagttagtaaatctgttttccacataaaaagccctgcagaggaaacacttgccccttcaggaccagagtccaacgtaaaatggatgtcagaaccttctggatcgaaggccacgaactgatactcaaagttttcaccataaaatgtctgtaatttgtcttgcaatgcttgaatcactgggggctggttgtctgtaatagagaaaacacttaactttatacccgtgtagaaaaaggaatgaagtgtacttctgagagctcccacagagatatgcattttgataaagactgaactctgctaaaaggtctattagctgctttcatttttttttttaacattctgagtaagttcaattccattcttagacacatgaaagtaactgacaggtgcaagacctcaggcattattatgaaagtatgaaatcactttggatacagcacagaatatataaatacccatgcactggccacactggatgctgcacctcttctgtcttacttcttggtgttgactgcctcactactctctctctctctggctgtggatcc

SEQ ID NO: 2389 - DNA, 545 bp, Homo sapiens
  MAP TO CHR13.1; EXPRESSED IN BRAIN, SIGNAL = 0.85; EXPRESSED IN ADULT LIVER, SIGNAL = 2.2; NT HIT: gi16165290, EVALUE 1.00e-129; SWISSPROT HIT: Q9UZ57, EVALUE 2.30e+00; EST_HUMAN HIT: AV751983.1, EVALUE 0.00e+00
tcaattgagcattaggccacaagtttgatatcttatatttataaatgcttacttctaagtatttcttaatttttagcctgatttttttgattcatgagttatttagaaggggttatttagagttatttcccaaccgtgttctttaaaatacatgtatttattttgttattggtttctttcccccccaaatctcttctattggggggaactcgggcgtcctcactgcacggcttgttcattggcactgcttcccgagtcctggggcttcatcacgtcgggcagctcaggcgggctggaaaacggctcgatgcacagggtctcaaagctgtcgtctgcgcggaaggcgagccccactgtggctggggcctgtggccgtgctgtttggctggtgaagccacactcacccagtgtcttgccatcatccaagagttggtcgtcctagcacagccactgctcatctggcagcagcttgaggatggcctcaacgatgcgcttcagctcgaacaccgcgctggactccttggcgtccgtgaagatgctggtct

SEQ ID NO: 2390 - DNA, 560 bp, Homo sapiens
  MAP TO CHR22.1; EXPRESSED IN BONE MARROW, SIGNAL = 0.49; EXPRESSED IN FETAL LIVER, SIGNAL = 0.45; EXPRESSED IN BRAIN, SIGNAL = 0.43; SWISSPROT HIT: Q9Y6J0, EVALUE 5.00e-39; EST_HUMAN HIT: AW392986.1, EVALUE 1.00e-112; NT HIT: gi6912457, EVALUE 1.00e-120
atcctccactcagccatcagggagctttctaggcacaaactaggttcagtgacttcctgcttcgacacccacaaaaaaaccaggttccaggcccacaagtagatgcagccaaacacaacagcagccccacacccatgcaagatccctgtccccatgccctggtcccagttcaataccagcccttgagaggctccccctaaccttgatgtgcttgttgctgcagtccctcagcagcgggttgggcaggctggtgctgtgcctcctccagctgtggtagacgctgagcacgacctccgccaagcctggaggccaccttaccaagaacttgtggcccatggctttcaggtagcgcatcatcagctccaggatgcccccgttggttaggttctccagcaggaactcatgcacgtcctgcttttctgcccggggagcaagaacaacctgacttgaataaagagtaccttccatgccagggtctcctatttactttgggacagtaaagactgttccctccctctaccatctgatccaggtggacatgataccacgttgtggtgctg

SEQ ID NO: 2391 - DNA, 553 bp, Homo sapiens
  MAP TO CHR22.1; EXPRESSED IN FETAL LIVER, SIGNAL = 0.67; EXPRESSED IN HELA, SIGNAL = 1.1; EXPRESSED IN BRAIN, SIGNAL = 0.95; EXPRESSED IN HEART, SIGNAL = 0.61; EXPRESSED IN BONE MARROW, SIGNAL = 0.86; EXPRESSED IN ADULT LIVER, SIGNAL = 0.92; SWISSPROT HIT: Q9JI55, EVALUE 4.00e-02; EST_HUMAN HIT: BI766192.1, EVALUE 2.00e-94; NT HIT: gi14778221, EVALUE 0.00e+00
cacaaacatccatgcaaaggctgtggcagagcccctgggcaccaggcgtctggcctctggggcacagacctgtgagcagctgctgtttgtcgtgctcccactcagacaggcactgctcatcctcctccgcctgtcgccgccgtgccccctgctcctgtttcagcgcctgctccagcttgcccgcctgcttcctcaggccatccttctgcccttcagcctcctccagctgggccctgagggcctccacatgcttactgaggcgcgtcaggtctttcctctgctctgctgcccagcggcccacggtggcagccggcagtggcctgagccccatgctgtcctgcaccagttgctggaactggcctaaggacgagggcaggttctggctctgacacaggctgatgaccaccttgcccaccttctgcaggcttccctggacgctggcgcatgcgtcacagggcaccagggccgtctcaatggtctgggagtggacactcctggtgttcttgaaggtcgtggctgggaactgcagggaggctctgacagggatgctctc

SEQ ID NO: 2392 - DNA, 529 bp, Homo sapiens
  MAP TO CHR2.1; EXPRESSED IN PLACENTA, SIGNAL = 1.1; EXPRESSED IN FETAL LIVER, SIGNAL = 1.1; EXPRESSED IN LUNG, SIGNAL = 1.3; EXPRESSED IN HELA, SIGNAL = 1.6; EXPRESSED IN BRAIN, SIGNAL = 1.1; EXPRESSED IN BONE MARROW, SIGNAL = 0.89; EXPRESSED IN HEART, SIGNAL = 1.4; NT HIT: gi7662333, EVALUE 6.00e-93; SWISSPROT HIT: Q60695, EVALUE 2.90e-02; EST_HUMAN HIT: AW505464.1, EVALUE 2.00e-87
gcccttatactgtgaacgccacatttcctcaatgacttttctcaacagagtgaacgaacatctagaactcaagaacccagtctgattaccagacatacctttgcaacattgataaactttgtgatgacttctgccctttgctggggggttggtttgctaagaaccatcaactggacccacttagagattccattaaataaagcaatcgatctttccaaggttggattattctccaggcagccatggatgacatagctttggtaatcagtgaactaggaaaggaagattcagagactctgaattataatagagcctttgtaaaatcaaaaattagaatattgcatagaaaaggtgagatattgtttcgtaacaacacaatttcttttatttcacatttacaatggcatcctaaaagtttgaatatacatgtgtctttaaaatgttattttgctgcttttcaaaccccactactcaccccacgcaaagacacccactactacacatcacagctttggtgggaggagaaaga

SEQ ID NO: 2393 - DNA, 528 bp, Homo sapiens
  MAP TO CHR17.1; EXPRESSED IN FETAL LIVER, SIGNAL = 0.64; EXPRESSED IN HELA, SIGNAL = 0.85; EXPRESSED IN BRAIN, SIGNAL = 0.78; EXPRESSED IN HEART, SIGNAL = 0.81; EXPRESSED IN BONE MARROW, SIGNAL = 0.85; EXPRESSED IN ADULT LIVER, SIGNAL = 0.93; EXPRESSED IN LUNG, SIGNAL = 0.81; NT HIT: gi11427857, EVALUE 1.00e-114; SWISSPROT HIT: Q13472, EVALUE 7.00e-37; EST_HUMAN HIT: BE389807.1, EVALUE 1.00e-114
tcagagtggccagtgacaagccccaggctatgaggctgctggcctttttcctgtgctgtgctgccccttttggcttctttgagtgtgctagcaggagagccagctgcttttcatcccatgagggggtgcatctcatctcagaacttttctgaagcaggtaatgtaggctgccttcagttgagttggctacatcagatgagtgtttgcaggtgttagtgtgtgctttcagttgtttatagaccaatcagagagcctagcaatttctttttctgtttgtttgccttggttttaggtacatcagctatccccgaacagaaacaaacatttttcccagagacttaaacctgacggtgttggtggaacagcagacccccgatccacgctggggggcctttgcccagagcattctagagcggggtggtcccaccccacgcaatgggaacaagtctgaccaagctcaccctcccattcaccccaccaaatacaccaacaacttacaggttggtttccctgaatgtactgcctgct

SEQ ID NO: 2394 - DNA, 580 bp, Homo sapiens
  MAP TO CHR6.1; EXPRESSED IN ADULT LIVER, SIGNAL = 1.1; EXPRESSED IN BONE MARROW, SIGNAL = 1.1; EXPRESSED IN PLACENTA, SIGNAL = 1.4; EXPRESSED IN LUNG, SIGNAL =   1; EXPRESSED IN BRAIN, SIGNAL = 0.98; EXPRESSED IN HEART, SIGNAL = 1.1; NT HIT: X77343.2, EVALUE 0.00e+00; SWISSPROT HIT: Q9N0N3, EVALUE 3.00e-57; EST_HUMAN HIT: AL556459.1, EVALUE 0.00e+00
ccaccgactgtatgttccaggtatcctttctggggtaggtaagtagggggctgtgttccctcccgcgctggttgcgcggcctcttaccgggacctcctcgatggcgtgaggtaaggagtggatcgagaggtctccgagtcctgagctgagcgcgtgtgggccgtgcaggaggtcctcgtgccgcctgtagtccctgcgaggatccaggcccgacagctggtgaggcagcccccggtgcgtgtgcaggagcccagactcctggctctgcctctggccgggccagcctgggtgctgcggctgcggctgggcgtgcagggggttcaggctgtaggggtcgttgacgtgggagtaaggatcttgcgactgggggtagataggctggtagggtggggggaagtatgggggctggaagtcggcattgggggtgtgggacagcggcggggcgctcgtgtagggagattgacctacagtgcccagctggggcaaccgtgccgtcccgttgctggtgccgtcgtgacggtcctagaagagagcgagaggaaaggtaaagaacaaggaatcaggcgtcgagctacaacta

SEQ ID NO: 2395 - DNA, 552 bp, Homo sapiens
  MAP TO CHR1.1; EXPRESSED IN BRAIN, SIGNAL = 1.9; EXPRESSED IN HEART, SIGNAL = 2.5; EXPRESSED IN BONE MARROW, SIGNAL = 1.5; EXPRESSED IN ADULT LIVER, SIGNAL = 2.9; EXPRESSED IN FETAL LIVER, SIGNAL = 1.6; EXPRESSED IN LUNG, SIGNAL = 3.1; NT HIT: gi14764730, EVALUE 0.00e+00; SWISSPROT HIT: P02457, EVALUE 2.00e-03; EST_HUMAN HIT: AW051845.1, EVALUE 1.00e-109
acacctcagccatgtggaggcggcacctgcacacccaagctcgcctgtccggctctctggccctgtgcatccactgtggctcccctcctgcagggccgcccaccttcctcccagggaagcccgccccccggccccccgcctggtcccctcttgggtgtgcccaggctgagctgcccccagggtcgccctcacctggtgcgcagggcctgccaggcggcgtcgatgtcggcatagaggttcctctcggaaggcctgcccgagctggcaccgtagccggagtagtcgtaggagaagatgttgcagtggaggcgggagcccaggccaatgtagaagctgctcatctggcccaggtccacggcattgccgtgcgagaagaggaccgtgtacctgggacaggccgagaagggccgttcacatcctcgctcccagcgcccagctgcagggcaggaggatgcgtagtgacagcccaccccggtggccagccatgcccagtgcctcatttactcccctcccaagggggccagaagccagtgaatggagaggggaggctac

SEQ ID NO: 2396 - DNA, 580 bp, Homo sapiens
  MAP TO CHRX.1; EXPRESSED IN HELA, SIGNAL = 1.3; EXPRESSED IN BRAIN, SIGNAL = 1.1; EXPRESSED IN HEART, SIGNAL = 0.87; EXPRESSED IN BONE MARROW, SIGNAL =   1; EXPRESSED IN LUNG, SIGNAL = 0.76; EST_HUMAN HIT: BG911464.1, EVALUE 5.20e-02; NT HIT: gi13649009, EVALUE 0.00e+00; SWISSPROT HIT: P36642, EVALUE 4.30e+00
ggctcaccgaaaatgaaaagtattttgtctgttattataaataaatgtctatttgccagatacttaggtgcatgccttgtccatgagtccctgctaacttgtatttccattctgcatattaaatgaaagaagggcagatatagggaaggagaacaaagcaaaggctaaaaactgcattctttctgtgttttacttaaacaattcaagtagtttattaccattttccccatcagacttcctttcatggtcagtgtcagtcaaggataatgcagagttggcccggctggacaaacaggaactatgctctgatttcattccccttatccacattcttagtgcatggtcaggtgaggcagcaccttctgtctctgtgtccacatcagatcccatctctagctggtagccatgccgagaaacgctgtgcatgtctgtttggtagccagagcacagagtgtgagaggtttcacagaattccatctctgagaagaaacaaagttcagagaaaacgtttagaagtatgaagaaatcccccagaaaattctactttttgttctcattcccctctcccccattggtagta

SEQ ID NO: 2397 - DNA, 559 bp, Homo sapiens
  MAP TO CHR7.1; EXPRESSED IN PLACENTA, SIGNAL = 1.2; EXPRESSED IN FETAL LIVER, SIGNAL = 0.69; EXPRESSED IN LUNG, SIGNAL = 0.8; EXPRESSED IN HELA, SIGNAL = 0.76; EXPRESSED IN BRAIN, SIGNAL = 1.1; EXPRESSED IN HEART, SIGNAL = 0.93; SWISSPROT HIT: P42658, EVALUE 2.00e-18; EST_HUMAN HIT: BF511079.1, EVALUE 2.00e-63; NT HIT: gi15299249, EVALUE 1.00e-63
agcaaggatgctgaaagctcttgagagtgggagggacccaccagcaaaggaaggtggaaatggagctgggtggtctcaggggctccagcagggagacagagggagaggcccggggggtctgtagcagggctccgcagatcaccctcatggggagagcccaccagcttgcggcacccagcgtggagggcagctcctctccgcccacattcacacctgcgtcctttgctcttccagtgccaacacggtgggcaacttcaacaggcagtgcctctcctgtgacctggttgagaactgcacctacttcagcgcttccttcagccatagcatggacttcttcctgctcaagtgcgaaggtcagctcctgccaccccgtcaggcaaagagccctggcaggcacatttgcagggagggggtgggcacacttgcagggagggggcagcggctgtggtgggagcacagcgtattccagaacaggtgaggatcccgcctacctgataacattgcttatggtgcaagatgactggacccccacagagcctggtgcagtggggctacttta

SEQ ID NO: 2398 - DNA, 532 bp, Homo sapiens
  MAP TO CHR7.1; EXPRESSED IN BRAIN, SIGNAL = 0.44; EXPRESSED IN HEART, SIGNAL = 0.59; EXPRESSED IN ADULT LIVER, SIGNAL = 0.47; EXPRESSED IN BONE MARROW, SIGNAL = 0.39; EXPRESSED IN FETAL LIVER, SIGNAL = 0.39; NT HIT: AB008344.1, EVALUE 5.10e-01; SWISSPROT HIT: O73700, EVALUE 4.90e+00
gtgttctctttgccaatccctattttataaatttttccacaatcatatgtttaacttgcataataattgttaaaatagtaacaatggtagtaatagcatgctgaaattaagctttttctctttttgaagagcattggcatgccagttctttttctccttagcatgaaagaaagcaccatggatccacattaaaagaaagatgtggcttgccatcaccctgagggacactttcagtgggatgattacagctgctatgacaacaagaggaggatgtgatgtcacataatgatccagtgacttcaacggtcccgtcccaatgcagagctttgctgccagctggaaatccagcagagacctcattaagggcatctgttcagtaattactacaagtttcccttcatcacgcatccaaatttgaaaacagccataccgcagaactccaatgcctgattcacagagggctttaatcttccatttctgtagcgctcagactgactgcgaccagaggaccagggtcaagttttggtgcagt

SEQ ID NO: 2399 - DNA, 587 bp, Homo sapiens
  MAP TO CHR19.1; EXPRESSED IN BRAIN, SIGNAL =  12; EXPRESSED IN BONE MARROW, SIGNAL =  19; EXPRESSED IN HEART, SIGNAL =  14; EXPRESSED IN ADULT LIVER, SIGNAL =  13; EXPRESSED IN PLACENTA, SIGNAL =  35; EXPRESSED IN FETAL LIVER, SIGNAL =  23; EXPRESSED IN LUNG, SIGNAL =  23; NT HIT: gi16177374, EVALUE 1.00e-69; SWISSPROT HIT: P11249, EVALUE 3.00e-20; EST_HUMAN HIT: BE263289.1, EVALUE 2.00e-69
tttaggtgcaatcagggaggtgtgggggtctcacagaccctggcaggtgagccagggaaaaggtgccagctcccaacactaggcaggggttcaattcggttctcagtgggtcccagaaaacagtggtgatgtggatcccagtctaaacaaggtgcagacccaaaaagggagtttccagatgtgatgtgatttacaaccgagcctggcagggctctcagaaaagcgccatctggggcctggggcatccttttgtcttcctgtgccccgccaccagtcctgagactctcctgcactgggaacctctggcacttgccctgcctcagtgtgagggagtcaaggagggtctaaaaagctggaggcgggacaggcagcttacagcactgggtgacagcgcctgcggtggtcaggtcccggtattcccggtacatgttgtgggtgccgctccgggagtcatagcgcagccagatcccgaagttcttcacccgcaggggggacttctcaaacacctgccaaggagaggccacagggagatgtgagagcagcaagccgatgtgccctagccccatcctcactgaaccctctgcctc

SEQ ID NO: 2400 - DNA, 556 bp, Homo sapiens
  MAP TO CHR17.1; EXPRESSED IN BRAIN, SIGNAL = 0.57; EXPRESSED IN BONE MARROW, SIGNAL = 0.65; EXPRESSED IN LUNG, SIGNAL = 0.78; NT HIT: gi15891923, EVALUE 8.30e+00; SWISSPROT HIT: P11120, EVALUE 4.60e-01; EST_HUMAN HIT: BF966709.1, EVALUE 2.00e-01
cgccctttcttgacagtttgtaaggcatttagctttagatttggctgaagggtagggtcttatatctgaataatgatttagagatacagattcatgatatgcaggaagtcctacaagttctgaggactataatgacataatatagtttattacagatgagaactgttccagaatacatatacttgctttaaaaactaagtaattatacaagggcaacttctagtaaaatatattatacctcagaatacaaaaatgattttcctccataagagtttcttttcattagtttgcttcaaggtatttgatgttgaccgtgatggagttctctccagggttgaactgagagacatggtggttgcacttttagaagtctggaaggacaaccgcactgatgatattcctgtaagttatgattgtgtatgtcttgttgcgtataaacttccaatgggaaattggagggaatcattttctttaaaagcataaaataatttgttactgcttttagttactacattaagctactcaaaatatttatagctgaagatgcaaaattgga

SEQ ID NO: 2401 - DNA, 522 bp, Homo sapiens
  MAP TO CHR7.1; EXPRESSED IN LUNG, SIGNAL = 0.91; EXPRESSED IN BRAIN, SIGNAL = 0.68; EXPRESSED IN HEART, SIGNAL = 5.2; EXPRESSED IN ADULT LIVER, SIGNAL = 0.93; EXPRESSED IN BONE MARROW, SIGNAL = 0.62; EXPRESSED IN FETAL LIVER, SIGNAL = 0.44; NT HIT: AF252549.1, EVALUE 0.00e+00; SWISSPROT HIT: P21333, EVALUE 2.00e-35; EST_HUMAN HIT: BF835730.1, EVALUE 0.00e+00
tgctgtggggaaagttaaggctccatcctggagcactctggccccaggagccctcagagaagtgggattccttggggacagttatctgggatccctgctgctgctaaaagggccaggcccccctccccagccatctagtcttgctgtggctacagaacttaccagcacgtggaaggggctgttggggatgtgctcacccccgaagcggatggtgatgacgtacttgcccggctcgggcgctgtgtagtagatgtcaaaggtaccgtcatggttctcaaccacatccacatcgagctctgccccatccggcgtggacaccgtgcatgtcaccttcccctcaccggctgccttggcatccaccgtgatcaccgtctcctgcccaatctggattcgagggcccaggcaggcacctgccatgcgggagatcctgctcagggagctggtgggctggagccagccctctctgttcccgctgcccgccccctaccgccaaccaccctggcccacaccaagaagaggaga

SEQ ID NO: 2402 - DNA, 532 bp, Homo sapiens
  MAP TO CHR11.1; EXPRESSED IN BRAIN, SIGNAL = 0.86; EXPRESSED IN BONE MARROW, SIGNAL = 0.87; EXPRESSED IN FETAL LIVER, SIGNAL = 0.86; EXPRESSED IN LUNG, SIGNAL = 0.67; NT HIT: gi14763654, EVALUE 3.00e-92; SWISSPROT HIT: P47095, EVALUE 3.00e-11; EST_HUMAN HIT: AV713375.1, EVALUE 0.00e+00
tttccttcacatttagcgggtggtaacttgttccccatgttctctgatttacactcacatggttttggccttctcccatgtttccccccacacatatactccatgacgtctgaccagtactgcacaggagtctgggtattcattcattgcatgagccattctatctttgaggtctttctcctcaggtgtattctcaataatgggtaccactaacatatcatcatatctgtaagacaaaacaagccatttttttccattaaaacaaatcaagcattgatatgtatacaacatgtaattttttcaagtaaccagttagacatgctgtttgtgtctgaaaagccactccaaattatgaacaggatgttgcgtgttattctgtgtaccttgtataaacatctctatcaaaaggtaccttgggaatgtggcaggcttggtctaatcctaagcctaagtggtggaaatttgtaaaatataccaaaacctaacaaagaaatcatcaagatcatataaatgtttccttgaagcagggaca

SEQ ID NO: 2403 - DNA, 577 bp, Homo sapiens
  MAP TO CHR5.1; EXPRESSED IN HELA, SIGNAL = 6.9; EXPRESSED IN BRAIN, SIGNAL = 4.6; EXPRESSED IN HEART, SIGNAL = 2.4; EXPRESSED IN BONE MARROW, SIGNAL = 3.9; EXPRESSED IN PLACENTA, SIGNAL = 5.2; EXPRESSED IN FETAL LIVER, SIGNAL = 3.4; EXPRESSED IN LUNG, SIGNAL = 2.5; NT HIT: L07488.1, EVALUE 0.00e+00; SWISSPROT HIT: P00094, EVALUE 2.50e+00
cactgattgtgtggactgggctgaccactggtctcccagatctcaggtccccagagataacaagaaccctcatcaagggttggacaggtcaaagaaggatcagatcagccccaaagcctgtgcgggggtgccatggtaccgaagggactttgaggcccatttccttccccttgtgataatgtctctcgtgataaggatcctggagtgactcaagcccctgtttcctacagagcctgtggggtggacacgcataggaaactccttccagagggttttctcctgtctctgtaggaaggggggccccagaggggtcataccacccatcgtggtccccgcctctgccctgccacagccccatcggagcccctgagtcagcatggctggctatcggttgacactgtttaaaatacagtgcaatctaggaatgcctgcctgtgtcatggcctcagccctgatgtcatctttccatgagaaagatgtgtggctgcccacaaacctcatcaccaaacccatggatttctgtcctgtttgtgctgacttgggcacctgcaggccaccactgccgaaatggatttct

SEQ ID NO: 2404 - DNA, 530 bp, Homo sapiens
  MAP TO CHR13.1; EXPRESSED IN FETAL LIVER, SIGNAL =   2; EXPRESSED IN HELA, SIGNAL = 3.2; EXPRESSED IN BRAIN, SIGNAL = 2.5; EXPRESSED IN HEART, SIGNAL = 1.8; EXPRESSED IN ADULT LIVER, SIGNAL = 2.9; EXPRESSED IN BONE MARROW, SIGNAL = 3.8; EXPRESSED IN LUNG, SIGNAL = 2.5; NT HIT: AE008683.1, EVALUE 1.30e-01; SWISSPROT HIT: P52824, EVALUE 1.30e+00; EST_HUMAN HIT: BF541116.1, EVALUE 2.90e+00
atatggcaaagccactccacttgacaatgcactttaaaaaccgcacggatgttataaaacccaaatattttactccacatgcttactggctgacttgcacaatacttccattataattacgggacagacacaaaatgaaaagaatatttttaacaaagcacttgtacgatgcagctgtacccattcttaatgatcattaatgtctcatccaaagagaactgtactttgtttgtttcgtttaccgaaggtcagcatactgggaagcaattgccatcacatctcagacctttttgcatattttcccgcattgttctgagcctgcatgtgcgcagacgagtcgattggtatgcagattgtctgtcattaaagccatttggaaatcagctttgtcactggtttagtgttggaacttcagatcctagaagccaccactggaaagctctgtgcactctgaaagggaaggtgtgtggccctgctgagcccaactcggggctggaggaagaagctgaccttgaccttgagccaaaagc

SEQ ID NO: 2405 - DNA, 597 bp, Homo sapiens
  MAP TO CHR5.1; EXPRESSED IN ADULT LIVER, SIGNAL = 0.76; EXPRESSED IN PLACENTA, SIGNAL = 1.3; EXPRESSED IN FETAL LIVER, SIGNAL = 1.1; EXPRESSED IN HELA, SIGNAL =   1; EXPRESSED IN BRAIN, SIGNAL = 1.2; EXPRESSED IN HEART, SIGNAL = 0.55; EXPRESSED IN BONE MARROW, SIGNAL = 1.2; NT HIT: U48462.1, EVALUE 0.00e+00; SWISSPROT HIT: P21817, EVALUE 3.00e-57; EST_HUMAN HIT: AI651620.1, EVALUE 0.00e+00
ggatcctagggtcagaagccagggatctcaaaacttattctaaaatttcatagaactgcaacattatatcaaaggtcagaaacgccgaagctgggacaagggtcagcagtcagggatcccatatagtgcagagcccggaagtggaggtgagggccttgtcccatggagccctaccatgcccgcaggtatatgatgagcaatgggtacaagccggctccgctggacctgagccacgtgcggctgacgccggcgcagacgacactggtggaccgtctggcagaaaatgggcacaacgtgtgggcccgagaccgcgtgggccagggctggagctacagcgcagtgcaggacatcccagcgcgccgaaaccctcggctggtgccctaccgcctgctggatgaagccaccaagcgcagcaaccgggacagcctctgccaggccgtgcgcaccctcctgggctacggctacaacatcgagcctcctgaccaggagcccagtgagtgctcacccctggccctggccctgactcctaccccaactctgaccccagccccgatccctgatctctgacctgactcagcccccaaatgggctatatct

SEQ ID NO: 2406 - DNA, 581 bp, Homo sapiens
  MAP TO CHR17.1; EXPRESSED IN FETAL LIVER, SIGNAL = 0.46; EXPRESSED IN BRAIN, SIGNAL = 0.46; EXPRESSED IN HEART, SIGNAL = 0.67; EXPRESSED IN BONE MARROW, SIGNAL = 0.44; NT HIT: gi13652313, EVALUE 1.00e-110; EST_HUMAN HIT: BG720093.1, EVALUE 1.00e-110; SWISSPROT HIT: P21948, EVALUE 6.50e-01
tatgtttgcaaagcccttcctcccatcagctttcaagtagtccccacaatgatgtaagaattccttcttcccttcacaacctgcagctggtcccaggatgaggagccaggcagggaagacttctttccatttcacagattagtaaaccgaggctcagctggggaagggactggcctaagatcctacacgatagcccggcctgtttctactagagtgcctgcaggggttttgtgaacaggcaacccctcactcccactaaaactcccaacaccttgactccaggaggtgccctggggttggcgaaaggaggtaccccagatgcgtatctttttcctcccggccatggccctcaccagtgagctccacgtgctcctcctcctcggggctggtcagtgccatctgcagaagctctgctgtgcagatgagcaggtcatggcaccgggccaggtggccaaagccagcacgtggtcccatgtccccactcagggttgtcacggtccagcgtccatccagcatgcgcctgaactcttcaccatgctgggtcaccaggtgcacctgggggtggagaatgagctgggaaa

SEQ ID NO: 2407 - DNA, 506 bp, Homo sapiens
  MAP TO CHR6.1; EXPRESSED IN BRAIN, SIGNAL =   4; EXPRESSED IN PLACENTA, SIGNAL =  31; EXPRESSED IN LUNG, SIGNAL =  14; NT HIT: gi13648348, EVALUE 0.00e+00; EST_HUMAN HIT: BG533230.1, EVALUE 0.00e+00; SWISSPROT HIT: P47914, EVALUE 2.00e-51
acatggccaagtccaagaaccacaccacacacaaccagtcctgaaaatggcacagaaatggtatcaagaaaccccgatcacaaagatacgaatctcttaagggggtggaccccaagttcctgaggaacatgcgctttgccaagaagcacaacaagaagggcctaaagaagatgcaggccaacaatgccaaggccatgagtgcacgtgccgaggctatcaaggccctcgtaaagcccaaggaggttaagcccaagatcccaaagggtgtcagccacaagctcgattgacttgcctacattgcccaccccaagcttgggaagcgtgcttgtgcccatattgccaaagggctcaggctgtgccggccaaaggccaaggccaaggatcaaaccaaggcccaggctgcagctccagcttcagttccagctcaggctcccaaaggtgcccaggcccctacaaaggcttcagagtagatatctctgccaatgtgaggacagaaggactggtgc

SEQ ID NO: 2408 - DNA, 568 bp, Homo sapiens
  MAP TO CHR12.1; EXPRESSED IN LUNG, SIGNAL = 1.6; EXPRESSED IN HELA, SIGNAL = 1.7; EXPRESSED IN BRAIN, SIGNAL = 1.8; EXPRESSED IN BONE MARROW, SIGNAL = 1.6; EXPRESSED IN HEART, SIGNAL = 1.4; EXPRESSED IN PLACENTA, SIGNAL =   2; NT HIT: AF069489.1, EVALUE 0.00e+00; EST_HUMAN HIT: BI758539.1, EVALUE 0.00e+00; SWISSPROT HIT: P27815, EVALUE 9.00e-43
ggtgcttccttcagaccaaggcttcaaactcctaggaaatgttctccagggccctgagccttacaggcttctgacctctggcctccgtctccaccaggaactggagaacctgaacaagtggggcctgaacatcttttgcgtgtcggattacgctggaggccgctcactcacctgcatcatgtacatgatattccaggtgatggggacagctgggagtgggcccgggtgaggggctcatagcggggcgctggaggccggtggaggtcaccaccctgcccctgcctgctctcaggagcgggacctgctgaagaaattccgcatccctgtggacacgatggtgacatacatgctgacgctggaggatcactaccacgctgacgtggcctaccataacagcctgcacgcagctgacgtgctgcagtccacccacgtactgctggccacgcctgcactagatgtgagtgactgccctgtgagtgaccgtccccatctctctttgtgactgcctcttcagcctcctgtgtgtctctctgaccctgtgtctctgacctccatctctctttgacgc

SEQ ID NO: 2409 - DNA, 539 bp, Homo sapiens
  MAP TO CHR6.1; EXPRESSED IN BONE MARROW, SIGNAL = 1.7; EXPRESSED IN ADULT LIVER, SIGNAL = 1.1; EXPRESSED IN PLACENTA, SIGNAL = 2.3; EXPRESSED IN FETAL LIVER, SIGNAL = 1.5; EXPRESSED IN BRAIN, SIGNAL = 2.3; EXPRESSED IN LUNG, SIGNAL = 1.4; EXPRESSED IN HEART, SIGNAL =   1; NT HIT: U48705.1, EVALUE 0.00e+00; EST_HUMAN HIT: AL539517.1, EVALUE 0.00e+00; SWISSPROT HIT: Q08345, EVALUE 3.00e-42
tgagagggaagtgacccttggcctcacgtgggcattccacctccacatggggagccagagtgaccgggcccggggagtgggctctctctcctctcctggatgggaatctgcgaagctgcccccagtgaccttctgtcggttcccttctcagctacccaatgctgctgcatgtggcagcccagatcgcctccggcatgcgctatctggccacactcaactttgtacatcgggacctggccacgcggaactgcctagttggggaaaatttcaccatcaaaatcgcagactttggcatgagccggaacctctatgctggggactattaccgtgtgcagggccgggcagtgctgcccatccgctggatggcctgggagtgcatcctcatggtgagcagcccgaggacagccaggttggagcagggcaggtgggagaacactggccgccactcacagccctggtctccatcagtcacacactttctctgggttgcattttacagaatctcatctataatatgaggttctcctagcccaagggac

SEQ ID NO: 2410 - DNA, 581 bp, Homo sapiens
  MAP TO CHR5.1; EXPRESSED IN BONE MARROW, SIGNAL = 0.71; EXPRESSED IN LUNG, SIGNAL = 0.9; EXPRESSED IN HELA, SIGNAL = 0.81; EXPRESSED IN BRAIN, SIGNAL = 0.76; EXPRESSED IN HEART, SIGNAL = 0.86; NT HIT: U48483.1, EVALUE 0.00e+00; SWISSPROT HIT: P21817, EVALUE 3.00e-48; EST_HUMAN HIT: BI549601.1, EVALUE 0.00e+00
tgggagaggtagttgggttggagggtgagatgggaagaatagggtttgggagactgtttaaggggggtggcaattcaatggtgtctgatgtattgcgggggaggccagggcactgaggtctgggggtgatggcttgacattccctgcccccgtccctgtaccccagtcctggggctccccaacagtgtggaggagatgtgtcccgacatcccggtgctggagcggctcatggcagacattggggggctggccgagtcaggtgcccgctacacagagatgccgcatgtcatcgagatcacgctgcccatgctatgcagctacctgccccgatggtgggagcgcgggcccgaggcacccccttccgccctgcccgccggcgcccccccaccctgcacagctgtcacctctgaccacctcaactccctgctggggaatatcctgagaatcatcgtcaacaacctgggcattgacgaggcctcctggatgaagcggctggctggtgggtcggggggcactgggcctctgaggggtgggtcagcagcctgggctcccttggcagatggtctgaaagggagacccat

SEQ ID NO: 2411 - DNA, 595 bp, Homo sapiens
  MAP TO CHR14.1; EXPRESSED IN PLACENTA, SIGNAL = 3.1; EXPRESSED IN FETAL LIVER, SIGNAL = 2.9; EXPRESSED IN LUNG, SIGNAL = 2.2; EXPRESSED IN HELA, SIGNAL = 2.7; EXPRESSED IN BRAIN, SIGNAL = 3.5; EXPRESSED IN BONE MARROW, SIGNAL = 3.4; EXPRESSED IN ADULT LIVER, SIGNAL = 1.8; EXPRESSED IN HEART, SIGNAL = 2.2; NT HIT: gi13649630, EVALUE 4.00e-73; SWISSPROT HIT: Q93134, EVALUE 1.70e-01; EST_HUMAN HIT: BE739840.1, EVALUE 5.00e-73
tttgggtaaaatgccaggagtgaggagactgctgtttctatcccattaacccatcagcctgtttcacctcaaatttccgggtgccgaacccttccgcagtttcacttgccactcgctgattttctcatcagcactgaggacaaaaaaggtgtgtgccgaggaccagatcagagcaccaatgtggcctggagcctggtgtacacaacaagttcaattcagtgcttctgatgagccaggatgcaccatcttttccctcccaggcacatatgcaacctctaacgcccagtaaatacacagccagggtagaattcacacagacaaagaaccaagggtacaccgactcacctgtgctgtggccacagccttagcttcctgccacaagattagttccccagcttgatttccagatactgccatggaaccatctggtgcccaagccacagcagtgacggctgcagaactccttggtatacatgtgtcatctggaggagaaaggacgtgtttcattaggagctgggatactgctgggataagagatatcaggccacccttgacctttttttgtgccagtaacacaccctgtctctctccaagc

SEQ ID NO: 2412 - DNA, 558 bp, Homo sapiens
  MAP TO CHR12.1; EXPRESSED IN LUNG, SIGNAL = 2.2; EXPRESSED IN FETAL LIVER, SIGNAL = 2.5; EXPRESSED IN BRAIN, SIGNAL = 3.7; EXPRESSED IN HEART, SIGNAL = 2.4; EXPRESSED IN BONE MARROW, SIGNAL = 3.6; EXPRESSED IN ADULT LIVER, SIGNAL =   4; EXPRESSED IN PLACENTA, SIGNAL = 3.4; EXPRESSED IN HELA, SIGNAL =   3; NT HIT: gi7705824, EVALUE 0.00e+00; SWISSPROT HIT: Q62158, EVALUE 3.00e-35; EST_HUMAN HIT: BI828196.1, EVALUE 0.00e+00
cctaccttgtacccctgcactgcctcctcggcgggcagcaccctgtgcagccggtgctcccgggactccctgcacaccacacagatggggctctggtccttctggcagaaaagcttgaggggctcgtggtgctcctggcacaggtcttgcttctgcagaccaggatgctgctgcgccatctcggccaccttggtcagcagccggttgggcagcaggttcctctgcggggacatctctctgcactcggggcaggggaaggagcccttccgcttccgcctccccttcttgcccctcgccttttcccagctcagctggatgcaggctcggcagaagttgtggccacaggtggtcatcacagggtctgtgaagtaatccagacagatggagcacgtagcttcctcctgcagttttctggcgagttccacagcctccatggctcctgggagacacgaggcaggttcccgcttgagggactctggagagagttggagggagcagcccgatgatctgggcgccggcagtgtgcaaccgtcctgtacagcctccctttacagagga

SEQ ID NO: 2413 - DNA, 504 bp, Homo sapiens
  MAP TO CHR12.1; EXPRESSED IN BRAIN, SIGNAL =   4; EXPRESSED IN HEART, SIGNAL = 2.2; EXPRESSED IN ADULT LIVER, SIGNAL = 4.2; EXPRESSED IN PLACENTA, SIGNAL = 4.4; EXPRESSED IN FETAL LIVER, SIGNAL = 2.5; EXPRESSED IN LUNG, SIGNAL = 2.8; NT HIT: X69723.1, EVALUE 0.00e+00; EST_HUMAN HIT: AL571331.1, EVALUE 4.00e-73; SWISSPROT HIT: P15426, EVALUE 4.00e-41
ttagtctcatccccctgtggtaccatcttgtcctcagaggtggtttgtgctccccctactgcctatatcgacttcgcccggcagaagctagatcccaagattgctgtggctgcgcagaactgctacaaagtgactaatggggcttttactggggagatcaggtgagatcgaggtggagaggggtgtgtgggacccttccctcactttcctcgttgaggggaaagccacagggtgggctccctgctgaaccttggcttcatctcttcctttagccctggcatgatcaaagactgcggagccacgtgggtggtcctggggcactcagagagaaggcatgtctttggggagtcagatgaggttagtagccaagagagaagataagggatgtctttttccaagaaggatgtctcaccaagtctgtttctcaacagctgattgggcagaaagtggcccatgctctggcagagggactcggagtaatcgcctgcattggggagaagctag

SEQ ID NO: 2414 - DNA, 509 bp, Homo sapiens
  MAP TO CHR22.1; EXPRESSED IN BONE MARROW, SIGNAL = 0.86; EXPRESSED IN HEART, SIGNAL = 0.89; EXPRESSED IN ADULT LIVER, SIGNAL = 0.87; EXPRESSED IN HELA, SIGNAL = 0.58; EXPRESSED IN BRAIN, SIGNAL = 1.2; EXPRESSED IN LUNG, SIGNAL =   1; NT HIT: gi9506784, EVALUE 1.90e+00; EST_HUMAN HIT: AA323342.1, EVALUE 5.00e-14; SWISSPROT HIT: P87503, EVALUE 1.20e-02
gccctctttggacattgaaccagctggaccttatgacccatagggccctttccagctctgagggtctctgggctggggccgccttaccctcctcttcagggggctgcgcagcaggctcccactcgccagccgcctgcaggacgtctggggccggtggctcctgcaggaagagctcccgtcgatggctgtggctctccaggttgggcccgcggggcgggaacttcttgcgcgagagccgcaggtacttgtgggcctttcggggcttgcggagcgggaagggcagggtgggcaccaaggggcccttgtccaccagctcaggtgcccccgccttgaccaccccctcagggctcccgctgccgagtgggcacgtcagggagaagcagagcttctccttgcccttggccttgtgggagctccgcaggtccatgctgtacagccgctgcgggggcaagccagggcagcgcgggtcagccccaccctcccacccgccacacctttgctcatgctgt

SEQ ID NO: 2415 - DNA, 569 bp, Homo sapiens
  MAP TO CHR6.1; EXPRESSED IN HELA, SIGNAL = 1.4; EXPRESSED IN LUNG, SIGNAL = 1.2; EXPRESSED IN BRAIN, SIGNAL = 1.4; EXPRESSED IN HEART, SIGNAL = 1.6; EXPRESSED IN FETAL LIVER, SIGNAL = 1.3; EXPRESSED IN PLACENTA, SIGNAL = 1.5; NT HIT: AJ302613.1, EVALUE 0.00e+00; EST_HUMAN HIT: BI562613.1, EVALUE 0.00e+00; SWISSPROT HIT: Q9GZK4, EVALUE 9.00e-89
aatcacactggggtgacagcctcatccctccaggtacaaacaagaacaggccatggttaaccaaagctcccccatgggcttcctccttctgggcttctctgaacacccagcactggaaaggactctctttgtggttgtcttcacttcctacctcttgaccctggtgggcaacacactcatcatcctgctgtctgtactgtaccccaggctccactctccaatgtactttttcctctctgacctctccttcttggacctctgctttaccacaagttgtgtcccccagatgctggtcaacctctggggcccaaagaagaccatcagcttcctgggatgctctgtccagctcttcatcttcctgtccctggggaccactgagtgcatcctcctgacagtgatggcctttgaccgatacgtggctgtctgccagcccctccactatgccaccatcatccacccccgcctgtgctggcagctggcatctgtggcctgggttatgagtctggttcaatcgatagtccagacaccatccaccctccacttgcccttctgtccccaccagcagatag

SEQ ID NO: 2416 - DNA, 549 bp, Homo sapiens
  MAP TO CHR2.1; EXPRESSED IN FETAL LIVER, SIGNAL = 0.84; EXPRESSED IN LUNG, SIGNAL = 0.65; EXPRESSED IN HELA, SIGNAL = 0.61; EXPRESSED IN BRAIN, SIGNAL = 0.85; EXPRESSED IN BONE MARROW, SIGNAL = 0.94; NT HIT: gi16157781, EVALUE 0.00e+00; EST_HUMAN HIT: BF829497.1, EVALUE 0.00e+00; SWISSPROT HIT: Q14324, EVALUE 2.00e-14
tatgcagaaaatgctgctggagttggaaaacctagccatccttctgaaccagtcttggcaattgatgcttgtggtacgtatttgtcatgggaagggcagttctgataacaaaaatgcaaatcttacttctgcgaagcaaaatattataagtgccgctaatctgcttctcttattaccacagaacccccaagaaatgttcgtatcactgatatttcaaagaactctgtcagcctttcatggcaacaaccagctttcgatggaggtagcaagattacaggctacattgttgagagacgtgaccttccagatggcagatggaccaaggccagcttcaccaatgttactgaaactcaattcatcatctctggcttgactcagaattcccagtatgaattccgtgtctttgctaggaatgctgttggttccattagcaatccatctgaggttgtagggcccattacttgcatcgattcttatggtaagcatgcttagcactttgaatcaaaattgctatttaactcagtatttccgcataccttttcctggttc

SEQ ID NO: 2417 - DNA, 515 bp, Homo sapiens
  MAP TO CHR19.1; EXPRESSED IN LUNG, SIGNAL = 1.4; EXPRESSED IN HELA, SIGNAL = 2.4; EXPRESSED IN BRAIN, SIGNAL = 2.1; EXPRESSED IN HEART, SIGNAL = 2.9; EXPRESSED IN ADULT LIVER, SIGNAL = 4.8; NT HIT: AB067468.1, EVALUE 0.00e+00; EST_HUMAN HIT: AW007846.1, EVALUE 3.00e-28; SWISSPROT HIT: Q99541, EVALUE 2.00e-05
cccatgaccccagtagtcactgtgtctttggtgccggtcagcacagtcttggtggtgtccacaccggcctgtacggtccctttggccacattcactgcccccgtgagcccagtggacaccgtgtccttggtgccggtgaggacagccttcgaggtgtccagacccccttggacggcccccttagccatgtccatggcccctgtgaccccgctggacaccacctccttggtgcccgtaagtgcagaccgagtggtgtccaggcctccctggaccactcccttagccacgtccaccacgctggccaccccggaggacacggcatccttggccctggacatcttggaacacaccaggtctttggccccggacaccatctgctgagaaaggacacaggtggatcaagagaaggactgagaggtgtactccaccccgatgtctgccagcccagccccctagtgtgctttggggcaaggaactgcaggcacccagaggccccacctcctcaaaaagcaagc

SEQ ID NO: 2418 - DNA, 514 bp, Homo sapiens
  MAP TO CHR17.1; EXPRESSED IN PLACENTA, SIGNAL = 4.9; EXPRESSED IN FETAL LIVER, SIGNAL = 4.2; EXPRESSED IN BRAIN, SIGNAL = 4.9; EXPRESSED IN LUNG, SIGNAL = 3.8; EXPRESSED IN HELA, SIGNAL = 4.6; EXPRESSED IN BONE MARROW, SIGNAL = 5.3; EXPRESSED IN HEART, SIGNAL = 3.1; NT HIT: U72336.1, EVALUE 0.00e+00; SWISSPROT HIT: P43035, EVALUE 2.00e-33; EST_HUMAN HIT: AW770846.1, EVALUE 0.00e+00
ccaagacaaattcactgcccttctctaattagtagaggactctgtcaccagatacaaatcgaaatttttctttttgttaaagagttaaggcaattgtactgaatttttctcaatttttagtttcctcacatgacttagattttgatgctgtacaaaataaataattttcatttaaatttgacaaatgctttggagattactgaaattttttcaagtatcctacatacatagttgcaaaataaaggcagttttttaaaatgtcacatgctatttttattgaaatctatctgtacgtaactacatgttctttttcaaggttatggaattagaatcaaagctaaatgaagcaaaagaagaatttacgtcaggtggacctcttggtcagaaacgagacccaaaagaatggattccccgtccgccagaaaaatatgcattgagtggtcacaggagtccagtcactcgagtcattttccatcctgtgttcagtgttatggtctctgcttcagaggatgct

SEQ ID NO: 2419 - DNA, 541 bp, Homo sapiens
  MAP TO CHR19.1; EXPRESSED IN ADULT LIVER, SIGNAL =   2; EXPRESSED IN LUNG, SIGNAL = 3.2; EXPRESSED IN FETAL LIVER, SIGNAL = 1.6; EXPRESSED IN BRAIN, SIGNAL = 2.2; EXPRESSED IN HEART, SIGNAL = 2.3; NT HIT: gi15308560, EVALUE 1.00e-108; SWISSPROT HIT: P10493, EVALUE 3.00e+00; EST_HUMAN HIT: AW014008.1, EVALUE 0.00e+00
cagcctagaggtgacttgcccatgtcacaggtgtaagtcgtctgagaccagcagccacatatccagaactggaggtcaggggtcagtacccaaagttatgaatcatggattaaggttcagagttcagaaaacacaggtcaaaggtcagaggtcagtgtcaggggtcagccagggaagttagtagtcgcatgtccagggaaaagggtcgcgtttcaaggctcagggacccatgcacacctgaacagatgggccaccaggtgccgcagggtgttgtagttagagtcaggcagctgtaccaagagggtcttcagcgagcggataacctcagggctggggctgggggtcccagggtcgtccccagggtctgcatgcaaggtcttagccagagagatgaaggcgtcgtagaggtggaaggggatcacgggctcggtgagctgggggtggaacggagggcgcaacacgagtgtgggtgggctgtggagggctcctgcccgcgtccccctcagtgtcctgagcaccaacctcctgaagaaatcgcttg

SEQ ID NO: 2420 - DNA, 512 bp, Homo sapiens
  MAP TO CHR1.1; EXPRESSED IN ADULT LIVER, SIGNAL = 3.7; EXPRESSED IN BONE MARROW, SIGNAL = 5.2; EXPRESSED IN FETAL LIVER, SIGNAL = 3.5; EXPRESSED IN HELA, SIGNAL = 3.4; EXPRESSED IN BRAIN, SIGNAL = 4.5; EXPRESSED IN HEART, SIGNAL =   3; SWISSPROT HIT: P30992, EVALUE 4.20e-01; EST_HUMAN HIT: H30565.1, EVALUE 4.60e-02; NT HIT: M30395.1, EVALUE 1.90e+00
tgtatttgggaatgttaactgaggtttttttcccttgtgcttctttataaccattactcttttctttatcattctgtcatattccatacacattgttctcagacagaaagtagataaagctgagaagaaaaaatctgttgaatgtctgaatggatttattttaaacccatagtagagacaacagcttgagaggcaggactttctttgattctgaaagctgtgcattttgagaaagagcaaaacaagtgtgtagctgcttcctaagttttggtatggagcccagagcccaccctctgaaccaagtaaacccactatcaaggcaatattttttaaactgtgggctgagacctcttgcatcataaaattggtttatcgggataaaaccagcattaaaagaaagagaatacaatggactaggaaatcccagagtttgttgccaggtaatggcaatgttgtttggtgaagttgttgtttcatgtgtgatgtgtacgtgtgctcagccgtgatgtaaa

SEQ ID NO: 2421 - DNA, 543 bp, Homo sapiens
  MAP TO CHR6.1; EXPRESSED IN HELA, SIGNAL = 4.2; EXPRESSED IN BRAIN, SIGNAL = 4.5; EXPRESSED IN HEART, SIGNAL = 3.2; EXPRESSED IN ADULT LIVER, SIGNAL = 4.1; EXPRESSED IN LUNG, SIGNAL = 4.2; EXPRESSED IN FETAL LIVER, SIGNAL = 3.5; NT HIT: gi14165253, EVALUE 0.00e+00; SWISSPROT HIT: Q99594, EVALUE 1.00e-34; EST_HUMAN HIT: BE731877.1, EVALUE 0.00e+00
ggaggaggatccagacacacaggcttgcgcgcccagactcgcccggccagcggctggcggcctccgacgtcaccaaaccggttgggtgagagggcagagagcagggggaagggccgcagtcccgcccgcgccccccggcacgcaccgtacatcttgccctcgtctgacaggatgatcttccgccggccgcagggcgggtagatggccagggcctcctggaagctctgctcgatgtccgggctccacacgccctccgcatcgttgtccagccccttgtccaggccctcgggcccatcctcccgggcctccccggggctgctgctggcgttccagctgttggacgctattgtgctggttgctctgggctctgggcctgagcccactgggcggctgagcctgggggacagacagacaggaactgggaccagggtcctcctcgaccacagcaatctcctatcccacagccgctggctctggagctccgcccccagccccaagcccaccctaggagcaggtgctccaggtggaacggaggtaaccaga

SEQ ID NO: 2422 - DNA, 600 bp, Homo sapiens
  MAP TO CHR1.1; EXPRESSED IN PLACENTA, SIGNAL = 2.9; EXPRESSED IN LUNG, SIGNAL = 0.92; EXPRESSED IN BRAIN, SIGNAL = 0.81; EXPRESSED IN BONE MARROW, SIGNAL = 0.87; EST_HUMAN HIT: BI770786.1, EVALUE 0.00e+00; NT HIT: gi16161678, EVALUE 1.00e-121; SWISSPROT HIT: P13942, EVALUE 8.80e-01
gcgtgagaaatcggaaagagctcaaaaaggctgatttgtgagggtgggatttaatgatggaggtggcccttaagcacaggcatccagctatttcccacacctcccatgcttcttccttcctaggtccaggccttttccaggtccagccgaccagcccaaccccctcgcctcctgcacacagcagacacctgtcagctagaggtggccctgattggagcctctccccggggaaaccgttccctgtttgggctggaggtagccacattgggccagggccctgactgcccctcaatgcaggagcagcactccatcgacgatgaatatgcaccggccgtcttccaggtcaggcttcctggagagaggcagatgggtgaggaatgtaggtgggacaccattgggacctaaaactcattcaaccatttgccatttagcaacactttctttgggtcgtttaagagctaggcactgtgctaatgaatctgacccagtctctgccctcagtggagacagacagaaagtgcaatatgacttacactctggcagatggagatctgcaagggggctaggggccaagaggagggctgagtccagacttggagg

SEQ ID NO: 2423 - DNA, 505 bp, Homo sapiens
  MAP TO CHR12.1; EXPRESSED IN HELA, SIGNAL = 1.1; EXPRESSED IN FETAL LIVER, SIGNAL = 1.3; EXPRESSED IN BRAIN, SIGNAL = 0.83; EXPRESSED IN LUNG, SIGNAL = 0.76; EXPRESSED IN BONE MARROW, SIGNAL = 0.97; EXPRESSED IN ADULT LIVER, SIGNAL = 0.86; EST_HUMAN HIT: AL550083.1, EVALUE 6.00e-97; NT HIT: gi15375317, EVALUE 4.00e-97; SWISSPROT HIT: O55438, EVALUE 1.20e+00
tggcacagagtgcctgttacaacagtccagggcctgcatgactcaggtctctatgccagggtcatgctggagaatgcagctttcagaagagtcacttcagagtgagtgaaatacctacacaaacatctggaccaagaggggcaattacctgtttggtatctttcctggtatgtcaatcagctctccctgcaccagcttcatgtagtgattcattgagaactggggccctaccaagaaggccccatagaagtaggagaaaccagcaacttccagcagggaaggaacaccacgtatggcatatttctgttgctcagaggacaaggaattctatgccaagaagagaatgcatggttcaggatagccttgaatctccccacaagagccactttgagtgttccccacctgtgtgccccactgactggggttcttcaaatagccttctctttgggggatgacaaatagttgcttcttgtggaaatgcgtatgtgtgtgcatagctggctgt

SEQ ID NO: 2424 - DNA, 550 bp, Homo sapiens
  MAP TO CHR3.1; EXPRESSED IN LUNG, SIGNAL = 1.2; EXPRESSED IN HELA, SIGNAL = 1.5; EXPRESSED IN BRAIN, SIGNAL = 1.7; EXPRESSED IN HEART, SIGNAL = 1.2; EXPRESSED IN BONE MARROW, SIGNAL = 1.2; EXPRESSED IN ADULT LIVER, SIGNAL = 0.44; EST_HUMAN HIT: BG682359.1, EVALUE 3.00e+00; SWISSPROT HIT: O43426, EVALUE 7.80e-01
cagacgccttctgggtagagtgtgatttcccgctccagtggttgtaaaatccccagaagcctagtgcgtccctattgtgtgtgtgtgggggggtctgtgcctcggaataccccctcccaggcgtgtttgacacgtgtttccgcctctccctgcatgggctcccgctgctgctatttataacctttaagagctcctgccgactgcaaagttttcttaaactcaaaatatcaccgaggtcccgggcacgcgttccagaggctggctgggccctgcggtttgaagggaggagggggccaggaaggaggaggtggtggggagggggttagctcagacactgggtccttgccgggggctgtggccgggagccctcgagtggagaacccctagtcctgacactcctgccctgttaggcctggaggaaccctctatgtgggtggtcctttgtcgtgccttgccaaatctctgggcctcagtttcctctcactctaaatgcctcaggggacactggctggggcaaggcaatgagctggcggacactgggaatgtctct

SEQ ID NO: 2425 - DNA, 562 bp, Homo sapiens
  MAP TO CHR17.1; EXPRESSED IN ADULT LIVER, SIGNAL = 1.3; EXPRESSED IN FETAL LIVER, SIGNAL = 0.7; EXPRESSED IN HELA, SIGNAL = 0.81; EXPRESSED IN BRAIN, SIGNAL = 0.8; EXPRESSED IN LUNG, SIGNAL = 0.88; EXPRESSED IN HEART, SIGNAL = 0.99; NT HIT: gi14773065, EVALUE 3.00e-95; EST_HUMAN HIT: BF885208.1, EVALUE 1.00e-15; SWISSPROT HIT: P41234, EVALUE 4.00e-07
gatatgcttggcgcattgtaaattatatgcaatgttagctattgtttaaattggattttcttgtccaacaattgtacaatgatttgcgcacaaataatttaaaattaaaactcagtgcaaatggttttaataatctcattttgaccaacacattaactttaacatatttttgtacctctttatccacttcttgtggcagaatcccttttattttagcaaagagtctgaggttttctcttacagtgaggaagtcaaattgcacattggattgtggacaaactccggtcagcttgctgagattttctaggtcagccatttctgaaagcttattgttatagatggtgactgaacctgtaacaaaggaaaagttaatatcaagataaggcttaagatatttcttaataaaatcgctgttaattaaatgtacgtatgactttatcttgacagtttatacaattcaggcattagaaacttctactttagttgcatagtatattcaaaatatgttctcatctgcagcttttcccatcaaggtgtagtccctttgtctgcccctcacatt

SEQ ID NO: 2426 - DNA, 529 bp, Homo sapiens
  MAP TO CHR19.1; EXPRESSED IN LUNG, SIGNAL = 2.4; EXPRESSED IN BRAIN, SIGNAL = 2.8; EXPRESSED IN PLACENTA, SIGNAL = 3.7; EXPRESSED IN FETAL LIVER, SIGNAL = 2.1; EXPRESSED IN HELA, SIGNAL = 2.5; EXPRESSED IN HEART, SIGNAL = 3.1; EXPRESSED IN BONE MARROW, SIGNAL = 2.4; EXPRESSED IN ADULT LIVER, SIGNAL = 3.4; SWISSPROT HIT: P27692, EVALUE 2.00e-06; NT HIT: gi14764278, EVALUE 2.00e-83; EST_HUMAN HIT: AU138558.1, EVALUE 3.00e-83
catccacacctgatgctgtctctgagcagagctgcaggtcccgggggagcaccttcagctgccagggatggtgaaaggggtgaggcccagtccaggtggctcgcctacctgggtctcctcttggcacgtgcacccttccccgacccttctatccacctacctcatgcatggtgaggtcagagaacaggataacgaaattctcctccacccgcacaatgaggcctgtgtcgccctcgaatcggccagcaatcaccttcacgtggtcccccatcttgaagtattttctaagttcctgggctgggaactccaacatgtcctgggggattgggtgtggggacaacaaacaggtgaagggagaccaccacaacctgcctgcccctcctgtcttcagaatctacgcatgttctcaaaaaccccacttcaggctcttaccacccaccccagactaccttagtccacctggacgacccctcagactgccccagaaacagctgaccccagacacaggacaccaacctggacaaccttt

SEQ ID NO: 2427 - DNA, 522 bp, Homo sapiens
  MAP TO CHR2.1; EXPRESSED IN BONE MARROW, SIGNAL = 1.3; EXPRESSED IN HEART, SIGNAL = 3.8; EXPRESSED IN ADULT LIVER, SIGNAL = 0.81; EXPRESSED IN FETAL LIVER, SIGNAL = 1.1; EXPRESSED IN LUNG, SIGNAL = 0.65; EXPRESSED IN HELA, SIGNAL = 0.94; EXPRESSED IN BRAIN, SIGNAL = 1.3; EST_HUMAN HIT: BF126349.1, EVALUE 2.00e-19; SWISSPROT HIT: P52179, EVALUE 2.00e-11; NT HIT: gi16157781, EVALUE 0.00e+00
aacaaaggggatttgattaggttacctaggtaatcttctaaattatgtttttcttctaggtgagccggatcccccaaggaaattagaagtgactgaaatgaccaagaacagtgccaccttagcctggttacctcccctacgtgatggaggtgctaaaatcgatggctacatcactagttacagagaagaagagcagcctgcagatcgctggacagagtactcagtggtaaaagatctgagccttgttgtcactggcctaaaggaaggaaagaaatacaaatttagagtagcggccagaaatgctgttggagtcagtttgccaagagaagctgaaggagtgtatgaagccaaagaacaactgtgtaagtagtctttgcttcatttatgtcatgtggtaagtttattagaatttcttcttttatatgtagacatttctccctgaggaatctagctctagaaattcttgaaaaacagtagagaacagtggctttcaaacacatgagtgggccaaaaacacacagt

SEQ ID NO: 2428 - DNA, 593 bp, Homo sapiens
  MAP TO CHR15.1; EXPRESSED IN LUNG, SIGNAL = 1.1; EXPRESSED IN BRAIN, SIGNAL = 1.1; EXPRESSED IN BONE MARROW, SIGNAL = 1.2; EXPRESSED IN HEART, SIGNAL = 1.3; EXPRESSED IN ADULT LIVER, SIGNAL =   1; EXPRESSED IN PLACENTA, SIGNAL = 1.5; EXPRESSED IN FETAL LIVER, SIGNAL = 1.5; NT HIT: AF266285.1, EVALUE 3.00e-92; EST_HUMAN HIT: BG472205.1, EVALUE 8.00e-32; SWISSPROT HIT: Q08379, EVALUE 3.00e-18
ggggttctaggaaagcaaggcagtcacttaggcctgaagtaaggggccaggggcctgggcaggcgacagagccccacagtgccctcgctaccctattaatgggcccagaatctgcaaaccagccaccatgtgccctcacacccagggtcttcctgcaggtggagctgaagagccaagaggctcagagtctgcagcagcagccagaccattacctgggtcacctgcagcagtacgtggccacctatcagcagcaggtggccgcctatcagcagctgacctgtgagaaggaggcgctgtacaggcagtggctgcagcagacccagctaatgaaccagttgcagcagcaggaagcttggggcaaagcggtggccgagatggcctgccaaaagttgcaggaggcccaggggagggagctgccgaggatggggccgtgagggggacgacctggcaaactctgtgccttctcactctttcctggccccttaggagcgtctggaagctgccagccagcagaaacagcagctaacggcccagttgagcctcatggctctccctggggaaggtacgggagaccgctcagaggaagaggagag

SEQ ID NO: 2429 - DNA, 515 bp, Homo sapiens
  MAP TO CHR19.1; EXPRESSED IN LUNG, SIGNAL = 1.8; EXPRESSED IN HELA, SIGNAL =   4; EXPRESSED IN BRAIN, SIGNAL = 3.6; EXPRESSED IN HEART, SIGNAL = 2.3; EXPRESSED IN ADULT LIVER, SIGNAL = 4.1; EXPRESSED IN PLACENTA, SIGNAL = 4.6; NT HIT: AF289221.1, EVALUE 0.00e+00; EST_HUMAN HIT: BE780931.1, EVALUE 1.00e-105; SWISSPROT HIT: P17426, EVALUE 1.00e-30
tctggactccccattctgagggaggagggctggaagcccagactcctgggtctgagggttgaatctggggcctggactcgtgggtctgagggaggaggggcctgggggcctggacttgtgggtctgagggaggaggggcctgggggcctggactcctgggtctgaggttgaatctggggcctggactcctgggtctgagggttggatctggggccactcagtcacaaggctcctagccatccacgacctccctccccacagggttacctgttcatttctgtgctggtgaactcgaactcggagctgatccgcctcatcaacaacgccatcaagaatgacctggccagccgcaaccccaccttcatgtgcctggccctgcactgcatcgccaacgtgggcagccgggagatgggcgaggcctttgccgctgacatcccccgcatcctggtggccgggtaaggcactggggacccgttggcagtggggggcctgggggtgatgagtcccagccaagt

SEQ ID NO: 2430 - DNA, 571 bp, Homo sapiens
  MAP TO CHR1.1; EXPRESSED IN LUNG, SIGNAL = 0.78; EXPRESSED IN FETAL LIVER, SIGNAL = 0.54; EXPRESSED IN BRAIN, SIGNAL = 0.5; EXPRESSED IN HEART, SIGNAL = 0.44; EXPRESSED IN ADULT LIVER, SIGNAL = 0.96; NT HIT: gi12056481, EVALUE 2.00e-28; EST_HUMAN HIT: W44916.1, EVALUE 0.00e+00; SWISSPROT HIT: Q9UL59, EVALUE 1.00e-81
aatcgtttctccccagtgtggacattctgatggacttgaagatttgaagcctgactgaagcccttaccacactccttacatttatagggtttctctcccgtgtgaactctgaaatgaatatgcagatctgtattacgggtaaagcctttcccacacgcctcacacttgtatggcttctctcctgtgtggactctccgatggcatattaatggtgaattgtggctgaagcccttaccacacacatcacacttgtagggtttctctccagtgtggactctctgatggatgtgaaaatgtgcagcctgagtgaagcccttaccacattcctcacatttatagggcttctcacccctgtggaccctctggtgaacacggagattaacactccaaccgaagcccttaccacactcttcgcatttgtatggtttttcttcagtgtggactctctgatggcactgaaaatttgaactttgactaaagcatttaccacattcctcgcatttatagggtttctctccagtatgagttctgtaatgaatgataagacccgtgctgctactgaatcccttgc

SEQ ID NO: 2431 - DNA, 574 bp, Homo sapiens
  MAP TO CHR18.1; EXPRESSED IN PLACENTA, SIGNAL = 2.8; EXPRESSED IN FETAL LIVER, SIGNAL = 2.5; EXPRESSED IN LUNG, SIGNAL = 3.1; EXPRESSED IN HELA, SIGNAL = 3.3; EXPRESSED IN BRAIN, SIGNAL = 3.3; EXPRESSED IN HEART, SIGNAL = 3.2; EXPRESSED IN ADULT LIVER, SIGNAL = 3.9; NT HIT: AB011541.1, EVALUE 0.00e+00; EST_HUMAN HIT: BI087164.1, EVALUE 8.10e-01; SWISSPROT HIT: P10039, EVALUE 2.00e-04
aggaatggaggtgggagaacgacctgggagcaaccatccctagacagcgggtacccacaactcacggctgagaggcggctgtccatgagggtctcccagaccagctgcccgccatccagcttggtggcgcagtcggggcccccgaagccctcggcacagatgcacacacccaggctctgggggatgacaagggactcaggggagccctgatcaccagccctgtcccaccagacttgccctctcccacctgtacctggttacaagttcctgccccagtgtgggcattgcagttctcaggacacagagccatgcggcagtgtgggccagcccagccctgaggacatcggcagagccccgcacctgcagcaccgtcctggggcacgcattcctgggggacgggacagctcccggggccccctgacccacagcgggcagagcccaccgaagcattgaagccccaggatgaggagccattggcctcccagtgcagcacgagcagccctgtgaagagagaggccagaggctggtagcaaagtcacgttcctggccccttccacccccagatgctaagaaa

SEQ ID NO: 2432 - DNA, 517 bp, Homo sapiens
  MAP TO CHR18.1; EXPRESSED IN LUNG, SIGNAL = 1.1; EXPRESSED IN FETAL LIVER, SIGNAL =   1; EXPRESSED IN HELA, SIGNAL = 1.3; EXPRESSED IN BRAIN, SIGNAL = 1.4; EXPRESSED IN HEART, SIGNAL = 0.92; EXPRESSED IN ADULT LIVER, SIGNAL = 1.7; EXPRESSED IN BONE MARROW, SIGNAL = 1.6; SWISSPROT HIT: Q9TC94, EVALUE 1.10e-01; NT HIT: gi13376407, EVALUE 1.00e-106; EST_HUMAN HIT: AU140164.1, EVALUE 1.00e-106
ggtcctaccctcttgggaactgagaacatgacagtgtatcagacagcaggcaagagactcaccccagtatccagctgtatccagtgaacctcattgctagagctaatgcgggactgttgggtctgcagagtgtatgggaaggagctgacctggagcaccaggaggttgaaagcttccagaacttctctgcaattaatgactctatcagctagcccatgactgggttcgctatgtgacaaagagcctgaaatgacactgtagaaaaattgaaagtcatattaatacctcatttaaccaagtagatatagaatcagacactaacatggacatactgttttagtttttatttttctatctcttttcaattgggagcagagaagaaacaactaaaatttgacacggaaaggaaaaaaaatttacattccttcttttcagacagatttcaggaatatgtattttttttccttttcactttattcccaatatacctcaaagtgcaaactcagtcatttaggcc

SEQ ID NO: 2433 - DNA, 511 bp, Homo sapiens
  MAP TO CHR7.1; EXPRESSED IN HELA, SIGNAL = 1.3; EXPRESSED IN FETAL LIVER, SIGNAL = 1.2; EXPRESSED IN BRAIN, SIGNAL = 1.4; EXPRESSED IN HEART, SIGNAL =   1; EXPRESSED IN ADULT LIVER, SIGNAL = 1.7; EXPRESSED IN PLACENTA, SIGNAL = 1.2; EXPRESSED IN LUNG, SIGNAL = 0.98; EST_HUMAN HIT: AI253087.1, EVALUE 0.00e+00; SWISSPROT HIT: P25569, EVALUE 2.80e+00; NT HIT: gi8923107, EVALUE 3.00e-76
tttgaaaagatgtttccctgggttttttcaatttgttgaaatttatttattttaataatgtgaaattatgttgtgcgtttttttctttccacagacagcaatggatcaacttcatatgcacttcacccaagccattcacaacaccgtgtttcaagttgttcttggttatgtggaactatgtgcaggaaacacagacacaaaattccaaaagctgcaatataaggatctctgtacagtatgtagtgacttaattactattcatatatctctcctttagattttaaatttatatttcctttatcttggtacatacctatttgaaaatgctactaaaataaaaataaatctttgccaaaaattttttttctcccaagttgttcttttccttatagagaagttggaggactcagtcacacaaatggtaaaggttactgagattggagcatgattgcttctcaatcgactctttaccatttcatagcttcttttacccatctctctcaggctccaa

SEQ ID NO: 2434 - DNA, 502 bp, Homo sapiens
  MAP TO CHR5.1; EXPRESSED IN HELA, SIGNAL = 0.71; EXPRESSED IN BRAIN, SIGNAL = 0.76; EXPRESSED IN HEART, SIGNAL = 0.76; EXPRESSED IN BONE MARROW, SIGNAL = 0.86; EXPRESSED IN FETAL LIVER, SIGNAL = 0.71; EXPRESSED IN LUNG, SIGNAL = 0.81; NT HIT: gi16158291, EVALUE 9.00e-86; EST_HUMAN HIT: BG699335.1, EVALUE 5.00e-88; SWISSPROT HIT: O76743, EVALUE 9.10e-01
tgtggagaaccaccatgaaacgtttggtcctttaataaattctatatacacattaaaaaaatattcctttggataccacatgtaaacctacctttgttgcaataataatctgttttctttttcttttaaagctttctttagttctgctgtccttgagggcctatgtaggtattttctttttcctgtgcattcataagtccaatgtccaaattccaagcatttctgacatcttacatgttgcttatttgcttcactacagaacaaaaaacagaatacaagccttaaaattctgtcttgtgactttcaccctaaaaactataaaaaaatataaaggataaaattatgtttactcttatggtccaattcataaaaatcaacattttacccttgtgagatttaatacaacaaagtataataagtgtaatgacatggtttggctgtgtccccatttaaatctcatcttgaattcccacatgttgtgggagaaacctggtgggaggta

SEQ ID NO: 2435 - DNA, 515 bp, Homo sapiens
  MAP TO CHR7.1; EXPRESSED IN ADULT LIVER, SIGNAL =   2; EXPRESSED IN PLACENTA, SIGNAL = 1.8; EXPRESSED IN LUNG, SIGNAL = 2.4; EXPRESSED IN FETAL LIVER, SIGNAL = 2.1; EXPRESSED IN HELA, SIGNAL = 3.3; EXPRESSED IN BRAIN, SIGNAL = 1.8; EXPRESSED IN HEART, SIGNAL = 1.7; NT HIT: X90691.1, EVALUE 4.90e-01; EST_HUMAN HIT: AA833824.1, EVALUE 6.00e-60; SWISSPROT HIT: P36304, EVALUE 6.20e+00
ctgagcgactgatcttgtggaaatgatttaaggtgacacttgcagtacttttttttaagggatcaagcaggggagacctcttgtttgtacaagcttttagcttcataactggcttatgctagggaatatcatagcctgcttaagaatgactactggggcaggaggaaaaaaagctagaaaaaaagagaaggcagagtggctctgatggagggcaaagcaactgcggacgaagaggggtctacctggttcacagcatccgtgatgatggtggtcagtctgacagtatttgtcccttaaaggcattttcagtggactcgacctactttgctttcactgtaagaagctcttcattgcggcgtggctgttgaaagaagcacaaacccgtcactcgccctgaacttcctggggggcactggctgcattttccagatacgttcccatcatcagctctccgctttccctccacggacccgcacctccctctcgaaaagaaaacagaaagacgcacaaaccct

SEQ ID NO: 2436 - DNA, 546 bp, Homo sapiens
  MAP TO CHR9.1; EXPRESSED IN HELA, SIGNAL = 5.6; EXPRESSED IN LUNG, SIGNAL = 3.7; EXPRESSED IN FETAL LIVER, SIGNAL = 6.4; EXPRESSED IN BRAIN, SIGNAL = 4.6; EXPRESSED IN HEART, SIGNAL =   4; EXPRESSED IN BONE MARROW, SIGNAL = 6.3; EXPRESSED IN ADULT LIVER, SIGNAL = 3.8; EXPRESSED IN PLACENTA, SIGNAL =  11; NT HIT: gi15298907, EVALUE 7.00e-96; EST_HUMAN HIT: AA404630.1, EVALUE 1.00e-129; SWISSPROT HIT: P39188, EVALUE 1.00e-11
acctggaggaggacaatgtgatcaacgtaagaatccaggctgggttcagtggctcatgcctgtaattccagtgctttgggagacccaggtgggaggactgcttgagcccaggagttggagaccagcctaagcaacatagcgagaccccatctctaaaaataaatgaatacatacatatatatgtacatacatacataaaaatttaaaaataaactaagcaagaatccggacagtatcgaagcaaggagagatcctcttcagggaggggatacctgggcctccccagccatccctgggccctctcctcacctgaggtgcagcaagtagcagaggaggcggtgggtggggttagcatttccctcctcacccacaggcaccaaaaagaggcgatggcgcaggaaggtcatgtgggcagcaggcatgtccgagaagtcaaaggtcacaaggaacatctttaccacagtctggttggggttaaataaggtctagggacaggacagtcaaggttggtagggcctgagggctgctttcctctctccccactcc

SEQ ID NO: 2437 - DNA, 552 bp, Homo sapiens
  MAP TO CHR12.1; EXPRESSED IN PLACENTA, SIGNAL = 2.6; EXPRESSED IN LUNG, SIGNAL = 7.2; EXPRESSED IN BRAIN, SIGNAL = 0.51; EXPRESSED IN HEART, SIGNAL = 2.8; EXPRESSED IN BONE MARROW, SIGNAL = 0.65; EXPRESSED IN ADULT LIVER, SIGNAL =  99; NT HIT: gi14766597, EVALUE 0.00e+00; EST_HUMAN HIT: BF339574.1, EVALUE 0.00e+00; SWISSPROT HIT: P09871, EVALUE 1.00e-103
gatggaagctgctggaagtcccagaaggacgaaccaattttgataatgacattgcactggtgcggctgaaagacccagtgaaaatgggacccaccgtctctcccatctgcctaccaggcacctcttccgactacaacctcatggatggggacctgggactgatctcaggctggggccgaacagagaagagagatcgtgctgttcgcctcaaggcggcaaggttacctgtagctcctttaagaaaatgcaaagaagtgaaagtggagaaacccacagcagatgcagaggcctatgttttcactcctaacatgatctgtgctggaggagagaagggcatggatagctgtaaaggggacagtggtggggcctttgctgtacaggatcccaatgacaagaccaaattctacgcagctggcctggtgtcctgggggccccagtgtgggacctatgggctctacacacgggtaaagaactatgttgactggataatgaagactatgcaggaaaatagcaccccccgtgaggactaatccagatacatcccaccagcct

SEQ ID NO: 2438 - DNA, 552 bp, Homo sapiens
  MAP TO CHR1.1; EXPRESSED IN HELA, SIGNAL = 0.81; EXPRESSED IN BRAIN, SIGNAL = 0.51; EXPRESSED IN HEART, SIGNAL = 0.82; NT HIT: gi16161881, EVALUE 2.00e-96; EST_HUMAN HIT: AI636063.1, EVALUE 0.00e+00; SWISSPROT HIT: P23249, EVALUE 2.00e-25
ggggaggaggagtgtttctccctgagataaatgagaccccggggcagagcaggagacttttcctcaggggtaccctgagatgctacggcagcttcctcttctagagaacttgcatagaggtcttggaaagaggggttgggacactggttggtggagaaagttctggccctttattgcccacctcccctgccccaacaaactcttaccacctctctctgcccaaagcctcctgagccgctttgtggatgggctgaccttcaaggtgaactttaccttcaaccgccagccgctgcgagtccagcaccgtgccctggagctgacagggcgctggctgctgtggcccatgctctttcctgtggcacctcgggacgtcccgctgctgccctcagatgtgaaactcaagtgagactgtgggcagggagcttctggagccacttggagtgtgggcacagggggtggagtcagggaggcctctgggtcactggatgacttcaagttcacattcctggtccctctgccaggctgtacgaccggagtctggagtcaaaccca

SEQ ID NO: 2439 - DNA, 559 bp, Homo sapiens
  MAP TO CHR17.1; EXPRESSED IN ADULT LIVER, SIGNAL = 1.7; EXPRESSED IN PLACENTA, SIGNAL = 3.4; EXPRESSED IN FETAL LIVER, SIGNAL =   2; EXPRESSED IN HELA, SIGNAL = 4.2; EXPRESSED IN BRAIN, SIGNAL = 2.4; EXPRESSED IN LUNG, SIGNAL = 1.4; EXPRESSED IN HEART, SIGNAL = 0.94; NT HIT: U38623.1, EVALUE 1.00e-107; EST_HUMAN HIT: BG385888.1, EVALUE 1.00e-104; SWISSPROT HIT: P34703, EVALUE 1.80e+00
aggcccactatgcctattccttcaagtatttaaagaacaagcctgttaaggaactgagagatgaccagtttctcaagatatgcctggctgaagacgaagggctcctcaccactgacatcagcatagatttgaagggagtggaagggtaagcagagccctgggctggcgactctctggggaaggcctgatgaggagtctggtggagggaagggcccctcaggagtggggaaccacaatttcagagttgagcaggctgttgtctctggcttgcttagaatgttcatggacattgggtgtcaccttttctccattcctgacaccatagctttgtgtctcttctcagctatggcaacgaccagacatattttgaggagataaaacagttttactaccgagatgagttcagccaccaggtgcaggagtggaaccggcagcgcaccatggccatcgaacgggctttacagcagttcctctatgtgcagatggccaaagaactcaagaacaagctgctggctgaagccaaggaatatgtcataaaggtgaggacagagactcatga

SEQ ID NO: 2440 - DNA, 535 bp, Homo sapiens
  MAP TO CHR3.1; EXPRESSED IN FETAL LIVER, SIGNAL = 0.64; EXPRESSED IN LUNG, SIGNAL = 0.9; EXPRESSED IN BRAIN, SIGNAL = 0.68; EXPRESSED IN HEART, SIGNAL = 1.1; EXPRESSED IN BONE MARROW, SIGNAL = 0.6; SWISSPROT HIT: O60344, EVALUE 1.00e-38; NT HIT: gi15295411, EVALUE 1.00e-119; EST_HUMAN HIT: AL119270.1, EVALUE 1.00e-119
gcagagtttgcctcttccagacagacagactgacagtctcctaccctccggccatgttccctaccacagacccatcccacagcacctgccttacagaggcctgcattcgagtggctggaaaaatcctggagtccctggaccgaggggtgagcccctgtgaggacttttaccagttctcctgtgggggctggattcggaggaaccccctgcccgatgggcgttctcgctggaacaccttcaacagcctctgggaccaaaaccaggccatactgaagcacctgcttggtgagtggggctgttagggaggccttgggccacctatgtgccttgtgcccagcacagggcctggcacttagcaaataggcagtgtccatgaatgaggaagtggatggttctgtgaacactccagagggtggggaggcagagagcaggggactattgagaagtgcagatgggtttgatgggggcagaactctgggtacaatggagggccgcttctctgcactctgtttggagcactgtcgtggtgtggtag

SEQ ID NO: 2441 - DNA, 583 bp, Homo sapiens
  MAP TO CHR19.1; EXPRESSED IN LUNG, SIGNAL = 0.6; EXPRESSED IN BRAIN, SIGNAL = 0.39; EXPRESSED IN HEART, SIGNAL = 0.57; SWISSPROT HIT: Q9Y2G7, EVALUE 1.00e-122; NT HIT: gi11427700, EVALUE 0.00e+00; EST_HUMAN HIT: AA332875.1, EVALUE 0.00e+00
atgtggctcagaccttcgagtacatcagagaattcatattggtgagaagccgtatgaatgtaaagaatgtgggaaagcctttagagttagaggacaacttaatctccatcaaaggattcacacgggtgagaaaccctatgaatgtaaagaatgtgggaaggcctttaggcagtatgcacaccttactcgacatcagagactgaacattgctgagaagtgctatgagtgtaaggaatgtggtcaggcctttctgtgtagtacaggccttcgactacatcacaaacttcatactggagaaaaaccctatgaatgtaaggagtgtggaaaggcctttagagtgcggcagcaacttactctccatcagagaattcacactggtgagaagccttatgattgtaaggaatgtgggaagactttcagtcgtggctatcatctaactctccatcagagaatacatactggtgaaaagccctatgaatgtaaggaatgtcagaagttctttcgtcgttactcagaacttatttcacatcagggtattcacattggagagaaaccttatgaatgtaaggaatgtgggaaggca

SEQ ID NO: 2442 - DNA, 598 bp, Homo sapiens
  MAP TO CHR12.1; EXPRESSED IN HELA, SIGNAL = 2.2; EXPRESSED IN BRAIN, SIGNAL = 1.1; EXPRESSED IN LUNG, SIGNAL = 1.7; EXPRESSED IN HEART, SIGNAL = 1.4; EXPRESSED IN BONE MARROW, SIGNAL = 1.1; EXPRESSED IN ADULT LIVER, SIGNAL = 2.3; EXPRESSED IN PLACENTA, SIGNAL = 2.5; NT HIT: gi15304108, EVALUE 0.00e+00; EST_HUMAN HIT: BE882895.1, EVALUE 0.00e+00; SWISSPROT HIT: Q09775, EVALUE 1.00e-06
ttacctgggtttgttgtcccagcagctgggatgacacttgtgtcctcaggagtgtgaagaatgaagctaggcagctgtgggtcttagtgtggtagggaccacagtcagtaggaggacaggggagatgggcacctggagagggcactgtgggcgcctcaggttcaggcagcatgtgctgtattcctgcctttggagatggggtgggaaggatgcctctagaagtggaggcatcagacacggctccccagggcatctgggctatgctgagtgacgttcttcccattccccagattacatccaccgcattggccgcacgggacgagcaggcaagagtggggtggccatcaccttcctcacaaaagaggactctgctgtgttctacgagctgaagcaagctatcctggaaagcccagtgtcttcctgtccccccgaactagccaaccacccagatgcccagcataagccaggcaccatcctcaccaagaagcgccgggaagagaccatctttgcctgacacagcactcttcctgtgggctgagggcatctccaaagctgcctgatgcctgtttttcagaaccctcacatccctctttccagg

SEQ ID NO: 2443 - DNA, 599 bp, Homo sapiens
  MAP TO AC027045.2; EXPRESSED IN ADULT LIVER, SIGNAL = 0.61; EXPRESSED IN FETAL LIVER, SIGNAL = 0.48; EXPRESSED IN BRAIN, SIGNAL = 0.5; EXPRESSED IN BONE MARROW, SIGNAL = 0.59; EXPRESSED IN HEART, SIGNAL = 1.2; NT HIT: U49057.1, EVALUE 1.40e-01; EST_HUMAN HIT: AI470361.1, EVALUE 1.00e-123; SWISSPROT HIT: Q50615, EVALUE 2.60e+00
  unsure 506
  unsure 533
  unsure 553
ggtcgtcaagtcctgctctcgtgggtggaggtgacgtggccaggtcacccttgtatacagtggaggtggttttcagactgagtgcctgagcacatacgcatacagtgtgagtgtgtgtatgtgggggttacaggcattgcagctcctgtttcctgctgagtagtcaccctacagagcagggaagcttctggaagtgtgtcctgggaatgtggagaaccccaggctccgtagcttctgggctggctccaggctatcctcactgtcacgggaagacctcagacaggtgagggggtgtggctgcagggcgccccagtgtggagcataggacagaagcgccagcacctgccagaaaaacctttatttccaaggggtggcccatttggcctcctgcagttacccctcctccgggacattgagcttctccttcaccccacaggccaccacggcgaaaaagaactccgggaagaaggtgcggacgtacacggcggccttggggatggggggtnggccataaacacctcttgcttcttctncgcacggtgcgcatcacctnctccgccacctctactgggtgcacgcccgtaggtcagcttcctgaa

SEQ ID NO: 2444 - DNA, 559 bp, Homo sapiens
  MAP TO CHR11.1; EXPRESSED IN BONE MARROW, SIGNAL = 2.5; EXPRESSED IN PLACENTA, SIGNAL = 1.3; EXPRESSED IN LUNG, SIGNAL = 2.6; EXPRESSED IN FETAL LIVER, SIGNAL = 1.1; EXPRESSED IN BRAIN, SIGNAL = 1.5; EXPRESSED IN HEART, SIGNAL = 1.8; NT HIT: gi16164218, EVALUE 1.00e-97; EST_HUMAN HIT: AW573021.1, EVALUE 2.00e-01; SWISSPROT HIT: P19532, EVALUE 1.80e+00
tgcagagagtgacatgagggggagtctctcttgcgcactgggtcttggaagcaacttaccagaggagaactcctgggcgaatgccagggacatcagcaacaagggggagcccacagctacgaacttgactatccggtccaggggcagttccagacgcagtcctttgaggcggggtcccctgcggtcaggcagcagggcatctgagagcatgtactctgcagctgtgtgtgcaagtgacatgatgctgctgagcttgggggtgcagaggtggcagcaggggtcctgggatggtggaatgaggagacggcagcttcaggcagctgactttgggcagacagtgcctgccaccccagccttatggatatctctgctgggagcaggcgatggttctctaaataactgcccaggccctgagccaggccctgctaattagagggaggcatagccttagcgggtccttgctggaggagggtcgggccttacctgggcctggtgccacgctgctgtctggattgtcctagagcagatggaggtctgtggctttatgctgccctgtcat

SEQ ID NO: 2445 - DNA, 579 bp, Homo sapiens
  MAP TO CHR7.1; EXPRESSED IN HELA, SIGNAL =   2; EXPRESSED IN FETAL LIVER, SIGNAL = 2.2; EXPRESSED IN BRAIN, SIGNAL =   3; EXPRESSED IN HEART, SIGNAL = 4.2; EXPRESSED IN ADULT LIVER, SIGNAL = 2.5; EXPRESSED IN BONE MARROW, SIGNAL = 3.2; EXPRESSED IN LUNG, SIGNAL =   4; NT HIT: U96992.1, EVALUE 1.00e-114; EST_HUMAN HIT: BF695365.1, EVALUE 2.00e-97; SWISSPROT HIT: P08581, EVALUE 1.00e-30
aaaagtgggcataggtggtgactggaaggcacagtgcacggtggcatcattcactcagatgtgatgtaaaaagaacactctgcagtcaaaccctcaggacaagatgctaactgtgtggtttaccatttcattgctcttcctatctaaatttgacaaaagtattcactgttccataatgaagttaatgtctccaccactggatttctcaggaatcactgacataggagaagtttcccaatttctgaccgagggaatcatcatgaaagattttagtcatcccaatgtcctctcgctcctgggaatctgcctgcgaagtgaagggtctccgctggtggtcctaccatacatgaaacatggagatcttcgaaatttcattcgaaatgagactcatgtaagttgactgccaagcttactaactggcaaactagctgtaagccagccatcccttcaaaataggcctgctctgagtctttaaaaagctagtagccaaagatgcacatttaaaatgttagcatcattcaaatgcacctcaaagtcttctatcctggtgggaaatagtgacacctggaagggtttcct

SEQ ID NO: 2446 - DNA, 600 bp, Homo sapiens
  MAP TO CHR19.1; EXPRESSED IN LUNG, SIGNAL = 1.7; EXPRESSED IN FETAL LIVER, SIGNAL = 1.2; EXPRESSED IN HELA, SIGNAL = 1.7; EXPRESSED IN BRAIN, SIGNAL = 1.6; EXPRESSED IN HEART, SIGNAL = 1.3; EXPRESSED IN ADULT LIVER, SIGNAL = 2.2; EXPRESSED IN PLACENTA, SIGNAL = 1.7; NT HIT: gi15302818, EVALUE 3.00e-61; EST_HUMAN HIT: BF966724.1, EVALUE 5.00e-61; SWISSPROT HIT: P20131, EVALUE 1.20e-02
attcccccaaaagacagaggtcacctgcatgcccgggtcccccgccttctccaggggctatcctcaaccctggccccacaccgggccagcatccctcccaccttccctcctggtccagggacatgggcggctttgccatctggtgcaagaaggccaaggccccgaggccagtgcccaagccccgaggtctcagccgggacatgcagggcctctctctggatgcagccagccagccaaggtgagtcctcaggcaccggagtgggggtggccgttgtgggaggatgaggcttaacctgagtcatcccacctccagtaagggcggcctcctggagcggacagcgtcaaggctgggctctcgggcatccactctgcggaggaatgactccatctacgaggcctccagcctctatggcatctcaggtgagcacagagtggggaaactgaggcgtggaagtggagggtgtgactgtcttgagattacacaaccaggaaggatcttcctacttccctctcccaactctggattctgtaaagactgaaggagccaggctgtgcgggttgggcctctgtgggtggggtgggcagttccctacacctcac

SEQ ID NO: 2447 - DNA, 550 bp, Homo sapiens
  MAP TO CHR16.1; EXPRESSED IN HELA, SIGNAL =   8; EXPRESSED IN BRAIN, SIGNAL =  10; EXPRESSED IN LUNG, SIGNAL =   5; EXPRESSED IN HEART, SIGNAL = 5.5; EXPRESSED IN BONE MARROW, SIGNAL =  12; EXPRESSED IN ADULT LIVER, SIGNAL = 5.2; EXPRESSED IN FETAL LIVER, SIGNAL = 9.3; SWISSPROT HIT: P09012, EVALUE 6.90e-02; NT HIT: M60782.1, EVALUE 0.00e+00; EST_HUMAN HIT: AL562585.1, EVALUE 2.00e-93
tgcagtcttgacctcctgtgctcaagtgatcctcctacctcagcctcacaaatagcatttaactctttctgatttaatgtcccactagaccctgggtttgttttgctctgtcgggccctctttgggtgccttttgcgcctctttctgggtgtttttccttacatctctcacccgctaggtttcctttcatggcctcttctctgcctcctggggctgctgtaaccacgcactctcctccctctctccacagggcatgccgccgatgactcaggcgccccgcattatgcaccacatgccgggccagccgccctacatgccgccccctggtatgatccccccgccaggccttgcacctggccagatcccaccaggggccatgcccccgcagcagcttatgccaggacagatgccccctgcccagcctgtgagtatctagtcccacccaccaggtctcatataaatagtgagaatacaggactagaaagggaccagttggggggctgctgtaggttgggtggtctgggcaggccccctgaggaggtggtactga

SEQ ID NO: 2448 - DNA, 520 bp, Homo sapiens
  MAP TO CHR22.1; EXPRESSED IN ADULT LIVER, SIGNAL = 1.7; EXPRESSED IN PLACENTA, SIGNAL = 4.1; EXPRESSED IN HELA, SIGNAL = 4.5; EXPRESSED IN BRAIN, SIGNAL = 2.4; EXPRESSED IN HEART, SIGNAL = 1.3; EST_HUMAN HIT: BF306996.1, EVALUE 0.00e+00; SWISSPROT HIT: P35085, EVALUE 9.50e-01; NT HIT: gi14777127, EVALUE 0.00e+00
aggaggcaagaagggaagagtccttcaaaaactcaccaacggattcatctttgcacacctcgactttggccttcacctgccccagggccccaggggctgcctcagcccctagtgggtctttctcgtccgggggccccgggtcagcacccatagagtcaggctcatccaggggaaactccagctctgcagatcggctcaggggcttgacgggggacacatccccactaggggtgaggtcactgctttgctcccgttcctcgttgtccttcattttcttataatgcagacaagggatgctactcagaggagggtcgtgtttctgtggatagtgaaattgcaatatggattacaaggacaacccgagagtctgaaactctgatgcctttcaccggcctctgcttggctgcggtgccatgtgtgtggatgtgcacgttttggtctgagaacttacaagcctaaagtcacgactgatgcctcccctacccgtatgcttcccgttcccaagaagtatggcctggac

SEQ ID NO: 2449 - DNA, 515 bp, Homo sapiens
  MAP TO CHR12.1; EXPRESSED IN BONE MARROW, SIGNAL = 0.6; EXPRESSED IN FETAL LIVER, SIGNAL = 0.84; EXPRESSED IN LUNG, SIGNAL = 1.1; EXPRESSED IN HELA, SIGNAL = 0.97; EXPRESSED IN BRAIN, SIGNAL = 0.65; NT HIT: AJ320524.1, EVALUE 1.90e+00; EST_HUMAN HIT: H43970.1, EVALUE 1.80e-01; SWISSPROT HIT: O66679, EVALUE 1.20e+00
taaatgacttgctgttgccgtacacatataatgtaatatttgattcctgtctttattagatctttataatctaacggtttaagtttggtaaaattatcgtttcctacttctctgttgaaagacttgaaagtacccccgaaatattactttgtgtcaagctttagacacacttagtctctggggttaatgacaagccagctcagaggcccacagcaggtaatgagggtgaaagtccaagctttgccatctgacagctgtgtcgatgtgtggagccaaaacatttctcttgactgcgtctctctacctattgggtcctggaagactcagttcccttccaaacccagccagcatcttgaatgcactcaaaatccacgttttggctcaatcaggtgttcctgcttgtgccgggatggggaggggcagtggcagaggaagtcgcggagcttctgcgagagagctgccccttggaaatcaagcaaaggataaacacatgctgccaaaaatctggaactgga

SEQ ID NO: 2450 - DNA, 553 bp, Homo sapiens
  MAP TO CHR1.1; EXPRESSED IN ADULT LIVER, SIGNAL = 1.4; EXPRESSED IN BONE MARROW, SIGNAL = 1.1; EXPRESSED IN PLACENTA, SIGNAL = 1.6; EXPRESSED IN LUNG, SIGNAL = 2.5; EXPRESSED IN HELA, SIGNAL = 0.8; EXPRESSED IN FETAL LIVER, SIGNAL = 0.91; EXPRESSED IN BRAIN, SIGNAL =   1; SWISSPROT HIT: P08548, EVALUE 2.00e-24; EST_HUMAN HIT: BE673893.1, EVALUE 2.00e-13; NT HIT: AJ271736.1, EVALUE 1.00e-14
agccttgctgaactcgtttgttagctctaatggttgtgtgtgtttgtgtgtttgtgtgtgtgtgtgtgtgtgtgtgtgtgtgtgtattccttataattttctatatatgagaacatgttatctgcaaatagatagctttacttcttcttttctgatctggataccttttatttaatttcattacctaattgccctggctagaacccccagtacaatgttgaatagaagggtcaagagtgggcatccttgtcttgttcctgatcttagggggaaagcatccagtctttcaccattaaatatgatgttagtggtgggtttttcataggtggcctttatcaagttaaggaagttctcttttatttttagtttgttgaatgtttttctagtcatgaaagggtgttggtgtgtaccagtaaggtagagattttagtccctattttacatatatatattagaaaactaaggctaaaaaatgctagagcaaatttggaaaataggaataaatatgaagaaggaataaacatcactatcaaccccatcgctcaaagataaa

SEQ ID NO: 2451 - DNA, 566 bp, Homo sapiens
  MAP TO CHR19.1; EXPRESSED IN ADULT LIVER, SIGNAL = 5.4; EXPRESSED IN PLACENTA, SIGNAL = 6.4; EXPRESSED IN FETAL LIVER, SIGNAL = 4.8; EXPRESSED IN HELA, SIGNAL = 6.3; EXPRESSED IN HEART, SIGNAL = 2.5; EXPRESSED IN BONE MARROW, SIGNAL = 4.2; EXPRESSED IN LUNG, SIGNAL =   2; EXPRESSED IN BRAIN, SIGNAL = 5.3; NT HIT: gi11276076, EVALUE 1.00e-04; SWISSPROT HIT: P58181, EVALUE 4.00e-24; EST_HUMAN HIT: BF062364.1, EVALUE 3.00e-03
atgatctgctttgccctcactgtcctctcttacatccgcatcttggccacagtggttcagatccgttcagcagccagccgccggaaggccttctccacctgttcttcccacctgggcatggtgctcctgttctatggcaccggcagctccacctacatgcgacccaccacccgctactccccgctggaagggcgcttggctgctgtcttctactccatcctcatacccaccctgaatccgctcatctacagcctgaggaaccaggacatgaagagagccctgtggaagctctatctccaggtgccatactagggtctgccatctggatgcgggagggacccaaaaatccaccttcccaagattttccttgtggtcgtggtggaagtgttagtgcctccagagacccccaggaacacacctattcgccaaagttgtcaacaaagttgaattgcaatgaatcatgcaggagaaccctgatggatgtctggataaaatggagacaaatccaatgtgcatttaatttaggcaaatagtattaaatgtacacaggggaggagagaaagagg

SEQ ID NO: 2452 - DNA, 578 bp, Homo sapiens
  MAP TO CHR19.1; EXPRESSED IN BONE MARROW, SIGNAL = 1.2; EXPRESSED IN ADULT LIVER, SIGNAL = 2.4; EXPRESSED IN HELA, SIGNAL = 1.8; EXPRESSED IN BRAIN, SIGNAL = 0.94; EXPRESSED IN LUNG, SIGNAL =   6; EXPRESSED IN HEART, SIGNAL = 1.9; NT HIT: U83981.1, EVALUE 0.00e+00; SWISSPROT HIT: P17564, EVALUE 8.00e-20; EST_HUMAN HIT: BI833349.1, EVALUE 1.00e-130
tgtatgttgcagagggttgcatgtcatctccatggagaaggctgtgtacgctgtcacgcaatcccttgtaagaggccaggcccctgggggaggagggagcagctgtggctcacagcagccccaggaaaccacctcttccttcagtgagtcagatagatagagaatcccgtgacagtgacaggcaagtgactagccagatagaaagcatttttgtgtaataactaatttttgtttgcttctctctctctcttccccgccctccccatccggattcccgtggctgtgtgcatctcctgcctgtgtccccatgtctgcccgcaggtgcgcttctccgagaaggtcactgtccatttcctggctgtctgggcagggccggcccaggccgcccgccagggcccctgggagcagcttgctcgggatcgcagccgcttcgcacgccgcatcacccaggcccaggaggagctgagcccctgcctcacccctgctgcccgggccagagcctgggcacgcctcaggaacccacctttagcccccatccctgccctcacccagaccttgccttcctcctctgtcccttc

SEQ ID NO: 2453 - DNA, 532 bp, Homo sapiens
  MAP TO CHR9.1; EXPRESSED IN BRAIN, SIGNAL = 1.4; EXPRESSED IN HEART, SIGNAL = 1.6; EXPRESSED IN BONE MARROW, SIGNAL = 0.99; EXPRESSED IN PLACENTA, SIGNAL = 1.9; EXPRESSED IN FETAL LIVER, SIGNAL = 1.8; EXPRESSED IN LUNG, SIGNAL = 2.1; NT HIT: gi4504864, EVALUE 0.00e+00; EST_HUMAN HIT: BG115664.1, EVALUE 0.00e+00; SWISSPROT HIT: O19048, EVALUE 4.00e-05
gagatcaaccggagagcaagaagctggcttcccagggagactcaatcagttctcaacttggacccatccatcgtcccccaaggacttcaatgacagaagagtgcagggtcccagacggtgtggtgggcctgatctttggcagagggcgcgaacaaattgacaaaatctaacaggattcagcctgcaaagtatagattactccaggcagcagtggcctacccaagcacagtgtgtccttgacaagagccccagaatctctccagaaagcgaagatgatgctggatgacattgtgtctcggggtcatggggggcccccaggacagttccacgacaccgccaaagggggccagaatggcactgtacaggacatgatccctgcgggcaacgccggcctggtcatcgccaagggcggggagaccatgaagcagctgcaggaatacgctggagtgaagatgatcttaattcaagatggttctcagaacacgaatgtggacaaccctctccggatccctggggatccttacaaagtgca

SEQ ID NO: 2454 - DNA, 530 bp, Homo sapiens
  MAP TO CHR19.1; EXPRESSED IN FETAL LIVER, SIGNAL = 2.8; EXPRESSED IN BRAIN, SIGNAL = 3.5; EXPRESSED IN LUNG, SIGNAL = 1.8; EXPRESSED IN HEART, SIGNAL = 2.6; EXPRESSED IN BONE MARROW, SIGNAL = 3.1; EXPRESSED IN ADULT LIVER, SIGNAL = 5.1; NT HIT: gi15300936, EVALUE 1.30e-01; EST_HUMAN HIT: AV650826.1, EVALUE 2.00e-59; SWISSPROT HIT: P47806, EVALUE 3.30e-01
tttgtaccaaggggtggaaggtcatggtgagggttggaagcatcgcccactgtgagccctcagcacggtgctgggcacatgcagcaagccccctctgtgtgctctcaccctgcagtggccgatatgggcaggctggcccaggaggtgctgggctgccaggccaagctgctctctggtggcctgggcggtcccaacagagacctcgtcctgcagcacctggtcactggacatcccctgctcatcccgtatcccagggcctgggagagaggagggcaggggtggcaaagggtgggtcccagggccacaccatcgtttttaccttaatgccagcaccagctacgacgaggacttcaaccatgagccgtgtcagaggaagggccacaaggcacactgggcggtgagtgcaggtgggttccccctcctttgtctgcacccctcaacctgggtctccccggcctccattaatcctcctgacattctcaccccttgtgctggtgcctccccagccaggctgggcacttagcattagc

SEQ ID NO: 2455 - DNA, 548 bp, Homo sapiens
  MAP TO CHR6.1; EXPRESSED IN ADULT LIVER, SIGNAL = 1.8; EXPRESSED IN PLACENTA, SIGNAL = 1.7; EXPRESSED IN FETAL LIVER, SIGNAL = 1.8; EXPRESSED IN LUNG, SIGNAL = 2.2; EXPRESSED IN HELA, SIGNAL = 2.1; EXPRESSED IN BRAIN, SIGNAL = 1.6; EXPRESSED IN HEART, SIGNAL = 1.8; NT HIT: gi14750646, EVALUE 0.00e+00; EST_HUMAN HIT: AL598440.1, EVALUE 0.00e+00; SWISSPROT HIT: P40151, EVALUE 2.00e-17
aaaccactcacctggtttgcctctcatttcacctcatgagaatttcttctgtctgtcgtaggtggttatccagactgtaggcacaaaagggggataataaaagcatgtggggatcttctcagaattacctagagctgtgtatcagaaggggctctgcagaacagaagcttggcatcttgctagtaaaatgtgtcctctgtgtcattggtaggtgcttctggcccagtgtgtggtctactttgccagagccccaaagtccattgaggtgtacagcgcctacaacaacgtcaaagcctgcctgaggaaccaccaggggccactgccccccgtgcccctgcacctgaggaacgcgcccactaggctgatgaaggatttgggctatggcaaaggctacaagtacaaccccatgtacagcgagcctgtggatcaggagtacctgcctgaagagttgaggggggtagatttcttcaagcagaggaggtgctgactcctcagggcacgacagcagaaggatgttgcttttttaagggagggccagaaagaaagtt

SEQ ID NO: 2456 - DNA, 581 bp, Homo sapiens
  MAP TO CHR5.1; EXPRESSED IN BRAIN, SIGNAL = 0.48; EXPRESSED IN HEART, SIGNAL = 0.72; EXPRESSED IN ADULT LIVER, SIGNAL = 0.54; EXPRESSED IN BONE MARROW, SIGNAL = 0.51; EXPRESSED IN LUNG, SIGNAL = 0.62; EXPRESSED IN FETAL LIVER, SIGNAL = 0.54; SWISSPROT HIT: P47535, EVALUE 9.60e+00; EST_HUMAN HIT: AA465635.1, EVALUE 2.10e-01
tggctgaaatgtccctatccccatgcatttatgagggaatgacctcattttctgttactttatctgcctataagtcagctcattaaagccattttcagtgaaatcctcagcattttattcagtagacaagttcctcttcttcatcagggatagatggcagtgagcaggcacaggatgattttactgaggaagtccaaggaatatggaaaccgaaaaaaaaaacattaagaaagaggggagaagctagaggggaaagcagtcaaagtgaaggagagagcactggtgaagaaaatatagcaactgagactttaagtcctttttaatagtggaaaattacgacctatgctcaaaggaaaaagaagctttataagttccttggacatcaaatatcattttgatacttgatacttaaatgagagagaaatgtgctgcttaaagttcctttgaaatccacattggatataaaactgaggtctaaaaatattcttagcataaataaatttataggctaccagttctggaagaaactgcaaatagatcaaaacacaaccctacagcaccccagttttcaccctctttgc

SEQ ID NO: 2457 - DNA, 503 bp, Homo sapiens
  MAP TO CHR7.1; EXPRESSED IN BONE MARROW, SIGNAL = 0.73; EXPRESSED IN BRAIN, SIGNAL = 0.57; EST_HUMAN HIT: BG618391.1, EVALUE 0.00e+00; SWISSPROT HIT: P21439, EVALUE 2.00e-27; NT HIT: gi14739702, EVALUE 1.00e-105
cgtcctgcagtagaaagttccatgagaaataaacaggtataagatgtgaattcagtcctcaaataaacctactatgcaccttgggggaaagccaacatgcaatggcataggctatagatgctgctagacatggctgccagatgatcgatttctaatatagatcagatgctcaatctagtaacatttttcatttaaaatctttccttgacatattttcacacagtaattaatttctatatgaaagtgtgacattaacaatgtacctactctgttagccgcgtattgagttcagtggtgtcgttgatgtcaaaccatcctatttcctgtcgtagaatagcatgaaaaaacttctgcctaattttcctgatctgtcgaccagctgccaaagtccaaaatgaaacttgtatataggcagcaacaagaactccagcacccaatcctgagtagtaatatgcatatctgaaaaaaaagagaaaggctctattaaataccttctcttttct

SEQ ID NO: 2458 - DNA, 505 bp, Homo sapiens
  MAP TO CHR14.1; EXPRESSED IN BONE MARROW, SIGNAL = 1.3; EXPRESSED IN ADULT LIVER, SIGNAL =   1; EXPRESSED IN PLACENTA, SIGNAL = 1.6; EXPRESSED IN LUNG, SIGNAL = 1.1; EXPRESSED IN BRAIN, SIGNAL = 1.6; EXPRESSED IN HEART, SIGNAL = 1.1; EXPRESSED IN FETAL LIVER, SIGNAL = 0.96; EXPRESSED IN HELA, SIGNAL = 1.5; EST_HUMAN HIT: AV718564.1, EVALUE 1.80e-01; SWISSPROT HIT: Q64573, EVALUE 8.00e+00
ctgggctcaagcagagagaggctgactgggttgggagcactcagctacagcctattaaactgaagttgcctttaatgttggttaatgacaaggaaaaccctgtgtttccatctatctatatagccaaactcagatacaggaggaagtttgtgcagaaaaatgctttcattttacaaatttcaatattttcccagcttctcatctataaatgcttgaaaacatgtgataaatgtaaaaatctgacttgaaaaaattattaaatctatattctatgtgagttcaagtgtatgcacacatgttcacatacccacaaacaaagtaactttcctggaggtcaaactataggcagcattgttaggcaaaggaggcaacatacctttcctcccactctgtatcattatcattggctttagcatttaagtagcactgcacttttggctgctctttagaaccatacctgtcatctggccctcagaaataatttgcttttggggttcaaaccaga

SEQ ID NO: 2459 - DNA, 553 bp, Homo sapiens
  MAP TO CHR2.1; EXPRESSED IN HELA, SIGNAL = 1.6; EXPRESSED IN BRAIN, SIGNAL = 1.7; EXPRESSED IN HEART, SIGNAL = 1.8; EXPRESSED IN ADULT LIVER, SIGNAL =   1; EXPRESSED IN BONE MARROW, SIGNAL =   2; EXPRESSED IN PLACENTA, SIGNAL = 1.5; EXPRESSED IN LUNG, SIGNAL = 1.8; EST_HUMAN HIT: BI823626.1, EVALUE 3.00e-80; SWISSPROT HIT: O95754, EVALUE 4.00e-24; NT HIT: gi14738407, EVALUE 2.00e-80
tggttcacttgtcaaggctgtgtttctcccccatggctgcttaataaatggtacttggaagaaaacaaaaattggcccctttggttttgctcttgtggacttgacccttaggaagcgatggctaacatcactctcctctcttcctgccagaggctgactcctgtctcacccggttcgcagtccctcacacatacaattactctgttctccttgtggatcctgcctcccacacactttatgttggcgcccgggacaccatcttcgctttatccctgcccttctcaggggagagaccccgcagggtgagagacaagagagggaaggacccctgaccctgtagcatgtgattaaatctatgattttatgagtgtgtgtgggggatttcataataactaaagatgtaacagcaggggtagtaggagggggtgagttgggagacatggggggagatcatccactttgttttcttagctaagagtatggcgggtcagggtgactggggaggatatgaaggaggttcatgatgatggggaggagaccacagtgaccaggt

SEQ ID NO: 2460 - DNA, 572 bp, Homo sapiens
  MAP TO CHR5.1; EXPRESSED IN FETAL LIVER, SIGNAL = 2.9; EXPRESSED IN HELA, SIGNAL = 3.4; EXPRESSED IN BRAIN, SIGNAL =   3; EXPRESSED IN HEART, SIGNAL =   2; EXPRESSED IN ADULT LIVER, SIGNAL = 3.2; EXPRESSED IN BONE MARROW, SIGNAL = 3.1; EXPRESSED IN PLACENTA, SIGNAL = 2.5; EXPRESSED IN LUNG, SIGNAL = 3.5; SWISSPROT HIT: Q15545, EVALUE 1.00e-38; EST_HUMAN HIT: AL568580.1, EVALUE 0.00e+00; NT HIT: gi15295777, EVALUE 0.00e+00
ttctgcctatacaatcctgcttcttataggatgaacacctagcaaaacaatataaatttgctgaaaaacaaaattacaaacaaatgaaagaacttaacagaacacacagcattaaaaggactaggaagagcaaggtcttaatacccagtacaataaagccaagaattttctaatgctgaccagtctgaagactgaaattaaatatcagttctttttacttctctaggagtgattctagctcctcttgcaaagagctgagttgctccttttctcggtcttccttttgtttgagctcatccagtacagcctgaaatctgttcttgagagccagattttccactttcatgatgagatcctcttgtcgttttgccctgtcctgggtctcttggagcttgcctttcatgttgtcaatctgcttctgaattcccataaccagctgattggttccttcattttcctggtgctgttcatctgattcatttagcttgtcctgtagctgtctctccagatcttcctccgtgtcaatgatgtttatatcttcttcatcttgatgctgggtctcatcttcatcc

SEQ ID NO: 2461 - DNA, 543 bp, Homo sapiens
  MAP TO CHR1.1; EXPRESSED IN BONE MARROW, SIGNAL = 6.5; EXPRESSED IN ADULT LIVER, SIGNAL = 4.3; EXPRESSED IN PLACENTA, SIGNAL =  86; EXPRESSED IN FETAL LIVER, SIGNAL = 4.2; EXPRESSED IN LUNG, SIGNAL =   3; EXPRESSED IN HELA, SIGNAL = 4.5; EXPRESSED IN HEART, SIGNAL = 2.9; EXPRESSED IN BRAIN, SIGNAL = 4.3; NT HIT: X68676.1, EVALUE 0.00e+00; SWISSPROT HIT: P46439, EVALUE 2.00e-20; EST_HUMAN HIT: AA815279.1, EVALUE 6.00e-57
ttcagatagggtctggcacccagtcagagtctaataaatgctgatgtatccaattgaagcctgggcactgccccggttttagttgtggggaagatggctgcttgcctgtggccagcctgggccatctacagccctggggaggccacgtctgtgcagggagcttttgtctgagggtggtgacagctgttttctgcctcaggagaaactgaagccaaatacttggaggaactccctgaaaagctaaagctctactcagagtttctggggaagcggccatggtttgcaggagacaaggtaaaggaggagtgatatggggaatgagatctgttttacttcatgtgtttcggggttttcagcccacacattcttggccttcttcagatcacctttgtggatttccttgcctatgatgtccttgacatgaagcgtatatttgagcccaagtgcttggacgccttcctaaacttgaaggacttcatctcccgctttgaggtgatgcccccatcctcctttctctttgatgccccttgttcctttctctcc

SEQ ID NO: 2462 - DNA, 552 bp, Homo sapiens
  MAP TO CHR14.1; EXPRESSED IN ADULT LIVER, SIGNAL = 5.9; EXPRESSED IN BONE MARROW, SIGNAL = 7.7; EXPRESSED IN LUNG, SIGNAL = 5.8; EXPRESSED IN HELA, SIGNAL = 4.7; EXPRESSED IN FETAL LIVER, SIGNAL = 5.5; EXPRESSED IN BRAIN, SIGNAL = 6.6; EXPRESSED IN HEART, SIGNAL = 4.8; NT HIT: M83228.1, EVALUE 0.00e+00; SWISSPROT HIT: P22758, EVALUE 1.00e-26; EST_HUMAN HIT: BG945730.1, EVALUE 6.00e-94
tggatcctgaggcatttaggggtaaggggtggttgcaggatcggggcccggctggtccccatggaccacatggcaggtcctgagcccctcctccacctccgccctatctcatcctgtcctgggcaggtgaactccctggatgacaatggagtcctgattgggaactggtctggtgattactcccgaggcaccaacccatcagcgtgggtgggcagcgtggagatcctgcttagctacctacgcacgggatattccgtcccctatggccagtgctgggtctttgctggcgtgaccaccacaggtagtggagggactgggacaggagtggcccgggccctacagggagaagggaggaaagccaggcttacccagccctgcccagatgtggctacagtgcagggtgcaggcgggggtgggtaataggctggccttaattatcattaattagtgttaacaacagagagaggcctaagggaaaggagggagaagggacaggcaaggactgagccaggcaggtggcctagcttcccctgaccccaagtgctctgtagc

SEQ ID NO: 2463 - DNA, 555 bp, Homo sapiens
  MAP TO CHR14.1; EXPRESSED IN PLACENTA, SIGNAL = 1.7; EXPRESSED IN FETAL LIVER, SIGNAL = 2.1; EXPRESSED IN LUNG, SIGNAL = 6.3; EXPRESSED IN HELA, SIGNAL = 2.1; EXPRESSED IN BRAIN, SIGNAL = 1.9; EXPRESSED IN BONE MARROW, SIGNAL = 4.9; EXPRESSED IN HEART, SIGNAL = 3.2; NT HIT: S42403.1, EVALUE 0.00e+00; EST_HUMAN HIT: BG107090.1, EVALUE 1.00e-127; SWISSPROT HIT: P23083, EVALUE 5.00e-33
ggatgtgtccctggtaatggtgactctgccctggaactcctgtgaatattttgtgttaccattgccagcgttgctccatcccatccactcaagcctttgtccgggggcctggcgcacccaatgcatagcatagctagtgaaggtgtatccagaagccttgcaggaaaccttcactgaggccccaggcttcttcacctcagccccagactgcaccagctgaacctgggagtggacacctgtagagaagacacaggagtggatggaagcccccttgactggcttcgatcccttcctcctcactgggatttggcagccccttacctgtggctgctgccaccaaaaagaggatcctccaggtccagtccatggtgaggagttgtgctctgggggcttctgaggagggatgtggttgttgggtgatgctctcagggcacaaagatatctatagtcatctcagttatttgcatattcatgagcgatgctatttcatacctaacacagcatgagaaagagtggagagatgacacatggattacccaacaggaggatgctaag

SEQ ID NO: 2464 - DNA, 580 bp, Homo sapiens
  MAP TO CHR15.1; EXPRESSED IN BONE MARROW, SIGNAL = 0.49; EXPRESSED IN BRAIN, SIGNAL = 0.48; NT HIT: gi14752378, EVALUE 0.00e+00; EST_HUMAN HIT: AW022882.1, EVALUE 0.00e+00; SWISSPROT HIT: Q10768, EVALUE 4.30e+00
tttccccattcactttgctccccatctactcagatctatcaacttctctgatggttatttgaaagtttagtacttaaaaatgtgtcagattaaaacttgtttagagacagccagctagctgggagatgaaaatatataagagcttatttgcaaggtggttaatacatgtataattactacagagttgactgtatataggtatgttgtagatacattaagctattctgttctctgcttcatctcttagattggtggaacgagaatgcctacacgcagccacaggaatccagtttccatggaaaccaaaagcagttgcttgcctgctcagcaagttgaaactgaaggagtggctccacataaaagaaaaataacttgaggactgtaccatggaaaactaaatttaaaaaaacagttataacagtgtttaatttagataagtttgagggaaaataatcagtaggcaagaggaacatttttcctgtagtagctagagtgccttgaaaaaatgtgttggctatgtgaaggaatatttcaactaaaatggaatggtatgcttttcacccttgaagtttgaggagga

SEQ ID NO: 2465 - DNA, 547 bp, Homo sapiens
  MAP TO CHR5.1; EXPRESSED IN HELA, SIGNAL = 4.4; EXPRESSED IN FETAL LIVER, SIGNAL = 2.7; EXPRESSED IN BRAIN, SIGNAL = 3.3; EXPRESSED IN LUNG, SIGNAL = 1.6; EXPRESSED IN HEART, SIGNAL = 2.9; EXPRESSED IN BONE MARROW, SIGNAL = 3.1; EXPRESSED IN ADULT LIVER, SIGNAL = 3.7; EXPRESSED IN PLACENTA, SIGNAL = 3.9; SWISSPROT HIT: Q9Y5E4, EVALUE 2.00e-38; NT HIT: gi14724301, EVALUE 0.00e+00; EST_HUMAN HIT: BI488619.1, EVALUE 0.00e+00
tcagcagcaacgtgtctctcagcctattcctgctggaccagaacgacaacgcgcccgagatcctgtaccccgccctccccacagatggttctaccggcgtggagctggcgcccctctccgcagagcccggctacctggtgaccaaggtggtggcggtggacagagactcgggccagaacgcctggctgtcctaccgcctgctcaaggccagcgagccgggactcttctcggtgggtctgcacacgggcgaggtgcgcacggcgcgagccctgctggacagagacgcgctcaagcagagtctcgtggtggccgtccaggaccacggccagcccccgctctccgccactgtcacgctcaccgtggccgtggccgacaggatctccgacatcctggccgacctgggcagcctcgagccctccgccaaacccaacgattcggacctcactctgtacctggtggtggcggcggccgcggtctcctgcgtcttcctggccttcgtcatcgtgctgctggcgcacaggctgcggcgctggcacaagtcacgtct

SEQ ID NO: 2466 - DNA, 501 bp, Homo sapiens
  MAP TO CHR19.1; EXPRESSED IN PLACENTA, SIGNAL = 1.4; EXPRESSED IN FETAL LIVER, SIGNAL = 0.94; EXPRESSED IN HELA, SIGNAL = 0.97; EXPRESSED IN LUNG, SIGNAL = 1.1; EXPRESSED IN BRAIN, SIGNAL = 0.91; EXPRESSED IN HEART, SIGNAL = 1.1; EST_HUMAN HIT: BG110455.1, EVALUE 2.00e-81; SWISSPROT HIT: P21709, EVALUE 1.20e+00; NT HIT: gi15303727, EVALUE 1.00e-81
agagcaaatggtcagatgccagcaggccagtccgaggagaggagcctcaggcctgctgggcagcccgtctcctgcaccggcagcttaatagttctccctgaagctgggtgtccctatctttatccccccaggagtgggaggagcggcgcaggcagaacattgagaagatgaatgaggagatggagaagatcgccgagtatgagcgcaaccagcgggtcagtggtgcgggtgtccccgaggcagggccgagctgcctgggctgcggggagcccgcgccaaccccctgctctgctgcctgcaggaaggggttcttgaacccaacccagtgcggaacttcctggacgacccccggcgacgcagcgggcccctggaggagtctgagcgggaccgccgggaggagagccgccggcacggccgcaactgggggggccccgacttcgagcgggtgcgctgtggccttgagcacgagcggcaggtgggtgttggcagtgaggacacctc

SEQ ID NO: 2467 - DNA, 574 bp, Homo sapiens
  MAP TO CHR22.1; EXPRESSED IN HEART, SIGNAL = 0.57; EXPRESSED IN BONE MARROW, SIGNAL = 0.83; EXPRESSED IN ADULT LIVER, SIGNAL = 0.92; EXPRESSED IN FETAL LIVER, SIGNAL = 0.58; EXPRESSED IN HELA, SIGNAL = 0.55; EXPRESSED IN BRAIN, SIGNAL = 0.84; EST_HUMAN HIT: BI550150.1, EVALUE 1.00e-116; SWISSPROT HIT: O43272, EVALUE 2.00e-32; NT HIT: gi14776954, EVALUE 1.00e-117
cggctttagctggtcttcaccatgaaactgaccctgaaagcccagtcgccaagagaccatatcgaggccccatggctggggtgaagtgtggtcggggatgagcagcggtgccttgctgggaaaggagagttcaggcagcccaggacagcggcttccctttgcctttcagctgctgtatgtttccaggaaacttctaggacagaggctattcaacaagctcatgaagatgaccttctatgggcattttgtagccggggaggaccaggagtccatccagcccctgcttcggcactacagggccttcggtgtcagcgccatcctggactatggagtggaggaggacctgagccccgaggaggcagagcacaaggagatggagtaaggcctgcccggtgtctgcgggctttctgatcatgaccctggagcacccagtgggagcaggtgggatgtatccagctgctgggcttcagcctcagctgggcagaggccaaggctaggagagcttggtcagcccaactaccgatgaccctcctgggctctgcctggagttcttgcatttttgtttcatgcggtg

SEQ ID NO: 2468 - DNA, 542 bp, Homo sapiens
  MAP TO CHR19.1; EXPRESSED IN HELA, SIGNAL = 1.5; EXPRESSED IN BRAIN, SIGNAL = 1.3; EXPRESSED IN BONE MARROW, SIGNAL = 1.2; EXPRESSED IN HEART, SIGNAL = 1.3; EXPRESSED IN FETAL LIVER, SIGNAL = 1.5; EXPRESSED IN LUNG, SIGNAL = 1.8; EST_HUMAN HIT: BF672054.1, EVALUE 1.00e-113; SWISSPROT HIT: P16374, EVALUE 4.00e-54; NT HIT: gi14766687, EVALUE 3.00e-21
acaactcttggcattgaggccttttattttagaaatgactcagaatatagacaatttgagggactacagggatatcaagaaggaaatatcaatcaaaagatgatcagctatgaaaaactgcctactcatactcctcatgcttctcttatttgcaatacacataaaccgtatgaatgtaaggaatgtgggaaatactttagtcgtagtgcaaatcttattcagcatcagagtattcatactggagagaaaccctttgaatgtaaggagtgtgggaaagcctttcgacttcacatacaatttactcgacatcagaaatttcatactggtgagaaaccttttgaatgtaacgaatgtggaaaggcctttagtcttcttaccctgcttaatcgccataagaacattcacacaggtgagaaactgtttgaatgtaaggaatgtgggaagtcctttaatcgtagctcaaaccttgttcaacatcagagtattcattctggtgtaaaaccatatgaatgtaaggagtgtgggaaaggctttaatcgtgg

SEQ ID NO: 2469 - DNA, 598 bp, Homo sapiens
  MAP TO CHR19.1; EXPRESSED IN FETAL LIVER, SIGNAL = 1.1; EXPRESSED IN LUNG, SIGNAL = 1.7; EXPRESSED IN HELA, SIGNAL = 0.71; EXPRESSED IN BRAIN, SIGNAL = 0.77; EXPRESSED IN HEART, SIGNAL = 1.5; EXPRESSED IN BONE MARROW, SIGNAL =   1; EST_HUMAN HIT: BF446281.1, EVALUE 0.00e+00; SWISSPROT HIT: Q14209, EVALUE 2.60e+00; NT HIT: S77127.1, EVALUE 1.40e-01
tgcatgaatgaatgaatgggtatgttgggtgggggagggaccaggggaagggtctgggactgaggggatgcctgggtcactgctgcccactgcctctacagaccaacaaggcttgggccaagggggacatccagggggcaggggccgcctcccgccgtgccttcctgctgggggtcctcgccgtcgggctgggcgtgtgcacgtatgcggctgccctggtgaccctggctgcctaccttgcctcccgagacccgccctagttgcccctacagccctcactgtgaaccctgaggccggcagcccagcaaatctgtgggcagagagtggagaatcttggtggatgaggctgcggcggcggcaggagcatctagaaacgggagcgagctggactggaacccttccccttcctggccaccgctcttcgggcggcagcaacctgagattaaacaccagacacccttgcagccaaaccagagtctgttcgcgtgtgtgggaggatggaagggggtgggggtgcttgagaccaacaggggactgactggtcagggtgacgggctgtggtgggcatccccagggtgcttgctccctgagacctgag

SEQ ID NO: 2470 - DNA, 576 bp, Homo sapiens
  MAP TO CHR16.1; EXPRESSED IN PLACENTA, SIGNAL = 5.3; EXPRESSED IN ADULT LIVER, SIGNAL = 3.7; EXPRESSED IN BONE MARROW, SIGNAL = 4.7; EXPRESSED IN LUNG, SIGNAL = 2.7; EXPRESSED IN FETAL LIVER, SIGNAL = 3.8; EXPRESSED IN HEART, SIGNAL = 2.9; EXPRESSED IN BRAIN, SIGNAL = 4.6; EXPRESSED IN HELA, SIGNAL = 5.8; NT HIT: gi14774941, EVALUE 1.00e-108; SWISSPROT HIT: Q92889, EVALUE 2.00e-33; EST_HUMAN HIT: BI522552.1, EVALUE 1.00e-107
tcaattccttgaggacagggatttatctctgttctgtgcgtggctatatgcccagtctagaatggtgcttattcattctcttgtaagtacttaagaaaaatgtgatgaatgaatggcaattacctacctgttctgtagtttaaattatgtttctccccctcaggcatcttggtgtatagagcccacagaataatcgagtcttgtcaagaagcattcatcttgcgcctctttcgccagaaaaacaaacgtggttttattaaagctttcacagacaatgctgttgcctttgatactggtttttgtcatgtggaaagagtgatgagaaatctttttgtgaggaaactgtatctgtggccaaggtaaagaacattatgtgacaaataatgatgacattatttgtcatctttgtttgtgagatctactgtaacttagttgcactttgatgtaatataatgtaaaattcattgtaattttgtttgatagaacctagtcagttttataacaaacacatccagctataaatatgtattcaccaagtttgtggttttatttaagtcgagagcaatttgatggttg

SEQ ID NO: 2471 - DNA, 535 bp, Homo sapiens
  MAP TO CHR7.1; EXPRESSED IN LUNG, SIGNAL = 0.69; EXPRESSED IN HELA, SIGNAL = 0.85; EXPRESSED IN BRAIN, SIGNAL = 0.88; EXPRESSED IN HEART, SIGNAL = 0.87; EXPRESSED IN ADULT LIVER, SIGNAL = 0.48; EXPRESSED IN BONE MARROW, SIGNAL = 0.84; NT HIT: gi14744037, EVALUE 8.00e-03; SWISSPROT HIT: Q63191, EVALUE 4.40e-01; EST_HUMAN HIT: BI831025.1, EVALUE 1.00e-116
cccagtcaatcattccatcccttcccgccctccctcaagcctttacctgctgaggttgatgactggggcgtcaccaggtgtgctccaggtggtaaatggaccctggggccaggtaacattggccatcaggaggacattggggagtggcagggagggcaccgaggaggtgaccccgaggatcacggtggcagacccttcacagacatctctccagttcccgggcttagtgacctggaaatcagcctcaggtacatgggtcagaaaggagcagaaaacaaggggtggaatacagatgctggaaagtggcacatcatcttgggggcaggtgtgcacacactgggctgggccctgacctgctattgatccttttcattggcctccccaaatacactttaaggtcattggctgcaggaaccctgtgtcattcttctctgggtcctctgttttatctaactaaaaagataactgttttatctaactaaaaagatgcactagcaagaaaaagctgagtggcactgaagttttcattccccca

SEQ ID NO: 2472 - DNA, 583 bp, Homo sapiens
  MAP TO CHR6.1; EXPRESSED IN LUNG, SIGNAL = 3.6; EXPRESSED IN HELA, SIGNAL = 1.5; EXPRESSED IN FETAL LIVER, SIGNAL = 1.3; EXPRESSED IN BRAIN, SIGNAL = 1.4; EXPRESSED IN HEART, SIGNAL =   3; EXPRESSED IN ADULT LIVER, SIGNAL = 1.3; EXPRESSED IN PLACENTA, SIGNAL = 4.1; SWISSPROT HIT: P22105, EVALUE 9.00e-30; NT HIT: gi15208634, EVALUE 0.00e+00; EST_HUMAN HIT: BF847439.1, EVALUE 7.00e-57
acagctgaccctggaatttgtcatgtgtgttagctgtcagctgagcaggaccccaagaatgggcctctctgaactgacctcaggtcccctagtcatagccttggctatttcatatgtcccctagtcatagccttctccctccttttccccacgacgtaagcacatcccccagggaccctgccatcctctctgtgtccctttttctcagctgcagaggaagagacccccagccccacagaacccagcatggaggccccggagccccctgaggagccgctcctgggggagctaacagtgacaggatcctcccctgactcgctgagcctctcctggaccgtcccccagggccgcttcgactccttcaccgtgcagtacaaggacagggacgggcggccccaggtggtgcgtgttgggggcgaggagagcgaggtcaccgtggggggcctggagcctgggcgcaaatacaagatgcacctgtatggcctccacgaggggcggcgcgtgggcccggtgtccaccgtgggcgtgactggtgagtagtgcttggagtctcggggtaaccacctttccctcatgggtacct

SEQ ID NO: 2473 - DNA, 600 bp, Homo sapiens
  MAP TO CHR5.1; EXPRESSED IN ADULT LIVER, SIGNAL = 0.75; EXPRESSED IN FETAL LIVER, SIGNAL = 0.61; EXPRESSED IN HELA, SIGNAL = 0.51; EXPRESSED IN BRAIN, SIGNAL = 0.45; EXPRESSED IN HEART, SIGNAL = 0.57; EST_HUMAN HIT: BF991907.1, EVALUE 0.00e+00; SWISSPROT HIT: O95486, EVALUE 4.00e-60; NT HIT: AJ131244.1, EVALUE 0.00e+00
cgttggtaagactaatttttcctccttttattggaaggtcctgtccaaaatgcattgctgtcttcacaagagtcagtgagccaaggatacaatttccagcttccaggatcctaccctcatccaataccagcaaagactttgaatccagtctctggacagtctaactatggtggttctcagggatctgggcagactcttaatagaccacctgtggcctctaatccagtgacaccttcgcttcatagtggtcctgctccccgaatgccattacctgcttctcagaacccagctactacaccaatgccttctagtagctttcttcctgaagccaacctgccaccacctttgaattggcaatataactatccatccacagcctcacaaacaaaccattgtcctcgtgcatcatcccaaccaactgtatctggaaatacaagtttaaccacaaatcatcaatatgtttcttctggatatccttcacttcaaaatagcttcataaagtcaggtagtattcttatagaagtgcttaaaatgtagaaatgtgaaacttttgcttatttagatgtttgaaataatacttgaaacctgaaaaccatatgg

SEQ ID NO: 2474 - DNA, 583 bp, Homo sapiens
  MAP TO CHRX.1; EXPRESSED IN HEART, SIGNAL = 4.7; EXPRESSED IN BONE MARROW, SIGNAL = 8.1; EXPRESSED IN ADULT LIVER, SIGNAL = 7.2; EXPRESSED IN PLACENTA, SIGNAL = 8.8; EXPRESSED IN FETAL LIVER, SIGNAL =   7; EXPRESSED IN HELA, SIGNAL = 9.2; EXPRESSED IN BRAIN, SIGNAL = 9.2; EXPRESSED IN LUNG, SIGNAL = 4.8; EST_HUMAN HIT: AV722265.1, EVALUE 0.00e+00; SWISSPROT HIT: P22304, EVALUE 6.00e-93; NT HIT: L13329.1, EVALUE 0.00e+00
agcacatcacatttgccatccatggttggcaaaactcaaggcatcaacaactggaaaagatctccaccttgggaatcattatacatattgtgatcctgcaatgggtcagaatccacaaaatacagttcccctgcatggatgtcagaaaagttagctagaaattcatcaggattgaagccaacccacacagtatacctatagtctatggtgcgtatggaatagcccatgatctttatatcttttaaactcggcttgtcagaattccactgagggatgtctgaaggccggggatactggctataggcaatcagttcacggggattaccagggaggtacggatcctcttccaagtcacggaatcgaaaatgcttcagaaggttcttgccttctctgcacagctcaacgtgaaatgaaggaacggggcagcgaggtggaacctgcagtcctgcaagtccagccagcgtgggaaaaagagacacaagttccacaaggtccatggattgcctgcctgaaacaggaagcgacagagcagaatgggttacattataaaagcctgccatggccaggcaggagcagtaaagga

SEQ ID NO: 2475 - DNA, 525 bp, Homo sapiens
  MAP TO CHR17.1; EXPRESSED IN LUNG, SIGNAL = 0.88; EXPRESSED IN FETAL LIVER, SIGNAL = 4.2; EXPRESSED IN HELA, SIGNAL =   1; EXPRESSED IN BRAIN, SIGNAL = 0.97; EXPRESSED IN ADULT LIVER, SIGNAL = 1.2; EXPRESSED IN BONE MARROW, SIGNAL =  14; EST_HUMAN HIT: BI028043.1, EVALUE 0.00e+00; SWISSPROT HIT: P05164, EVALUE 1.00e-59; NT HIT: X15377.1, EVALUE 0.00e+00
ctcctatgccacctctggtccccaccccaaagctgacctgccaggaagcaggggatgcgcgctgagcggttggtgaggagacaggggtcatcgtgcaggttgtcaaagggcagcagggcccggccgttgtcttggaagcgctggttgacggccagcagccccagctggttggacatgttgcgcaggttcctggccaggggctcctcgctgccgtacaccatgctggcgtccacgaaggaagtgagcgcgttgatctggttgcggatggtgatgttgctcccggggcaagccgggcaggagcggaagaacgggatgcagtcggcttggttcttgatgcgggggtcattgggcgggatctgaggcacagagagaggctagactggctcaccgagggcaaggaaggtgcccaggcagaactggatctccccctgccctcaggacctctggtaccctcaacctgcagagaggcctccggaggcccgaaagggatcgctgcctagggcgccatcagcaacagcctctgag

SEQ ID NO: 2476 - DNA, 503 bp, Homo sapiens
  MAP TO CHR5.1; EXPRESSED IN FETAL LIVER, SIGNAL = 1.1; EXPRESSED IN BRAIN, SIGNAL = 1.6; EXPRESSED IN LUNG, SIGNAL = 0.75; EXPRESSED IN HEART, SIGNAL = 0.78; EXPRESSED IN BONE MARROW, SIGNAL = 1.3; EXPRESSED IN ADULT LIVER, SIGNAL = 1.1; EST_HUMAN HIT: AI969295.1, EVALUE 0.00e+00; SWISSPROT HIT: Q9Y5I1, EVALUE 2.00e-82; NT HIT: gi14727918, EVALUE 0.00e+00
tcagcatcagaagctccctctagtggaaaacgcgagtccgattgcttagattccgcaatcagcagcttttgttctctgagcgagaacaccggcgggttgtcgttaatgtccttcacctccacgttcacatggaaaacctgcagcggcctgtccacgatcacctccaggtggatgctgcactccgcgctctgcccgcacagctcctcgcggtcgatccgagaattcacaaacaaaatgccattctgcagatttacctccagaaggtccccatgtgttttggacgccacccggaacaggcgctgcaccagctccgccagctccagccccaggtcctgcgcgatgcggcccacgaaggtgccgtgtttggcctcctccgagacggagtagtggagctggccgctccccacctcccagaattcgaggaggagaagccagagctgtagtcgtggggtgcccaatccccttctctgaaaaccaaacatcgcatacgaaattggcttcca

SEQ ID NO: 2477 - DNA, 526 bp, Homo sapiens
  MAP TO CHR5.1; EXPRESSED IN ADULT LIVER, SIGNAL =   2; EXPRESSED IN BONE MARROW, SIGNAL = 1.8; EXPRESSED IN FETAL LIVER, SIGNAL = 1.7; EXPRESSED IN LUNG, SIGNAL = 2.5; EXPRESSED IN HELA, SIGNAL =   2; EXPRESSED IN BRAIN, SIGNAL = 3.3; NT HIT: gi14724326, EVALUE 0.00e+00; EST_HUMAN HIT: AL541160.1, EVALUE 0.00e+00; SWISSPROT HIT: P39768, EVALUE 7.40e-01
ttatggctggaatctggaggatgttgtcagtcccctgaggacatacagagcctcctccaaggccttgataacttgatgtgtcaagctttgtccatgcccccaccatccacatccacacacttcccttccttatcttaccaccccatactgtcttggaacatgcagtggagtctcttgtttgaggaggaggtgggggaagtcaaggcatgcagtggaaacgtcaaacaatgaaaaacaaaacagaagactggtccccagggcgttgggaagaggcttggtagcaaaatgccctccctaaatccagcaagcatcagtaccatggggatggtgatcatgtcctccaaaacttgagcattgatcttgggctctggaaggaggtgaaggggctggcaccaaaccatgctttgggggaagattgagaatcaaaggagaggccaagaggtcatgatgcccttccaacttttcagaactaggaggcttgtaggttacttggtacttcaacaccccaaccaccttactcgggaaa

SEQ ID NO: 2478 - DNA, 595 bp, Homo sapiens
  MAP TO CHR19.1; EXPRESSED IN FETAL LIVER, SIGNAL = 3.1; EXPRESSED IN LUNG, SIGNAL = 3.8; EXPRESSED IN BRAIN, SIGNAL = 3.5; EXPRESSED IN HEART, SIGNAL = 3.6; EXPRESSED IN BONE MARROW, SIGNAL = 3.7; EXPRESSED IN PLACENTA, SIGNAL = 2.9; NT HIT: gi14249509, EVALUE 1.00e-91; SWISSPROT HIT: P09959, EVALUE 2.00e+00; EST_HUMAN HIT: BE208545.1, EVALUE 8.00e-32
agtgagatggaaggcagcagaaaaaaagagaaaggcaattagaggtgtgcattgattccggaagtccagttcaaacaagaggaatttttaaaagaataaagaagatgaggagcaaataaaacttgagaccaatattacattcagatcagagtaaaatgtagaaacaaaattaaacaatggaacaaataaaacaggcccagagggttttagcagaaccctcaatcagacattcagacatctctgcgggccatggcgcagggcgcatgccccacctgttctgctgcagcgcctggtccagcacctcctgcttgtccttcagcacctggtgcaggtgccgcatctcctgccggtactgggctgtcttgccggcgaagtcctcctgctgctccagcagacggtgactgatgtcccccagcttcagtgctgcctgcttcttgtagccctggtcgggggaaggactctgtgaatgaggggacgctgccaggccagggtggacagtgcctcctggctgtgctccctacccactccttgtgtgtcagagcctttaaaatctagcaaccccggataagtttggtctgggattgcaagtctggat

SEQ ID NO: 2479 - DNA, 590 bp, Homo sapiens
  MAP TO CHR5.1; EXPRESSED IN HELA, SIGNAL = 0.72; EXPRESSED IN BRAIN, SIGNAL = 0.51; EXPRESSED IN HEART, SIGNAL = 0.67; EXPRESSED IN BONE MARROW, SIGNAL = 0.53; NT HIT: gi15594346, EVALUE 1.40e-01; SWISSPROT HIT: P26011, EVALUE 7.50e+00; EST_HUMAN HIT: AW792992.1, EVALUE 2.10e-01
agagcaaagcaggtgtctccaaaaggttgttggaaaggcaaatataataccaaatcctatttcatttactttaattacaatactaaggagtggaataaatcttgcccttgaaatgtaataaaagcatactttaaaatcccagctgtctttttcactggcttatttttaaaaatgataatttcctgataagccacaagtaagaccacttaaaatagattcctgacttggctcggccactaactagctgctgatcatagacaagtcacttacactctgcatgtcagcatttgcagtgtatggttcttgtgaggctctgggtcgatggcgtgagagccctttgatagcaagctcttatttattatccattattctcagtcttattaataataagaaggaacaggctgcgtgccagagatagttgagtagatttgcagggctggaggattgaggccacagagaaaaatgaaaagaaataagattggttgagaaatatttaagggggggggggttgggaaatgaagggtggaggggaccagagacaataatggctgggggtttatgtctatcaggctgagtaaaaggtggggctg

SEQ ID NO: 2480 - DNA, 593 bp, Homo sapiens
  MAP TO CHR17.1; EXPRESSED IN BRAIN, SIGNAL = 1.1; EXPRESSED IN BONE MARROW, SIGNAL = 0.83; EXPRESSED IN HEART, SIGNAL = 1.6; EXPRESSED IN PLACENTA, SIGNAL = 1.2; EXPRESSED IN FETAL LIVER, SIGNAL =   6; EXPRESSED IN LUNG, SIGNAL =   2; EXPRESSED IN HELA, SIGNAL = 1.6; NT HIT: Y11497.1, EVALUE 0.00e+00; SWISSPROT HIT: P02749, EVALUE 3.00e-35; EST_HUMAN HIT: AV682758.1, EVALUE 1.00e-108
tctgagagggcagagtaggcttacatgaaatgtcaatatctgttagttgcttttttttttttttttcactgaaatggaggctctgatgcttctgttctgaccttctgtggctactgtaggggaagagaaggccatcttggaagctatgaataatggttctattgacagagaactgcaattagcaatcatattaccattacttactatatatattcttggatttttcttgccttgaccaatttgtgtaggtgtactcatctactgtttcaaatgctatactctctttcagaaagacttcctgaactcttaagtcctgattacaagtattctctctttcagcatcttgtaaagtacctgtgaaaaaagccactgtggtgtaccaaggagagagagtaaagattcaggaaaaatttaagaatggaatgctacatggtgataaagtttctttcttctgcaaaaataaggaaaagaagtgtagctatacagaggatgctcagtgtatagatggcactatcgaagtccccaaatgcttcaagggtaagtctgcattggaacgtttagctaggactcccacttgcccgtcatcataatca

SEQ ID NO: 2481 - DNA, 575 bp, Homo sapiens
  MAP TO CHR5.1; EXPRESSED IN PLACENTA, SIGNAL = 7.3; EXPRESSED IN HELA, SIGNAL =  10; EXPRESSED IN HEART, SIGNAL = 4.7; EXPRESSED IN BONE MARROW, SIGNAL = 6.9; EXPRESSED IN ADULT LIVER, SIGNAL = 4.9; EXPRESSED IN LUNG, SIGNAL = 5.3; EXPRESSED IN FETAL LIVER, SIGNAL = 6.9; EXPRESSED IN BRAIN, SIGNAL = 7.3; EST_HUMAN HIT: AW027359.1, EVALUE 0.00e+00; NT HIT: gi14735434, EVALUE 0.00e+00; SWISSPROT HIT: Q00417, EVALUE 2.00e-08
gaggacaaggaatcagccaggcctgtgcaaaggcagcattttttggttgtggtgtatgactatgaattcaccctctgtttacagataactctcttcactattcctaggaggaaaaagaaatgcattcggtacttacccggagaaggccgctgccccagccccgttccttccgatgacagtgctctaggctgccccgggtccccagctccccaggactcaccctcataccatctgctgccccgcttccccacagaactgcttactagccctgcggagccggcacctacatccccaggtctctccactgctctcagcctcccaaccccagggcccccacaggccccccgcagcaccctgcagagcacacaggtacagcaacaggaatctcagagacaggtggcctagcaggcacaggacacctggccgcctccaggagcctaccccctgaaagtgacagagacccagatctcatggaaactggccaggggtcctgttaacgtcatctcagggtccagaccctgaagatttcagaggctgcagaacttctgcctgaacctggggtcatcgattcaaac

SEQ ID NO: 2482 - DNA, 592 bp, Homo sapiens
  MAP TO CHR19.1; EXPRESSED IN FETAL LIVER, SIGNAL = 0.87; EXPRESSED IN BRAIN, SIGNAL = 0.58; SWISSPROT HIT: P98187, EVALUE 1.00e-25; EST_HUMAN HIT: BI023202.1, EVALUE 1.00e-70; NT HIT: gi16163602, EVALUE 6.00e-47
acatcttcctgctcacggacttcttgtacttcctcactcccaatgggcgacgcttctgcagggcctgtgacatagtgcacaacttcacagatgctgtcatccaggagcggcgtcgcaccctcactagccagggtgtcgatgacttcctgcaggccaaggccaagtccaagactttggacttcattgacgtgctcttgctggccaaggtgggctactctgggatctgaatttcagaagtagaatggactttgacgtgaaatgtcagatccatgaacttggacttgatccagagggcactggggagccatggaaggtgcttgaggaaaggagggacaagtaagatatattttagaggtgactctgtagaagagttcctagaaggagcaaacaggaggcaagagactgggaaagagtcctgctaggcaggtctaatgatgataagggaggaatcttgcctggaatatggatcttcatgaactgttttaggttagactcaggtgccttcatggctggtgtaatttagaggtcttgtcttgtctccaggatgaaaatggaaagaagttgtcagatgagaacataagagcggaggctg

SEQ ID NO: 2483 - DNA, 519 bp, Homo sapiens
  MAP TO CHR17.1; EXPRESSED IN FETAL LIVER, SIGNAL = 1.2; EXPRESSED IN LUNG, SIGNAL = 1.3; EXPRESSED IN HELA, SIGNAL = 1.7; EXPRESSED IN BRAIN, SIGNAL = 1.7; EXPRESSED IN HEART, SIGNAL = 1.3; EXPRESSED IN ADULT LIVER, SIGNAL = 1.8; EXPRESSED IN BONE MARROW, SIGNAL = 1.3; SWISSPROT HIT: Q13183, EVALUE 3.00e-07; EST_HUMAN HIT: AL549850.1, EVALUE 3.00e-03; NT HIT: gi4506978, EVALUE 2.00e-62
actcactgggaggtgaatggggctgggcagttctcggggcaatgtcacacggcagcccatgttcctccttcaggctcttcccccaaaacggcaacgtggtgaacttcgcctcctggttcagcttcgccttccccaccatggtcatcttgctgctgctggcctggttgtggctgcagatcctcttcctgggcttcaagtaagtggcaaagttggtgagagaagcccaggtccctgcccttagccctgggagcttccagttgggtgcagatgtggaaaatgatattatcaccatcccaatgagaaggcttctccctcccaaagcccctctgtgcacttggacccccatttgaggaaattactgggtagagagtattatcccatttcacagatgcgcaaattgaggcttcaggagtggttcgcaactagatttgtcagtgctggggctgcaaaccaggtcacttgatgccccttcccataatggtccaccgtcctttgataggtgcttaaggggcacacact

SEQ ID NO: 2484 - DNA, 502 bp, Homo sapiens
  MAP TO CHR9.1; EXPRESSED IN BRAIN, SIGNAL = 0.43; EXPRESSED IN HEART, SIGNAL = 0.6; EXPRESSED IN ADULT LIVER, SIGNAL = 0.83; SWISSPROT HIT: P10628, EVALUE 1.40e-01; EST_HUMAN HIT: BF371493.1, EVALUE 1.00e-27; NT HIT: AF030001.1, EVALUE 7.40e+00
actatacctgcccaggaggggactatacgggaagccccgattctggggagagcccagaggaactcagctcagcccagagcccagagtggattccaggcaaactttctggtacctagaaccagggaggccagggagggaggcatctgggaccccccatcaccacccagcagcccagagtcccttccctaatcccctctcagctccagttcctggcaggggctgctgcgagattccccgtgcaaccctgacacggggctgtagctaaaacattggtctggcagttttccctctttaagttgaagtgtgatgttggcaggcagcaagctgtggtggcaggctgccagggggagcatgtgttggaaatccttgttccatgttgcagcaatctggggctcccccacccgcaaactgctccagagccagccagccctggggaccagagcctcacgctgatggggagcagccaccgagatgaggagcctgatgaggcagagggactcag

SEQ ID NO: 2485 - DNA, 560 bp, Homo sapiens
  MAP TO CHR11.1; EXPRESSED IN ADULT LIVER, SIGNAL = 0.65; EXPRESSED IN BRAIN, SIGNAL = 0.4; EXPRESSED IN HEART, SIGNAL = 0.48; EXPRESSED IN BONE MARROW, SIGNAL = 0.33; SWISSPROT HIT: O00330, EVALUE 2.00e-42; EST_HUMAN HIT: BG164721.1, EVALUE 0.00e+00; NT HIT: AJ298105.1, EVALUE 0.00e+00
tgatccttcgttatgtgggacatgactcgatataaaatggattgttatattgaccttttatctgatgacttaactaaatttacttattaattttactagttatctatagtctcatttttcctgtgtacacaattaatttatttgtaaatactaaatgtttccttttttcattactcatatatttttttcttgccttactacactgcctagtaaaatatataaaatatgtgcttcacggaaaggggactttgattaaggacatgcctccttcagagctttttcttttccccctagtatttccaacttggggatgtttggcatcgacgaatttactgcagtgattaaccctcctcaggcctgcattttggcggttgggaggttccgacctgtgctgaagctcactgaggatgaagagggaaatgccaaactgcagcagcgccagctcataacagtcacaatgtcaagtgacagtcgagtggttgatgacgaactggcaaccaggtttcttaaaagttttaaagcaaacctagagaatcctatccgacttgcctagtcctcaa

SEQ ID NO: 2486 - DNA, 595 bp, Homo sapiens
  MAP TO CHR5.1; EXPRESSED IN BRAIN, SIGNAL = 2.2; EXPRESSED IN HEART, SIGNAL = 1.1; EXPRESSED IN BONE MARROW, SIGNAL = 1.8; EXPRESSED IN ADULT LIVER, SIGNAL = 1.7; EXPRESSED IN PLACENTA, SIGNAL = 2.2; EXPRESSED IN LUNG, SIGNAL = 1.4; NT HIT: gi14861871, EVALUE 0.00e+00; SWISSPROT HIT: Q9UN66, EVALUE 7.00e-51; EST_HUMAN HIT: BI488619.1, EVALUE 0.00e+00
tattccttggccgaagacaccatccagggggctccagtgtcctcctatgtctccataaactctgacactggagtcctgtacgcgctgcaatcctttgattatgagcagttgagagaactacaactaagagtgactgcacatgacagcggggacccgcctctcagcagcaacatgtcactgagcctgttcgtgctggaccagaatgacaacccgcccgagatcctgtacccggccctccccacagatggttctactggcatggagctggcaccccgctccgcagagcccggctacctggtgaccaaggtggtggcggtggacaaagattcaggccagaacgcctggctgtcatacctcctgcttaaggccagcgagccaggactctttgcggttgggctgtacacgggcgaggtgcgcacggctcgggccctgctggacagagatgccctcaagcagagcctcgtggtggccgtccaggaccacggtcagcctcctctgtcagccaccgtcacactcaccgtggctgtggctgacagcatccccgaagtcttggccgacctgggcagccttgagccctccgacggtccttacaact

SEQ ID NO: 2487 - DNA, 510 bp, Homo sapiens
  MAP TO CHR3.1; EXPRESSED IN BONE MARROW, SIGNAL = 0.66; EXPRESSED IN FETAL LIVER, SIGNAL = 0.53; EXPRESSED IN BRAIN, SIGNAL = 0.65; EXPRESSED IN HEART, SIGNAL = 0.66; NT HIT: gi16175703, EVALUE 3.00e-85; SWISSPROT HIT: Q99551, EVALUE 6.00e-19; EST_HUMAN HIT: AL523995.1, EVALUE 3.00e-43
ggtgtgaagtgaaacgatgcagacaatgagctttggagaatgaggaaccactgaataacttactatggaagtggatactgacatggcaaagaaacgacagcctggagtttttaaaagaatgttcccaatgagcaggacctgaagatgtttcttcgttccaaaggagctagcaaagaagtgattgttagcatcatatcaaaataactaaaagctataacacacactcttgaacgtctttcaaaacaatgggatctatgaaggattatgatatcagatcttgatactgtaaatattttgggccattctcctgaatgctttcttttgtcccatgaaaacctaaacttagggattctatgagttcctctactcagctggatttacctgtaaatgcctttgttgattgttgaccaatgtcccttgtaccttttccaatagtctcgatctgaataaacagatggttaaagttttgcaggaagtatatttttcattgggtcacaatgatcccacaga

SEQ ID NO: 2488 - DNA, 546 bp, Homo sapiens
  MAP TO CHR7.1; EXPRESSED IN BONE MARROW, SIGNAL = 0.75; EXPRESSED IN HEART, SIGNAL = 1.2; EXPRESSED IN FETAL LIVER, SIGNAL = 0.8; EXPRESSED IN LUNG, SIGNAL = 1.2; EXPRESSED IN BRAIN, SIGNAL = 0.65; EST_HUMAN HIT: BG199496.1, EVALUE 0.00e+00; NT HIT: gi8923072, EVALUE 1.00e-109; SWISSPROT HIT: O04716, EVALUE 1.00e+00
ggtcttttatccgccctttctttatctaacacacccattcttttcacaaaacaggatcttcagaggcagactggaaaactggacacccaagccatgttcaacagctcagacctccactcgttccccttgcatgcctttctcatggtttaatgacagccggaaaggatcctattccttcaggaacctgcctgcgcctacaagttcccttcagccttctcctgagactctaatttcagataaaaaggggtccaaggtagaaaacacatggattacaaaagcaaacaagagaaacccaaatccctcctcttcttcaatctttggaaggcattctcaacttatgtctgtagtctggatccaagaaaccaatgtaataacactgcaataaacaatgcatggtatttcttatgtggggaaaagaaagcctcatttaactaccaccttctttaatgctgtttcattgtagattgtacattactctttgatttgcctatcttttcacatattgctatttaatctcagtttgacagttaagccatgctgggaaag

SEQ ID NO: 2489 - DNA, 531 bp, Homo sapiens
  MAP TO CHR17.1; EXPRESSED IN FETAL LIVER, SIGNAL = 1.3; EXPRESSED IN LUNG, SIGNAL = 1.3; EXPRESSED IN BRAIN, SIGNAL = 1.7; EXPRESSED IN HEART, SIGNAL = 0.96; EXPRESSED IN ADULT LIVER, SIGNAL = 2.2; EXPRESSED IN BONE MARROW, SIGNAL = 1.7; EST_HUMAN HIT: R73419.1, EVALUE 2.90e+00; SWISSPROT HIT: P03414, EVALUE 6.50e+00
gagcttgtgggaaaagatgcatctctctatccaagtctcacttctagaggcaaggattctactactcaggattgtagtatgattgtacactttaatcttcaaggactttattataaagcaaggtgccaatattattactgatgcagattatcctatgattccagatttctgcaattacaatatatatatttgaaatgattattccattaagcaacccacttgccccttgctgtgacccttgctatggtgtaacttttaatgtttctggttttacaaaagaaaatctgcatcaatccttaaagttacatttaaaatttacattaacagtacaaccagatggcattctgacactcactgtaagtattctaggatttttctaaaatagctggctcaaatagaaaagtcatctttttcccaagtgtgttcctgtccttttctcttgttgtgtgttctaactgttgcacttatattaaaatcataaaaccagaatggagaatttattccaaaagttcccatgcatttctccaatct

SEQ ID NO: 2490 - DNA, 592 bp, Homo sapiens
  MAP TO CHR20.1; EXPRESSED IN HELA, SIGNAL = 6.1; EXPRESSED IN BRAIN, SIGNAL = 5.4; EXPRESSED IN FETAL LIVER, SIGNAL = 4.6; EXPRESSED IN HEART, SIGNAL = 3.3; EXPRESSED IN BONE MARROW, SIGNAL = 4.8; EXPRESSED IN ADULT LIVER, SIGNAL = 4.4; EXPRESSED IN LUNG, SIGNAL =   4; EXPRESSED IN PLACENTA, SIGNAL = 5.4; SWISSPROT HIT: Q01094, EVALUE 9.00e-37; EST_HUMAN HIT: BE384696.1, EVALUE 1.00e-122; NT HIT: U47676.1, EVALUE 0.00e+00
tataagatggggatgcaggcagccacagtgggtattactaccagctcctccaggctggcatgggcaggtgtgcctgccctcctgtgtggccggtacctacagccactggatgtggttcttggacttcttggcaatgagctggatgccctcaaggacgttggtgatgtcatagatgcgccgcttctgcaccttcagcacctcggcagcccagttcaggtcgacgacaccgtcagccgagtggctcagcagctccaggaagcgcttggtggtcagattcagtgaggtctcatagcgtgacttctcccccggggatttcacacctgtgggggtgtggtcaggcaagacagggcccttcagcatccacccccacctccagccaggcctgccactctggcagtgcagggcagcaggatgatgggggctgggggacagccagctccttccccttggcgaggccaaccacagcattcttcttctggctggggaactcctcacccctcagggcctggagaaaccaagccaggtggccactccaactgcccatcagggtcctcagaggcctggctcaagcccgacaagccagacgttagct

SEQ ID NO: 2491 - DNA, 517 bp, Homo sapiens
  MAP TO CHR9.1; EXPRESSED IN BONE MARROW, SIGNAL = 0.81; EXPRESSED IN ADULT LIVER, SIGNAL = 0.78; EXPRESSED IN HELA, SIGNAL = 0.91; EXPRESSED IN FETAL LIVER, SIGNAL = 0.71; EXPRESSED IN BRAIN, SIGNAL = 0.96; SWISSPROT HIT: P06876, EVALUE 2.10e+00; EST_HUMAN HIT: BG769630.1, EVALUE 7.20e-01; NT HIT: Z49344.1, EVALUE 1.20e-01
tgtgtacgcttgtgagggtctttcctaagcaggaggagatggctgtataaaaggattactgttacttatttctatatttttcctaaagaaaagcaggaactacattaattctagattgagatcagaaactacttaccttacaggacacgtgttgtgtgcagccacaggtttcagaagcagatggcatgtgctaaagagtgtatgtatgaattagctctgggaataacttctgctccaggtataaaagaaattaggaggagagccaaattaaaattgggcaataggcctatgcagagtggtacttttatatctccttttcctattgtgtgtatgtgtgtgtgtagagtgcgtgtgtctgcatgtactgaaagcacacaaacacaaatagacccctacctgtaggttttatacatttacattgtactccagaaaaataaaaatgatttttttttcttgacatttacagtctcagattaacagacgtgtgtaggatttcagtcccatttgaatacacccg

SEQ ID NO: 2492 - DNA, 566 bp, Homo sapiens
  MAP TO CHR7.1; EXPRESSED IN BONE MARROW, SIGNAL = 1.4; EXPRESSED IN PLACENTA, SIGNAL = 1.2; EXPRESSED IN FETAL LIVER, SIGNAL = 1.3; EXPRESSED IN HELA, SIGNAL =   2; EXPRESSED IN LUNG, SIGNAL = 0.63; EXPRESSED IN BRAIN, SIGNAL = 1.5; EXPRESSED IN HEART, SIGNAL = 0.85; SWISSPROT HIT: Q99996, EVALUE 6.00e-35; EST_HUMAN HIT: BE002098.1, EVALUE 4.00e-86; NT HIT: AJ010770.1, EVALUE 0.00e+00
atcaatgcaacagcacgaagatagaaaaaaaattagacttcagttctcatgaatttttaaactcttgtagtcagtatatgcaaaaaaaagaagttaaattatttgatttgtcatttaagaatattataatgtttacatatgtttactttaagaatgatttaaggctacagatggaagcccaacgcatttgcctctctctggtttattcaactcatgtggatcaggttcgtgaatatatggaaaatgaaaaagataaagctctttgcagtcttaaagaagagcttatttttgctcaagaggaaaagatcaaggaacttcagaaaatacaccagttagaactacagactatgaaaacacaagaaacaggtaaaatggtttctgacttataagtaccatgatccaaataagtattggatagagcccaccattctataattttttccttgtcatagaacccacagaggaaggtgatttgtttaccagttgttgatataatcactagacattcatttaagtgcttgagaaagctaaaatcattttcccataggaagtcacaatccattgcg

SEQ ID NO: 2493 - DNA, 506 bp, Homo sapiens
  MAP TO CHR19.1; EXPRESSED IN LUNG, SIGNAL = 0.93; EXPRESSED IN HELA, SIGNAL = 0.69; EXPRESSED IN BRAIN, SIGNAL = 0.63; EXPRESSED IN HEART, SIGNAL = 0.84; EXPRESSED IN FETAL LIVER, SIGNAL = 1.2; SWISSPROT HIT: P78329, EVALUE 3.00e-26; EST_HUMAN HIT: AW951429.1, EVALUE 0.00e+00; NT HIT: AB002461.1, EVALUE 0.00e+00
gggttggtcctagaagggtctgtggtgtgctcagagccccctcctaccccaccttggtctaggctgggggttggagctcggctaggcttgcaggatatgcaagcccgcatggggatccaggcacggatacccccttctctattcctcaaactgctctaggtggggttgggtgtcccaggccaggttaccggcttgatggggccaggatggggctcctgggtgcagtcagagttcccacctccctcccctaggaactgcatcgggcagacgttcgcgatggcggagatgaaggtggtcctggcgctcacgctgctgcgcttccgcgtcctgcctgaccacaccgagccccgcaggaagccggagctggtcctgcgcgcagagggcggactttggctgcgggtggagcccctgagctgagttctgcagagacccactctgaccccactaaaatgacccctgattcatcaaaagtgaagcctagaattaccctaagaccctgttccaca

SEQ ID NO: 2494 - DNA, 518 bp, Homo sapiens
  MAP TO CHR6.1; EXPRESSED IN FETAL LIVER, SIGNAL = 4.6; EXPRESSED IN HELA, SIGNAL = 4.5; EXPRESSED IN BRAIN, SIGNAL = 5.8; EXPRESSED IN LUNG, SIGNAL = 4.4; EXPRESSED IN HEART, SIGNAL = 4.8; EXPRESSED IN BONE MARROW, SIGNAL = 5.7; EXPRESSED IN ADULT LIVER, SIGNAL =   7; EXPRESSED IN PLACENTA, SIGNAL = 6.4; NT HIT: D86566.1, EVALUE 0.00e+00; SWISSPROT HIT: P31695, EVALUE 2.00e-26; EST_HUMAN HIT: BF951906.1, EVALUE 5.00e-76
ccccacttatctttgtatatccctgtttgtctctctccccaggcatagacgtctcttccctttgccacaatggaggcctctgtgtcgacagcggcccctcctatttctgccactgcccccctggattccaaggcagcctgtgccaggatcacgtgaacccatgtgagtccaggccttgccagaacggggccacctgcatggcccagcccagtgggtatctctgccaggtgagagggtctgcaggagaagggggaggaaagacaagggtgggctggatgggagagacagtagtgactgagggaagacccaatgtatccatttcacctccttttattttttttaaccccacacacccaactaaccacaaagtcatgccactttatctcctgaagttttctcaagtctgtgctttcaccttcaccctttgtcccactgcctgagtcctgacctttgttgcgttccagatagatacttgcatcagcctcctaactacagtctctgcctccacacttgtcctt

SEQ ID NO: 2495 - DNA, 500 bp, Homo sapiens
  MAP TO CHR12.1; EXPRESSED IN BONE MARROW, SIGNAL = 4.5; EXPRESSED IN FETAL LIVER, SIGNAL = 3.9; EXPRESSED IN LUNG, SIGNAL = 3.4; EXPRESSED IN HELA, SIGNAL = 6.8; EXPRESSED IN BRAIN, SIGNAL = 4.9; EXPRESSED IN HEART, SIGNAL = 2.7; EXPRESSED IN ADULT LIVER, SIGNAL = 4.9; EST_HUMAN HIT: BF325888.1, EVALUE 6.00e-57; NT HIT: gi9966908, EVALUE 4.00e-57; SWISSPROT HIT: P02810, EVALUE 7.00e-01
aagtgaggatattggcgcaccgcgccagggtctcactttgctgggtgggacaggcaatcccctgtggttggcctgatcatggaagagggtctgacccgagccttgtcctccttcccccaggaaagccaatggagtcctagaggcgcggcaactcgccatgcgcatatttgaagattacaccgtctcttggtactggattatcatgtaagtcaggagggaaggggcctctcccctggctgccccctctaagcctggctgagggtggagtctgttcatgaccgttttcttttccccagaggcctggtcattgccatggcgatgagcctcctgttcatcatcctgcttcgcttcctggctggtattatggtctgggtgatgatcatcatggtgattctggtgctgggctacggtgcgtcaccccctccctgtggcttctctttcctgaatccgcacactgccctgccctttcccgtggaaatggcccatcaggaaaacaaaaa

SEQ ID NO: 2496 - DNA, 515 bp, Homo sapiens
  MAP TO CHR9.1; EXPRESSED IN BRAIN, SIGNAL = 4.7; EXPRESSED IN HEART, SIGNAL = 2.5; EXPRESSED IN ADULT LIVER, SIGNAL = 4.5; EXPRESSED IN BONE MARROW, SIGNAL = 3.6; EXPRESSED IN FETAL LIVER, SIGNAL = 3.7; EXPRESSED IN LUNG, SIGNAL = 2.7; SWISSPROT HIT: O15287, EVALUE 2.00e-42; EST_HUMAN HIT: BE798999.1, EVALUE 0.00e+00; NT HIT: gi4759335, EVALUE 0.00e+00
ctcgaggcacctgaagtaggacacagaacaggggtgaagaggaatcaatttcagaaactctagggtaagtaggtgaacatggagctcaccaactcaggtcccaatcagaaaatcatccctccacaccccctctaggaccccgggctcacctgctaaattcactaattgccactttttgggcacccagttgaacccaggcctggccctgaagcaggtgggtggcagagacccagagtgggcagtatggcagttccttggttccttttctggcatcttcccacagccgggacatcttgggtagcagagatgatgtgcggctgagcaactcctcacatagagtcaaggcatcttgggctctgcctgcctggatcagtgctaccgctgcctccaaaaacacctcaggcatacagggccctggaggggaggggggtggggagaactggagtgggaagaagaagcagtgtcttgaaaggcatgagccaccatccccaacctcttcaccaggctctggtacc

SEQ ID NO: 2497 - DNA, 598 bp, Homo sapiens
  MAP TO CHR17.1; EXPRESSED IN HEART, SIGNAL = 4.1; EXPRESSED IN ADULT LIVER, SIGNAL =   5; EXPRESSED IN FETAL LIVER, SIGNAL = 3.3; EXPRESSED IN LUNG, SIGNAL = 3.4; EXPRESSED IN PLACENTA, SIGNAL =   6; EXPRESSED IN HELA, SIGNAL = 3.9; EXPRESSED IN BRAIN, SIGNAL =   4; SWISSPROT HIT: Q05859, EVALUE 1.20e-02; EST_HUMAN HIT: BI755052.1, EVALUE 2.10e-01; NT HIT: AF143314.1, EVALUE 2.00e-03
agattgacacctcccgacacctgctcaccatcgccgggtaagcccccctcccaggaccctccaggccccacccctgtgcctgggacagaggagcacgacctgtggctgtacagtgtgccctgcccccatggcctgaatgccctgtctctctgggtggggctgcggcagctggaagcatgagaagtcccgccgggccctcaaatggcgggaggagcagcgaaaggagtgctacgctaaggacgacagcgagaaggactcagacacaggtgatgaccaaccagacatcctggagccacccgaggtggccgcagcccgggagagcattgcagccctggtggacgagcagaagcaactgcgcaagcagaaggtgtccagggtttggggggacaaggagagtgggtttaggggacagggtgagcaggtttgagaggcaaggcggaggggccagggtgggggtagccgtgagacttgggaactcaggccacaaatcctgtgtgactttgctaagctctttaacttctctatgcgtcacattccccacctgtaaaatgggagcagtccatggtgcagccctcatggggttgctgggaagattaca

SEQ ID NO: 2498 - DNA, 519 bp, Homo sapiens
  MAP TO CHR7.1; EXPRESSED IN BRAIN, SIGNAL = 3.3; EXPRESSED IN HEART, SIGNAL = 2.6; EXPRESSED IN ADULT LIVER, SIGNAL = 2.6; EXPRESSED IN BONE MARROW, SIGNAL = 3.9; EXPRESSED IN PLACENTA, SIGNAL = 2.6; EXPRESSED IN FETAL LIVER, SIGNAL = 2.5; EXPRESSED IN LUNG, SIGNAL = 1.7; SWISSPROT HIT: P06547, EVALUE 4.80e+00; EST_HUMAN HIT: BI093816.1, EVALUE 0.00e+00; NT HIT: AB051545.1, EVALUE 0.00e+00
cgatgttggaatcagtggtgttattgcaagtcacgtcttccagactccaccatccatcagaagagattgcctggaaatgatttgtcagagcttgactcactgcttttgaaaaatcatcccatgatgtctgtttgcggatatttaaagcacatattgtgttttcacattccaagtcatcagaaccatagttgcttggttcaatctcacccactgaaatccttaagggtattttaagagcatctgttagaagagtaaaagaattaggagttaaaaaaatctggacagaaaaaaaaagtaaaactattacataaaataagcagatataaacatttaaaaattataaaccaaagctattttatttcattaaataacattacattgaacgttcttacactggagtaaacttttgtctcccaatctcttcagtttctttggaagcacgctgcacgaactgtctctttccttgtatctttggctttttctatttcattaactctttcccatcagcaagattgtcaa

SEQ ID NO: 2499 - DNA, 557 bp, Homo sapiens
  MAP TO CHR7.1; EXPRESSED IN PLACENTA, SIGNAL =  43; EXPRESSED IN FETAL LIVER, SIGNAL =  12; EXPRESSED IN LUNG, SIGNAL =  21; EXPRESSED IN BRAIN, SIGNAL = 4.6; EXPRESSED IN HEART, SIGNAL =  15; SWISSPROT HIT: P08526, EVALUE 1.00e-47; EST_HUMAN HIT: AI201613.1, EVALUE 0.00e+00; NT HIT: L05094.1, EVALUE 0.00e+00
attctggatgcaaagccatcatcgtgaagaacattgatgatggtaccttagatcgcccctacagccatgctctggtggctggaattgaccgctgtccccacaaagtgacagctgccatgggcaagaagaagatctctaagaggtcaaagatcaagtcttttgtgaaagtttataaccacaatcagctaatgcccacaaggtactctgtggatatccccttggacaaaactgtcatcaataaggatgtcttcagagaccctactcttaaacacaaggcccgatgagaggccaaggtcaagtttgaagagagatacaagacaggcaagaacaagcggttcttccagaagctgcggttttagatgcttcgttttggtcattaaaaattaaacagaaaaaaaaaaggaaagttcacagatggccaaacttttccacagccatggtaccgtcctagtgaagtacatttgagacaatagtcatcaaattacatataaatacgtaatcaaccaaaattatttttagatagttcagttggtttacgttgtctgaattggcggagt

SEQ ID NO: 2500 - DNA, 600 bp, Homo sapiens
  MAP TO CHR17.1; EXPRESSED IN FETAL LIVER, SIGNAL = 0.84; EXPRESSED IN HELA, SIGNAL = 0.97; EXPRESSED IN BRAIN, SIGNAL = 0.99; EXPRESSED IN BONE MARROW, SIGNAL = 1.1; EXPRESSED IN HEART, SIGNAL = 0.67; NT HIT: U78308.1, EVALUE 0.00e+00; SWISSPROT HIT: P30953, EVALUE 1.00e-90; EST_HUMAN HIT: BF477726.1, EVALUE 0.00e+00
ctgaccaccttccatgccatgttacacactttactcatggccaggttgtgtttttgtgcagacaatgtgatcccccactttttctgtgatatgtctgctctgctgaagctggccttctctgacactcgagttaatgaatgggtgatatttatcatgggagggctcattcttgtcatcccattcctactcatccttgggtcctatgcaagaattgtctcctccatcctcaaggtcccttcttctaagggtatctgcaaggccttctctacttgtggctcccacctgtctgtggtgtcactgttctatggaaccgttattggtctctacttatgctcatcagctaatagttctactctaaaggacactgtcatggctatgatgtacactgtggtgacccccatgctgaaccccttcatctacagcctgaggaacagagacatgaagggagccctgagcagagtcattcatcagaagaaaactttcttctctctctgatgataacacttggagctattacatagtttatccagtaaaatattgatattaatattggaatattattctaaattatttcctcaccatccttttgttgaaatggca

SEQ ID NO: 2501 - DNA, 577 bp, Homo sapiens
  MAP TO CHR1.1; EXPRESSED IN HELA, SIGNAL = 2.3; EXPRESSED IN BRAIN, SIGNAL = 1.7; EXPRESSED IN HEART, SIGNAL = 1.2; EXPRESSED IN BONE MARROW, SIGNAL = 1.5; EXPRESSED IN ADULT LIVER, SIGNAL = 1.5; EXPRESSED IN FETAL LIVER, SIGNAL = 1.8; EXPRESSED IN LUNG, SIGNAL = 1.4; EST_HUMAN HIT: AL601147.1, EVALUE 1.00e-116; NT HIT: L16464.1, EVALUE 1.00e-115; SWISSPROT HIT: P41162, EVALUE 6.00e-42
tcagcaggggtaccagaaaccacggcccttttccttgaaatcccccctctttggccatgtcagccgcctcctctcacctgagggcccggctcagcttgtcataattcatctgtggtttgcatttcctgcggccccagaggcgggccacctcatctggatccttgatgacaaattccccgtactctccctgctgccaggcgatgacatggcggaactcttccttctgcagcagctccaggatgaagtgccacagctggatctgccgggagcctggggacgactcggctttgtaggcccaatcagggaaggccaaccctgggtggagaggggagagtgagggctctggaggccctgccctaggccaccgttggagcagggggtaggcccggccaagaggctcacctgagatccagttgccggggttggctgggatgccctcagccaagcagctgcagtgcatggtccactccggcgagatgggctgtgtctgggccttggggaaatggtcaccacttaagaggaagggaaggaaggaggcagaggggaggacagtgaaagaggaaggaaaaatggaggg

SEQ ID NO: 2502 - DNA, 590 bp, Homo sapiens
  MAP TO CHR2.1; EXPRESSED IN FETAL LIVER, SIGNAL = 0.62; EXPRESSED IN LUNG, SIGNAL = 0.9; EXPRESSED IN BRAIN, SIGNAL = 0.49; EXPRESSED IN HEART, SIGNAL = 0.84; EXPRESSED IN BONE MARROW, SIGNAL = 0.55; SWISSPROT HIT: P10925, EVALUE 6.60e-01; EST_HUMAN HIT: BF946547.1, EVALUE 6.00e-54; NT HIT: gi14742988, EVALUE 1.00e-45
tcatcagcgactgaatacgctgctgaaagaggaatggaagggagcagcagtgagtggttctgaacatgtaagacagaagcaatatgcctacatggatctttgcggtgatatccaagggtgtcttccttgatctcgtcttatgtgagcctcaaaggcaggtgataaaatgaaactggaaggtgtgaaagacctgctcacagcagctggctgtgggaggtggtggccatttgggaacgctagggataagagtacgatttctcccaaaatgacttacacagaaacctcagagggcctacatggaccacacacctcttcagctgctcgaagctcatcttcctcgtgggcatcagctttttctgtagctgacagccctgctggaagtgccgttttcttgtcctcagcctgcaagggaagatgtgaaaacagctgagcacgggagatggagactcagtagagaaaggacaatactgacaagaggcatgagtctgtgaaaaaaacacagacctgcagagcagcagcatcctgagagagtggatactccaaacggctgaacctccactagagtatagggtgggcaggttaagcttcag

SEQ ID NO: 2503 - DNA, 554 bp, Homo sapiens
  MAP TO CHR19.1; EXPRESSED IN HEART, SIGNAL = 1.9; EXPRESSED IN BONE MARROW, SIGNAL = 2.5; EXPRESSED IN ADULT LIVER, SIGNAL = 4.5; EXPRESSED IN FETAL LIVER, SIGNAL = 2.1; EXPRESSED IN LUNG, SIGNAL = 1.7; EXPRESSED IN BRAIN, SIGNAL = 2.8; SWISSPROT HIT: Q64458, EVALUE 3.00e-12; EST_HUMAN HIT: BI906340.1, EVALUE 1.00e-79; NT HIT: gi14575809, EVALUE 0.00e+00
tgaccatcacacagacagggagacagaaacagagatagactgagggcccaaaaaatagaggaaaggagagagaaagaaaagagacagagagagagatggagacccaggaagaatgggatgatagcaccagagacacacagagagatgtcatgacagcctcggagagacagtgggacagagacagaaggtggcagtgaacagaacccccaggccagccctagagttcaaggcttcccctcctgcccattccaggacctgggttggggccacccccagccacagtaggagagttttccctttcactcggctggagaccctggggtgaccccgccatgctgaccttctgtcccctggaatgtctccaccagacaccgggcctccgcctggatcagctcctcgccttctcgcttccccatgcccaggtcccgcagagcaagcatggtaaacttcctcagctgcctccaccgctccccgttggagaagaaaacccctgcgcagaaggctagactcaaaaagggaccggcccctctcccccattcccccttcttcctttc

SEQ ID NO: 2504 - DNA, 523 bp, Homo sapiens
  MAP TO CHR17.1; EXPRESSED IN LUNG, SIGNAL = 0.72; EXPRESSED IN HELA, SIGNAL = 2.8; EXPRESSED IN BRAIN, SIGNAL = 1.4; EXPRESSED IN HEART, SIGNAL = 0.68; EXPRESSED IN ADULT LIVER, SIGNAL = 1.3; EXPRESSED IN BONE MARROW, SIGNAL = 1.4; EXPRESSED IN FETAL LIVER, SIGNAL = 1.3; SWISSPROT HIT: P35240, EVALUE 6.40e-02; EST_HUMAN HIT: BG427609.1, EVALUE 0.00e+00; NT HIT: gi16164876, EVALUE 0.00e+00
ttgacaggctcctccttttgactactgagcaattaagatattttcagtcgtttcgattccttttccacattgtctctaatgttctgtagttttctggagttctgaaccagggatactaaactctccctaaaatcactagtcccatgatctctgccaacattatgaagctcatcaaagaaagtcaacgtctgtttgagtttggcctgaacaattttttgctcttctaattctgcaagaagggcctgcttagtacataattcagtcttgtacttctcctgtaactgttcaatttctttctggagatgctgaaaatcttcctcactataaggtgtctccttacatttatcttcaggaagcaagatgtttgagggaatacgtaaaatcagctgcaaaaacagttgctccattttgctaaaaaggttatcaaaatctcctttcatgaagcaaaaaaacttctctgtgcatttgcgaatctgcactgggctaatgtcacagtctgggatgccatccagcttcttcagaa

SEQ ID NO: 2505 - DNA, 542 bp, Homo sapiens
  MAP TO CHR4.1; EXPRESSED IN FETAL LIVER, SIGNAL = 0.76; EXPRESSED IN BRAIN, SIGNAL = 0.68; EXPRESSED IN HEART, SIGNAL = 0.5; EXPRESSED IN ADULT LIVER, SIGNAL =   1; EXPRESSED IN BONE MARROW, SIGNAL = 0.73; SWISSPROT HIT: P41823, EVALUE 2.00e-13; EST_HUMAN HIT: BF967194.1, EVALUE 0.00e+00; NT HIT: AJ303368.1, EVALUE 0.00e+00
tgaaaatgttggagggcttccagatcttggttcagaatacagtacaaggaacaattcacaagataaaatgtgtctgtgactcccaaatgagcgtgtcagaaatgtcttgtagtgaaagtacatccgcatgtcagtctctcgaagacgggtcagttccagaaattctcattagcctgctttataatgccacaaatgggagactatcagcagaagtgataaaaggcagccacttaaaaaattgggcagcaaacagaccacccaatacatatgttaagttaactctacggaaatccacggatcaagagatgtccaaatgcaagatatccatccgcagagggcggccaaatccagtatacaaggaaacttttgttttcaaagtgaccctatttcagctttctcatgtgacactcatgctgtctgtgtataacaaaagcagcatgagaagaaagatgataggctggatttatttaggtctcaacagctctggagaagaactcaatcactggactgaaatgaaagagtcaaaaggacggcaagtacgt

SEQ ID NO: 2506 - DNA, 519 bp, Homo sapiens
  MAP TO CHR6.1; EXPRESSED IN PLACENTA, SIGNAL = 2.8; EXPRESSED IN FETAL LIVER, SIGNAL = 3.7; EXPRESSED IN LUNG, SIGNAL = 2.6; EXPRESSED IN HELA, SIGNAL = 3.1; EXPRESSED IN BRAIN, SIGNAL = 4.8; EXPRESSED IN HEART, SIGNAL = 2.7; EXPRESSED IN ADULT LIVER, SIGNAL = 4.6; EXPRESSED IN BONE MARROW, SIGNAL =   4; SWISSPROT HIT: Q9UBS5, EVALUE 6.00e-07; EST_HUMAN HIT: AU118171.1, EVALUE 1.00e-110; NT HIT: gi14760806, EVALUE 1.00e-111
agtgagcagcttcaagccaggtacgaactaaattgtgaagaggtgatacaaaattacatgaagcagtaagagagaaaaaggtctgtttcccagaggtatgagagacccaaatcagcccagaactcacagggggacatgtatttacaagagatgagattggatagcatgttcttcccagctggggatggggaccccctgcttcctgagtcccctgcccttcccctctccctttccctccccctactggcctgtcctccctcaccctaccctcacttataaagcaaatgcactcgactcccatcacagctaagccggtcggggggctcagggggtcccctgggcaggcccccagagggttctgggggtgtcggtgggtggcgccgggagcggagctgctgccgagactggagttgatggcgcagttcagagacacgctcctctttctggaggaagaagcacaattgggatagtaggagaagaggaggtgatgaaggagtggggaggagggaaagagaggaa

SEQ ID NO: 2507 - DNA, 566 bp, Homo sapiens
  MAP TO CHR19.1; EXPRESSED IN BRAIN, SIGNAL = 1.2; EXPRESSED IN HEART, SIGNAL = 1.2; EXPRESSED IN FETAL LIVER, SIGNAL = 0.85; EXPRESSED IN LUNG, SIGNAL = 1.2; NT HIT: U29366.1, EVALUE 2.00e-68; SWISSPROT HIT: P52888, EVALUE 4.00e-19; EST_HUMAN HIT: BF527375.1, EVALUE 3.00e-68
gcttcattcaaagcagaggctccagggaacacactcctcctgggggctggggccgcacacccgtccccgaccctgggcctgcagctgcatctcagctggggctgtcccccgaggagcctgggacgcgctccgtggctccccagcagggactcctgcacttgctaagtgaagcatggggaccaactcccttcaccttcccagggaagcagctgaggctccaaattccagggtgtgcccggctcaagggtggctacctggcgtggccgggaccccgaggatctcctggcagagccgcgcatactcctcggcggggtctgcgtccgtctgcgtgtgcagggcctggtccaccttggcgaggacgatctggcgcaggttgaagaggcctgggcgggagggaaggagagagctggcctctgcacctgccccggcccactctgcccagagctccgacccccacccggggcacatgccaggccccagctgtgtgccgccccccgaggttagcacccttccccggacggggcgggtgcacctgtgttggcctgccgggactcaatgagcttctc

SEQ ID NO: 2508 - DNA, 593 bp, Homo sapiens
  MAP TO CHR9.1; EXPRESSED IN BONE MARROW, SIGNAL = 3.8; EXPRESSED IN FETAL LIVER, SIGNAL = 3.1; EXPRESSED IN LUNG, SIGNAL = 1.6; EXPRESSED IN HELA, SIGNAL = 3.6; EXPRESSED IN BRAIN, SIGNAL = 3.5; EXPRESSED IN ADULT LIVER, SIGNAL = 2.6; EXPRESSED IN HEART, SIGNAL = 1.7; NT HIT: AJ133424.1, EVALUE 0.00e+00; SWISSPROT HIT: Q9NQN1, EVALUE 7.00e-79; EST_HUMAN HIT: BF003023.1, EVALUE 9.00e-07
ctgtggtcatgagcaaggctgcctacatgcccatggctgttggctcctgggcagctggtatcaccaactctgtagtacagatatccctagcaatgtgactgcccttctgtggggacaatgtcatcaatcacttcacctgtgagatcctggcagttctaaagttggcctgtgctgacatctgcatcaacgtgatcagcatggttgtgaccaacatgatcttccttgcactcccagtcctgtttatttttgtctcatatgtcttcatcattgccaccatcctgagaatcccctcagctgaggggaggaaaaaggccttctccacctgctctgcccacctcactgtcgtgatcgtcttctatgggatgatcctcttcatgtatgggaagcccaagtctaaggacccaatgggagcagacaaacaggaccttgcagacaaactcatctccattttctatggagtggtgacccccattctcaaccccatcatctacagcccgaggaacaaagatttgaaagctgctatgaggaacctggtggctcaaaaacacctaacagagtgactatcacagatccccagactgcgagaatgcata

SEQ ID NO: 2509 - DNA, 516 bp, Homo sapiens
  MAP TO CHR19.1; EXPRESSED IN PLACENTA, SIGNAL = 5.3; EXPRESSED IN LUNG, SIGNAL = 3.4; EXPRESSED IN HELA, SIGNAL = 4.4; EXPRESSED IN BRAIN, SIGNAL = 4.6; EXPRESSED IN HEART, SIGNAL = 3.5; EXPRESSED IN ADULT LIVER, SIGNAL = 4.3; EXPRESSED IN BONE MARROW, SIGNAL = 6.5; SWISSPROT HIT: O07672, EVALUE 1.20e+00; EST_HUMAN HIT: AA584465.1, EVALUE 1.00e-05; NT HIT: AL163204.2, EVALUE 1.00e-04
atggtgccttgactcagacctcggagcaagtacgaaaaatcacttccgatcggcctcattaataacacagttgctaatgtggcagtaagacagttccctggcccctgattaaaaacagaagtttcccccacattcgtggagatggagcagaagggaaaacaaagacaagcacacttgtgccagataaatacagacgcaaacacatgcatggcagataaacacacactggcacaccaaatatacacacagccggctgcagacatccgggtgggctcgcacagcccgaagagaccaaaagcccgggtgggctcgcacaaaaaggaacagaaaccgctgcagagatgtcccgctggaccctggccacatctgggacctgatcacttcagtgtacttgaacaggagacagagtgtgggaaattgacatccctgggagtagccctgagccagaaatggaatgagttggtggataaataccccagctccctccccagcatatgcctaatccacagtctccca

SEQ ID NO: 2510 - DNA, 556 bp, Homo sapiens
  MAP TO CHR14.1; EXPRESSED IN BRAIN, SIGNAL = 4.4; EXPRESSED IN ADULT LIVER, SIGNAL = 6.3; EXPRESSED IN BONE MARROW, SIGNAL = 3.5; EXPRESSED IN PLACENTA, SIGNAL = 5.8; EXPRESSED IN LUNG, SIGNAL = 2.7; EXPRESSED IN HELA, SIGNAL =   5; SWISSPROT HIT: P04437, EVALUE 9.00e-28; NT HIT: U32526.1, EVALUE 0.00e+00
tgggaagactggaagaccacctgggctgtcattgagctctggtgccaggaggaatggacaagatcttaggagcatcatttttagttctgtggcttcaactatgctgtgagttatggaagagaaactccaggatatgttactaacttgggtgaatgagaaaattggggtacagacaaactcatgcaggtagacactttaagaagaaaatattattttggggcctaatgacattttgttatctctctaagcaggggtgagtggccaacagaaggagaaaagtgaccagcagcaggtgaaacaaagtcctcaatctttgatagtccagaaaggagggatttcaattataaactgtgcttatgagaacactgcgtttgactactttccatggtaccaacaattccctgggaaaggccctgcattattgatagccatacgtccagatgtgagtgaaaagaaagaaggaagattcacaatctccttcaataaaagtgccaagcagttctcattgcatatcatggattcccagcctggagactcagccacctacttctgtgca

SEQ ID NO: 2511 - DNA, 534 bp, Homo sapiens
  MAP TO CHR17.1; EXPRESSED IN HELA, SIGNAL = 7.3; EXPRESSED IN BRAIN, SIGNAL = 6.1; EXPRESSED IN LUNG, SIGNAL = 3.3; EXPRESSED IN HEART, SIGNAL = 3.2; EXPRESSED IN BONE MARROW, SIGNAL = 6.3; EXPRESSED IN ADULT LIVER, SIGNAL = 4.9; EXPRESSED IN PLACENTA, SIGNAL = 7.3; EXPRESSED IN FETAL LIVER, SIGNAL = 6.5; SWISSPROT HIT: Q09499, EVALUE 2.00e-04; NT HIT: gi13651521, EVALUE 0.00e+00
gtttatacgccagccagctctcagtgtcttgatattacagagactaagcgagttcattggaaacaagtgaaattgctcagaggagatctgagaatattccagaagtcttgtttcctctaactgagtgactagagcctgccacaagagtagaggatgtggttgcaagatggggtgagactcagcatgctttgtttatttgatctgtacagagatgtcccactttgtgtccaatggtgatgggctggtggtgactgtggacagtgaatctggggacgtcctgtggatccaaaactacgcctcccctgtggtggccttttatgtctggcagcgggagggtctgaggaaggtgatgcacatcaatgtcgctgtggagaccctgcgctatctgaccttcatgtctggggaggtggggcgcatcacaaagtggaagtacccgttccccaaggagacagaggccaagagcaagctgacgtgagttgggagctcggggaaggagagggcggccgtggccttcgtgttctggtgctgttgcag

SEQ ID NO: 2512 - DNA, 558 bp, Homo sapiens
  MAP TO CHR19.1; EXPRESSED IN ADULT LIVER, SIGNAL = 5.8; EXPRESSED IN BONE MARROW, SIGNAL = 4.6; EXPRESSED IN PLACENTA, SIGNAL = 6.8; EXPRESSED IN FETAL LIVER, SIGNAL = 3.8; EXPRESSED IN LUNG, SIGNAL = 2.4; EXPRESSED IN BRAIN, SIGNAL = 5.3; EXPRESSED IN HEART, SIGNAL = 2.3; EST_HUMAN HIT: BI918861.1, EVALUE 2.00e-69; SWISSPROT HIT: O02491, EVALUE 8.00e-01
tttggaaatagatgccagggggctgctcaggggatgatgctggtggtgggcttttgttggacaactggggtgatgggcctgggggcagatgctgggggtcgcaggcttgggggacactgtctgaggaccccctcgcccaggaccacctccccctgcagctgcggctcagccccactgaccttggctcctgcccgccctgcggcccctgccccatcccgaagccggcagccagaggcaggcgccaggcaagtgcccaggggcaggtggtgagagcccggagcccctgtcgggggcgtggggaggggacagcagccaacactgccccacgcacttctgggcgtgccctgcagagtcaagactggggcaagagtgacgagaggctgctacaagccgtggaaaacaacgatgcacctcgggtggccgccctcatcgcccgcaaggggctggtgcccacgaagctagaccccgagggcaagtccgcgtgagtgcccgcgacccgggagtgagatggctgaggggtggcaaccttgcggctgaacccttgtctctcacctccag

SEQ ID NO: 2513 - DNA, 513 bp, Homo sapiens
  MAP TO CHR7.1; EXPRESSED IN ADULT LIVER, SIGNAL = 2.8; EXPRESSED IN PLACENTA, SIGNAL = 4.5; EXPRESSED IN FETAL LIVER, SIGNAL = 3.4; EXPRESSED IN HELA, SIGNAL = 4.4; EXPRESSED IN BRAIN, SIGNAL = 3.9; EXPRESSED IN HEART, SIGNAL = 1.9; EXPRESSED IN BONE MARROW, SIGNAL = 4.4; NT HIT: gi14751802, EVALUE 1.00e-111; EST_HUMAN HIT: H79904.1, EVALUE 1.00e-110; SWISSPROT HIT: Q14168, EVALUE 3.00e-24
tggaaaaacgttaagccaccctatgtattttagtctattttttatgccctaaaatttctttgtacaaaaatctcaacactattttatttagttacttcacggaaaccaagggaagatgaaaaagatggccaggcatataagtttgtgtcacgatctgagatggaagcagatattaaagctggaaagtatttggaacatggggaatatgaaggaaatctctatggaaccaaaattgattctattcttgaggttgtccaaactggacggacttgcattctggatgtcaacccacaagtaagctgcttggattccaaagctgttttatattttattttctgtggagtttttttcatgtgtgtcggggttgttgggttggggttgtttgttttgtcagggtggaaaggtgactccctccattacctttgggtgatagagaatgttattatgtatacatagctagttaaataaatctctgaacaattagccaacagaggcttgggtggcaatagaaac

SEQ ID NO: 2514 - DNA, 569 bp, Homo sapiens
  MAP TO CHR19.1; EXPRESSED IN FETAL LIVER, SIGNAL = 2.2; EXPRESSED IN LUNG, SIGNAL = 1.2; EXPRESSED IN HELA, SIGNAL = 1.4; EXPRESSED IN BRAIN, SIGNAL =   3; EXPRESSED IN HEART, SIGNAL = 2.1; EXPRESSED IN ADULT LIVER, SIGNAL = 1.5; EXPRESSED IN BONE MARROW, SIGNAL = 1.2; SWISSPROT HIT: Q07699, EVALUE 6.00e-42; NT HIT: U12191.1, EVALUE 0.00e+00; EST_HUMAN HIT: BI754689.1, EVALUE 0.00e+00
gtaagggaagagagccccaggcagtgacaccttcccctcctggctacccctagatctgcgctatgagaatgaggtgttgcagctggaggaggatgagcgcttcgagggccgcgtggtgtggaatggcagccggggcaccaaagacctgcaggatctgtctatcttcatcaccaatgtcacctacaaccactcgggcgactacgagtgccacgtctaccgcctgctcttcttcgaaaactacgagcacaacaccagcgtcgtcaagaagatccacattgaggtagtggacaaaggtgagtcgggtgctgcctgcccctttaccgtcacccaccggagagccagatggagggacagatggcaggcagtggacaggacaggctggctctgtgcctggccagccaaccgcccacagcagcgggctgagggggaggggagcagcccctcctgcccactccagctctggcctctgtttctctccagcccacggagaggtcaaagcatgcctgtcccccacagacgctccgggtacagaacccagctctgtcacctgtgctgtatgacctctggca

SEQ ID NO: 2515 - DNA, 557 bp, Homo sapiens
  MAP TO CHR20.1; EXPRESSED IN BRAIN, SIGNAL = 0.64; EXPRESSED IN HEART, SIGNAL = 1.7; EXPRESSED IN BONE MARROW, SIGNAL = 0.52; EXPRESSED IN ADULT LIVER, SIGNAL = 2.3; EXPRESSED IN LUNG, SIGNAL = 1.4; EXPRESSED IN HELA, SIGNAL = 0.79; SWISSPROT HIT: O13867, EVALUE 7.00e-10; NT HIT: gi14770067, EVALUE 2.00e-65; EST_HUMAN HIT: AI249721.1, EVALUE 1.00e-67
tcctaccgagtgtattgggcaggtaaatcccacctctgcctgaacctgccccgcctacccagggctcactcaccaggagcacgcgcactgccatcatggccgccgcgcccgtggacacggtgcagtccatgaggatcacgtggtcatcgctgatgtccttgggcagcctcaggtagtggagctgcgggcagcaggggtcaggctgcaggtggggctccctgcgtccccttgctgtgagctccctctgccccctacccccgggctcatcaccccggctgcccccaggcacctcgggctccccggtaagctggttggtctggatgaggatggtgccgatgcgcacgtctttgcacacagcgcgcagcgcgggctccatggtttcaccggcgcgcagaatggacacaccggtgatctgcggggaggggaggctaagcgcccacatcccgccccagcagcctgtcccgcgcccaggtgtgcccaggcaggtacctgcttccccgcatagcacttgcccgcatagtcctgcccctgcggggtctgtacgacgcagtcctgtg

SEQ ID NO: 2516 - DNA, 578 bp, Homo sapiens
  MAP TO CHR17.1; EXPRESSED IN HELA, SIGNAL = 1.7; EXPRESSED IN BRAIN, SIGNAL = 1.3; EXPRESSED IN HEART, SIGNAL = 1.3; EXPRESSED IN ADULT LIVER, SIGNAL =   2; EXPRESSED IN BONE MARROW, SIGNAL = 1.3; EXPRESSED IN FETAL LIVER, SIGNAL =   1; EXPRESSED IN LUNG, SIGNAL = 1.1; SWISSPROT HIT: P35331, EVALUE 1.40e+00; NT HIT: gi14774017, EVALUE 1.00e-105; EST_HUMAN HIT: BF847317.1, EVALUE 1.00e-104
ttggtggactggggactaagtccacaagggatgatatacctgacagtgagtgatgcggaggggccaccttcaccatgctgcctattgcccacttcagaaatgctacactccccgctgccctgtactggtggcaaacccagtggggacactccagatgtcttcatcagctaccgccggaactcaggttcccagctggccaggtgaggaggggcgggcgggcagcgacggggcgtggggacaaggctgtggcactgacacaggacttacttgcagtctcctgaaggtgcacctgcagctgcatggcttcagtgtcttcattgatgtggagaagctggaagcaggcaagttcgaggacaaactcatccagagtgtcatgggtgcccgcaactttgtgttggtgctatcacctggagcactggacaagtgcatgcaagaccatgactgcaaggattgggtgcataaggtaggtgcctgcctatgcttctgcggtcccagcattggcctgtggtccagaagatagggtcgtcttctattccttcttgtctgcacatcccggcacacttagccctgaagcacct

SEQ ID NO: 2517 - DNA, 501 bp, Homo sapiens
  MAP TO CHR22.1; EXPRESSED IN FETAL LIVER, SIGNAL = 0.59; EXPRESSED IN HELA, SIGNAL = 0.42; EXPRESSED IN BRAIN, SIGNAL = 0.77; EXPRESSED IN BONE MARROW, SIGNAL = 0.77; EXPRESSED IN HEART, SIGNAL = 0.54; EXPRESSED IN ADULT LIVER, SIGNAL = 0.67; EST_HUMAN HIT: W78748.1, EVALUE 0.00e+00; SWISSPROT HIT: P31636, EVALUE 2.00e-19; NT HIT: gi14778437, EVALUE 5.00e-72
atcctgcagtgtccttttgccatattctctggacttccttaaatctaagcaactcatgaagacggaactcacagactcaaatgtctacgagataggcagatggtatgaagaggataaaggaacagagcgtccaatatgccaaattttcctgcctttgaccactgtgcaggctgctccctccacctggaagtctgcttttacttccttccagaatggattttctcaaggttttatgacattttaaaaacacttatcagaatacaagcataaaaaaagagagaacatacggattcagggcttacctgtgtacaggatgcggctgatcatccccggcatcaccatgaggaacatgggcagcagcttcaggtaagcacacataatgcaagcggccttcacgtgagacatgtccttgccacacaggcagcgctgcacaatgacctgccgggagaacgtgacacactcatgaaacaagccaggggatgatttcaaaggcagtcagcg

SEQ ID NO: 2518 - DNA, 533 bp, Homo sapiens
  MAP TO CHR7.1; EXPRESSED IN BRAIN, SIGNAL = 0.95; EXPRESSED IN HEART, SIGNAL =   1; EXPRESSED IN BONE MARROW, SIGNAL = 0.8; EXPRESSED IN HELA, SIGNAL = 0.82; EST_HUMAN HIT: BI713604.1, EVALUE 0.00e+00; SWISSPROT HIT: Q9JJV3, EVALUE 8.60e+00; NT HIT: gi9964314, EVALUE 7.90e+00
aagcagaaaacccaaaccgcgtggtgactttaaatgataaacttttattctgaatatactgtttttgcacaagatttaacacaacattttctgggattataaatattttataacagtattatacaaatttttacaaaatgtttttatcaggctaggtaattttcacaaaagtgtcaagagaacaaaataaaggggagaaaagatctattgttcacaaaagccagttggccttttgcatgaatgcacaccattttaataaaagtattcctaaaagcatgatccgacactcatacaacacaacaaaaaagacagctttactaggtcacattataaactcaactggcatctacacaagacagtatcccattagtttcagtggaatttgagataactgtgtgaactagaaataaggtagatgaagagttgtctaattcttcaaaaatctggaatttttttcaacactcaaaacattatattggtttgctctttacagaaatgtactgtgaatattgacattctgctatgggaaacaa

SEQ ID NO: 2519 - DNA, 567 bp, Homo sapiens
  MAP TO CHR15.1; EXPRESSED IN LUNG, SIGNAL = 0.7; EXPRESSED IN BRAIN, SIGNAL = 0.46; EXPRESSED IN HEART, SIGNAL = 0.64; EXPRESSED IN BONE MARROW, SIGNAL = 0.5; EXPRESSED IN ADULT LIVER, SIGNAL = 0.72; EST_HUMAN HIT: BI825110.1, EVALUE 0.00e+00; SWISSPROT HIT: P36027, EVALUE 2.40e+00; NT HIT: AF175292.1, EVALUE 6.00e-50
ccctgaacctctcaagcaagagtgttaactgagcctgattcactcccatactcattgttacagttccagtgggccctgcctcaacttttttcttgctctctttcagaattataactctgcagcttcatgatttttgaataaatggattcaaagactttaattcacagcaccagaaaccaactgcaggctagttcaggcctgcaaagcctgggcataccttcatgaagaatatcctcctacaggtcttgcctcgatcattcccagctgcttggagttgagcagcctccgaggccagtgctagatcaggaacactgctgggcccagcctccgatgtgtctgccagctgcacagatgagtggaaaattccctccttgccctgggccaaggaaatctcaaagggatcaggatatttctcatcagggctagagccatcatcactggtcttagcattacagagcatcagggacctggagatggaccgaaattttgcagattttctgctctttccagcgcggctgtgcgactccatcctcaaagaggaagtgaagctgcctttcttcctttcct

SEQ ID NO: 2520 - DNA, 589 bp, Homo sapiens
  MAP TO CHR15.1; EXPRESSED IN PLACENTA, SIGNAL = 7.6; EXPRESSED IN FETAL LIVER, SIGNAL =  10; EXPRESSED IN LUNG, SIGNAL = 6.9; EXPRESSED IN HELA, SIGNAL = 5.8; EXPRESSED IN BRAIN, SIGNAL =  10; EXPRESSED IN HEART, SIGNAL = 8.1; EXPRESSED IN ADULT LIVER, SIGNAL =  12; EST_HUMAN HIT: BF375980.1, EVALUE 1.30e-02; SWISSPROT HIT: P30957, EVALUE 4.00e-11; NT HIT: gi4506758, EVALUE 1.00e-112
cagagattcccttctgtggcataaggattataagcatatgtagtaaaagttgcctaattttaatttttttgctttcttctcaagagataggttttgtctcctttttaaaagtttgtttgcaattattagagatactgggtgattcctagtaataagtcacctaaaaacctcattcattcagcaagtaatgttgagtcactactatttgtatagcacatgctaacaatataaaatatgtggggagagcccaatggctgaggttctttttgatgtttaataagcgagtgtgtattttgagccaggtcactgaagaacctttagaagaagagacagaggatgttgcaaacctatggaattcctttaatgacgaggaagaggaagaagcgatggtattctttgtccttcaggagagcaccgggtatatggcaccaaccctgcgtgccctggccatcatccataccatcatctctctagtctgtgtggtgggctactactgcctgaaggtgagctgtttgccactctggatctaatctcactccttgaggaagaaatgtcctttttgagcccagccagccctttgctctaagac

SEQ ID NO: 2521 - DNA, 565 bp, Homo sapiens
  MAP TO CHR14.1; EXPRESSED IN HEART, SIGNAL = 2.1; EXPRESSED IN ADULT LIVER, SIGNAL = 4.7; EXPRESSED IN PLACENTA, SIGNAL = 5.8; EXPRESSED IN LUNG, SIGNAL = 2.6; EXPRESSED IN HELA, SIGNAL = 5.7; EXPRESSED IN FETAL LIVER, SIGNAL = 4.1; EXPRESSED IN BRAIN, SIGNAL = 4.5; NT HIT: gi16190815, EVALUE 0.00e+00; EST_HUMAN HIT: BI464766.1, EVALUE 0.00e+00; SWISSPROT HIT: Q27974, EVALUE 1.40e+00
tcctcctctaagctctcccctgcagcttctagtcttcggatctgcacccactccgtcctgtcaaagtttgccacggccttctccgcctgcgtggcagcaagaacagtaccaaccacagaaaagttgccctggttcctcacaccaaagttcctagatgaaaactctctcggctcagggggccttgggtagacattatggtccccatcagtgccagcctcacctgtactgcacgacttcctgtggaccatgggtttcaatgggaacgcccggtccactccaactcgtttctttgtaaaggggataaagtcctggttattggctttgggataccaggattgagggcctgacgagtaaaacaaaccatttccttggccctgggaatcactttctggatcttgctggctgattccagtacagtggggataggagtagctccgggcttttgtttgggtgttccatttggggtgagtatagactttatccagaatcaactctttgttgctcaaaagctgcttctggaaattgttcctcaggtgccccttcaaggactgctgggaagagtcac

SEQ ID NO: 2522 - DNA, 500 bp, Homo sapiens
  MAP TO CHR11.1; EXPRESSED IN HELA, SIGNAL = 0.96; EXPRESSED IN LUNG, SIGNAL = 1.9; EXPRESSED IN BRAIN, SIGNAL = 1.4; EXPRESSED IN HEART, SIGNAL = 1.8; EXPRESSED IN BONE MARROW, SIGNAL = 1.7; EXPRESSED IN ADULT LIVER, SIGNAL = 1.9; EXPRESSED IN FETAL LIVER, SIGNAL = 1.2; SWISSPROT HIT: O00327, EVALUE 3.00e-45; NT HIT: AF044288.1, EVALUE 0.00e+00; EST_HUMAN HIT: AA129554.1, EVALUE 1.00e-124
tgtttctctttccgtctgcccctttcattagatgcttacttctggagagtgaagccttgatttttttttattttttgactccctacctacatcccatcccaccatcggccgtgtacacctccatggcccaaacctagtgctgacactaaccacgaactttgctttctagcagatcgaaaaagcttctgcacaatccacagcacaggctatttgaaaagctggccacccacaaagatggggctggatgaagacaacgaaccagacaatgaggggtgtaacctcagctgcctcgtcgcaattggacgactgcattctcatgtagttccacaaccagtgaacggggaaatcagggtgaaatctatggaatatgtttctcggcacgcgatagatggaaagtttgtttttgtagaccagaggtaagagtctacatactacccttgagcaatgatggtagaggattttcaaccctgatctaaaaagcagagaagactgggccatca

SEQ ID NO: 2523 - DNA, 515 bp, Homo sapiens
  MAP TO CHR19.1; EXPRESSED IN BONE MARROW, SIGNAL = 0.84; EXPRESSED IN LUNG, SIGNAL = 0.72; EXPRESSED IN HELA, SIGNAL = 0.78; EXPRESSED IN BRAIN, SIGNAL = 0.96; EXPRESSED IN HEART, SIGNAL = 0.9; SWISSPROT HIT: Q06886, EVALUE 1.10e-01; NT HIT: AF108093.1, EVALUE 2.00e-03; EST_HUMAN HIT: AL041673.1, EVALUE 1.00e-105
gatggatggccacaaataccatgagggatggcattgccggggaggcatctccactgtcactagaggtggctgtcactactcagtgacattgatggtgattgattacccatgtggccttgttagcttcctcttccacaggaaggcggaagcagtctacccagatacagtggcactgaccttcgaccccatccaccagtggctgtcctgcgtgtataaggaccacagcatctacatctgggatgtcaaggacatcaacagagtgggcaaggtgtggtcagagctcttccacagctcctacgtttggaacgtggaggtgagccccccccccacccccttgcccctgcttggcctctgcacagttccccacagtttgggaacccattcagtaattccttcagaagatactcattgactccctcctatgcatcaggccctgtcctaggtgctgaggacacagacacaaaatccctgcccttaacaagctcacatttggatgggaaaggaaacctggaaac

SEQ ID NO: 2524 - DNA, 524 bp, Homo sapiens
  MAP TO CHR1.1; EXPRESSED IN BRAIN, SIGNAL = 0.7; EXPRESSED IN HEART, SIGNAL = 0.83; EXPRESSED IN BONE MARROW, SIGNAL = 0.87; EST_HUMAN HIT: BE817889.1, EVALUE 8.00e-04; SWISSPROT HIT: O43869, EVALUE 6.00e-45; NT HIT: AF321235.1, EVALUE 8.00e-03
gcaagaagatctgctgcctcatggttgcatgtgcatgggccagtggttctatcaatgctttcatacatacattgtatgtgtttcagcttccattctgtaggtctcggctcattaaccactttttctgtgaagttccagctctactatcattggtgtgtcaggacacctcccagtatgagtatacagtcctcctgagtggacttattatcttgctactaccattcctagccattctggcttcctatgctcgtgtgcttattgtggtattccagatgagctcaggaaaaggacaggcaaaagctgtttccacttgttcctcccacctgattgtggcaagcctgttctatgcaaccactctctttacctacacaaggccacactccttgcgttccccttcacgggataaggcggtggcagtattttacaccattgtcacacctctactgaacccatttatctacagcctgagaaataaggaagtgacgggggcagtgaggagactgttgggatattggatatgctgt

SEQ ID NO: 2525 - DNA, 502 bp, Homo sapiens
  MAP TO CHR17.1; EXPRESSED IN PLACENTA, SIGNAL = 1.5; EXPRESSED IN FETAL LIVER, SIGNAL = 1.2; EXPRESSED IN HELA, SIGNAL =   3; EXPRESSED IN BRAIN, SIGNAL = 1.5; EXPRESSED IN LUNG, SIGNAL = 2.8; EXPRESSED IN HEART, SIGNAL = 1.1; EXPRESSED IN ADULT LIVER, SIGNAL =   1; EXPRESSED IN BONE MARROW, SIGNAL = 1.4; EST_HUMAN HIT: AI924482.1, EVALUE 1.00e-112; SWISSPROT HIT: P30838, EVALUE 2.00e-21; NT HIT: M77477.1, EVALUE 1.00e-112
ggtggagacttggaatggtgaggcctgggcccatgtgggagtggggtgtgcacaggtcagcaggtcagcagaggagtggggctgggctggggctgcaggagcgattctcccagggccaggagagccagtgagggtggtccgcactccgatgggacacagtatggccaggccaggcggagcaacccctcctcagtgctgggtcatctgtgaaagggacacggagtgggcagtgatccccaggccctggtcccgcacagcccggtctcccccacagcgccttccccctctcaccttggccgggctcggggggtatctgaccttcaggccttcatcattcatcagaggcctcaccaggcaagagcggcggtgagagaaagtctcgaagctcttcttgccatggtaggatcccatgccgctgttccctgcggaggagaagtaagcacagggctcagcatcctgcccccaggacgccccaggtttccctctccaccttgttgggtgt

SEQ ID NO: 2526 - DNA, 592 bp, Homo sapiens
  MAP TO CHR11.1; EXPRESSED IN ADULT LIVER, SIGNAL = 1.3; EXPRESSED IN BONE MARROW, SIGNAL = 1.6; EXPRESSED IN PLACENTA, SIGNAL = 1.3; EXPRESSED IN LUNG, SIGNAL = 2.1; EXPRESSED IN FETAL LIVER, SIGNAL = 1.3; EXPRESSED IN HELA, SIGNAL = 1.1; EXPRESSED IN BRAIN, SIGNAL = 1.6; EST_HUMAN HIT: U69202.1, EVALUE 2.00e-81; SWISSPROT HIT: O00327, EVALUE 1.00e-22; NT HIT: gi14762065, EVALUE 2.00e-80
tgaccactgcagtttccttggcttactaaagagcgatgtcgttggagctcaagtacctttaatattttgtattggatgtcctgtttaatactttggtctgagaaaacaacaatgtccatgttttctttacattttcagttttacagacgagagaaaaaattacaactaattgctataaatttaaaatcaaagatggttcttttatcacactacggagtcgatggttcagtttcatgaacccttggaccaaggaagtagaatatattgtctcaactaacactgttgttttgtaagtacttttcctatatctgaagctccccttgcttcaaacagatgcctagggttcctcatctgggaaatggggtgcaggcaacatccagtatcacatcctttaatgccatcttgctaatacctgtgaagcctcaggactggcagaagctagaaaggattgttaacaaagggacaagcttcaggacttgtaccatgcaggccctggcttatgaaactgctccaggaaatagcaacatttccttccagataaagcagctaacctttgaattccacaggccctgcaccctaggcatccacttgt

SEQ ID NO: 2527 - DNA, 556 bp, Homo sapiens
  MAP TO CHR19.1; EXPRESSED IN FETAL LIVER, SIGNAL = 0.54; EXPRESSED IN LUNG, SIGNAL = 0.92; EXPRESSED IN HELA, SIGNAL = 0.85; EXPRESSED IN BRAIN, SIGNAL = 0.79; EXPRESSED IN BONE MARROW, SIGNAL = 0.58; EXPRESSED IN HEART, SIGNAL = 0.96; EXPRESSED IN ADULT LIVER, SIGNAL = 0.72; NT HIT: gi4506012, EVALUE 3.40e-02; EST_HUMAN HIT: AI202106.1, EVALUE 9.00e-84; SWISSPROT HIT: P13837, EVALUE 1.60e-01
gttgtcactgtctagggcgggtctgtcttcctcctgggagccccagcaggacagcgttggggtggtcttggccatgtctgtgtccccagcaccacctagcgcagggccgggcagagtgggtgctgggtgacgggtgtgggtggggtgggccactgcacccacccgagtctagcacgtggttgttccggaggtccaggatctgcagggagcagttgaacttgagcaggttacccagctgggccgagtcctgcaggccgttgagcttgttgtccgccaggtacagctcccgcaggttcatgttcatcttcagggccgtggctggggacggggagggggcacggtgactgggcaggcccctgccccccaacaggctgcacatcctgctcaccctcccgggcttggggctcaccgagcagcatgaggggccgccccgacaggctggcgttctccaagtgcagcactgccaggctgctgcggatgcgcagggcacgggccacgaagggcgccgagtggtccagcaggggcgtgttgcgggcgtccagatactgcaggcagc

SEQ ID NO: 2528 - DNA, 561 bp, Homo sapiens
  MAP TO CHR7.1; EXPRESSED IN HELA, SIGNAL = 0.72; EXPRESSED IN BRAIN, SIGNAL = 0.97; EXPRESSED IN HEART, SIGNAL =   1; EXPRESSED IN ADULT LIVER, SIGNAL = 0.59; EXPRESSED IN BONE MARROW, SIGNAL = 0.85; EXPRESSED IN FETAL LIVER, SIGNAL = 0.82; EXPRESSED IN LUNG, SIGNAL = 0.64
gcactatatgctgcctgtggttgaatattaatagacaatatattatgatgacattcatttaaataagctacggggatttttttctgagaaatagcaggtagtgaatatgacttccatttaaaacagatatggctttataagcatgttttcatgaaactggtttcagttgcatttaattggtgttcgagtaaaaataaaattaaaacagcatcttttcaaggctttctatgttccaatttacaatttttttcagatactttagtccttattaaactttctcacttgcaaagcttttcaacctgctgatctcaggagattctgacatagcctattggaggctaaacacaaggacacttttttagaatgagtttatagactaggttaggaaagtatcaattatgttttcatttgaacaaaaattaaactctttcatttgtctgctcagctgttcatggaatactgcataaattgggtttaaaatacatgtgttatcaacgtaactgccttgcaattccttacattcaatagaactataaataaagcccactgtcctaagagcac

SEQ ID NO: 2529 - DNA, 551 bp, Homo sapiens
  MAP TO CHR11.1; EXPRESSED IN FETAL LIVER, SIGNAL = 1.4; EXPRESSED IN LUNG, SIGNAL = 2.6; EXPRESSED IN HELA, SIGNAL = 0.88; EXPRESSED IN BRAIN, SIGNAL = 1.2; EXPRESSED IN HEART, SIGNAL = 2.7; EXPRESSED IN BONE MARROW, SIGNAL = 1.2; NT HIT: gi15307291, EVALUE 2.00e-83; EST_HUMAN HIT: BI597594.1, EVALUE 2.00e-84
tcatggggtcaactagggagattttcaccatctttagagacagaaataaatattcaaatacaaatattaaaaaattaaaaagaaatgtttctccaaaagttatctatggagacagataaacattcacaacgttttgtaaaacagcccccattctctgacaggaattgccacaaccaaatgcagtagtattctttacaatcagtttttagcagagctttcatatgcgaaatacatattttctacctaccttgaatgtttataaagtttacgaggtctactatgcaatttccgatcccaattctctggatcactggagttaccatcatagggatgaggccgtcctgccatcccactccaagcttcctcacactactgctctgaaagcacacatgtagcacccataacctacataaaagagcagtgttgacctttaaatctattccacgcagaataaaatagtcatagaattgtacagacttgatattattgtgacatatttttaaagtgatgaatagattataaaatactaaccatacaaatgccacaaatca

SEQ ID NO: 2530 - DNA, 547 bp, Homo sapiens
  MAP TO CHR19.1; EXPRESSED IN BRAIN, SIGNAL = 1.3; EXPRESSED IN PLACENTA, SIGNAL = 1.3; EXPRESSED IN HELA, SIGNAL = 1.6; EXPRESSED IN HEART, SIGNAL = 1.4; EXPRESSED IN BONE MARROW, SIGNAL = 1.3; EXPRESSED IN ADULT LIVER, SIGNAL = 0.84; EXPRESSED IN LUNG, SIGNAL = 2.1; EXPRESSED IN FETAL LIVER, SIGNAL = 1.5; NT HIT: gi15321335, EVALUE 0.00e+00; EST_HUMAN HIT: BE714172.1, EVALUE 0.00e+00; SWISSPROT HIT: Q14585, EVALUE 9.00e-78
ttgagcaagatacgaagcccaagtaaaagtcttcccgcattgcttacattcataaggtttcctgccagtatgaattcgctgatgtcgagcaaggtgtgagctccaaatataggctttcccacatttctcacatttataaggtttcctaccaacatgaacattctgatgttgagcaagatttgaaccacgaataaaggcttttccacattccttacactcatgagatttctcaccagtatgaattctctgatgctgagttaggtgtgatccacgagtaaaagctttcccacactccttacattcataaggtttttcaccagtgtgaattctctgatgtttaataagatgtgatcgctgactaaaggcctttctacattcattacattcatagggtttttcaccagtatgaattctctgatgtcgagtaagatctgagccacaactaaaggccttcccacattccttacattcataagatttctcaccagtatgaattcgcttatggacactaagttgtgaatgaaatctaaaggctttcccacaatcc

SEQ ID NO: 2531 - DNA, 585 bp, Homo sapiens
  MAP TO CHR7.1; EXPRESSED IN PLACENTA, SIGNAL = 1.4; EXPRESSED IN FETAL LIVER, SIGNAL = 1.8; EXPRESSED IN LUNG, SIGNAL = 2.9; EXPRESSED IN HELA, SIGNAL = 1.4; EXPRESSED IN BRAIN, SIGNAL = 1.6; EXPRESSED IN HEART, SIGNAL = 2.7; EXPRESSED IN BONE MARROW, SIGNAL = 1.6; NT HIT: AL163278.2, EVALUE 8.70e+00; EST_HUMAN HIT: T26460.1, EVALUE 0.00e+00
aaaacccaaacccactggtcacaaaaggctaattgaatataatcagccattttatctattggatagaaacaagcatatcctgaattatgttggaaatctctgctttagggtggaattttgtctgttctaactattccttgtagtgttaaaattccccttgagaagcaagtttaacatgtgtttgaagattgactctaagaggttgccatggttttctacaaatgttttacaaccagctaaaggcaaacgtaccctttgagcttttcaatcttttcttgaaatcactcagtcattacttcctagagcaaatgctgcttcaggacccagcccagtctaatagggagtggacttcagtgctagctctaagaaatattcagctactgcatctagctataggagcaatttaatagttcttccttctggggctcttttaaaactaatattcaagatcttgagactagcagaacattatatagctggaggttttcaccttttagaggagacttcaagggatttgctcactcttattctgccagcacttttagaaaagtatgatacttcatttcctgggcatcaagtagggta

SEQ ID NO: 2532 - DNA, 579 bp, Homo sapiens
  MAP TO CHR5.1; EXPRESSED IN HEART, SIGNAL = 2.4; EXPRESSED IN BONE MARROW, SIGNAL = 3.9; EXPRESSED IN ADULT LIVER, SIGNAL = 3.5; EXPRESSED IN PLACENTA, SIGNAL = 4.3; EXPRESSED IN HELA, SIGNAL = 5.2; EXPRESSED IN FETAL LIVER, SIGNAL = 3.4; EXPRESSED IN BRAIN, SIGNAL = 4.6; NT HIT: AF119153.1, EVALUE 0.00e+00; EST_HUMAN HIT: BF108794.1, EVALUE 2.00e-57; SWISSPROT HIT: O14511, EVALUE 2.00e-12
agtcagcttgtacatgccccaggcctgcctctccctgcagccccactcctggcagcccagcctcctataattgccttctaaaaatatcctttccccacccccacctcttgatttcaaaatatttagttttcagggtatttaaaatgagagctggcggctcttccaggcccagataacaaagctaaacatttatgcttcgactgcatttctctgaatcggctgagatctagggcttgatatggcagcagcaggagggaggggagttgagtgcgagatggatcacatgcaggccccaagggctggggggccactggcccgccctgccaaacccctctaggacccttccctctgtctgggcccacctaccgctgttgacgtaaagccggccccggagcggtgtccttccccaggatgttctcggcctcgcagacatactccccagcgtcctccaccttcaccttgttgaactgtagtcgtgagttctttctggttagggaggggataaaagggggagaggcgtgagccagggccggctgtggctccccagcagtcacccagcggttgcctctctccacagag

SEQ ID NO: 2533 - DNA, 567 bp, Homo sapiens
  MAP TO CHR1.1; EXPRESSED IN FETAL LIVER, SIGNAL =  60; EXPRESSED IN LUNG, SIGNAL =  62; EXPRESSED IN BRAIN, SIGNAL =  24; EXPRESSED IN HEART, SIGNAL =  37; EXPRESSED IN BONE MARROW, SIGNAL =  30; SWISSPROT HIT: P02248, EVALUE 2.00e-30; NT HIT: X04802.1, EVALUE 0.00e+00; EST_HUMAN HIT: BG196817.1, EVALUE 0.00e+00
attcgcagcatcctcgtatctgctaacaggtcaaaatgcagatcttcgtgaagaccctgactggcaagaccatcacccttgaagtggagcccagtgacaccatcgaaaatgtgaaggccaatatccaggataaggaaggcatcctccccgaccagcagaggctcatctttgcaggcatgcagctagaagatggctgtactctttctgactacaacatccagaaagagttgaccctgtacctggtccagcgtctgagatgtggctgttagttcttcagtcttgcatttgcagtgctcagtgatggcattacactgcactatagccatctgcccccacttaagtttagaaattacaagtttcagtaatagttgaacctgttcaaaatgttaataaaggttttgttgcatggtagcattaaagaaaattctggatgccatacttttggaaaaacattatttcaaaagtccttctataaaagttgtacacgactgtactttgaaattattcattagaagacttccagttttaggatagtggtgaatttcttgccctgtctcatcctctcag

SEQ ID NO: 2534 - DNA, 583 bp, Homo sapiens
  MAP TO CHR17.1; EXPRESSED IN PLACENTA, SIGNAL = 3.7; EXPRESSED IN FETAL LIVER, SIGNAL = 3.7; EXPRESSED IN HELA, SIGNAL = 3.7; EXPRESSED IN BRAIN, SIGNAL = 4.5; EXPRESSED IN LUNG, SIGNAL = 4.2; EXPRESSED IN HEART, SIGNAL = 4.6; EXPRESSED IN ADULT LIVER, SIGNAL = 2.9; EST_HUMAN HIT: BE384947.1, EVALUE 8.20e-01; SWISSPROT HIT: P35448, EVALUE 4.30e+00; NT HIT: M54916.1, EVALUE 1.40e-01
cttcatgctaggcagccttcgggtgcagcttaagtgtgggggagcatttactactaaaaacagaaaccaagaagtggggaggccccttccattcccctcccatccccactgtatacatcccattctcctgaactttgcataacgccagtgttctcacagtacccggcacccgtccacagtgggcagtgactggggatggtggccctcctggcagtgatcaccactaggctgtgggctgacagtggactgaagagataccccacgcccacagaacgggatccgggagaccctaaacactcccaccggctgtcagctcctctggggtgggccggggcccaggctctgggtaatatggcagtgccctaggcgtctggtcaaaaggtgggagctcaggcactgtctcaggcttcaggtcaaagggctcagtctcaggcaggtcaaaaggcacgatcttgggtgtggccaggtcagagggtgcattcggcttcttcttgggctaagatgaggaaaaggggtttaaatggggcttggggtgggtgcaaaaggagttgagaaaaaagggccttggtggcatgcagagtag

SEQ ID NO: 2535 - DNA, 522 bp, Homo sapiens
  MAP TO CHR10.1; EXPRESSED IN BRAIN, SIGNAL = 2.4; EXPRESSED IN BONE MARROW, SIGNAL = 2.1; EXPRESSED IN PLACENTA, SIGNAL =   3; EXPRESSED IN LUNG, SIGNAL = 1.1; EXPRESSED IN HELA, SIGNAL = 3.1; EXPRESSED IN HEART, SIGNAL = 1.7; EXPRESSED IN ADULT LIVER, SIGNAL = 2.5; EXPRESSED IN FETAL LIVER, SIGNAL = 2.6; EST_HUMAN HIT: BG763955.1, EVALUE 0.00e+00; SWISSPROT HIT: O57383, EVALUE 4.00e-11; NT HIT: AF161019.1, EVALUE 0.00e+00
aggggtagccagtccaactcggctctcctcagcacccccagccatgggtcaccagtcccgctcagcaggttctcggtaggggaggcctaagagcctgaagacatccttctcagtgggagtgggcagcactcggccaggccccaccttgcagccatgggtgttccggaccacagcagtgctgagggcatgttctgacagactcatgcccttggttttggccagggctcgcatggagcggttgaagtgtgcagagccggtgaagtagagcagggcacaggcaaactcgctatagggcaccacgatgatgtccaggcgccggtgccgccgccctggccctgggagccggcacacccccaagtacttctgttgctgaccattctcctcttggctcaccaagtcatctgtgaggaaccctggcccaacagaggggactgctgggagggcagggaaccaggcctgggctgtcccatcctcccaggtctctcctgatgtctaagctggggcttgcccaggtattagctg

SEQ ID NO: 2536 - DNA, 598 bp, Homo sapiens
  MAP TO CHR19.1; EXPRESSED IN ADULT LIVER, SIGNAL = 4.3; EXPRESSED IN BONE MARROW, SIGNAL = 4.4; EXPRESSED IN PLACENTA, SIGNAL = 3.9; EXPRESSED IN HELA, SIGNAL = 4.3; EXPRESSED IN FETAL LIVER, SIGNAL = 4.1; EXPRESSED IN LUNG, SIGNAL = 2.5; EXPRESSED IN BRAIN, SIGNAL = 4.7; EXPRESSED IN HEART, SIGNAL = 3.1; NT HIT: gi14767780, EVALUE 5.00e-57; SWISSPROT HIT: P97609, EVALUE 1.30e-01; EST_HUMAN HIT: AL044278.1, EVALUE 7.00e-57
caccccatgtgatactgcactctccctgcagctcgcactgcctccgagcagccgccttctatgtgcgtgggctcttctccttcttccagggacgctacaacgaggccaagtaagtgtggggcagagggtggcgtgagggccatgctcagggtagcccaggccccgtcctgcagttatcagcgtccatgttctccttgtcaggcgatttctgcgggaaactctgaagatgtccaatgctgaggacctgaaccggctcacagcctgctccctcgtgcttctgggccacatcttctatgtgctgggaaaccacagggtgagtgccctggcctgggcccctcgcttgggtgcctgtggggcttggctgagggacaggagccggccagcaccctaagggtggcatggcactgttcatcctatgcccctcgaagagcacgtctaggtggatgccctgactcccacagcctgggcaggcagggccagaggagctgggcacccacagagggtgtggggggaaggcaggaggcctgatgggtgtggcctcagacattgggcaggcagagccccagggctcaggggagctgaagccagaaccaaagga

SEQ ID NO: 2537 - DNA, 530 bp, Homo sapiens
  MAP TO CHR4.1; EXPRESSED IN FETAL LIVER, SIGNAL = 1.1; EXPRESSED IN LUNG, SIGNAL = 1.6; EXPRESSED IN HELA, SIGNAL = 1.5; EXPRESSED IN BRAIN, SIGNAL = 1.3; EXPRESSED IN BONE MARROW, SIGNAL = 1.1; EXPRESSED IN ADULT LIVER, SIGNAL = 0.94; EXPRESSED IN PLACENTA, SIGNAL = 1.3; NT HIT: gi15297223, EVALUE 4.00e-63; SWISSPROT HIT: P39028, EVALUE 9.00e-34; EST_HUMAN HIT: BF718532.1, EVALUE 3.00e-62
gaccaaaacagagacattggctactttgacaaccttaaagtggattccaggaatatcaataatagcatgatcttttcaatcaaattccctaaccagaacctaattgttttcctcaataatgttcaagcaaccatcattgggttacaacagatgtgattttcttgctgttcttgatcagctggaccctgaaacacttccggaaggcagagtttggttgtttggcttcaacttctactttttccagcataatcccctttgcatttgaagcacctttaaaactgttggccttcagggctgtgcccaaataaacttccctgtactgtttatgacatttcttgtctcatcagtgactacagagcttcctgacagtatgaagtccagggcccttactcatcctgccagtgccatgggcctgaacaaaagagctcattcctctctttgacttccaggaaatgtagaaataacgaggtccagatttgcttatctgagcccactgataacaagaagtaactctccacatgcaagcagtt

SEQ ID NO: 2538 - DNA, 598 bp, Homo sapiens
  MAP TO CHR9.1; EXPRESSED IN FETAL LIVER, SIGNAL = 1.7; EXPRESSED IN LUNG, SIGNAL = 2.3; EXPRESSED IN HELA, SIGNAL = 1.4; EXPRESSED IN BRAIN, SIGNAL = 1.3; EXPRESSED IN HEART, SIGNAL = 2.1; EXPRESSED IN BONE MARROW, SIGNAL = 1.1; EXPRESSED IN ADULT LIVER, SIGNAL = 1.6; NT HIT: gi14745797, EVALUE 4.00e-76; EST_HUMAN HIT: BI832055.1, EVALUE 0.00e+00; SWISSPROT HIT: P08121, EVALUE 1.20e-02
acctggggaatgacagacaccttgtcaccgcacctgacctgcggttggggtacaccttgcatttctgtcactccgctgccctgaggacgtcccagaccctcgctgccagtccccagcaggagctgtaggggcgttacctcatgcagcgggtctctcctcatgttgcgcccggccagcggctcatcgtgggggaagacgacggagtagttcttggcgtaggactcatggcttcgctctcggatccagcgggggtggtccgtgagcgagtgatggaagcgcctgccgcagacagggggacgggtcactgctttggggatggcccgtcagggaagggctagcctaggacccagggtaagcctggaccccggtcccctgcaccagagtcccctttgtggctcagcattgagcgggcccctgactctccattcgccccacccttgggtgaactcagctttctcccccagagccaccccaccccagtggccctcagtgagtgggcgttgtggacagagggcccagctgaggctctcatcccccacagggacatgggactccggcctcgctctccacacattgctgtctgctgcctaggttccag

SEQ ID NO: 2539 - DNA, 533 bp, Homo sapiens
  MAP TO CHR2.1; EXPRESSED IN FETAL LIVER, SIGNAL = 3.2; EXPRESSED IN LUNG, SIGNAL = 2.9; EXPRESSED IN BRAIN, SIGNAL = 2.1; EXPRESSED IN HEART, SIGNAL = 1.9; EXPRESSED IN BONE MARROW, SIGNAL = 2.6; EXPRESSED IN ADULT LIVER, SIGNAL = 2.8; EST_HUMAN HIT: AU116861.1, EVALUE 0.00e+00; SWISSPROT HIT: O75643, EVALUE 4.00e-40; NT HIT: gi14724658, EVALUE 0.00e+00
tttggcatctcaggttttcctcacataagtgaaagatgcctggtatggcctagtgttgttctgcctccctcctctgcccgccaggtatacatggactggtacgagaagttccaggacaggctcaacaagaaggtggtactcctgacaggcgagaccagcacagacctgaagctgctgggcaaagggaacattatcatcagcacccctgagaagtgggacatactttcccggcgatggaagcagcgcaagaacgtgcagaacatcaacctcttcgtggtggatgaggtccaccttatcgggggcgagaatggggtatggcgtgaccttgcagcacagatgagggactgggactgaccaagtggccttggcattggacctaatgtttgggtctgaggacggaggctcggggcttctccccagaggattctacctgctgccctattccaaagggacaatgttaacttttttggtagtactttaggaaaacagtattgtttagtggaggttggctgccgtggaggaggtagaaccaa

SEQ ID NO: 2540 - DNA, 501 bp, Homo sapiens
  MAP TO CHR11.1; EXPRESSED IN LUNG, SIGNAL = 3.2; EXPRESSED IN HELA, SIGNAL = 2.6; EXPRESSED IN BRAIN, SIGNAL = 2.3; EXPRESSED IN HEART, SIGNAL = 2.8; EXPRESSED IN BONE MARROW, SIGNAL = 2.3; EXPRESSED IN ADULT LIVER, SIGNAL = 1.8; EXPRESSED IN FETAL LIVER, SIGNAL = 2.3; EXPRESSED IN PLACENTA, SIGNAL = 2.7; EST_HUMAN HIT: AI083623.1, EVALUE 1.00e-103; SWISSPROT HIT: P14207, EVALUE 6.00e-43; NT HIT: X69516.1, EVALUE 0.00e+00
tcctctttgcataagggcacatccaggaagcgttctttgcgccagctctgattcacctgggtgggaggtggggaggcagggctcctctcagccagggatgctggcagccatcgccttgaagtgactgagggggatggcagtctgctggggtgggtcggggggagacaccctacctgctggatccagggccccaggttgggtgagcactcatagagacaggtgtcctggatgaagtggcgcttgcaggcgggctccatcttgccgcagtggtcccagttaaagttgtacaggcgggaggtgtccttgtgcagctcctggctggtgctggctgtgcagcaggcattcttcttccagggactgcactgggtggggaagacacaggactaagtgcctccccataccctcctcctcctgccacctcgtgtctctcccccatttggttcttactcctctgccctaggcaggttgtcctgagaacactcaggttcccagatgatggtc

SEQ ID NO: 2541 - DNA, 560 bp, Homo sapiens
  MAP TO CHR16.1; EXPRESSED IN BONE MARROW, SIGNAL = 0.68; EXPRESSED IN FETAL LIVER, SIGNAL = 0.9; EXPRESSED IN LUNG, SIGNAL = 1.2; EXPRESSED IN BRAIN, SIGNAL = 0.65; EXPRESSED IN HEART, SIGNAL = 1.1; EST_HUMAN HIT: BF814199.1, EVALUE 1.00e-103
tatggctgttggaagaagggttaatgtaacaatggcatccaaagtacaattttgcttcatagaccaaaattcaaaggtactcctactgtatataattcagtgatggactagatctaattttgtcttaactatattgcttggttacttatatctataaataaggttgttgaatgttgacacacaatgctttctttttccatttctgtattcttacactactttaatggtggattctgaagtattatttccttttcagaaaaaccatgccacatggatcgtttggatcgaatcctattgtctggcatctataatgtacgcaagggaaagacccagctgcataagtgggctgagcgcctagttgtcctctgtggtacctgccttatcgtttcctcagtgaaggattgtcaaactggaaagatgcacattttgcctctggttggtggaaaggtaagactcacaaagatgaattatttttcatttgatcatcttaattaagaaaatatcacataatgcttttcatagcttttagtcatatcttttcaaagaagccagtatgggca

SEQ ID NO: 2542 - DNA, 550 bp, Homo sapiens
  MAP TO CHR7.1; EXPRESSED IN LUNG, SIGNAL = 2.1; EXPRESSED IN BRAIN, SIGNAL = 1.8; EXPRESSED IN HEART, SIGNAL = 1.3; EXPRESSED IN ADULT LIVER, SIGNAL = 2.4; EXPRESSED IN PLACENTA, SIGNAL = 1.4; EXPRESSED IN FETAL LIVER, SIGNAL = 3.2; SWISSPROT HIT: P54467, EVALUE 8.90e+00; EST_HUMAN HIT: BE909088.1, EVALUE 7.70e-01; NT HIT: AL391737.1, EVALUE 5.20e-01
tgaggaagacctggatcagctctttatttggaaggcttatttagaaaatggagcccctctcaatagcatctcatatgtgatgaacaggaagctgagcctttacggtgttttctgagtagagttaggggagatcaaggagatcgggaacaacagcagagaggtgaattcttaagggagttcaaaaagggtagagagctgtgtgtctaacccctaacagttcccaacagaaaagagagagagacaacacaagaaggagaaaggaatagagacacttgcaacaggctgcgcccctcaggagggaacagcgtggcttctggaggggaggaggcagggaaaggaatgtctgcttgatgttctttgatatttccactattccccctgcagatttattatgcttattgggtactccagagctattatactcagggtgtttacaaataaaagataggggtgagaagcaaaaataaaaagcaagatctctggacacttgagtgcaaaatgcaatgactctttagtgtagtgtttccaaagcagcagacatccacatttg

SEQ ID NO: 2543 - DNA, 548 bp, Homo sapiens
  MAP TO CHR5.1; EXPRESSED IN FETAL LIVER, SIGNAL = 2.5; EXPRESSED IN LUNG, SIGNAL = 1.7; EXPRESSED IN HELA, SIGNAL = 3.3; EXPRESSED IN BRAIN, SIGNAL = 2.6; EXPRESSED IN ADULT LIVER, SIGNAL = 1.8; EXPRESSED IN BONE MARROW, SIGNAL = 2.4; EXPRESSED IN HEART, SIGNAL = 1.4; NT HIT: AB054976.1, EVALUE 0.00e+00; SWISSPROT HIT: O66132, EVALUE 3.50e-01; EST_HUMAN HIT: BE905348.1, EVALUE 1.00e-101
gctcaatcagatccagggagagcaaggaggtacagaaactaggactgtttgctggaagagaagtaccagggtgaaaaactgctttcccccaccacccctgtcaatactacccacctcagcctaggccatgaggaaatatccccattatccaaatgtccaggcctgggcagattatggtgcgtaccagtgaggttgttgaggagccaaaggccctcagggagcagactgggctgtttctggaaaaagaactgcagaaggataaataaggctgccacaacacgctcatctctgagctgcatttgccctcccacagtctccactgctgcctcagttagcaggttgcttagacatcgaagcacggggcatgccagctgcaaagacaaattggggggtcaggtgtaagaaggaagaggttacctgcattccagagtatcaagaaacatctcccagaatttcacctgacatcttcacctaccagctccagtcctgcatcctcggttttctggacagccccagccaagtccaacagcagcaaccccagagtagac

SEQ ID NO: 2544 - DNA, 595 bp, Homo sapiens
  MAP TO CHR1.1; EXPRESSED IN BRAIN, SIGNAL = 1.2; EXPRESSED IN ADULT LIVER, SIGNAL = 1.3; NT HIT: gi14723146, EVALUE 0.00e+00; SWISSPROT HIT: P24666, EVALUE 7.00e-51; EST_HUMAN HIT: AL552042.1, EVALUE 0.00e+00
tttgtaattggggcaagtgagatgttcaactagtctaagaatgtttaatatatcccataaactgtctgaatcaaagatttttatttattcttctgccagacacaactgatttccatctacaattattttttaaggtaagaaacagtaagtcaactgaacaaagagctggggctttgggctctggaacatgattacacaccgactgagaaatgcagcacctcagggttgggtctagtcaggctggccgcagcagggcacgaagctgcctcagtgggccttctccaagaacgctctgtagcacctgacacacagctggtacaccatctcaaagtcagagtcattcccataatagggatcttcaataataagttgtttttgtggatcatagctcccaagtagctcaattttagctttgcaggttttaacttgattactttttctattcaaatctctcagattgctatcatccatacatggtatataatcaaatttggcaaaattttctttggtaatctgccgggcaacgtggctcatgggaatgccgtgcctctccgtgaagctctgccctcgggagtcaggaggggttccctatctc

SEQ ID NO: 2545 - DNA, 528 bp, Homo sapiens
  MAP TO CHR7.1; EXPRESSED IN BRAIN, SIGNAL = 0.77; EXPRESSED IN BONE MARROW, SIGNAL = 0.87; EXPRESSED IN ADULT LIVER, SIGNAL = 0.99; EXPRESSED IN LUNG, SIGNAL = 1.1; EXPRESSED IN HELA, SIGNAL = 0.85; NT HIT: U37100.1, EVALUE 2.00e-55; SWISSPROT HIT: P15122, EVALUE 2.00e-16; EST_HUMAN HIT: BG682196.1, EVALUE 4.00e-55
attttgcaagcctggttcacccttgggtggctgaactggaaatattcccagagggtcaagcatgtcgcccttgttgttgttgttgttgtttaattcccattttttcccactgccatcccatttgtgtgtaccaaacgtgttaccttacacacatttttctttccagtaacttatggacccataccgacatttaccaattataaaataatgtttttaagattatcaagagaaagacccaccacttggaagcctcaccaaggtctatccggagagcccagggggctgtaggccgtaacggtgatgcccttggagtggcagtactggatcagtttctcctgcgtgaggtatgggtgacactcaacctgcaacagcaaacaatcctcatcacggggaaagccggctctgttttgcattgttcctagggagttctacacacaaaaaaagtccaccaagcaaaggccaaacaagtgcgcactgagattcttgctaaatcacccatgagatcagcctcacacctccccaaagtgt

SEQ ID NO: 2546 - DNA, 595 bp, Homo sapiens
  MAP TO CHR19.1; EXPRESSED IN LUNG, SIGNAL = 1.1; EXPRESSED IN HELA, SIGNAL = 1.3; EXPRESSED IN BRAIN, SIGNAL = 1.4; EXPRESSED IN HEART, SIGNAL = 1.2; EXPRESSED IN ADULT LIVER, SIGNAL = 1.2; EXPRESSED IN BONE MARROW, SIGNAL = 1.6; EXPRESSED IN PLACENTA, SIGNAL = 1.5; SWISSPROT HIT: O43345, EVALUE 1.00e-15; EST_HUMAN HIT: AI376339.1, EVALUE 2.00e-91; NT HIT: gi14754700, EVALUE 3.00e-33
atgggacagttaaaggccagatgcagcattatgaagctttttatttgtgaatcaacaaggcttcagtctctgtcaaataatgtagggcctcacaagaaacacaataaggaaagtacaaaaatgcacaagggaagatcctaacttctggaggaaaactatcctcacccaggaagccgaggttcctgtagttctccaacatcacgtccctgtacaaagctttctgaacagggtccaggcatttccactcctcctgagagaattctacagccacatccctgaatgtcaaagatccctgaaatgaaaaacacatttcaatatgagcagtgggtgagctcttatctttacataaaatgagaagaggagagaactgtcacatcaatttgattgaagtgtgttttgacatatccattaaaagtatctgtgagataattacgtctccctgattttgggttttataaaattcaataggagattaggatattatctaaatcggtgcacatttctcacttttgtggacaaaataagaaataaacacatggttatccctatgaaagttttagatattacatttgttacaccaagtgaggtgtccaga

SEQ ID NO: 2547 - DNA, 591 bp, Homo sapiens
  MAP TO CHR7.1; EXPRESSED IN ADULT LIVER, SIGNAL = 1.7; EXPRESSED IN BONE MARROW, SIGNAL = 1.7; EXPRESSED IN PLACENTA, SIGNAL = 1.6; EXPRESSED IN LUNG, SIGNAL = 1.3; EXPRESSED IN HELA, SIGNAL = 1.7; EXPRESSED IN BRAIN, SIGNAL = 1.7; EXPRESSED IN HEART, SIGNAL = 1.3; SWISSPROT HIT: P96744, EVALUE 2.60e+00; EST_HUMAN HIT: W26522.1, EVALUE 3.00e-03; NT HIT: AF156673.1, EVALUE 2.20e+00
cctttgtgctcctcatttcctcatctggaaactggtgaaagcaatagatctacctcccagggttattgggagggcagctagtacatgcaaaagcacttggaatagtgctggcaaacagcactcaataaatcaccataatcatcaccatcattgtgattttcatttcaaaggaagttactaaaacatctctatatgcagcttaccttcactatgcactcttaggtacaaggagtgggaatccaagcactgggagaaggggacggataggagtagggaggggtctctctgaccctggattgtgggctggtgttcagggaaaagctccaaacctaggggggacctggcaggtagggcagggaaaggaggccagatcgcccatccagaggaggagccgtggctaagggttattacacatggaagactgccacctggaagggacacaggctcccaagtgtcattcctgacatactagatactggctttacaggtagcaagaccaatgccaagcctgactagatggtggccctgaggttttgctctattttctgccttggctatgaaacttagctaagctttgtcccagagatggag

SEQ ID NO: 2548 - DNA, 570 bp, Homo sapiens
  MAP TO CHR11.1; EXPRESSED IN FETAL LIVER, SIGNAL = 1.2; EXPRESSED IN LUNG, SIGNAL = 2.2; EXPRESSED IN BRAIN, SIGNAL = 0.9; EXPRESSED IN BONE MARROW, SIGNAL = 0.92; EXPRESSED IN HEART, SIGNAL =   2; SWISSPROT HIT: Q99816, EVALUE 8.00e-31; EST_HUMAN HIT: BI767407.1, EVALUE 6.00e-88; NT HIT: gi5454139, EVALUE 4.00e-88
attctgctgggggaaataggaatgggggggatgcggatatatgtataaattgtatctagactaaacctctgttcctttaaccattcttcaatttaaaaataataaaaatagagtaactgaagtttctatttctttttcaggtaatacatacaatattccaatatgcctatggctactggacacatacccatataatccccctatctgttttgttaagcctactagttcaatgactattaaaacaggaaagcatgttgatgcaaatgggaagatatatcttccttatctacatgaatggaaacacgtaagtattcatagtgttctgtgaattagttatgttttatatattttgctcactagcatctgctttcttttagcactcaaggaggattcgaggtaggatagataagttcagataatggactaatcactgagttgagggtaaattagaaaaggctgactaaaagaaatgggtttctgtagagctttgtaattttcagaatacttatattcaatattttgttggctttagttgaacctttttaaaataggcaggattcacatagtggg

SEQ ID NO: 2549 - DNA, 511 bp, Homo sapiens
  MAP TO CHR11.1; EXPRESSED IN FETAL LIVER, SIGNAL = 0.72; EXPRESSED IN LUNG, SIGNAL = 0.93; EXPRESSED IN HELA, SIGNAL =   1; EXPRESSED IN BRAIN, SIGNAL = 0.78; EXPRESSED IN HEART, SIGNAL = 0.84; EXPRESSED IN BONE MARROW, SIGNAL = 0.83; SWISSPROT HIT: Q15620, EVALUE 1.00e-58; EST_HUMAN HIT: AI962273.1, EVALUE 6.00e-17; NT HIT: AF282279.1, EVALUE 5.00e-32
cactggatgcatgctgagactgactttctgtgatgcgaacaccatcgatcactacttctgtgacatcctccctctgctccagctctcctgcaccagcacctacatcaatgagctggtggttttcactgtggttggcatcaacatcattgtgcccactgttaccatctttatctcttatggtttcatcctctccagcatcctccatatcagttccaaggagggcaggtccaaagctttcagcacttgcagttcccatataattgctgtttctctgttctttggatcaggtgcatttatgtatctcaacccatcttctgctgggtccatggataagagaaaattatcttctgtcttttatacaaatgtggttcccatgttgaaccccttaatctacagcctgaggaacaaagatgttaaatttgccctaagaaaagccctgagtagtaggaaactttgataagtaatagtatgtgtctgtgtgtatagtcacaagacagggatattctgtttg

SEQ ID NO: 2550 - DNA, 550 bp, Homo sapiens
  MAP TO CHR17.1; EXPRESSED IN FETAL LIVER, SIGNAL = 4.8; EXPRESSED IN LUNG, SIGNAL = 2.2; EXPRESSED IN PLACENTA, SIGNAL = 4.6; EXPRESSED IN BRAIN, SIGNAL = 4.6; EXPRESSED IN HEART, SIGNAL = 2.7; EXPRESSED IN ADULT LIVER, SIGNAL = 6.7; EXPRESSED IN BONE MARROW, SIGNAL = 4.6; NT HIT: AB051525.1, EVALUE 5.00e-66; SWISSPROT HIT: P06333, EVALUE 1.00e+00; EST_HUMAN HIT: AA332498.1, EVALUE 1.00e-76
caaaagcaacctcttctgggtccaaggcctctgtggtcctgtcagaggccttggtgctgaagagtgtcctgagcatctgcgctgatccaaggattcttggattgggcctcttctggtttgggtgggttggagagaatgacgagatgtagttaacagttacatcccgaccctgttgtggttgagtgtgtgtgcatgggtgtgtgtgttctctttctaagcagagcttgggtgagggcaggcagtggtggtgactctctctctgtccagttgcaggccccgggcattctgtctggcggacagcgatgaggaatcctccagcgctggctcctccgaggaagacgatgccccagagcccagcgggggagacaaacagctcctcccaggggctgaagggtgagtggatcagtgcttctgtgcctctgagtctccagggatcaggacagcaagttgggagtgaaccttgtttcccttccttcctctgtgatcttccttcctctttaatgttgagtagatggtttttttattaatatcccaggtcagtggtctgttt

SEQ ID NO: 2551 - DNA, 582 bp, Homo sapiens
  MAP TO AC068936.2; EXPRESSED IN FETAL LIVER, SIGNAL = 0.69; EXPRESSED IN BRAIN, SIGNAL = 0.77; EXPRESSED IN HEART, SIGNAL = 0.66; EXPRESSED IN BONE MARROW, SIGNAL = 0.89; NT HIT: gi4507202, EVALUE 8.00e-65; SWISSPROT HIT: Q00423, EVALUE 3.50e+00; EST_HUMAN HIT: AL541679.1, EVALUE 7.00e-60
gctggtctccttgctcagtcactgggtggggtggcttcttgcagctcaggccttgctttgggagtgtggcctgatggaaagccgtggctcccagcctcagtccacccccttccctggccccggcacccagggacctgcaacttcattcttctggcccttccaggcccaggccagtcagccctgccattgcctttctttccctttctttttttgagtgtcagtctttccagccaccccctccctctcagggaggtgcctcgtggcagcccgcccctccggcctggtttcctcaggaaaagccctgagaggaagcagggagggggttgggagctgtgggggccagacgaacccgagcgctcccaccgagctgcctgccatggggctggggctgctgctcccgctgctgctgctctggactcgggggactcaggggtccgagctggaccccaaagggcagcacgtctgtgtggccagcaggtgggtctcgtgggagtctgatgcgtgtggccagcaggtgggtctcgtgggagtctgatgcgggtggctgaaccggtgttgaggccgttaggggaaggaggagac

SEQ ID NO: 2552 - DNA, 505 bp, Homo sapiens
  MAP TO CHR22.1; EXPRESSED IN ADULT LIVER, SIGNAL = 2.3; EXPRESSED IN PLACENTA, SIGNAL = 2.5; EXPRESSED IN FETAL LIVER, SIGNAL = 2.2; EXPRESSED IN LUNG, SIGNAL = 2.4; EXPRESSED IN HELA, SIGNAL = 2.6; EXPRESSED IN BRAIN, SIGNAL = 2.5; EXPRESSED IN HEART, SIGNAL = 1.9; EXPRESSED IN BONE MARROW, SIGNAL = 2.1; SWISSPROT HIT: P16818, EVALUE 2.40e-01; EST_HUMAN HIT: BI764337.1, EVALUE 1.00e-105; NT HIT: gi14778708, EVALUE 1.00e-105
tagtgtcccagaagcaaccccagaaactcagagaccaacatgcccctccgcctgctcaccagcccacacccagcccagcctgggttcaagttcccgcccctaactgaggactcttcccacttcccccaagcttcctcccctggctgaggtctcccaccagggccggcacgttcccagccctggccaagagctcctgccaggaccccagccttcctgccaggacctccacaatcttgacccgctcaccttgaggcaggtgccaccctgggcccgctgcagctgaacctccagcagagccttggtgccctccaggctggtgagcgttgtcagcagctcatcccgctccgcctccaggccccgcacctgcttgcggtactggtccttctcgatgaggctctgtgagtactgcaactggatccggtcacggctctggatggcctagggttgggggaggggaggcagcagctgaaggagccaccttggcccagctttcctggcctatgac

SEQ ID NO: 2553 - DNA, 589 bp, Homo sapiens
  MAP TO CHR17.1; EXPRESSED IN BONE MARROW, SIGNAL = 1.8; EXPRESSED IN PLACENTA, SIGNAL = 1.3; EXPRESSED IN FETAL LIVER, SIGNAL = 1.6; EXPRESSED IN LUNG, SIGNAL = 1.9; EXPRESSED IN HELA, SIGNAL = 1.9; EXPRESSED IN BRAIN, SIGNAL =   2; EXPRESSED IN ADULT LIVER, SIGNAL = 1.2; EXPRESSED IN HEART, SIGNAL = 1.6; SWISSPROT HIT: P51692, EVALUE 9.00e-18; EST_HUMAN HIT: AW504150.1, EVALUE 8.00e-69; NT HIT: gi14786064, EVALUE 5.00e-69
caaggcacaggaaaggaaagcgatttgcccaggttcacctgcagtcaagggcatgggcacacttacaccccagacagcctggacccatgctgggccgcgagaagagggctggcagccctgtgaggcaggcgggcaggaggcaggcaggcctcctccccagctgccccagcacccgtgtgcccccagaggggacggctcagagtcaggaggctggcgagcagggcccagaggcgcctcctggggcacccattcatcttggcccccctggctgtcaggaaccccgacttgcccttaatgcagtatctgagcccaggagggtctcgctccagaacgggtgagtgggcttctctgggcctcctgttggacactgggaggtgatggtcatggtttcctctcccctcctctagctcagtttggcccgctggcccagctgagcccccaggagcgtctgagccgggagacggccctccagcagaagcaggtgtctctggaggcctggttgcagcgtgaggcacagacactgcagcagtaccgcgtggtgagtggggtcctgggcctctcctgggcgtgggtgccatgaagtcagtct

SEQ ID NO: 2554 - DNA, 596 bp, Homo sapiens
  MAP TO AC002345.1; EXPRESSED IN ADULT LIVER, SIGNAL = 1.5; EXPRESSED IN PLACENTA, SIGNAL = 1.2; EXPRESSED IN LUNG, SIGNAL = 0.93; EXPRESSED IN HELA, SIGNAL = 0.54; EXPRESSED IN BRAIN, SIGNAL = 0.82; EXPRESSED IN HEART, SIGNAL = 0.94; SWISSPROT HIT: Q12809, EVALUE 3.00e-54; EST_HUMAN HIT: BG395842.1, EVALUE 0.00e+00; NT HIT: gi13540548, EVALUE 0.00e+00
  unsure 263
tctaggccagtctcaccagcagtggctgccccgtgcctgacctccctcggcccccacccccaggtcctgtccctgggcgcggatgtgctgccggagtacaagctgcaggcgccgcgcatccaccgctggaccatcctgcactacagccccttcaaggccgtgtgggactggctcatcctgctgctggtcatctacacggctgtcttcacgccctactcagccgccttcctgctcagcgaccaggacgaatcacggcgtggggncctgcagctatacctgcagtcccctcactgtggtggatctcatcgtggacatcatgttcgtcgtggacatcgtcatcaacttccgcaccacctatgtcaacaccaatgatgaggtggtcagccacccccgccgcatcgccgtccactacttcaagggctggttcctcattgacatggtggccgccatccctttcgacctcctgatcttccgcactggctccgatgaggtgagcagaccccctccaggccagcagccatggctgtcctctgcacgctggcctcaagccctccctgctgcacagcactgggtgcggagagtatctggcactgggc

SEQ ID NO: 2555 - DNA, 556 bp, Homo sapiens
  MAP TO CHR6.1; EXPRESSED IN HELA, SIGNAL = 3.1; EXPRESSED IN BRAIN, SIGNAL = 4.7; EXPRESSED IN ADULT LIVER, SIGNAL = 5.9; EXPRESSED IN BONE MARROW, SIGNAL = 4.1; EXPRESSED IN HEART, SIGNAL = 3.5; EXPRESSED IN PLACENTA, SIGNAL = 3.8; EXPRESSED IN FETAL LIVER, SIGNAL = 4.2; EXPRESSED IN LUNG, SIGNAL = 2.6; SWISSPROT HIT: O32322, EVALUE 6.90e+00; NT HIT: AE001137.1, EVALUE 8.30e+00
agcatcatctggaaaccaccctgtttgccatcctaaatgtaaagcttgattctgcaaaatattacctagccacccaactacttcaaagtttaaatgccacgacaatacgtgttaactcctccaatcaaaaggggcttcacagggcttccaaacactgttttgttttccctgccaatcatctgaacaatactattgtcagtcatattaatttagacaaatcttttcaagatgaatgggtggagcaaacccaggcaaacagactgggattagctctctccctctcaaaataaccagaaagagcaaagatgcaattaacaaaacaataaatgtgtctcagcatacatccctgccttagtattccagcagatagatggaaattatgccagggcagagaggccaggcatgtcttctctgaagctgaacttatgctgcactaaggaggataatgtagaaaacatgcatgtttttacacctttggaagccactctcagtgacaagataacctttcttacctcttttggttggtctttattctggtgctcagtgttggcattgt

SEQ ID NO: 2556 - DNA, 524 bp, Homo sapiens
  MAP TO AC002345.1; EXPRESSED IN BRAIN, SIGNAL = 0.58; EXPRESSED IN BONE MARROW, SIGNAL = 0.59; EXPRESSED IN HEART, SIGNAL = 0.54; EXPRESSED IN FETAL LIVER, SIGNAL = 0.54; EST_HUMAN HIT: BF685466.1, EVALUE 1.00e-127; SWISSPROT HIT: Q12809, EVALUE 8.00e-30; NT HIT: gi13540548, EVALUE 1.00e-127
  unsure 344
ctcctctgcctaaattccccttactgccaccaagagtccttatgatctttccctcccagccgctggatcctggctcccatggactttttgcctcccacctcccaccccaggtcggaagttcctgattgccaatgctcagatggagaactgcgccatcatttactgcaacgacggcttctgcgaactcttcggctactcccgagtggaggtgatgcagcaaccctgcacctgcgacttcctcacaggccccaacacaccaagcagcgccgtgtcccgcctagcgcaggccctgctgggggctgaggagtgcaaggtggacatcctctactaccgcaaggatggtngaggcatactcaggccagaggctttgcagggcaggcttggccctctgtcttgtccagccagggtggccttggggaaggcactgacccagggtccaaagggcctgaacaaaccctgtttcttctaggggccttggttcctccacaggcattggatatgatgccttctgaggtcctttgcag

SEQ ID NO: 2557 - DNA, 503 bp, Homo sapiens
  MAP TO CHR19.1; EXPRESSED IN ADULT LIVER, SIGNAL = 0.82; EXPRESSED IN LUNG, SIGNAL = 1.1; EXPRESSED IN FETAL LIVER, SIGNAL = 0.66; EXPRESSED IN HELA, SIGNAL = 0.78; EXPRESSED IN BRAIN, SIGNAL = 0.69; EXPRESSED IN HEART, SIGNAL = 0.99; NT HIT: gi14757575, EVALUE 1.00e-120; EST_HUMAN HIT: BG696924.1, EVALUE 1.00e-120; SWISSPROT HIT: P48301, EVALUE 1.00e-14
atgatggggaccccttttacccagggaatgtgatgtgatgggaacccgattaaccctgagatgtgatacaccataactgccaacgctcagctgaggggtaacccccattgcccagggaactgacttttgggcatccctttctcctggggaacatgatatggtggcggcctgtttcctggagatggaaaagagcctgctgggtattccatgatagcttggcaggggggcacaggggtccctgccctcccttctaagcataagtcccttgtcctggccttcctggcaggtggtgacaaacagagacacccaggaactgctgctctgcaccgcctatgtcttcgaggtctccaccagcgagcgtggggcccagcatcacatttaccgcctggtcagggactgaagggggaccccaaaactggctcaccccccagaacaccctcctcccagggagggtcctccagctcacctcatgcttcttatttggggagagggctgtgatgtaa

SEQ ID NO: 2558 - DNA, 526 bp, Homo sapiens
  MAP TO CHR12.1; EXPRESSED IN HEART, SIGNAL = 0.95; EXPRESSED IN ADULT LIVER, SIGNAL = 0.38; EXPRESSED IN BRAIN, SIGNAL = 0.65; NT HIT: gi15321265, EVALUE 1.00e-72; SWISSPROT HIT: Q12778, EVALUE 5.60e-01; EST_HUMAN HIT: AW959332.1, EVALUE 2.00e-72
tccgctatttggaccttttgccaaagattccaggcaatgttggctactcttaccatgatgctgaagaccattccagccactttctctctctggaaagtagttttttttgcaatgtgaggtgaacaagacactggggatcactgaggaatctgttacagggcacttgaaggcagctgtgtcgagtacttcagacacacacacacatgcacgtgcacacacccccattctgccagctcctggggcgttacctgtctggtcctccagcaggtaatactgcttcatgagctgccagtgggcctgcagggccttcgcggtacgggccaggtagaaggcatcagggtgtctgtgcagcaggtcctggaaggtctccaaggtgggctggctggtctagagggcaagaaacattctctaggcatctgggctttttcacacatgcctctctgccttaccatctctacctcccacctcagcatcccccaggagctggaagaagcaagctagtcacccaagaagtcaggcttggctc

SEQ ID NO: 2559 - DNA, 578 bp, Homo sapiens
  MAP TO CHR7.1; EXPRESSED IN BRAIN, SIGNAL =   3; EXPRESSED IN ADULT LIVER, SIGNAL = 2.9; EXPRESSED IN BONE MARROW, SIGNAL = 3.2; EXPRESSED IN FETAL LIVER, SIGNAL = 2.5; EXPRESSED IN PLACENTA, SIGNAL = 2.6; EXPRESSED IN LUNG, SIGNAL =   2; NT HIT: AB033111.1, EVALUE 0.00e+00; SWISSPROT HIT: P26545, EVALUE 1.30e-01; EST_HUMAN HIT: BG752466.1, EVALUE 0.00e+00
aaaatgaggggtgggataggtgagctctgagatccctttgcctgaaccagtctttagatgtaaccacttctttcctaggttggagacggattcttacaagtcccgcgtcacggagcctatactcgaggccgtgcttggtaattctttcccacctgttgccccatcagtgtccagctacctctctgaaggaaccacagctttcccagggggcaggggccctctgggaggcctcatggcaacccttccccggccgtccccgcccagcactcacccgtgcagttcctctgctgcaccagcatctgcttcagttcgctgaactcgctggagccttccgtggactcctccagcgtgttctctggctcctgcatgtccaggtctggctgttccccacaggggtcacccagctctgagtcctggaagccgtgctcttccacctgtcccatcaggggctcaggtgtctccaaactttctgagccctcgtcgttggtctgtacctcgatcttaatcacgatcccatcgtgcgctgagagagggtgggcaggggtgaggaggagaaaagaacccagaatgttcatgcc

SEQ ID NO: 2560 - DNA, 540 bp, Homo sapiens
  MAP TO CHR7.1; EXPRESSED IN FETAL LIVER, SIGNAL = 0.35; EXPRESSED IN BRAIN, SIGNAL = 0.37; EXPRESSED IN HEART, SIGNAL = 0.51; EXPRESSED IN BONE MARROW, SIGNAL = 0.37; EXPRESSED IN ADULT LIVER, SIGNAL = 0.57; NT HIT: gi16175749, EVALUE 1.00e-121; SWISSPROT HIT: P30988, EVALUE 6.00e-37
tgggctttagagttaaaatcagctagctgaataagcacagtagttgaataaatacacctttggcttccttacctggaaatgaatcagagagtgcatcacgtaatcatatatcttcccaagcatcttgttggaaggtctccagggaaagacgacaaactggattcccagcaggggcacaaggatcatggtggccttcacagccttcaggtacatgtgggattccgcctcatgggtttccctcattttggtcacaagcacccggacaatgttgagcaaaaagaagaaattgacctgcaaatatacggtgttatgagcaaatcatacagaaaagtatcacttaagaatatgcactgttctcaattcttgtttatccagtgtgagcaacaaatgttacctacatagaacatgagagtctacctgagaggtagcacaattggctcagcatttctagggctctagagaagtggtttaattttatgttccctccagcagtatataaaacagttccagttgctcatcacccttgccaacacttggtat

SEQ ID NO: 2561 - DNA, 589 bp, Homo sapiens
  MAP TO CHR11.1; EXPRESSED IN BRAIN, SIGNAL = 5.7; EXPRESSED IN HEART, SIGNAL = 4.2; EXPRESSED IN BONE MARROW, SIGNAL = 5.6; EXPRESSED IN PLACENTA, SIGNAL = 6.2; EXPRESSED IN FETAL LIVER, SIGNAL = 5.3; EXPRESSED IN LUNG, SIGNAL = 3.3; EXPRESSED IN HELA, SIGNAL =  11; SWISSPROT HIT: Q08485, EVALUE 5.70e+00; EST_HUMAN HIT: BG749105.1, EVALUE 1.00e-107; NT HIT: AF084558.1, EVALUE 1.00e-108
ggaggttaagcaacacagccaaggatcacacagttagtaaatggcagagcaaggacttagtcccctgaactcttaggcactatcccatggcacctcctcctgtcatcctcattgtcgtggtatctttgcctaggactgtggacttcccacagctacctcagtgggaggtccttgagcctgagagggcccttgtctccagtagcattggggtgcagatgagaagaataacagctcctcttcctcttctgcagaaagagctgacagatgagttccgggagctgcgggccacagtggagcggatggggctcatgaaggccaaccatgtcttcttcctgctgtacctgctgcacatcttgctgctggatggtgcagcctggctcaccctttgggtctttgggacgtcctttttgcccttcctcctctgtgcggtgctgctcagtgcagttcaggtgagagcctttggcttgtcaagtgcacagcaatgctcagcatccctggggaaagctccttgggtgtttgaggaaggccaagagtgcctgccctccaagcagggcagatctgaaggtatgcaggagtgagtgcaggaaca

SEQ ID NO: 2562 - DNA, 577 bp, Homo sapiens
  MAP TO CHR7.1; EXPRESSED IN LUNG, SIGNAL = 1.4; EXPRESSED IN PLACENTA, SIGNAL = 1.6; EXPRESSED IN HELA, SIGNAL = 2.3; EXPRESSED IN BRAIN, SIGNAL = 2.8; EXPRESSED IN HEART, SIGNAL =   2; EXPRESSED IN BONE MARROW, SIGNAL = 2.4; EXPRESSED IN ADULT LIVER, SIGNAL = 3.8
tttcccatcatcctccactggcttgcagtattttactcctaaaatgtcaaactccctcacattcataaacaaattcaaatccctgtgtcaacacttgaaattctgcctgcaaatcagaacacgctgtgattgaattgctgctcctatcatctaccactgactcctatcaaagcatataactggattagtgggaaaacagctacattatgcttgcatttcagctttgctaacagcaggcttcctttctgcaacaaagaacaaccctggagatagtagaaacactcagaaatgatgcagcgttagttctgacatcttatacatgatttaagcatgaaaaattactgttatttttaaaaagaatgaaagaaacttagaaaaataaccctaaaaatgagaggctacttgatttttctgtttggtggcttctgggcaactttgggaaagtgttaatatagattgcatcctgagtctttggatgacccacattcttttgggtatgaagataaagagaaatgcatgaggtctctaaggaaaaattacggtcaaagttaactatagaaccactccctccttcctc

SEQ ID NO: 2563 - DNA, 536 bp, Homo sapiens
  MAP TO CHR15.1; EXPRESSED IN HELA, SIGNAL = 0.96; EXPRESSED IN BRAIN, SIGNAL = 0.9; EXPRESSED IN HEART, SIGNAL = 0.99; EXPRESSED IN ADULT LIVER, SIGNAL = 1.2; EXPRESSED IN LUNG, SIGNAL = 1.1; EXPRESSED IN BONE MARROW, SIGNAL = 0.94; EXPRESSED IN FETAL LIVER, SIGNAL =   1; EXPRESSED IN PLACENTA, SIGNAL = 1.2; SWISSPROT HIT: P11087, EVALUE 2.00e-06
gaggaggatgggccattggggtccccggagggggagggtgggacattggggtccccggaggaggaggatgggccatgggagctccgggagctgaaggatgcaccatcaggactcccggggtcggaggctgggccatcggggctcccggaggtggaggatgcaccatcaggaccccgggagtcggaggcttacccatcgggccccccagcgggggagcccgggactatcgggccccctaggggcagcgaggctgggtcatcggaaccaccggggcgggcagctggccctgtggggcctcccaggcaggctgaggtgcctgccaagcggccaatgaagcctgcaagtcaattggaggtggatcccaagggactggcggagcccgggaggaagcgggcggggcccgcatcagaaccgtagggcggctatagacaggcggcttcggggcctccgccggaggactcgagtcacccagattcttacttagctgcgacatgtccctttgctgacagctggtgggtcttttcctcggacagctg

SEQ ID NO: 2564 - DNA, 521 bp, Homo sapiens
  MAP TO CHR12.1; EXPRESSED IN BONE MARROW, SIGNAL = 0.6; EXPRESSED IN FETAL LIVER, SIGNAL = 0.51; EXPRESSED IN HELA, SIGNAL = 0.98; EXPRESSED IN BRAIN, SIGNAL = 0.61; EXPRESSED IN LUNG, SIGNAL = 0.84; EXPRESSED IN HEART, SIGNAL = 0.77; EST_HUMAN HIT: BG115194.1, EVALUE 4.70e-02; SWISSPROT HIT: Q00624, EVALUE 2.80e+00; NT HIT: AF312032.1, EVALUE 5.00e-01
ttggaaaaatcagagaggggtacgattttaatgcagcagagaatctatggagccgctgagctctctcagccggcagcttgttactggggaggggaggaatatgggttatccaacggtcagtatggtaatccaggcacaataaggcctcacacacaatggacacatatttttcttcagcgatgtcagaagggaagcgctttgtactgaaacgtgtttccgaaagagaaaccaaatcgagatttagaaaggagatggggtggaggggcaattgcagagagcatttggatgctggcaaaaggtagtcagaaaaaataaaaataaataaaactggggcaaagtgaggttgaggacagggcagaggtgcagcccctgggccagcaaggcgggaggcaggagggtgaaacacaaaagaagacaggaccagatacaaggattcatcacagatgagagctgctttagtacccccaccccctcccaattaagccattgctaagtgcaaaagcccttccaacggattttat

SEQ ID NO: 2565 - DNA, 508 bp, Homo sapiens
  MAP TO CHR1.1; EXPRESSED IN FETAL LIVER, SIGNAL = 0.77; EXPRESSED IN LUNG, SIGNAL = 0.57; EXPRESSED IN HELA, SIGNAL = 0.76; EXPRESSED IN BRAIN, SIGNAL = 0.71; EXPRESSED IN BONE MARROW, SIGNAL = 0.79; EST_HUMAN HIT: AI990328.1, EVALUE 1.00e-125; SWISSPROT HIT: P35555, EVALUE 1.60e+00; NT HIT: AY048672.1, EVALUE 1.00e-126
tgggaaaagtgaaacaagggagggggtaataagttccagtgattgatttcaaattaaaataggatagccaggtatgcctcactgggaggtgacagctgggcaaaggtatgtctgggttgggttgtgcctggaaagattggagaggtcattttattagggtccttccaacctcagtacaattaccaaatctctctcctttgttcccttgcacctccgttgcttttccttctggagttgatcacaagcccaaggaatgcctaggactcctggaatgtatgtatgcaaacctccagcttcagacccagctcgcccaacaacagatggctgttttggaacatttacaggcatctgtgacacaactggctcctgggaggggaagcaataactcttctctcccagccttatctcctaatccattgttaaatcacctgccccaattcagtaaatgaattgtggaacaaagttattgtgttgttttcctctctcttcccagtaaacccttgttgga

SEQ ID NO: 2566 - DNA, 571 bp, Homo sapiens
  MAP TO CHR13.1; EXPRESSED IN BRAIN, SIGNAL = 0.56; EXPRESSED IN BONE MARROW, SIGNAL = 0.73; EXPRESSED IN ADULT LIVER, SIGNAL = 0.56; EXPRESSED IN FETAL LIVER, SIGNAL = 0.49; SWISSPROT HIT: P46023, EVALUE 1.00e-06; NT HIT: AF346501.1, EVALUE 1.00e-60
catgtcctcccaaactctcctcatccaagttactgaattcctatgttctttaggttcctcatctttaaaaggatactgcctagtgtttcatgaagaactctttaattatataaacactactaaacaaaaataaacaaacctagtgaagttgtatacctagcatggagttgcagccccgataggactgcaactgtaggttctgtatcattgctgcaaagtgacactttttttccctttgactttagttatttcaaaaactttcgatactgctcctatgctccccatgtccgaatatgtatgcccttgacggacggcatttcttcatttgaggacctcttggctaacaatatcctcagaatatttgtctgggttatagctttcattacctgctttggaaatctttttgtcattggcatgagatctttcattaaagctgaaaatacaactcacgctatgtccatcaaaatcctttgttgtaagtatgtttccagtataagtagattaaggatatcttctgtgagttgtgcactagacatatatatgtatttattggctttcaacaaatggcatt

SEQ ID NO: 2567 - DNA, 594 bp, Homo sapiens
  MAP TO CHR19.1; EXPRESSED IN ADULT LIVER, SIGNAL =  10; EXPRESSED IN BONE MARROW, SIGNAL = 1.8; EXPRESSED IN FETAL LIVER, SIGNAL =   2; EXPRESSED IN LUNG, SIGNAL = 0.67; EXPRESSED IN HELA, SIGNAL =   1; EXPRESSED IN BRAIN, SIGNAL =   1; EXPRESSED IN HEART, SIGNAL = 0.84; NT HIT: AB002461.1, EVALUE 1.00e-41; EST_HUMAN HIT: AV645396.1, EVALUE 6.00e-51; SWISSPROT HIT: P78329, EVALUE 2.00e-22
gagaggctgtcagggtcttggctcagaaatactccgccttcccctcgccaggccctggatccctgcagttctccgacgccccctgctggctgtctgtgggactcaggcacaggttgattccccggaatctgcaaaggtgcctgaggagggcgcgggtggctctgagacctgacagtggtgggtcactgcagatccgcgctcaggggctccacccgtagccaaagtccatcctccgcgcgcacgatcagctccaacttcctgcggggctccgcgtggtccggcaggacgcggaagcgcagcagagtgagcgccaggaccaccttcatctcagccatggcgaacgtctggccgatgcagttcccgggggagggggtggggactctgactgtgcccaggacccccatcccggccccatcgcgccgggaacctcgtctgggactcccaaccccacccagatccgattgaggggcagagagagggactctgtgcctgggacccccatgtgggcttgcatatcctccgagcctggcttagactccagcccccagaccagcagacgtaggagtggggaagtctgagaacacacaccccctt

SEQ ID NO: 2568 - DNA, 542 bp, Homo sapiens
  MAP TO CHR17.1; EXPRESSED IN HEART, SIGNAL = 5.2; EXPRESSED IN ADULT LIVER, SIGNAL = 3.6; EXPRESSED IN BONE MARROW, SIGNAL = 2.5; EXPRESSED IN FETAL LIVER, SIGNAL = 3.4; EXPRESSED IN LUNG, SIGNAL = 5.6; EXPRESSED IN HELA, SIGNAL = 2.4; EXPRESSED IN BRAIN, SIGNAL = 2.5; NT HIT: gi14770963, EVALUE 7.00e-96; EST_HUMAN HIT: AA434222.1, EVALUE 1.00e-95
  unsure 465
  unsure 503
cgatctgctccatgtctgtgtgtacttcatagactgggtaagaaagagacagtgatagaatgatgagctttatggaggctgagcttctagaggcatccactcatgccagcctgtttccttccctgtcagaggagtgatggctgtaggagctcgtcactcttttgacaaaaagggggtgattgtggttgaagtggaggacagagagaagaaggctgtgaacctagagcgtgccctggagatggcaatcgaagcaggagctgaggatgtcaaggaaactgaagatgaagaagaaaggaacgtttttaaagtaagcatgaaaacatgggtgtttggtgggcttccgggaggaccctgatagatgccttatgcatgcctcttggtttcttccttcatgtgccccagggtataggtgagacagttcacatattgtacaaacatttattaagtgaatactgaataggaccngactctagtgaggactatgagaaagaaagagtcaaaancattgaaaacgatgtccctgccagtgaagagctcaaacc

SEQ ID NO: 2569 - DNA, 524 bp, Homo sapiens
  MAP TO CHR17.1; EXPRESSED IN BONE MARROW, SIGNAL = 0.72; EXPRESSED IN HEART, SIGNAL = 0.92; EXPRESSED IN FETAL LIVER, SIGNAL = 0.65; EXPRESSED IN BRAIN, SIGNAL = 0.71; EXPRESSED IN LUNG, SIGNAL = 0.68; SWISSPROT HIT: O43896, EVALUE 7.00e-30; NT HIT: gi14774564, EVALUE 1.00e-97; EST_HUMAN HIT: BE252943.1, EVALUE 2.00e-97
actttggggcagtgattctgtccttcagcttcgtatgttcatctgggagacgctgttgatcggacacacctcctggcttgttgggcaggtcgctgagctagcatctgcagaatgcttcgcactgtgtattagctgcagtcacctggatcgtgtccagtggagtcagattaagttgcgttgtcattgtttttgctagttttgttacttctcatttgcttctcccactcaggtgagctatatggagatctactgtgagcgggtacgagacctcttgaaccccaagagtcggggttctctgcgggtccgggagcaccccatcctgggcccgtacgtgcaggacctgtccaaattggctgtgacctcctacgcagacattgctgacctcatggactgtggaaataaagcacggtgaggcaggctgatggagcagagggcaagggggccagggttgggaaggtgagaggcaggatccagtgactgctttctttaccctaaggactgtggctgccaccaacatgaatgag

SEQ ID NO: 2570 - DNA, 589 bp, Homo sapiens
  MAP TO CHR19.1; EXPRESSED IN FETAL LIVER, SIGNAL = 4.7; EXPRESSED IN HELA, SIGNAL = 4.3; EXPRESSED IN BRAIN, SIGNAL =   6; EXPRESSED IN HEART, SIGNAL = 5.2; EXPRESSED IN ADULT LIVER, SIGNAL =   6; EXPRESSED IN BONE MARROW, SIGNAL = 4.9; EXPRESSED IN LUNG, SIGNAL = 3.6; EXPRESSED IN PLACENTA, SIGNAL =   5; EST_HUMAN HIT: BI755020.1, EVALUE 5.30e-02; SWISSPROT HIT: Q14324, EVALUE 2.00e-24; NT HIT: gi4758747, EVALUE 2.00e-80
tctaccctgtcactcaccccatgtagggaaggacgcagtggtcgtggccaaggtgaacgggaaggagctcccagacaaaccgaccatcaagtggttcaaggggaagtggctggagctgggcagcaagagtggcgcccgcttctccttcaaggagtcccacaactccgccagcaatgtgaggaccccgtgggccagagggctggtggaggggagtggagcttgtgcaggacatgctcctcagaagccctgttgcctgaggcatcaatgtgggcctggagccgggatggagagtgggccctctgaggatggagtttgtgcggggctgctggggagagcttgtgtgaagcagagggaggatgcctggggtttgggtggggatgcattagggcttggtcatgtacattcctggcaaggcctgagggggccagggacctgggccccagaagtcctgatgggtcagatatgaggagacagagctggccaccaggtgctgagacccctctcggtctccattggcccccctgtggggtgggggtgaggacgtggagatagagctatgagtggactctgaggaatatggggtggctct

SEQ ID NO: 2571 - DNA, 555 bp, Homo sapiens
  MAP TO CHR3.1; EXPRESSED IN PLACENTA, SIGNAL = 4.8; EXPRESSED IN FETAL LIVER, SIGNAL = 7.7; EXPRESSED IN HELA, SIGNAL = 4.9; EXPRESSED IN BRAIN, SIGNAL = 5.6; EXPRESSED IN ADULT LIVER, SIGNAL =  16; EXPRESSED IN BONE MARROW, SIGNAL = 5.6; EXPRESSED IN HEART, SIGNAL = 5.5; EST_HUMAN HIT: BG000251.1, EVALUE 3.00e-28; SWISSPROT HIT: P02462, EVALUE 6.00e-03; NT HIT: S76351.1, EVALUE 5.30e-01
ctgcagggaggctaagtgaccttggagggtccccagcctctggatcttccacattccactcccagcttgcagcccccttctctccctctgtagggctccaaccacaggactctccagccaccctggaaggctgccttgatggctggacccgccctggcttggtgaaaggctctctgtcctgggcgccatattcccagccccacccagccaggcccacaattccctctggtccccagggagccacagggtgaccacagcctcccagatgtggcccatctggaatctgctgcccacccggccggctgaaaccggccctgtggccaaagcctgggctctgtctgcctttcctcatctgcttccctcccttctcttctcccctccttgtcccactgcctctggccccaccctctgccactgccctcctctccttctctatttctgtggccctatccactatgtgtccccatgtacctcctctgacacactgagcccagacttcagtgtgtgcctcctggtcccctctatctctgtgactgtctctccctgcctctgttg

SEQ ID NO: 2572 - DNA, 590 bp, Homo sapiens
  MAP TO CHR17.1; EXPRESSED IN ADULT LIVER, SIGNAL = 0.91; EXPRESSED IN LUNG, SIGNAL = 0.87; EXPRESSED IN FETAL LIVER, SIGNAL = 0.76; EXPRESSED IN BRAIN, SIGNAL = 0.78; EXPRESSED IN HEART, SIGNAL = 0.81; EST_HUMAN HIT: BG761119.1, EVALUE 6.00e-17; SWISSPROT HIT: P35499, EVALUE 4.00e-65; NT HIT: L04219.1, EVALUE 0.00e+00
tataggtcaggcaacagcccatcaggtctttatagttcattctcctagtggctgagcgtctgtggccatttgagggctccagattgaggatgtgaacagagaagggtggagttaatttcagaaggcttcggggaagtagtggtgctcagtaagtcaagccttgaagatggagtaggaaaaagcttggcggtgggggccgcgggggctctgttatcaccctgccctgccccctgccaatatccttgccctctctgcggtcagggctgaagacgatcgtgggggccctgatccagtcggtgaaaaagctgtcggatgtgatgatcctcactgtcttctgcctgagcgtctttgcgctggtaggactgcagctcttcatgggaaacctgaggcagaagtgtgtgcgctggcccccgccgttcaacgacaccaacaccacgtggtacagcaatgacacgtggtacggcaatgacacatggtatggcaatgagatgtggtacggcaatgactcatggtatgccaacgacacgtggaacagccatgcaagctgggccaccaacgatacctttgattgggacgcctacatcagtgat

SEQ ID NO: 2573 - DNA, 572 bp, Homo sapiens
  MAP TO CHR22.1; EXPRESSED IN HELA, SIGNAL = 7.4; EXPRESSED IN PLACENTA, SIGNAL = 7.8; EXPRESSED IN FETAL LIVER, SIGNAL =   6; EXPRESSED IN HEART, SIGNAL = 6.7; EXPRESSED IN BRAIN, SIGNAL = 7.6; EXPRESSED IN ADULT LIVER, SIGNAL =   8; EXPRESSED IN BONE MARROW, SIGNAL = 7.7; EXPRESSED IN LUNG, SIGNAL = 5.6; EST_HUMAN HIT: BE934659.1, EVALUE 0.00e+00; SWISSPROT HIT: O30114, EVALUE 1.40e+00; NT HIT: AB016207.1, EVALUE 0.00e+00
cacaccagtgtggttggttcctttcatttcgggggctggtattaatagtgcaatacttggcaaattagcaagaaaaaatagatcccaaacacccaccccgtcaggtgaaaaaccagaagagcttggtatagaggggaggagcaagtgggggttaactgctgtgataaacctttccatgttcataaaggtgcaccctcaacctctcccaagggagagccaaatgaggcccagggtttcctaacaagtcacagtataataaaagcaggagacaaccacattaaattcctacaacacacatcagaggacgcatccagccaatcttcagcataaagccatacatctcagggcacgaatagatttaacaatcgctgtgaaaggagaatttacaacaaataccaaggctcaacggactgggggtgcaactttatagacatatcagttagaataatgactatggccatgtaaaattacttaaagaggggagagggaaatatgaattggactttttgggttagattttgttttctttaaaattaaataaaggcagctccccagtgggaggccctgagttt

SEQ ID NO: 2574 - DNA, 543 bp, Homo sapiens
  MAP TO CHR2.1; EXPRESSED IN ADULT LIVER, SIGNAL = 0.41; EXPRESSED IN FETAL LIVER, SIGNAL = 0.52; EXPRESSED IN LUNG, SIGNAL = 0.69; EXPRESSED IN HELA, SIGNAL = 0.71; EXPRESSED IN BRAIN, SIGNAL = 0.67; EXPRESSED IN BONE MARROW, SIGNAL = 0.68; EXPRESSED IN HEART, SIGNAL = 0.85; NT HIT: D86061.1, EVALUE 2.00e+00; EST_HUMAN HIT: BE858274.1, EVALUE 3.00e+00; SWISSPROT HIT: Q10818, EVALUE 1.70e+00
ttctgccattaaaaggccacactacttttgaaatcaacctaataaaaagggcatcttcgggaggcactgaaccatcttttcatcctcccccagcacctggcgtcaaggaaacccttgaagaatgcttgaggctgactgaaaacatgggtggcagcctaagttcatgacttgctttggccaagtgaccccacggggacccatatccttactctctgggtccctccccagaggtcagtcctggggcacgccctgggtgcctgtatggctctcttctccgcccacaggaagtgtgaccccggatcatgacgtcatggctgaccttggcatctgtcctgctgccttaatgaatcaggcctcgctaaggagaaagccccaagtggccaacaggaatgactcaaaatgacttaattgatttaattaactgaaaagagaggaaaagaaaccaaacccttctgagggcagtttgagtacctgcttgggcaatgagtgcaatggagatgcccccggcctggtggctcaggttcaggaaacacgtctcaccct

SEQ ID NO: 2575 - DNA, 591 bp, Homo sapiens
  MAP TO CHR1.1; EXPRESSED IN FETAL LIVER, SIGNAL = 0.36; EXPRESSED IN LUNG, SIGNAL = 1.2; EXPRESSED IN BRAIN, SIGNAL = 0.4; EXPRESSED IN BONE MARROW, SIGNAL = 0.37; EST_HUMAN HIT: BI546563.1, EVALUE 0.00e+00; SWISSPROT HIT: Q13751, EVALUE 6.00e-25; NT HIT: U17758.1, EVALUE 0.00e+00
gcctgagtctggttgaaagggggcagcagctccttgggacaccacggtagaggggccactgtgggtgccttccacaagtgctgctcagctaggagaggcctcgtatctctggggaggttagtgggctcctacagtcaaatgcgtgttgtcttccagaccccgacactgatgcagccactatccaggaggtcagcgaggccgtgctggccctgtggctgcccacagactcagctactgttctgcagaagatgaatgagatccaggccattgcagccaggctccccaacgtggacttggtgctgtcccagaccaagcaggacattgcgcgtgcccgccggttgcaggctgaggctgaggaagccaggtatggccttgggccctgaacttctctctgcccaggattaagctggcgttttgctcctcaaccccgttgctgggagaggggtacagagggctgggagacaggagggggtgcttaccatggtggagagtggtacacagagtccagagtgcaggttaaacttaatttgcatgactgtgtcttccgtattggaaaccgcccagaaggtgtcttgggcataatgggaacat

SEQ ID NO: 2576 - DNA, 555 bp, Homo sapiens
  MAP TO CHR19.1; EXPRESSED IN FETAL LIVER, SIGNAL = 1.9; EXPRESSED IN LUNG, SIGNAL = 2.9; EXPRESSED IN HELA, SIGNAL = 1.2; EXPRESSED IN BRAIN, SIGNAL = 1.3; EXPRESSED IN HEART, SIGNAL = 2.8; EXPRESSED IN BONE MARROW, SIGNAL = 1.2; EST_HUMAN HIT: AA781745.1, EVALUE 0.00e+00; SWISSPROT HIT: P22791, EVALUE 5.30e+00; NT HIT: gi14763698, EVALUE 0.00e+00
taccttgtccagtgccacacagactataagtagcaaggctgggttcgcacccagactgtggccggtgtcttttgtctgaattaccctcactttctgcttattccagagccccaacccccgcctgaccttctgcgtcaaaacctacgaacgccttttctacatggtggctccgagccccgaagccatgcgcatttggatggacgtcatcgtgaccgccgctgacgaaaaccacgccccctgagtggccccgccctcttggggggaagtcccttcgaggctccgccggcgcggggcgcgggggcgttcctaggccccgcccactgccggaaaacttggacgcaccgctttggaactctcccgggagttccgcaggcgcggcagttcagctggcctgagctgctgcgttctgggttgcaggtgccttgcccccgacgggatcgccggcccctaaggccctgcccggggcaggaggaagattgcaggggcgggaagaaactatttattggtgctcctgtgataccgaattaaatacggaggaaaaacaggaattgctgc

SEQ ID NO: 2577 - DNA, 559 bp, Homo sapiens
  MAP TO CHR5.1; EXPRESSED IN PLACENTA, SIGNAL = 1.7; EXPRESSED IN FETAL LIVER, SIGNAL = 0.87; EXPRESSED IN LUNG, SIGNAL = 1.1; EXPRESSED IN HELA, SIGNAL = 1.2; EXPRESSED IN BRAIN, SIGNAL = 0.92; EXPRESSED IN HEART, SIGNAL = 1.1; EXPRESSED IN BONE MARROW, SIGNAL = 0.99; EST_HUMAN HIT: BF983761.1, EVALUE 3.00e-03; SWISSPROT HIT: P56488, EVALUE 5.30e+00; NT HIT: gi16171606, EVALUE 0.00e+00
taacctcagccccatcactctatggtggaagataaagtttttgttgttgttgtttttctttctcagtggtggtaagtggttcttgcacccacataagatgtgatgcctcagtgagggacatagcagacagacagtatcggggttacagtttacctgcacaggtgtgttttaggtgtgtgtctgccatgtgtttcctctccaggttcttcatgaagaaatcgagctccctggttccaatgtgaaacttcgctatctgagctctagaactgcagggtacaagtcactgctgaagatcaccatgacccagtccacagtgcccctgaacctcattagggttcacctgatggtggctgtcgaggggcatctcttccagaagtcattccaggcttctcccaacctggcctacaccttcatctgggacaagacagatgcgtatggccaaagggtgtatggactctcagatgctgttggtatgttttggtttcaaccacttattgatcaatggatttagtcatgtgttaattcgacccatatttattgagttccgaggatatgccaa

SEQ ID NO: 2578 - DNA, 555 bp, Homo sapiens
  MAP TO CHR13.1; EXPRESSED IN ADULT LIVER, SIGNAL = 0.83; EXPRESSED IN BONE MARROW, SIGNAL = 0.81; EXPRESSED IN FETAL LIVER, SIGNAL = 0.7; EXPRESSED IN HELA, SIGNAL = 0.68; EXPRESSED IN BRAIN, SIGNAL = 0.84; EXPRESSED IN HEART, SIGNAL = 0.48; EST_HUMAN HIT: BE747376.1, EVALUE 9.00e-87; SWISSPROT HIT: P35680, EVALUE 1.20e-01; NT HIT: gi7662435, EVALUE 6.00e-87
tctcaccacgagtgttctgcactgaagtttaaggccaaagctcccattctcagcaaaacatctctgactcactctgtctcctctatgcctccctcaagactctcagggagaagaatgtctgcacgagggtaacataaagtaactgctggatcccctggccttaatgccatcctaacaccacctctcaaggcaatcaataccataagaacttctaggtttaatacttacatattctaatgctgaattcttcgaagttaattctttaaattccttcataaacatctccttgactttttccatttcatcaactagtttctccttttcttcttctttccacctgtcaaataacttcaaaaagtcttcctcttttgttttctgcatttcatattcctgaaattattttaatacacatctttaaaagttctggtctgaagaaaataagcaatatttaaaataaaagttcatagcatcacttcaaaaatgttagctagtattgcttatttcagtgaggcttgtaacaacatttcctatcatggcaggtctgtgcacaatgat

SEQ ID NO: 2579 - DNA, 547 bp, Homo sapiens
  MAP TO CHR2.1; EXPRESSED IN LUNG, SIGNAL = 0.96; EXPRESSED IN BRAIN, SIGNAL = 0.76; EXPRESSED IN HEART, SIGNAL = 0.66; EXPRESSED IN ADULT LIVER, SIGNAL = 0.96; EXPRESSED IN BONE MARROW, SIGNAL = 0.99; EST_HUMAN HIT: AV717873.1, EVALUE 1.00e-109; SWISSPROT HIT: Q9NVP1, EVALUE 4.00e-50; NT HIT: gi14742966, EVALUE 1.00e-109
aaccctggcttttctcatccctgcagttgaactcattgttaagttaaggttcatgcccaggaatggtaagcgttcatctgcttgtttctgccattatttcactagaggtttattgtagctgttacggactcagtggtgacagccacatttagacttctaccatatatcatttttaggaacaggagtccttattctctcacctactagagaactagccatgcaaacctttggtgttcttaaggagctgatgactcaccacgtgcatacctatggcttgataatgggtggcagtaacagatctgctgaagcacagaaacttggtaatgggatcaacatcattgtggccacaccaggccgtctgctggaccatatgcaggtaagagatgtagtgcttgtctcattgtcttgtatgaaacataaactgacaactaatggttgttctttgtcctttgttttgttagaataccccaggatttatgtataaaaacctgcagtgtctggttattgatgaagctgatcgtatcttggatgtggggtttgaagagga

SEQ ID NO: 2580 - DNA, 577 bp, Homo sapiens
  MAP TO CHR17.1; EXPRESSED IN HEART, SIGNAL = 1.1; EXPRESSED IN BONE MARROW, SIGNAL = 0.54; EXPRESSED IN FETAL LIVER, SIGNAL = 0.74; EXPRESSED IN LUNG, SIGNAL = 1.1; EXPRESSED IN BRAIN, SIGNAL = 0.55; NT HIT: AF029308.1, EVALUE 5.50e-01; EST_HUMAN HIT: BF379687.1, EVALUE 5.00e-42; SWISSPROT HIT: P36212, EVALUE 1.90e+00
ttgctgcctcttgttctttggatagatacctccttcacacacagaattcagtagagggcctgaaacacaacctagtaagtaggtaagggttttatttttattttcaagcctgctctagactttcaggagccaaaagttcaaatcacagcaggattgattcagccctttcacaagcaatttagtactatgcagtttgtttaggatggtcaagtttccaggccctggcagagcagcatcattatctctctaagccttcgtgtatcaacttccctggccatatttcactttctatgtctttcttctctgaaatcaggtgaacatgcaaaatcagacacttacacaattatacacttttcaacaaccatgtcaaatatgttcaagaatttaccacaacattggaagttgctttttctctctggattagataaaaccaacaagtatgcaaaaattaactcctcagtccttagtagaaagggggcagtatttatcattcttcagctagtacatcaattaactgagaaaagatgtggttttttttttccagattctattcagtccacctcacagcaacctaaaa

SEQ ID NO: 2581 - DNA, 589 bp, Homo sapiens
  MAP TO CHR7.1; EXPRESSED IN FETAL LIVER, SIGNAL = 0.94; EXPRESSED IN BRAIN, SIGNAL =   1; EXPRESSED IN HEART, SIGNAL = 0.44; EXPRESSED IN ADULT LIVER, SIGNAL = 0.64; EXPRESSED IN BONE MARROW, SIGNAL = 0.99; EST_HUMAN HIT: BG527584.1, EVALUE 0.00e+00; SWISSPROT HIT: P08243, EVALUE 3.00e-42; NT HIT: L35937.1, EVALUE 0.00e+00
cgcttcctaagatgcaacagcattttgaatttgaataccagaccaaagtggatggtgagataatccttcatctttatgacaaaggaggaattgagcaaacaatttgtatgttggatggtgtgtttgcatttgttttactggatactgccaataagaaagtgttcctgggtagagatacatatggagtcagacctttgtttaaagcaatgacagaagatggatttttggctgtatgttcagaagctaaaggtaataataaatttttctatagattttcattattgtcttggttgtacgttttcttttaaattatatttgaaaatctcttagagagcaatccagaattttacaagtgactaagttatgagtctttacctttttttaaaaaaacagaggagttgtactctccttttcagcacttaaattctgtaatccttgaaggatgattctttagtgcagtcgtttattttttgctgtgctaatatgctctacatctagcttgatcttaagtgcagttttaagttttcctgtgtcatactataatcgtagggttgactctgcaattattgcattgtggtactttgcgcag

SEQ ID NO: 2582 - DNA, 502 bp, Homo sapiens
  MAP TO CHR8.1; EXPRESSED IN PLACENTA, SIGNAL = 1.4; EXPRESSED IN HELA, SIGNAL = 1.3; EXPRESSED IN FETAL LIVER, SIGNAL = 1.3; EXPRESSED IN BRAIN, SIGNAL = 1.1; EXPRESSED IN HEART, SIGNAL = 1.1; EXPRESSED IN ADULT LIVER, SIGNAL = 1.4; EST_HUMAN HIT: BI087262.1, EVALUE 0.00e+00; SWISSPROT HIT: Q14596, EVALUE 6.00e-28; NT HIT: gi14772834, EVALUE 0.00e+00
tggtctttagtttgctccccaaaatactgtagcaggtattgtcttggtaactcaacgatgggctctatacagattcatcagattaaaaataagcaagggcttctatcccataccccaatgacagaataaagatcatctctgagcagcaggcagttatttaatacaaggtcactcctcaatagcgttggctgtaccagtcgttgttgtttaactgaagaagttctgtcacaacctgcaggatattgtaattgtgtttcttcagcagccgtaggttcagctgcctgtcacagaatcccatttcaaagagatgggccatcagggctgctgtctgatcttcagaaattattggctgtgtagagacaagcaaagcaaaaaaaaaaaaaaaaattctgtataatttaaatgtttattttatacatttgtatcatcttgcaagcatactagtctttccagatttattcaaagtactaggtaattagattcaaggctatggcactcctgt

SEQ ID NO: 2583 - DNA, 541 bp, Homo sapiens
  MAP TO CHR10.1; EXPRESSED IN FETAL LIVER, SIGNAL = 3.1; EXPRESSED IN HELA, SIGNAL = 3.1; EXPRESSED IN LUNG, SIGNAL = 2.4; EXPRESSED IN PLACENTA, SIGNAL = 3.1; EXPRESSED IN HEART, SIGNAL = 4.1; EXPRESSED IN BRAIN, SIGNAL = 3.4; EXPRESSED IN BONE MARROW, SIGNAL =   3; EXPRESSED IN ADULT LIVER, SIGNAL = 4.4; EST_HUMAN HIT: AI917366.1, EVALUE 4.00e-67; SWISSPROT HIT: P51532, EVALUE 6.00e-14; NT HIT: AF254822.1, EVALUE 0.00e+00
ctgagagctgtggtgtgtgggcagaatgaccagaaaccacctaggcggtgccttgggctacctggttagggacctggtcgtgggcttttggggttccttgtaagggttgggggtgtcctgagggatgtcagtgggcagtcggtgttgggtgttccttcaaggtcccactcacttagtgctgggcctcagtcatgcagttcccatgcctagtgagccaggttaccgaggctggcgcttcggccacatcctcataggcacgaggaatcctagcccgtggggtctccagcacacagccaggcctgcgggcaggcgaggcggggtcctgaggtaagacctgctcctcccgtccactgcaggagcgcattcgcaaccacaagtaccgcagcctcaacgacctagagaaggacgtcatgctcctgtgccagaacgcacagaccttcaacctggagggctccctggtgagggcaccgctgggggttggggatgggccactcccacagctgggctttgacccaacccgcccctccttcccttctgaatt

SEQ ID NO: 2584 - DNA, 561 bp, Homo sapiens
  MAP TO CHR4.1; EXPRESSED IN FETAL LIVER, SIGNAL = 0.92; EXPRESSED IN LUNG, SIGNAL = 0.98; EXPRESSED IN BRAIN, SIGNAL = 1.2; EXPRESSED IN BONE MARROW, SIGNAL = 1.1; EXPRESSED IN HEART, SIGNAL = 1.1; EXPRESSED IN ADULT LIVER, SIGNAL = 0.85; EST_HUMAN HIT: BI600401.1, EVALUE 1.00e-103; SWISSPROT HIT: Q9R0Y8, EVALUE 1.60e-01; NT HIT: X55272.1, EVALUE 3.00e-18
aaggggaataaggggaaaggggtagatagcaaagaatagttttaaacccctgaatttactcaccagtttcccaaatgcagggtcagtaacaagaagaccaacctcacccctctactttgactccgcagaagaaaaggggagaagagaaaagctttcaaaggacccatcggaatcgcttttttacgtgtgctgcactagctcaattctcccagccaggacttttcctcccacctcagcagcagctggctgagtacagaagggagagtgtggaaaggcagtgcacctcccaaacaggtaggatgcgactcccagcagaattgagccagggagccaatcaggccgagaggatggtggcataaattatcttaaaaagagttgagccaatcagtagcccaaggaggcggggttctcctactagaaattgagcccagtagggaaaagggctccctttttctaaaagaaaaacaaacctcttctccctcgcagcggcggagaaacgtttgagtggccttgaacagaatccctccctagggagaggctgcctttctccccttctgctct

SEQ ID NO: 2585 - DNA, 560 bp, Homo sapiens
  MAP TO CHR7.1; EXPRESSED IN BONE MARROW, SIGNAL = 1.4; EXPRESSED IN HEART, SIGNAL = 1.3; EXPRESSED IN FETAL LIVER, SIGNAL = 1.2; EXPRESSED IN LUNG, SIGNAL = 1.1; EXPRESSED IN HELA, SIGNAL = 1.1; EXPRESSED IN BRAIN, SIGNAL = 1.4; EST_HUMAN HIT: AA926703.1, EVALUE 0.00e+00; SWISSPROT HIT: P11707, EVALUE 6.20e-01; NT HIT: gi14754098, EVALUE 1.40e-01
aacagcctgctcacccatacctgtctcccaagctcccaccagtttcactgacaagggtagcattagttaggcgaatgactccctatcttattcacctttataccacccaagagcacccagcagaaggcctgacacagagacagtgctacaatgtttaatgaattgaattgtatgctggccaatattaggctttacaattgttaaaagatggtttgatatgcttagtcttgtcaaaaacattgtatgtaagaagaagaaacttgagaaaggtggtcagtagagagcctcttcgactaatagacagtttgagcatctgacagctgcattagaagcagaaattggtaaacaacttgacatagtatagcaaaacattcatgaaggcagccctgaatcccaaacagggatggataacctgaggacaaggaaagaaaaatgaggcaaatagacttttaatgctgtaatatacattaaacagaagccctctatttctgttccatgttcagatccatcttgagagcacagcaaacactcagagtatctgggggagaaggtcagttttc

SEQ ID NO: 2586 - DNA, 595 bp, Homo sapiens
  MAP TO CHR2.1; EXPRESSED IN ADULT LIVER, SIGNAL = 1.7; EXPRESSED IN HELA, SIGNAL = 2.7; EXPRESSED IN BRAIN, SIGNAL =   2; EXPRESSED IN BONE MARROW, SIGNAL = 2.6; NT HIT: AJ277892.1, EVALUE 0.00e+00; EST_HUMAN HIT: AA683051.1, EVALUE 0.00e+00; SWISSPROT HIT: Q49400, EVALUE 2.00e+00
gtggtcttcataatgcctaaatgtaatttcactaatatctttcaagtgcctgaggctcccaaagaagttgttcctgaaaagaaagtgccagtgcctcctcctaaaaagcctgaagtgccacccacaaaaggtagacaccctcttgttgctgtgtttgatattgtttgtttgtctttactttgtctaataatgaaaatactaatatctttaaagtcccagaggtgccaaaggcagctgtcccagaaaagaaggtgcctgaagctattcctcccaaaccggaaagtcctccccctgaaggtaatgccaaagctatacaaactataggagaaaaataactgttattttaactaggaaattacatgttaaaaatcctactacataaagatgatataattctaaagaaaacaaatgtcaatcactatccaaaatatcttggtgggtgtttatatgcaaaaggcatccatcgttttcaccttttctaaacacaaattacaaatatctttgaagtgcctgaagtgctgccaccgaaggaagtggtcccagaaaagaaagtaccggtgcctcctgccaaaaagccagaagctccacctcctaa

SEQ ID NO: 2587 - DNA, 505 bp, Homo sapiens
  MAP TO CHR19.1; EXPRESSED IN FETAL LIVER, SIGNAL = 0.63; EXPRESSED IN LUNG, SIGNAL = 0.92; EXPRESSED IN HELA, SIGNAL = 1.4; EXPRESSED IN BRAIN, SIGNAL = 0.91; EXPRESSED IN HEART, SIGNAL = 0.65; EXPRESSED IN ADULT LIVER, SIGNAL = 1.1; EXPRESSED IN BONE MARROW, SIGNAL = 0.95; EXPRESSED IN PLACENTA, SIGNAL = 1.2; SWISSPROT HIT: Q28120, EVALUE 7.00e-16; NT HIT: gi8923091, EVALUE 0.00e+00; EST_HUMAN HIT: BG763451.1, EVALUE 0.00e+00
gcgtggagtagagtgggaagacgagagggatgacaaatgtccaggcaagggagggtgggggcttgggaaaaggtggaggtagcccactaccctccccgactcctgctcctcacctgttttttggccctgctcagctccaggtcaagtgcttgggccagctccagcagcagggcacagggcacagccgaatccgtggcccctacaaagggggtcgatccgggtgggaagagcttcgagtcataatggcaggcaagggtgaggtgacgggcagcccttgggtccagtgtggccaccacattgccaaagtccactggccccaggggtgttgaggctgtgaagggatccagctccacgtgccaacctgctgtcagggaccgcagcgtggcctccaggaactagcggcaagagagaggtgggagggtggacggggactggggaggaggtggggagaagggccacgtgacctgagccatgcagagcagatgggttgacactaaagccccac

SEQ ID NO: 2588 - DNA, 599 bp, Homo sapiens
  MAP TO CHR7.1; EXPRESSED IN FETAL LIVER, SIGNAL = 0.9; EXPRESSED IN HELA, SIGNAL = 0.95; EXPRESSED IN BRAIN, SIGNAL = 0.89; EXPRESSED IN HEART, SIGNAL = 0.65; SWISSPROT HIT: P03267, EVALUE 7.70e+00; NT HIT: D88447.1, EVALUE 5.70e-01; EST_HUMAN HIT: BF679279.1, EVALUE 0.00e+00
tcccttttggaagaggtaaggactagtgatctctttttcacttccctcctgaactatttttttcctgtctctgagacagtcttttgttcatctttgtctcctgtgttcctgaaaaaagaatgccttctttctcttcaattagtcagctgtcaacaagtgcttgttttctctgaagggtacttacttgtttcaacttcatttcctgctttctttctccccaaggtgattgaatcgcactttgataaatacattgttattaaagtttactagaggcaattgcaattgtagatgtttcaaattaatgtctttcattatactgagtcaaaaagttaatgaattgaaaaattattctttttgtaggtattcagcagcattactcagtcaacatgtcctgacggtgtgtggagtgaccttctagattttgtggggagtgatgatggcaatatttcctggagaagcacgctcaataaaggagaaatgggattaacacaactgtgacaaaactgcactaagtgattggaaagtaggaagcatgtgggcaaatgaataggctactggcctgattaaaccaggaaatctcaagcagcactggagttctg

SEQ ID NO: 2589 - DNA, 559 bp, Homo sapiens
  MAP TO CHR19.1; EXPRESSED IN ADULT LIVER, SIGNAL = 2.1; EXPRESSED IN BONE MARROW, SIGNAL = 2.5; EXPRESSED IN PLACENTA, SIGNAL = 2.4; EXPRESSED IN LUNG, SIGNAL = 1.4; EXPRESSED IN HELA, SIGNAL = 1.8; EXPRESSED IN BRAIN, SIGNAL = 2.1; EXPRESSED IN HEART, SIGNAL = 1.9; EST_HUMAN HIT: AV726545.1, EVALUE 3.00e-03; SWISSPROT HIT: P17861, EVALUE 1.80e+00; NT HIT: X60152.1, EVALUE 2.00e-03
atggatttggctcccctaacccagagcccatcaatttaaaataatacaaaccaccatttcagactagccccagcccaatattctattcctttccttaaaaatgtcaggcgattccagagcttgactctcacctttaaggtgaaacattctaactagtatgaaaaaactaatttacaaaaaggaaaaaaaaatctaaaagtcacagggaaataatgtggacaacaagaataaacttccatgggcccctaatgcattgctttgccaaccacaccctctggtcacagaactgttctgacagagccctctacattcagagccaccctgcctggtcacaagcagcagggagagagggtcttgtctccagcccagcacttgagcagcacatgaccttgactctaggcatctgctgctctctgccaacccctcttgccgagggaagatggcacaggacattcccgtgactgttgtctgacagtcagagaaaagatgtgaggctttaaacaagaattgcagctgggccttggggcctgtgagcagctcaaacacaggctactgccaa

SEQ ID NO: 2590 - DNA, 526 bp, Homo sapiens
  MAP TO AL139374.13; EXPRESSED IN HELA, SIGNAL = 3.7; EXPRESSED IN BRAIN, SIGNAL =   4; EXPRESSED IN HEART, SIGNAL = 2.1; EXPRESSED IN ADULT LIVER, SIGNAL = 5.7; EXPRESSED IN BONE MARROW, SIGNAL =   4; EXPRESSED IN PLACENTA, SIGNAL = 3.6; EXPRESSED IN FETAL LIVER, SIGNAL = 3.1; EST_HUMAN HIT: AI908802.1, EVALUE 0.00e+00; SWISSPROT HIT: Q29450, EVALUE 3.70e+00
gaaagagctgggatttgcacgaggggtctgcatttacaaaaccagtgttcttttcatctctatgctgctgttcctttggtggtgaaaatgattatctatcagtccccttgccctgccattttctctcaagcattgcctggctgagaatagttgcccaacagttgtgaatttccttccttccgtttcctccttctccgatctggccaagtttcttggctgcaggcatttacagactatcaaaattctcaaaacagttcaaaccagttctgtgtatgagcagaatatagaatctgtcataatgttggccccctgaaattatgtttttatacactatgcttttcaaattggggccaatcaactcgtcattcactgaaatattttcagcagagattacactgacacatggggatgcatatgtcacattttataggggaggttttaaaatatgatcattccactggcatcgattccttgttaaccaaagacgaggttatttagatgcattgagtgtggctcttttggatca

SEQ ID NO: 2591 - DNA, 514 bp, Homo sapiens
  MAP TO CHR2.1; EXPRESSED IN HELA, SIGNAL = 3.4; EXPRESSED IN FETAL LIVER, SIGNAL = 1.9; EXPRESSED IN LUNG, SIGNAL = 2.7; EXPRESSED IN BRAIN, SIGNAL = 1.9; EXPRESSED IN HEART, SIGNAL = 2.6; EXPRESSED IN BONE MARROW, SIGNAL = 1.6; EXPRESSED IN PLACENTA, SIGNAL = 2.3; EST_HUMAN HIT: AV695354.1, EVALUE 4.00e-70; SWISSPROT HIT: Q06278, EVALUE 1.00e-16; NT HIT: AF009468.1, EVALUE 1.00e-102
agtgtgttcaggacttggggtccagactagctataggatttttagaaacaagaaacttttcatggctggaggaatttgtggttctgctcccttgtccctgtcatgggtatgagggtatcacacatgtgttaccacgtgggcatgtgcacaggtctgtgactaatcaaagtgtttaaaaggaaactctctcttaaaattcaggtggtcagccgtgaattaagaatgccaatgtcgaatgtccacctgcgtggaacaagcacagaaactgtccctaatgcaaatatctctggaggttctgtggtggcagatctcaacggtttggcagtaaaggtaacagtcactgcagtggcgtccaaatcattaactccctcagggccaaatacgtgggtgggtggagctccaaagatgctgagagttaatccaactcatatctccttccccatcttgccctcagtcagtggtacagcacccagtggttctcctgtgctggaaatgccacctctttttctccctc

SEQ ID NO: 2592 - DNA, 510 bp, Homo sapiens
  MAP TO CHR1.1; EXPRESSED IN ADULT LIVER, SIGNAL = 0.39; EXPRESSED IN BRAIN, SIGNAL = 0.51; EXPRESSED IN HEART, SIGNAL = 0.46; EST_HUMAN HIT: BG221310.1, EVALUE 1.80e-01; SWISSPROT HIT: P94281, EVALUE 3.20e-01; NT HIT: AY044083.1, EVALUE 0.00e+00
gagaggagtgcatgtagggcttctggggggaaatgtgagtaatagcaaagagagccaaactcaagccaaatctcactctcagtccccctacccccccacccagtgggaagcaattaaaaataacagcacaaaacagcaaaataagcttaagaaaaaaaatgtgcacattttgggaaaaaataatgaaagcaaagaagctctataagccccacactcaagttcaatgaaaaagtattacaacatcaaaggagaaattgcaagccagccagaacccagatggcgggaaatccaagactggttcaagactctaaggcaagtgcaatggatcatacacttattattttaacagagaacaaagaagaaataatgagtgacaaaaaaggcactaaactattaaactgggtcttgtaaatgctgtagagcaacaagaaacatggagaagatgctaggaagaggcgacctgatgtagaagaaaaaagaactagcattaggcaagtgaaactagctggg

SEQ ID NO: 2593 - DNA, 536 bp, Homo sapiens
  MAP TO CHR5.1; EXPRESSED IN FETAL LIVER, SIGNAL = 0.67; EXPRESSED IN BRAIN, SIGNAL = 0.56; EXPRESSED IN BONE MARROW, SIGNAL = 0.55; EST_HUMAN HIT: AI871103.1, EVALUE 1.90e-01; SWISSPROT HIT: P97347, EVALUE 3.80e+00; NT HIT: gi6226515, EVALUE 2.00e+00
aagaccattccgagagttcgccacagggccaagatggccgcctgcctctccttcttagctctgggggtgccggaaggcagggtcaggccctgtggagatggagtggcgggaggtggctgtgacggtcctccgcagtccatagcctggccccacagaggggagaagaaaggatctcttttaattttcttctcaggcctccacctgacgaaggagaaatatcacccaacattgttatctctcagaaaatactctctggaatcataaaaagggaaatacagtgaagctagaccacgaaggctgccccttaaatcaggagcttctaaattatcacagtggcgctctctaattcctcggaatgaaaacattaaagatgacaatgtccctttaaatcaaatgccctgggagttgctgtaaagagtcagtgggcttttttttttcccttgtgaggattttttttttgtctcttttcaccttataataaaatataaatcataacttgtgggggcaggctctacagagcaagctgtgaacatgga

SEQ ID NO: 2594 - DNA, 559 bp, Homo sapiens
  MAP TO CHR11.1; EXPRESSED IN FETAL LIVER, SIGNAL = 0.51; EXPRESSED IN BRAIN, SIGNAL = 0.57; EXPRESSED IN BONE MARROW, SIGNAL = 0.47; EST_HUMAN HIT: BE935686.1, EVALUE 1.00e-103; SWISSPROT HIT: O32922, EVALUE 5.30e+00; NT HIT: gi14767293, EVALUE 1.00e-103
tgccagcacttctcattctggcttgatctccatgcaactgaaagcttacagtgttgaggggggttaatcagcagcggtgggtatttggacaaatcgcgtgctccagagaggtggggatgtggtgcacttggacattcagagacatggctttgtgttttacccctggaggcagacatctagtctgggtgaaaggtggggggtgctctgcaaaggagctgatgaccacagaagcggtgtgtggaccctgtagtgagaaccagcagttcctgaaggaggtggtgcacagcgtgctggacggccagggagttggctggctcaacatgaaaaaggtgcgccggctgctggagagcgagcagctgcgagtctttgtcctgagcaagctgaaccgcatggtgcagtcagaggacgatgcccggcaggacatcatcccggatgtggtcagtgttgggggtagggaatcggagtaactggagagagggatgtgaacaccacaggcaatttgccaacgctagcccctgggttattgttgcaggagatcagtcggaaggtgtacaaggga

SEQ ID NO: 2595 - DNA, 518 bp, Homo sapiens
  MAP TO CHR11.1; EXPRESSED IN BONE MARROW, SIGNAL = 0.54; EXPRESSED IN ADULT LIVER, SIGNAL = 0.87; EXPRESSED IN PLACENTA, SIGNAL = 1.2; EXPRESSED IN BRAIN, SIGNAL = 1.1; EXPRESSED IN LUNG, SIGNAL =   1; SWISSPROT HIT: O00213, EVALUE 2.00e-47; NT HIT: AF047835.1, EVALUE 0.00e+00; EST_HUMAN HIT: BG699532.1, EVALUE 0.00e+00
gctgcattgtgagctgagagctccagctcagagtacaggtgtatcaggcctttggggcccaagggtgccatctcaggctcctggctggcctcctccgccaaggtcaaggtcacattgcgattctggtcacggtgggccgtggcggcccgccggagctggttctggccctcttttagccacttggcattggcagggcctggctcaggcccaccaccctcccccatggcgctgcgcaggtccttgggtcccacagctgtggcctgcagcttggcgttgagcagctggttgtgggcagcgtgcagaggcaggggtaggctcagtgcggggcctccgtggctgttggcattaatggccgactggctcagtgatgatggaacagacatggccttggcagctcctgtggggtgcggaggggagatgctgttgagcctctggtccagaacagcagcatcactgcttctgccccagggctatgccctgtgcctcctcatctccctgcactaagcaggctagcaccc

SEQ ID NO: 2596 - DNA, 574 bp, Homo sapiens
  MAP TO CHR17.1; EXPRESSED IN LUNG, SIGNAL = 7.7; EXPRESSED IN FETAL LIVER, SIGNAL = 2.7; EXPRESSED IN BRAIN, SIGNAL = 3.5; EXPRESSED IN HEART, SIGNAL = 4.9; EXPRESSED IN ADULT LIVER, SIGNAL = 2.7; EXPRESSED IN BONE MARROW, SIGNAL = 3.7; SWISSPROT HIT: P51648, EVALUE 2.00e-39; NT HIT: U75287.1, EVALUE 0.00e+00; EST_HUMAN HIT: BE408899.1, EVALUE 1.00e-129
tgaagggtgcaaaaggagtctgaatggcaaacagctagtctgataatgccagttgttgtcactacaggtgtacctggtgtgagtgttctgacattcagggccaagtgtatcatacttactctgcaagattaactgtgattctcttataacagagtgaattcaatgtgtacagtcaggaagtcattactgtccttggggaaattgattttatgcttgagaatcttcctgaatgggttactgctaaaccagttaagaagaacgtgctcaccatgctggatgaggcctatattcagccacagcctctgggagtggtgctgataatcggagcttggaattaccccttcgttctcaccattcagccactgataggagccatcgctgcaggtctggtgccaccttatgtctatatacctttttagggaggcttattttctcatattaattggaaattaaggatagtggctaattaaatacatttacttggtgatttgcctttgtttacaccaccagtgtactgagaattcatacataccatacatatttttaaatgggctgctgaggagatttgtgtggc

SEQ ID NO: 2597 - DNA, 505 bp, Homo sapiens
  MAP TO CHR15.1; EXPRESSED IN ADULT LIVER, SIGNAL = 1.9; EXPRESSED IN BRAIN, SIGNAL = 2.1; EXPRESSED IN HEART, SIGNAL = 2.6; SWISSPROT HIT: P14866, EVALUE 3.00e-76; NT HIT: gi14755903, EVALUE 0.00e+00; EST_HUMAN HIT: BI833983.1, EVALUE 0.00e+00
ctgcttgtatggcaatgtggagaaggtgaaattcctgaaaagcaagccgggggcgccatggtggagatggctgatggctacgctgtggaccgggtcattacccacctcaacaacaacttcatgtttgggcagaagctgaatgtctgtgtctccaagcagccagccatcatgcccggtcagtcatacgggttggaagatgggtcttgcagttacaaagacttcagtgaatcccggaacaatcggttctccaccccagagcaggcagccaagaaccgcatccagcaccccagcaacgtgctgcacttcttcaacgccccgctggaggcgaccgaggagaacttctttgagatctatgatgagctgggagtgaagcggccatcttctgtgaaagtattctcaggcgaaagcgagcgcagctcctctggactgctggaatgggaatccaagagcgatgccctggagactccgggcttcctgaaccattacctgatgaaaaacccaatgg

SEQ ID NO: 2598 - DNA, 595 bp, Homo sapiens
  MAP TO CHR17.1; EXPRESSED IN BRAIN, SIGNAL = 0.59; EXPRESSED IN BONE MARROW, SIGNAL = 0.61; EXPRESSED IN HEART, SIGNAL = 0.55; EXPRESSED IN FETAL LIVER, SIGNAL = 0.46; EST_HUMAN HIT: BG820134.1, EVALUE 0.00e+00; SWISSPROT HIT: Q14451, EVALUE 1.30e-01
tttccaattcggtcaattcctgccctcttttcccccacaccaaaaggggaagttttaacagaaatccagtaagttcccatgtatcactatggggtgaggtggggaaggagaaggggccctttgctcccagatcttggagagggaaagtgaaaatggccacgcaggaagctagccagctgtgaacttgaccagatgtcagaagtgaaactgaccacaggcaagtcagaggctcgccaggagggccaggtcacaaccccacagctcccagccacccacgtggcctgggagacacacacacacacatacacaccacagagagagagagagagaatctggctccagatggcctagcaggaggcattcggcaggcctggcctggagttaggcaggcaggcccctcccttgtagctctcgtgggcaggtcctaacccaggctcctgacagcctggcttcgagccccgcctggcccaggcctgggagctcccagggctgtagggctcctggccctgggcctgtgcctgtctctgaggctcagcctcagcccctgctggttgtttggccaagtcctccggggagactggcttgtggtcactga

SEQ ID NO: 2599 - DNA, 588 bp, Homo sapiens
  MAP TO CHR19.1; EXPRESSED IN PLACENTA, SIGNAL = 1.5; EXPRESSED IN LUNG, SIGNAL = 0.93; EXPRESSED IN BRAIN, SIGNAL = 1.6; EXPRESSED IN HEART, SIGNAL = 1.4; EXPRESSED IN BONE MARROW, SIGNAL = 1.6; EST_HUMAN HIT: BF672054.1, EVALUE 1.00e-126; SWISSPROT HIT: P16374, EVALUE 2.00e-71; NT HIT: gi4507974, EVALUE 5.00e-20
tgcctactcatactcctcatgcttctcttatttgcaatacacataaaccgtatgaatgtaaggaatgtgggaaatactttagtcgtagtgcaaatcttattcagcatcagagtattcatactggagagaaaccctttgaatgtaaggagtgtgggaaagcctttcgacttcacatacaatttactcgacatcagaaatttcatactggtgagaaaccttttgaatgtaacgaatgtggaaaggcctttagtcttcttaccctgcttaatcgccataagaacattcacacaggtgagaaactgtttgaatgtaaggaatgtgggaagtcctttaatcgtagctcaaaccttgttcaacatcagagtattcattctggtgtaaaaccatatgaatgtaaggagtgtgggaaaggctttaatcgtggtgcacaccttattcagcatcagaaaattcattccaatgagaaaccctttgtatgtaaggaatgtgggatggcctttcgatatcattaccaacttattgaacattgccaaattcatactggtgagaaaccctttgaatgtaaagaatgtggaaaggcgtttactc

SEQ ID NO: 2600 - DNA, 514 bp, Homo sapiens
  MAP TO CHR17.1; EXPRESSED IN FETAL LIVER, SIGNAL = 1.2; EXPRESSED IN HELA, SIGNAL =   2; EXPRESSED IN BRAIN, SIGNAL = 1.1; EXPRESSED IN HEART, SIGNAL =   1; EXPRESSED IN BONE MARROW, SIGNAL = 1.3; EXPRESSED IN ADULT LIVER, SIGNAL = 1.3; EST_HUMAN HIT: AW972076.1, EVALUE 0.00e+00; NT HIT: gi5729954, EVALUE 0.00e+00
taaccacgtcgtgttcttgcggctccgggagggactgaaaaaccagagtccaaccgaagctgagaaaccagcttcttcgtcgttgccttcgtcgccgccgccgcagttgctgacgagaaacgtggtctttggcctcggcggagagcttttcctgtgggacggagaagacagctccttcttagtcgttcgccttcggggccccagcggcggcggcgaagagcccgccctgtcccagtaccaggtaatgccaggccgatcttggaagtgaccctcaccgggatcggaaccagtcttttttgttccttgctcctcttggctgtttttcatcttgtggcaggcgttccagcggattgactccgacgctgccatacgcggtcgcggggactcaggctctctcgatgcttacggcctggaggcctgggaggaaggaaagggtcattgaatattcaataaaaatactagtgacggatgagtgctctggagaaaaacaaagcgggctaaaggggttgagaac

SEQ ID NO: 2601 - DNA, 593 bp, Homo sapiens
  MAP TO CHR1.1; EXPRESSED IN HELA, SIGNAL = 4.9; EXPRESSED IN BRAIN, SIGNAL = 3.1; EXPRESSED IN HEART, SIGNAL = 3.6; EXPRESSED IN ADULT LIVER, SIGNAL = 1.4; EXPRESSED IN BONE MARROW, SIGNAL = 2.7; EXPRESSED IN FETAL LIVER, SIGNAL = 3.8; EXPRESSED IN LUNG, SIGNAL = 4.2; EST_HUMAN HIT: BE277773.1, EVALUE 1.00e-121; SWISSPROT HIT: P23249, EVALUE 2.00e-50; NT HIT: gi14739255, EVALUE 1.00e-121
taattaaaggggtaccgggctggggaaatggggaagaatggtttccggagtggggtggtgggtgctgagaagccagcctgggaaagcattcaggtttggtagttgggtgcctggatatgacccctgcctggcctgacacctcccaggttggtctcggcccagtttcccattgatcacttcacacacatcttcatcgatgaggctggccactgcatggagcctgagagtctggtagctatagcaggtgagggactcaggtggggctgcaggtatacaccctgtgtgggtcagagaggttgcaccacttacctttcttcccacacctcttctgcttcccagggctgatggaagtaaaggaaacaggtgatccaggagggcagctggtgctggcaggagaccctcggcagctggggcctgtgctgcgttccccactgacccagaagcatggactgggatactcactgctggagcggctgctcacctacaactccctgtacaagaagggccctgatggctatgacccccagttcataaccaagctgctccgcaactacaggtattcccacgcccttgcctcccctgccatatcctat

SEQ ID NO: 2602 - DNA, 523 bp, Homo sapiens
  MAP TO CHR19.1; EXPRESSED IN PLACENTA, SIGNAL = 2.6; EXPRESSED IN HELA, SIGNAL =   2; EXPRESSED IN LUNG, SIGNAL = 2.2; EXPRESSED IN BRAIN, SIGNAL = 2.8; EXPRESSED IN ADULT LIVER, SIGNAL =   3; EXPRESSED IN BONE MARROW, SIGNAL = 2.7; NT HIT: gi4503680, EVALUE 0.00e+00; EST_HUMAN HIT: AA327385.1, EVALUE 2.00e-32; SWISSPROT HIT: O88799, EVALUE 2.00e-16
cagctgtactgtccccagtggagccctcctgcgaaggcatgcagtgcgcagccgggcagcgctgccaggtggtaggcgggaaggccgggtgtgtggcggagtccaccgctgtctgccgcgcccagggcgacccccattacaccaccttcgacggccgtcgctacgacatgatgggcacctgttcgtacacgatggtggagctgtgcagcgaggacgacaccctgcccgccttcagcgtggaggccaagaacgagcaccggggcagccgccgcgtctcctacgtgggcctcgtcactgtgcgcgcctacagccactctgtgtcgctgacccgcggtgaagttggcttcgtcctggtgagtacctgggggctttggggggttaacatccatgagctgcgggtccgaaggcggaggcaaagcccaatggccgacctcaaaccagggtgcagggaagtgggccatggagttggagggtggggaggcggatttgaaaatcagtagcaggaccttagaaccctgccctc

SEQ ID NO: 2603 - DNA, 576 bp, Homo sapiens
  MAP TO CHRX.1; EXPRESSED IN ADULT LIVER, SIGNAL =   5; EXPRESSED IN BONE MARROW, SIGNAL = 4.9; EXPRESSED IN PLACENTA, SIGNAL = 4.7; EXPRESSED IN FETAL LIVER, SIGNAL = 4.6; EXPRESSED IN LUNG, SIGNAL =   2; EXPRESSED IN HELA, SIGNAL = 4.5; EXPRESSED IN BRAIN, SIGNAL = 4.6; EXPRESSED IN HEART, SIGNAL = 2.2; NT HIT: D64033.1, EVALUE 5.50e-01; EST_HUMAN HIT: BG259499.1, EVALUE 2.00e-01
tggggaattggagaaagatgtgtttggttttgttttctttcaacaggactactccctcatttcctagaaaactcttgagtccttaacagcaaggccacaaggagtgaaaaggctatctggggtacaatacgctggcttggaagtgtcgaggggaacaaaataaagagatgtctagactcaaaggagcacaccagttcataattatagaattagctgattgcactgtgaccggagaaaatactctgaatgcattcagggaactagcaacggtctacaaagctggagtggattttcaggtctatttgtacggaattaaagctacagttgttctatatcatcttacttttaagaagcagcagatattcaatttacatcagtagttaccttgacagtagttacttttgagttctgtttttcctgattattaggcttcctctggcattttgttctttataattctttatcagcacctcctgcagtttcctgtgacagtttatctagtgcatatgattagttgtatccttcaacagttttcaatgagtttagattaagttcactttccccacgaagtcagaa

SEQ ID NO: 2604 - DNA, 599 bp, Homo sapiens
  MAP TO CHR14.1; EXPRESSED IN PLACENTA, SIGNAL = 3.6; EXPRESSED IN LUNG, SIGNAL =  18; EXPRESSED IN HELA, SIGNAL = 0.76; EXPRESSED IN BRAIN, SIGNAL = 0.78; EXPRESSED IN HEART, SIGNAL = 1.2; SWISSPROT HIT: P01764, EVALUE 5.00e-43; NT HIT: M99659.1, EVALUE 0.00e+00; EST_HUMAN HIT: AW402433.1, EVALUE 1.00e-110
agaccatcacaggaagccagccctcagcagcacctgcacctgccctggagacagccccgtgcacagtgtccctggcgccccctggtggtcctggggacccctgcagggaggtttgtgtccgggctcacactgacttcccctcactgtgtctctcgcacagtaatacacggccgtgtcctcggctctcaggctgttcatttgcagataggtgatgcttttggaatcatctcttgagattgtgaatctgcctttcacagacgtggtctattctgttgtcccaccattagctttgtttctaatgaaacctacccactccagccccttcccgggagcctggcggacccagctcatgtagtagtcactgaaggtgaatccagaggctgcacaggagagtctcagggaccccccaggctggaccaagcctcccccggactccaccagctgcacctcacactggacacctgcaaacaaaaagaaaccctggtcagaaactgccacacaaatccactgtttctctcactcttatccactcacactcaatttcaatagttctcaatgaattaccttttaaaatagcggcaagaaaaacccagctcagc

SEQ ID NO: 2605 - DNA, 569 bp, Homo sapiens
  MAP TO CHR19.1; EXPRESSED IN BRAIN, SIGNAL = 1.1; EXPRESSED IN BONE MARROW, SIGNAL = 1.1; EXPRESSED IN HEART, SIGNAL = 0.77; EXPRESSED IN ADULT LIVER, SIGNAL = 0.99; EXPRESSED IN FETAL LIVER, SIGNAL = 0.95; EXPRESSED IN LUNG, SIGNAL =   1; SWISSPROT HIT: Q04725, EVALUE 4.00e-44; NT HIT: gi14764152, EVALUE 0.00e+00; EST_HUMAN HIT: BG330349.1, EVALUE 0.00e+00
acaatcaggacagggtttgcaggccaaccatgggtggggcttataggtaaaggatggagcttatagtcagatggggcagtgtttgcaggtcaaaggggcggggctcaccagccaatcagggtagggcttgcaggctaatcaggatgaggctacattgggctccagagacccccacgttgagctaggctcctagagacctcacctgggaccaacccccagcccctgcttctctccccgaccccagaaccgagacaactacattcgttcctgcaagttgctgccggatggccggagtctgatcgtgggcggtgaggccagcaccttgtccatttgggacctggcggcgcccaccccccgtatcaaggccgagctgacttcctcagccccagcctgctacgccctggccgtcagccccgacgccaaggtttgcttctcctgctgcagcgatggcaacattgtggtctgggacctgcagaatcagactatggtcaggtgggtggcaggtgcgctgggaccttgggcaagcccccggccgctctcggtgcagggggagtggaggagtgtgacct

SEQ ID NO: 2606 - DNA, 586 bp, Homo sapiens
  MAP TO CHR19.1; EXPRESSED IN FETAL LIVER, SIGNAL = 0.67; EXPRESSED IN HELA, SIGNAL = 0.49; EXPRESSED IN BRAIN, SIGNAL = 0.73; EXPRESSED IN BONE MARROW, SIGNAL = 0.77; EXPRESSED IN HEART, SIGNAL = 0.59; EST_HUMAN HIT: BE810962.1, EVALUE 1.00e-21; SWISSPROT HIT: O14581, EVALUE 2.00e-62; NT HIT: AF179825.1, EVALUE 1.00e-128
tttgtgctttccacttgctgatggcattctcaaaacacaggaggtgatctgagtgtaagacaaaatgattccagacagaggaacaccaccaaatatgcaagctgcaaaatatatcaggatgttattgatgagggtgtctgaacaggtgagttggatgacctgagccagttcacagaagaagagcgggatttccaggtctgtgcagaaggacagcctcaacaccatcaggctgagaagaagggcattcacaacactagtcaacagagagagaagaatcagcaggccacagaggcgggggttcatgatgactgtgtatctaagggggtgacaaatggccacatagcggtcataggccattgctgcaaggagacaattttccaagccagcaaaaaacaagacaaagcagatctgggtgaggcagcctgagtacgtgatgctccgattctgagcttggatgttcaccagcatctttgggatcgtggttgtgcttaaacaaatgtccaaaaaggagagattggagaggaagaagtacatgggggtgtggaggtgagagtcagagatgacagccaagaggatgagcaggttc

SEQ ID NO: 2607 - DNA, 535 bp, Homo sapiens
  MAP TO CHR3.1; EXPRESSED IN HELA, SIGNAL = 1.7; EXPRESSED IN BRAIN, SIGNAL =   1; EXPRESSED IN BONE MARROW, SIGNAL = 1.1; EXPRESSED IN FETAL LIVER, SIGNAL = 1.6; EXPRESSED IN LUNG, SIGNAL = 1.3; EST_HUMAN HIT: C04097.1, EVALUE 6.00e-97; SWISSPROT HIT: P08590, EVALUE 5.00e-29; NT HIT: M24245.1, EVALUE 1.00e-101
tctgttgtctgccattgaggctccctaattatgtaactctctccatttcaccaatgggtcacaggcctggggggcaacagagtggtttctcccaggatgtccctggaaggagttggggtaggggaggaggctgccctcacccagcgtggccagcacgtggcgaagctcagcacccatgacagtgccattgccctccttgtcgaagacccgcagcccctccacgaagtcctcataggtgcctgtgtccttgttcttggaaatgtgctggagcataggcaggaaagtttcaaagtccatcatcttggtattgagctctgcagagaaatggtcccaggttccagggtctaaggctggggtgggcacacccctcccccatgcctgataatgaggagctatccccacctctcacacagttctacaacagtctacaccagttctcacagcagtctacaccagtttgccatttaaaagcaaactaccatcgcgaggcactttacagtctactgagcaatgcactgtttccatagccctttgc

SEQ ID NO: 2608 - DNA, 538 bp, Homo sapiens
  MAP TO CHR19.1; EXPRESSED IN FETAL LIVER, SIGNAL = 1.6; EXPRESSED IN LUNG, SIGNAL = 1.4; EXPRESSED IN PLACENTA, SIGNAL = 2.9; EXPRESSED IN HELA, SIGNAL = 2.1; EXPRESSED IN BRAIN, SIGNAL = 1.3; EXPRESSED IN ADULT LIVER, SIGNAL =   3; EXPRESSED IN BONE MARROW, SIGNAL = 1.3; EST_HUMAN HIT: BG413485.1, EVALUE 0.00e+00; SWISSPROT HIT: P18616, EVALUE 2.00e-01; NT HIT: Y12790.1, EVALUE 1.00e-113
tccctccatttggaactcactcaccccagtcactttccttagcttactcctattcatttgtcaggtcttggctcagatttctccttccccaggcagccctccctgattccccgctaaatcaggtaagatgcctcctttgggttcacatagctccccttgccctctaggcttcctcaatcccagctctgcccactctgggctgtcaccatctggggacaggtctgtctccagtttagggggtaccaaggagaggatgcctgctcacccaccaccctgggccccacgtaccgtgacactgcggatgacacctgtctgtcccaccacctgtgtatccaggtaggtgtcccgcaccttcacctgaatgtcagtggttacccagtcgctggagttctgctcgatgcctgagcctggcgtgtgtgggttgtagccaccaggggagggagctccaggtgtcataggactgtagccaacggggctcgggctggggctagcctgcaggggaaagaggaagtgtcattgggaatagtcatctggcctg

SEQ ID NO: 2609 - DNA, 578 bp, Homo sapiens
  MAP TO CHR7.1; EXPRESSED IN FETAL LIVER, SIGNAL = 1.2; EXPRESSED IN BRAIN, SIGNAL = 1.2; EXPRESSED IN LUNG, SIGNAL = 1.1; EXPRESSED IN HEART, SIGNAL = 0.75; EXPRESSED IN BONE MARROW, SIGNAL = 1.4; EST_HUMAN HIT: AI925826.1, EVALUE 0.00e+00; SWISSPROT HIT: P08476, EVALUE 2.00e-70; NT HIT: X57579.1, EVALUE 0.00e+00
tcttcttcttcttgcccaggagaaccaagctggcgccactctcctggcactgctcacaggcaatccgaacgtccagggagctcttgccctggtccagcaaccgctggatgctgctggagacagggaagacatgccaggtgctcttccgagcgtctactactttttcagagagcaacagttcactcctctccccctttaagcccacttcctcggcctcttcccctgtgtccaagctgccctgcgggtgcttctgctgctggaagaggcggatggtgactttggtcctggtcctgttggccttggggacttttaggaagagccagacttctgcacgctccaccactgacaggtcactgccttccttggaaatctcgaagtgcagcgtcttcctggctgttcctgaagatgaaagacagcataagagaaaacaggcacacctgttaattccaacatttacatgcactcgtaaatttcaggcaagcaggagtcttctgtgacagaccctcttgaataggggtcaacaaatgacagcccatgggctgaaactgtttctgtactgcctgcaaactaagaatggc

SEQ ID NO: 2610 - DNA, 578 bp, Homo sapiens
  MAP TO CHR5.1; EXPRESSED IN HEART, SIGNAL = 0.79; EXPRESSED IN BONE MARROW, SIGNAL = 1.6; EXPRESSED IN FETAL LIVER, SIGNAL = 1.6; EXPRESSED IN BRAIN, SIGNAL = 1.5; EXPRESSED IN LUNG, SIGNAL = 1.7; SWISSPROT HIT: P53746, EVALUE 3.20e+00; NT HIT: gi16158940, EVALUE 0.00e+00; EST_HUMAN HIT: BE263103.1, EVALUE 0.00e+00
ggcatggaagctcttgtaccacaggctgcttgctcaacccccgtctctcttcagagctttcaagccaccggtgggacgcagcagatgacatccaccgctccctcatggttgaccatgtgactgaggtcagtcagtggatggtaggagttaaaagattaattgcagaaaagaggagtctgttttcagaggaggcagccaatgaagagaaatctgcagccacagctgagaagaaccataccataccaggcttccagcaggcttcataatcctcggttccccagactcaccggacaccatctcctatgccttggagaccttctgtcacttggctcccttcttaccaccaccaagactgtcccactgggcctgacccacctatgagggaagaagtcccacctgggccagagggagttcatgtgttactcataacatgcatttcaataaaaacatctctgcggtgggccttgggtaggagagatgaacccttccggtgccaagctagtcccctctggtgtcctcgactgccctgctccctgtgtatctgcaaacctctgttctcccttctccattcatcagga

SEQ ID NO: 2611 - DNA, 511 bp, Homo sapiens
  MAP TO CHR15.1; EXPRESSED IN HELA, SIGNAL = 0.58; EXPRESSED IN BRAIN, SIGNAL = 0.77; EXPRESSED IN ADULT LIVER, SIGNAL = 0.76; SWISSPROT HIT: Q15620, EVALUE 1.00e-58; NT HIT: AF282279.1, EVALUE 5.00e-32; EST_HUMAN HIT: AI962273.1, EVALUE 6.00e-17
caaacagaatatccctgtcttgtgactatacacacagacacatactattacttatcaaagtttcctactactcagggcttttcttagggcaaatttaacatctttgttcctcaggctgtagattaaggggttcaacatgggaaccacatttgtataaaagacagaagataattttctcttatccatggacccagcagaagatgggttgagatacataaatgcacctgatccaaagaacagagaaacagcaattatatgggaactgcaagtgctgaaagctttggacctgccctccttggaactgatatggaggatgctggagaggatgaaaccataagagataaagatggtaacagtgggcacaatgatgttgatgccaaccacagtgaaaaccaccagctcattgatgtaggtgctggtgcaggagagctggagcagagggaggatgtcacagaagtagtgatcgatggtgttcgcatcacagaaagtcagtctcagcatgcatccagtg

SEQ ID NO: 2612 - DNA, 545 bp, Homo sapiens
  MAP TO CHR5.1; EXPRESSED IN FETAL LIVER, SIGNAL =  10; EXPRESSED IN HELA, SIGNAL = 5.8; EXPRESSED IN LUNG, SIGNAL = 7.1; EXPRESSED IN BRAIN, SIGNAL = 9.6; EXPRESSED IN HEART, SIGNAL = 9.5; EXPRESSED IN ADULT LIVER, SIGNAL =  11; EXPRESSED IN BONE MARROW, SIGNAL =  12; EST_HUMAN HIT: BE833911.1, EVALUE 4.00e-95; SWISSPROT HIT: Q60716, EVALUE 1.00e-29; NT HIT: gi4758867, EVALUE 3.00e-95
ccaaactcctggtctcaagctatcctttggccccccagagttctcggattacaggcatgagccactgtgcatgcccacctgctgggacttttgttttcttctgtggtgtggtgggagggagcagctgctggccatgaggtgagtccagtgtctgcagacagccagactgggaccgaggattaggactcactcagctcagggcctgttactctgtgctttccagacaccccgtagacagaagaggcttttctgtaggtaccaccatggcaacagggccccacagctgctcattgcccccttcaaagaggaggacgagtgggacagcccgcacatcgtcaggtactacgatgtcatgtctgatgaggaaatcgagaggatcaaggagatcgcaaaacctaaagtaggtgtcactgtaggtccttctcgggtcactgaagggggaaggtcctttttctcatccctagcactatgggtggttggtttgcccatctagccaccctttatccatatctagcatgggcctaccgtggggatacagagatgct

SEQ ID NO: 2613 - DNA, 549 bp, Homo sapiens
  MAP TO CHR19.1; EXPRESSED IN HEART, SIGNAL = 1.3; EXPRESSED IN ADULT LIVER, SIGNAL = 1.6; EXPRESSED IN PLACENTA, SIGNAL = 1.6; EXPRESSED IN FETAL LIVER, SIGNAL = 1.5; EXPRESSED IN LUNG, SIGNAL = 1.2; EXPRESSED IN HELA, SIGNAL = 2.7; EXPRESSED IN BRAIN, SIGNAL = 1.6; EST_HUMAN HIT: BI907306.1, EVALUE 0.00e+00; SWISSPROT HIT: P74745, EVALUE 1.00e-02; NT HIT: AF305731.1, EVALUE 0.00e+00
ccctcagacctaggagtcccagctcccagccaccatgccccactcaccgagcaccccccgaaccacagcatctctgcatgcagcaccatgagtccaatgccagttcctgccagcaccagtgcccagccggccagagacttctcctgctccagcaagcgctttcggcgtctcaaggcccccaggccaagcaccagatccccgcccatggcccccggggtcttggggctcagccagcttcctgcccagggtcccccacctcgcagcacgcacagggcagccactgtggcttgcaggtcgtcagcctgctctgctggctctgggacttttgctctgaggcacagcagagccctgtgccctctggggagtggtgacggccaggcagggcggggaggggcaggggaggccccagggtagggggaggctccccagctcccccttttgagaataaggaggggctagggtgtgtcttggggcagagcaagaaagagacgtccatccacgtggataaagacacacacagacacacgatgggctttgtcacacacaatg

SEQ ID NO: 2614 - DNA, 503 bp, Homo sapiens
  MAP TO CHR7.1; EXPRESSED IN FETAL LIVER, SIGNAL = 0.6; EXPRESSED IN LUNG, SIGNAL = 0.93; EXPRESSED IN BRAIN, SIGNAL = 0.49; EXPRESSED IN HEART, SIGNAL = 0.91; EXPRESSED IN BONE MARROW, SIGNAL = 0.55; EST_HUMAN HIT: BG205092.1, EVALUE 2.00e-50; SWISSPROT HIT: P08581, EVALUE 4.00e-13; NT HIT: gi14752543, EVALUE 8.00e-83
acccagttcaatctgccttgtttccgttaattctatcagtctagcaacaatagttaagttcggttttctttgtatttttttcagaggtgaaatatttattttgtgtaattcggtgaataaaatacaaatgcatttcttaagcttatgaaatatgcattttaaaaatattttcaagttaaataagttgtttccaaagaacagttacccatgaacttccatttgatgttgactgtgcctctgacctgtaatcagtgcaggtgattaaattgaatccctctcttacagtacttggtggaaagaacctctcaacattgtcagttttctattttgctttgccagtggtgggagcacaataacaggtgttgggaaaaacctgaattcagttagtgtcccgagaatggtcataaatgtgcatgaagcaggaaggaactttacagtggtaagtcctttgagcaatggttctactcagagctctgcatctttgcctctaaccatgtggcttt

SEQ ID NO: 2615 - DNA, 558 bp, Homo sapiens
  MAP TO CHR17.1; EXPRESSED IN FETAL LIVER, SIGNAL = 0.69; EXPRESSED IN LUNG, SIGNAL = 0.7; EXPRESSED IN BRAIN, SIGNAL = 0.61; EXPRESSED IN HEART, SIGNAL = 0.68; EXPRESSED IN BONE MARROW, SIGNAL = 0.88; EST_HUMAN HIT: BE736042.1, EVALUE 7.80e-01; SWISSPROT HIT: P17140, EVALUE 1.20e-01
aggaatgccactccgtgtaggtgggagagttccctagctgtctcccctctcgaggactggcccagagtgaggcttgtatccagatgtacactgcctactccccagggcaccaggctctgttttctgcaagggggacctggggacagccacctaacatcatgagaaaagcactgtggaaccctggcatcccagccaggggtccctggcctctagtccccctggtaccagccgccacagaaacagctcggctttcctcaagcactcaggagccaggtttccctggtcttggcttggcatagctgcctcttcttcactccaagaaagccccgcagaggccctccgtgggcaggcttggcagtgcagctggctgaggagggggccagcatggccaccttcagagcaggttaatgggctttgctcagccccaaattgctctgctggaggctggaagcagggagtgatgggcagataggaggtgcctggtgaagggaaggggcacccagcagtgctgtgatgccagcccggtgccctgcttgccgctatgcatgttctctgcca

SEQ ID NO: 2616 - DNA, 578 bp, Homo sapiens
  MAP TO CHR7.1; EXPRESSED IN BRAIN, SIGNAL = 0.31; EXPRESSED IN BONE MARROW, SIGNAL = 0.39; EST_HUMAN HIT: BF732311.1, EVALUE 0.00e+00; SWISSPROT HIT: Q9NRM2, EVALUE 9.00e-22; NT HIT: gi13630377, EVALUE 0.00e+00
tcaagcagaggctaagtggccagcggacaactccagaggcaactctggagggtgggaggtccacgatcttggtttaccaaatctggatagtagatttggtaaggttgatgtcagccagtaaaagtcaaagtgaaagcaatcagaagttgtctccagtatagcctttgcaaaatgctatgaaattgttggcaaggatacctgacaaaattatagtaaatgtgtacattcagctacctggacactgtattagcttggtaatttaatactatgtatctgtggttgttttcaggtattattttccaacctatgaaaatgacactctcctgtgtacactatctgacagtgaaagtgacctgacagctcaggaacaaaatgaaaatgttcccatcatcagtgaagatacatctaaactgtatgctttgaaacaaagcagtattttgaaccagttgctactataagagtacttgaaaacctagaagaaactaccacagaagcaatttttcatgtttttctcctatgagacagatatgaaagaacaatttaaatttgaacatcaacaaaagattggtccttggtga

SEQ ID NO: 2617 - DNA, 521 bp, Homo sapiens
  MAP TO CHR11.1; EXPRESSED IN LUNG, SIGNAL = 0.93; EXPRESSED IN HELA, SIGNAL = 1.1; EXPRESSED IN BRAIN, SIGNAL = 0.95; EXPRESSED IN HEART, SIGNAL = 0.91; EXPRESSED IN BONE MARROW, SIGNAL = 0.92; NT HIT: AF282286.1, EVALUE 2.00e-49; EST_HUMAN HIT: AI239808.1, EVALUE 5.00e-08; SWISSPROT HIT: Q9GZM6, EVALUE 6.00e-34
gcagccaacatgtgacattcagatatgacaagaacaaggaagaagtagagctgagtcatgcatgctgggtaggagataatattcctctctgacacaaaattcaccagcatttttggggtaatgacagaagactggcagagatcaatgaaggacagactgctgaggaaatggtacatgggggtgtgcaggtgagaactgaaccctattagagtgatcatgctcaggttgcccaccactgtgaccacatagattcccaggaagaggaggaaaagaggcagctggagctctggtttgtctgttagcccagcgagattaaattcagtcaccgtggaatgatttccttttaccattttctctggaaattttatgtagaaagagaagaagaaaatttgagttaggtattcattatcccactaacacgataaaatgtgaaacaaaattcaagtttttcaactaggtagttgcagttctctgcctgttcctcatgttagcagtaaaagaccccaggatccctgaaatat

SEQ ID NO: 2618 - DNA, 511 bp, Homo sapiens
  MAP TO CHRX.1; EXPRESSED IN PLACENTA, SIGNAL =   2; EXPRESSED IN BRAIN, SIGNAL =   2; EXPRESSED IN LUNG, SIGNAL = 2.3; EXPRESSED IN HEART, SIGNAL = 1.4; EXPRESSED IN ADULT LIVER, SIGNAL = 1.3; SWISSPROT HIT: P11413, EVALUE 3.00e-52; NT HIT: X55448.1, EVALUE 0.00e+00; EST_HUMAN HIT: BG675121.1, EVALUE 0.00e+00
atagcccacaggtatgcaggggccggcagctgggcctcacctgcgcacgaagtgcatctggctcccgcagaagacgtccaggatgaggcgctcgtaggcgtcagggagcttcacgttctgtgagggagagagtgtcttgctgatgccactgcctgccaccatgtggagtcccccgggcccaggccgcccaccctccacactgctccttctctgtagggcaccttgtatctgttgccgtaggtcaggtccagctccgactcctcggggttgaagaacatgcccggcttcttggtcatcatcttggtgtacacggcctcgttgggctgcacgcggatcaccagctcgttgcgcttgcactgctggtggaagatgtcgccggccacatcatggaactgcagcctcacctcggccttgcgctcgttcagggccttgccgcagcgcaggatgaagggcacccctacgtggcggaaagggcagcctcagcaccagctctctcagggtgtggaccagt

SEQ ID NO: 2619 - DNA, 583 bp, Homo sapiens
  MAP TO CHR8.1; EXPRESSED IN HEART, SIGNAL = 0.46; EXPRESSED IN BONE MARROW, SIGNAL = 0.63; EXPRESSED IN FETAL LIVER, SIGNAL = 0.63; EXPRESSED IN BRAIN, SIGNAL = 0.55; SWISSPROT HIT: Q99795, EVALUE 3.30e+00; NT HIT: AF285605.1, EVALUE 3.00e-61; EST_HUMAN HIT: BE834867.1, EVALUE 5.30e-02
tgcttgagccagtattgttgtgaagaggaaaagaagcattaagaccacttaaaatatttttaagacttgtccaatttaacaaaaggtcaccattaacactgtctttggcatcactgggcataagtgaaatgtctgaatcatgtgcaagtacttgagaagtgtctctaatttctgctaaactgtgctctgtctgtccactgtatgtttcaggtatagaaatgtttccattttgtacatttccataggagttagaaatatttgagatgaaaggatttatctctgaatttagtgcattgcataaacagttttcttgaacaaatggatctacaggtttcttgaaatgcacaaaggtgacagtagcatcttttccttttccaaatcttttggccactgtacagttattcagagagcatgtcctttctgtggaaataataaggaagacaaatttgaaaaaaagtgtttctatagacaactattaatacaggtacattgtgtccagtaattttaattgaaagttcagctaataacctaatgatgattaaaatgtgttttcaacggaaaaagcaaagagagaaggggatga

SEQ ID NO: 2620 - DNA, 524 bp, Homo sapiens
  MAP TO CHR5.1; EXPRESSED IN FETAL LIVER, SIGNAL = 0.68; EXPRESSED IN HELA, SIGNAL = 0.6; EXPRESSED IN BRAIN, SIGNAL = 0.85; EXPRESSED IN HEART, SIGNAL = 0.61; EXPRESSED IN BONE MARROW, SIGNAL = 0.79; EST_HUMAN HIT: AI142278.1, EVALUE 0.00e+00; NT HIT: AB022083.1, EVALUE 8.00e-74; SWISSPROT HIT: P36618, EVALUE 3.80e-02
ggactctccacactgcttcccctggggcccggatccagtttcaggaagctccgccttcagagctgataagattgaccaaggtccccctgacaccagtgcctattaaaatgcagtccctactggagccttctgtaaaaattgaaaccaaagatgtcccctcactgtgctgccctcagatgcaggtattagacagcaggggagtctggttttcaaaactgcgcctgtgttgccccatagggtatatcagcagttcccaagtctaaactacaaaagtgaagtaatggaactgattcttttcagggtagcctgcacaggtatcacttctgatcgacttgtacatatagcagtaaaatacacgaacgccttcaaaattctcaagtatttttttaaaaatcaattttaaggcctactatttagatagaactaatttttgcgcacaaaaatagaagtattcttgatagacattttcctgatcctctagctagaaattggggcctttagtctccctgctctgttatgtggct

SEQ ID NO: 2621 - DNA, 578 bp, Homo sapiens
  MAP TO CHR7.1; EXPRESSED IN PLACENTA, SIGNAL =  41; EXPRESSED IN FETAL LIVER, SIGNAL =  61; EXPRESSED IN HELA, SIGNAL =  33; EXPRESSED IN LUNG, SIGNAL =  61; EXPRESSED IN BRAIN, SIGNAL =  51; EXPRESSED IN HEART, SIGNAL =  53; EXPRESSED IN BONE MARROW, SIGNAL =  66; EST_HUMAN HIT: AA451932.1, EVALUE 2.10e-01; NT HIT: Z46940.2, EVALUE 6.00e-04
cagctacttgggaggctgaggcaaggggatggtttggagaccggagtttgagccagcctgggcaacatagtgaggccccctgtctaaaataaataaatgaaacataaaaaataaatgaatagattttttctaaatcaaaaagcattattccatttttttctcactgtcattgaaattttttttggtaataaatggatttctgagcctgttttaaatgacagggtctgttgttcaaagccccactagcacggtaagccattaaaccagcagttgtgaagctgcattataacacagggacagtcactcagctcaacactttacattacaataggcaagcctctgtgaggcagctttgaaatcccagaactgtggtcaaactacggacctcctggaaggacaaagtgttctgtttgtgtagcacaagggtgtggcttttgtagctagtaaaataatctgaacacaaaggcctccagatcctgcagagcactctgcagtgaactgactcagcggaaagcggtgggaaaggaagctggttcttagatttcagaaccctccaaagctacacccacctcgcttag

SEQ ID NO: 2622 - DNA, 536 bp, Homo sapiens
  MAP TO CHR7.1; EXPRESSED IN FETAL LIVER, SIGNAL = 0.82; EXPRESSED IN HELA, SIGNAL = 1.1; EXPRESSED IN BRAIN, SIGNAL = 0.88; EXPRESSED IN ADULT LIVER, SIGNAL = 0.72; EXPRESSED IN BONE MARROW, SIGNAL = 0.95; EST_HUMAN HIT: AW008475.1, EVALUE 1.00e-116; SWISSPROT HIT: P09270, EVALUE 6.60e+00; NT HIT: gi14739833, EVALUE 3.00e-61
atgatttctttcgggtgtgcatcaactatgacatttactgacgtctgactttaaaatctgtgtttttcttaaaacaacatataaatacattaagaagataggtctgtgtgtttttacttctcattgctttaattaacttcattgttatttctatgcatatactgagcattcagttgaaatatgaagattagaattttgacaagaatcttgaagggccactcaccttcactctcacaccattctagaaatgcaaggactcgagcatttccctggcatgacatgtattcttctattaataaaggagccactgatgacaaagtggcaattgcatgcagttgtaattcttcatgctgtgctgcagaccagtcaattattttttgcttctcaggcttcttaacataggtaaacaaagccaaaataactttgccatcaattaatagctgtgagaaagaacaaaggatactttgttagaaacatagccaaaaatactttaaggcaattaaataaaaatttacattttgatgttttattgggga

SEQ ID NO: 2623 - DNA, 554 bp, Homo sapiens
  MAP TO CHR14.1; EXPRESSED IN BONE MARROW, SIGNAL = 0.72; EXPRESSED IN HELA, SIGNAL = 0.58; EXPRESSED IN BRAIN, SIGNAL = 0.55; EXPRESSED IN HEART, SIGNAL =   1; EXPRESSED IN ADULT LIVER, SIGNAL = 0.51; EST_HUMAN HIT: BG170481.1, EVALUE 7.80e-01; SWISSPROT HIT: P04945, EVALUE 4.10e-02; NT HIT: AE008684.1, EVALUE 2.00e-16
tctggacccaagacttgaccccttccagagcagcggcaaaggcaccccagcaaccaggcaaggagccatggagaggagactgggagctctcttggggcttttgtgggtccaggtttgctatgagttgggccgtcctagatgggggctgacaggggaagggagggaagggagagctgacacaaatctcctggactgtcctacagcctcataagtgtttctagggatattttacaggcttggaaactgcatcagtgattccttagtgacataatacatatttgcttttctctttccaagcaggggtgagacgagtgaaggtggagcagagtccttcagttccgagtctccaggagagaaccagctctactctgagatgcagtttttctacctctgtgaacaacgtgcagtggttccaacagaatcctgggttggcctcatcaatctgtttttcatggcttcatggatgaagcacagtggaaagttatggtcaaaaagaaactgaggagctctgtggtaccctacacatcacagccgcccaactgaaagactcaggc

SEQ ID NO: 2624 - DNA, 556 bp, Homo sapiens
  MAP TO CHR5.1; EXPRESSED IN BRAIN, SIGNAL = 1.7; EXPRESSED IN HEART, SIGNAL = 1.3; EXPRESSED IN ADULT LIVER, SIGNAL = 1.9; EXPRESSED IN BONE MARROW, SIGNAL = 0.99; EXPRESSED IN LUNG, SIGNAL = 0.93; EXPRESSED IN FETAL LIVER, SIGNAL = 0.86; EXPRESSED IN PLACENTA, SIGNAL = 1.2; EXPRESSED IN HELA, SIGNAL = 1.1; EST_HUMAN HIT: BI754938.1, EVALUE 1.00e-107; SWISSPROT HIT: Q92599, EVALUE 4.00e-23; NT HIT: gi15297270, EVALUE 1.00e-104
cctgcccctttctcttatccaggggccatggatgcctgagccctgcctggcctagccaccagtcaaggacagcccatttccagcctatgacacccacttcttcccctcctgtcctcactgcccaggggagaccggcattggcaaatccacactgatgaacacactcttcaacacgaccttcgagactgaggaagccagtcaccatgaggcatgcgtgcgcctgcggccccagacctatgacctccaggagagcaacgtgcagctcaagctgaccattgtggatgccgtgggctttggggatcagatcaataaggatgagaggcaagaggcgggaagggcggccccacccagcctcctcccaccccacctacattggcccctataacagtagcccagccctcacactgcagggggccagggagggcctcttggggaatatctgaggctctgtggtcaccaacagaccagttactcctttaggtgtctggagaaggggtcagctgcctgtatccagtcagggatctcaggcagaagctgttcccagaaagaaaaggcc

SEQ ID NO: 2625 - DNA, 599 bp, Homo sapiens
  MAP TO CHR16.1; EXPRESSED IN BRAIN, SIGNAL = 0.9; EXPRESSED IN LUNG, SIGNAL = 1.6; EXPRESSED IN HEART, SIGNAL = 0.63; EXPRESSED IN ADULT LIVER, SIGNAL = 1.5; EXPRESSED IN BONE MARROW, SIGNAL = 3.4; SWISSPROT HIT: Q07092, EVALUE 7.00e-03; EST_HUMAN HIT: AI003763.1, EVALUE 1.00e-100; NT HIT: gi15317699, EVALUE 1.00e-100
tctatgggcagaagagggtggggtacaggcaggtccatgcgcccgccagggaccgtcccccacctggaaggccgcgaaccacatcagccagtccaggcggtagtggtacggggagatgaggcagggccgtctgctggggtcacctggcttgcacttgaactcgtagtcctcccacatggcatcgggggcgctggcgttggagctggctgtgccctgcaggatcacctccgcccgctccttggtgatgctgccgggagaccgaggcaggccaggcccacgtcacacaccggctgggccgagtggggtgcatgggtggggggggttccccgactgtccatcctggcccagggggagggctacagcctccacctgcctcctggtcaggggctactgagaggctgggtggggctgaggagaacttttgggaactgtggccccagggtctcattcgagaacaccttctctgcccgtgaagacccagctgcagccgccatgtgccccatgcccctcggcagctcagggtggacatgagggggacagaggccaaggggctggccccaggacagggagggtgcctgtgttcaggtggcactacctgg

SEQ ID NO: 2626 - DNA, 539 bp, Homo sapiens
  MAP TO CHR6.1; EXPRESSED IN HELA, SIGNAL = 0.95; EXPRESSED IN BRAIN, SIGNAL = 0.99; EXPRESSED IN HEART, SIGNAL = 0.8; EXPRESSED IN BONE MARROW, SIGNAL = 0.97; EXPRESSED IN ADULT LIVER, SIGNAL = 0.89; EXPRESSED IN FETAL LIVER, SIGNAL = 0.84; NT HIT: AF220677.1, EVALUE 8.00e-03; SWISSPROT HIT: P37342, EVALUE 1.70e+00
atgccgaggagttgtgaaactactctgccctacaaatcctctgtggagaagctgtacattaaacaaggaaaaacaagtcaatgaaagtataaaaattcaaaatacgcagagttcggggaaagaattataaaatacctcagttgaagaatattttgtttctggggttttactaaagtggtccctaaggaagtaattttgatagtctatgacaatgtgggatttatttttatagtgcttctatgtgttgacaacaaatccatcagaaatctttcttttttctttctttgtttttaagtctaggagtttaaaaatcttttttcctccgcatagtttgactgaggtgtctgtcaccatagtacctagacaatccctcaggcagagatatgagtgattaaatttctccctggcttgtgccctgtttgatccatgctaggcaggatttgggggagtaaaataaagaagcctgaagaatgaacaagaattataggaattttgtgcttgtgaattattaaaatttgggggggttattaggggagagg

SEQ ID NO: 2627 - DNA, 564 bp, Homo sapiens
  MAP TO CHR5.1; EXPRESSED IN HEART, SIGNAL = 0.91; EXPRESSED IN PLACENTA, SIGNAL = 1.8; EXPRESSED IN LUNG, SIGNAL = 1.1; EXPRESSED IN FETAL LIVER, SIGNAL = 1.3; EXPRESSED IN BRAIN, SIGNAL = 1.6; EXPRESSED IN HELA, SIGNAL = 2.1; EXPRESSED IN BONE MARROW, SIGNAL = 1.9; EXPRESSED IN ADULT LIVER, SIGNAL = 1.1; SWISSPROT HIT: Q9UFF9, EVALUE 4.00e-25; NT HIT: AF180476.1, EVALUE 1.00e-85; EST_HUMAN HIT: AI761731.1, EVALUE 0.00e+00
actgtgcctggtgttattggtttttttttttttttaaataatgagcaaatgtatacctattataattaggaaatttagtttatggaggaaaatctcatttttctatctgtcacagaaatatgatctactttgcatgcttgtttgaatgttggaaagagtgaattgatctattaagttaggaaaagcatttcaaaaatacttgtactataattataaggtggtggtaatagtgtggccactacttctgtttcattattcaccagttaataaataaacaccttgttttttagagaggacatgtactcccaggattccatagatctccttgctaactcaggactacagtttcagaagcatgaagaggaagggattgacacactgcactttgcagagctgcttatgacatcaggagtggttctctgtgacaatgtcaaatggctttcatttcataggtcagtcctagggaatgtgtatttctctctcactttgggctacactgaagcagggaattgaattcttagtcatttttgcagtcctagtgactgttctgttcagcagcagcag

SEQ ID NO: 2628 - DNA, 581 bp, Homo sapiens
  MAP TO CHR11.1; EXPRESSED IN ADULT LIVER, SIGNAL = 0.8; EXPRESSED IN PLACENTA, SIGNAL = 1.8; EXPRESSED IN LUNG, SIGNAL = 0.98; EXPRESSED IN HELA, SIGNAL =   1; EXPRESSED IN BRAIN, SIGNAL = 0.87; EXPRESSED IN HEART, SIGNAL = 1.2; EXPRESSED IN BONE MARROW, SIGNAL = 0.91; EST_HUMAN HIT: R59267.1, EVALUE 5.20e-02; SWISSPROT HIT: P33137, EVALUE 1.50e+00; NT HIT: Y07905.1, EVALUE 5.50e-01
agggtctcatcctcatggtggttttactctttctacataatccgagtgtctctcttgtcatccttaggccaggagaactatctgaatgctacgttaaacctaaaaagcatacttaaaaaaatacttaaaaaaagcccttttaagctttgattttacaatatttactcactctgcatgcagccctgattaatgcctgaattcaaccattgtggtagtgtgtatatatgccatttatatataattccaatcctccacacctaactggagtgctgtcttggcttcggggtttctgtgcctccttgcttcagaacaccgggtatttgggattaaatccagcctgaaatgttatttgctctgtttagtgcttttatgatgattctcttattatctgcatgtgcttcagtgctaattgtacattacaatggttgtaagcaggcagcctgtgagccaaacaggagagtgcagggtttggaacagccgctatttagggtccaggcaagggaagggctagagaaagaaacaccaaaaagaaaaaacagggtaactttattttggcattcagagaaaacaggaccctgtgc

SEQ ID NO: 2629 - DNA, 560 bp, Homo sapiens
  MAP TO CHR5.1; EXPRESSED IN HELA, SIGNAL = 1.2; EXPRESSED IN BRAIN, SIGNAL = 0.97; EXPRESSED IN HEART, SIGNAL = 0.52; EXPRESSED IN BONE MARROW, SIGNAL = 0.91; EST_HUMAN HIT: BF920578.1, EVALUE 9.00e-10; SWISSPROT HIT: Q9Y5H6, EVALUE 3.00e-95; NT HIT: gi14861872, EVALUE 0.00e+00
tcaaaatccaaattaccccgaatcactatttctcccgtatttcgatctatgctaaagtggtcaataaccatagtttcaacaaggctattaaaagaatatgaaattgccccattggctccttcatccggatcagaagcattcagtttgataactgttgttccgttgtctgcgttttcgaatattcttacttcgtattcagactgttcgaaagtgggagcattatcattcacatccagcactgtgaccagcagctgaacagtgcctgtgagctcaggtttgcccccatctgtggctgtcaggaataagtggtgcgcaggagcgtcctctctgtccaaggattttcttaatacgagctcaaccagtttattctcatcgttctttgaattcacatctagcatgaagtaatcatgagagctaagcctgtaggttaacacggagttagctccaacatctgcatcggacgcgccctctagcggaaaccgagagtctggcattctggattctgaaacaaacagcttttggtcttttacccggaacactggcgggttgtcattaacatc

SEQ ID NO: 2630 - DNA, 552 bp, Homo sapiens
  MAP TO CHR2.1; EXPRESSED IN ADULT LIVER, SIGNAL = 1.3; EXPRESSED IN BONE MARROW, SIGNAL = 1.9; EXPRESSED IN PLACENTA, SIGNAL = 1.9; EXPRESSED IN FETAL LIVER, SIGNAL = 1.6; EXPRESSED IN HELA, SIGNAL = 2.2; EXPRESSED IN BRAIN, SIGNAL = 1.9; EXPRESSED IN LUNG, SIGNAL = 0.8; EST_HUMAN HIT: BG168908.1, EVALUE 3.10e+00; SWISSPROT HIT: P11799, EVALUE 6.00e-09; NT HIT: AJ277892.1, EVALUE 0.00e+00
tcactagtttgattcccggcattcacgatttgagcaaaatgctgtcagtctcacaaattttaaaacccaggctttcctcctttttcatcagcaccaccaagatttgtgaagaagctcagtgacatatctactgtcgttggtaaagaagttcagctgcagactaccattgaaggcgctgaacccatttcagtggtgtggttcaaagataagggagaaatcgttagagaaagtgacaacatatggatttcttattcagaaaacattgcaaccttacagttttcaagagtggaaccagccaatgctggaaaatacacttgtcagatcaaaaacgatgctgggatgcaagagtgcttcgccacgctatccgttctcggttagtaaaaagatgatgttatcacagatacaaggcacacactcaccaggatctgtattttctttagtttttcaatttgagtttaaaatatggatatcttttacatttcattccagagcctgcaacaattgtagaaaagccagaatccataaaagttaccacgggagacacctgtacct

SEQ ID NO: 2631 - DNA, 512 bp, Homo sapiens
  MAP TO CHR16.1; EXPRESSED IN BONE MARROW, SIGNAL = 0.85; EXPRESSED IN HELA, SIGNAL = 1.2; EXPRESSED IN BRAIN, SIGNAL = 0.8; EXPRESSED IN HEART, SIGNAL = 0.46; EXPRESSED IN ADULT LIVER, SIGNAL = 0.69; EST_HUMAN HIT: AI653508.1, EVALUE 0.00e+00; SWISSPROT HIT: Q92889, EVALUE 2.00e-40; NT HIT: gi11430344, EVALUE 0.00e+00
cgaggaaggatatcgtcgagaaataagcagtagcccagaaagctgcccggaagaaattaagcatgaagaatttgatgtaaatttgtcatcggatgctgctttcggaatcctgaaagaacccctcactatcatccatccgcttctgggttgcagcgacccctatgctctgacaagggtactacatgaagtggagccaagatacgtggttctttatgacgcagagctaacctttgttcggcagcttgaaatttacagggcgagtaggcctgggaaacctctgaggcaagttataaagaatcacagctttcagttgcacagttctttaggatttaacccagaaactataccagttgcatgttagttttctttaatatccgttacgatgctgcttatgtttatgaaaccttattttgcttcctgatgaatctgggaagttggataggaaggatgtcaagtatcacagcagaacaacaaaccaaggggactgctcttgttctcgttacgtgctgctg

SEQ ID NO: 2632 - DNA, 584 bp, Homo sapiens
  MAP TO CHR5.1; EXPRESSED IN FETAL LIVER, SIGNAL = 0.58; EXPRESSED IN BRAIN, SIGNAL = 0.41; EXPRESSED IN HEART, SIGNAL = 0.64; EXPRESSED IN ADULT LIVER, SIGNAL = 3.9; EXPRESSED IN BONE MARROW, SIGNAL = 0.51; EST_HUMAN HIT: BE856739.1, EVALUE 0.00e+00; SWISSPROT HIT: P10912, EVALUE 1.00e-81; NT HIT: gi16159531, EVALUE 0.00e+00
tcaacattttgggaaaaggcattttagaatccataccccatcctgtcactcccccaaaaaaggtttaaacattgttttggcttaaacgttattgccccagtcaattctttgctattaaatacgtagctcttgggaaaccaaagaaaggctaaggcatgattttgttcagttggtctgtgctcacatagccacatgatgagagaaactctttgtcaggcaagggcaaggcagtcgcattgagtatgaggccctgtggggactgtactatatgaatggaggtatagtctgggacaggcatctcagaacctggaacatgttctcctgtcccaggcctcccagcagcagtggtaaggctttctgtggtgatgtaaatgtcctcttggtttaagcttggctgtatgtgtgattcaaccttgatgtgaggagccacagggaggcactttttggcatctgcctcacagaagtaggcattgtccataaggaagttttcttggcagagtgagaccatttccgggtgcatgtcacattgggacatccctgccttattcttttggcccggggaaaggaccacactacctgctggt

SEQ ID NO: 2633 - DNA, 551 bp, Homo sapiens
  MAP TO CHR1.1; EXPRESSED IN PLACENTA, SIGNAL = 6.6; EXPRESSED IN LUNG, SIGNAL = 1.4; EXPRESSED IN HELA, SIGNAL = 2.5; EXPRESSED IN BRAIN, SIGNAL = 1.8; EXPRESSED IN HEART, SIGNAL = 1.7; EXPRESSED IN ADULT LIVER, SIGNAL = 4.3; EXPRESSED IN BONE MARROW, SIGNAL = 2.1; NT HIT: gi13637528, EVALUE 0.00e+00; EST_HUMAN HIT: BG167829.1, EVALUE 0.00e+00; SWISSPROT HIT: P07155, EVALUE 2.00e-53
tttagcaggacctttgcaccatcaaactttcctttcgacttatagtcagcaacatccttctcatacttctccttcagctttgcagccttagtgatgtaaggctgcttttcactgtcatttaaattattccacatctcactcaggttttttgccacgtctccaatagagatgccggggtttgtggatttgattttggggtggaattctgaacagaacaggaagaatccagacggtggccttttgggagcattgggatccttcttcttcttgcctcccttagctggtccataatccttcatttcccgatcatagcgcactttatctgcctttgccatttcatcaaatttagatttctgtttcccggacatgtcttccacctctcagagcacttcttggaaaattccacaaaattgacagggacctctgggtttttcttcttatgttcttctctacttgtctgcacaaagaaggcataagcagacatcttgccctttggtttcttggggtcacctttagccatcctgactgtattgttcgctagtctgggcagc

SEQ ID NO: 2634 - DNA, 527 bp, Homo sapiens
  MAP TO CHR9.1; EXPRESSED IN ADULT LIVER, SIGNAL = 3.4; EXPRESSED IN BONE MARROW, SIGNAL = 6.8; EXPRESSED IN FETAL LIVER, SIGNAL = 5.3; EXPRESSED IN HELA, SIGNAL = 3.5; EXPRESSED IN BRAIN, SIGNAL = 6.2; EXPRESSED IN LUNG, SIGNAL = 4.9; SWISSPROT HIT: P52735, EVALUE 3.00e-25; NT HIT: gi11429600, EVALUE 2.00e-83; EST_HUMAN HIT: R35169.1, EVALUE 1.00e-116
tttctggctgtgtgaccttgggttcgtggtaaacatctggagcctcggtttccccctgtgaatgccaaccttctgggctgctgtgaggatgagggagattgcagagggtgtctggaacagggcctggggtgtggacataggtgtggtgctagtctgcctgagcccgaccaggtaggggctgcagcgaggccagccccacaccctcagggtggggccactcacccgtccgttggtctcgcccttccaccagccctggtctccgccgatgcggctgtagatcctcaccacgtcaccctcccgcagcgaaagctccctcatatctcgggcggcaaagttatacctggccacagctgtgccgatgacgcggggcgtgaacactgttgagggagatgggcagcatcacacagctgcaggaggagcccaaccagtgatccaggaggcccttgggccaagctgggtctctcccctggtgcccagaaccctgctctgtacccagagaggaaggatgtcaagcagaaaggctctgg

SEQ ID NO: 2635 - DNA, 570 bp, Homo sapiens
  MAP TO CHRX.1; EXPRESSED IN LUNG, SIGNAL = 0.9; EXPRESSED IN HELA, SIGNAL = 0.74; EXPRESSED IN BRAIN, SIGNAL = 0.55; EXPRESSED IN HEART, SIGNAL = 0.91; EXPRESSED IN BONE MARROW, SIGNAL = 0.6; EST_HUMAN HIT: BG392171.1, EVALUE 3.00e-93; SWISSPROT HIT: O95239, EVALUE 1.00e-25; NT HIT: gi14765698, EVALUE 2.00e-93
aaacccagagccattgtcactggtatgtataaagttagacaagtcacgtctctgcttcaggtttctttttatttgcaaaatttagaaaaggccacgtggacttttgaaagaaatttcatatccccactttttttttaaaactaacaatacaaggcaatgatagtttcacagtatagcttcttgacttgctagagtttaccttctcttggtgctgttgctccattctgaccagctcagcttgtaactctgtctctatctcggcaaaatgatttcgttcctcaaacagcatcttctgcatgtcagcacagctggtcttgctctgtttcaggctgctttcaagtttgctgacctgtattttggaggagaccagctggaaggaataaaagaagatcagtttatttgaagaatgaccacctttctttccccctttcaacaggcaggataatgtcagctttcttgaaagggtctgagaaaaattcctccatgttcaagtctattcttattttttcatgtcatatggattccaacattgaatagtaaatatactattgttctattcccaggccaaga

SEQ ID NO: 2636 - DNA, 541 bp, Homo sapiens
  MAP TO AC068936.2; EXPRESSED IN LUNG, SIGNAL = 1.8; EXPRESSED IN BRAIN, SIGNAL = 3.6; EXPRESSED IN HEART, SIGNAL = 2.6; EXPRESSED IN BONE MARROW, SIGNAL = 3.8; EXPRESSED IN ADULT LIVER, SIGNAL =   3; EXPRESSED IN PLACENTA, SIGNAL = 4.1; EXPRESSED IN FETAL LIVER, SIGNAL = 2.9; SWISSPROT HIT: P08125, EVALUE 6.70e-02
ttctctctccccacagcttcccccgccccggaaaagctagcaagccttccttccttcctccgggaagcacatctatccagagcaggctcatccccggcggccacacaatggcccttatcagccgtggagccaggcgtagacccagtgcacaccaggtctcacttatttcctgtttccacccagtgggtcggggtggacccagaacggccatatcctgactggggcccagaggacggagagcaccccccattcccctttccgcctctcaatcactgctgggctcacccctcccacacaggaggctgggtgtgtggcgacctcagttcaccacgggggaggtgagcatgtggggggacccctggggtcaagccccggggccgcattaatcagaacggggaggcgggtctagtgcgatacactttctgcaattgttctcccacagtaatcttgagaatagggacatcatctgtattttacagactactgagaccgctctgcgggtgggttcagaccccattcctgtttctggtcctgtgggaaa

SEQ ID NO: 2637 - DNA, 539 bp, Homo sapiens
  MAP TO CHR19.1; EXPRESSED IN PLACENTA, SIGNAL = 3.4; EXPRESSED IN LUNG, SIGNAL = 1.9; EXPRESSED IN HELA, SIGNAL = 4.2; EXPRESSED IN BRAIN, SIGNAL = 2.7; EXPRESSED IN HEART, SIGNAL = 2.3; EXPRESSED IN ADULT LIVER, SIGNAL = 6.1; EXPRESSED IN BONE MARROW, SIGNAL = 2.8; NT HIT: gi11693147, EVALUE 8.00e+00; SWISSPROT HIT: P71613, EVALUE 1.40e-01
gtccacaaaaggactcctgctgaaaggacgcctcagtttcctctgagctaggttcctccatcccagaaacctccagccgtctttgaactcgagaggactgccctttagtcgatctcctcccaggactccagtccctttatccttctaaacggaggtggctctctgcgtcctttcctctctacagttgtggctcagaatcccacacgcgcctcccccggccgcctgcctcctccctcccctccgcacagctgtctccagctgttctctgcagccccgggagagagagggagggggtgccctcgcaggacagcccggcctcctttggctcaaaggtcccggggctccccaagggtccggaatgtggagcctccgccctgcccccgccgcacctctctctttgtttaccccgccgcacagctggcagtgccccgcccagaggtggcctggggcccagcgagggcgcgcagaggggagtggaggcgcgttcccgctcgtggctccgccccggtgctactggaggctgtaaggccgagctagaa

SEQ ID NO: 2638 - DNA, 526 bp, Homo sapiens
  MAP TO CHR7.1; EXPRESSED IN BONE MARROW, SIGNAL = 0.54; EXPRESSED IN FETAL LIVER, SIGNAL = 0.57; EXPRESSED IN LUNG, SIGNAL =   1; EXPRESSED IN HELA, SIGNAL = 0.71; EXPRESSED IN BRAIN, SIGNAL = 0.54; EST_HUMAN HIT: BI770213.1, EVALUE 1.00e-111; NT HIT: M61934.1, EVALUE 1.00e-121; SWISSPROT HIT: P07942, EVALUE 1.00e-34
ttccattcccctctccctaccctgcttatggaaatgctttatcctcatggacttttcccctggtcacctgttatttgcatatttcttgaatatcaattccatcttcagtggtgctctttcactgaaatattacttaaaaagataaagacaaactgtaactgagacactatttcccttgtgctgcctaacacagggctagggggtgggcactccactgtacttcatgtgccagatatactcagagccagaaacagcagctgctgcagctgcccagcaatacctacccaggcctgtctggtgtaacagggcagaaatgctaaagatgatgtttctgcaaacatctgtcatcggtgttttcacaacgcttctgctgttctctagacatcggtatctctgaaaggtttcccaggcactgttggtgaccaccccatctcctgaacctcccacggtgaagatgtccagtgatttacagtatggcatgagaacaagctgtgaagaaatgagaacggccaaacatccttacagt

SEQ ID NO: 2639 - DNA, 584 bp, Homo sapiens
  MAP TO CHR9.1; EXPRESSED IN HEART, SIGNAL = 1.2; EXPRESSED IN BONE MARROW, SIGNAL = 1.3; EXPRESSED IN LUNG, SIGNAL =   1; EXPRESSED IN PLACENTA, SIGNAL = 1.2; EXPRESSED IN BRAIN, SIGNAL = 1.2; EST_HUMAN HIT: W05012.1, EVALUE 2.10e-01; NT HIT: AF153836.1, EVALUE 2.00e-03; SWISSPROT HIT: P30645, EVALUE 9.70e+00
ttctccgatccaggattttgcccagcaagacctgctatgcatattcacagcatctaacagcttgttctgtcatgcccaaaagatgaattattgcacaggcctccgactttccactcacaagctgtctattcctataccaaagcctgattgggactgtggcaggaggtatagggggatgtttagggttgggaggaggctgggatagaaacagatggtggtttggcagagtgattaaaacactagatatctgttttaatgaattgcctacccagcagataaaacactgcaatagtgagtctcagtcttctccgtcagtaattgcagtcttatttacagagtgtatttgctgctggtaaagccatgcatttgccactgtccccttgaatgtcatggggtgaagaactataagggcagagaggaaaaaacttagataagcaagaagaaatagattgatcaacttcttcccaagctcgtaccaatatggaagcttcaccaagcagtcaaatttttctgtgtgatctttggtgagtcacttaacctccccgtgcttcctttcctctgttaggaaaatgcagctggaaatc

SEQ ID NO: 2640 - DNA, 500 bp, Homo sapiens
  MAP TO CHR7.1; EXPRESSED IN FETAL LIVER, SIGNAL = 1.3; EXPRESSED IN HELA, SIGNAL = 2.6; EXPRESSED IN BRAIN, SIGNAL = 1.2; EXPRESSED IN LUNG, SIGNAL = 0.78; EXPRESSED IN HEART, SIGNAL = 0.62; EXPRESSED IN BONE MARROW, SIGNAL = 1.3; EXPRESSED IN ADULT LIVER, SIGNAL = 0.84; EXPRESSED IN PLACENTA, SIGNAL = 1.7; EST_HUMAN HIT: BF221513.1, EVALUE 9.00e-59; NT HIT: AF072810.1, EVALUE 6.00e-59
gagcaggaacactcaaaggcctggtaaatacctaaacaagtgcacctataactaaataaatattccatattgctactgcaaaatgccattaggcaaaggaacccagaaacccatacagtacactaatgtaatatagtctaatttgtgccccataaacttaaatacacatactgctttagggttaatattccctcctttcctaacaatgtgaagatggtggcaaagagcaatacttccattacttacagctcagcaacttcctgttcttcctcccaggcttccttgtgtgttagctgactgcttccagtactcttgcacgtccaaatgcgctcactgtacctttccaagcgggcttcatactctctgttggcagtagttcaggaaaacaatatgcaagcaacagagacgacaaacccatacccataagatacttatatacagaaaaaaatctagtctcctttttaaaatgtgtagcatgagaggataaaaatggaattgga

SEQ ID NO: 2641 - DNA, 542 bp, Homo sapiens
  MAP TO CHR5.1; EXPRESSED IN BRAIN, SIGNAL = 0.94; EXPRESSED IN HEART, SIGNAL = 0.83; EXPRESSED IN BONE MARROW, SIGNAL = 1.2; EXPRESSED IN ADULT LIVER, SIGNAL = 0.91; EXPRESSED IN FETAL LIVER, SIGNAL = 1.1; NT HIT: AY012155.1, EVALUE 2.00e-71; SWISSPROT HIT: P53627, EVALUE 4.50e-01; EST_HUMAN HIT: BG332509.1, EVALUE 3.00e-71
gttccatgtgattccaagccgtctgggccctcaggaaagctccagctcccacagagcacctcccacctgatttcctcccggaagcctcacctgctgtttcagcaactcattctgcgtgaccagctcctgtttccttaggagggcccctgctccttctgggctcccaaatgctgttggtggagatgatggcggggtttggatgctcagtgcttcctccagggcctggaatcaggaaaagatgggaccatcagcaggaacccctggaaatcagggccctttggaggggtcatcctcagggaactccttcctaataataatcatactaataatagccaccactaccagtcctatttaataaatgctgccctatttatttgcattctacacatatcatttcattggatcttctgcacagtgccatgaagaaaagactatgatcatcatcctcattttacagatgtgaaaactgaggctcagagacctgaaggggcttgtccaaggtcaaggtcacacagctagtaagtggcagagcacagattcaa

SEQ ID NO: 2642 - DNA, 541 bp, Homo sapiens
  MAP TO AC015651.17; EXPRESSED IN BONE MARROW, SIGNAL = 0.65; EXPRESSED IN FETAL LIVER, SIGNAL = 0.9; EXPRESSED IN BRAIN, SIGNAL = 0.65; SWISSPROT HIT: Q09003, EVALUE 3.00e+00; EST_HUMAN HIT: AL547109.1, EVALUE 0.00e+00; NT HIT: gi14770996, EVALUE 0.00e+00
agaatggcaatccattttggggttctctttttttttaagctttttttctcaaggtgcaatgaaagccttccacactttctgtgttgtccttctggtgtttgggagtgtctctgaagccaagtttgatgattttgaggatgaggaggacatagtagagtatgatgataatgacttcgctgaatttgaggatgtcatggaagactctgttactgaatctcctcaacgggtcataatcactgaagatgatgaagatgagaccactgtggagttggaagggcaggatgaaaaccaagaaggagattttgaagatgcagatacccaggtgaggctctttttattaatttattggaaaaatttgtaactagcacctttcccaaacattaaaattaatcctcaggctcaagagacctttactgtctggagtcttcattttcattcactaggtagagctcttctaaatgttctgtggtaagtttccaccttttacattaacagaatgaattgtgttcttctattgaaaccctgactggaagaggggtta

SEQ ID NO: 2643 - DNA, 539 bp, Homo sapiens
  MAP TO CHR15.1; EXPRESSED IN BRAIN, SIGNAL = 2.3; EXPRESSED IN ADULT LIVER, SIGNAL = 2.2; EXPRESSED IN BONE MARROW, SIGNAL = 1.9; EXPRESSED IN LUNG, SIGNAL = 1.7; SWISSPROT HIT: P44157, EVALUE 2.30e+00; NT HIT: AJ271086.1, EVALUE 2.00e+00
accaaatggaatgcaagacctgaatgccccctatttgataataacaaagaggcagatggcccagccacaaagggcaatgtgaatgtctatatgttagatgccaacaaagtgattataaaattaaggacaagtatttgggcattgctttctaactgcatgttatttttcacaagaaatttcagggaaggttgggctttcacatatttaattagtgtaatggaactgattctgccaagtgtatctgttagtcgagggcttagcctccttgtcacactcaggtgctgacagctatctgggcagaactcttcccccttggagaaggtctgagggggagtgaatggtgtatgtgttaaggtgcccatcacttgcatggtcgcaggcctgcaagggctttccatctctacacacagtgataaaattctccaaggtgcctacattcatgacaaaagtttcacatctttcaggagctgggatagctctggaagtggtactaattgtataaaagctttttcctccacaccagcccaaaacaaaaagaa

SEQ ID NO: 2644 - DNA, 552 bp, Homo sapiens
  MAP TO CHR17.1; EXPRESSED IN LUNG, SIGNAL = 1.1; EXPRESSED IN HELA, SIGNAL = 1.5; EXPRESSED IN BRAIN, SIGNAL = 1.4; EXPRESSED IN HEART, SIGNAL = 0.91; EXPRESSED IN BONE MARROW, SIGNAL = 1.4; EXPRESSED IN ADULT LIVER, SIGNAL = 1.3; EXPRESSED IN PLACENTA, SIGNAL = 1.9; EXPRESSED IN FETAL LIVER, SIGNAL = 1.6; EST_HUMAN HIT: BF834727.1, EVALUE 0.00e+00; SWISSPROT HIT: P04626, EVALUE 2.00e-61; NT HIT: M95667.1, EVALUE 0.00e+00
atcccagatccgtgagtgacccccatcatgactttctttcttgtccccagagtggcggtggggacctgacactagggctggagccctctgaagaggaggcccccaggtctccactggcaccctccgaaggggctggctccgatgtatttgatggtgacctgggaatgggggcagccaaggggctgcaaagcctccccacacatgaccccagccctctacagcggtacagtgaggaccccacagtacccctgccctctgagactgatggctacgttgcccccctgacctgcagcccccagcctggtatggagtccagtctaagcagagagactgatgggcaggggaggtgggaccttcagcccagggtccactgtgggggcagagggagtggcagagacaccggggttccttcccctaatgggtcaccttctcttgacctttcagaatatgtgaaccagccagatgttcggccccagcccccttcgccccgagagggccctctgcctgctgcccgacctgctggtgccactctggaaaggcccaagactctct

SEQ ID NO: 2645 - DNA, 588 bp, Homo sapiens
  MAP TO AC068936.2; EXPRESSED IN LUNG, SIGNAL = 2.1; EXPRESSED IN BRAIN, SIGNAL = 0.74; EXPRESSED IN HEART, SIGNAL =   1; EXPRESSED IN ADULT LIVER, SIGNAL = 1.1; EXPRESSED IN PLACENTA, SIGNAL =   2; EXPRESSED IN FETAL LIVER, SIGNAL = 1.1; EST_HUMAN HIT: BE002727.1, EVALUE 0.00e+00; SWISSPROT HIT: P34369, EVALUE 4.00e-52; NT HIT: AF092565.1, EVALUE 1.00e-103
actaaattcctgccccgttcctcacagggcgatctcatgaaagttctaccttgacaccacttgtaaacaagcagcggaggtggttctgtgtctgcaggcttaatccagggtgggaacaggcggcgcttgtcggcttcataccacaggtactggtccaggtaagcatcagttatcttctccaggggctcaacatcatatactggaacgaggtggctatacagatccatgaactcaatgcccacctgtgggacaaggaggctggttcacaccaatccaccaactgctacctttggtagaaccaaaggcaactgctacctttggtagaaccaaaaagaaaacttgggaggcctcactcacctctttgaaggctctctgtgtgaggaggtgacgcttgatgcgggacagcgcctcgtgggggttatcgtaggcctgctcgatcagacctagctcctccctctgagactggttcaaccgagacttcacactgacaaaagcaatgggaagggtgaatgggaaaactaggaggaagtaaaaccaggaaagactggggctacaccttctttctttggactctgaggatgacgccat

SEQ ID NO: 2646 - DNA, 551 bp, Homo sapiens
  MAP TO CHR17.1; EXPRESSED IN PLACENTA, SIGNAL = 2.2; EXPRESSED IN FETAL LIVER, SIGNAL = 1.7; EXPRESSED IN LUNG, SIGNAL = 1.9; EXPRESSED IN BRAIN, SIGNAL = 2.1; EXPRESSED IN HEART, SIGNAL = 1.8; EXPRESSED IN BONE MARROW, SIGNAL = 1.9; NT HIT: gi11321572, EVALUE 0.00e+00; EST_HUMAN HIT: AU121122.1, EVALUE 0.00e+00; SWISSPROT HIT: P34703, EVALUE 3.00e-16
atgacagagcaccccaactcaataaataaataagaaatgaaggcctggtttgtcctgttgctgccagctcctagccccatcacccagtctgtactgcttttctgcccttttcagcatacatcaagagagtgatcgcacacccatccttccataatatcaatttcaagcaagcagaaaagatgatggagaccatggaccagggtgatgtgattatccgaccaagcagcaagggcgagaaccacctgacagtgacctggaaagtcagtgatggcatctaccagcatgtggatgtgcgggaggagggcaaggaaaatgccttcagcctgggagccactctgtggatcaacagtgaggtgagagccagtgcctgcccacctcccatcccactcctgcttccagaaaggtgcccttcagggtgctttcacctgacattagtaactcgggtcataggtattttagctgtgcacagcaacaaaacgggaggtggtttgcggaatgagtcatttgatatcaattttattttgtcccctccttccgtgtcctccaaatgt

SEQ ID NO: 2647 - DNA, 513 bp, Homo sapiens
  MAP TO CHR7.1; EXPRESSED IN BRAIN, SIGNAL = 0.87; EXPRESSED IN HEART, SIGNAL = 1.5; EXPRESSED IN BONE MARROW, SIGNAL =   1; EXPRESSED IN PLACENTA, SIGNAL = 1.7; EXPRESSED IN FETAL LIVER, SIGNAL =   1; EXPRESSED IN LUNG, SIGNAL = 1.5; NT HIT: gi14753231, EVALUE 0.00e+00; EST_HUMAN HIT: AL541368.1, EVALUE 0.00e+00; SWISSPROT HIT: P09544, EVALUE 6.00e-51
aggatcgtgagctttgaacctaaagagagcaggctgaaaatacagaacctcatttaaattgtggagtatcaattgttgaaagaattaggtactataaagaaagtcttttgaacttacctgcctctcggtccctgatacagtagtctggagaattctcaaaatacacgaggtcatttttcgttggcttcttaaacctctcgttagccacagtgaaacctgtgccatcctggttcatgaccacctggatggccccattgtacttcctccagagataatcgcccgttttcctgaagtcggccatggccagccagcatgtcctgagagtacatgagccgctcaccccgtggcacttgcactcttgtttcaagaaccgctttacagcctgccgaaaaagacaggggcaagttcagtgaggttcgagcaggtgacacatgctccaactctccttacctcccagcaatccagaagtgattctcaggatgctggatcctggggcaagtgactgggaaatgt

SEQ ID NO: 2648 - DNA, 571 bp, Homo sapiens
  MAP TO CHR5.1; EXPRESSED IN LUNG, SIGNAL = 0.83; EXPRESSED IN FETAL LIVER, SIGNAL = 0.64; EXPRESSED IN BRAIN, SIGNAL = 0.76; EXPRESSED IN HEART, SIGNAL = 0.61; EXPRESSED IN BONE MARROW, SIGNAL = 0.84; NT HIT: gi14726595, EVALUE 3.00e-92; EST_HUMAN HIT: AL138191.1, EVALUE 4.00e-92; SWISSPROT HIT: Q14195, EVALUE 2.00e-26
tctattggcctctgtccctgagtgactggaatgggcagagcccatctgctttggaaagcaggagaaacacagttgaggttttgagccactgagatttaggggatggattattattgcaacccgtcctagtctaactaccctggcacaccacataaacacatttctcctgaccaagttccttgcatgcattctccattctactccactcccaccagagcgggccttacagactggtggttcttggcagagacgatcttcacagcatctggatcccagatgacgaggtcgctgtcagaacccacagatattcttcccttgcggggatacaggttgaagatcttggcagcgtttgtgcttgtcacagccacgaactggttttcgtccattttccctgtggcctattgaaatataagaaattatatctatatctatagctacatatatatcaattcagggcttctgaactcagagaaagacaacccacaaaggcatagaaatacaaaaaggagccacctgaaaagctggtgagctacagaacctcactcagcaagctcgaattagctgggctgtc

SEQ ID NO: 2649 - DNA, 596 bp, Homo sapiens
  MAP TO CHR19.1; EXPRESSED IN PLACENTA, SIGNAL =   3; EXPRESSED IN FETAL LIVER, SIGNAL = 3.1; EXPRESSED IN LUNG, SIGNAL = 2.7; EXPRESSED IN BRAIN, SIGNAL = 2.9; EXPRESSED IN HELA, SIGNAL = 3.8; EXPRESSED IN HEART, SIGNAL = 4.1; EXPRESSED IN BONE MARROW, SIGNAL = 3.4; EXPRESSED IN ADULT LIVER, SIGNAL = 5.6; EST_HUMAN HIT: BG768636.1, EVALUE 2.00e-72; SWISSPROT HIT: Q00839, EVALUE 6.00e-15; NT HIT: gi14786839, EVALUE 1.00e-72
aaaaacatcagccaactgtgggcattttccttcacagataactgcgacctccacttcaaggtggcccgagatcggagtagtggctatccgctcacaattgagggctttgcatacctgtggtcaggagcccgtgccagctatggggtcagaaggggccgtgtatgcttcgagatgaaggtgagtaggagcaagagaaggggaagggacagagaagtccatccattgtaatatcctgataccagccaccttggtcagagctgcaactgcaaaagagattggattgtgcaataccatgtccaagcagacaaaactgtgatgaactcaagacaactacatcattgctaaatatcatatcagaaaagcaggccaaccatgcattgcttcatcaagcagatatttccttggtgagatttgacccaggtattatgtagtcaaccagtgtagtgatgacatgtttgtagaactgagaaaagaagttgtttggaagaaaagtgatctagaaagaatagactcagatgtcacttattaaagggaggccagagggagaacagggcaaagaactgccagcttaggccagcctctgctgtcatctctcc

SEQ ID NO: 2650 - DNA, 552 bp, Homo sapiens
  MAP TO CHR12.1; EXPRESSED IN HEART, SIGNAL = 2.1; EXPRESSED IN BONE MARROW, SIGNAL =   2; EXPRESSED IN ADULT LIVER, SIGNAL = 0.9; EXPRESSED IN PLACENTA, SIGNAL = 2.6; EXPRESSED IN FETAL LIVER, SIGNAL = 1.7; EXPRESSED IN LUNG, SIGNAL = 2.3; EXPRESSED IN BRAIN, SIGNAL = 2.1; EST_HUMAN HIT: AA490128.1, EVALUE 1.00e-88; SWISSPROT HIT: Q9ULV8, EVALUE 4.00e+00; NT HIT: AL163246.2, EVALUE 1.00e-125
tactgggctttggtggaaactgaacatttaactatgggtcatcaagtcaccatgtgacctgaactccctatcatgaactgggtgctttctgacccatctagccataaagtgggtcatgcatagcagcattctatcatcgaatggaagtagtataaatgtgactgggctctagcaggtcctgaaggcacaagtcagttacatgagaaagtggctcaaatgcccatagtctctactcctgccaccaggccttctctctcccagcctgcatcgatggcctcatgaggagttccctatgatcagctgacaaaggaagagaagactagggcctggttcgcagatagttatgcccaatatgcaggcatcacccaaaagtggacagctgtagcactacagcccctttctaggacatccatgaaggagagcagtgaagggaaatcttcccagggggcagaacttcaagcagtgcacttggttgtgcactttgcatggaaggagaaatggccagatgtgcgattatacactgattcatgggctgtagccaatggtttggct

SEQ ID NO: 2651 - DNA, 564 bp, Homo sapiens
  MAP TO CHR14.1; EXPRESSED IN BRAIN, SIGNAL = 0.49; EXPRESSED IN BONE MARROW, SIGNAL = 0.46; EXPRESSED IN FETAL LIVER, SIGNAL = 0.38; EST_HUMAN HIT: BI821699.1, EVALUE 0.00e+00; SWISSPROT HIT: P06322, EVALUE 3.00e-24; NT HIT: M97710.1, EVALUE 0.00e+00
ttttccctaggaagaacccgtggaaattcagtgacccagatggaagggccagtgactctctcagaagaggccttcctgactataaactgcacgtacacagccacaggatacccttcccttttctggtatgtccaatatcctggagaaggtctacagctcctcctgaaagccacgaaggctgatgacaagggaagcaacaaaggttttgaagccacataccgtaaagaaaccacttctttccacttggagaaaggctcagttcaagtgtcagactcagcggtgtacttctgtgctctgagtgacacagtgacagggactgcagggggagctgagcacaaactctgagcagcacggggggcccggctgctgagtgtcagccactgtgatccactctggttctagcacagtctgtggttgtttgtgcctcagtttctctgattgatgcagtaatcatacacatggccagaggagaaaaacaagaaatgaacatccccaaacccagctcttggttagtgaaattaaaaacagacattgacaccaaatagttcctcatccagtgccaaa

SEQ ID NO: 2652 - DNA, 599 bp, Homo sapiens
  MAP TO CHR7.1; EXPRESSED IN HEART, SIGNAL = 1.6; EXPRESSED IN BONE MARROW, SIGNAL = 1.4; EXPRESSED IN PLACENTA, SIGNAL = 2.3; EXPRESSED IN FETAL LIVER, SIGNAL = 1.5; EXPRESSED IN LUNG, SIGNAL = 1.6; EXPRESSED IN BRAIN, SIGNAL = 1.3; EST_HUMAN HIT: BI763590.1, EVALUE 5.40e-02; NT HIT: AJ006525.1, EVALUE 8.90e+00
gaccccaagtctctcactgcttgaactatcacttaactgtcttttgtttatcattcttcagccactttttaatcttcagcgattgtgtactgaaccaagccagtttgaattaatttcccaagcaaaatttcttaaggtactgtatttaatgctttggcaaaagccaaattcataacatctgccacattcatatcagtcattcgttctgacactctttaggtaaataatagacaggtcaggtggcaaggcatcattctgctctgttcctccctaccagggtgttgattccaacagacttctttgaccctggttattgctggtgatatcggcagtggtgcagagtgctcttctgttgactttgctttccagtgcactgcttggccattagtactttcagagaaacattgtaagctttggggaaagggcagcccattaaacttgtctgacttaggtcagcacagctgcctgcctagaagttgatgagctttctcagggctctgcagcccctacttcctctgcaaagggatatgatctgccaacctttctcatatcatttcatgggcgctcagggagtgatgcggtaggcactcattgggaga

SEQ ID NO: 2653 - DNA, 549 bp, Homo sapiens
  MAP TO CHR6.1; EXPRESSED IN BRAIN, SIGNAL = 1.2; EXPRESSED IN HEART, SIGNAL = 0.84; EXPRESSED IN ADULT LIVER, SIGNAL = 0.91; EXPRESSED IN BONE MARROW, SIGNAL = 1.1; EXPRESSED IN FETAL LIVER, SIGNAL = 0.89; EXPRESSED IN LUNG, SIGNAL = 0.93; NT HIT: X98208.1, EVALUE 0.00e+00; EST_HUMAN HIT: AU133664.1, EVALUE 7.00e-66; SWISSPROT HIT: Q08345, EVALUE 2.00e-08
tgttattatccccaaagcggcccattctgtctgttgctgtcagctatgactcagtcccctgattaacttacgcaccacccattttatcccctgcagagatgctgcccccacccccttaggcccgagggatcaggagctatgggaccagaggccctgtcatctttactgctgctgctcttggtggcaagtggagatgctgacatgaagggacattttgatcctggtgaggagactgaatcatgggtccctgagggccagggcttgggaggtagagagttgggggccttgacctgttacatgcctgctttttactcagccaagtgccgctatgccctgggcatgcaggaccggaccatcccagacagtgacatctctgcttccagctcctggtcagattccactgccgcccgccacagcaggtacttggcacacctggcacacttgtagctgccccgagaggagctcctgggacctctacttcccctccaacccctctgcccatgccagtgaaacccctgcaggctgagggggcaaatgaagtggggttta

SEQ ID NO: 2654 - DNA, 513 bp, Homo sapiens
  MAP TO CHR19.1; EXPRESSED IN ADULT LIVER, SIGNAL = 1.4; EXPRESSED IN BONE MARROW, SIGNAL = 1.3; EXPRESSED IN FETAL LIVER, SIGNAL = 1.1; EXPRESSED IN HELA, SIGNAL = 4.1; EXPRESSED IN BRAIN, SIGNAL = 1.3; EXPRESSED IN LUNG, SIGNAL = 1.7; NT HIT: AF309494.1, EVALUE 4.90e-01; EST_HUMAN HIT: BF793559.1, EVALUE 0.00e+00
ccagtggacgaagagggtcccgagggcaggcccaggtccagacacgggaacggaggcctggctgcgttgccctatctccgtctccgccacccacttagcgttttaggcatcaattaccagcagtttctccgccactatctggaaaattacccgattgctcccggcagaatacaagagcttgaagaacgccgcaggcgattcgtggaagcctgcagagcaagggaagcagcgtttgatgccgaatatcagcgaaatcctcacagggtggacctcgatattttaacctttacgatagctctgactgcctctgaagttatcaaccctctgatagaagaacttggttgcgataagtttatcaatagagaatagttatgtggtgacactacttcaagagaacctctgcattccagtcataccaatcctgcaacttgattttcagaagtcaagagtatatcgcgataagacagtgcacaggtggaggggaaaaaaagggggagggggaagcttatcttg

SEQ ID NO: 2655 - DNA, 559 bp, Homo sapiens
  MAP TO CHRX.1; EXPRESSED IN BONE MARROW, SIGNAL = 0.51; EXPRESSED IN FETAL LIVER, SIGNAL = 0.49; EXPRESSED IN HELA, SIGNAL = 0.4; EXPRESSED IN BRAIN, SIGNAL = 0.48; EXPRESSED IN LUNG, SIGNAL = 0.67; EXPRESSED IN HEART, SIGNAL = 0.69; EST_HUMAN HIT: AI339033.1, EVALUE 0.00e+00; NT HIT: gi6754693, EVALUE 1.00e-105
acccaattccaggagaatccacggccatcttccttttagtcctcccccaattcaactccagcgagagacaacaaagaattcatgaatacatatatatttatttaattcataatatagcattttggatgggctggaatattgtagagagggatgaggctgtgtaatccacagatgctcatatttctgtcactaggagagacactattggtccagagctcccaatacaaacaggcgtggggtaaagcatttgataaaaaatagtccaacaatagtctaataaatagtctagccaataacaacaatacagcatatgtctgaagctggcagactacaccataaaaggcagttttgtctgacctgatggcaatcagtttggccaacctgtaacacacagccaaatacagccattggctccaaggctgcagttggcttcaggagctagaaataagtgtaggagtggttcttacctacctgcctgacactctccattccttggaggaagcagtatcaaatatttgagtttattcaaaagtccatccgtggattgctccatcttggt

SEQ ID NO: 2656 - DNA, 552 bp, Homo sapiens
  MAP TO CHR2.1; EXPRESSED IN BONE MARROW, SIGNAL = 0.81; EXPRESSED IN LUNG, SIGNAL =   1; EXPRESSED IN HELA, SIGNAL = 0.91; EXPRESSED IN BRAIN, SIGNAL = 0.69; EXPRESSED IN HEART, SIGNAL = 0.96; SWISSPROT HIT: P54258, EVALUE 7.90e-01
aacacttggtgtgggaggagtaaagaggcgaggctcttaaaagcaatctgatgatcaatgtgtgtcctctataatttgggggaaggcctacccttcctccactccaggctctgcttttctctcacctctatcagcagaggaacttactgtagtctgggagggtctctccttcactcagccattcttcccactgtagttgagcacttgctgcaggcccagcctatggcaggcggaggaatgcagaggcccctccttccaaggcccacagagaggagccttcagctccagctggttcaatgtcccctgattgcctttggatattattatctgaatccgggattaacaactcctgaaccctgagcaagtgagagacagcagtgccctccagggacctggcagagtgcacatgccaggcagcacgtagctgctacggcaggcatggaggcgttgccatggaaactgcccaggcggcctttccactcacaacctctaggttcctttgtttgtgtcatccgtttctaggagatacatgcgaggctttctctcctcctt

SEQ ID NO: 2657 - DNA, 536 bp, Homo sapiens
  MAP TO CHR9.1; EXPRESSED IN PLACENTA, SIGNAL = 3.6; EXPRESSED IN LUNG, SIGNAL = 1.4; EXPRESSED IN HELA, SIGNAL = 3.2; EXPRESSED IN BRAIN, SIGNAL = 3.5; EXPRESSED IN BONE MARROW, SIGNAL = 4.2; EXPRESSED IN ADULT LIVER, SIGNAL = 1.6; EST_HUMAN HIT: AI342905.1, EVALUE 6.00e-51; NT HIT: gi14739129, EVALUE 1.30e-01
cccaaaggaggaagaagaggaaatctgaaccttcaccacccacggtcccattcttaaactgaatcagtaattgaatgctattaagcaaaattaatttgcctcctgcaggaaggtttatgatgaatgaaaggattgctgatctgggagggagccaggcttccctctactcatcaatatttcagagccgtaggcagtgtcaggaaggtagctgtcctggctcagctgaccttgagcatgcatgaaggtaggatccagccagggaggttgtactgaaagggcttattacaagtcacttaatgataacttcagtgaaatttgcaaaatgcatctgtgggtttattgaatttacaccctcagctagtgggagacccccccaggtggttctctgggaccaacctgagactagtcccagtggaggtcacagctctgtgcagagctgaaatgtttaatgctggctctctggggggaaaaaattcctgatttgtagcatctgccaattcctgtgatgtcagtatactcccaccatagccaggtta

SEQ ID NO: 2658 - DNA, 516 bp, Homo sapiens
  MAP TO CHR1.1; EXPRESSED IN ADULT LIVER, SIGNAL = 3.9; EXPRESSED IN BONE MARROW, SIGNAL = 3.4; EXPRESSED IN PLACENTA, SIGNAL = 4.9; EXPRESSED IN FETAL LIVER, SIGNAL = 3.5; EXPRESSED IN LUNG, SIGNAL = 3.1; EXPRESSED IN HELA, SIGNAL = 5.3; EXPRESSED IN BRAIN, SIGNAL = 3.9; EXPRESSED IN HEART, SIGNAL = 3.1; SWISSPROT HIT: P98198, EVALUE 5.00e-37; EST_HUMAN HIT: AA557655.1, EVALUE 0.00e+00; NT HIT: gi15294794, EVALUE 1.00e-117
tgttaaggaaactgtggggccccagttccactgtccttccaggcgaggtgcaagcccccagtccccagtggtgccaccataccatagctgtggccattgatggagcacttgttgaaaaccatgatgttctgggtgagggtgcccgtcttgtcggagaagatgtactccacctggcccagctcctcgtttagggtggtggtgcgggcttctgcaggcgtccgcttcttcatgcagaacatcttcttatcccagttgatgaagtagctgtggcccagacggatgacctccacactgcacaggggacaagaggtgaggcttgggtcgggaagaagaggaggtgccccacccacatgggccttcgctgcaggccctccgcctggggagagacaagaacggagaagacacctgggcacagaaacctgggtgggaaagggcaaggagagcctgaaggtggagccggctgcacacagccagcagaggaacgccccgacccgaccctcctgatgctctccagac

SEQ ID NO: 2659 - DNA, 563 bp, Homo sapiens
  MAP TO CHR5.1; EXPRESSED IN LUNG, SIGNAL = 1.7; EXPRESSED IN BRAIN, SIGNAL = 1.4; EXPRESSED IN HEART, SIGNAL = 1.5; EXPRESSED IN BONE MARROW, SIGNAL = 1.2; SWISSPROT HIT: Q9UN74, EVALUE 1.00e-104; EST_HUMAN HIT: BG719192.1, EVALUE 2.00e-75; NT HIT: gi14861872, EVALUE 0.00e+00
tgtagcccgagtcagcatccaccgcgcgcacctttgccaccacgtggcccacacccaccgaccatggcaccagctcgctcactgcgccaccagtgccacccgcccgaggcgctagcagtgctggcgcgttgtcgttttcgtccagcacgaacacctgcagcgtcacgttgctgcccagaggtggcacgccggcatcgcgagcggtcacctgaaactgcagcagctctagctcctcgtggtccagcggctgcagcgcgtacaccttgccgctctccgcatgcaccgaaacgtagctcgacagcgcgcgctcccctacccgccgctctaccagcgagtaggacaccagcgcgttctcctgcgcgtccgcgtcccacgcagacacagtgaagatgtggcagcccggcgggttgttctccttcacgaacactgtgtactcgggctgcgcgaacgccggagcgttgtcgttcacatcagccacctccacagaaacactggccgtggcccacagcgaaggcgagcccccgtctcgcgcggtcaccaccagctcataggctgacacgctc

SEQ ID NO: 2660 - DNA, 587 bp, Homo sapiens
  MAP TO CHR7.1; EXPRESSED IN ADULT LIVER, SIGNAL = 0.51; EXPRESSED IN HELA, SIGNAL = 0.85; EXPRESSED IN BRAIN, SIGNAL = 0.9; EXPRESSED IN LUNG, SIGNAL = 0.93; EXPRESSED IN BONE MARROW, SIGNAL = 0.82; EXPRESSED IN HEART, SIGNAL =   1; SWISSPROT HIT: P28750, EVALUE 2.90e-01; EST_HUMAN HIT: BG706779.1, EVALUE 0.00e+00; NT HIT: gi6912583, EVALUE 0.00e+00
gcctgggccttaagtttctcattttagaggtagattttttagtgtaagctctagtgtgagatctaagtgtaaacacaatgattgtgaggatttttttgtactgtaatttatgctgatgcagcttttagaatgtgggctttttgggtatttcctgaaactgaaattggcatgctttctagagttatatattggcatgtttagtgatattaaagttgcagtgaagagttctgaatttaatttcttcttttctcagatatgtgtcacaaagatgtctacacggaactgccagggaatggactcagtgatcaaacccctggacacaattcctgaggataaaaaagtcagagttcagaggacacagagcacttttgacccatttgagaaaccagctaatcaagtaaagagggtgcattctgagaacaatgcttgcattaactttaagacctcctccactggcaaagagtcacctaaagttaggcggcactccagccccagctcggtaagtgcagtctttttgtttatcactgggtaaacagaaggaatagccttcttatgatagcatgcggtgctggaagacagcaggaaac

SEQ ID NO: 2661 - DNA, 594 bp, Homo sapiens
  MAP TO CHR17.1; EXPRESSED IN HELA, SIGNAL = 0.64; EXPRESSED IN BRAIN, SIGNAL = 0.78; EXPRESSED IN BONE MARROW, SIGNAL = 0.87; EXPRESSED IN HEART, SIGNAL = 0.49; EXPRESSED IN ADULT LIVER, SIGNAL = 0.67; NT HIT: AJ249579.1, EVALUE 9.00e-03; SWISSPROT HIT: P16692, EVALUE 1.50e+00; EST_HUMAN HIT: C15785.1, EVALUE 2.10e-01
gcactgcacttgcttctgagcacccaaaggatacttttgagaaccccaaaacagctgctgttgaaatggctcagctagggaaatgcttccctatcattaggccaaagctgtaatgctcaggtcctgggtttcttaacaatggtttggggctaacacctggtgggtcatcccctgaagaccttatatccacccagttgcagtcccgaccctatctcatggaatagtgcagaaatacaattctcccattgttctctgtcttggagattgagggaggggggaatactaacccccacctcaaaaagattagtgcaattattagccaacagtaatggctataagccaatatgttctcaaatcctcctgagcaccaagtcaccttagagtctcttaaagccccaaacacaagactgtgtgttttcttgaatttggccatggtgttctcaaaggctgctgggtcggtggttaatgctgcccttacccacaaggctaataagcggagaaagaaacagtgaataatgcatgtgtctgagccctaggtccccatgcccccataagtctgtaaaaagcaggtgtccggtccagacaacactagca

SEQ ID NO: 2662 - DNA, 553 bp, Homo sapiens
  MAP TO CHR6.1; EXPRESSED IN HEART, SIGNAL = 2.3; EXPRESSED IN BONE MARROW, SIGNAL = 2.1; EXPRESSED IN PLACENTA, SIGNAL = 2.1; EXPRESSED IN FETAL LIVER, SIGNAL = 2.5; EXPRESSED IN HELA, SIGNAL = 2.6; EXPRESSED IN BRAIN, SIGNAL = 2.1; NT HIT: D28769.1, EVALUE 0.00e+00; SWISSPROT HIT: Q15109, EVALUE 4.00e-51; EST_HUMAN HIT: BI772105.1, EVALUE 1.00e-106
accatggtgctatctcccaggggcagtagtaggtgctcaaaacatcacagcccggattggcgagccactggtgctgaagtgtaagggggcccccaagaaaccaccccagcggctggaatggaaactggtaagcggggctcctgttgcagcctcccaacttccagggagaccagcaatgatttggatccccgtcactctgcctcacagtcctttcccaaaggccttgcactgtttaggccctgcttctctgcttctagaacacaggccggacagaagcttggaaggtcctgtctccccagggaggaggcccctgggacagtgtggctcgtgtccttcccaacggctccctcttccttccggctgtcgggatccaggatgaggggattttccggtgccaggcaatgaacaggaatggaaaggagaccaagtccaactaccgagtccgtgtctaccgtaagaattccagggtcttctccaaggcctccctcttacctaagaaaaagccttcaaccccagccttggcccatgagggcctctgacttccactggcctc

SEQ ID NO: 2663 - DNA, 510 bp, Homo sapiens
  MAP TO CHR12.1; EXPRESSED IN FETAL LIVER, SIGNAL = 3.6; EXPRESSED IN HELA, SIGNAL = 5.1; EXPRESSED IN LUNG, SIGNAL = 2.6; EXPRESSED IN BRAIN, SIGNAL = 4.2; EXPRESSED IN HEART, SIGNAL = 2.9; EXPRESSED IN BONE MARROW, SIGNAL = 3.5; EXPRESSED IN ADULT LIVER, SIGNAL = 2.9; NT HIT: gi14762973, EVALUE 0.00e+00; SWISSPROT HIT: P06599, EVALUE 2.80e-02; EST_HUMAN HIT: AU133702.1, EVALUE 0.00e+00
ttaattacgggcagagacgctgggagagggcctcggaccacaggagccagtatatgtgttgagacagaatggggcgggaggacctacacatgtctacagccatgcacatgctccttctccacagcacacccagccaagcatccacctagaaccccccactccacccactggggaagccaaaccctttaccccagtctgggccatgccaaaaggtccagggttcatgcccaggaagagtacttccttggggccctggcagtagcgagtcacgtagttgcgatgtggctcccatgcatactccacgggattgtagatgatgcccacaggctccgaaaactgcagctggctcagctcagcattgagccgaagctcctcctccaggaagctctcagccaagcttccagggcagggctggggctccatgagggcacctgcaggctcatggatggaccccagcaggaaagcctggggcatatgtccatgccgctgtcacctgggaaaagagatgga

SEQ ID NO: 2664 - DNA, 547 bp, Homo sapiens
  MAP TO CHR7.1; EXPRESSED IN PLACENTA, SIGNAL = 6.8; EXPRESSED IN FETAL LIVER, SIGNAL = 6.5; EXPRESSED IN HEART, SIGNAL = 4.3; EXPRESSED IN BONE MARROW, SIGNAL = 7.6; EXPRESSED IN ADULT LIVER, SIGNAL =   3; EXPRESSED IN LUNG, SIGNAL = 2.8; EXPRESSED IN BRAIN, SIGNAL =   7; EXPRESSED IN HELA, SIGNAL = 6.4; SWISSPROT HIT: P21333, EVALUE 6.00e-27; EST_HUMAN HIT: BI870614.1, EVALUE 0.00e+00; NT HIT: AF252549.1, EVALUE 0.00e+00
agttgtctccaaggcaggtggtggggtggggctggcctcagccccacacccttggctgtgcccactccaggcacataagtccctctggcctctgccccctatgactcatctatcttcccaacaagtccccaactcccagccccaaccagctcctatctcctcaccttggagggatcagggggcaggacaccctccacagcaaacgggctgccaggcaccgggtgaccatcgtaggtgatatccaccttgtagggcccctcctccgggggcatgtagcgcacagcctgggcttccgctccaccgcctggctccagcttgcaggggatgggccggcgagagggcgaagtcatccgcacatccagttggccctgaccgccagcccctcgtgtgttcacagagaatgcttgttcctgtcccacagccacctctgcgtggagggcaagtgacaccatgaggagactccggtccaccctacccgaatacccctcactcccagggtggctcttgccccacttactgctattaaggccctgaactttgattttgc

SEQ ID NO: 2665 - DNA, 538 bp, Homo sapiens
  MAP TO CHR7.1; EXPRESSED IN BRAIN, SIGNAL = 0.79; EXPRESSED IN LUNG, SIGNAL = 1.1; EXPRESSED IN HEART, SIGNAL = 0.97; EXPRESSED IN ADULT LIVER, SIGNAL = 1.6; EXPRESSED IN BONE MARROW, SIGNAL = 0.59; SWISSPROT HIT: Q15165, EVALUE 1.00e-36; EST_HUMAN HIT: AA011231.1, EVALUE 0.00e+00; NT HIT: gi4505952, EVALUE 1.00e-112
taaagaatttggccagcaccacaactgaagaaaaatgaagatattctataaggggccatacttatcatcaggtgaaatattgatcccatttgctgaatcaaatccttctgctaccactttaacttcatttggactgtagtaaacaacatttgcccagtgtaagttcaagtatgtttctaaatactttaagaaaggatcagagaagtagtggtcatttgtggcatagaaatgtgccggtccaacagctgtgatgtcattcacactgaaaaagaaaaatagcatgtgagaggaaacaaaaggcctgttggtctccatattaaatattaagtactcataagatttatgcaacatgtgctttaaatttttggtaagaggaaaagacgagctaaaaatcacgactatagtcatatacaatatactataatattgttgccagagaacaattttgtatggtaccaggtaatctgaacacaggtcatttagcaattatggcaggattaccataagagaagaaagaacttagtgccatcagggcatg

SEQ ID NO: 2666 - DNA, 581 bp, Homo sapiens
  MAP TO CHR17.1; EXPRESSED IN PLACENTA, SIGNAL = 1.6; EXPRESSED IN FETAL LIVER, SIGNAL = 1.7; EXPRESSED IN LUNG, SIGNAL = 2.5; EXPRESSED IN BRAIN, SIGNAL = 1.1; EXPRESSED IN BONE MARROW, SIGNAL = 1.3; EXPRESSED IN HEART, SIGNAL = 1.2; SWISSPROT HIT: P52631, EVALUE 2.00e-38; EST_HUMAN HIT: AW368229.1, EVALUE 5.00e-76; NT HIT: gi14786029, EVALUE 4.00e-76
gtgaaacagggagtcaaggccatctccacccaccagggggcagtaggtgcttgcaactagaagcagtgatgaggcctcagcagccaccagcaggtggggtgggtgggagcctcccttaccgctgatgtccttctccacccaagtgaaagtgacgcctccttctttgctgctttcactgaatcttagcaggaaggtgcctggaggcttagtgctcaagatggcccgctcccgctccttactgataaagcccatgatgtacctggagccaaggaggaggaacaatgttgttattgctaacagggcatccatcccctgccactggcttgctgagagcaggggacttggttacatctgtgcacactctgtccaacctacccttcgttccaaagggccaggatgtactttttcacaaggtcaatgatattgtccagccagacccagaaggagaagcccttgccagccatgttttcctggagaaaagagtaatgggaaagccaagtctactgccatcccagcccttcccttcctaggggtgcagtgcatcacccaaatcctcaggcccgtctaccttcaggcaggtc

SEQ ID NO: 2667 - DNA, 523 bp, Homo sapiens
  MAP TO CHR2.1; EXPRESSED IN ADULT LIVER, SIGNAL = 1.5; EXPRESSED IN PLACENTA, SIGNAL =   2; EXPRESSED IN FETAL LIVER, SIGNAL = 1.5; EXPRESSED IN LUNG, SIGNAL = 1.5; EXPRESSED IN BRAIN, SIGNAL =   2; EXPRESSED IN BONE MARROW, SIGNAL = 1.5; EXPRESSED IN HEART, SIGNAL = 1.3; EST_HUMAN HIT: BG106497.1, EVALUE 1.00e-79; NT HIT: AL161516.2, EVALUE 1.00e-04
cctctaaaaacaacggacggaaaaaaaatcttggcttctttacaaattttttacatttacaaaaacttgcaactttcagctttagtattgataatgttcagttgacaatacctcaatgttatttttatactttgtacctaaaagtgaatgtttacttactgttagttgcttgcacgttttcctctagtttacagagcactcttaattcagacaccagccaagcacagagtttggtaaactcgggggaactggctccagcagagactgcctgagagagcgctccatcttccaacaatgggcccttgtaactggtgagcaagaaattacatttcagaagaaaatacaatcatacctaatatattacagataaaacatatctatgtcttatttatataagcaataatttaataaagataagttagtacttatctttattttaaatggacaaatataaacataatttagaactatactgaaccattacaaaaagcagctaaatggtagctgcatttcaacctttcaa

SEQ ID NO: 2668 - DNA, 563 bp, Homo sapiens
  MAP TO CHR14.1; EXPRESSED IN FETAL LIVER, SIGNAL = 0.55; EXPRESSED IN LUNG, SIGNAL =   1; EXPRESSED IN BRAIN, SIGNAL = 0.98; EXPRESSED IN HEART, SIGNAL = 1.2; NT HIT: AE005809.1, EVALUE 3.40e-02; SWISSPROT HIT: P12842, EVALUE 1.20e-01; EST_HUMAN HIT: BG913168.1, EVALUE 3.00e-56
tcttccccaaatcacctcagactggcttcccatcaccaactcctcaccaagtcgatgacgcagtcagttcctgacaggtccaggtgcaccagggcgttgggttgggccaggaaactgtagagggcctggagtaggaaggaagaggggttgcaggggaagggatgatggagtctcgccacccccagaggccatggggcagaaggcctcccagctcctgaagcttaagcatgctttctgcagggggctgaggctgttctgaggactcacattggcctcatccgtggcgaggagcccaggattcttgctcaggtccaggtatcgaagggagctggcaaatgctgggtttgccccgaaggtctggccgagtgcctggagccctgagcacagcgggcactgggctgggttggcccctagccccacctcttcccctcagcacataactcttcccctctccccaaacgtggctccttttcactcttccatccctgaggtggtgtgtgaatgtgtgggtgtacctctggagctcaacaccccaggcagcaccagggtagggtcagaggtca

SEQ ID NO: 2669 - DNA, 580 bp, Homo sapiens
  MAP TO CHR20.1; EXPRESSED IN HELA, SIGNAL =   2; EXPRESSED IN FETAL LIVER, SIGNAL = 2.1; EXPRESSED IN BRAIN, SIGNAL = 2.6; EXPRESSED IN LUNG, SIGNAL = 1.4; EXPRESSED IN HEART, SIGNAL = 1.5; EXPRESSED IN PLACENTA, SIGNAL = 2.8; SWISSPROT HIT: P13361, EVALUE 3.30e-02; EST_HUMAN HIT: AL580725.1, EVALUE 0.00e+00
acccgctaggtcaggagtgctggtgctctcagggatgctctgctccacaaccacatgattgtctggcttggccacgttccacacaaagctggcttccccggagtgacatgtggcattgtgcaaggaaagcccctcaggggtttttgccagaaaactgcacccactgcatacaaaggttgggtctttattaaagtctgtgtgctctgagttcatatgtcccacaaattgggtcatgtcatgggatctgaaatcgcagtatttacaggaatataaatagccatctaaagtgctccgatgcccattggccagtgtagagccatcagtactgctggggttctgtgctgcctcactgctggcagcagatgcttctgggggcagatcctgctggggtccttcaggcaaggtctcagcgggctgggcctccatgctggcatcttgcaacaccacagtcttcactgggatcatgcatggtgtggtggatttcctcttgctggccatggtgacaatcactgggtgatcagcagttgagagcttgtcccataaggggcctaacaatacaagttccagcttctcgatgagg

SEQ ID NO: 2670 - DNA, 525 bp, Homo sapiens
  MAP TO CHR7.1; EXPRESSED IN HELA, SIGNAL =   1; EXPRESSED IN BRAIN, SIGNAL = 0.76; EXPRESSED IN HEART, SIGNAL =   1; EXPRESSED IN LUNG, SIGNAL =   1; NT HIT: AF039433.1, EVALUE 0.00e+00; SWISSPROT HIT: P03999, EVALUE 4.00e-66; EST_HUMAN HIT: AL524418.1, EVALUE 1.00e-24
tcattcacagagcccaagtgtttttagaggaggggttttgtggggtgggaggatcacctataagaggactcagaggggggtgtggggcatccatgagaaaaatgtcggaggaagagttttatctgttcaaaaatatctcttcagtggggccgtgggatgggcctcagtaccacattgcccctgtctgggccttctacctccaggcagctttcatgggcactgtcttccttatagggttcccactcaatgccatggtgctggtggccacactgcgctacaaaaagttgcggcagcccctcaactacattctggtcaacgtgtccttcggaggcttcctcctctgcatcttctctgtcttccctgtcttcgtcgccagctgtaacggatacttcgtcttcggtcgccatgtttgtgctttggagggcttcctgggcactgtagcaggtactgcaggggaaaaaggggttaggggaaggcaaaggttgctactccactggagggggttcctaaagaggagtctggggg

SEQ ID NO: 2671 - DNA, 522 bp, Homo sapiens
  MAP TO CHR7.1; EXPRESSED IN BRAIN, SIGNAL = 0.5; EXPRESSED IN HEART, SIGNAL = 0.66; EXPRESSED IN FETAL LIVER, SIGNAL = 0.4; EST_HUMAN HIT: BI027352.1, EVALUE 7.30e-01; NT HIT: AJ227874.1, EVALUE 2.00e+00
ctatgacctgccagggtctcttacccaaagcagatactaacatctgttgttttcacttgggatgcctcagattgcatgagccatattacttgtcaagattaaacaagtgactcactgtgtttatctttctgctagcttccaaagtcatgttgctgatattgaaatgtcaattccttgacctttggatgcacatgggagtctcagagaacattccaagcatttgaaagtaagttgtaaaaatctggtactggaaagaaacataacttcagttgaagtctttggggttaatgcagtactgtattaaaacagcactctgtgttcctcgaggtttacttgagcaaatttagacagcagtgtaggttaatgtaattactccttggaattgctgaattcttagtgataagtggcttggaaataagtatttttcttgggctatatatttgtactccttaggtacatgtacttgggatagtgtcctgtaatctgttatgcagaactcttccttctcaggaatgcccaaga

SEQ ID NO: 2672 - DNA, 591 bp, Homo sapiens
  MAP TO CHR7.1; EXPRESSED IN HEART, SIGNAL = 0.82; EXPRESSED IN BONE MARROW, SIGNAL = 0.65; EXPRESSED IN BRAIN, SIGNAL = 0.64; SWISSPROT HIT: Q10025, EVALUE 5.70e+00
caaacccacacatcttgtcgtttccatttttctccatccaaaaccttgcccggatgatcctggagactcagcaagaaataacccaacccatctcaccagtggattcagtatgaaactctaggtggtaacatttggggacggttgactcttttatttctctcaggaaagaggaaatgagtacttatttgaaaacacgagttccctctggagactgtgtctttaaatgagcatttgaaattgcagatagctttttttttactttattttttttgaggctgcacagaaccatattgtagtaatattctgatttttatcacaacctcaaatatttaagtgtcaaaatctggccaagccacctgcaaatgtttgccatggctactggccaagaaaaacagcaaacagcaatgaaagtcttcattcaggctcagtgcttaagctgcatccagccagaaaggctgggacccacctgtgcccacgcatagtgctcttgtgctgcggccagcgggtgtgttcatggctgagactttgtgggagaaggggccacctggctcctgctcccccctcttcccttcccttctatcagtgcttggc

SEQ ID NO: 2673 - DNA, 580 bp, Homo sapiens
  MAP TO CHR19.1; EXPRESSED IN FETAL LIVER, SIGNAL = 1.1; EXPRESSED IN LUNG, SIGNAL = 2.1; EXPRESSED IN HELA, SIGNAL =   1; EXPRESSED IN BRAIN, SIGNAL = 0.97; EXPRESSED IN HEART, SIGNAL = 2.1; EXPRESSED IN BONE MARROW, SIGNAL = 0.88; SWISSPROT HIT: P90747, EVALUE 4.00e-26; EST_HUMAN HIT: AW384442.1, EVALUE 1.00e-106; NT HIT: gi15308579, EVALUE 1.00e-109
tgattgttccttgcttgtggggctctgtggggcccacccctgggacccctacctgtggacaggtgtggacgccaagctgtaccacctggaggggtctgggagcctcagtccacacctgccctgccagcatttcctgagccatcccagctacagcccccatctctggggccctgggtcctgtaacttggggatgacaattcccgtgcctatatcagcctggccctggcaggcccatgcatccctggccttccagcacctctggggcccaccttggaacgggagatgaagaggaagcagccggccagcagcagcccctgtagggtggcctggaagtcactgaacttgactccctccaggtagaggacgctctggctgtaggccaggatgagggcattgagcgccaggatcttgaacatctgtagcgtggtcaccagcgtgcagcggccctgcttgatcacgtggcagactgcagggtggtggggaggcaggtgtgggtgtgggtaggggtgccaaggggggaatgaagggagggggagcgggggcaggcaactcactgcactggatggatgagagcttggag

SEQ ID NO: 2674 - DNA, 582 bp, Homo sapiens
  MAP TO CHR10.1; EXPRESSED IN HELA, SIGNAL = 1.3; EXPRESSED IN BRAIN, SIGNAL = 1.5; EXPRESSED IN LUNG, SIGNAL = 1.9; EXPRESSED IN HEART, SIGNAL = 2.4; EXPRESSED IN ADULT LIVER, SIGNAL = 0.78; EXPRESSED IN BONE MARROW, SIGNAL = 1.5; SWISSPROT HIT: P05423, EVALUE 6.00e-79; EST_HUMAN HIT: BE294228.1, EVALUE 0.00e+00; NT HIT: gi4502436, EVALUE 0.00e+00
tcacgtccagagtcaccttgcccaggaggagttgcaccctttcggacttgcagatgggcagcttgccaacctgaccctctgtcaggtcagctagggtagaagcattctttgccagcctggcttcctggtcgttctcctgcttgatgagtaccacctctctgtccttgccctgtacctctgccttgatgggcttgatgtcctggataggtgggtggccagggagggtgtctggcaactggaggaacagcaattcctcctccttggtgaggctcagctccctgggcagctctgccacggatatgtccttcgggaggcccgggggtcttcctggctgctctggaaggagcctttatcttggcctcctcctcatcttgtagctcctctttcagtttcacagtaggtacccccacctctttcttggggccagccagccaaggtttaacatctggttcattgttttcttccttaaaaagccaccctgagtgagccagtggcagctgcacaggcatgttgcgagtgtcattcctcagcccagggtcatcaatgaaatcgtccttctacagcatggtgagatgtttcgtg

SEQ ID NO: 2675 - DNA, 509 bp, Homo sapiens
  MAP TO CHRX.1; EXPRESSED IN FETAL LIVER, SIGNAL =   1; EXPRESSED IN PLACENTA, SIGNAL = 1.5; EXPRESSED IN LUNG, SIGNAL = 0.67; EXPRESSED IN BRAIN, SIGNAL = 1.2; EXPRESSED IN BONE MARROW, SIGNAL = 1.2; EXPRESSED IN HEART, SIGNAL = 0.76; EXPRESSED IN ADULT LIVER, SIGNAL = 1.4; SWISSPROT HIT: Q00706, EVALUE 2.80e+00; EST_HUMAN HIT: BE153903.1, EVALUE 1.80e-01; NT HIT: AF195953.1, EVALUE 0.00e+00
ctgtaaagacggcaagagggagaggctcactcgcagtcactgacgttgcaaggaatcatcagattccaaataattatttgcaattggtgcatttccttgctgtgaatttctttctcagggactctggccatggggtgctggtgggatctgttccagtcaagttatctattctctatgtctcctatgggtgtggacgaaaggagatgggctgggccaccttggccatgtttgagttaacaaatgacaatagaattcctgcttagaatgctagggaaataggtttctttgacctcctgggaggaattgtaatcaccaagttttcaaaaggctagggaatcttaactgaaggctgcttttcatttgagacaggaagagacagacacggagggtgagactgataagtgaaagggcgtgaagcaccatttcccccttcaggatgctggggctgggctggagaagatgcaaccggaggtggtggtggtgatggcggaatccactgtgcctgacct

SEQ ID NO: 2676 - DNA, 420 bp, Homo sapiens
  MAP TO CHR17.1; EXPRESSED IN FETAL LIVER, SIGNAL = 1.8; EXPRESSED IN BRAIN, SIGNAL = 1.5; EXPRESSED IN BONE MARROW, SIGNAL = 1.1; EXPRESSED IN ADULT LIVER, SIGNAL = 0.63; EXPRESSED IN PLACENTA, SIGNAL = 3.3; NT HIT: gi14773922, EVALUE 4.00e-78; SWISSPROT HIT: O42354, EVALUE 2.70e+00; EST_HUMAN HIT: BF376204.1, EVALUE 6.00e-78
aaatcgggaagagttccctcttcaaggatgggaaggaagtcagatattctgtcactgaaaggctggtggaaagaagtgctctccacattctctgagcctgctccccatcctcttttccttcttgcaggaaagctcatcatctgcaatgtcactggcattgcccacaggcgtccccagggtgagagctatgaccaggcgatccgcaatgatgagacagggctgtggcagtgccccttctgtcagcaggacaatttccctgaactaagcgaggtgtgtgctgcagcattatcctgctcagtggatttccttggttgaatgatctcggtgcctagaagggaatcagaaatgagggtgttctagatcattctctcaccaaacaagtacacaaagaaggaagacggacgggaaacacacaggttt

SEQ ID NO: 2677 - DNA, 552 bp, Homo sapiens
  MAP TO CHR13.1; EXPRESSED IN ADULT LIVER, SIGNAL = 5.5; EXPRESSED IN PLACENTA, SIGNAL = 4.9; EXPRESSED IN FETAL LIVER, SIGNAL = 3.8; EXPRESSED IN BRAIN, SIGNAL = 3.4; EXPRESSED IN LUNG, SIGNAL = 2.5; EXPRESSED IN HEART, SIGNAL = 1.7; EXPRESSED IN BONE MARROW, SIGNAL = 4.1; NT HIT: D87466.1, EVALUE 5.30e-01; SWISSPROT HIT: O58312, EVALUE 5.20e+00; EST_HUMAN HIT: AI183969.1, EVALUE 5.00e-02
cactaactctggagggccacctagagaaaagaagtgtttcaggataatcactctgcaaactgtagacaagagacccagaaaccaccattcttttggtgctgtttagaatttggacaaagagccacagacacatttttgaggtgaggagaactgcgttttccttttcataatgtaaaaaaacccatctttagcatttttggaataagcaatattcatctctcaattagtgttaacagctaatcagggtgcagcaggatagtagagctttcctcgaacagcaggcagcttgttttattttttcaatgcagcttaaagattatttgaaaaatctccttcagagaccagtgtgcggggagccacctaccccagtcagaatttaaaatgatccataatacaatattaatgattgatgcggaagctcacagtttggggctggggtttaattagataagcattgcagctgttttcgggtggaagcaacttgataggacgtggagctgttatgtgacttcccatctacagggtatctattgaagcggaaacagaagcaag

SEQ ID NO: 2678 - DNA, 568 bp, Homo sapiens
  MAP TO CHR19.1; EXPRESSED IN FETAL LIVER, SIGNAL = 2.3; EXPRESSED IN LUNG, SIGNAL = 3.4; EXPRESSED IN BRAIN, SIGNAL =   3; EXPRESSED IN BONE MARROW, SIGNAL = 3.3; EXPRESSED IN PLACENTA, SIGNAL = 3.5; EXPRESSED IN HELA, SIGNAL = 3.2; EXPRESSED IN HEART, SIGNAL =   3; EXPRESSED IN ADULT LIVER, SIGNAL = 2.1; NT HIT: gi11863122, EVALUE 1.00e-75; SWISSPROT HIT: P30530, EVALUE 1.00e-18; EST_HUMAN HIT: BG749585.1, EVALUE 2.00e-75
tccttcccatccaatctctgacccctcagcagcactgcccgctggcctctctcccagcccttctctcccctgtgcttcctctcatgggaggcctgcacgagttgcccacgtgtgtgcccttggcaccctgcacccacttcctgggaacaggggagggggtcaggaagaggtgggggtgccagcttcccctcttccctgtcctccagtgcccctgggcccccctgagaacattagtgctacgcggaatgggagccaggccttcgtgcattggcaagagccccgggcgcccctgcagggtaccctgttagggtaccggctggcgtatcaaggccaggacaccccagaggtgggtgctgctggtgggattggagtggagtggcttggggaggagggaggagaacatatcagggcagacatagatggttgtgaaggttgggtagtacacaattgctctatgcctagggggcacattcagggaaggttcacattcacattctggggagaataagggggtctaagggagggcatggggaatggctgtttttgaaccactgcaaaagcatttcag

SEQ ID NO: 2679 - DNA, 583 bp, Homo sapiens
  MAP TO CHR9.1; EXPRESSED IN HEART, SIGNAL = 0.76; EXPRESSED IN ADULT LIVER, SIGNAL = 1.6; EXPRESSED IN BONE MARROW, SIGNAL = 1.1; EXPRESSED IN FETAL LIVER, SIGNAL = 1.2; EXPRESSED IN LUNG, SIGNAL = 0.59; EXPRESSED IN HELA, SIGNAL = 1.3; EXPRESSED IN BRAIN, SIGNAL = 1.2; NT HIT: gi9631294, EVALUE 2.20e+00
ccagcttcagcctgagagagagatagatactgatcgctagaaaggagaggattaatatggaataatcctgtgtacttaagaagaggatattgacatgtctgcattaggttaggtttttagacagggaaataattacaaatccccaaaggtatttttggggggagaaaagggagggagaatcttgttttattagttaatttatttttggtgcttatttacttaaataagcataagtagtagaagtgtgacattttatagttattttgtgcatttcaaaaagaaaaactcagtctcttcctggatggtctaatggaaccacaaccttgacatatttaataaagttaaacattgcacaaggagcttttcttttgaggcctttaagaatgttcaaacatgtcttgttagctcactaacaggtccaattgggatgtagaggagatgctggcagcctgtcagatcctgaggcccccaggcactgagattagccccagattgcatcctgggggttagtgtggaactgctaatagctttcagtcttttacaatctagaattcagaggggaagggatcttagggactttggg

SEQ ID NO: 2680 - DNA, 598 bp, Homo sapiens
  MAP TO CHR6.1; EXPRESSED IN HEART, SIGNAL = 0.89; EXPRESSED IN BONE MARROW, SIGNAL = 1.3; EXPRESSED IN PLACENTA, SIGNAL = 1.3; EXPRESSED IN FETAL LIVER, SIGNAL = 0.92; EXPRESSED IN BRAIN, SIGNAL = 1.1; EXPRESSED IN LUNG, SIGNAL = 1.5; SWISSPROT HIT: Q06846, EVALUE 5.00e-03; EST_HUMAN HIT: BI761941.1, EVALUE 1.00e-120; NT HIT: AB057764.1, EVALUE 1.00e-29
tgagagcccagttcacacagccatgttggagtccagggatgtcgaatgccaaagccccttcccttgccatgggggttactgcctgggctcttgccctatagcctggggtcaggtgttccatctaatactatcttctttaactctgagggctgcaggaaactgaaaacacacctgcagcatctccggtggaaaggagcgaagaacacggactgggagcacaaagagaagtgctgtgcgcgctgccagcaggtgctggggttcctgctgcaccggggcgccgtgtgccggggctgcagccaccgcgtgtgtgcccagtgccgagtgttcctgagggggacccatgcctggaagtgcacggtgtgcttcgaggacaggtaagcatggccggtggttggatccctcccactgattcaggtctcggaggaggcctctttacaaaccgctcataaagagagcactcactcctcaccttcagccagtaaatgtgtaccgagtgcctgatagggagctacctttctagccttggaagttatcttcatccaaaaataaattttatgtagcaacatttttttcatttacagaagtttgggccaagtgt

SEQ ID NO: 2681 - DNA, 545 bp, Homo sapiens
  MAP TO CHR8.1; EXPRESSED IN PLACENTA, SIGNAL = 6.4; EXPRESSED IN FETAL LIVER, SIGNAL = 5.3; EXPRESSED IN BONE MARROW, SIGNAL = 6.4; EXPRESSED IN LUNG, SIGNAL = 4.4; EXPRESSED IN BRAIN, SIGNAL =   6; EXPRESSED IN HELA, SIGNAL =   6; EXPRESSED IN HEART, SIGNAL = 3.4; EXPRESSED IN ADULT LIVER, SIGNAL = 3.8; SWISSPROT HIT: Q9ZM46, EVALUE 5.10e+00; EST_HUMAN HIT: BE274855.1, EVALUE 3.00e-34; NT HIT: gi6677620, EVALUE 2.00e-13
taaaaagtctgcccctggtgaggagaaccagctgactactcctttctctccagaatgctggggttagatctggtggtgcgagatgacaatgggaacatcctagaccctgacgaaaccagcaccattgccctcttcaaggcccatgaggtggcctccaaaaggattgaggaaaagatccaagaagagaaggtacagttcctcaaatgtgaaattctgcccactgaggttccatttttgccttggtttttaatgaaagaaagggaaatcattgagaacaaaactacttctgtagttttcgtcctcattttaaaagtgaaacatagcagaaaggatgaggcaggtatatatatatatatgttctgatatggaaagatcgcaaagatacgtattaagtgaaaagatcaggatccataatggtatatatgaaatgctattatttgtgtttcaaaaaatgtatataaatctatgcttgcatatacatagactaactctgaaataatagacaagaaataattattaatggatgcatctgggaaggaaaacgg

SEQ ID NO: 2682 - DNA, 551 bp, Homo sapiens
  MAP TO CHR11.1; EXPRESSED IN PLACENTA, SIGNAL = 1.5; EXPRESSED IN FETAL LIVER, SIGNAL = 1.7; EXPRESSED IN LUNG, SIGNAL = 1.4; EXPRESSED IN BRAIN, SIGNAL = 1.3; EXPRESSED IN HEART, SIGNAL = 1.1; EXPRESSED IN ADULT LIVER, SIGNAL =   1; EXPRESSED IN BONE MARROW, SIGNAL = 1.2; NT HIT: J02769.1, EVALUE 7.00e-99; SWISSPROT HIT: P08195, EVALUE 7.00e-36; EST_HUMAN HIT: BG999262.1, EVALUE 0.00e+00
aaggctcacgtctatgtgccgccatccccagaatcatcattgtaagatggataaacaacctccctgtgacagaaagacagcaagcagtacctgtccaggaagggcagctgcatccaggccaatctcatccccgtagctgaaaacaggggtccctggcagggtgaagagcatcagctggtagagtcggagaagttgagccggcaagaaggaagtcaggagccttgcctgagacaactacagggagagacactccagtgagccccataacccacctctgcctctgtctcccaacaaccctttcttctcccatctgccccctttcccaccagcatggtactcacactccagctgcaccagcgattgccagtggcattcaaatactgtgtgactagggattttgtatgctccccagtagaaccagaatcagacaggtatgagctagtcaacagcaagtctttgttggattcgagtaggctcaggatctgctgaaggtcggaggagttagtccccgcaatcaagagcctgcagaggggagggaggagttcaaggtt

SEQ ID NO: 2683 - DNA, 517 bp, Homo sapiens
  MAP TO CHR20.1; EXPRESSED IN HELA, SIGNAL = 2.1; EXPRESSED IN BRAIN, SIGNAL = 1.5; EXPRESSED IN HEART, SIGNAL = 1.7; EXPRESSED IN BONE MARROW, SIGNAL = 1.6; EXPRESSED IN FETAL LIVER, SIGNAL =   2; EXPRESSED IN PLACENTA, SIGNAL = 1.7; EXPRESSED IN LUNG, SIGNAL =   2; NT HIT: U56089.1, EVALUE 0.00e+00; SWISSPROT HIT: Q15269, EVALUE 2.00e-22; EST_HUMAN HIT: N56712.1, EVALUE 5.00e-79
tgacacaaggagcactccacagtgtggaccagcaggggaccgtgcaccccacccacccccaggccctgcacccacacgtacagtttcgacaggtcgtccaggtgccgctggatgctcttctggaggaactgaatgacaggcagcagcgtcccggctctgaaagggagactccctaagcgtgcggggctcaccccgtggtacagtgggctcacttcatgctgcattggcatgtcaaagttcccttttatccagcaggacaagctggtccagtgacctgagccaccgatgaactgcgggggagaccctctacctggacttcagcttctgtccgtgcaacatgagcagtttgtgagtccagaggaggtagaattccaggtggcgagacacttcaaaggaggaagctaaaaactccagcactttctccacatacagttcaggaagggaggaggtgaccacttcaactgcaaaaggagaaaaaatcatgcttattctgccaccaactcaaaccaggggaaga

SEQ ID NO: 2684 - DNA, 547 bp, Homo sapiens
  MAP TO CHR22.1; EXPRESSED IN HEART, SIGNAL = 1.4; EXPRESSED IN BONE MARROW, SIGNAL = 1.3; EXPRESSED IN PLACENTA, SIGNAL = 1.5; EXPRESSED IN FETAL LIVER, SIGNAL = 1.4; EXPRESSED IN LUNG, SIGNAL = 1.4; EXPRESSED IN HELA, SIGNAL = 1.8; EXPRESSED IN BRAIN, SIGNAL = 1.4; NT HIT: X77633.1, EVALUE 6.00e-47; SWISSPROT HIT: Q61666, EVALUE 6.00e-14; EST_HUMAN HIT: AU121562.1, EVALUE 2.00e-47
gtggttatgatggtcccaggtcccaggggcactggccaagctaatagacaagggcatcaccaggtaagagatctcaccagaaccctctgtcttctttcagatgtgatggatgtagcatggtctccccacgatgcctggctagcctcatgcagcgtggataacactgtcgtcatctggaatgctgtaaagttcccaggtctggggcctcctctgactggttaacagcaagcagtactgcctgtcagtttctggagcaggggttgggctgtctccttagtcttggtggcaacagatgtgtcacagtggcctaggatttatgtgtcttgtcagtttttctttgtcagttacatttgtttaagctttaaaaagagattcatgcttaagaaaaatggtaactgagtgctagcatggcatgccacagatcaggagggtaatggatgggcagctgttgttggggaccctgatgctcctaaacctgctgtgtgcacccccaccactgggctctgggctcagctcagtcaccatctcctctgtgaaacccttgagc

SEQ ID NO: 2685 - DNA, 574 bp, Homo sapiens
  MAP TO CHRX.1; EXPRESSED IN BONE MARROW, SIGNAL = 0.42; EXPRESSED IN FETAL LIVER, SIGNAL = 0.39; EXPRESSED IN BRAIN, SIGNAL = 0.4; EXPRESSED IN LUNG, SIGNAL = 0.6; NT HIT: gi8924241, EVALUE 3.00e-30; SWISSPROT HIT: Q92830, EVALUE 2.80e-01; EST_HUMAN HIT: BG680761.1, EVALUE 0.00e+00
ttacggcagcaaaaggaaacattacaagaaataaggggaaaaaacaggaaaatatagactgtacctttttagttaaaacaagaggaactgccttaaactatgtgaaagcccaatattgcccccagtgtacctcaagggatagcttgaatctatagtgaatcacagaatgagagaaacctcctggtgcattattgatagatgttctttcactacttacttcgaccaaactttcgaacttccttcattaattgatgttttatatcagcattgattccttgtgccatagcaggagtgatttgtaatgtatttggcatagctcccaaagtagatgctactgggtctttttggtcatctacggagagactgcagtttttggctcctcctacaaatgcgttactaccaggtttttgaatcagcccatctttgctgagacttgtgaagtcgtcagacagagaatccacttggttgggtggcataagatctcctgtcatatttataagctctgatggagcagattttgacaggaagccatcaggtgtgatctgaccattttccatcttctcctcatggccat

SEQ ID NO: 2686 - DNA, 571 bp, Homo sapiens
  MAP TO CHR6.1; EXPRESSED IN BONE MARROW, SIGNAL =   1; EXPRESSED IN HEART, SIGNAL = 0.6; EXPRESSED IN ADULT LIVER, SIGNAL = 0.81; EXPRESSED IN PLACENTA, SIGNAL = 1.3; EXPRESSED IN LUNG, SIGNAL = 0.7; EXPRESSED IN BRAIN, SIGNAL = 0.91; NT HIT: gi14783018, EVALUE 0.00e+00; SWISSPROT HIT: Q9ULD4, EVALUE 1.00e-69; EST_HUMAN HIT: BG983545.1, EVALUE 0.00e+00
atgcttttggtccttggttgtcagtgtcagtatctagcttgtaggagcagactctttctaaaatgttcaagcagattctctttttttctaatagatgactccaaactgcctcctccgccaaccctggagcccactgggcctgcaccttccttgtctgagcaagaatcccccccggagccccctactctgaaacccattaatgatagcaaacctccaagcaggttcctaaagcccagaaaggtggaagaagatgagctcttggaaaaatcaccactgcagctagggaatgagcctttgcaacgcttgctcagtgacaatggcatcaacagactatccctcatggcccctgacaccccggccggtaccccacttagtggtgtgggtcgccgcacatcagtcctcttcaagaaggccaagaatggggttaagctacagagaagcccagacagggtcctggagaatggcgaggaccatggtgtggcaggctctcctgcctctccagccagcatcgaggaagagcgccactcccggaagcggccaaggagcaggagctgtagtgagagcgaagggg

SEQ ID NO: 2687 - DNA, 541 bp, Homo sapiens
  MAP TO CHR18.1; EXPRESSED IN BRAIN, SIGNAL = 0.5; EXPRESSED IN BONE MARROW, SIGNAL = 0.46; EXPRESSED IN FETAL LIVER, SIGNAL = 0.63; EST_HUMAN HIT: BG545518.1, EVALUE 4.00e-21; SWISSPROT HIT: O15084, EVALUE 5.00e-07
ttctcctgcccaatcaaaacccaatctattggcattttccttaaaaaaaaacaactttttaaaaaagaaatagctgccaattttgtaacatcttacgcctttggtatcatttactatgacatatgagaacggaaacaaaggaatgcttaccatagaacttaatgtttccctttaataggatcctagcaatacctgcaggatgtgtttctttaaaggttttacctggagactgggatgacagccaaagtccaataaagtcttcacaacttgaagatgacctttattgacagcaatatgaagtggtgtctgtcggcgcttgtttcgagcattcaaatcagcactacctcgatgtagtacttctataacagcgccttcatctccaaaagctgcatggtgaactgctctatcaccatctttatcctaatcattagtattgaaatgtgaattagtgaatattttagaaagaaaaaaaccttgaagctataataatataccaagaagcagattaatttgagaaaaggcaatgtaggaaacaacaaaa

SEQ ID NO: 2688 - DNA, 533 bp, Homo sapiens
  MAP TO CHR17.1; EXPRESSED IN ADULT LIVER, SIGNAL = 1e+02; EXPRESSED IN BONE MARROW, SIGNAL = 0.53; EXPRESSED IN HELA, SIGNAL = 0.47; EXPRESSED IN BRAIN, SIGNAL = 0.55; EXPRESSED IN HEART, SIGNAL = 0.96; SWISSPROT HIT: P04004, EVALUE 9.00e-27; EST_HUMAN HIT: AV653179.1, EVALUE 0.00e+00; NT HIT: AF382388.1, EVALUE 0.00e+00
tttccccaaaaggtcaacagaagcaaagtctggcctgagcaaacagactttgatcgatagctccacaaccacagccccctccagccggcctggctctaccaataccaaggggtttcagcccttttgagggagaagcaagacttgccctctctccataccagaggttctgccccagaagagaagctcgaagatgtcctcccagctgtcccgctgcatcatggcaaagtgttcaaacacagccgacagggagctgccttcacactcctcctgactgggctggtgctggaactggtactcccagtactgtttccctgaggagcagggtggtgggcattaggagggctgggccagggcaagactggagatcccagaggctgttgaagttaggatctcccagcatgaggtgggggtcaggggtgggcacatgctgaggcctgtccccagtgaaatgtgaaaggaatccaagactgctccactgcctgctcagtctcccaccaccccctgagtacccttgaagaagtagacccgctccc

SEQ ID NO: 2689 - DNA, 505 bp, Homo sapiens
  MAP TO CHR17.1; EXPRESSED IN BRAIN, SIGNAL = 0.8; EXPRESSED IN ADULT LIVER, SIGNAL = 0.75; EXPRESSED IN HEART, SIGNAL = 0.85; EXPRESSED IN BONE MARROW, SIGNAL = 0.97; SWISSPROT HIT: P38398, EVALUE 2.00e-80; EST_HUMAN HIT: BE564528.1, EVALUE 0.00e+00; NT HIT: L78833.1, EVALUE 0.00e+00
tctgagcatggcagtttctgcttattccattcttttctctcacacaggggatcagcattcagatctacctttttttctgtgctgggagtccgcctatcattacatgtttccttacttccagcccatctgttatgttggctccttgctaagccaggctgtttgcttttattacagaattcagccttttctacattcattctgtctttagtgagtaataaactgctgttctcatgctgtaatgagctggcatgagtatttgtgccacatggctccacatgcaagtttgaaacagaactaccctgatacttttctggatgcctctcagctgcacgcttctcagtggtgttcaaatcattattactgggttgatgatgttcagtatttgttacatccgtctcagaaaattcacaagcagctgaaaatatacaaaaataacaaggtactcaaaaactgaattgtcattaaaaaaatacatacttcatacaccttggaggtggaaatcaac

SEQ ID NO: 2690 - DNA, 538 bp, Homo sapiens
  MAP TO CHR7.1; EXPRESSED IN LUNG, SIGNAL = 0.68; EXPRESSED IN BRAIN, SIGNAL = 1.1; EXPRESSED IN HEART, SIGNAL = 0.65; EXPRESSED IN ADULT LIVER, SIGNAL = 0.7; EXPRESSED IN BONE MARROW, SIGNAL = 1.1; SWISSPROT HIT: O00222, EVALUE 5.00e-24; EST_HUMAN HIT: AW062520.1, EVALUE 3.00e-74; NT HIT: gi14753097, EVALUE 1.00e-72
aatgtttcccagataccccagtactgtatgcatggtatatgttcaataaaaacttgctgatccattgaaagaaccaataaacaaatttaagtttgttgaatgatcagggtatgctcagccctgagacactataacaaaaagacacaaaaaatagaaaatacattcatcattatccatatagaaaaacgtaatttatcaagtaatgaaaacaaatgaaaatgaaataaatgcaccacaggaaacatttgagtggttacctgtgcatttctttatatgactgttccttttcccatgtgatcctaacttgcagccaaaattctcctcccagaattctgcaaaccacacatttcttcgattattggcaagagttcggcttctaaagtatcgatcaaatcctatttcaaaggagaaaggtatgattttaatattctttcaaaattaaatattgtcagaactttcgaatggacattatattctgatcactgcatgaaaagaaaaaaacaaaacacataacaaatgagagaaagccagtagccca

SEQ ID NO: 2691 - DNA, 533 bp, Homo sapiens
  MAP TO CHR19.1; EXPRESSED IN ADULT LIVER, SIGNAL = 5.8; EXPRESSED IN FETAL LIVER, SIGNAL = 4.2; EXPRESSED IN BRAIN, SIGNAL = 3.2; EXPRESSED IN PLACENTA, SIGNAL = 5.8; EXPRESSED IN LUNG, SIGNAL = 2.4; EXPRESSED IN HELA, SIGNAL =  10; EXPRESSED IN HEART, SIGNAL = 2.3; EXPRESSED IN BONE MARROW, SIGNAL =   4; NT HIT: gi13645425, EVALUE 8.00e-03; SWISSPROT HIT: P51617, EVALUE 3.40e-01; EST_HUMAN HIT: BF516466.1, EVALUE 0.00e+00
agttttgttgctcacccaccaacagatggggtatagggctctgggcgtgcggggctggggcggcggttacctgggcgtcctggtagccctggagcagcaggaagtaggggcggttgctgggggcctggatgaggcactgagtcaactgatcgaagtccccggggtctgcagttccgatttgggcgtcggctgcccctggggccatgctaagtgcctgctgtctccgctcctgctgccgccgccgccgcccctgaaggctaagctccgacacgctgcgccgcaaagacaagttttctgagcgctccttgcctccagacccagctggggcccctgatccggtccccgggccaggactggccagcgctgccccacccgacgccgcccgggagcggttcttctgtggccgccacgaaggggcgccggtgcctgcggagagatggagaacagtgaggctgagcctggaaagacagggatagacacagagctgcagattatgagacaaagaactggttgcagagaggtgaggctgcttc

SEQ ID NO: 2692 - DNA, 576 bp, Homo sapiens
  MAP TO CHR12.1; EXPRESSED IN ADULT LIVER, SIGNAL = 0.92; EXPRESSED IN FETAL LIVER, SIGNAL = 1.1; EXPRESSED IN BRAIN, SIGNAL = 1.3; EXPRESSED IN LUNG, SIGNAL = 1.1; EXPRESSED IN HEART, SIGNAL =   1; NT HIT: gi14763839, EVALUE 1.00e-128; SWISSPROT HIT: P36896, EVALUE 9.00e-41; EST_HUMAN HIT: BF949313.1, EVALUE 1.00e-124
ccgttgtgccaattagtgtgggagttggaaaatttgtcaaatttgcaatgtcaggtttcttcctattctttggttcacagggttacccctctttgtccagcgcacagtggcccgaaccatcgttttacaagagattattggcaagggtcggtttggggaagtatggcggggccgctggaggggtggtgatgtggctgtgaaaatattctcttctcgtgaagaacggtcttggttcagggaagcagagatataccagacggtcatgctgcgccatgaaaacatccttggatttattgctgctgacaataaaggtaagggctgggcttggatacagcattcccagatagaggatgctagagaaagtgcatagctatggggtgcacagctctgtttgccttcatcattgtaacccgtagaaagaaaacttgagtaaggtcaaggtttccatgctttccttaaagtgtggagccttttattccatgaaaaggttatacaaaaatccaggttatcaagcaaataaacaagcagttcttactcagataaacaagatacaccccctcaccctacctgctcaat

SEQ ID NO: 2693 - DNA, 585 bp, Homo sapiens
  MAP TO CHR8.1; EXPRESSED IN FETAL LIVER, SIGNAL = 5.7; EXPRESSED IN HELA, SIGNAL = 5.5; EXPRESSED IN BRAIN, SIGNAL = 6.8; EXPRESSED IN LUNG, SIGNAL = 5.6; EXPRESSED IN HEART, SIGNAL = 4.4; EXPRESSED IN BONE MARROW, SIGNAL = 7.2; EXPRESSED IN PLACENTA, SIGNAL = 5.3; NT HIT: AF110520.1, EVALUE 0.00e+00; SWISSPROT HIT: P70213, EVALUE 2.00e-08; EST_HUMAN HIT: BF757689.1, EVALUE 4.00e-06
aattgtccacaatgggaaggtccagaagatatgcctttcaccagctctataagacgcaaattggtgagaggggcaccagcacatttgaagggttttgttctttcccttttccttgtgccagatcttagcattggagatgcttctgctcaattagatgaattaaattcactgggtttagttggattccgaggtaacaagggccaggtggcagcattgaatcgcccgagacaaggtgattctagttattataatggacagcgtagacaaaagaatgtttataataacatacccagtaatggtcagcacaggagaggtgaaatttataatggcatgactcggttggacctttggtactggctaaccaatcatggtgtttccaggaatgaaatacataggaagcctactgcatatttgtttgatctgtataagcagaaaaattctcaaacaaatgaaagaaaggctacattagatcgtggtaaacagccaaatgaaagaaaggctacattagatcgtggtaaacagcaatctcggccagtgaatcaatttccagacttgagacagtttgcagatccagaaccccttgaa

SEQ ID NO: 2694 - DNA, 508 bp, Homo sapiens
  MAP TO AC023121.3; EXPRESSED IN ADULT LIVER, SIGNAL = 1.1; EXPRESSED IN BONE MARROW, SIGNAL = 1.1; EXPRESSED IN HEART, SIGNAL = 0.72; EXPRESSED IN FETAL LIVER, SIGNAL = 0.93; EXPRESSED IN BRAIN, SIGNAL = 1.2; SWISSPROT HIT: Q93050, EVALUE 1.00e-37; EST_HUMAN HIT: AU119028.1, EVALUE 1.00e-118; NT HIT: gi4885084, EVALUE 1.00e-118
attcagtgtaggagtggccctaggcccatttacccttaacatttttttctctctcctttttagctatttcaagaagcccctgaatatctactttggatttattcctgaaataatcttcatgacctctttgtttggctatttggttatccttattttttacaagtggacggcctatgatgctcatacctctgagaatgcaccaagccttctgatccatttcataaacatgttcctcttttcctacccagagtctggttattcaatgttgtattctggacaggtacgtcagcccagaggcagactgtctgagatgattatacttgatcaggaagccagatgtttctctgaccctaaaaaatttataactgcccttctatgggacaattctagggctttgccacaaaatgtgataattattttgagaaattggatagtgttattcatagattagtaagaaagtactgttgggggaaatttgtgccatatttggaaactgcgtatgtgatcg

SEQ ID NO: 2695 - DNA, 539 bp, Homo sapiens
  MAP TO CHR5.1; EXPRESSED IN BONE MARROW, SIGNAL = 0.88; EXPRESSED IN ADULT LIVER, SIGNAL =   1; EXPRESSED IN FETAL LIVER, SIGNAL = 0.94; EXPRESSED IN LUNG, SIGNAL = 0.91; EXPRESSED IN BRAIN, SIGNAL = 0.78; EXPRESSED IN HEART, SIGNAL = 1.2; SWISSPROT HIT: P02461, EVALUE 5.10e-02; EST_HUMAN HIT: BF947285.1, EVALUE 3.00e-77; NT HIT: AF234559.1, EVALUE 2.00e+00
aatgggagtggtgaggacagagagagaggtgagatgaaagagagaagaaatgagagagagagggagagagagagggagggggaaggtgcagaaagaagagagagacagggcagcataggaagcggagtgttaggtcgcagcgtcagtgggtctaggttatctgcagaagcaaagagccaaatgaagcacacagaaaccagcagagtgggctccgcagggaagtctcctctctgagggcctgcccctcacttgcagtcagtcggctctagcccggctctctccccttcctccccacacctgcaggacctgccccacaccccatttctccaggatccctgggctacccgggcagggattcagaaggtcttggctagtcagcactttctagtccttgcagagaaaggggcccagagactcctaagtctatgcaactgtggctggggtatgagccccagccagaggaggagacaaggccaaaccccaaacactggctgagcctggcctcacaagccatccctggaaccagggccttaaagagg

SEQ ID NO: 2696 - DNA, 542 bp, Homo sapiens
  MAP TO CHR16.1; EXPRESSED IN FETAL LIVER, SIGNAL = 1.9; EXPRESSED IN BRAIN, SIGNAL = 1.8; EXPRESSED IN LUNG, SIGNAL = 2.1; EXPRESSED IN HEART, SIGNAL =   2; EXPRESSED IN BONE MARROW, SIGNAL = 1.8; EXPRESSED IN ADULT LIVER, SIGNAL = 2.1; EXPRESSED IN PLACENTA, SIGNAL = 1.7; NT HIT: Z35415.1, EVALUE 0.00e+00; SWISSPROT HIT: P12830, EVALUE 2.00e-20; EST_HUMAN HIT: BI091629.1, EVALUE 0.00e+00
acgtgatttctgcatttcccagcacatgggtctggggcccgcctctctcgagtcccctagtcgtcctcgccgcctccgtacatgtcagccagcttcttgaagcgattgccccattcgttcaagtagtcatagtcctggtctttgtctgactctgaggagttcagggagctcagactagcagcttcggaaccgcttccttcatagtcaaacacgagcagagaatcataaggcggggctgtggggtcagtatcagccgctttcagattctaaagaagaagggacaaaagcatcttttagtgaaaggaagggcacacctgtcatctggggcaagaagtctagcaatatgtaaggtacgacaatgcacccagacttgtggcacaccacggagcagtgaacaccaacaacgtacatttatacacactgtcatggaaggatgcagaagcacaggatatgttgttgatggaaagagaaagtgaaatggtgagttatatgtaggcaggagagatgcaagcaccaaccagtcaggatggagtccccataga

SEQ ID NO: 2697 - DNA, 579 bp, Homo sapiens
  MAP TO CHR14.1; EXPRESSED IN ADULT LIVER, SIGNAL = 1.3; EXPRESSED IN PLACENTA, SIGNAL = 2.8; EXPRESSED IN FETAL LIVER, SIGNAL = 1.2; EXPRESSED IN LUNG, SIGNAL = 1.6; EXPRESSED IN BRAIN, SIGNAL = 0.75; EXPRESSED IN HEART, SIGNAL = 1.5; EST_HUMAN HIT: AI076630.1, EVALUE 4.00e-95; NT HIT: gi5031984, EVALUE 3.00e-95
gcactcatgctgtttcttgctccctcctctccccagtgctattcccactcctccagatgctccaaatatcatgcacaaatgagcagggccgtggcgggagtgggtgcagtgcgctgctgccgccgaggtgttgtgcatgatgtttggacgctagactagttgcatctgacgggagaagtttgtattgtaccagcgcatgccttggaaagacttaagtaatgcaaaagattgtccttttttttcttttaatctactgacaagttgctctagcaacccaaagaagtgaagagaaagaagctgcctcaccgcccagacattgatttgttcagatgtttcaatgcctcatgatacaataaaaccacaacatcttcctaaaataaaaaataataaaaataaataattaaaataaaaatatgagcactttaaacaggccaaacaatactatatattatttttggatacatatacaaaaatagtatgtatagatgcatgggtaaccaaagcacatggtaaccaaaaacaggatactagttactctggaaagggaaggagagaattaggattgagaagcatcggaag

SEQ ID NO: 2698 - DNA, 583 bp, Homo sapiens
  MAP TO CHR20.1; EXPRESSED IN ADULT LIVER, SIGNAL = 0.74; EXPRESSED IN PLACENTA, SIGNAL = 1.6; EXPRESSED IN FETAL LIVER, SIGNAL = 0.98; EXPRESSED IN LUNG, SIGNAL = 1.3; EXPRESSED IN BRAIN, SIGNAL = 1.3; EXPRESSED IN BONE MARROW, SIGNAL = 0.86; EXPRESSED IN HEART, SIGNAL = 1.1; EST_HUMAN HIT: BE168239.1, EVALUE 1.00e-111; NT HIT: gi13653671, EVALUE 1.00e-111; SWISSPROT HIT: P08487, EVALUE 5.00e-55
ctcatttggggtggaacttggtctttggggccctggcctgttttccccagcctccctcactctgtgtcttccacaggcggaacgggaaagtccagcactgccgtatccactcccggcaagatgctgggacccccaagttcttcttgacagacaacctcgtctttgactccctctatgacctcatcacgcactaccagcaggtgcccctgcgctgtaatgagtttgagatgcgactttcagagcctgtcccacagaccaacgcccacgagagcaaagagtgagggaagggcctgggggcggacaaggcagggcagggccatgggtggtgctggccgggcctgactctgcctgttctcaggtggtaccacgcgagcctgaccagagcacaggctgagcacatgctaatgcgcgtccctcgtgatggggccttcctggtgcggaagcggaatgaacccaactcatatgccatctctttccggtgaggggtgtggcactgggttgtggggccttgcttgggtctgagctgccctgaccctgtgtgactgttttgtccttgtgaagggctgagggcaagatcaagcat

SEQ ID NO: 2699 - DNA, 563 bp, Homo sapiens
  MAP TO CHR17.1; EXPRESSED IN HELA, SIGNAL = 1.1; EXPRESSED IN BRAIN, SIGNAL = 1.2; EXPRESSED IN HEART, SIGNAL = 0.63; EXPRESSED IN ADULT LIVER, SIGNAL = 0.94; EXPRESSED IN BONE MARROW, SIGNAL = 1.3; SWISSPROT HIT: O70191, EVALUE 4.20e-02; EST_HUMAN HIT: BF743607.1, EVALUE 2.00e-01; NT HIT: gi13652329, EVALUE 0.00e+00
tggcacctgtgaaacaactcgatgtgttttcaacagatctctcgtctcaatcaggaggtgtctcagcttagccgggagctgcggcacatcatgggcctgctgcaggccaggtctgggtcccccaggccacccagcaggctccgcttggaccccagaccctccttgtccacagctgaggccaccatgcctctctccttgtgcgtccagaccaccacccagcctccaggatactacgcttgctgaagttcactgcccagccagtgtggggaccatggagacagggactgcgctcctggacttgagaccttccatattgcccccctacccctcagagcctgaccctctgggaccctctccagtgccagaggctcacccccaaccccaagcctcttgaggcacagtttccagtccaggtcagacacgttccactgaccctggcccagggcccaggcctgtctggggtgggcgctgccgctcaccactcagggaggacctgggccccttggcttcctgccttggggtcagcagccaccagctggcctggttggctctggatttctgga

SEQ ID NO: 2700 - DNA, 561 bp, Homo sapiens
  MAP TO CHR5.1; EXPRESSED IN LUNG, SIGNAL = 0.73; EXPRESSED IN BRAIN, SIGNAL = 0.74; EXPRESSED IN HEART, SIGNAL = 0.9; SWISSPROT HIT: P31918, EVALUE 3.10e+00; EST_HUMAN HIT: AL119615.1, EVALUE 5.00e-02
acttggcaacattgaggagcagaactaatctctagctttcagtttttcaatgcagaagcagtgagagatattaaatatttaaatggcctcagtcatgatctaaaatgtctatttattaaaagtctagggttaagacaaatatagggctgttaattttctgcttcttaaagaaattagttcttcccacatttaaaggagaaagaaatccaacatacggagcactccgcattaatataaaaaacaaaattctggcaacgcatcaagaatgataaaaattaaacaaaaggaaagcgtgtaaaagctgtcctcattattgttgtgcattaattattttcttcaattatattggcaaaaaaggctttcaaaaccaagcagtttaatgattctaaaagtttaatctcctttatcttcaaactatagcctcattctgtgttctgcctccatctggtcttaactgctttttatgttattatttatcattacgtaatgagcatttagttatttcagtaagaaacaattctttaggaaacaatttacggttgccagcacagtaaagggaaa

SEQ ID NO: 2701 - DNA, 522 bp, Homo sapiens
  MAP TO CHR20.1; EXPRESSED IN FETAL LIVER, SIGNAL = 0.29; EXPRESSED IN BRAIN, SIGNAL = 0.39; EXPRESSED IN BONE MARROW, SIGNAL = 0.39; SWISSPROT HIT: O00764, EVALUE 2.00e-14; EST_HUMAN HIT: BF886530.1, EVALUE 4.00e-70; NT HIT: gi14780637, EVALUE 4.00e-57
acccaaaacattcttgcagccccaaagaacaccttcctctgggaagagcagaggcggccacggtgcacgatgggggcacttactcctcctctgactccccagcacaatcaggtagttgctgccctgcggggagggcaggtcggagctggtgatgaccacggtgtcggggcccatagagtgcagcatgtccatcacctagcagtggcacagggagcgtcagccacggccggtcacatgtcagccacggctggtcacaccccactccccgatccatcacctggcagtggcacggggagcatcagccacggccggtcacaccccactcccccagagcccgttcccaatggcggcactcccggagggaagacagccacctggtcagccaccatccccccacaaactgtcagcccaaaccgtgtggctccccacaggtgactggcgagggcctcccccttggggggtggacagatgggtgcctgtcctgcagcgaggaggagctggcccctctgtacgttggctttt

SEQ ID NO: 2702 - DNA, 530 bp, Homo sapiens
  MAP TO CHR6.1; EXPRESSED IN FETAL LIVER, SIGNAL = 0.97; EXPRESSED IN BRAIN, SIGNAL = 0.85; EXPRESSED IN HEART, SIGNAL = 0.74; EXPRESSED IN ADULT LIVER, SIGNAL = 1.5; NT HIT: gi13540603, EVALUE 2.00e-68; SWISSPROT HIT: P38661, EVALUE 1.00e-05; EST_HUMAN HIT: AI750888.1, EVALUE 3.00e-68
tgatctcgacccaggatttcaacgaagctgccatttttctcgtcttaggtgtggtcattgtaagactctggctcctacttgggaggaactctctaaaaaggaattccctggtctggcgggggtcaagatcgccgaagtagactgcactgctgaacggaatatctgcagcaagtattcggtgggtacttggatggatgcttatgggagctctcagtatgggggcagatcccaagggaactgtgcctcaaccacgataactcactctgctctcatcttctcaacaatgtggtttttatgtccctttgagttgtttgtttggagaagcaaaagagatcctctctcaaagggaaggcattcttcttcgcccgctttgtagttagtatccatgtttcagtgcaggttttcaggccttgctgtctgagtaacaaggccgtgaagtaacagaccccacgccatagactgtggggcttcccacaccgcgactcttgatgattgaccagtggtctgtagcctttgccataaatacccga

SEQ ID NO: 2703 - DNA, 504 bp, Homo sapiens
  MAP TO CHR19.1; EXPRESSED IN LUNG, SIGNAL = 0.79; EXPRESSED IN HELA, SIGNAL = 1.9; EXPRESSED IN BRAIN, SIGNAL = 1.8; EXPRESSED IN PLACENTA, SIGNAL = 1.9; EXPRESSED IN FETAL LIVER, SIGNAL = 1.5; EXPRESSED IN HEART, SIGNAL = 0.72; EXPRESSED IN BONE MARROW, SIGNAL = 1.5; EXPRESSED IN ADULT LIVER, SIGNAL = 0.99; EST_HUMAN HIT: BI911467.1, EVALUE 0.00e+00; NT HIT: gi14764433, EVALUE 0.00e+00; SWISSPROT HIT: Q9CD58, EVALUE 6.20e-02
aatttccccaccaggaaaactggtgacaaggacctacatgatgctggctgattaggaggattcaaagtcacaggaaacagcatgttgccacatgggtgagatgcttacaagacagtagcaatcatcactgttccagaaaaggaacctgggatctggagaggaggggcttcacaaggtcatgccgatctaagggacgcccccttctctctacaccagggtggggtgcctcaaattgaccccctctgcaaagagctcttaccagttcttctcggtgaggatcgtgtgtgacagctgtggccgggccatggacatcacttggctccggagcttgctcaccaaggactggaaactggggtggccacgatacccaggcagcagggagaagagtgggctggaaccaggtcctggaaagttggggcagggagggtaagagggatagactgccagggtctttctcccagttaacagcatcctgggcttcaaggagcacctgagagttcagcc

SEQ ID NO: 2704 - DNA, 544 bp, Homo sapiens
  MAP TO CHR1.1; EXPRESSED IN BONE MARROW, SIGNAL = 0.86; EXPRESSED IN HEART, SIGNAL = 0.62; EXPRESSED IN ADULT LIVER, SIGNAL = 0.93; EXPRESSED IN PLACENTA, SIGNAL = 1.3; EXPRESSED IN FETAL LIVER, SIGNAL = 1.1; EXPRESSED IN HELA, SIGNAL =   1; EXPRESSED IN BRAIN, SIGNAL =   1; SWISSPROT HIT: Q58036, EVALUE 1.70e+00; EST_HUMAN HIT: AA316684.1, EVALUE 1.00e-129; NT HIT: gi16159694, EVALUE 7.00e-65
cccactcagtcccttctctggattcttcaggactgggaaagggcatggtgcaatatggtcgcccgcctggctcagggttagtcggttagccgaatcttggctaatcatgcctggaacagcaggagggaggggtccacaggggctcacatacccagttgtgtccatgaactctttgccactgcctggatctacacataagggcagctcttgggccccttccaggtcctgcccatgctgcatatctgtcagggtgcagaaggatgccaccctctggtctggggaggggagaaacacacacagaaagaagggttagtaatcaatgcaaggcaatgtttctttgtggaaatgcaatagctaaataaaatcttttccccccttcaaaccagttactgccttgttttggagcaaaacaaagaaaaacaaattcaggcaagcttctgagaaggagaaagcatggagattggctgtcctcctactgggctgtatggcctatgcacatcacagccatggggacaattagcagacactggatttgctacagcca

SEQ ID NO: 2705 - DNA, 558 bp, Homo sapiens
  MAP TO CHR14.1; EXPRESSED IN BONE MARROW, SIGNAL =  36; EXPRESSED IN ADULT LIVER, SIGNAL = 1.2; EXPRESSED IN PLACENTA, SIGNAL =  29; EXPRESSED IN HELA, SIGNAL =  22; EXPRESSED IN FETAL LIVER, SIGNAL =  34; EXPRESSED IN LUNG, SIGNAL =  41; EXPRESSED IN BRAIN, SIGNAL =  27; EXPRESSED IN HEART, SIGNAL =  35; SWISSPROT HIT: Q92813, EVALUE 1.00e-36; EST_HUMAN HIT: AA724777.1, EVALUE 0.00e+00; NT HIT: AB039888.1, EVALUE 0.00e+00
taagagggtgaaggggaaccagagcgcacaagggaactgactcaggaggcagagaagatgggcatcctcagcgtagacttgctgatcacactgcaaattctgccagtttttttctccaactgcctcttcctggctctctatgactcggtcattctgctcaagcacgtggtgctgctgttgagccgctccaagtccactcgcggagagtggcggcgcatgctgacctcagagggactgcgctgcgtctggaagagcttcctcctcgatgcctacaaacaggtgagctgagctgagaagggcttctccctaggtctacaggggcaggggctcatatgctggggaccagaggccattgggagcattggggggagagctgtgaagccctatttgtggggttgccaagtgagcctctaagtttactttccacacctgttgcacaggttagcttgggagggtgacagctattaagccataatgactctgtgtgacctaataaggaatctttctactaagggttattaatatcttgctgtgatttgggagtagaaggcattgtgc

SEQ ID NO: 2706 - DNA, 585 bp, Homo sapiens
  MAP TO AC007873.4; EXPRESSED IN FETAL LIVER, SIGNAL = 0.82; EXPRESSED IN LUNG, SIGNAL = 1.2; EXPRESSED IN HELA, SIGNAL = 0.65; EXPRESSED IN BRAIN, SIGNAL = 0.59; EXPRESSED IN HEART, SIGNAL = 0.88; EXPRESSED IN BONE MARROW, SIGNAL = 0.65; SWISSPROT HIT: P56094, EVALUE 8.50e-01; EST_HUMAN HIT: BG419335.1, EVALUE 0.00e+00
  unsure 94
  unsure 129
  unsure 134
  unsure 136
  unsure 186
  unsure 318
  unsure 324
  unsure 338
gcattcagatccccaatgactctcggcctgagaaccccggaccactgggccccatctcgggggtgggtggcgggggcctgggcagcgggagagncgacaacgccctgaagcaggagctgccgcggagcntgcancngggctgagcggaaactggctggcgtactggcagtacgagatcggcgtgancgagcaggatgcccactttcacttccaccagatccgcctgcagagcttcccgggccactcgggggccgtcaagtgcgtggcacccctaagcagcgaggacttcttcctgagcggcagcaaggatcgtaccgntgcgcnctctggccgctgtnacaactacggcgacgggaccagcgagacggccccacgcctcgtctacacccagcaccgcaagagcgtcttcttcgtgggccagcttgaggccccgcagcacgtggtgagctgtgacggggctgtgcacgtctgggaccccttcacaggtgagcgggcccaggtgaggcctgttctcttcctgctcctgcgccccaccaggcctccaggaagggggcccgagggtggggctgtaatgctgcggagttt

SEQ ID NO: 2707 - DNA, 543 bp, Homo sapiens
  MAP TO CHR6.1; EXPRESSED IN BRAIN, SIGNAL = 5.1; EXPRESSED IN HEART, SIGNAL = 2.6; EXPRESSED IN ADULT LIVER, SIGNAL = 5.5; EXPRESSED IN BONE MARROW, SIGNAL = 5.1; EXPRESSED IN PLACENTA, SIGNAL = 4.9; EXPRESSED IN FETAL LIVER, SIGNAL =   6; EXPRESSED IN LUNG, SIGNAL = 2.4; SWISSPROT HIT: P17599, EVALUE 2.30e+00; NT HIT: gi13385375, EVALUE 4.00e-88; EST_HUMAN HIT: BG113166.1, EVALUE 0.00e+00
gagacaaatcacgagggagggctggctgcaggcatcccaggtgagatgggctccaacaaggagtagacccacagctggccctaatcctgaaagtcgttagaagccatctgagaaagtggggcatttagccggtcaagttcatccacttggggtgggtgatgcattaatatctcctggtcctccaagacatcatctccagcagctaccagattcgtgagggatttgcttcgaacacactggaaatccacatggcgactcttcccttcttccttttcccatgacatctggatgaaggggcgttgtacataattatagatgacttcagaccggccgccaggccttctcttaattttttctttacaggtagggtaacctgcaatggaaaaaggccattctcatgactaacaaattgtgctcactctggtgtccatactttctccttcctaaccacatcagttttctcccaaaatcacagcatggaaaatatgtgcgaagtgaccagtccctgtcccatgctttcccagccccagtcacctacatgtt

SEQ ID NO: 2708 - DNA, 507 bp, Homo sapiens
  MAP TO CHRX.1; EXPRESSED IN FETAL LIVER, SIGNAL = 0.69; EXPRESSED IN HELA, SIGNAL = 0.86; EXPRESSED IN BRAIN, SIGNAL = 0.86; EXPRESSED IN LUNG, SIGNAL = 0.71; EXPRESSED IN HEART, SIGNAL = 0.72; EXPRESSED IN BONE MARROW, SIGNAL = 0.9; EXPRESSED IN ADULT LIVER, SIGNAL = 0.79; SWISSPROT HIT: Q61555, EVALUE 5.40e-01; NT HIT: gi14778791, EVALUE 3.10e-02; EST_HUMAN HIT: BF439950.1, EVALUE 4.50e-02
ggcagatgggatcacaaaagtatacatagggactttgtttgtatttattaatttttaaagcaaagtagtgggtttacagctgttcattatgttatcttacatgtctgaaatatttcataataatttacaaaagaaaaagagaatcagtaaaaaacaactgtctttagaactgactgttctattgaataaataactggagatattacttaacctaactcttacacaataccctccacagatacaaaccacaaccacgagtcggataggattcagcacagtaagaatccaggtgggaagcaatatcctcatgaatgagggaatcctctacaaaatgaattactacaaatggagaagcagatcttaagcaataagcattcctcattttgaactgcatcaacatttctgcaattgcatccagttccaaatagagtttctggactgattctaagatgtttttcaatcccaatcttcctataatcagcagtggggttggtgtgggtgaagaac

SEQ ID NO: 2709 - DNA, 573 bp, Homo sapiens
  MAP TO CHR17.1; EXPRESSED IN BRAIN, SIGNAL = 0.79; EXPRESSED IN BONE MARROW, SIGNAL = 0.73; EXPRESSED IN HEART, SIGNAL = 0.91; EXPRESSED IN ADULT LIVER, SIGNAL = 1.1; EXPRESSED IN FETAL LIVER, SIGNAL = 0.7; EXPRESSED IN LUNG, SIGNAL = 0.7; NT HIT: gi14773985, EVALUE 1.00e-117; EST_HUMAN HIT: BI333833.1, EVALUE 1.00e-116; SWISSPROT HIT: P23757, EVALUE 3.20e+00
gcttgaaacctcgcactctcatctgcactcctgcttgggggctggtactgccgtctagaggaaggctgggacactaaagatggcaagcccacacataccatggacctcacaggctctctggtctcaccacactctggccctctctggctactccagtcccaagctgcagaatccatcccctgcctgcttacctcagatgccacgtcgtccttaatgacaatgttgctgatcttgcccagaagctgcgccagggaggtaagggtggtggtggctgtggccaggttctccactgaccgagcccagagcagccggtctagctcccaggtcattagcccttcactcgtaggccctgaaagcaggcattttggaggcagctggggctgagcaatcccaaagagcaacctgtaggaacatcggagtaagatcaaggtggctgagaccacaaggcgggagatcatggctaagatttctcaaatatctgtcctgagccagtgattttcaatcttacccagaaccataggggttaaagggaagtacctcagggtcttgggggcataaggggcaacaccaaac

SEQ ID NO: 2710 - DNA, 590 bp, Homo sapiens
  MAP TO CHRX.1; EXPRESSED IN FETAL LIVER, SIGNAL = 0.87; EXPRESSED IN LUNG, SIGNAL = 1.2; EXPRESSED IN HELA, SIGNAL = 0.85; EXPRESSED IN BRAIN, SIGNAL = 1.1; EXPRESSED IN HEART, SIGNAL = 1.2; EXPRESSED IN ADULT LIVER, SIGNAL = 1.1; EST_HUMAN HIT: AU118913.1, EVALUE 2.00e-88; NT HIT: gi14757195, EVALUE 1.00e-88; SWISSPROT HIT: Q13474, EVALUE 7.00e-28
cacaggctgagaggagaaggacagggtgcagcagcaaaaggagcccaacaccatctaagccaattccctaaggcacctgtttcttaccggaggttgtgagacttcttttttatttcattccaacacagattcatggctggtggttccaggggtccagaggcaccaacagacccgttcaacagctttaggcttaggcagggaaccccagcaccatcttgaggaggtgcagggctggtgacagcagctctaacctggacagaaacacaaacatcctgtgatccttggattgtgccacaccctggtctgcaccaagccaagggtgagacaagtgtgaacaaggggagagaagggttgctgccagggttcagaaatgctattctctgtgtgttcagggactgagatgaagaaagaccctgtggtcctgttcattgccaagtcttctcttggtacaggtcagttacatagaactgctgcctactattattgttactcatgattataaattttggacctagggaaaggttaacattcccaagctgggcccccactcctcaggaccactgcccagatggggtcttggaagtacctgc

SEQ ID NO: 2711 - DNA, 548 bp, Homo sapiens
  MAP TO CHR2.1; EXPRESSED IN FETAL LIVER, SIGNAL = 0.84; EXPRESSED IN BRAIN, SIGNAL = 0.67; EXPRESSED IN ADULT LIVER, SIGNAL = 0.69; EXPRESSED IN BONE MARROW, SIGNAL = 0.79; SWISSPROT HIT: P27487, EVALUE 2.00e-16; EST_HUMAN HIT: AU136648.1, EVALUE 3.00e-83; NT HIT: gi14720334, EVALUE 2.00e-83
ccaaacttgttgatcccacctttactcatggtaaatcattgctcattttgataccaggaaaatgaaagcatcgctgaaagtattcaacatacctttgggtatggaatatttattgttctaggatattgttcatcgccataataggaataggcaataactggtatatccgtatcattaaattccgcatatgccaaaaattttccattaggagaccaccagagagcatattttgtagcaagcatttcctctgaaaaataagtactaggatattaactataattacatcttactcttaaaatcattgtaaatacttctaaatagctatttatcaactgaaataatttatttaatgtggatgtgacatatgtcatactttggttattaaaaaattacataatctgagttaagaggaatagtttaccctttcactctatatcaaacatcaattagccttgttagaaaatgacattaatcagaaatgtaattttttaaataaataataaacatgttggcactaattaattttttctttcagggcagtttcaggt

SEQ ID NO: 2712 - DNA, 599 bp, Homo sapiens
  MAP TO CHR17.1; EXPRESSED IN HEART, SIGNAL = 1.2; EXPRESSED IN BONE MARROW, SIGNAL = 1.5; EXPRESSED IN PLACENTA, SIGNAL = 1.4; EXPRESSED IN FETAL LIVER, SIGNAL = 1.2; EXPRESSED IN HELA, SIGNAL = 1.3; EXPRESSED IN LUNG, SIGNAL = 1.1; EXPRESSED IN BRAIN, SIGNAL = 1.5; SWISSPROT HIT: P51954, EVALUE 1.00e-12; EST_HUMAN HIT: BF982335.1, EVALUE 0.00e+00; NT HIT: AF407579.1, EVALUE 1.00e-69
acaacaatggagaggggttgtcgtaggtgtgagaaagcctggatcttgattagtcccttgggccacaggcggcactctggctgagttcatccaaaagcgctgtaattccctgctggaggaggagaccatcctgcacttcttcgtgcagatcctgcttgcactgcatcatgtgcacacccacctcatcctgcaccgagacctcaagacccagaacatcctgcttgacaaacaccgcatggtcgtcaagatcggtgatttcggcatctccaagatccttagcagcaagagcaaggcctacacggtgcctgggcatggaagggacctccagggcactagaagtcttgagggccaggacctaaccctgcctcctcccctccccctaaaaaacccttggccctttggcccctgtttgggtggttctgcaggaggaagccccttggcttgctttgagaagaagctgtccccaaatgggcttatgcacagagcccctggtcttccctccctgcagggctgtgatcccagcttctatcctgcaggtggtgggtaccccatgctatatctcccctgagctgtgtgagggcaagccctacaaccagaag

SEQ ID NO: 2713 - DNA, 572 bp, Homo sapiens
  MAP TO CHR16.1; EXPRESSED IN BRAIN, SIGNAL = 1.3; EXPRESSED IN HEART, SIGNAL =   1; EXPRESSED IN ADULT LIVER, SIGNAL = 1.8; EXPRESSED IN BONE MARROW, SIGNAL = 1.5; EXPRESSED IN FETAL LIVER, SIGNAL = 1.4; EXPRESSED IN HELA, SIGNAL = 1.5; EXPRESSED IN LUNG, SIGNAL =   1; SWISSPROT HIT: O17482, EVALUE 9.40e+00; EST_HUMAN HIT: AA493227.1, EVALUE 1.00e-116; NT HIT: gi15317918, EVALUE 1.00e-118
ataaagcaaggtgggacagcatcaggaagaggctcttcagctgataaatgtgacattcaaaatggcaatagcaatgtctccttaccgcctgctggcagttcattccaaggttccccttctcccctcgaactactttcatcagacagtgtagggtccgcccttttcgatgtaatccggaacaatggtgttcaatctccccccgacagcttaggatgatctcagggctcagagaaaagtcttccatcaacatgcgtcggtaatccagcatctccccctggcactcactgctgacttgtcgccctaagttaggatgtaagtcataacattacgaagggtgatgctatgtattagcatcagaaatcaccacctattaaaagtacatatttctatctgtaatacaatatacctatcagacatgctaacatctgaaaagtttagaattagcaaaagctttagcagcataaaataggcttagactccagatattcaggcttctcctgtcactgttctgcatgaaacaggttttatactactgcactaataatgcaaatgctttgcccatggaaatccta

SEQ ID NO: 2714 - DNA, 563 bp, Homo sapiens
  MAP TO CHR3.1; EXPRESSED IN BRAIN, SIGNAL = 0.92; EXPRESSED IN LUNG, SIGNAL = 0.73; EXPRESSED IN HEART, SIGNAL = 0.85; EXPRESSED IN ADULT LIVER, SIGNAL = 1.3; EXPRESSED IN BONE MARROW, SIGNAL = 0.87; NT HIT: gi15295411, EVALUE 0.00e+00; SWISSPROT HIT: O60344, EVALUE 2.00e-31; EST_HUMAN HIT: AV708732.1, EVALUE 0.00e+00
gctgttcctgtgagggagacatgcaggaaacgaaagctcgggacgcagagtggcctgtccagggctgcccaggaatagagtaagtggcagagcaaggacccaggcagagcctccgctgggcagccacagcaggcagcttctggggtccgctttttcccctcgtcatgtccatgctgggcaacccgatgtccagggcagttttggaaggaacttgggaggggctgcagcggtggtggtttgtgcccctgggatggctgtagctgactctaaggcccggctccacactagacaccatatgcccccatgtctgtcctggcccgcaggtgtggtgctcggtccgcacaccagagagctctcacgaggggctggtgaccgacccccacagccctgcccgcttccgcgtgctgggcactctctccaactcccgtgacttcctgcggcacttcggctgccctgtcggctcccccatgaacccagggcagctgtgtgaggtgtggtagacctggatcaggggagaaatggccagctgtcaccagacctggggcagctctcctgacaaagct

SEQ ID NO: 2715 - DNA, 570 bp, Homo sapiens
  MAP TO CHR1.1; EXPRESSED IN BONE MARROW, SIGNAL = 0.83; EXPRESSED IN LUNG, SIGNAL =   1; EXPRESSED IN BRAIN, SIGNAL = 0.97; EST_HUMAN HIT: BE152441.1, EVALUE 0.00e+00; NT HIT: gi16159689, EVALUE 0.00e+00; SWISSPROT HIT: Q02817, EVALUE 4.20e-02
acaccaacctacctgatgcccctactgcttacagttcaggcttctgccctatcccagcaggcagggcccaggtggcaccagcaggtactactctgcagtgctgtggggcttacctggaatgagaggatatctcactgagatcgcccatgctgccttccgcagcactgccggcggagatggtggacgcgtagccatgcacagaatataacttggctggctcgtcgtcaggcccagagacgtcggcagcatcagcccactgctcggcccggctgtggatcagggacctgctgcctgccaggtgcacagggccgaggatggtggcaggcatgcagggggccgtgtcgatgccactgtcggtggaggcccctttgatgtaggtcagccccagtaattcggggtccatcaggtcgccagacccaaagtgcttgtcgtcactgttgctggaggtgttgctggagagcgtgttgctgctggagtgactggagcaacttttatccccaatcttcagaagaaagaggaacagagagttctcaagtgaatcttgaactcaggtgcttctcaccctgactc

SEQ ID NO: 2716 - DNA, 586 bp, Homo sapiens
  MAP TO CHR2.1; EXPRESSED IN LUNG, SIGNAL = 0.72; EXPRESSED IN BRAIN, SIGNAL = 0.8; EXPRESSED IN HEART, SIGNAL = 2.8; EXPRESSED IN BONE MARROW, SIGNAL = 0.79; EST_HUMAN HIT: BF091531.1, EVALUE 0.00e+00; NT HIT: gi16157781, EVALUE 0.00e+00; SWISSPROT HIT: Q63518, EVALUE 7.00e-09
gctagcaaaccaagcagacccacagaggaaatccaggctgtggacacacaaggtatctatttttgatttttgtcttatcaaataggcctctgaccttaaatctgcttgaacttgataacatcataaataatcttttccaattcagaggccccagaaatcttcctcgatgtgaagctccttgctggtctcactgtaaaagctgggaccaagattgaacttcctgccaccgtaaccggaaaacctgaacctaaaataacttggacaaaggctgatatgattctgaagcaggacaaaagaattaccattgaaaatgtccctaagaaatccacagtgactattgttgatagtaagagaagtgacactggcacatatatcattgaggctgtgaatgtgtgtggccgggcactgctgtggtggaagtgaacgtcttaggtaaggaaggttctcattttaaaaggggataaactctttgcagttactttcttgaaagaaaaaaataaaaaaaatggtgaacaatttttttttctgcatctgtaatgccatacacagataaacccggaccaccagctgcctttgacatcacaga

SEQ ID NO: 2717 - DNA, 543 bp, Homo sapiens
  MAP TO AC060233.1; EXPRESSED IN PLACENTA, SIGNAL = 1.5; EXPRESSED IN FETAL LIVER, SIGNAL =   1; EXPRESSED IN LUNG, SIGNAL = 1.9; EXPRESSED IN HELA, SIGNAL = 1.1; EXPRESSED IN BRAIN, SIGNAL = 1.2; EXPRESSED IN HEART, SIGNAL = 1.7; EXPRESSED IN BONE MARROW, SIGNAL = 1.2; EST_HUMAN HIT: BE966797.2, EVALUE 1.20e-02; NT HIT: gi6753785, EVALUE 1.30e-01; SWISSPROT HIT: P34472, EVALUE 2.30e+00
gggagtctacaggcaagctggccctgttgctgacctaaccctccccgcacccccctgcccagcccttcccagactaccagcccgcaggtttcaccacccccaacacccaaccacacacaactcctggcttcggatttgagggatgagaggggagctggcaggagggaacaagggcatgcaaatgggacctgacaggggccgggcacctcaggcaaagaatgtaaataaaaatcggtaaatatttaggggaaatggagcgggaagtgggagagggagggtggaggggacgtgttggatttccaacaacatctggagggcagtcctctcctccatcccccccatgccccattcccccccatatgggggcttgcagttgagagagggtggtggctcttgagggggaggtaaagtgtctgcgctgggctgtctggatgtgtgggggtgggcacaactttgacagtctagagtgtttgcccggccaagcacacacaaggcctcacccaaccccaaactgagtgcttccctctgggccattcatgtctt

SEQ ID NO: 2718 - DNA, 555 bp, Homo sapiens
  MAP TO CHR12.1; EXPRESSED IN BONE MARROW, SIGNAL = 0.48; EXPRESSED IN HEART, SIGNAL = 0.58; EXPRESSED IN ADULT LIVER, SIGNAL = 0.53; EXPRESSED IN FETAL LIVER, SIGNAL = 0.66; EXPRESSED IN BRAIN, SIGNAL = 0.45; SWISSPROT HIT: Q25337, EVALUE 7.00e-08; EST_HUMAN HIT: BI764258.1, EVALUE 0.00e+00; NT HIT: gi13653079, EVALUE 0.00e+00
ctttcaggtcagcaaaaggccgttggatcgcaaaccccagccagccgtgctcgaaagcctccattgggttatttgtgccagcaagtcctcctctggaccctgagaaggtcaaagagttacagcgcttcatcaccctttccaagagactccttgtgatgactggggcaggaatctccaccgaatcggggataccagactacaggtcagaaaaagtggggctttatgcccgcactgaccgcaggcccatccagcatggtgattttgtccggagtgccccaatccgccagcggtactgggcgagaaacttcgtaggctggcctcaattctcctcccaccagcctaaccctgcacactgggctttgagcacctgggagaaactcggaaagctgtactggttggtgacccaaaatgtggatgctttgcacaccaaggcggggagtcggcgcctgacagagctccacggatgcatggacaggtgcaggagctgtacacggtttgaacgcaaacccgtgtgttgttttgggagagtagggaccttggctgtcttgatcacca

SEQ ID NO: 2719 - DNA, 504 bp, Homo sapiens
  MAP TO CHR3.1; EXPRESSED IN FETAL LIVER, SIGNAL = 0.68; EXPRESSED IN BRAIN, SIGNAL = 0.65; EXPRESSED IN LUNG, SIGNAL = 0.65; EXPRESSED IN BONE MARROW, SIGNAL = 0.67; EXPRESSED IN HEART, SIGNAL = 0.67; EXPRESSED IN ADULT LIVER, SIGNAL = 0.87; SWISSPROT HIT: O75521, EVALUE 5.00e-20; EST_HUMAN HIT: AL556411.1, EVALUE 2.00e-96; NT HIT: gi4757969, EVALUE 2.00e-96
cctgctccaactccatcttcatgttgcggcacacaagggcttcggattcctcaagcacaactggattacatgaggcaaactccgtaattcaaatcataacttcctgggtgaaggtcccgggccaaaatacctgggctaccagacctttaccacaggcttcctgtgtggtcatcttctgcccactgagcaatatctcatttgcaaatgccccttccattactttaggaaacaatggtagaacagccatctggattctgtccaaagatagtaaagagcggtggaaaccaagccttttcattagtacagaccacattgcaaagaggcaatatagatgcgcttagcctaatggctgggccattgactactacaataatagatttctgaaactgtatgaaagtattcacaaagtttctggtagcttctgctgttctagtgctttctcttttgctgtcatttgttgaatgctatataaaataaataaagtcaagtgcacaacagaaggca

SEQ ID NO: 2720 - DNA, 587 bp, Homo sapiens
  MAP TO CHR19.1; EXPRESSED IN HEART, SIGNAL =   2; EXPRESSED IN BONE MARROW, SIGNAL = 1.3; EXPRESSED IN ADULT LIVER, SIGNAL = 2.1; EXPRESSED IN LUNG, SIGNAL = 0.99; EXPRESSED IN HELA, SIGNAL = 1.6; EXPRESSED IN BRAIN, SIGNAL = 1.2; EST_HUMAN HIT: AL555422.1, EVALUE 0.00e+00; NT HIT: AF326503.1, EVALUE 3.60e-02; SWISSPROT HIT: P13919, EVALUE 4.30e+00
ctacctctcccaagtgccagggggcttcttcctctcctacattccccttcttcccctgagcagggtctgctgcctcagaccccagctcatcagcctccctgtccccctcaactaagtgggtgtcacctggtgggcctcccttcccccactccccactgacctccctcactcctctgcgcctccccccactgctgtgacttctctctctccctgtcttcactttgttcatttctcttctgttttctgtccccgtggcaaggcccgactgtccgctgcgtcctgcccgaccctcctgtacctccggcctcccagcggccccctcgtcggcggtggcgtcgagcctgttgagactgttagccgccctctactcccaggctggagggacctctccagaccctgggctgcggctgaggcgcatccgttttcctgccctgggcatctgtctctgaaagtgtatggcgggtggtgggcaaggggcactgggaagggaggccagtgcctagagtgaagacagctgctgttttaatatatttttgtgactttcaaatcatttcccccactccttcagggtgagttgcaggactgtt

SEQ ID NO: 2721 - DNA, 562 bp, Homo sapiens
  MAP TO CHR7.1; EXPRESSED IN ADULT LIVER, SIGNAL = 0.44; EXPRESSED IN PLACENTA, SIGNAL = 4.3; EXPRESSED IN FETAL LIVER, SIGNAL = 4.4; EXPRESSED IN LUNG, SIGNAL = 5.3; EXPRESSED IN HELA, SIGNAL = 3.3; EXPRESSED IN BRAIN, SIGNAL =   4; EXPRESSED IN HEART, SIGNAL = 4.9; EXPRESSED IN BONE MARROW, SIGNAL = 4.5; SWISSPROT HIT: Q99835, EVALUE 2.00e-31; EST_HUMAN HIT: BE250601.1, EVALUE 1.00e-121; NT HIT: AF114821.1, EVALUE 0.00e+00
tgggacagaaggtgggttactggccccctccctcaaactcaccccatccaggtctcccgttcctaccagtcactatacctgcgccacagcaaggattgccacagtgaggacaaaggggagtgaccaggtgagcaggtggaagtaggaggtcttgcccgagagaggctggtaggtggtgcccagggctttgaaggaagtgtgccaggcataggtgaggaccacaaaccaaaccacaccagccatcagggcgtagtacacgatgacaaagatgatgacgcaggacagagtctcattggagctgtgcagagaggtgaggtgtcacttgaggcggtcactctgtactccctctacctggtctccccaccctgtgcccagaccctcagctgctgaggtctggaggttcccagaagtcagggcttggagacaggacccaggtcagatctgaggaggctctaggagccgcccctttgagcagatacaaaccatgaaggtcctgattctgaaactaagatcctaacactggagatcttgcatgcagtatgcagtagggcagagccagatc

SEQ ID NO: 2722 - DNA, 577 bp, Homo sapiens
  MAP TO CHR5.1; EXPRESSED IN BRAIN, SIGNAL = 0.65; EXPRESSED IN HEART, SIGNAL = 0.49; EXPRESSED IN ADULT LIVER, SIGNAL = 0.41; EXPRESSED IN BONE MARROW, SIGNAL = 0.47; SWISSPROT HIT: Q9UN75, EVALUE 7.00e-70; EST_HUMAN HIT: AW134813.1, EVALUE 0.00e+00; NT HIT: gi14861872, EVALUE 0.00e+00
ttccctttctctgaacaccggcgggttgtcgttaatgtccttcacctccacgtccacatggaaaacctgcagcggcctgtccacgatcacctccaggtggatactgcactccgcgctccgcccgcacagcttctcgcggtcgatccgagaattcacaaacaaaatgccattctgcagatttacctccagaaggtccccgtgtcttttggacgccacccggaacaggcgcggcaccagctccgccagctccagccccaggtcctgagcgatgcggcccacgaaggtgccgtgtttggcctcctcgtagacggagtagtggagctggccgctccccacctcccaggctgcaaggagcagaagcgagagcagcagacgctgggatcccgggcctcttggtccgataatcaccattgcagaaaatgagggcctctgagttgggacaatcagttttaagggatcgcttgcctgaggtattttatgagcagtcacccttttctgtaagtacatatttagtaaattttttccagcatcacagtcattatggagtcgatcctattccgtgaatgattggaatgtg

SEQ ID NO: 2723 - DNA, 587 bp, Homo sapiens
  MAP TO CHR17.1; EXPRESSED IN BRAIN, SIGNAL = 3.1; EXPRESSED IN PLACENTA, SIGNAL = 3.6; EXPRESSED IN BONE MARROW, SIGNAL = 2.7; EXPRESSED IN HEART, SIGNAL = 2.2; EXPRESSED IN ADULT LIVER, SIGNAL = 3.1; EXPRESSED IN FETAL LIVER, SIGNAL = 2.6; SWISSPROT HIT: Q64008, EVALUE 5.00e-32; EST_HUMAN HIT: AL568026.1, EVALUE 0.00e+00; NT HIT: gi14773912, EVALUE 2.00e-46
gatttctccagctcagccagcacattggcctcaaaggtcagtgctgccacacggaagaagaattctcggacattctcacctgacacagagagcagataggtgctcaggggcagtgctgggtctggggacacagggcacagctggaggtgtagcagtgagaggagagccaggcaagagtgtcacagcagagccctaaagcctccaactcaccagtgagagatgagactgcccagtactcagccttcatctcctgggccacctggagggcgtctttctccatcagcgcatactgagcaggggtctgagggaaggccagagtcagaggggggcattccctcaccaagctgggaagtccccccactggcacactcacactcagatccttcttggaacctacaaggaagagaagcacactggaagggtcattctccttcagggcatcggccagccactgcctgccatgggaggtggaaagtaagggatgagtgagtctgcagggcccctcccactgacattcataggcccaattaccccctctctggtcctacatgcattcttcttcttcctgaccacccctctgttctgaa

SEQ ID NO: 2724 - DNA, 527 bp, Homo sapiens
  MAP TO CHR13.1; EXPRESSED IN LUNG, SIGNAL = 0.75; EXPRESSED IN HELA, SIGNAL = 0.54; EXPRESSED IN BRAIN, SIGNAL = 0.91; EXPRESSED IN HEART, SIGNAL = 0.62; EXPRESSED IN ADULT LIVER, SIGNAL = 1.3; EXPRESSED IN BONE MARROW, SIGNAL = 0.99; NT HIT: AB009667.1, EVALUE 0.00e+00; SWISSPROT HIT: Q02401, EVALUE 2.00e-24; EST_HUMAN HIT: BG699357.1, EVALUE 0.00e+00
cttctttccgtcccactcagggaggtcaggtgtccattgccctaagctctcactggatcaatcctcgaagaatgaccgaccacagcatcaaagaatgtcaaaaatctctggactttgtactaggttggtttgccaaacccgtatttattgatggtgactatcccgagagcatgaagaataacctttcatctattctgcctgattttactgaatctgagaaaaagttcatcaaaggaactgctgacttttttgctctttgctttggacccaccttgagttttcaacttttggaccctcacatgaagttccgccaattggaatctcccaacctgaggcaactgctttcctggattgaccttgaatttaaccatcctcaaatatttattgtggaaaatggctggtttgtctcagggaccaccaagagagatgatgccaaatatatgtattacctcaaaaagttcatcatggaaaccttaaaaggtatgattgtgggtaaagttctcatttcctgccaaaatcttctggaa

SEQ ID NO: 2725 - DNA, 531 bp, Homo sapiens
  MAP TO CHR7.1; EXPRESSED IN BRAIN, SIGNAL = 0.7; EXPRESSED IN HEART, SIGNAL = 0.45; EST_HUMAN HIT: AI743835.1, EVALUE 6.00e-88; NT HIT: AF004843.1, EVALUE 5.00e-01; SWISSPROT HIT: P49257, EVALUE 3.80e+00
tcagaaacctgaaattggggaatggcgtgagccgaagtgagacaggaaggaagaggtggcagttcagcagttttgaacttctgactgtgattccgaatccttttttaaaaaaggattttgtagcactgaccccaaaggcagcacaaacacgttggtgagtgtgcattaatcgaggccattgaggatgttattttctcctttaagaccctgaccagaagctgaatatgccagcagcaaatgcaggcagtgctgctgttcccttcacagtcctcggaggcagtgaagcctgtgcttgagacgcgcagggcggagtgcttgttttggagagcattcagcggatagcatttggtttcctccatttaaccaggtcacccaggcatggaatgcacagctctgccagacagaaagcgctttggatgcctgagaaacaacagcttgtccgggctactgatgcgaagagaggccatggtttcctttttctctgctctgaatggcagccttgacgtcacaacagctaggaaccactggagg

SEQ ID NO: 2726 - DNA, 524 bp, Homo sapiens
  MAP TO CHR22.1; EXPRESSED IN BONE MARROW, SIGNAL = 0.92; EXPRESSED IN FETAL LIVER, SIGNAL = 0.82; EXPRESSED IN LUNG, SIGNAL = 0.84; EXPRESSED IN HELA, SIGNAL = 1.1; EXPRESSED IN BRAIN, SIGNAL = 1.1; EXPRESSED IN HEART, SIGNAL = 0.9; EXPRESSED IN ADULT LIVER, SIGNAL = 0.75; EST_HUMAN HIT: AI459538.1, EVALUE 1.00e-110; NT HIT: X52150.1, EVALUE 0.00e+00; SWISSPROT HIT: P15289, EVALUE 3.00e-20
tcttcactgcagacaatgggtatgccagcagggcagctgggtgctccggccctgtcacgggccagggccctggaggccttgcagttcagctgcttgccaagaacatagtgggtgagggggtgccaggagatgctggccacgttgcaggggcccaaggtgtagtcaggagacacagtgcacagagagctggtcttggtaggcctgggaggtgccgggctcatgctgggcacctccgggcaagctttgtgacttagaggtgtggggccactggtcaccctcggtggctcagaggctgtggctccatggctcatgagcgcctcctgtgtcccagacctgagaccatgcgtatgtcccgaggcggctgctccggtctcttgcggtgtggaaagggaacgacctacgagggcggtgtccgagagcctgccttggccttctggccaggtcatatcgctcccggtcagtccgcaggccctctccttggaaccctggccccaccaccccaaccttgatggcgaactgagtga

SEQ ID NO: 2727 - DNA, 598 bp, Homo sapiens
  MAP TO CHR9.1; EXPRESSED IN BRAIN, SIGNAL = 0.51; EXPRESSED IN HEART, SIGNAL = 0.64; EXPRESSED IN BONE MARROW, SIGNAL = 0.53; EST_HUMAN HIT: BF529223.1, EVALUE 0.00e+00; NT HIT: AL096808.1, EVALUE 5.70e-01; SWISSPROT HIT: P17277, EVALUE 5.90e-02
tgtccagaatgcccttcttcctggagaaggcttggagacagggaccccctgagaggtggggagaggcccctccacctgcctccctgcccctgcgggccccgtcacccctcgcctgcagcccggtcctggccctgcccctctctctcccctcactgcccacggggctcaggctggttcccgtccgccgctgcccaggccccgtcactcccgggccccgcacacaatcagctctttgtgagcaagccttgcctctccccctccccagcagagcgtctcaggagcccctgcggagaatggacgtttgtgtcaccgcagtggggcaggggggcagagtttctgcccattgaaacccggcagcacgggatgaaaagaaagcagggcctgggagccggcgcggggagaggggcagcataaaggtccctctgtttggggccctggcgcttggttcccagccagcacctcgaaaggagaggagccgggcacatagggggcagcgcagacccaccttccctgccaggggaggcacttaggcgcaggagccctgggctgtcatggaaaatatcctggaggttgcattcccctccaaagtgtttgcagt

SEQ ID NO: 2728 - DNA, 596 bp, Homo sapiens
  MAP TO CHR8.1; EXPRESSED IN ADULT LIVER, SIGNAL = 9.4; EXPRESSED IN PLACENTA, SIGNAL =  18; EXPRESSED IN LUNG, SIGNAL = 4.7; EXPRESSED IN BRAIN, SIGNAL = 1.5; EXPRESSED IN HEART, SIGNAL = 2.8; SWISSPROT HIT: P11174, EVALUE 3.00e-17; EST_HUMAN HIT: AI370011.1, EVALUE 0.00e+00; NT HIT: M32405.1, EVALUE 0.00e+00
gaatctctgcagtcacacggtggctcttgcatgtgaggggtgagtcgcgcatatctggcgggggtgccagagggacttggcgtgttcattgtagtcactacaatggacagtgacaggtccactgcggctctgtccctggagagaaccaagccttagttctctgtccgccggagtgcgtagggtctccccaggccgggccgctcacaaaactgcctggtgcatcctccccagcgagcagctgatgcagctgtacagtgcgcgccagcggcggcggctgaaccggggcctgcggcggaagcagcactccctgctgaagcgcctgcgcaaggccaagaaggaggcgccgcccatggagaagccggaagtggtgaagacgcacctgcgggacatgatcatcctacccgagatggtgggcagcatggtgggcgtctacaacggcaagaccttcaaccaggtggagatcaaggtgtgtgcggccgtccctgccggctggggtgggctggggtcgcctgatgcaggcgggatcagctgacacccagctttgctcttggtctcccgcagcccgagatgatcggccactacctgggcgagttctc

SEQ ID NO: 2729 - DNA, 579 bp, Homo sapiens
  MAP TO CHR13.1; EXPRESSED IN PLACENTA, SIGNAL = 2.8; EXPRESSED IN LUNG, SIGNAL = 2.1; EXPRESSED IN HEART, SIGNAL = 2.3; EXPRESSED IN FETAL LIVER, SIGNAL = 4.2; EXPRESSED IN BRAIN, SIGNAL = 3.7; EXPRESSED IN HELA, SIGNAL = 2.2; EXPRESSED IN BONE MARROW, SIGNAL = 4.4; EXPRESSED IN ADULT LIVER, SIGNAL = 4.1; SWISSPROT HIT: P13983, EVALUE 3.70e-01; EST_HUMAN HIT: BI906055.1, EVALUE 1.00e-123; NT HIT: AL049801.1, EVALUE 1.00e-124
ggtgaaatggctttgctttctttgagtctcggcgtttctttggctcagtgtgttgccctttcatgcatccgttggtctaggttccacacgagttggtggcccagtctcgtaactcgtatgtggaggctgagatccacgtgccaaccctggaagaattggggacacagctggaggagagtggggcaactttccacacttacctgaaccatctcatccagggcctccagaaagaagccaaggagaagttcaaaggatgggtcacgtgctccagcacggacaatacagatcttgctttcaaaaaggtaatctcagaggatggaaaaagatcacccccagaaagccacagctaacaatcagacatttgtttttgcattgaaaacagctgctgtgtccacagggcttggcacacacgcggacagttaaggcacatgaaccattcaaagaactcagtccagagatctgttgcctataatcagagagtaaactatggagccggacagctggatcccggtcctgtctctcccccgtagctgtgtgatgttgggcaagtcacacacctctctgtgcctcagttttccc

SEQ ID NO: 2730 - DNA, 541 bp, Homo sapiens
  MAP TO CHR17.1; EXPRESSED IN BRAIN, SIGNAL = 0.52; EXPRESSED IN HEART, SIGNAL = 0.75; EXPRESSED IN FETAL LIVER, SIGNAL = 0.71; EXPRESSED IN HELA, SIGNAL = 0.74; NT HIT: gi14772440, EVALUE 0.00e+00; SWISSPROT HIT: Q9UKJ3, EVALUE 1.00e-100; EST_HUMAN HIT: BF971679.1, EVALUE 0.00e+00
aagtctctgagcagccgaaggaaaccagcatgaccgagccctcagaaccaggaagcaaagctgaggcaaagaaggccttaggaggggatgtaagtgatcagagtttagaaagtcatagtcagaaggtttcagagacccaaatgtgtgagtccaactcttctaaagaaacctctctggccaccccagcagggaaagaaagccaagaaggacccaaacatcctactggtcccttcttcccagttttgagcaaagatgaaagcactgccctccagtggccatcagaactattaattttcaccaaggcagaaccctccatttcatacagttgtaaccctttatattttgactttaaactttcaaggaacaaagatgccagaactaaaggaacagaaaaaccaaaggatataggaagctcctcaaaggaccatctccaaggcctagatcctggtgagccaaataaaagcaaggaagtgggcggagagaaaatagtacgttcctcaggaggcagaatggacgcacctgcttcagggtctgcctgtag

SEQ ID NO: 2731 - DNA, 581 bp, Homo sapiens
  MAP TO CHR17.1; EXPRESSED IN BRAIN, SIGNAL = 0.46; EXPRESSED IN BONE MARROW, SIGNAL = 0.54; EXPRESSED IN HEART, SIGNAL = 0.54; EXPRESSED IN FETAL LIVER, SIGNAL = 0.59; NT HIT: gi16164967, EVALUE 1.00e-113; SWISSPROT HIT: Q13351, EVALUE 5.70e-02; EST_HUMAN HIT: AL522480.1, EVALUE 3.00e-03
ggtgtctgcaggaagaggagttaccctgtcagctaagaggaggctgccctggcctccacagcacccctttcctttctcagtgctcacaagtggcagtgctgaagggagtcttcagaaagctgagaaagtgctgaagaaggtactggaatggaacaaggaagaggtacccaacaaggatgaactggttggaaacttgtatagctgcatagggaatgcccagattgagctggggcagatggaggcagccctgcagagccacagaaaggacctggagatcgccaaggaatagtgagtgccctaggggaggccactggcgtgagcctacggagaaggacacctggggctatctgaggcccttgccagggctgctggtggcttgactcccattttctgctctgcatgcctgaggtagattctcctggaggtggggaccacctgcccaggactgagggtgggggcacctagactgttagcttttttgccaccaaaagggtagtggctcaaaattccaaaaagctacccaatgatctggctcttagggatgtttatattcttacatcagcttaacgagcatgcatgaa

SEQ ID NO: 2732 - DNA, 552 bp, Homo sapiens
  MAP TO CHR17.1; EXPRESSED IN FETAL LIVER, SIGNAL = 0.78; EXPRESSED IN LUNG, SIGNAL = 0.95; EXPRESSED IN HELA, SIGNAL = 0.94; EXPRESSED IN BRAIN, SIGNAL = 0.91; EXPRESSED IN BONE MARROW, SIGNAL = 1.1; EXPRESSED IN HEART, SIGNAL = 0.96; EST_HUMAN HIT: N53279.1, EVALUE 1.00e-48; NT HIT: gi14774646, EVALUE 3.00e-92; SWISSPROT HIT: P13489, EVALUE 4.00e-04
ggcctgctttcagtttcttgactgcctcctcctgccttctccacagagcctttgtacatgctattctcttttcctggaactttttccttcctgctttgcttagttaaatcctctgtattcttcagacctccctcaaacctcacttcatgaaggaattttttttttttatgagcaaaaaatcctatctgtgtttgtttactaaagtcatcccggccagagaaggcctcaacgaatatttgataaatacaaagacaaatccctcagcccagactcagcttctgccttggatctcttccccatccctgcttcagaacagaacccaggccagactcaccgcagggtctccaggaggcagcgagggcgtctcagggtcttacaaagactcttcactgcagagtggctcagcgagtttccacttaggtccagctccttcaggtttctggtgaccttgaggacggagaagagaatctgccaataggcatctgtgactgggacccacctgaacctgagggggagagagaaggacaggagagatgtgatgtgtctggcagg

SEQ ID NO: 2733 - DNA, 524 bp, Homo sapiens
  MAP TO CHR17.1; EXPRESSED IN FETAL LIVER, SIGNAL = 0.73; EXPRESSED IN LUNG, SIGNAL = 0.84; EXPRESSED IN BRAIN, SIGNAL = 0.72; EXPRESSED IN BONE MARROW, SIGNAL = 0.53; EXPRESSED IN HEART, SIGNAL = 0.85; NT HIT: U82695.2, EVALUE 2.00e+00; SWISSPROT HIT: Q39565, EVALUE 1.00e-03
tgatgatgaaggaggtcacgcagaaggccacgcggtcctggcgcagggagcgaacgatcagcatccgttgcatttcattgcaggcattttcccactcacctggggatgaggtgagtcattgcagggagagggagtgagtctggaagagcggggaatccagacaaaggggcacctgccgggaatgtgctccgggccaggaggcaggcaccagctgggagaggggatggaggacaatgggaagggccggcatgtggctgaatggagggaaggagaaaagtgagagtgggacacagacgcctggtacctggcagcatcgccttctccggggcagcattggtataccacaggtgccagtcacgagggtactgctcaaaggagttcatgagtccgtggaagttggtcagtttgtctagctctgtgatgttatcccagtaggcatctgcaagccagctactacatggattgtccatttggccctcccgatccaagacctggtgggagaaggggaggaagaaagggattga

SEQ ID NO: 2734 - DNA, 564 bp, Homo sapiens
  MAP TO CHR7.1; EXPRESSED IN HELA, SIGNAL = 1.9; EXPRESSED IN BRAIN, SIGNAL = 2.2; EXPRESSED IN HEART, SIGNAL = 2.2; EXPRESSED IN BONE MARROW, SIGNAL = 2.4; EXPRESSED IN PLACENTA, SIGNAL = 1.4; EXPRESSED IN FETAL LIVER, SIGNAL =   2; EXPRESSED IN LUNG, SIGNAL = 2.2; SWISSPROT HIT: P00533, EVALUE 5.00e-32; EST_HUMAN HIT: AU140207.1, EVALUE 1.00e-108; NT HIT: U48727.1, EVALUE 0.00e+00
cctcccacagcatgacctaccatcattggaaagcagtttgtagtcaatcaaaggtggtctggagaaacaaagttttcagggatacattgtttttataatttttcaccacatgatttttcttctctccaatgtagtggtcagttttctcttgcagtcgtcagcctgaacataacatccttgggattacgctccctcaaggagataagtgatggagatgtgataatttcaggaaacaaaaatttgtgctatgcaaatacaataaactggaaaaaactgtttgggacctccggtcagaaaaccaaaattataagcaacagaggtgaaaacagctgcagtaagtcaccgctttctgtttagtttatggagttggttctaatgggtcctttatttgtatttagaatattgaagggctattcccatttaaattacttttttcagttccttaagaagcaaattaaaatcttaagattcctaactgtgaaattaccatgtgaattccattaaaactttttccagatcattaccattcaatgggatgaatttaccctgaggtttaggctacca

SEQ ID NO: 2735 - DNA, 576 bp, Homo sapiens
  MAP TO CHR19.1; EXPRESSED IN HEART, SIGNAL = 1.8; EXPRESSED IN ADULT LIVER, SIGNAL = 1.7; EXPRESSED IN BONE MARROW, SIGNAL = 1.3; EXPRESSED IN PLACENTA, SIGNAL = 2.4; EXPRESSED IN FETAL LIVER, SIGNAL = 2.4; EXPRESSED IN BRAIN, SIGNAL = 1.6; EXPRESSED IN LUNG, SIGNAL = 1.2; SWISSPROT HIT: Q9UNY5, EVALUE 4.00e-23; EST_HUMAN HIT: AA977770.1, EVALUE 0.00e+00; NT HIT: AF208974.1, EVALUE 0.00e+00
tgtcagaagtgtggaggctgagagccccaggggacacctgaggcctgcactgaccaccaacaccccgtggagactctcaccttctggttggtacatctccttgtaattctccagcagagtgacgagcttctcacagttctccggcttttttgctcgcacccaaggcttgagcttttcagggatgatggtcaggtactgctcaaggaccaagagctcgatgatctcctccttggtgcgggtctccggctgcaaccaatcgaggcagaggtttcggagtttgatcagggtcttccgaggcccaacaaattccacatagattaggttccgaaacctctgatgaaaaaactcagagtcagttggaccttctcctatgatgacatccggctccttagtcaagtcactgtctagctcatacagatttggggcccaggacttcttaggtttggtggcagacaagtgctttggaggcagcatttctctaagtaaaattttcactggaggaaccaaacatgagtcaacaggaaagacgcggcagcctgtgaccgtcagtactcagggacctgtggatcgtaagga

SEQ ID NO: 2736 - DNA, 588 bp, Homo sapiens
  MAP TO CHR5.1; EXPRESSED IN PLACENTA, SIGNAL = 2.3; EXPRESSED IN LUNG, SIGNAL = 2.1; EXPRESSED IN BRAIN, SIGNAL =   2; EXPRESSED IN HELA, SIGNAL = 1.9; EXPRESSED IN BONE MARROW, SIGNAL = 2.1; EXPRESSED IN HEART, SIGNAL = 1.8; EXPRESSED IN ADULT LIVER, SIGNAL = 0.66; NT HIT: gi12621105, EVALUE 4.00e-39; SWISSPROT HIT: Q15700, EVALUE 7.00e-05; EST_HUMAN HIT: BF356153.1, EVALUE 1.00e-70
cgactctcctcaaaccttggggtcttggttcctctatcaacatctccacctggatgggagtttcactgacattgatgccaggtaggccggtgaccttaatgtgcatattgctgagccactgcctgaaatcatggagggaatcctctgatgggaatctggacacatgaataaacaatcgcatccccaactgcctctggccatcacagtatcctctttagcccaatcttaaccgtccctcctcacaaccctccctagctccagaaaatggcccttctcaggcccagaatgtcttgacaagggatctttttcccatctccctttcctcagggatggcaggctgtccttaggagatgagctgctggtaatcaatggtcatttactggtcgggctctcccacgaggaagcagtggccattcttcgctccgccacgggaatggtgcagcttgtggtggccagcaaggtaggtcgtgtttgttttttggtactcgtaatggtggcagtggtgagttggggttgagccccacctcccatgccacacacacacacaaagacatgtgtgcacttgtacgtttgccttgggctattgaa

SEQ ID NO: 2737 - DNA, 520 bp, Homo sapiens
  MAP TO CHR6.1; EXPRESSED IN BRAIN, SIGNAL = 1.2; EXPRESSED IN HEART, SIGNAL = 1.1; EXPRESSED IN PLACENTA, SIGNAL = 2.5; EXPRESSED IN FETAL LIVER, SIGNAL = 1.3; EST_HUMAN HIT: BG110606.1, EVALUE 0.00e+00; NT HIT: gi14781564, EVALUE 0.00e+00; SWISSPROT HIT: Q16626, EVALUE 1.00e-40
gggtctaggctttcagggagcccagcttcacctgttcaggaaccatccctcctccaccctacctggattcgatcctggatgtcagcaactacatctccatcccccactggtgccagttccacctcctcttgttcaggatcttggttcaggggctggtaggagtagccagctgggcccgaccccgtttcctcctgctcttcctcaggctcctcactgctccaatccccagtgccttctgaagggccctgatgtcccagttcctcagtctgattggggaagatacgctcagggcccatggtgtctcctcctagaactactgttgccatccgggcaggggctgcaagaacagggaggcggtaggacagggatcggatgaaaccaggcccatcttcatcctctcatcatctccttgtagtctcctgcgtgcaaaaaaccagctcctccccgaggctcctgcatcctccacccctccgccccaattccagcctctcgttcctccccctcctaagtcggggttctt

SEQ ID NO: 2738 - DNA, 587 bp, Homo sapiens
  MAP TO CHR7.1; EXPRESSED IN PLACENTA, SIGNAL = 2.4; EXPRESSED IN FETAL LIVER, SIGNAL = 2.4; EXPRESSED IN HELA, SIGNAL = 1.9; EXPRESSED IN BRAIN, SIGNAL = 2.5; EXPRESSED IN LUNG, SIGNAL = 1.9; EXPRESSED IN HEART, SIGNAL =   2; SWISSPROT HIT: O60896, EVALUE 1.00e-22; EST_HUMAN HIT: BI462355.1, EVALUE 1.00e-70; NT HIT: gi13626665, EVALUE 3.00e-70
gtgaggccttgggtagagtgcggtcaggctgtggtcaggcagtggttgggcagtgggcagcgctgtggtcagagcaaatcccacgcccagcagtggcactcacacgatgaactcggacaggttgcaccacttccagacgtccaccttgcccatcatgtctgcgaaagccttcccacacaggggcagcctctccaacatgcctgtctcgttgcagccgcctgctctgggacacccacctggagaggggacagccataagaattccactacagttcacactggggatgccaggacaggggaggcccaaggggccataacttgagtactcactagcaaggctccgtttgcaagcctgagaccgttccagcggagtccttcaccctccaccctgacctacctgtcagtgcagaaaggaggctccacacagggacctgtccccaagacaggacaagtccaccttttcacttcaccgcctcacaggcagtggcacaggcagggatcaggcagtgagaccctgggccaaactccttgggaggtggtgagagggtctcaggcagatcagggctggcaaagaggctccagttccag

SEQ ID NO: 2739 - DNA, 548 bp, Homo sapiens
  MAP TO CHR2.1; EXPRESSED IN HEART, SIGNAL = 0.98; EXPRESSED IN ADULT LIVER, SIGNAL = 0.99; EXPRESSED IN BONE MARROW, SIGNAL = 0.6; EXPRESSED IN HELA, SIGNAL = 3.4; EXPRESSED IN FETAL LIVER, SIGNAL = 1.1; EXPRESSED IN BRAIN, SIGNAL = 0.56; EXPRESSED IN LUNG, SIGNAL = 0.81; SWISSPROT HIT: P14650, EVALUE 3.00e-14; EST_HUMAN HIT: AA488536.1, EVALUE 1.00e-113; NT HIT: gi14722592, EVALUE 1.00e-115
ctgtgagtctcctgcccttctctgatcctgctttcattttgggggatccaggttgtggtatgagaaccctggggtgttctccccggcccagctgactcagatcaagcagacgtcgctggccaggatcctatgcgacaacgcggacaacatcacccgggtgcagagcgacgtgttcagggtggcggagttccctcacggctacggcagctgtgacgagatccccagggtagacctccgggtgtggcaggactgctgtgaaggtgcgtgccaggggcaccatgtctgttcctttttcatccctggttttggtgactgcttggcgggtgcttaatgacctgcagatgtcatcctaatcttgaaaactgaaaacaaaatattcagctttagatttaaatcgtgctgtatccatgctgagatggactgcggagccaaaaatatgaacaaagttggtgattctgaggaattggcagtgctgtgggagaacattcagaataactaaaacactaagagaaacagaaacccaggcttcagcaagatgtgcccctaat

SEQ ID NO: 2740 - DNA, 594 bp, Homo sapiens
  MAP TO CHR9.1; EXPRESSED IN FETAL LIVER, SIGNAL =   1; EXPRESSED IN BRAIN, SIGNAL = 1.1; EXPRESSED IN LUNG, SIGNAL = 1.4; EXPRESSED IN HELA, SIGNAL = 0.6; EXPRESSED IN BONE MARROW, SIGNAL = 1.2; EXPRESSED IN HEART, SIGNAL = 1.7; EXPRESSED IN ADULT LIVER, SIGNAL = 1.3; SWISSPROT HIT: Q05063, EVALUE 6.70e-01; EST_HUMAN HIT: AL521001.1, EVALUE 0.00e+00; NT HIT: gi15298469, EVALUE 0.00e+00
ccatgtgcaactctccacactatatttaacagctgcggcggagaaggcagggaggcagccacggtggcggctctgggggcagctcttgtcttcggggagaaggcccttggagccgggctggcatcggccttctcggggtgagcgaggtcaccatgccagcttcccagagccgggcccgtgcccgggaccgcaacaacgtcctcaaccgggctgagttcctgtccctgaaccagccccccaaggggggcccggagccccgcagctcgggcagaaaggcctcgggcccatcagcacagcccccacctgctggtgacggggccagagagcgacgccagtcacagcagctgccagaggaggactgcatgcagctgaacccctccttcaagggcatcgccttcaactccctgctggccatcgatatctgtatgtccaagcggctgggggtgtgcgctggccgggcggcgtcctgggccagtgcccgctccatggtcaagctcatcggcatcacgggccacggcatcccctggatcggaggcaccatcctctgcctggtgaagagcagcacactggccggccaggaggtgctcatgaatc

SEQ ID NO: 2741 - DNA, 598 bp, Homo sapiens
  MAP TO CHR7.1; EXPRESSED IN LUNG, SIGNAL = 0.58; EXPRESSED IN BRAIN, SIGNAL = 0.54; EXPRESSED IN BONE MARROW, SIGNAL = 0.6; SWISSPROT HIT: Q9UPE1, EVALUE 4.00e-05; EST_HUMAN HIT: AA361108.1, EVALUE 4.00e-46; NT HIT: gi14782986, EVALUE 6.00e-04
taacccaggcagaccaaaagcaatgtccctggacgttccctaagtccagtctctaggccacctctgttctactacagagagtccatgaaatggaaagataagtctagctggcttttaacaatcacctaaactcctttttataaataatatacagattggtaacttggagtaaaagagagaagcggaggaggaaaaaatgctgttaggaaggctgttctcttacaaaattcttactccaggtatcagatgggtcaggtttatttcttgagagctttcttcggaagaattccccagttgtgaaactccagatctttctccactgcccaatcacgaatgcacaatttctccttttgggagaagactatgctgaaaattagtgttgcataaataccgttaccttttctggtgaaaaactccttggagtatttccccaacatagcgtattttcgagggactttccccagcagttcaatgatcaatgctatgtgatctgcattgggaaacattgccagcaaaacagaaacacacgacagtttaatcagtacactgcatgcagacactaccaccgcccgcgcagacagaaacagagcgcaacttg

SEQ ID NO: 2742 - DNA, 550 bp, Homo sapiens
  MAP TO CHR17.1; EXPRESSED IN HEART, SIGNAL = 0.73; EXPRESSED IN ADULT LIVER, SIGNAL = 0.41; EXPRESSED IN BONE MARROW, SIGNAL = 0.53; EXPRESSED IN LUNG, SIGNAL = 0.87; EXPRESSED IN BRAIN, SIGNAL = 0.59; NT HIT: gi15310274, EVALUE 1.00e-48; SWISSPROT HIT: Q14849, EVALUE 7.00e-12; EST_HUMAN HIT: BF772391.1, EVALUE 8.00e-81
cgaggttcagcctctactgggaaacccctgcccaccccggctgacccctgcacccgccctcctccaggcacccattccaagggcaggggttaggggtaggcaggcaaatacctgagcagagaaacttttcttcccagcaacttcttcatctgattcattgtcagaccctgcagaaaacaggcacagatgacaatggcaaggggtggggagagagtgtggggaggtagtggggttcgggtatgtgagtgcaaggatgtgggggataaaagtgtgtgggagagggttgctggctttccccagggagcctgatagaaggaatagaaagaacagacccagcctaccccattcctcacaaggcccctccctgaaagcagttcccccacacaccagccctcacctgcaaaggattctgggggtgaatagaactgtccctcggacagagcaccggagaacagcaggggtccacgggcaacagcaacctgggcggcaagataccctggaggagcagactcggtcccggaccgaggacagttacaccctagcagcctgg

SEQ ID NO: 2743 - DNA, 532 bp, Homo sapiens
  MAP TO CHR19.1; EXPRESSED IN FETAL LIVER, SIGNAL = 1.4; EXPRESSED IN LUNG, SIGNAL = 1.1; EXPRESSED IN HELA, SIGNAL =   2; EXPRESSED IN BRAIN, SIGNAL = 2.1; EXPRESSED IN HEART, SIGNAL = 1.3; EXPRESSED IN BONE MARROW, SIGNAL =   2; NT HIT: AF340156.1, EVALUE 0.00e+00; SWISSPROT HIT: Q9WVR6, EVALUE 5.00e-27; EST_HUMAN HIT: BI756372.1, EVALUE 1.00e-112
acgaggtgccatttcctatgtgagggactgaggaaggggcagatgatgagcccagaatggcacttgctgggcttgggggccagtggcattcaacacctccagcccacctcctgcctcctcctcctccgggaagcaccccgggctgtcttcctcctggcagcaggcagatccccacacagaaggccgggctgcgaaggggaccccaggcctgatgcctccccatctctccccctgcagggaacatcatcggctcgggcatcttcatctcgcccaagggggtcctggagcactcaggctccgtgggtctggccctgttcgtctgggtcctgggtgggggcgtgacggctctgggctccctctgctatgcagagctgggagtcgccatccccaagtctggcggggactacgcctacgtcacagagatcttcgggggcctggctgggtgagtgtggggcaccagcgggcagggggacaccctcttgggaatgggatggccaaatgagccctggcatcagtttccactcctgcttcc

SEQ ID NO: 2744 - DNA, 579 bp, Homo sapiens
  MAP TO CHR12.1; EXPRESSED IN BRAIN, SIGNAL = 1.8; EXPRESSED IN HEART, SIGNAL = 1.1; EXPRESSED IN LUNG, SIGNAL = 2.4; EXPRESSED IN PLACENTA, SIGNAL = 4.5; EXPRESSED IN FETAL LIVER, SIGNAL = 1.7; NT HIT: gi14784244, EVALUE 9.00e-80; SWISSPROT HIT: O10341, EVALUE 2.90e-01; EST_HUMAN HIT: BF059003.1, EVALUE 1.00e-79
tgtttggtctcaaccccttcatggccctaatgtaaggaccctagggcccctattctgtctctaagctgtggccaccttattcagttcacacacctctaagctcactacagagggagaactggggctgcagggacttaggggctgcaagccatttgtggtgagaaaggtgacctctttctcctttgcaggacctgaaggagaagaaggagaaggtggaggagaaggcaagccggaaagagcgaaagaaagaagtggtggaggtgtggaggggtgggggagaggaccacatctgccctaccatcttccctcccaatcatctcatccttcctctgctttccttccgagggtgctgggtcctgccgttcccctgagccctgtcacccttgctgccccaccctgtggcccatcccaagcccttttatcacccaggctccagtcccattggtggtgatggtgggcaaggcatgcagccagcctgaggctactccctctcctggtccccacaggaggaggagaacggggctgaggaggaagaagaagaaactgccgaggatggagaggaggaagatgaaggggaag

SEQ ID NO: 2745 - DNA, 576 bp, Homo sapiens
  MAP TO CHR19.1; EXPRESSED IN BRAIN, SIGNAL = 0.95; EXPRESSED IN HEART, SIGNAL = 0.44; EXPRESSED IN BONE MARROW, SIGNAL = 1.1; EXPRESSED IN ADULT LIVER, SIGNAL = 0.94; NT HIT: gi14763160, EVALUE 0.00e+00; SWISSPROT HIT: Q02817, EVALUE 9.60e-02; EST_HUMAN HIT: AA069926.1, EVALUE 3.00e-28
ttctggggttggttgtaagggggatttggagatggttggaagtgaagttctggagggagctggtatgaggtgagggcctgggcaagggagctgattggagggaaggctctggaggggacacagaggccccagaactcaggcaatttctgggataggtgagggggtcaggtggggtccacggctgggttgggtgtgtgtctagagctggggatctgcatgcacctgtctgttcctctccccacaggcagaagcacgtggcagccctcctcgacatccgtggcctgcgcaacacagccgcccgccaggagatcctggccgtggcccgggacctggaactctctgaggagggagccctgtcaccccctcgggaccgtgccttctttgcagacatccctgtgccccgcccatctttctgtctcagcctccctctcttcctgggccgcctccccctctcccggctggccaggcccagtttggcctgtctgcctcggccccggcctccgtctctagcgcgacctcgggcccagcgctgagggtcacccaaccgccggccttagtgaccccatctatgctgct

SEQ ID NO: 2746 - DNA, 525 bp, Homo sapiens
  MAP TO CHR11.1; EXPRESSED IN HELA, SIGNAL = 1.1; EXPRESSED IN BRAIN, SIGNAL = 0.97; EXPRESSED IN HEART, SIGNAL = 0.86; EXPRESSED IN BONE MARROW, SIGNAL = 0.89; EXPRESSED IN ADULT LIVER, SIGNAL = 0.85; EXPRESSED IN PLACENTA, SIGNAL = 1.3; EXPRESSED IN LUNG, SIGNAL = 0.82; EST_HUMAN HIT: BE009187.1, EVALUE 7.40e-01; NT HIT: gi15668172, EVALUE 2.00e+00; SWISSPROT HIT: P35448, EVALUE 4.90e+00
gcttctgcctattgggtctgaaaccctagaaaacaaaccaataaatcaggtttcagcttctgtccgatactgacacatttgctgctttcataaaaaatatatttctaccacccaaagtgctaatttgttttgacagatgctgtggagttgccaaatatgagggggtggggggaatcctggaaactgtaatgcaaaatagtataattaaagatgttaaaaaatacgaatgtaactactgtgatattacgatgtaactgaatatttaaaaatagctcttcagggttgtgcttaaaaaatctccaggcaatcaagatcacctggagagtatctaagaaagctgtggtgtacgtgtggaactggaggaattttaagagtagttttaaattatggaatatgcagccgaccacttaacagcctcaatgagatttttttttccagcttaaaagcccatggtattagacatcaattagtaattttattataaagatgttcaatgtcaagataacactcttcgttcctggcatt

SEQ ID NO: 2747 - DNA, 553 bp, Homo sapiens
  MAP TO CHR2.1; EXPRESSED IN LUNG, SIGNAL = 1.1; EXPRESSED IN FETAL LIVER, SIGNAL = 1.3; EXPRESSED IN HELA, SIGNAL = 1.9; EXPRESSED IN BRAIN, SIGNAL = 2.3; EXPRESSED IN HEART, SIGNAL = 1.1; EXPRESSED IN ADULT LIVER, SIGNAL = 1.9; SWISSPROT HIT: P11799, EVALUE 1.00e-10; EST_HUMAN HIT: AW948592.1, EVALUE 2.00e-01; NT HIT: AJ277892.1, EVALUE 0.00e+00
ttctcctctgatttgggctcttagcaaagttatgagttccaaaataaaaggataattaaggttatttggttgcaattcttcaacaagttttaatgaattgtcatttcttgtgtcagcatgtattgtcatatgatcacaccagtcactcttcaaggttctagatttaatttttttttcctttatagtaagcaagtgttctcattgtttatctccttttttctggtagcacctcctgttttcacccagaagccttctccagtaggagctcttaaaggttctgatgtgattctccaatgtgaaatttcgggaactcccccatttgaagtagtatgggttaaagatcgaaagcaggttagaaacagcaagaaatttaaaatcacttcaaaacattttgatacaagtcttcatatccttaatcttgaagcctccgatgtcggggaatatcactgcaaagctactaatgaggtgggaagtgacacgtgttcttgctctgtcaagttcaaaggtttgtatacatggacacaaaaatatatgccccttcctcctatctgtt

SEQ ID NO: 2748 - DNA, 577 bp, Homo sapiens
  MAP TO CHR19.1; EXPRESSED IN FETAL LIVER, SIGNAL = 1.6; EXPRESSED IN LUNG, SIGNAL = 3.1; EXPRESSED IN HELA, SIGNAL = 0.74; EXPRESSED IN BRAIN, SIGNAL = 1.1; EXPRESSED IN HEART, SIGNAL = 1.7; SWISSPROT HIT: P52737, EVALUE 9.00e-75; EST_HUMAN HIT: BG167169.1, EVALUE 2.00e-72; NT HIT: gi14760087, EVALUE 3.00e-67
tccgtgcatttgaagttctgagtcccatctaaggactttaccatattgcttacatccatagagtttctagccagcgtgagtccttacatgcttttgaaggattgaggcagatctaaaggctttaccacattgcttacactcatagggtttctctccagtatgaatcctttcatggtagagaaaagagttggaagaaatgaaggctttcccacactgtttacatttatagggtttctctccagtgtgagtccttttatgatagcgaatagaattagaagaaatgaaggcttttccacattgcttacactcatagggtttctctcctgtgtgagtcctttcatgcattttaagttgtgaggcaactctaaagactttaccacattgcttacatccatagggtttctctcctgtgtgagttcgtatgtgcttttgaaggactgaggcagatctgaaggctttcccacattgcttacactcatagggtttctctccagtgtgagtcctttcatgatagtgaaaggaattggaagaagtgaaggttttcccacattgtttacattcaaagggtttctctcca

SEQ ID NO: 2749 - DNA, 550 bp, Homo sapiens
  MAP TO CHR5.1; EXPRESSED IN LUNG, SIGNAL = 0.67; EXPRESSED IN BRAIN, SIGNAL = 1.4; EXPRESSED IN HELA, SIGNAL = 2.3; EXPRESSED IN BONE MARROW, SIGNAL = 1.3; EXPRESSED IN HEART, SIGNAL = 0.54; SWISSPROT HIT: Q9Y5H8, EVALUE 1.00e-100; EST_HUMAN HIT: BG719192.1, EVALUE 3.00e-80; NT HIT: gi14728129, EVALUE 0.00e+00
tgtagcctgagtctgcatccactgcgcgcaccttcgctaccacgtggcccgcacccactgaccgcggcaccagctcgctcactgcgccaccgatgccacccacccgaggcatcagcagtgccggcgcgttgtcgttctcgtccagcacgaacacctgcagcgtcacgttgctgcccagaggcggcacgcccgcatcgcgcgcactcacctggaactgcagcagctctagctcctcgtggtccagcggctgcagcgcgtacaccttgccgctctccgcgtgtaccgacacgtagctcgacagcgcgcgctcccccacccgccgttccaccagcgagtaggacaccagggcgttctcctgcgcgtccgcgtcccgcgcagacaccgtgaagatgtggcagcccggcgggttgttctccttcacgaacaccgtgtactcggactgcgagaatgccggcgcattgtcgttcacgtcggccacctccacggacacgctggccgtggcccacagtgaaggcgagcccccgtcccgagcagtcaccaccagctcata

SEQ ID NO: 2750 - DNA, 562 bp, Homo sapiens
  MAP TO CHR7.1; EXPRESSED IN FETAL LIVER, SIGNAL = 0.33; EXPRESSED IN BRAIN, SIGNAL = 0.68; SWISSPROT HIT: P22443, EVALUE 4.10e+00; NT HIT: AJ009968.1, EVALUE 8.40e+00
ctcctttctcttgccattcgctggccattagccaccagcctctgcacaatgaccagctggcccctggcagatcttgggcccaggtgtgaagtcgctggagaagcatttcagggccaagatgggagtgatttcattttccattgacactatgcagaaatgaaggggattcaagtgccttcagaaaagcttccttccagcgaatggagttttgggggttttccagacttgcaactgcttttattcttggaagcatcattgttgctttttccccccttccatttatatcccaggaactgattcagaaaccatagaaattggatttggaatcgctgaatgctagcagacagctgactgcactcttcccaagaaaccctgccagctgggttcgggtatcgcgcggtgtgtgctctctctgcctggcccgctgagtcctctaactctaatggattccttcttacaccaaagtgcactagaactaaagtgttttgcttcattctttagacattttgtggtttagggctcaatcagccagggtatgatttgcaatccacagtaaccggtt

SEQ ID NO: 2751 - DNA, 516 bp, Homo sapiens
  MAP TO CHR7.1; EXPRESSED IN PLACENTA, SIGNAL = 4.2; EXPRESSED IN LUNG, SIGNAL = 3.8; EXPRESSED IN BRAIN, SIGNAL =   5; EXPRESSED IN HEART, SIGNAL = 3.8; EXPRESSED IN ADULT LIVER, SIGNAL = 2.9; EXPRESSED IN BONE MARROW, SIGNAL = 4.6; EXPRESSED IN FETAL LIVER, SIGNAL = 3.6; NT HIT: AJ010770.1, EVALUE 0.00e+00; SWISSPROT HIT: Q99996, EVALUE 2.00e-61; EST_HUMAN HIT: BG258279.1, EVALUE 0.00e+00
taccctagatagggagcgggaattgcacgcacagctgcagagcagtgatggtactggacagtctcggccacccttgccctcagaggacctactgaaagagctgcagaaacagctagaggaaaaacacagtcgcatagtagaattgttaaatgagactgaaaaatataaactggattctttgcaaacacgacagcaaatggaaaaagataggcaggttcacaggaaaacactgcagacagaacaggaggccaacactgagggacagaaaaaaatgcatgagctccagtccaaagtggaagatcttcagcgccagctggaagagaaaagacaacaagtttataagttagaccttgaaggacagcgactacaaggaatcatgcaggaattccagaagcaagaactagaacgagaagaaaaacgagaaagtagaagaattctgtatcagaaccttaatgaggtaaactgacagtttctttttagatatttttaaggaaagcactgcagccctttgatcat

SEQ ID NO: 2752 - DNA, 543 bp, Homo sapiens
  MAP TO CHR17.1; EXPRESSED IN FETAL LIVER, SIGNAL = 0.71; EXPRESSED IN HELA, SIGNAL = 0.61; EXPRESSED IN BRAIN, SIGNAL = 0.68; EXPRESSED IN BONE MARROW, SIGNAL = 0.71; NT HIT: gi8923235, EVALUE 2.00e-49; SWISSPROT HIT: P18155, EVALUE 1.30e+00; EST_HUMAN HIT: BI906547.1, EVALUE 3.00e-43
atggacgccagtactccttggcccttgcgccgctctgcctctgagtcaccgtctccgagtcaccggctccctcctcaccgcgctgagcagtggcagcagctgctgcaggaaccaggaaggaaggagatgtcagagcctcccctctagccggatctccccacctccctctcccctgtcccctcctcccgccaagctccgggcagccgctcagctctgcccccctgctccccggaggactcagggctgagcagactgccctagcatcgatgtggcttgggagtgggggcacagtccctgctgggcatggttccagatagatcagaggactggggaactgttggctgtacgccagtggtgataaaggatttattcagactagcatggcagtgaccctgttagtacccaaggccaattcctaattaacccccgccccccgcctctcattttacatctgaaaatagactgcaaaatttggagccagcaaaagtatcaggttgatggtggagggacagatgccccctctgggaccataagagagtgcca

SEQ ID NO: 2753 - DNA, 511 bp, Homo sapiens
  MAP TO CHR2.1; EXPRESSED IN ADULT LIVER, SIGNAL = 0.79; EXPRESSED IN BONE MARROW, SIGNAL = 0.47; EXPRESSED IN HELA, SIGNAL = 0.53; EXPRESSED IN BRAIN, SIGNAL = 0.46; EXPRESSED IN HEART, SIGNAL = 0.76; NT HIT: gi14723948, EVALUE 2.00e-89; SWISSPROT HIT: Q00918, EVALUE 8.00e-30; EST_HUMAN HIT: BF878441.1, EVALUE 7.00e-78
ttgcatgcttgctaaaatggaagaagagaccagagagggacagggacaatcactgtcacgacttttggtgccctgactctaaaactcacatggtaaactgatttttcttcaagaaaggtgatgctctaaatctagacagatttatcctgaagtgtggtttttaattcataccttagggttcattttactatcatttggaaagccaatgtagttttggtttctcatgtaatgtcgggctttatctctctgcttcagctgatccccctgtgatctcggaagagaaagggccctgttaccgacttgtcagttctggaagacagtgtatgcaccctctgtctgttcacctcaccaagcagctctgctgttgtagtgtgggcaaggcctggggcccacactgtgagaaatgtccccttccaggcacaggtaagacatgcccagctgtatgcgcacatagattcccagccacatgagtacacgggacaactttggcaccttgggtcatttgtggttt

SEQ ID NO: 2754 - DNA, 591 bp, Homo sapiens
  MAP TO CHR2.1; EXPRESSED IN ADULT LIVER, SIGNAL = 0.83; EXPRESSED IN HELA, SIGNAL = 0.89; EXPRESSED IN BRAIN, SIGNAL = 0.84; EXPRESSED IN BONE MARROW, SIGNAL = 0.96; EXPRESSED IN HEART, SIGNAL = 0.63; EST_HUMAN HIT: BI460929.1, EVALUE 5.00e-64; NT HIT: gi14738090, EVALUE 3.00e-64; SWISSPROT HIT: Q01820, EVALUE 2.00e-06
tgcaatgaggaagaacatgacttaagagtttcagtgactaccctgttactcaaatagaaaaaatacttacttgacataaatatattttgtgtaagctccattcttctcctagagcacaaatcttaatgtcactgttttcaccattcaaaaataatgtttgataaatatatttagatgtactctttaattttttcctgttaaaagaaatgaaaaagtcacatatttatataaaactgaatgttttactgattttgcatatatttctaaatactccttttattcaatttctattaaatagagtcaacttacctattgtgtaaaaggatagggagatagtatatattcaaattttcttgtgtctagaagagtacataagaaactaataatagtggttatctctggggtcctctatgcacgggagagatagtggagaaaggggggcagcatgggaggcagacttttcactacacatgttttagcaattttggactaatttaattacccattcaatagattaagaagttagcatgttgattttttgcttatttccttatttagaaaccagcactatgaaggagctcaaatagcgca

SEQ ID NO: 2755 - DNA, 553 bp, Homo sapiens
  MAP TO CHR19.1; EXPRESSED IN HELA, SIGNAL = 1.8; EXPRESSED IN BRAIN, SIGNAL = 2.8; EXPRESSED IN HEART, SIGNAL = 3.5; EXPRESSED IN BONE MARROW, SIGNAL = 2.9; EXPRESSED IN LUNG, SIGNAL = 5.1; EXPRESSED IN FETAL LIVER, SIGNAL = 1.7; SWISSPROT HIT: P39188, EVALUE 4.00e-05; EST_HUMAN HIT: BG753238.1, EVALUE 2.00e-84; NT HIT: gi14761375, EVALUE 1.00e-78
caaacaaacaacaacaacaaaacacattccttaaccagcccctgggtggctccagctatggctaccgtggccgagactgccgggccaacctttatttgctgcccaccggggagatagtgtactttgtggcctccgtagccgtgctatacagcgtggaggagcagaggcagcgacactacctgggacacaacgatgacatcaaatggtgagatgtgggacagaggggacgggagggagctgtggctggagatggagctccagcccctgcccctctatgcctcttttcacattgctaccctgtggggtttggggcaaggctaagcctttgctccctctccaaagccaccagctgccctcaggctgaatttagtgggaaaatgtggattgagtatcaatatttcaatatttcaggtgttttagttgggtgtggtggtaagcccttatggtcccagctactcaggaggttgaggcgagaggatcacttgaacccaggaggtcgaggctgcagtgactgagccaccacactccagcctgggtgaaagagcaagctctg

SEQ ID NO: 2756 - DNA, 580 bp, Homo sapiens
  MAP TO CHR19.1; EXPRESSED IN LUNG, SIGNAL = 0.7; EXPRESSED IN HELA, SIGNAL = 0.55; EXPRESSED IN BRAIN, SIGNAL = 0.7; EXPRESSED IN BONE MARROW, SIGNAL = 0.66; EXPRESSED IN HEART, SIGNAL = 0.7; SWISSPROT HIT: P06186, EVALUE 6.40e-01; EST_HUMAN HIT: BI025054.1, EVALUE 1.30e-02; NT HIT: AF294352.1, EVALUE 9.00e-03
atctcaccatgaggtctccgtgcccacctctgctaaaaccacagctgcccagcactcccgagggcccggccagctctgttcttcccacagcacctagcgccatctcaaggactggacactcccttgtttatcagattcacagtctgccctcccaccggggctggcatctttgcagattttgctccctgccgagcccccggggcctaaaacagagcctggcacccaggaggtgcttggtaaatatttgtcgaaggaatgcacaggctcccggctgcacccccagcatttgagctccggctgggtgcccagcaaggtgtgggagaggatgtttggacctgcgggggtgagggcaagcctggccagcaggggtgcagagggggtgagaccaccatccacctttattctgagccttggatggaagaagatccaaaggtcagagtggtaagaaaggttcaagggccaaccactagggcacgtttcaaatgggggcgtgggggtgtgcagacccattttgaaatttgggaaaggccagagaacaagctgcaattttgtcccatcggcaggatttagggtggtgacg

SEQ ID NO: 2757 - DNA, 527 bp, Homo sapiens
  MAP TO CHR19.1; EXPRESSED IN HEART, SIGNAL = 0.63; EXPRESSED IN BONE MARROW, SIGNAL = 1.3; EXPRESSED IN ADULT LIVER, SIGNAL = 1.3; EXPRESSED IN LUNG, SIGNAL = 0.65; EXPRESSED IN BRAIN, SIGNAL = 1.2; NT HIT: AF059304.1, EVALUE 1.00e-105; SWISSPROT HIT: P36776, EVALUE 1.00e-28; EST_HUMAN HIT: AW732401.1, EVALUE 6.00e-97
aaatggagcccttgtcacaggctgcccctccccgtggccagtggcagctctgatgtgctcagcctcccggacaatcctggtcccttctcgcagccctcagacgtctgaaaggcagtgtgcaggtggcgagagtcatgcgcgggtccccggcttccccagctcacgtgcccactgaacctgcctctgtctgcaggagttcattgccgttagccagctccgcggctccacccagggcaagatcctctgcttctatggcccccctggcgtgggtaagaccagcattgctcgctccatcgcccgcgccctgaaccgagagtacttccgcttcagcgtcgggggcatgactgacgtggctgagatcaagggccacaggtaggcctggcctgacagctctccccacgcactcccctcagctgtgctgccgggcttcgtcttctccggtcaccctttaacatctggtagagcaatccgggttgtgggcaaccgattccactcatgctggagtaactgaaaagtccagccatgtg

SEQ ID NO: 2758 - DNA, 556 bp, Homo sapiens
  MAP TO CHR8.1; EXPRESSED IN BRAIN, SIGNAL = 3.9; EXPRESSED IN HEART, SIGNAL = 6.4; EXPRESSED IN ADULT LIVER, SIGNAL = 3.9; EXPRESSED IN BONE MARROW, SIGNAL = 4.2; EXPRESSED IN PLACENTA, SIGNAL = 4.1; EXPRESSED IN LUNG, SIGNAL = 5.3; NT HIT: AL049866.2, EVALUE 0.00e+00; SWISSPROT HIT: Q00927, EVALUE 1.40e+00
atcttcagctccagacagccggccaccttcctggtgagagcacgggggtctgcctggcctgagaggtttgtggcacaggcgccggcgggagccttcttggctccgggactccgcggagggcaggctgcacgggtgaccgtgtggaatacagagtgccagctgtttctgggacgggcgagagagtcgcagagcttctgggcggcgccatcttcagctccagacagccggccaccttcctggtgagagcacgggggtctgcctggcctgagaggtttgtggcacaggcgccggcgggagccttcttggctccgggactccgcggagggcaggctgcacgggtgaccgtgtggaatacagagtgccagccgtttctgggacgggcgagagagtcgcagagattctggggcggcaccatcctcagctccagacaaccagccaccttcccggcaagagccacagagcttctgaggctgcgacatcttcgactccagacaactggccaccttcctggccaaagcaacacagcttctgggaaagattctgttttgggccttca

SEQ ID NO: 2759 - DNA, 598 bp, Homo sapiens
  MAP TO CHR17.1; EXPRESSED IN BONE MARROW, SIGNAL = 0.55; EXPRESSED IN HEART, SIGNAL = 0.78; EXPRESSED IN FETAL LIVER, SIGNAL = 0.57; EXPRESSED IN LUNG, SIGNAL = 0.67; EXPRESSED IN BRAIN, SIGNAL = 0.51; EXPRESSED IN HELA, SIGNAL = 0.63; NT HIT: gi14770916, EVALUE 3.00e-70; SWISSPROT HIT: P08548, EVALUE 4.30e-02; EST_HUMAN HIT: BE009356.1, EVALUE 8.00e-66
tgggcatttaggttgtttccacttttggctattatgaatcgttcttctgtgaacacttgtgtacaagtttttgggtggacatgtgtttttatttctcttaagtatatacttaggagcagaattgttagatcatagaacaaatggaatttagccatttttccttaaagtttttatgattatctgatgcaaacatctaaatctttttaatccagatgtggatgccaacagagagctgccactcacacagccaccttcagcccactcatctatcaccagtggaagctgcccaggaactccggaaatgcgcaggcggcaggaggaggctatgcgaagactagcctcgcaggtacaatatgattcccacgttggggatatggtagttccattttaatatcaaggaagcaaagatagggagacctttggcaaagtgaacaaaaatacgtaaagctataccatgagaacgtggaggaaagtttctctttctttgatattcctagaaaaatactttattgtgatgggatcagaaccttagagttggaaagacccttagaaaaaacgtcttctagtgaataaataaagaagttgagaccgaagtggg

SEQ ID NO: 2760 - DNA, 539 bp, Homo sapiens
  MAP TO CHR7.1; EXPRESSED IN PLACENTA, SIGNAL = 3.7; EXPRESSED IN FETAL LIVER, SIGNAL = 3.9; EXPRESSED IN LUNG, SIGNAL = 4.7; EXPRESSED IN HELA, SIGNAL = 4.5; EXPRESSED IN BRAIN, SIGNAL = 4.3; EXPRESSED IN HEART, SIGNAL = 5.4; EXPRESSED IN ADULT LIVER, SIGNAL = 2.6; EXPRESSED IN BONE MARROW, SIGNAL = 4.6; NT HIT: AF252549.1, EVALUE 0.00e+00; SWISSPROT HIT: P21333, EVALUE 5.00e-22; EST_HUMAN HIT: AW340724.1, EVALUE 6.00e-60
agaacaagtggggcagtcaccacctgagggcttggcatgcaggcagtactccctagatatgcccccacccatacagccccgtcacttccgctcagccctcccagggtggcacatgttctgggacccttcactgtggcctcccagctgtgctcttaggaactccagccaccttgggggtgggatggaggactcagggagggggtctctgcagacccccgccccagctcttcctcctgccccttgcaagcctctggctttggtaagggctaccgtggggagcagtgaagggcccttaccttccgacacatggacagggaagggactgcgggtgatgggggcacccgcaaaggccacatgcacggtatgtggcccctccatggcaggtctgtatgtgcagcggaacgtgctgtcacccttgtcctccagggccacctccactgtgtcccgccggccctgtgggtccacgatcaccacagcaacatcgccagtgccggcccctgccgaaaacagaggctgtcagcaccactctggacacacac

SEQ ID NO: 2761 - DNA, 507 bp, Homo sapiens
  MAP TO CHR17.1; EXPRESSED IN FETAL LIVER, SIGNAL = 0.58; EXPRESSED IN HELA, SIGNAL = 0.41; EXPRESSED IN BRAIN, SIGNAL = 0.6; EXPRESSED IN LUNG, SIGNAL = 0.65; EXPRESSED IN HEART, SIGNAL = 0.78; NT HIT: AF297182.1, EVALUE 1.20e-01; SWISSPROT HIT: Q57856, EVALUE 6.10e+00; EST_HUMAN HIT: N34417.1, EVALUE 4.50e-02
aaatgccacttcagagcagggccctgagagtctgttctggtcactgcccacactggctttcctcactcctgcccccaagggttatacgtttccccatttctcctcctgccacctagaactttaaatagcctccagcacactatgtggctgccagaagttgtaattaaataatgtccagctgtcagaaaagctgttataaatggtccttttgtctgcaccactgtctgggaaaccaggaaggagagaaactagggggttataaatatgaagggcagaagttcagtggggagtccggggaaagcagcttttagggaccctgaaaacactggaggaattaaaagaaaaagtgtaattagtctatggcagaggccccagctctggctctgtgactggatttgcacattgggtagcctgaaaataatttgggaagctaatgtctttatctggagctgcaattaacatctccttttaaaatccagacaggaaagcaaaaagggcacaatgagt

SEQ ID NO: 2762 - DNA, 512 bp, Homo sapiens
  MAP TO CHR19.1; EXPRESSED IN HEART, SIGNAL = 0.82; EXPRESSED IN ADULT LIVER, SIGNAL = 0.89; EXPRESSED IN LUNG, SIGNAL = 0.93; EXPRESSED IN BRAIN, SIGNAL = 0.96; SWISSPROT HIT: P29597, EVALUE 8.00e-62; EST_HUMAN HIT: BE884149.1, EVALUE 0.00e+00; NT HIT: gi14756716, EVALUE 0.00e+00
ggctagtgtgcctgttttccagatgaggcagctgaggctcaaagaggttaagccacttgccctgtgtcacccagctgggcctgcaacccaggtccctgaccagcccctcactgtgtttccccccagcttcaaggactgcatcccgcgctccttccgccggcatatccggcagcacagcgccctgacccggctgcgccttcggaacgtcttccgcaggttcctgcgggacttccagccgggccgactctcccagcagatggtcatggtcaaatacctagccacactcgagcggctggcaccccgcttcggcacagagcgtgtgcccgtgtgccacctgaggctgctggcccaggccgagggggagccctgctacatccgggacagtggggtggcccctacagaccctggccctgagtctgctgctgggcccccaacccacgaggtgctggtgacaggcactggtggcatccagtggtggccagtagaggaggaggtgaacaaggaggaggtga

SEQ ID NO: 2763 - DNA, 569 bp, Homo sapiens
  MAP TO CHR10.1; EXPRESSED IN FETAL LIVER, SIGNAL = 1.1; EXPRESSED IN BRAIN, SIGNAL = 0.85; EXPRESSED IN HEART, SIGNAL = 0.99; EXPRESSED IN BONE MARROW, SIGNAL = 0.9; SWISSPROT HIT: P01130, EVALUE 1.00e-55; EST_HUMAN HIT: BG773575.1, EVALUE 4.00e-92; NT HIT: AF217403.1, EVALUE 0.00e+00
gttgggaggtcttttccaccctctttttctgggtgcctcctctggctcagccgcaccctgcaggatgacacaaggggatggggaggcactcttggttccatcgacgggtcccctctgaccccctgacctcgctccccggacccccaggctccatcgcctacctcttcttcaccaaccggcacgaggtcaggaagatgacgctggaccggagcgagtacaccagcctcatccccaacctgaggaacgtggtcgctctggacacggaggtggccagcaatagaatctactggtctgacctgtcccagagaatgatctgcaggtgagcgtcgcccctgcctgcagccttggcccgcaggtgagatgagggctcctggcgctgatgcccttctctcctcctgcctcagcacccagcttgacagagcccacggcgtctcttcctatgacaccgtcatcagcagagacatccaggcccccgacgggctggctgtggactggatccacagcaacatctactggaccgactctgtcctgggcactgtctctgttgcggataccaagggcgtgaagag

SEQ ID NO: 2764 - DNA, 597 bp, Homo sapiens
  MAP TO CHR6.1; EXPRESSED IN PLACENTA, SIGNAL = 1.8; EXPRESSED IN FETAL LIVER, SIGNAL = 1.5; EXPRESSED IN LUNG, SIGNAL = 1.5; EXPRESSED IN HELA, SIGNAL = 1.2; EXPRESSED IN BRAIN, SIGNAL = 1.1; EXPRESSED IN BONE MARROW, SIGNAL = 1.2; EXPRESSED IN HEART, SIGNAL = 1.5; NT HIT: gi14782488, EVALUE 0.00e+00; SWISSPROT HIT: P08125, EVALUE 3.90e-01; EST_HUMAN HIT: BE314165.1, EVALUE 0.00e+00
aatcccccaaatgagaggacatgaggtaggggaggcctggaattgtcattcatggaggagcagaggaagggggttctgggaggccaagtctctactaaaaccccgtctctactaaaaatgggggataatatgggagcaatgaggtggtcacaggcacaccaaagcctgacatctgctttccaaggccaccacttggtctctggaccgaggagttcctggggacccctgaatatatcctcaggagagccaaggttcaatgcaggtctcataaagggtacggttggagtgccaggctgtgtgggagataccggccattggacacctcactatggccccccgggccaatagagtcttcaacccaaaagaatcccgcagataaaccttcaaggtggtcgaaggggcgtggaagcatggaagagagacacaaggagagacaaagtgagttactgctgggatcctggacctcctccccacagggtgaacccttcagctcaggagtcacagagagggctctggaataaggtgggacagcggctagaaggggaagtaatcccagggggctcaccagttgctcctccatctccaggacggtctcat

SEQ ID NO: 2765 - DNA, 595 bp, Homo sapiens
  MAP TO CHR19.1; EXPRESSED IN ADULT LIVER, SIGNAL = 0.46; EXPRESSED IN HELA, SIGNAL = 0.82; EXPRESSED IN LUNG, SIGNAL = 0.99; EXPRESSED IN BRAIN, SIGNAL = 0.64; EXPRESSED IN HEART, SIGNAL = 1.2; NT HIT: J04431.1, EVALUE 0.00e+00; SWISSPROT HIT: P19359, EVALUE 2.00e+00; EST_HUMAN HIT: AW247300.1, EVALUE 0.00e+00
gaccccgaggtcctagaaaggacagaagcggtgccatgccttagctggggtcagctctgacagtctctagagtctgtgctcttgaccactgtgccatcctcccccatcactgggtgtccggggtgtggatggtggtgacgttggaggcagagtccctcagcactccacgccgtagcggtcgaagttgcggagcagcaggccgatctccaggtgcacggtgccaccagcagctgtgtgcaggcgatagcggtcggccccactgtagatggtgtccccatgcagcagctgcggcccaccacccacgaaagcccgtgccaactgttctcgccaactgcccaggggccgccacgtggggcaggccagctggtgggtgcccgggctactgggcacatggcaaaatccatagcctgcaagctggcagcggccaaagctgtcctgggaccacacctggaaatggagccggggccagcctgcaggaaaggagagagaggggaaaggagggatgggtggggaccagactcctgctgattccccactccctgatactcactggagaccccaggcccagtcttttcctctctgggtttctgtccca

SEQ ID NO: 2766 - DNA, 540 bp, Homo sapiens
  MAP TO CHR19.1; EXPRESSED IN HEART, SIGNAL =   2; EXPRESSED IN BONE MARROW, SIGNAL = 1.5; EXPRESSED IN ADULT LIVER, SIGNAL = 2.2; EXPRESSED IN PLACENTA, SIGNAL = 3.7; EXPRESSED IN FETAL LIVER, SIGNAL = 2.8; EXPRESSED IN BRAIN, SIGNAL = 1.7; EXPRESSED IN LUNG, SIGNAL = 2.9; NT HIT: gi7661935, EVALUE 0.00e+00; SWISSPROT HIT: P98161, EVALUE 2.20e+00; EST_HUMAN HIT: BG818630.1, EVALUE 0.00e+00
ccatttgcacaggacacaagtagcgtggggccagacagaaagcttgcggaggaagaggacctatttgacagcgcccatccggaagagggtgatttagatttggccagcgagtcaacagcacacgctcagtcgagcaaggcagacagcctgttagcggtagtgaaaagggagcccgcggagcagccaggcgatggcgagaggacggactgtgagcctgtagggctagagccggcagttgagcagagtagtgcggcctccgagctcgcggaggcctctagcgaggagctcgcagaagcacccacggaagccccaagcccagaagccagagatagcaaagaagacgggaggaagtttgattttgacgcttgtaatgaagtccctccggctcctaaagagtcctcaaccagtgagggcgctgatcagaaaatgaggtttgttttttctcagttttagaccagacgctatctccttttcattggtcatgtaatgacacacataagctgtttttttctgcaattggccagccagactgacgaaatt

SEQ ID NO: 2767 - DNA, 569 bp, Homo sapiens
  MAP TO CHR12.1; EXPRESSED IN FETAL LIVER, SIGNAL =   1; EXPRESSED IN LUNG, SIGNAL =   1; EXPRESSED IN BRAIN, SIGNAL = 0.99; EXPRESSED IN HEART, SIGNAL =   1; EXPRESSED IN ADULT LIVER, SIGNAL = 1.7; NT HIT: gi14767782, EVALUE 1.00e-102; SWISSPROT HIT: P13538, EVALUE 8.20e-01; EST_HUMAN HIT: BG291952.1, EVALUE 1.00e-102
ctgcccttttctttctgctgaggttaggttctgacagggagacaacagcaaatacaagagaagattgagcagaaccgacgggcacaagaggaatccctgaaacacagggagcaacttattcgaaatcttgaggaggtgagagagttggctcgtcgcgagaaagaggagagtgaaaagctgaaatcggccaggaagcaggagctggaagcccaggtagggctgagcccaagggcgggaggcaccgggcctgccaggttctctgcatcatcatgggacagggttcagagccgctggactgcctggcagggcttgcgcacgtttgagagcacggtgctcccgtttccatcccagctgcagtcctcatcctcttgactgtggcttctttccctccacatcctccatgtcgtgtgggtgaggccggtactgctgtctgttctctttactctgtctgcttctgcaagcagttggcttaccgggggccatagatctctcttcatttcagtccctgatacataagacagaacagtcctccaaacacctggccacaggccgagcttttcacgaggtac

SEQ ID NO: 2768 - DNA, 582 bp, Homo sapiens
  MAP TO AC007873.4; EXPRESSED IN HEART, SIGNAL = 0.7; EXPRESSED IN ADULT LIVER, SIGNAL =  16; EXPRESSED IN FETAL LIVER, SIGNAL =  11; EXPRESSED IN HELA, SIGNAL = 0.77; EXPRESSED IN BRAIN, SIGNAL = 0.86; EXPRESSED IN LUNG, SIGNAL = 1.2; EXPRESSED IN BONE MARROW, SIGNAL = 0.83; EST_HUMAN HIT: AL564784.1, EVALUE 0.00e+00; NT HIT: M20786.1, EVALUE 0.00e+00; SWISSPROT HIT: P28800, EVALUE 1.00e-39
  unsure 207
  unsure 369
  unsure 499
  unsure 505
  unsure 549
gagttcaagctgttccctggccaggatctcagacaccctcccaagcagctccaggagcctgtgaggccaagggcagctctgaccagccatctctggccctgggcaggcctgcaggagttgttccaggccccagacctgcgtgggatctccgagcagagcctggtggtgtccggcgtgcagcatcagtccaccctggagctcagcganggtcggcgtggaggcggcggcggccaccagcattgccatgtcccgcatgtccctgtcctccttcagcgtgaaccgccccttcctcttcttcatcttcgaggacaccacaggccttcccctcttcgtgggcagcgtgaggaaccccaaccccagtgcaccgcngggagctcaaggaacagcaggattccccgggcaacaaggacttcctccagagcctgaaaggcttcccccgcggagacaagcttttcggccctgacttaaaacttgtgccccccatggaggaggattaccncccagntttggcagccccaagtgaggggccgtggctgtggcatccagagntccctgcctggaccagcctctccactcatgtga

SEQ ID NO: 2769 - DNA, 571 bp, Homo sapiens
  MAP TO CHR10.1; EXPRESSED IN FETAL LIVER, SIGNAL = 3.3; EXPRESSED IN LUNG, SIGNAL = 3.1; EXPRESSED IN HELA, SIGNAL = 3.7; EXPRESSED IN BRAIN, SIGNAL = 3.4; EXPRESSED IN HEART, SIGNAL = 3.3; EXPRESSED IN ADULT LIVER, SIGNAL = 2.6; EXPRESSED IN BONE MARROW, SIGNAL = 3.4; SWISSPROT HIT: P22421, EVALUE 3.20e-02; EST_HUMAN HIT: BF512621.1, EVALUE 2.00e-01
tatgctgctaacccactccctaaaagattcacttcttgtcacacctggtcaacccacccctaccctcaccctcataacgtgtgtgtacaccaccagcagcagcaggtcaagccacaagcaatgttgccaaacaccccactgagttatgcaaccagcttcccgagaagggcggggtgggtagaggtggaaccaggggagggccatgggtcccagagggagctggctgccttgcctgcttgcctgctggtctgaccgcagtggccccagagggtgggggcagggctggccctttatcagtgccctgcagggttgcacccaacaccccctggcttcctctctcaacagacggaaaggggaggcagccacagggggcaaggggagggctgggcgttatcctaggcagcagagccgggcggttaccccgatgcttgggggaggtggtagaggggtctgggaccaaggaatagcgaggcccctcttagcggggggccctggtatacacagaggctcagatggtggactagattttctgaagcatataactcattgttccttgtgttccagtttgggt

SEQ ID NO: 2770 - DNA, 510 bp, Homo sapiens
  MAP TO CHR15.1; EXPRESSED IN ADULT LIVER, SIGNAL = 0.79; EXPRESSED IN LUNG, SIGNAL = 0.76; EXPRESSED IN HELA, SIGNAL = 0.97; EXPRESSED IN BRAIN, SIGNAL = 1.4; EXPRESSED IN HEART, SIGNAL = 0.85; SWISSPROT HIT: Q9JJZ8, EVALUE 1.10e-01; EST_HUMAN HIT: BI490063.1, EVALUE 3.00e-40; NT HIT: AJ238850.1, EVALUE 6.00e-87
cctgcagcctacagtcttcctcttccaagacctagactgacgccttcccatcccacccccagcctggatttgcactgagtgggcgccctgcagagtccaggcagagcagtgcccaccagcagctccagggcagggaaagtggccgctggccctcctggccactcacctatcccagccaatttctcctcctctgctggcagatcttccacatgacctacgacctggccagcgccgtggtgcgcatcgtgaacctcatcggcatgatgctcctgctctgccactgggacggctgcctgcagttcctggtacccatgctacaggacttccctgacgactgctgggtgtccatcaacaacatggtggtgagtgcgcccagcccggtcctctctctgggccataggcgggctctccagaggtagggtggcgagatgtggacttggaacttctgagttccagcatgtaggaccctgagtgctgcctggggctgagggggcacatagctctacccag

SEQ ID NO: 2771 - DNA, 546 bp, Homo sapiens
  MAP TO CHR1.1; EXPRESSED IN FETAL LIVER, SIGNAL = 2.1; EXPRESSED IN HELA, SIGNAL = 4.1; EXPRESSED IN BRAIN, SIGNAL = 2.5; EXPRESSED IN ADULT LIVER, SIGNAL = 3.4; EXPRESSED IN BONE MARROW, SIGNAL = 1.8; EXPRESSED IN LUNG, SIGNAL = 1.8; SWISSPROT HIT: Q13751, EVALUE 1.00e-34; EST_HUMAN HIT: BF737390.1, EVALUE 0.00e+00; NT HIT: U17748.1, EVALUE 0.00e+00
ggagaaacttctgtggcctgtggtatgccaggaggtttggacccggatgctccgagcccacttgctcccactgggccccctttctcccgagttcactggaggagcctgtctctctgcttgtgtctccacggggcacagccccagtgcctcccctctgcacactgcccctgtctccacaggggcccatgcccgccggcatgctgattgagcgctcctcagacttcggtaagacctggcgagtgtaccagtacctggctgccgactgcacctccaccttccctcgggtccgccagggtcggcctcagagctggcaggatgttcggtgccagtccctgcctcagaggcctaatgcacgcctaaatggggggaaggtaggtagagggaatcctgaaaagtaggcctggggagaaatccctgatgtcccactgttcacacagccacacggactcctgagaagggacggaaacaccctcgccagctccccttgctgactttcctgaattcccaccagtaatgacccctgtggccaccctcaaaacatttgct

SEQ ID NO: 2772 - DNA, 547 bp, Homo sapiens
  MAP TO CHR4.1; EXPRESSED IN LUNG, SIGNAL = 2.8; EXPRESSED IN BRAIN, SIGNAL = 0.41; EXPRESSED IN HEART, SIGNAL = 1.4; EXPRESSED IN ADULT LIVER, SIGNAL =  81; EXPRESSED IN BONE MARROW, SIGNAL = 0.37; SWISSPROT HIT: P00326, EVALUE 6.00e-50; EST_HUMAN HIT: BI758997.1, EVALUE 2.00e-97; NT HIT: L38286.1, EVALUE 0.00e+00
gcctgtgctctcagttctttctgggtcatttttctactcttaatcgacacttcaaatctacaaaaataatttctgattcttgcaagaaattgattcccttttggttcctgacagtctgcgtgtaaccggttttatcatccattgtcatttctaccttggcaactttgactgcagacccataaccagtcgaaaatccacagccaatgaggcagactttctccaggggcgaggctgcatcaattttggccactgcattctcatccaccactgtgtactgggagaaggtgctgacgccgacgaagtggtggatgggcttcccgctgcaggtgaacctcctggtgccatcctgcagggtcccccgaggattgcctagactgggcagtgcaatacaaagacacacaaaggcatgagacaggaccataactaatgtgcaaactcaaagtctgtgcaaagaaagcatcagaaacttactcatttttcaagcagtagttgctttctgggtttttacaaattctgcattttccacactgaggagtaaagagcggga

SEQ ID NO: 2773 - DNA, 576 bp, Homo sapiens
  MAP TO CHR5.1; EXPRESSED IN FETAL LIVER, SIGNAL = 1.6; EXPRESSED IN LUNG, SIGNAL = 2.1; EXPRESSED IN HELA, SIGNAL = 2.2; EXPRESSED IN BRAIN, SIGNAL = 2.1; EXPRESSED IN HEART, SIGNAL = 1.4; EXPRESSED IN ADULT LIVER, SIGNAL = 3.1; NT HIT: gi14861871, EVALUE 0.00e+00; SWISSPROT HIT: Q9Y5E8, EVALUE 2.50e+00
tcaatcccttatgaggacgggcggcttctccagtgccgcccccaggggtcgcccggggcggcgccgagcccctcacctggctccgctcccgcagcgtattagagcgggaccggatggcgtcaggctccagcgccagagctgtgggctgctgaacgctgaggggtcttagaaaagtgaagtcactgccgtccgaggccggtgaaaagcacgtcctgtagcagtggctctgcgagtctgtgggccgcagcgtcacctccatgtacttgagcgtgccgtccgagctcacctgcaggttggggctggactgcttatagaagtccggggagggtgagtcctggcgcctgcagcactgccctccacccccgtccccgtctgcgtttccctgaaggcacttcgctgacagaaaggtgaaggtgactagggataagagactgacggtcgctagagccacaatgaggtaaagggtaaggtctgaacgctcaggagggtgtatgaggaagtcactggatttgggcatttcctcagggtcctcatcctccagaaccagcagcactgtggctgtggaggagagtgaag

SEQ ID NO: 2774 - DNA, 585 bp, Homo sapiens
  MAP TO CHR7.1; EXPRESSED IN HELA, SIGNAL = 0.52; EXPRESSED IN BRAIN, SIGNAL = 0.65; EXPRESSED IN HEART, SIGNAL = 0.55; EXPRESSED IN BONE MARROW, SIGNAL = 0.67; NT HIT: AJ010770.1, EVALUE 0.00e+00; EST_HUMAN HIT: AW138877.1, EVALUE 1.00e-86; SWISSPROT HIT: Q99996, EVALUE 1.00e-13
ttggcaaatacaataaacgcctgtgcttcattaactttatatcttcttttatatgataaagtacacagccattgatttaaagtggtttgtatccaaaagaagcatattcttttgttcagtaaagctagaatacatcactttacagaaagtcgtgcacagccaatatacatgtctcctctgatttctcctacctgctaatcttagcatacactggcaatatctaaatgactacaattcagtagtatatctttattttaaaatcctccttttttccagctttaatagggaatgaaactagtatttccacactttattttcttttatgtattgtttccctctttgtttagcttgaacatgcgaaagtgacacagacagagttgatgcgtgagtcatttagacagaaacaagaagcaacagagtcccttaagtgccaagaggaacttcgagagcgccttcatgaggagtccagggccagagaacagctagctgtggagctcagtaaggctgagggtgagcaatttgccattgacaactaagggtagagaaatttcagtcttaaaatagagatttttgatgcacagccag

SEQ ID NO: 2775 - DNA, 543 bp, Homo sapiens
  MAP TO CHR4.1; EXPRESSED IN BONE MARROW, SIGNAL = 0.48; EXPRESSED IN HELA, SIGNAL = 0.38; EXPRESSED IN BRAIN, SIGNAL = 0.58; EXPRESSED IN HEART, SIGNAL = 0.62; NT HIT: AF156490.1, EVALUE 1.00e-57; EST_HUMAN HIT: BI914503.1, EVALUE 1.00e-08; SWISSPROT HIT: P23574, EVALUE 2.00e-46
cgtaaattagcctgaaagctgctactttatttacttctgaaggccttaaaatagttacaatactattcacattttaaccattggtctctctgcattttaaatttaaacttcaagttactgaagcacaaaagattctactgaatttagtcagacttcttttgatttttgcttatgaagtagattttataagtaaagatagccaacccaataaaccaagttgaacagggcaaaagcggttgggaaaaatattctagaataagagtcaattttggcaatgcgtatgtgtatccttccttccctccaagatcctgttctgcagtcttcaaagcaacagaagaagctggcacaatctttgccctccaaacactgatacccataatcatcttcttgcggcacagaaatattattcattggaatcagagtggatccaggatggagaccaggagtcatctgagcacaataataaatgaatttttgacatcaaaaaagtagcataaggaaagatcaatttgctcctttaacgcaaactctaggagactgaca

SEQ ID NO: 2776 - DNA, 553 bp, Homo sapiens
  MAP TO CHRX.1; EXPRESSED IN PLACENTA, SIGNAL = 3.4; EXPRESSED IN FETAL LIVER, SIGNAL = 3.5; EXPRESSED IN LUNG, SIGNAL = 5.2; EXPRESSED IN HELA, SIGNAL = 4.7; EXPRESSED IN BRAIN, SIGNAL = 6.1; EXPRESSED IN BONE MARROW, SIGNAL = 3.5; EXPRESSED IN ADULT LIVER, SIGNAL = 2.7; EXPRESSED IN HEART, SIGNAL = 3.8; NT HIT: L44140.1, EVALUE 0.00e+00; SWISSPROT HIT: P21856, EVALUE 6.00e-41; EST_HUMAN HIT: BF874319.1, EVALUE 1.00e-115
ttgccagcactactgtggagaccacggaccctgaaaaggaggtggagccggctctggagctgttggagcccattgaccagaagtgagggactgggctgagcccaagggggagagggagggagcccagcagctgggcttagggaccaggaagggcatggcccattgtgaggcctgtcccctcccctctgtctgcccctcaggtttgtggctatcagtgacttgtatgagcccattgatgatggttgtgagagccaggtaagcagctcgtcccagccctgggctcctggctgcccgcccaggatacctgtctgactcaccctgggcgctgggctctggctgtttccaggtgttctgttcctgctcctacgatgccaccacacactttgagacaacctgcaacgacatcaaagacatctacaaacgcatggctggcacggcctttgactttgagaacatgaagcgcaaacagaacgacgtctttggagaagctgagcagtgattgtggccgcccccagcccctgctgccccagcctgtgtctgttctcctcgaggg

SEQ ID NO: 2777 - DNA, 556 bp, Homo sapiens
  MAP TO CHR6.1; EXPRESSED IN BONE MARROW, SIGNAL = 0.45; EXPRESSED IN FETAL LIVER, SIGNAL = 0.42; EXPRESSED IN LUNG, SIGNAL = 0.6; EXPRESSED IN HELA, SIGNAL = 0.49; EXPRESSED IN BRAIN, SIGNAL = 0.47; EXPRESSED IN HEART, SIGNAL = 0.56; SWISSPROT HIT: O83297, EVALUE 2.30e+00; EST_HUMAN HIT: BF943924.1, EVALUE 3.00e-34; NT HIT: X01401.1, EVALUE 5.30e-01
agccataccaagaaggcaaggggttgatgggctatcatttctgcacagcttctttgctgtgttttctcttaagcccatgtgcatttttattattggttatagtttttgtgtatgtgtgtagtggcatttgggggtgggtgtacataaggcttacatcacttgactgccagctttactgagctcacatgttgtccttatttttgtgtttgccagggagaaatgcctgctgcctctccagttggctttggaatccaagaatgtgaagctggcccaacatgctttggcagggatgcaggtatggctttgactgaatgcaatgggatgatagaaattgacaggccactttggcattgaaagggcaaatagttaacattttaaatactggctgtttaaagactcaggcagaaatttgattgaactaggaaataactatagagaataacaggattttcttatattcaccagaatttctctgtacacagcattatttcgttgaacctttgtgatcagacactgattcatgtggacctagctaagcccacacagatagggattt

SEQ ID NO: 2778 - DNA, 512 bp, Homo sapiens
  MAP TO CHR15.1; EXPRESSED IN FETAL LIVER, SIGNAL = 1.1; EXPRESSED IN LUNG, SIGNAL = 2.2; EXPRESSED IN HELA, SIGNAL = 0.6; EXPRESSED IN BRAIN, SIGNAL = 0.77; EXPRESSED IN BONE MARROW, SIGNAL = 0.8; EXPRESSED IN HEART, SIGNAL = 1.9; SWISSPROT HIT: Q9UPM8, EVALUE 2.00e-52; EST_HUMAN HIT: AL596783.1, EVALUE 4.00e-55; NT HIT: AF155156.2, EVALUE 0.00e+00
atgacaatgatggggaaagccattttgaattattggtataattttgaacctaaaatatacagttgtatctttaataattttttcaccatgagaggatgtttaatctactttaaattcactctagcagtaggtactttgtttagattttagtatagtctactgtataacttgatatttctatatgaatatctctttgttttatttacaggtattaggggaatattcctacctcttagataaggaaacgccagaggaagttatagctaagctctacaagttacttatgaatgactctgtgtcttcagaaacaaaagcctggttaattgctgctgtgaccaaattgacatctcaggcgcactcttctaatacagttgagagattaatccatgaatttaccatatctttggatacttgtatgagacaacatgcatttgaattaaaacatttgcatgagaatgtggaacttatgaagagcttgcttccagttgacaggagttgtgaagacttggtgg

SEQ ID NO: 2779 - DNA, 562 bp, Homo sapiens
  MAP TO CHR22.1; EXPRESSED IN HELA, SIGNAL = 1.3; EXPRESSED IN BRAIN, SIGNAL = 0.91; EXPRESSED IN LUNG, SIGNAL = 0.82; EXPRESSED IN HEART, SIGNAL = 0.8; EXPRESSED IN ADULT LIVER, SIGNAL = 1.1; EST_HUMAN HIT: AI692666.1, EVALUE 0.00e+00; SWISSPROT HIT: P12111, EVALUE 1.20e-01; NT HIT: L77570.1, EVALUE 0.00e+00
cagctctcagcccacctaaccctgcctctctcacccattcctccaccccagcctcacccccaaaggcctgagcccagccatgtcgccagccctacagcgccttgtgagcaggacggccagcaagtacacagaccgggccctgcgggccagctacacaccatccccagcacgctccacccacctcaagaccccggccagtgggctgcagacccccacaagcacaccggcgcctggctctgccacacgcacccctctcacacaggacccggcctccatcacggacaacctgctgcagctccctgcccggcgcaaagcttcggacttcttttagagccaggcctgggctgggctcatagacgcttcacagagcctgcagggcagctgtacacccagcagaggactccagccttctcggggcccaggcctgggccagaagctgttgaccataccaggagtcactggagaaaggggctgtgctggggccagactggcacaaggcactcgtgcccacaccacaccccagggccttgccaagctgtttgctgtttaattggccccttga

SEQ ID NO: 2780 - DNA, 588 bp, Homo sapiens
  MAP TO CHR3.1; EXPRESSED IN LUNG, SIGNAL = 1.2; EXPRESSED IN HELA, SIGNAL =   1; EXPRESSED IN BRAIN, SIGNAL = 1.1; EXPRESSED IN HEART, SIGNAL = 0.75; EST_HUMAN HIT: BE531149.1, EVALUE 1.00e-109; SWISSPROT HIT: P42900, EVALUE 1.90e+00; NT HIT: gi14758967, EVALUE 1.00e-109
gccctgtatgctgtaggaggggcgcgcgccagaagccccttcctcggcactgtcaacccgtcacccagctcggcctggggctactcctggcgctgggcctgccgctgctgtcgtccctgggaacgaccctgggcgcaaatatcaaccccttctgcaaatgagagtagcattgtttggcctacacccaccagctccagctccagtggagccctgtttcggggggccgtcactgctatcatcttggtcctctgattcctggctgtcttgttcctggcagtggggctggcactattggtgcggaagcttccggagatgaggcagacggagggcacctactggcccagcagcaaggagcagttctcctatgtagctgaggcctgggcctctcagtactccaatgagaccgtgtggggctgcctgcacatctaggccccctctcctccatctgtcccccttcattgctgtgtgaccttggggaaaggcagtgccctatctgggcaatcagatccacccagtgcttaagaatagcagggaagaaggtgcttcaaagactgcccttgaggtcaagggagtgtggggctactcact

SEQ ID NO: 2781 - DNA, 598 bp, Homo sapiens
  MAP TO CHR7.1; EXPRESSED IN FETAL LIVER, SIGNAL = 0.91; EXPRESSED IN BRAIN, SIGNAL = 1.2; EXPRESSED IN HELA, SIGNAL =   1; EXPRESSED IN BONE MARROW, SIGNAL = 1.1; EST_HUMAN HIT: BI000338.1, EVALUE 5.40e-02; SWISSPROT HIT: Q9JLN6, EVALUE 2.60e+00; NT HIT: gi4826977, EVALUE 0.00e+00
ataatagaatccccaggccgaatcacaattattttcaaattaagtgacaggcacccaaagttctgacatgtagccaaatgacaattctcacatggtggagagtggaaggtagacagtgatccgcttccaattctggaatctttccgaggtgtaaattgaactttccgtgtaatgcagacagccaatggttggaggaacacactcttcggtgacaagatgccagtccttgccattgttcagagaatactggagctgtacactgtgggagttgctgaagggcttgctacagcccatgctcatttcaaactgcaaaaaggtagatgctgacacatgaaaatcccaggtctcagcataacgaggttttcctgaaaaaaaaaaatgtgtaatggtagcatatatgtgtgccattttcttatttggtgtttatgcttataataaacatcttcaatagcaaacaaaaatcatggcctatctttagtgccccctatgtgctttgacttttcttcttatattttctgcttctatttggttaccatagatttagaaatatagaaggctgctaatttgaaaagcattaccaccttggaaagggctaaca

SEQ ID NO: 2782 - DNA, 588 bp, Homo sapiens
  MAP TO CHR1.1; EXPRESSED IN BONE MARROW, SIGNAL = 2.3; EXPRESSED IN FETAL LIVER, SIGNAL = 2.3; EXPRESSED IN LUNG, SIGNAL = 1.8; EXPRESSED IN BRAIN, SIGNAL = 5.2; EXPRESSED IN HEART, SIGNAL = 1.8; NT HIT: J05096.1, EVALUE 0.00e+00; EST_HUMAN HIT: BF926154.1, EVALUE 1.00e-121; SWISSPROT HIT: P50993, EVALUE 1.00e-41
agatcgtgagaaaaggcagccgtgacaagctccaaaagagaaactgagtgcctaagaatagccccacctgagatttctcaactcataccctaagccatgtattaagtgatctctgagtatcgcatccaataagtgactctagggggaaaaagtagtgagaagctacaagcaactgtgcctctatcactctgaggaaagagtagtgagaccctcccctggtggcacctcagcctgacccactcacagtgacagtggccagaagcccctcaggcacgttggccactatgatgccgatgaggaagatgactgcctccagccagctgtagcccaggatgagggagagcacgaagaaggagacccccaggaatacagcgacccctgtgatcagctggatgaagtgttcaatctccattgctatgggtgtccgcccaacctccaggcctgaggcgagagtagctatgcggcccatcaccgtccggtctcctgtggcaatcacaatgcccctggcagtgcctgcaacatggtggggcatcaggttgggtgccttgtggctcccagggactgcagtcccatcctatttcctgagca

SEQ ID NO: 2783 - DNA, 525 bp, Homo sapiens
  MAP TO AC073133.5; EXPRESSED IN BRAIN, SIGNAL = 0.62; NT HIT: D86947.1, EVALUE 7.80e+00; EST_HUMAN HIT: AL535500.1, EVALUE 2.90e+00; SWISSPROT HIT: P29191, EVALUE 1.70e+00
ttatggtcccaaggcaaatctgggccgtggagaggagagagaaggtgacccccaccacccccccgccaccagtctctgcactgatagaagaataacaaatataaaaaaatctgccaaacaacaaagcttcaatttattatacatgctcatcaatttaacccaaaaaaaaaaaaaaacccttaaaagcctgagggtgatccagcccctttaatacccaggccctgagcatgccgcagatcaaggcccaggccccagcctgctttgtctgcgaaagatgaaagccaggcgcaaacaggtgaaggcttttttgaatcatcacctgcaattaagcaaaggaaaaccaagagaagcagaggtgagctgaactcgcttgaaaaaggcgcccgcggagcaggtggatgcttgctgccgatggctgcggtgtctgctgacactcccagatgacgagacctccccgggctccctgcatgcacggcagattgccggtgggaaggggggtgcacaaggaaacacacacaggtgcac

SEQ ID NO: 2784 - DNA, 578 bp, Homo sapiens
  MAP TO CHR1.1; EXPRESSED IN BRAIN, SIGNAL = 1.3; EXPRESSED IN HEART, SIGNAL = 1.3; EXPRESSED IN ADULT LIVER, SIGNAL = 0.9; EXPRESSED IN BONE MARROW, SIGNAL = 1.1; EXPRESSED IN FETAL LIVER, SIGNAL =   1; EXPRESSED IN LUNG, SIGNAL = 1.3; SWISSPROT HIT: P08031, EVALUE 5.70e-02; EST_HUMAN HIT: AI905894.1, EVALUE 0.00e+00; NT HIT: gi14742776, EVALUE 6.00e-50
aactcccattgatcgtccagtttagtggccacagacttcaaacaatattaaacagcctcctccagctccatggggggtgggtaagctgacatgtccccacccactgaggacattgcccactagagatgcagccagtgaaggaggaccttggcctgagtccaaggccatctgtgactcacccaaagcccagaccccagcctcctccaaaataccactttgagtggtgccttccagtggtcccattcagtaattttctcatgccaccccccttccaccatccccccacctatgtagagagccctgttggggcactgaatgagccatggaaactctctatgtgcctggggactggggcacgcgggcaagggacgatggatggagctgccgggggaatatgcgaagggactgaccaatgccgctgtggggccggcctatgtgttgcaggctgaggcccttgttcatgtctagaagtccattcttgggccagcagcccatggcgaagctgtaagcctggaagacaggaggcaagtggttaacggaggccctgaccctctgaaccaaccccactcacaaggtct

SEQ ID NO: 2785 - DNA, 577 bp, Homo sapiens
  MAP TO CHR5.1; EXPRESSED IN HEART, SIGNAL = 2.6; EXPRESSED IN BONE MARROW, SIGNAL = 3.5; EXPRESSED IN ADULT LIVER, SIGNAL = 2.9; EXPRESSED IN PLACENTA, SIGNAL =   3; EXPRESSED IN FETAL LIVER, SIGNAL = 2.8; EXPRESSED IN HELA, SIGNAL = 3.9; EXPRESSED IN BRAIN, SIGNAL = 3.6; EXPRESSED IN LUNG, SIGNAL = 2.3; SWISSPROT HIT: P10834, EVALUE 2.50e+00; NT HIT: AF084363.1, EVALUE 9.00e-03
taacagagatggcggtcctcccatctccaccccttccccccctcatctttccccaccctttcctggcttccacctcaggaacaaagaagggaaaaaaacagcagtatgacgaaaaccagcagctgtctctgcaggctcaggctgggggctgggagtttattccatctgttctctttgttctgctcttaccctgttacttcccttcccaaccctgaataaaacagaatatttctagaatcctttgttatggagaatggtttagaattctgcagtttactcagtatttatttaggttagcgtgggtgagatacagcagagattaaaactgatctggagcacctaaaaaaaagatgaaggtactttgccttctcattcagtcttaaattatgaatacctatttaatgtcagatttgtgacaggggattatcaactattatttccaattatcaaaacattatttccataatgcctaattggtattatctttgttttataattgagagatataaaagagaattaatatgtcctttgcttgttaagattttatagcaagtaaacaccaagccagaatttgagc

SEQ ID NO: 2786 - DNA, 508 bp, Homo sapiens
  MAP TO CHR17.1; EXPRESSED IN HEART, SIGNAL = 0.63; EXPRESSED IN FETAL LIVER, SIGNAL = 0.45; EXPRESSED IN BRAIN, SIGNAL = 0.51; EST_HUMAN HIT: BG719412.1, EVALUE 1.00e-127; SWISSPROT HIT: Q09530, EVALUE 5.00e-21; NT HIT: gi14774624, EVALUE 1.00e-127
ccttgtaatagttacattaattgcggttaaagtaaacttgaccattgtctctctcagcagctagactgcatgcttcccaagggagtgggaagcgttggtgttggtcttgttcactgtggtagtgcaagtgcccaacttagtgccggacacagtgggcgctcaagaaatgtttggtgactgaataaattgtttccctgcacaggttggctatacagtgcgctttgatgatgtcacctcagaagacaccaggatcaagtttctgacagatggcatgcttctgcgtgaagcaatttcagactctttgcttcggaaatacagctgtgtcattttggatgaagctcacgaacggactatccacacagatgtgctctttggagtggtgaaagctgcacagaagaggagaaaggaactcgggaaacttcctctgaaagtatgagggaaacttcccctgaaagtatgagggaaacttcccctgaaagtatgcgtaacacacagaaggaaacaggcc

SEQ ID NO: 2787 - DNA, 429 bp, Homo sapiens
  MAP TO CHR17.1; EXPRESSED IN BRAIN, SIGNAL = 0.48; EXPRESSED IN ADULT LIVER, SIGNAL = 6.5; EXPRESSED IN LUNG, SIGNAL = 0.62; EST_HUMAN HIT: BG565373.1, EVALUE 4.00e-48; SWISSPROT HIT: P02749, EVALUE 1.00e-13; NT HIT: Y11494.1, EVALUE 0.00e+00
gagaaacagtataatgaacgcttttgtacatatatcacttgtcttattttgaattgctttcttagaatagttaccagtaaagttattgaaccaaaggatgaaaatgaatttatatgtttcatttaatgaaaaattctataaatagaaatttacctgtttatgtttttttttagcccaaagaaaagtaacattttttatctttgtatcacagccagagtatgtccttttgctggaatcttagaaaatggagccgtacgctatacgacttttgaatatcccaacacgatcagtttttcttgtaacactgggtaagaactttcatggaactaagcagttaacagactgagcacatttttgtatccttaagctaaacatcaagactggtctatattttgttttcagcctttaggttggactttcaaatgcaaa

SEQ ID NO: 2788 - DNA, 597 bp, Homo sapiens
  MAP TO CHR2.1; EXPRESSED IN PLACENTA, SIGNAL = 3.6; EXPRESSED IN LUNG, SIGNAL = 1.6; EXPRESSED IN FETAL LIVER, SIGNAL = 2.4; EXPRESSED IN HELA, SIGNAL = 3.5; EXPRESSED IN BRAIN, SIGNAL = 3.3; EXPRESSED IN HEART, SIGNAL = 2.4; EXPRESSED IN ADULT LIVER, SIGNAL = 1.8; EXPRESSED IN BONE MARROW, SIGNAL = 3.3; SWISSPROT HIT: Q15746, EVALUE 3.00e-10; NT HIT: AJ277892.1, EVALUE 0.00e+00
gtaaggacacagaggctggggcaatttgtgggcagcatgtgatgtgttctttgcttgtttttaaacctttatctttttaaaaaatccaacaaatttaaactattgtctttagagaggaataaaccaggcacataattctgtcctactacagcaacagtgttacctgttagaggccagtttttctctttatttgtttctcttgtggaatttaatacttttttgcctttatgttcctcatgaaaataccttttcaattccagaacctaagaagccacctgtatttgatcagcaccttactccagtaacagtgagtgaaggagaatacgtgcagctcagctgccatgtccagggatctgagccaattaggatccagtggttgaaggctggcagggaaataaagccttcagacagatgcagcttcagctttgctagtgggacagctgtactggaactcagagatgtggctaaagcagattcgggagattatgtgtgtaaagcttcaaatgtggctggaagtgacactaccaaatcaaaagtgaccattaaaggtacagacacctcaaaagtattatgcagctcaagccagcaaccactcat

SEQ ID NO: 2789 - DNA, 510 bp, Homo sapiens
  MAP TO CHR7.1; EXPRESSED IN FETAL LIVER, SIGNAL = 0.42; EXPRESSED IN BRAIN, SIGNAL = 0.56; EXPRESSED IN BONE MARROW, SIGNAL = 0.55; NT HIT: AF075717.1, EVALUE 4.80e-01; EST_HUMAN HIT: BF681094.1, EVALUE 1.80e-01; SWISSPROT HIT: P30969, EVALUE 6.20e+00
gggacaatttcactgccaactaaaatgacaaggcattttttccccaaaatttattatgatgatagataacaaatggcatctataaagcagtcagttaacaacgagaaacaaaagaagaatacactgagaatactaggaacagagttataaaaatgccagttagacatgcaagaagcagcagggctttgaaaacgcacaaagctggatccaaatgttagatgtggttttagctactcaccgcaaagctgggttactaacatttctaaaatttctgaaaatgattttcaggcctctagcctgctttggagcagatgaaaattttccattgttgatccacagacattagtatgcaaggtaaataacaggcatcaggcaagatatctatttctaataagtttacagaaagcacattaaaagcccgttagaactctgatttacctcaatacacacaggcagaaaaccagagtacgggcacacaagcaggactccccttccagttcccctgtctca

SEQ ID NO: 2790 - DNA, 577 bp, Homo sapiens
  MAP TO CHR19.1; EXPRESSED IN PLACENTA, SIGNAL = 1.6; EXPRESSED IN LUNG, SIGNAL = 2.8; EXPRESSED IN HELA, SIGNAL = 1.3; EXPRESSED IN BRAIN, SIGNAL = 1.5; EXPRESSED IN HEART, SIGNAL = 2.4; EXPRESSED IN BONE MARROW, SIGNAL =   2; NT HIT: AB002457.1, EVALUE 0.00e+00; EST_HUMAN HIT: T85456.1, EVALUE 2.00e-90; SWISSPROT HIT: Q08477, EVALUE 1.00e-17
atggcacacagagcacagaggacagagctggaacttgaacctaggtctcctgactcccaatcttgggtcttcatctcttaatagtaacagcttttgcttgcaccataacctggtgctcccgggtaaagggtccctggggagaagatgaagaggcttattctggggcgtgcatattgattgttggggttggagagctgctcaagggagcaagggacctgccccagctctgtccccttctctggctaggccaagtggcagctcctggcctcagagggtagtgcccgtctggacatgtttgagcacatcagcctcatgaccttggacagtctgcagaaatgtgtcttcagctttgacagccattgccaggagtaagttcttgcccagggtctgggatcctgggccgtggacacaaagttggtaggtggggggctggggaggactgagcagggaaatcagacaaaccttcttggaggagttgttatacctgatcgttgaaggactggtatgaattttatcttgaggtttccagggactcattaaaagggtttgaactggtgggtgtggtcaaagtgggtct

SEQ ID NO: 2791 - DNA, 526 bp, Homo sapiens
  MAP TO CHR7.1; EXPRESSED IN ADULT LIVER, SIGNAL = 0.5; EXPRESSED IN HELA, SIGNAL = 0.68; EXPRESSED IN FETAL LIVER, SIGNAL = 0.64; EXPRESSED IN BRAIN, SIGNAL = 0.7; EXPRESSED IN BONE MARROW, SIGNAL = 0.69; NT HIT: gi5174672, EVALUE 1.00e-84; EST_HUMAN HIT: BI552379.1, EVALUE 2.90e+00; SWISSPROT HIT: Q14563, EVALUE 3.00e-25
aaatgcacacattttggttccaatatatttcttagtaccctgaagaataagcactgattgataactacagcagtcaatatagtcaggttaccatgtaccaacagtctatgcttatatagtgcttcacattaatacccaatgttttgctttgttaccttgcagaaatgttggaatccaacaatgtgatcactttcaatggcttggccaacagctccagttatcataccttccttttggatgaggaacggagtaggctgtatgttggagcaaaggatcacatattttcattcgacctggttaatatcaaggattttcaaaaggtatcagtattctaatatatgcactatagttattttgaagcatctcaagttatagataattctctagctatttaaaagcatgattactgacagaaaattgttttgaattaatagtttgtcttttctgatgcaaataaaaatgacagtaatgaatcaatggatgcaataaatcaaaaaatatcaaggatgaaaccacagtatttgca

SEQ ID NO: 2792 - DNA, 557 bp, Homo sapiens
  MAP TO CHR5.1; EXPRESSED IN FETAL LIVER, SIGNAL = 1.8; EXPRESSED IN HELA, SIGNAL = 2.3; EXPRESSED IN BRAIN, SIGNAL =   2; EXPRESSED IN BONE MARROW, SIGNAL = 1.7; EXPRESSED IN HEART, SIGNAL = 1.4; SWISSPROT HIT: Q9UKU0, EVALUE 5.00e-20; NT HIT: AF099740.1, EVALUE 2.00e-71; EST_HUMAN HIT: AL041091.1, EVALUE 3.00e-71
caaggtcacccgttggatacttaggtgtcactctataatcacttgttcattttcttacctgaatcttattaaagaagagttcatcccagatactatcattcctgatgattccactccggacctcggcttgcttacgctttgctgcaaactccaggagccagcgctttaatggtgtgtttgcctggctgaagatctgaggaacataagttggaagcagctgtcagagcctgaatgtctcatttctagatatatcccccaggaataaggcccagactggccagcagagaagccatgttccattttgcccctgcaggaggtcactgaatgtgtgacattgagctgaaggttaacactgccagggtccaggcatgctgtgaagatggaagttcctgaaaaaaaatctctcccgcaggggtatttggagaataggaagaaaacaggagaaggaagaatgagaaagagtcaggaactacaagagaggaggcaagttccaggacttggcagtggaggcactgaaagcctgcctggggctccagaccctgtccaaacaagcaaat

SEQ ID NO: 2793 - DNA, 516 bp, Homo sapiens
  MAP TO CHR7.1; EXPRESSED IN HELA, SIGNAL = 1.2; EXPRESSED IN BRAIN, SIGNAL = 1.1; EXPRESSED IN HEART, SIGNAL = 5.3; EXPRESSED IN ADULT LIVER, SIGNAL =   1; EXPRESSED IN PLACENTA, SIGNAL = 1.2; EXPRESSED IN LUNG, SIGNAL =   1; SWISSPROT HIT: Q01786, EVALUE 7.20e-01; NT HIT: AJ132990.1, EVALUE 0.00e+00; EST_HUMAN HIT: AL602841.1, EVALUE 0.00e+00
cccccatcagttaaacctcctcctctgctcagacctgccctggccttcggggccagtctgccagcatcaagcctggtccgcagcaccctcccatcccgccgtgaggacccggccggcccagtgtgcggtgctcaccctcctgctgccgggtgatgctgccgaaggatcccaggcgctcccggcccaggaagtccccaaacacagcagggaaggggtccccgccgacctgggtggactcctccacccgcacctcgcgctttgtctccccgccccgcgtcttgctgatctccgtgcgctccgtgcgggtgtaggtgtggctgctgcgtgtgaaggtgcgtgtcaggcgctcctgggcagacaccatctggaaccagtttcctgtgtggtcaagggagccagggtgagggagggaagcgaggggtgaggaagcagggtggaggcccgacaggtgggctctggcccgggccagccctctcccaccacccgccccacccagggtcctccaggcttctacct

SEQ ID NO: 2794 - DNA, 569 bp, Homo sapiens
  MAP TO CHR22.1; EXPRESSED IN HEART, SIGNAL = 0.94; EXPRESSED IN BONE MARROW, SIGNAL = 1.1; EXPRESSED IN ADULT LIVER, SIGNAL = 1.4; EXPRESSED IN PLACENTA, SIGNAL = 1.6; EXPRESSED IN FETAL LIVER, SIGNAL = 1.4; EXPRESSED IN HELA, SIGNAL = 1.6; EXPRESSED IN LUNG, SIGNAL = 3.1; EXPRESSED IN BRAIN, SIGNAL = 1.2; SWISSPROT HIT: P34501, EVALUE 1.00e-17; NT HIT: gi12742736, EVALUE 0.00e+00; EST_HUMAN HIT: BG534300.1, EVALUE 0.00e+00
tcgaaggtcacaaagtgtgggtctccgaaggcggaggctagggtgagagtggagggtcacgtgggggtgcaccccagcccagcccgatctttcccagggtctggggcacgggatggcacccacccagtcttgggggccggtagttgcggcagtcattggagggccgccgttgcatgtagcgggggcagtcgggtgcccagaggcagcagtaatagaagctgaggacatcgtagagccagtgggacatgctgggcactcggggtggcgtgcggaacgggggtgcgccccagtcatggccgcggtcgggagtgctgccgccgctggagtcagctgtcaggagctgcgtcccgtccgctgtgtagcagcactgctgacctgagccgtaccggaggctgcaggagccagtgagtcagggccaggccactgttgggagcccacccctgaccccaatccccataccggccccagcctgggggctcacctggcctgcacagaacgcacacagtgcacggccccggggtggtaggtgcacacgctgccctgctccatgtcacagccgtagtccgtct

SEQ ID NO: 2795 - DNA, 592 bp, Homo sapiens
  MAP TO CHR22.1; EXPRESSED IN ADULT LIVER, SIGNAL = 1.3; EXPRESSED IN FETAL LIVER, SIGNAL = 0.63; EXPRESSED IN BRAIN, SIGNAL = 0.79; EXPRESSED IN LUNG, SIGNAL = 1.4; EXPRESSED IN HEART, SIGNAL = 1.4; EST_HUMAN HIT: BG829431.1, EVALUE 3.00e-65; SWISSPROT HIT: Q02926, EVALUE 8.70e-01; NT HIT: gi13647206, EVALUE 2.00e-65
atgaacgttggatgatgcaggcagaatgtaaggtggaaggagaagagcaagccacggaggctgggaccaggctgggggcagaggctgcaacttccccacgagtggcttgtggcttgcctttatgctattttctgggcaggctgggtgcttctctagatagagggaggtgctctggttcccataaaactcctgggatcttgggccaccgtccactgttgtgccaacagagaatggcctctgcctcagggaatggaggttgcagcacacaccaaagcactcccagtcttggcctctgtttgttctgtgggtcccaggtgctggcaatgccagccaatgtcttgctgagcaggggggctggcatctgtgccacctggtgcttccttctcacagaggccattggggagggaatgtcttgggaggatgctcttaccaggcacaaggaaattcttggactggtggtttgggtccccatcagggatgggcttgggcaggtggtgaacggtcacctcatattcctggtcagggtcaaccacaaagtggctgaaggtaaaacgccactgaagagaagggaggaagggaaggtggatggatt

SEQ ID NO: 2796 - DNA, 569 bp, Homo sapiens
  MAP TO CHR5.1; EXPRESSED IN HEART, SIGNAL = 1.7; EXPRESSED IN ADULT LIVER, SIGNAL = 2.4; EXPRESSED IN FETAL LIVER, SIGNAL = 2.7; EXPRESSED IN HELA, SIGNAL =   2; EXPRESSED IN BRAIN, SIGNAL = 2.7; EXPRESSED IN BONE MARROW, SIGNAL = 2.8; EXPRESSED IN PLACENTA, SIGNAL = 2.3; EXPRESSED IN LUNG, SIGNAL = 1.7; EST_HUMAN HIT: AA935376.1, EVALUE 1.30e-02; SWISSPROT HIT: Q28983, EVALUE 7.10e+00; NT HIT: AF132204.1, EVALUE 5.40e-01
ttaatgagccaggatggagggtcataaaaagtgataggtttttgcgatggtaaattataaatcggtattgatttttcccggcactaatgcagccagcttattgtaagacaccacaggcaaagtgcactttatcagattagactggggccggtatcaaatatacatgagaataaggatgcatttgtgagttagactagacttttcttccctaacaatgcatgaaatttttaaggaaaaaaaaaaagcagacaaggatactgggaaattcaactttttttttctttttctaaagcaaaaatttccagaattgttgctcttgagataatttgattcaaagtgaagagaaggcagtaataacgctaatcaaattataaatagttttatttaaggctgttctaagtttctcttattcatttgtactttaggttggtgcccaaaatgcaaaggtcattctctggccccttccctgcgttcactctctgcttgcagcatcattgctttcctctacccacaagtcactgggagtgttttgttttttgttttttgtttgcaaatgaccgaggttcttc

SEQ ID NO: 2797 - DNA, 557 bp, Homo sapiens
  MAP TO CHR10.1; EXPRESSED IN ADULT LIVER, SIGNAL = 0.52; EXPRESSED IN FETAL LIVER, SIGNAL = 0.76; EXPRESSED IN HELA, SIGNAL = 0.97; EXPRESSED IN LUNG, SIGNAL = 1.1; EXPRESSED IN BRAIN, SIGNAL = 0.74; EXPRESSED IN BONE MARROW, SIGNAL = 0.73; EST_HUMAN HIT: AW245557.1, EVALUE 8.00e-78; SWISSPROT HIT: P30133, EVALUE 8.00e-03; NT HIT: AF043444.1, EVALUE 5.30e-01
ctcacggagagctcagaaggggccaacccctccagactcctatatttaccactaaacccctggggggtgggggatggttgctgtcataaagccgatttctcagatggtgaaactaaggctcagagggggccgtcccagggggcatagggcaggagatgggagagtccaggagagaaggggttttgaggtgggcctggtcgccccctcccagcacccgggccccttcccccgtgggcccgcgaccacgctccgaccctcacctcgcagctgcttctcggcaccgtcttgcgtttccagcagccgctccaccacctgctcgtggcgccccagcagccgtcgctgctgcgcctccgcgcggttggcgcccagcaggctgagcagcccctggctcacctcctctatgtcgcggaaggcggccatgactacgccaggctccaacccgcgcaaatttgactgtccgcggggcccgccctcttccagaagaggttgctttccattggattttttgatacgtcagtcataagcaatggccaataggcatggggaacaggatctta

SEQ ID NO: 2798 - DNA, 560 bp, Homo sapiens
  MAP TO CHR14.1; EXPRESSED IN LUNG, SIGNAL = 1.8; EXPRESSED IN HEART, SIGNAL = 1.8; EXPRESSED IN PLACENTA, SIGNAL = 3.8; EXPRESSED IN FETAL LIVER, SIGNAL = 3.2; EXPRESSED IN BRAIN, SIGNAL = 3.8; EXPRESSED IN HELA, SIGNAL = 3.6; EXPRESSED IN BONE MARROW, SIGNAL =   4; EXPRESSED IN ADULT LIVER, SIGNAL = 2.2; NT HIT: gi7661903, EVALUE 5.30e-01; EST_HUMAN HIT: BG564849.1, EVALUE 0.00e+00; SWISSPROT HIT: P51955, EVALUE 1.00e-08
ctccagtattcttgccctgccataatcaccatcatgattagcagtctgtcatagtatcctcaatagaatctttttgagatctatccccagcccatatttttacctggaactgacatcatgcaaattaagtatgacaacaacgttttaatgctttacttcccctgtcctgcaataaattataatgctaaattgtacacataacttttaaagtctgttaaaaggaaaaaataagaggagtcagtctgtgcccctctaggaagttttccttctaggcttacagatctaggtgtggattcatttgctgccaggcaagaggaaaagcacgatacctctgttactgtgtttaggatgactcactggttgtgtggaaggaagtcgatttgacccggctgtctgagaaggaacgtcgtgatgccttgaatgagatagttattctggcactgctgcagcacgacaacattattgcctactacaatcacttcatggacaataccacgctgctgattgagctggaatattgtaatggtaagatagagttcagtgggacttttccagcaaga

SEQ ID NO: 2799 - DNA, 589 bp, Homo sapiens
  MAP TO CHR12.1; EXPRESSED IN BRAIN, SIGNAL = 1.2; EXPRESSED IN HELA, SIGNAL =   1; EXPRESSED IN LUNG, SIGNAL = 0.99; EXPRESSED IN ADULT LIVER, SIGNAL = 0.87; EXPRESSED IN BONE MARROW, SIGNAL = 1.8; EXPRESSED IN FETAL LIVER, SIGNAL = 0.89; NT HIT: gi5032222, EVALUE 1.00e-111; EST_HUMAN HIT: BG761162.1, EVALUE 1.00e-110; SWISSPROT HIT: P51689, EVALUE 3.80e-01
cccctttccctagcctactgctttcagcctagtctcttttcccatggcataaccttccagctgctttcattgtcactcacgatattaatcataatattaactagcatgttttgagtgcttactgtgtgccgggccctgatctaagcatgtataatctcagttaacgtagccctcatttaatgtaatgtagggtgaagtcaatcctgtgagggaggtagttttgctgtctccatattacacatgagaaaacagaagcaccaagaagttaagttgctcaggtcacttagctcttagagatcacagctgggattcgttaacaaagttactaaaacattcttttctttttgtccaggtctctgaatattgtgtggcgacttactgcgggtttttagcccccagtttaaagagttcaaaagtgcgcacgaatgtcactgtgaagctgagagtacaagacacctacttggattgtggaaccctgcagtatcgggaggaccccagattcacggggtatcgggtggaatccgaggtggacacagaactggaagtgaaaattcaagtatgtttcttttctttctgggtgggatgtcac

(The sequence listing continues in the following parts.)
